United States Patent Application Publication US 2024/0342206 A1 - sequence listing, part 2

SEQ ID NO: 1892 - RNA, 1642 nt, synthetic construct
  misc_feature 1..1642: note = mRNA i-3 (A64-N5-C30-hSL-N5) (opt11) from Homo sapiens__NP_000448.3__HNF4A(1-474)(K458R)
  source 1..1642: mol_type = other RNA
aggagaaagcttaccatgcgactttccaaaaccctagtcgacatggacatggccgactactctgccgccctcgacccagcttacacaacattagagttcgaaaacgtccaagtcctgaccatgggaaacgacacaagcccatctgaaggaactaacctcaacgcccccaactccctaggagtatccgctctctgcgccatctgcggagaccgcgccaccgggaaacactacggcgcctcctcatgcgacggatgcaaaggcttcttccgccgctcagtccgcaaaaaccacatgtactcctgtcgattctcccgacaatgcgtcgtcgacaaagacaaacgcaaccaatgccgatactgccgcctcaagaaatgcttcagagccggcatgaagaaagaagccgtacaaaacgaacgagaccgcatctccacacgccgtagctcctacgaagactcaagcctcccctcaatcaacgccctacttcaggccgaagtcctctcccgacaaattaccagcccagtctccggcatcaacggcgacatccgagccaagaaaatcgcatcaatagccgatgtctgcgaaagcatgaaagaacaactccttgtcctcgtagaatgggccaaatacatccccgccttctgcgaactacccctcgatgaccaagtagccctactcagagcccacgccggcgaacacctcctcctcggcgccaccaaacgcagcatggtcttcaaagatgtactcctcctcggcaacgactacatcgtcccccgacactgccccgaacttgcagaaatgagcagagtctcaatccgcatcctcgacgaactcgtactaccattccaagaactccagatcgacgacaacgaatacgcctacctgaaagcaattatcttcttcgaccccgacgccaaaggcctctcagaccccggcaaaattaaacgcctcagaagtcaagtccaagtatccctcgaagactatatcaatgaccgccaatacgactcccgcgggcgcttcggcgaactcctcctccttctcccaaccctccaatcaatcacctggcaaatgatcgaacaaatccaattcataaaattattcggaatggccaaaatcgacaacctactccaggaaatgctcctcggcgggtccccctccgacgccccacacgcccaccaccccctccacccccacctaatgcaagaacatatgggcaccaacgtcatcgtcgcaaacaccatgccaacccacctctcaaacggacaaatgtgcgaatggccccgtccccgaggccaggccgccacccccgaaacccctcaaccctcgcctcccggaggctccggctcagaaccctacaaactcctcccaggtgcagttgcaacaatagtcagacccctctccgccatcccccagcccacaataacaaaacaagaagtcatctaaggactagttataagactgactagcccgatgggcctcccaacgggccctcctcccctccttgcaccgagattaataaaaaaaaaaaaaaaaaaaaaaaaaaaaaaaaaaaaaaaaaaaaaaaaaaaaaaaaaaaaaaaatgcatcccccccccccccccccccccccccccccccaaaggctcttttcagagccaccagaatt

SEQ ID NO: 1893 - RNA, 1642 nt, synthetic construct
  misc_feature 1..1642: note = mRNA i-3 (A64-N5-C30-hSL-N5) (opt11) from Homo sapiens__NP_000448.3__HNF4A(1-474)(K106R_K108R_K126R_K127R)
  source 1..1642: mol_type = other RNA
aggagaaagcttaccatgcgactgtccaaaaccttagtcgacatggacatggcagactactcagccgccctcgacccagcatatacaacactagagttcgaaaacgtccaggtccttaccatgggcaacgacacctcaccctccgaaggcaccaacctcaacgctcccaactccctaggcgtctcagccctctgcgcgatatgcggagaccgagccaccggtaaacactacggcgcttcgagctgcgacggctgcaaaggcttcttccgtcgctcagtccgcaaaaaccacatgtactcatgccgattctcacgccaatgcgtagtagaccgcgaccgccgcaaccagtgccgatactgccgtcttaagaaatgcttccgcgccggcatgcgcagagaagcagtccaaaacgaacgcgaccgcatctcaacccggcgcagctcttacgaagactcaagccttccctcaatcaacgccctactacaagccgaagtcctaagccgccaaatcacttcacccgtatccggaataaacggcgacatccgagccaagaaaatagcctccatcgccgacgtctgcgaaagcatgaaagaacaactcctcgtcttagtcgaatgggccaaatacatccccgcattctgcgaactcccactggacgaccaagtagccctgctccgagcccacgccggcgaacacctcctcctcggcgccacgaaacgaagcatggtcttcaaagacgtccttctccttggcaacgactacatcgtcccacgccactgcccagagctagccgaaatgtcacgagtctcaatccgcatactcgacgagctagtactcccattccaagaactacaaatagacgacaacgaatacgcctatctcaaagcgatcatattcttcgaccccgacgccaaaggcctctccgacccaggcaaaatcaaacgcctccgctcccaagtccaggtgtcccttgaagactacataaacgatcgccaatacgactcacgaggaagattcggcgaactccttcttcttctccccacactccagtcaatcacatggcaaatgatcgaacagatacaattcatcaaacttttcggcatggccaaaatagacaacctcctacaggaaatgctactaggaggatccccatcagacgcaccccacgcccaccaccccctacacccccacctcatgcaagaacacatgggcaccaacgtcatagtcgccaacaccatgcccacccacctaagcaacggacaaatgtgcgagtggccccgcccacgcggccaagccgccacccccgaaacaccacaaccaagcccacccggcggctccggctccgaaccatacaaacttctcccaggcgctgtagccaccatcgtaaaaccactctcagccataccccaacccactatcaccaaacaagaggttatctagggactagttataagactgactagcccgatgggcctcccaacgggccctcctcccctccttgcaccgagattaataaaaaaaaaaaaaaaaaaaaaaaaaaaaaaaaaaaaaaaaaaaaaaaaaaaaaaaaaaaaaaaatgcatcccccccccccccccccccccccccccccccaaaggctcttttcagagccaccagaatt

SEQ ID NO: 1894 - RNA, 1642 nt, synthetic construct
  misc_feature 1..1642: note = mRNA i-3 (A64-N5-C30-hSL-N5) (opt11) from Homo sapiens__NP_000448.3__HNF4A(1-474)(E285Q)
  source 1..1642: mol_type = other RNA
aggagaaagcttaccatgcgactctccaaaacacttgtcgacatggacatggccgactactccgccgccctcgatcccgcatacaccaccctcgagttcgaaaacgtccaagtcctcaccatgggaaatgacacctcgccatccgaaggcacgaacctaaatgcccccaactcccttggcgtctccgcactctgcgccatctgcggcgaccgcgcaaccgggaaacactacggcgcctcatcctgcgacggctgcaaaggattcttccgtcgatctgtacgcaaaaaccacatgtactcttgccgattcagccgacaatgcgtcgttgacaaagacaaacgcaaccaatgccgctactgccgactcaaaaagtgcttccgcgcaggtatgaaaaaggaagcagtacaaaacgaacgagaccgcatttccacccgacgatcatcctatgaagactcctccctcccctcaatcaacgccctacttcaagccgaagtcctctcccgacaaataacctcccccgtcagcggcatcaacggcgacatcagagccaagaaaatcgcaagcatcgcagacgtatgcgagtcaatgaaagaacaactcctcgtcctagtcgaatgggcaaaatacatccccgccttctgcgaactcccactagacgaccaagtagccctcctccgcgcccacgccggagaacacctcctcctaggcgccactaaacgctccatggtcttcaaagacgtcctcctcctaggcaatgattacatcgttccccgacattgccccgaactagccgaaatgtcccgagtatccatccgcatcctcgacgaactcgtcctaccattccaagaactacaaatcgacgacaaccaatatgcatacctaaaagcaatcatcttcttcgaccccgacgccaaaggccttagcgacccaggcaaaatcaagcgactacgcagccaagtacaagtatccctagaagattacatcaacgatcgccaatacgactcccgcggccggttcggcgaactcctcctcctcctccccactctacaatccataacctggcaaatgatagaacaaatccaattcatcaagttattcggcatggccaaaatagacaacctcctccaagaaatgctactcggcggctccccatccgacgccccacacgcccatcaccccctccacccacaccttatgcaagaacacatgggcaccaacgtaatagtcgccaacaccatgccaacccacctctccaacggacaaatgtgcgaatggccacggccacgcggacaagccgccacaccggaaacaccacaacccagcccacccggcggttccggctccgaaccctacaaactactacccggcgcagtcgccaccatcgtcaaaccgctctcagccatccctcaaccaaccatcaccaaacaagaagtcatataaggactagttataagactgactagcccgatgggcctcccaacgggccctcctcccctccttgcaccgagattaataaaaaaaaaaaaaaaaaaaaaaaaaaaaaaaaaaaaaaaaaaaaaaaaaaaaaaaaaaaaaaaatgcatcccccccccccccccccccccccccccccccaaaggctcttttcagagccaccagaatt

SEQ ID NO: 1895 - RNA, 1642 nt, synthetic construct
  misc_feature 1..1642: note = mRNA i-3 (A64-N5-C30-hSL-N5) (opt11) from Homo sapiens__NP_000448.3__HNF4A(1-474)(T166E)
  source 1..1642: mol_type = other RNA
aggagaaagcttaccatgcgcctatccaaaaccctcgtcgacatggacatggccgactactcagccgcactcgaccccgcatataccactctcgagttcgaaaacgtacaagtcctcaccatggggaacgacactagcccctccgaaggcaccaacctcaacgcaccaaactccttaggggtttcagccctatgcgccatatgcggcgatagagcaacaggaaaacactacggcgcctcatcatgcgatggctgcaaaggcttcttccgccgatccgtccgaaagaaccacatgtactcatgccgcttctcacgacaatgcgtcgtcgacaaagacaagcgaaaccaatgccgctactgccgcctaaagaaatgcttccgcgccggcatgaagaaagaagcagtacaaaacgaacgcgatcgcatctccacccgcagatcgtcctacgaagacagcagcctccccagcatcaacgccctcctccaagctgaagtcctctcccgccaaatcgaatcacccgtctcaggcatcaacggtgatatccgcgcaaagaaaatagcctccatcgccgacgtctgcgaatccatgaaagaacaactcctagtcctagtagaatgggccaaatacatcccagcattctgcgagctccccctggacgatcaagtcgctctcctccgcgcccacgccggcgaacacctcctactcggagcaaccaaacgcagtatggtattcaaagacgtcctactactcggtaacgactacatagtaccccgccactgcccagaactcgccgaaatgtcccgtgtctccatacgcatcctagacgaactcgtcctccccttccaagaactacaaatcgacgacaacgaatacgcctacctaaaagccatcatcttcttcgaccccgacgctaaaggcctctccgatccaggcaaaatcaaacgcctacgaagccaagtccaagtttccctcgaagactacatcaacgacagacaatacgactcccgcggccgcttcggcgaactactcctcctacttccaacactccaaagcataacgtggcaaatgatagaacaaatccaattcatcaaactcttcggcatggctaaaatagacaacctcctccaggaaatgctccttggaggctccccctccgacgcaccccacgcccaccacccactccaccctcacctcatgcaagaacacatgggcacaaacgtaatcgttgccaacactatgcccacccacctatccaacggacaaatgtgcgaatggccccgaccccgcggccaagccgccaccccagagactccccaaccctcgccacccggagggtccggctccgaaccctacaaactactccccggagcagtagcaacaatcgtaaaaccactctccgccataccccaacccactatcaccaaacaagaagtcatctaaggactagttataagactgactagcccgatgggcctcccaacgggccctcctcccctccttgcaccgagattaataaaaaaaaaaaaaaaaaaaaaaaaaaaaaaaaaaaaaaaaaaaaaaaaaaaaaaaaaaaaaaaatgcatcccccccccccccccccccccccccccccccaaaggctcttttcagagccaccagaatt

SEQ ID NO: 1896 - RNA, 1642 nt, synthetic construct
  misc_feature 1..1642: note = mRNA i-3 (A64-N5-C30-hSL-N5) (opt11) from Homo sapiens__NP_000448.3__HNF4A(1-474)(S148A)
  source 1..1642: mol_type = other RNA
aggagaaagcttaccatgcgactatctaaaacactcgtcgacatggacatggccgactactccgcggccctggaccccgcctacaccacgctagaattcgaaaacgtccaagtattaacaatgggaaacgacacctctccctccgaaggcaccaacctcaacgcacccaactccctcggagtctccgccctctgcgccatctgtggcgaccgagcaaccgggaaacattacggcgcatcctcctgcgacggctgcaaaggcttcttccgccgatccgtcagaaaaaaccacatgtactcgtgccgattctcacgccaatgcgtagttgacaaagacaaacgcaaccaatgccgctactgccgccttaaaaaatgcttccgcgccggaatgaaaaaagaggccgtacaaaatgaacgcgaccgaatcagcacacgccgctcttcatacgaagactccgcactcccatccatcaacgccctactacaagccgaagtcctcagccggcaaatcacatccccagtgtccggtattaacggagacatacgcgccaagaaaatagcctccatagcagacgtctgcgagtcaatgaaagaacaactcctcgtactcgtagaatgggcaaaatacatccccgccttctgcgaacttcccctcgacgaccaagtcgcactcctccgcgcccacgccggcgaacatctcctactaggagccaccaaacgttcaatggtcttcaaagacgtcctgctactcggcaacgactatatcgtccccagacactgccccgaactagcagaaatgtccagagtctcaatacgaatcctagacgaactcgtcctcccattccaagaactacaaatcgacgacaacgaatacgcctacctcaaagccatcatcttctttgaccccgacgccaaagggctctccgaccccggaaaaatcaaacgcctgcgctcacaagtccaagtatccctcgaagactacatcaacgaccgccagtacgacagccgaggacgtttcggcgaactcctactcctcctcccaacactccagtccatcacctggcaaatgatcgaacaaatccaattcataaaactcttcggcatggccaaaatcgacaacctactccaagaaatgctcctcggcggatccccgtccgacgccccccacgcccaccaccccctacacccacacctcatgcaagaacacatgggaacaaacgtcatcgtagccaacaccatgcccacccacctctccaacggccaaatgtgcgaatggccccgcccacgcggccaagctgcaacaccagaaaccccacaaccatccccccccggcggcagcggctccgaaccctacaagcttctccccggtgccgtggccacaatagtcaaaccactctcggccattccccaaccaacaataacaaaacaagaagtgatctaaggactagttataagactgactagcccgatgggcctcccaacgggccctcctcccctccttgcaccgagattaataaaaaaaaaaaaaaaaaaaaaaaaaaaaaaaaaaaaaaaaaaaaaaaaaaaaaaaaaaaaaaaatgcatcccccccccccccccccccccccccccccccaaaggctcttttcagagccaccagaatt

SEQ ID NO: 1897 - RNA, 1642 nt, synthetic construct
  misc_feature 1..1642: note = mRNA i-3 (A64-N5-C30-hSL-N5) (opt11) from Homo sapiens__NP_000448.3__HNF4A(1-474)(S148E)
  source 1..1642: mol_type = other RNA
aggagaaagcttaccatgcgcctctccaaaaccctcgtcgacatggacatggccgactactcagcagccctagacccagcctacacaacactcgagttcgaaaacgtacaagtactaaccatgggcaacgacacctcaccctctgaaggaaccaacctcaacgcacccaactccctcggcgtatccgccctgtgcgccatctgcggtgatcgcgccaccggcaaacactacggggcctcaagctgcgacggctgcaaaggcttcttccgccgctctgtcaggaaaaaccacatgtacagctgccgattctcccgccaatgcgtagtcgataaagacaaacggaaccaatgccgatactgtcgcctcaagaaatgcttccgagcaggcatgaaaaaggaagcagtccaaaacgaacgggaccgaatctccactcgccgctcatcctacgaagacagcgaactaccctccattaatgccctcctccaagcagaagtactttcacgacaaataacctcccccgtctcaggcatcaacggcgacatcagagccaagaaaatcgcctccatcgccgacgtatgcgaatccatgaaagaacaactcctggtgctagtcgaatgggcaaaatatatccccgctttctgcgaactccccctagacgaccaagtcgcactcctccgagcccacgccggagagcacctcttactaggcgccaccaaacgaagcatggtcttcaaagacgtcctcctcctcggaaatgactacatcgtccccagacactgccccgaactcgccgaaatgtcacgagtctccatcagaatcctcgacgaactggtcctaccatttcaagaactacaaatcgatgacaacgaatacgcatacctcaaagcgatcatcttcttcgaccccgacgccaaagggctctccgacccaggcaaaatcaaacgcctcagaagccaggtccaagtctccctagaagactacataaacgaccgccagtatgactcccgcggcagattcggcgaactcctccttctacttccgaccctccaatccatcacctggcaaatgatcgaacaaatccaattcatcaaactcttcggcatggccaaaattgacaacctcctacaagaaatgctcctaggcggcagcccctcagacgcgccccacgcccaccacccactccacccacacctcatgcaagagcacatgggcaccaacgtcatagtagccaacaccatgcccacacacctctccaacggccagatgtgcgaatggccacgcccacgtggtcaagcagccacccccgaaaccccgcaaccatccccacccggcggatccggatccgaaccctacaaactcctacccggcgcagtcgccacaatcgtaaaacccctcagcgccatccctcagcccaccataaccaaacaagaagtcatctgaggactagttataagactgactagcccgatgggcctcccaacgggccctcctcccctccttgcaccgagattaataaaaaaaaaaaaaaaaaaaaaaaaaaaaaaaaaaaaaaaaaaaaaaaaaaaaaaaaaaaaaaaatgcatcccccccccccccccccccccccccccccccaaaggctcttttcagagccaccagaatt

SEQ ID NO: 1898 - RNA, 1642 nt, synthetic construct
  misc_feature 1..1642: note = mRNA i-3 (A64-N5-C30-hSL-N5) (opt11) from Homo sapiens__NP_000448.3__HNF4A(1-474)(S183A)
  source 1..1642: mol_type = other RNA
aggagaaagcttaccatgcgactcagcaaaacactagttgacatggacatggccgactacagcgcagccctggatccagcctacaccaccctcgaattcgaaaacgtacaagtcctcaccatgggtaacgacacctccccctcggagggaacaaacctcaacgcccccaactcactcggcgtcagcgcactctgcgccatatgcggcgaccgcgccaccggaaaacactacggagcctcaagctgcgacggctgcaaaggattcttcagacgcagcgtccggaaaaaccacatgtactcctgccgcttctcccgacaatgcgtcgtcgacaaagacaaacgaaaccaatgccgatactgccgcctaaaaaaatgcttccgcgctggaatgaaaaaagaagcagtacaaaacgaacgcgaccgcatatccaccagaagatcctcctacgaagactccagcctaccctcaatcaacgctctcctccaagcagaagtcctcagccgccaaatcacctcacccgtcagcggcatcaacggggacatccgcgccaaaaaaatcgccgcgattgccgacgtgtgcgaatccatgaaagagcaactcctcgtcctcgtagaatgggccaaatacatccccgccttctgcgaactacccctagacgaccaagtagcccttctacgcgcccacgccggggaacacctcctactcggcgcaaccaaaaggtcaatggtcttcaaagacgtcctcctactcggaaacgactacatcgtgcccaggcactgtccggaactcgccgaaatgtccagagtctcaatccggatactagacgaactcgtactccccttccaagaactacaaatcgacgacaacgaatacgcatacctaaaagccatcatcttcttcgacccagacgctaaaggactaagcgacccaggcaagatcaaacgactacgttcccaagtacaagtatccctggaagactacatcaacgaccgccaatacgactcacgaggtcgcttcggcgaactgctcctactcctacccaccctccaatccatcacatggcaaatgatcgaacaaatccaattcatcaaactcttcggtatggctaaaatcgacaacctactccaagaaatgcttctcggcggctccccatccgacgccccccacgcccaccacccactccacccccacctaatgcaagaacacatgggcaccaatgtcatagtcgccaacaccatgcccacccacctctcaaacggacaaatgtgcgaatggccccgaccacggggacaagcagccacaccagaaaccccccaacctagcccacccggaggctccggctcggaaccctacaaactcctccccggcgccgtagccaccatagtaaaacctttatccgccatcccacaacccaccatcacgaaacaggaagtaatataaggactagttataagactgactagcccgatgggcctcccaacgggccctcctcccctccttgcaccgagattaataaaaaaaaaaaaaaaaaaaaaaaaaaaaaaaaaaaaaaaaaaaaaaaaaaaaaaaaaaaaaaaatgcatcccccccccccccccccccccccccccccccaaaggctcttttcagagccaccagaatt

SEQ ID NO: 1899 - RNA, 1642 nt, synthetic construct
  misc_feature 1..1642: note = mRNA i-3 (A64-N5-C30-hSL-N5) (opt11) from Homo sapiens__NP_000448.3__HNF4A(1-474)(S183E)
  source 1..1642: mol_type = other RNA
aggagaaagcttaccatgcgcctctccaaaaccctcgtcgacatggacatggccgactactccgccgccctcgacccagcctacacaacactagagttcgaaaacgtccaagtcctaaccatgggaaacgatacctccccctcggaagggaccaacctcaacgccccaaattcacttggagtctccgccctatgcgccatatgtggagaccgcgctaccggaaaacactatggcgcgtcatcctgcgacggatgcaaaggcttcttcagacgctcggtccgcaaaaaccacatgtactcctgccgattctcccgccaatgcgtcgtcgacaaagacaaaagaaaccaatgcaggtactgccgtctgaagaaatgcttccgcgccggaatgaagaaagaagccgtccaaaacgaacgcgaccgaatcagcaccagacgcagctcctacgaagactcctcactcccatcaatcaacgccctactccaagccgaagtcctctcccgccaaatcacctccccagtaagcggaatcaacggcgacatccgcgccaagaaaatagccgaaatagccgacgtctgcgaatcaatgaaagaacagctactcgtcctcgtcgaatgggccaaatacatacccgccttctgcgaactccctctcgacgaccaagtcgcactactcagagcccacgccggagaacacctactcctcggagccacgaaacgatccatggtattcaaagacgtactcctccttggtaacgattacatcgtcccaagacactgcccagaactcgccgaaatgtccagagtatcaatccgaatcctcgacgagctagtactcccctttcaggaactacaaatagatgacaacgaatacgcatacctaaaagccatcatcttctttgaccccgacgccaaaggcctctccgacccaggcaaaatcaaacgcctacgctcccaagttcaagtatccctcgaagactacatcaatgaccgccaatacgacagccgaggacgcttcggcgaactactcctgctactccccaccctacaatccatcacttggcaaatgatcgaacaaatccaattcatcaaactcttcggcatggccaaaatcgacaaccttctccaggaaatgctcctcggtggcagcccctccgacgcaccccacgcccaccaccccctccacccacacctcatgcaagaacacatgggcaccaacgtcatagtagcaaacaccatgcccacccacctatcaaacggacaaatgtgcgaatggccgcgcccgagaggacaagccgccacacccgaaacaccccaaccaagccctcccggcggctcaggttcagaaccctataaactcctacccggcgccgtagccaccatcgtaaaacccctcagcgccatcccccaacccaccatcaccaaacaagaagtgatataaggactagttataagactgactagcccgatgggcctcccaacgggccctcctcccctccttgcaccgagattaataaaaaaaaaaaaaaaaaaaaaaaaaaaaaaaaaaaaaaaaaaaaaaaaaaaaaaaaaaaaaaaatgcatcccccccccccccccccccccccccccccccaaaggctcttttcagagccaccagaatt

SEQ ID NO: 1900 - RNA, 1642 nt, synthetic construct
  misc_feature 1..1642: note = mRNA i-3 (A64-N5-C30-hSL-N5) (opt11) from Homo sapiens__NP_000448.3__HNF4A(1-474)(S461A)
  source 1..1642: mol_type = other RNA
aggagaaagcttaccatgcgactctccaaaaccctcgtcgacatggacatggcagattactccgctgccctcgacccggcctacaccacactagagttcgaaaacgttcaagtattaaccatgggcaacgacacatcccccagcgaaggcaccaatctaaacgcacccaactccctcggggtctcagcactatgcgccatctgcggagatcgcgctactggcaaacactacggagcctcctcctgcgacggctgcaaaggcttcttccgaagatcagtccgcaaaaaccacatgtactcatgccgcttctctcgccaatgcgtcgtcgacaaagacaaacgaaaccagtgccgctactgccgcctaaagaaatgctttcgcgccggcatgaagaaagaagcagtacaaaacgaacgcgaccgcatctccacccgccggtcaagctacgaggactcatcactcccatcaatcaacgctctcctccaagcagaagtccttagccgacaaatcacatcccccgtttccggaatcaacggcgacatccgagcaaagaaaatcgcctctatcgcagacgtatgcgaatccatgaaagaacaactcctagtcctagtcgaatgggcaaaatatatacccgccttctgcgaactgcccctagacgatcaagtcgcactactccgagcccacgccggcgagcacctcctgctcggcgccacaaaacgatccatggtattcaaagacgtactactcctcgggaacgactacatcgtaccccgccactgccccgagctcgccgaaatgtcacgtgtctcaattcgcatactagacgagctagtcctccccttccaagaactacaaatagacgacaacgaatacgcatacctaaaagccatcatcttcttcgaccccgatgccaaaggactatccgaccccggcaaaatcaaacgccttcgttcacaagtgcaagtctcgctcgaagactacatcaacgaccgccaatacgactccagaggccgattcggagaactcctactcctcctccccaccctccaatccatcacatggcaaatgatagaacaaatccaattcataaaactcttcggcatggccaaaatcgacaacctgctccaagaaatgctcctcggcggatcaccctccgacgccccacacgcccaccaccccctacacccccaccttatgcaagaacacatgggaaccaacgtcatcgtcgccaacacaatgcccacacacctatcaaacggacaaatgtgcgagtggcctcgcccccgcggccaagcagccacacccgaaacaccccagccctccccacccggcggctccggctcggaaccctacaaacttctcccaggcgccgtcgccaccatcgtaaaaccactcgccgcaataccccaaccaaccatcaccaaacaagaggtaatctaaggactagttataagactgactagcccgatgggcctcccaacgggccctcctcccctccttgcaccgagattaataaaaaaaaaaaaaaaaaaaaaaaaaaaaaaaaaaaaaaaaaaaaaaaaaaaaaaaaaaaaaaaatgcatcccccccccccccccccccccccccccccccaaaggctcttttcagagccaccagaatt

SEQ ID NO: 1901 - RNA, 1642 nt, synthetic construct
  misc_feature 1..1642: note = mRNA i-3 (A64-N5-C30-hSL-N5) (opt11) from Homo sapiens__NP_000448.3__HNF4A(1-474)(S461E)
  source 1..1642: mol_type = other RNA
aggagaaagcttaccatgcgactgtccaaaaccctagtcgacatggacatggcagactacagcgcagcactcgatcccgcctacaccaccctagagttcgaaaacgtacaagtactaacaatgggaaacgacacctctccatccgaaggcacaaacctcaacgcacccaactccctcggcgtctccgcactttgcgcaatctgcggcgaccgagccaccggcaaacattacggagcctccagctgcgacggctgcaagggattcttccgccgcagcgtccgcaaaaaccacatgtactcgtgccgcttctcacgacagtgcgtagtcgacaaagacaaacgcaaccaatgcagatactgcagacttaaaaagtgcttccgcgcgggaatgaagaaagaagccgtccaaaacgaacgagatcgcatctccacccgccggagctcatacgaagactcatcactaccatcaataaacgccctcctacaagccgaagtcctatcccgccaaataacctcccccgtctctggcatcaacggagacatccgcgccaagaaaatcgcaagcatcgccgacgtctgcgaatcaatgaaagagcaactactcgtcctagtagaatgggcaaaatacataccagccttctgcgaactccccctagacgaccaagtcgcgctactccgagcccacgcaggagaacaccttctcctaggcgcaaccaaacgctccatggtatttaaagacgtcctactcctgggcaacgactacatagtcccccgccattgcccagaactcgccgaaatgtcacgcgtatcgatacgcatcctcgacgagctagtcctccccttccaagaactacaaatagacgacaacgaatacgcctacttgaaagccataatcttcttcgacccagacgccaaaggcctctccgacccaggcaaaataaaacgcctacgcagccaggtacaggtcagcctcgaagactatatcaacgaccgtcaatacgactcccgaggccgattcggagaactcctcctactcctaccaaccctccaatcaatcacctggcaaatgatcgaacaaatacaattcatcaaactgttcggcatggcaaaaatagacaacctacttcaagaaatgctcttaggaggctccccctccgacgccccacacgcccaccaccccctccacccacacctcatgcaagaacacatggggaccaacgtaatagtcgccaacaccatgcccacccacctatccaacggccaaatgtgcgaatggccccgcccgcgcggccaagccgccacccctgaaacaccacaaccctcccctcccggcggatcaggctccgaaccctacaaactccttcccggcgccgtagccactatcgtcaaacccctcgaagccatacctcaaccaaccatcaccaaacaagaggtcatctaaggactagttataagactgactagcccgatgggcctcccaacgggccctcctcccctccttgcaccgagattaataaaaaaaaaaaaaaaaaaaaaaaaaaaaaaaaaaaaaaaaaaaaaaaaaaaaaaaaaaaaaaaatgcatcccccccccccccccccccccccccccccccaaaggctcttttcagagccaccagaatt

SEQ ID NO: 1902 - RNA, 1642 nt, synthetic construct
  misc_feature 1..1642: note = mRNA i-3 (A64-N5-C30-hSL-N5) (opt11) from Homo sapiens__NP_000448.3__HNF4A(1-474)(S142A_S143A_S313A)
  source 1..1642: mol_type = other RNA
aggagaaagcttaccatgcgcctctccaaaacccttgtcgacatggacatggcagactactccgccgcacttgacccggcttacacaaccctagaattcgaaaacgtccaagtactcaccatgggaaatgacacctcaccctctgaagggaccaacctaaacgcaccaaactcactcggagtcagcgccctatgcgccatctgcggcgaccgcgcaaccggaaaacactacggcgcctcctcttgcgacggctgcaaaggcttcttccgaagatccgtcagaaaaaaccatatgtacagctgccgcttctcacgacaatgcgtcgtcgacaaagacaaaagaaaccaatgcagatattgccgactcaaaaaatgctttcgagccggcatgaaaaaggaagcagtccaaaacgaacgcgaccgcatttccacccgcagagccgcctacgaagacagctccctccccagcatcaacgcactactccaagctgaagtattatcccgccaaatcacctccccagtctccggcatcaacggcgacatacgggccaaaaaaatcgcctcaatcgccgacgtctgcgaatccatgaaagaacaactcctagtcctagtcgaatgggccaaatacatacccgcattctgcgaactacctttagacgaccaagtcgccctcttacgagcccacgccggcgaacatctactgcttggcgccaccaaacgatccatggttttcaaagacgtactactcctcggaaacgactacatcgtcccacgtcactgcccagaactagccgaaatgtcccgcgtctcaatccgcatcctcgacgaactcgtactcccctttcaagaactacaaatcgacgacaacgagtacgcctacctcaaagccatcatcttcttcgaccccgacgcaaaaggcctctccgaccccggcaaaattaaacgacttagagcacaagtacaagtcagcctagaagactacataaatgaccgccaatacgacagcagaggccgcttcggcgagctcctactcctcctccccaccctacaatcaattacctggcagatgatcgaacaaatacaattcataaaacttttcggaatggccaaaatcgacaacctactccaagaaatgctcctcggcggctcccccagcgacgccccccacgcacaccaccccctacacccccacctaatgcaagagcacatgggaaccaacgtcatagtagccaacacaatgcccactcacctcagcaacggccaaatgtgcgaatggccccgcccccgaggacaagccgccacccccgaaaccccccaaccgagcccccccggcggctccggctccgaaccctacaaactcctccctggcgccgtagccacgatagtaaaaccgctctccgccatcccccaaccgacaataacgaaacaagaagtaatctaaggactagttataagactgactagcccgatgggcctcccaacgggccctcctcccctccttgcaccgagattaataaaaaaaaaaaaaaaaaaaaaaaaaaaaaaaaaaaaaaaaaaaaaaaaaaaaaaaaaaaaaaaatgcatcccccccccccccccccccccccccccccccaaaggctcttttcagagccaccagaatt

SEQ ID NO: 1903 - RNA, 1642 nt, synthetic construct
  misc_feature 1..1642: note = mRNA i-3 (A64-N5-C30-hSL-N5) (opt11) from Homo sapiens__NP_000448.3__HNF4A(1-474)(S142A_S143A_S313A_K458R)
  source 1..1642: mol_type = other RNA
aggagaaagcttaccatgcgcctcagcaaaacactagtagacatggacatggcagactactccgccgccctagacccagcctacacaaccctcgaattcgaaaacgtccaagtcctaacgatgggcaacgacacatccccctccgagggcaccaacctcaacgcccccaactctctcggcgtctctgccctctgcgccatctgcggcgaccgcgccaccggaaaacactacggagccagctcatgcgacggctgcaaaggattctttcgacgctccgttagaaaaaaccacatgtactcatgccgtttctctcgccaatgcgtcgtcgacaaagacaaacgtaaccagtgccgctactgccgcctaaaaaaatgcttccgcgcaggcatgaaaaaagaagccgtccaaaacgagagagaccgcatatccacccgccgagccgcctacgaagactcttcactaccgtccataaacgccctcctacaagccgaagtcctatcacgacaaataacctcccccgtcagcggcatcaacggcgacatcagagccaagaaaatagcctctatagcagacgtatgcgaatcaatgaaagaacaactcctagtactagtcgaatgggccaaatacattcccgccttctgcgaactgccactcgacgaccaagtggccctactccgtgcccacgccggcgaacatttactcctcggcgccaccaaacgatcaatggtattcaaagacgtactactcctcggcaacgactacatagtcccccgccactgccccgaactcgccgaaatgtcacgtgtctctatccggatcctagacgaactcgtcctccccttccaagaactccaaatcgacgacaacgaatacgcctacctaaaagccatcatattcttcgatcccgacgccaagggtctctccgacccaggaaaaatcaaacgcctacgcgcacaagtacaagtatccctcgaagactacatcaacgaccgacaatacgacagccgcggccgattcggcgaactactccttctcctccccacactacaatcaataacctggcaaatgatcgaacaaatccagttcataaaactctttggcatggccaaaatagacaacctcctccaggaaatgctcctcggaggaagcccctccgacgccccccacgcccaccacccactccacccccacctcatgcaagagcacatgggcaccaacgtcatcgtcgccaacaccatgcccacacacctatcaaacggccaaatgtgtgaatggcccagacctcgcggccaagccgccacacccgaaaccccacaaccctcccccccggggggctcaggctccgaaccctacaaactcctcccaggtgccgtcgccacaatcgtacgacccctctccgccatccctcaaccaacaataaccaaacaagaagtcatctaaggactagttataagactgactagcccgatgggcctcccaacgggccctcctcccctccttgcaccgagattaataaaaaaaaaaaaaaaaaaaaaaaaaaaaaaaaaaaaaaaaaaaaaaaaaaaaaaaaaaaaaaaatgcatcccccccccccccccccccccccccccccccaaaggctcttttcagagccaccagaatt

SEQ ID NO: 1904 - RNA, 1642 nt, synthetic construct
  misc_feature 1..1642: note = mRNA i-3 (A64-N5-C30-hSL-N5) (opt11) from Homo sapiens__NP_000448.3__HNF4A(1-474)(S142A_S143A_S167A_S313A_ S378A_T429A_T432A_S436A_K458R)
  source 1..1642: mol_type = other RNA
aggagaaagcttaccatgcgcctaagcaaaaccctagtcgacatggacatggcagactactccgccgccctcgaccccgcctacaccaccctagaattcgaaaacgttcaggtcctcaccatggggaacgacacatcgccaagcgaaggaaccaaccttaacgccccaaactccctgggcgtctccgccctttgcgccatctgcggagaccgcgccacaggcaaacactatggcgcctccagctgcgacggctgcaaaggcttcttccgacgctcagtacggaaaaaccacatgtactcatgccgcttctcacgccaatgcgtcgtcgacaaagacaaacgcaaccaatgccgctactgccgactcaaaaaatgcttccgcgcaggcatgaaaaaggaagccgtccaaaacgaacgcgaccgtatctcaacccgacgtgctgcatacgaagactcatccctcccctccatcaacgccctactccaggccgaagtcctgagtcgacaaatcacagcccccgtctcaggcatcaacggcgacatccgagcaaagaaaatcgcctctatagccgacgtctgcgaatcaatgaaagaacaactcctcgtcctcgtagaatgggccaaatacatccccgcattctgcgaactacccctcgacgaccaagtcgccctactaagagcccacgccggcgaacaccttctgcttggcgccacaaaacgcagcatggtattcaaagacgtactactcctcggcaacgactacatcgtaccccgacactgccccgaactcgccgaaatgtcccgcgtctccatacgcatcctagacgaactggtcctccccttccaggaactccaaatcgacgacaacgaatacgcctacctcaaagccatcatattcttcgacccagacgcaaaaggcctcagcgaccccggcaaaatcaaaagactccgcgcccaagtacaagtcagcctagaagattacataaacgaccgccaatacgatagcagaggccgattcggcgaactcctcctactcctacccacactacaatcaatcacctggcaaatgatagaacaaatccaattcatcaagctattcggcatggcaaaaattgacaacctactacaagaaatgctcctcggcggcgccccaagcgacgcaccacacgcccaccaccccctccacccgcacctcatgcaagaacacatgggcaccaacgtcatcgtcgccaacacaatgcccacacacctctccaatggacaaatgtgcgaatggccacgcccacgaggccaagcggccgcgcccgaagccccacaacctgccccgcccggaggctctggaagcgaaccctacaaactactccccggcgcagtcgccacgatagtccgcccactatccgccatcccccagcccacaataaccaaacaagaagtcatataaggactagttataagactgactagcccgatgggcctcccaacgggccctcctcccctccttgcaccgagattaataaaaaaaaaaaaaaaaaaaaaaaaaaaaaaaaaaaaaaaaaaaaaaaaaaaaaaaaaaaaaaaatgcatcccccccccccccccccccccccccccccccaaaggctcttttcagagccaccagaatt

SEQ ID NO: 1905 - RNA, 1642 nt, synthetic construct
  misc_feature 1..1642: note = mRNA i-3 (A64-N5-C30-hSL-N5) (opt11) from Homo sapiens__NP_000448.3__HNF4A(1-474)(S142A_S143A_S148A_S167A_ S313A_S378A_T429A_T432A_S436A_K458R)
  source 1..1642: mol_type = other RNA
aggagaaagcttaccatgcgcctttccaaaaccctagtcgacatggacatggccgactactcagccgcactagaccccgcctatactaccctagagttcgaaaacgtccaagtcctcaccatgggcaatgacacctccccatccgaaggcaccaacctcaacgcccccaactcactaggagtctccgccctttgcgccatctgcggcgaccgcgccacaggaaaacactacggcgcgtcaagctgcgatggatgcaaaggtttcttccgtcgttccgtccgcaaaaaccacatgtattcctgccgattctcgcgccaatgcgtcgtcgacaaagacaaacgaaaccaatgccgatactgccgcctcaaaaagtgcttccgcgccggcatgaagaaagaagccgtccaaaacgaacgcgacagaatatcaacccgacgagccgcctacgaagactcagccctcccctcaataaatgccctcctccaagcagaggtcctttccagacagatcaccgcccccgtctccggcatcaacggcgacatcagagccaagaaaatcgcctccatcgccgacgtctgcgaatccatgaaagaacaacttctagttctcgtcgaatgggccaaatacatccccgccttctgcgaactaccccttgacgaccaagtcgctctcctgcgcgcccacgccggcgaacacctccttctcggagcaactaaacgctccatggtgttcaaagacgtcctcctcctcggcaacgactacatcgtcccccgacactgccccgaactagctgaaatgtcacgcgtcagcatcagaatcctcgacgaactcgtcctccccttccaagaactccaaatcgatgacaacgagtacgcctatcttaaagccatcatattcttcgacccagacgcaaaaggtctctccgaccccggcaaaataaaacgactccgcgcccaagtccaagtttccctcgaagactacatcaacgaccgacaatacgattcccgcggccgattcggcgaactcctcctactccttcccaccctccagtccataacatggcaaatgatcgaacaaatccaattcataaaactcttcggcatggccaaaatagacaacctcctccaagagatgctactcggcggtgctccatccgacgccccacacgcacaccaccccctccacccccacctcatgcaagagcacatgggcaccaacgtcatagtagcaaacaccatgcctacccacctatccaacggacaaatgtgcgaatggccccgcccacggggccaagccgccgcccccgaagccccacaacccgccccacccggaggatccggcagcgaaccctacaaactactacccggtgccgtcgccacaatcgtccgccccctatccgccataccacagcccaccatcaccaaacaagaagtcatatagggactagttataagactgactagcccgatgggcctcccaacgggccctcctcccctccttgcaccgagattaataaaaaaaaaaaaaaaaaaaaaaaaaaaaaaaaaaaaaaaaaaaaaaaaaaaaaaaaaaaaaaaatgcatcccccccccccccccccccccccccccccccaaaggctcttttcagagccaccagaatt

SEQ ID NO: 1906 - RNA, 1642 nt, synthetic construct
  misc_feature 1..1642: note = mRNA i-3 (A64-N5-C30-hSL-N5) (opt11) from Homo sapiens__NP_000448.3__HNF4A(1-474)(K106R_K108R_K126R_K127R_ S142A_S143A_S148A_S167A_S313A_S378A_T429A_T432A_S436A_K458R )
  source 1..1642: mol_type = other RNA
aggagaaagcttaccatgcgcctctccaagaccctcgtcgacatggacatggcagactacagcgcagccctagaccccgcctacaccacccttgagttcgaaaacgtccaagtcctaacaatgggaaacgacacctcaccatccgaaggcacaaacctaaacgcccccaactcacttggcgtttcggccctctgcgccatatgcggagaccgcgccaccggcaaacactacggagcatcctcctgcgacggctgtaaaggcttcttcagacgatccgtacgcaaaaaccacatgtactcctgccgcttcagcagacaatgcgtcgtcgaccgcgaccgccgcaaccaatgccgctactgccgcctaaagaaatgcttccgcgcaggcatgcgccgagaagcagtccaaaacgaacgagaccgaataagcacccgcagagccgcgtacgaagactccgccctcccatcaatcaacgcacttctacaagccgaagtactctcccgccaaataaccgccccagtatccggaatcaacggcgacatccgcgccaagaaaatcgcttccatagcagacgtctgtgaatccatgaaagagcaactcctcgtcctcgtcgagtgggccaaatacatccccgccttctgcgagctacccctcgacgaccaagtcgccctcctccgagcccacgctggcgaacacctcctactcggcgccaccaaaagatccatggttttcaaagacgtactccttctgggaaacgactacatcgtacccaggcactgccccgagctagccgaaatgtccagagtctcaatccgcatactcgacgagctcgtccttccctttcaagaacttcaaatagacgacaacgaatacgcatacctgaaagccatcatcttcttcgaccccgacgccaaaggactatccgacccaggcaaaatcaaacgcctacgagcacaagtacaagtctccctagaagactacataaacgaccgccaatacgactcgagaggccgcttcggcgaactactccttctcctccctaccctacaaagcatcacctggcaaatgatcgaacaaatccaattcataaaactcttcggaatggccaaaatcgacaatttactccaggaaatgttactcggcggcgcaccatccgacgcaccccacgcccaccaccccctacacccccacctcatgcaagaacacatgggaaccaatgtcatagtcgccaacacaatgcctacacatctctccaacggccaaatgtgcgaatggccgcgtccccgaggacaagcagccgcccccgaagcaccccagcccgccccgcccggcggatccggatcagaaccctacaaactcctcccaggcgccgtcgcaaccatcgtccgccccctctcagcaatcccccaacccaccatcaccaaacaagaagtcatctaaggactagttataagactgactagcccgatgggcctcccaacgggccctcctcccctccttgcaccgagattaataaaaaaaaaaaaaaaaaaaaaaaaaaaaaaaaaaaaaaaaaaaaaaaaaaaaaaaaaaaaaaaatgcatcccccccccccccccccccccccccccccccaaaggctcttttcagagccaccagaatt

SEQ ID NO: 1907 - RNA, 1642 nt, synthetic construct
  misc_feature 1..1642: note = mRNA i-3 (A64-N5-C30-hSL-N5) (opt11) from Homo sapiens__NP_000448.3__HNF4A(1-474)(S142A_S143A_S148A_T166A_ S167A_S313A_S378A_T429A_T432A_S436A_K458R)
  source 1..1642: mol_type = other RNA
aggagaaagcttaccatgcgcctctccaaaacactcgtcgatatggacatggccgactacagcgctgcccttgaccccgcgtacaccaccctagaattcgaaaacgtccaagttctcaccatgggcaacgacacctccccctcagaaggaaccaacctaaatgcccccaactctctcggcgtctccgctctctgcgccatctgcggcgaccgagccaccggaaaacactacggagcctcctcctgcgacgggtgcaaaggcttcttcagaagatccgtccgcaaaaaccacatgtactcatgccggttctcccgacaatgcgtagtcgacaaagacaaacgcaaccaatgccgctactgccgcctcaaaaaatgctttcgcgccggcatgaagaaagaagcagtacaaaacgaaagagacagaatctcaactcgcagagccgcctacgaagactcggcgctcccctctatcaacgccctgcttcaagccgaagtcctctcacgccaaatcgccgcacccgtatccggaatcaacggcgatatccgcgcaaaaaaaatcgcatccatcgccgacgtctgcgaatccatgaaggaacaactgctagtcctcgtagaatgggccaaatacatccctgccttctgtgaactccccctagacgatcaagtcgccctcctacgcgcccacgccggcgagcacctactacttggagccaccaaacgttctatggtcttcaaagacgtactcttactcggcaacgactacatagtcccccgccactgcccagaactggccgaaatgagccgcgtctcaatacgaatcctagacgaactcgtgctaccattccaagaactacaaatcgacgacaacgaatacgcatacctaaaagctattatcttcttcgaccccgacgccaaaggcctatccgaccccggcaaaataaaacgcctgcgagcccaagtacaagtaagcctcgaagactacatcaacgaccgacagtacgactcccgaggccgcttcggcgaactcctacttctcctccccaccctacaatccatcacctggcaaatgatagaacaaatccaattcatcaaactcttcggaatggcaaaaatcgataacctgctccaagaaatgctcctcggcggagccccaagcgatgcaccacacgcacaccacccactacacccacacctcatgcaagaacacatgggaaccaacgtcatagtcgccaacacaatgccaacccacctatccaacggccaaatgtgcgaatggccccgcccccgcggtcaagcagcagctcccgaagcacctcaaccagccccccccggaggctccggctccgaaccttacaaactcctcccaggagccgtcgccacaatcgtaagacccctctcagccatcccccaaccaaccatcacaaaacaagaagtgatataaggactagttataagactgactagcccgatgggcctcccaacgggccctcctcccctccttgcaccgagattaataaaaaaaaaaaaaaaaaaaaaaaaaaaaaaaaaaaaaaaaaaaaaaaaaaaaaaaaaaaaaaaatgcatcccccccccccccccccccccccccccccccaaaggctcttttcagagccaccagaatt

SEQ ID NO: 1908 - RNA, 1642 nt, synthetic construct
  misc_feature 1..1642: note = mRNA i-3 (A64-N5-C30-hSL-N5) (opt11) from Homo sapiens__NP_000448.3__HNF4A(1-474)(S87A_S142A_S143A_S148A_T 166A_S167A_S313A_S378A_T429A_T432A_S436A_K458R)
  source 1..1642: mol_type = other RNA
aggagaaagcttaccatgcgcctctccaaaaccctcgtcgacatggacatggcagactactctgccgccctcgaccccgcctacacaaccctcgagttcgaaaacgtacaagtcttaaccatgggaaacgacacctcaccatcagaaggtacaaacctcaacgcccctaactcactcggcgtatctgcactatgcgcaatatgcggagaccgtgccactggcaaacactacggagcctcatcatgtgacggctgcaaaggcttcttccgacgtgcagtccgcaaaaaccatatgtactcctgccgattctcccgacaatgcgtcgtagacaaagacaaacgaaaccaatgccggtactgccgcctaaagaaatgcttccgcgccgggatgaagaaagaagccgtacaaaacgaacgagatcgcatctccacacgccgagccgcctacgaagactccgccctcccctccatcaacgccctactccaggccgaagtactgtcgcgccaaatcgccgcgccagtttccggaataaacggcgacatccgcgccaagaaaatcgcctcaatcgcagacgtatgcgaatccatgaaagaacaactcctcgtcctcgtagaatgggccaaatacatccccgcattctgcgaactacccctagatgaccaagtagcactattacgcgctcacgccggagaacacctcctcctcggagccactaaacgctccatggtcttcaaagacgtcctcctcctcggcaacgactacatcgtaccccgccactgccccgaactcgcagaaatgtcaagggtctccataagaatcctagacgagctagtcctaccgttccaagaactccaaatcgacgacaatgaatacgcatacctcaaagccataatcttcttcgacccagacgccaaaggcctctcagaccccggcaaaatcaaacgactacgcgcccaggtccaagtctccctagaagactacatcaacgacagacaatacgacagccgagggagattcggcgaactcctcctactcctccccaccctccaatcaataacatggcaaatgatcgaacaaatccagttcatcaaactcttcggcatggccaaaatcgacaacctactccaagaaatgctcctcggaggcgccccaagcgacgcaccccacgcacaccaccccctccacccacacctcatgcaagaacacatgggaaccaacgtcatagtagcaaacacaatgcccacccacctctcaaacggccaaatgtgcgaatggccccgcccacgaggccaagcagcggcccccgaagctccccaacccgcccctcccggagggtccggcagcgaaccctacaaactcctcccaggcgcagtagccaccatcgtacgcccgctttccgcaatacctcagcccacaatcacaaaacaagaagtaatataaggactagttataagactgactagcccgatgggcctcccaacgggccctcctcccctccttgcaccgagattaataaaaaaaaaaaaaaaaaaaaaaaaaaaaaaaaaaaaaaaaaaaaaaaaaaaaaaaaaaaaaaaatgcatcccccccccccccccccccccccccccccccaaaggctcttttcagagccaccagaatt

SEQ ID NO: 1909 - RNA, 1642 nt, synthetic construct
  misc_feature 1..1642: note = mRNA i-3 (A64-N5-C30-hSL-N5) (opt11) from Homo sapiens__NP_000448.3__HNF4A(1-474)(S87A_K106R_K108R_K126R_K 127R_S142A_S143A_S148A_T166A_S167A_S313A_S378A_T429A_T432A_ S436A_K458R)
  source 1..1642: mol_type = other RNA
aggagaaagcttaccatgcgcctcagcaagacactcgtagacatggacatggccgactactccgccgcacttgaccccgcctataccaccctcgaattcgaaaacgtacaagtactcacaatgggaaacgacacctccccatccgaaggtaccaacttaaacgcccccaactccttaggcgtctccgccctctgcgcaatctgcggcgaccgagctacaggtaaacactacggcgcatcaagctgtgacggctgcaaaggcttcttccgacgagccgtccgcaaaaaccacatgtactcatgcagattctcccgacaatgcgtcgtggacagagaccgacgaaaccaatgccgctactgccgcctcaaaaaatgcttccgcgccggcatgcgacgtgaagcagtccaaaacgaacgtgatcgcataagcactagacgcgccgcctacgaagactccgccctgccctccatcaacgccctactacaagccgaagtccttagcagacaaatagccgccccagtctccggaataaacggagacatacgtgccaaaaaaatagcatccatcgccgacgtatgcgaaagcatgaaagaacaactccttgtcctagtagaatgggctaaatacatccccgcattctgcgaactccccctagacgaccaagtagccctcctccgagcacacgccggcgaacacctcctactcggcgccacaaaaagaagcatggtcttcaaagacgtcctacttctaggaaacgactacatcgtccctcgccactgccccgaactcgccgagatgagtagagtctctatcagaatcctcgacgaactcgtactcccattccaagaactacaaatagacgacaacgaatacgcctacctcaaagcgatcatcttcttcgaccccgacgccaaaggcctatcagaccccggcaaaatcaaaagactccgcgcccaagtacaagtctccctagaagactacatcaacgaccgccagtacgacagccgaggccgattcggcgaactacttctactcctcccaacactacaatcaatcacctggcagatgatcgaacaaatccaattcatcaaactattcggcatggccaaaatagacaaccttctacaagaaatgctcctaggcggcgcccccagcgacgcaccacacgcacaccacccccttcacccccacctaatgcaagagcacatgggcaccaacgtcattgtagccaacacaatgcccacccacctctcgaacggtcaaatgtgcgaatggccccgcccacgcggccaagcagccgcacccgaagcaccccaaccagccccacccggaggatccggttcggaaccctacaaactcctacccggcgccgtggccacaatagtaagacccctctcagcaatcccccaacccaccatcaccaaacaagaagtcatctaaggactagttataagactgactagcccgatgggcctcccaacgggccctcctcccctccttgcaccgagattaataaaaaaaaaaaaaaaaaaaaaaaaaaaaaaaaaaaaaaaaaaaaaaaaaaaaaaaaaaaaaaaatgcatcccccccccccccccccccccccccccccccaaaggctcttttcagagccaccagaatt

SEQ ID NO: 1910 - RNA, 1642 nt, synthetic construct
  misc_feature 1..1642: note = mRNA i-3 (A64-N5-C30-hSL-N5) (opt11) from Homo sapiens__NP_000448.3__HNF4A(1-474)(S87A_K106R_K108R_K126R_K 127R)
  source 1..1642: mol_type = other RNA
aggagaaagcttaccatgcgcctctccaaaacactcgtcgacatggacatggccgactactcagcagccctagaccccgcttacaccaccctcgagttcgaaaacgtacaagtcctcaccatgggcaacgacaccagcccatctgaaggtaccaacctcaacgcaccaaactccctcggcgtttcagctctatgcgccatatgcggagaccgcgccaccggcaaacactacggagcctcctcttgcgacggctgcaaaggcttcttccgcagagccgtacgcaaaaaccacatgtacagctgtagattttcccgccaatgcgtcgtcgaccgcgaccgccgcaaccagtgcagatattgccgactcaagaaatgcttccgcgcaggaatgcgccgcgaagccgtacaaaacgaacgcgaccgcatctccacacgccgctcatcttacgaagactcctccctaccaagcatcaacgcactacttcaagcagaagtcctatcccgacaaatcacctcccccgtctcaggcataaacggcgacataagggcaaagaaaatcgcctccatagccgacgtatgcgaatcaatgaaagaacaactcctagtcctcgtcgaatgggccaaatacatccccgccttctgcgaactgcccctcgacgaccaagtagcacttctccgcgcccacgccggcgaacacctcctactcggcgccaccaaacgttccatggtcttcaaagacgtcctcctacttggtaacgactacatcgtaccccgccactgccctgaactcgcagaaatgtcccgcgtctcaataagaatcctcgacgagctagttctccccttccaagaactacaaatcgacgacaacgaatacgcctacctcaaagccatcatatttttcgaccccgacgccaaaggcctttccgaccccggcaaaataaaacgcctccgctctcaagtccaggtcagcctcgaagactacatcaacgaccgccaatacgactctcgtggccgcttcggagaactactactactcctccccacactacaatccatcacctggcaaatgatcgaacaaatccaattcatcaaactcttcggcatggccaaaattgacaacctactccaagaaatgctcctaggcggctccccatccgacgcaccccacgcccaccaccccctccacccccacctcatgcaagaacacatgggaaccaacgtaatcgtcgcaaacacaatgccaacccacctatccaacggtcaaatgtgcgaatggccacgaccccgcggccaagcagctacccccgaaaccccacaaccctcaccaccaggaggcagcggttccgaaccatacaaactcctacccggggccgtcgccaccatcgtaaaacccctctccgccatcccccaacctacaatcaccaaacaagaagtcatctaaggactagttataagactgactagcccgatgggcctcccaacgggccctcctcccctccttgcaccgagattaataaaaaaaaaaaaaaaaaaaaaaaaaaaaaaaaaaaaaaaaaaaaaaaaaaaaaaaaaaaaaaaatgcatcccccccccccccccccccccccccccccccaaaggctcttttcagagccaccagaatt

SEQ ID NO: 1911 - RNA, 1642 nt, synthetic construct
  misc_feature 1..1642: note = mRNA i-3 (A64-N5-C30-hSL-N5) (opt11) from Homo sapiens__NP_000448.3__HNF4A(1-474)(S87A_K106R_K108R_K126R_K 127R_S142A_S143A_S148A_T166A_S167A_S313A_S378A_T429A_T432A_ S436A_K458R_S461A)
  source 1..1642: mol_type = other RNA
aggagaaagcttaccatgcgcctaagcaaaaccctagtagacatggacatggcagactactcagcagcactagaccccgcctacaccaccctcgaatttgaaaacgttcaagtcctaacaatgggcaacgacacctctcccagcgaaggcacaaacctcaacgcccccaactcactcggggtctccgccctctgcgccatatgcggtgaccgtgcaaccggcaaacactacggcgcctcatcctgcgacggctgcaaaggattcttccgacgcgccgtacgcaaaaaccacatgtactcctgcagattctcacgccaatgcgtcgtggaccgagaccgccgcaaccaatgccgttactgccgcctcaagaaatgcttccgagccggaatgcgaagagaagccgtacaaaacgaacgcgaccgcatctccacacgacgagcagcctacgaagactccgccctaccctccataaacgcactcctccaagccgaagtactctcccgacaaatagccgcaccagtctccggcataaacggagacatccgagcaaagaaaatagcctcaatcgccgacgtatgcgaatcaatgaaagaacaacttctcgtcctcgtcgaatgggccaaatatatacccgccttctgcgaactccccctagacgaccaagtggcccttcttcgcgcccacgccggcgaacacctcctactcggagccaccaaacgctccatggtcttcaaagacgtactactcctcggtaacgactacatcgtcccacgacactgccccgaactagccgaaatgtcacgcgtctccatccgcatcctagacgaactcgtactcccattccaagaactccaaatcgacgacaacgaatacgcatacctcaaagccatcatcttcttcgacccagacgccaaaggcctatccgacccaggaaaaataaaacgcttacgcgcacaagtccaagtctccctcgaagactacatcaacgaccgtcagtacgacagccgggggagattcggcgaactgctactactacttcccaccctccaatccatcacctggcaaatgatagaacaaatacaattcatcaaactattcggcatggccaaaatcgacaacctcctacaagaaatgctactcggcggcgccccctccgacgcaccccacgcccaccaccccctccacccccatctaatgcaagaacacatgggcacaaacgtcatcgttgccaacacaatgcccacccacctttccaacggccaaatgtgcgaatggccacgcccccgtggccaagccgccgcccccgaagccccacaaccggccccaccaggtggatccggctcggaaccctacaaactactcccaggagcggtcgctaccatcgtacgccctttggccgccatcccccaacccacaatcaccaaacaagaagttatctagggactagttataagactgactagcccgatgggcctcccaacgggccctcctcccctccttgcaccgagattaataaaaaaaaaaaaaaaaaaaaaaaaaaaaaaaaaaaaaaaaaaaaaaaaaaaaaaaaaaaaaaaatgcatcccccccccccccccccccccccccccccccaaaggctcttttcagagccaccagaatt

SEQ ID NO: 1912 - RNA, 1642 nt, synthetic construct
  misc_feature 1..1642: note = mRNA i-3 (A64-N5-C30-hSL-N5) (opt11) from Homo sapiens__NP_000448.3__HNF4A(1-474)(S87A_K106R_K108R_K126R_K 127R_S142A_S143A_S148A_T166A_S167A_S313A_S378A_T429A_T432A_ S436A_K458R_S461E)
  source 1..1642: mol_type = other RNA
aggagaaagcttaccatgcgcctctccaaaaccctcgtcgacatggacatggcagactacagcgccgccctcgaccccgcatacaccaccctagagttcgaaaacgtccaagtcctaacgatgggaaacgacacctcaccatccgaaggcacaaacctcaacgccccgaactccctaggagtctcagccctctgcgccatatgcggcgaccgagccacaggcaaacactacggcgcctcatcgtgcgacggatgcaaaggattcttccgacgagctgtccgcaaaaaccacatgtactcctgccgcttctcccgccaatgcgtcgttgaccgcgaccggcgcaaccaatgcagatactgccgactcaagaaatgcttccgcgcaggcatgcgacgagaagccgtccaaaacgaacgcgaccgcatctcaaccagacgcgccgcctacgaagactctgcactccccagcatcaacgccctcctgcaagccgaagtattatcccgacagatcgccgcccccgtatccggcatcaacggcgacatccgcgccaagaaaatcgcctccatcgcagatgtctgcgaaagcatgaaagaacaattactcgtactcgtcgaatgggcaaaatacatccccgcattctgcgaactccccctcgacgaccaagtcgccctattacgcgcccacgcaggagaacaccttctcttaggcgcaacgaaacgcagcatggtcttcaaagacgtcctactcctcggcaacgactacatcgtcccccgtcactgccccgaactcgccgaaatgtcccgcgtatccatccgcatcctcgacgaactcgtcctaccattccaagaactccaaatcgacgacaacgaatacgcctacctcaaagcaatcatcttcttcgaccccgacgcaaaaggactatccgaccccggcaaaatcaaacgcctccgcgcacaagtccaagtctccctcgaagactacataaacgacagacaatacgacagccgaggcagattcggagaacttctcctcctcctccccacactacaatccatcacatggcaaatgatcgaacaaatacaattcatcaaactcttcggcatggcaaaaatcgacaacctgctccaagaaatgctacttggcggagcccccagcgacgccccacacgcacaccaccccctccacccccacctcatgcaagagcacatgggcaccaacgtcatcgtagccaacacaatgcccacacacctctccaacggccaaatgtgcgaatggccccgtccccgcggccaagccgcagcccccgaagcaccacaacccgcacctccaggcggcagcggctctgaaccctacaaactcctccccggcgcagtcgccacaatcgtccgccccctagaggccataccccaacccacaattaccaaacaagaggtaatctaaggactagttataagactgactagcccgatgggcctcccaacgggccctcctcccctccttgcaccgagattaataaaaaaaaaaaaaaaaaaaaaaaaaaaaaaaaaaaaaaaaaaaaaaaaaaaaaaaaaaaaaaaatgcatcccccccccccccccccccccccccccccccaaaggctcttttcagagccaccagaatt

SEQ ID NO: 1913 - RNA, 1642 nt, synthetic construct
  misc_feature 1..1642: note = mRNA i-3 (A64-N5-C30-hSL-N5) (opt11) from Homo sapiens__NP_000448.3__HNF4A(1-474)(S87A_K106R_K108R_K126R_K 127R_S142A_S143A_S148E_T166A_S167E_S313A_S378E_T429E_T432E_ S436E_K458R_S461E)
  source 1..1642: mol_type = other RNA
aggagaaagcttaccatgcgactaagcaagaccctagtagacatggacatggccgactactccgccgccctggatcccgcctacaccacactagaatttgaaaacgtacaagtcctcaccatgggcaacgacacaagccccagcgaagggaccaacctcaacgcgccaaacagcctaggcgtctcagccctatgtgccatctgcggagacagagccaccggcaaacactacggagcctcatcctgcgacggatgcaaaggcttcttccgacgcgccgtccgcaaaaaccacatgtactcctgccgtttctcccgacaatgcgtcgtagaccgcgaccgccgcaaccaatgccgctattgccgcctaaagaaatgcttccgcgccggcatgcgacgcgaagccgtccagaacgagcgcgaccgaatctccacacgtcgcgctgcctacgaagactctgaactcccctcgataaacgcactgctccaagccgaagttctatcacgccaaatagccgaacccgtcagcggcatcaacggcgacatccgcgccaagaaaatcgcatcaatcgcagatgtatgcgaatccatgaaagaacagctcctcgtcctcgtagaatgggctaaatacatccccgccttctgtgagctccccctcgacgaccaggtagccctgctaagagcccatgccggcgaacacctcctccttggcgccactaaacgatcaatggtattcaaagacgtcctcctactaggaaacgactacatagtccccagacactgccccgaacttgcagaaatgagccgagtctccatccgcatcttagacgaactcgtcctcccattccaagaactccagatcgacgacaacgaatacgcataccttaaagcaataatcttcttcgaccccgacgccaaaggactatcagaccccgggaaaattaaaagactccgagcacaagtccaagtctcactcgaagactacatcaacgatcgccaatacgactcacgcggacgatttggcgaactcctcctgttactccccaccctacaaagcatcacctggcaaatgatcgaacaaatccagttcataaaactcttcggaatggccaaaatcgacaacctgctccaagaaatgctcctcggcggcgaaccctccgacgcaccccacgcccaccaccccctccacccacacctaatgcaagaacacatgggaaccaacgtcatagtcgccaacaccatgccaacacacctctcgaacggccaaatgtgcgaatggccccgaccacgcggccaagccgctgaacccgaagaaccccaacccgaacccccaggaggctccggctccgaaccctacaaactcctccctggcgccgtcgcaaccatagtacgccccctagaagctatcccacaacccacaataaccaaacaagaagtcatctgaggactagttataagactgactagcccgatgggcctcccaacgggccctcctcccctccttgcaccgagattaataaaaaaaaaaaaaaaaaaaaaaaaaaaaaaaaaaaaaaaaaaaaaaaaaaaaaaaaaaaaaaaatgcatcccccccccccccccccccccccccccccccaaaggctcttttcagagccaccagaatt

SEQ ID NO: 1914 - RNA, 1642 nt, synthetic construct
  misc_feature 1..1642: note = mRNA i-3 (A64-N5-C30-hSL-N5) (opt11) from Homo sapiens__NP_000448.3__HNF4A(1-474)(S87A_K106R_K108R_K126R_K 127R_S142A_S143A_S148A_T166A_S167A_K179R_K180R_S313A_S378A_ T429A_T432A_S436A_K458R_S461E)
  source 1..1642: mol_type = other RNA
aggagaaagcttaccatgcggctctccaaaactctcgtcgacatggacatggcagactacagcgccgccctcgacccagcctacacaaccctcgaattcgaaaacgttcaagtcctcaccatgggtaacgacacatccccctcagaaggaaccaacctcaacgcacccaactccctcggagtttccgccctatgcgcaatctgcggcgatcgagccaccggcaaacactacggcgcctcgtcttgcgacggctgcaaaggcttcttccgccgcgccgtcagaaaaaaccacatgtactcatgccggttctccagacaatgcgtcgtcgaccgagaccgccgaaaccaatgcaggtactgccgcctgaaaaaatgcttccgcgcaggcatgcgccgcgaagccgtccaaaacgagcgagaccgaatctcaacgcgacgcgccgcctacgaagactcagccctcccatccatcaacgcactactacaagccgaagtactatcccgacaaatagccgcaccagtctcaggaatcaacggagacatacgcgccagacgaatagcctccattgccgacgtatgcgaaagcatgaaagaacaactactcgttctcgtcgagtgggccaaatacattcccgctttctgcgaattacccctagacgaccaagtcgccctcctcagagcccacgcaggcgaacacctcctactcggagccaccaaacgatccatggtcttcaaagacgtcttactcctcggcaacgactacatcgtccccagacactgtcccgaactcgccgaaatgtcccgcgtctccatccgaatcctcgacgaactcgtactccccttccaggaactccaaatcgacgacaacgaatacgcctacctaaaagccatcatttttttcgaccctgatgccaaaggcctctctgaccccggcaaaatcaaacgactacgcgcccaagtccaagtctcactcgaagactacatcaacgatcgccagtacgactcccgaggccgcttcggtgaactcctcctcctcctgcccaccctacaatcaataacttggcaaatgatcgaacaaatacaattcatcaaactcttcggcatggccaaaattgacaacctcctacaagaaatgcttctcggcggagcacccagcgatgccccacacgcccaccaccccctccacccacacctcatgcaagaacacatgggcaccaacgtaatcgtcgccaacacaatgcccacacacctctccaacggacaaatgtgcgaatggccccgcccccgaggccaagcagccgccccagaagcaccccaacccgccccacccggaggctcaggctctgaaccctacaaactcctcccaggagcagtcgcaaccatcgtccggcccctcgaagcaatcccccaacccacaatcacaaaacaagaggtaatctagggactagttataagactgactagcccgatgggcctcccaacgggccctcctcccctccttgcaccgagattaataaaaaaaaaaaaaaaaaaaaaaaaaaaaaaaaaaaaaaaaaaaaaaaaaaaaaaaaaaaaaaaatgcatcccccccccccccccccccccccccccccccaaaggctcttttcagagccaccagaatt

SEQ ID NO: 1915 - RNA, 1642 nt, synthetic construct
  misc_feature 1..1642: note = mRNA i-3 (A64-N5-C30-hSL-N5) (opt11) from Homo sapiens__NP_000448.3__HNF4A(1-474)(S87A_K106R_K108R_K126R_K 127R_S142A_S143A_S148A_T166A_S167A_K300R_K307R_K309R_S313A_ S378A_T429A_T432A_S436A_K458R_S461E)
  source 1..1642: mol_type = other RNA
aggagaaagcttaccatgcgcctatccaaaacactcgttgacatggacatggcagactactccgcagccctcgaccccgcctacaccaccctcgaattcgaaaacgtccaagtcctaacaatgggaaacgacacatccccatcagaagggaccaacctaaacgcccccaactccctcggcgtctccgcactctgcgcaatctgcggcgacagagccaccggaaaacactacggcgcctcctcatgcgacggatgcaaaggattcttccgaagagccgtccgaaaaaaccacatgtactcatgccgattctcgcgccaatgcgtcgtcgatcgcgacagacgcaaccaatgccgatactgcagacttaaaaaatgcttccgtgctggcatgcgacgcgaagctgtccaaaatgagcgcgaccgcatatctacccgaagagccgcctacgaagactcagcactaccctcaatcaacgccctactccaggccgaagtcctatcccgacaaatcgcagcccccgtgtccggcataaacggtgacatccgcgccaaaaaaatcgcctcaatagccgacgtctgtgaaagcatgaaagaacaactactagttctcgtcgaatgggcaaaatacatacccgcattctgcgaactcccactagacgaccaagtggccctcctccgagcccatgcaggagaacacctcctcctcggggccacaaaacgctccatggtgttcaaagacgtactactcctaggaaacgactacatcgtaccccgccactgccccgaactagctgaaatgtcacgcgtctcgatccgcatcctcgacgaactcgtcctaccattccaagaactgcaaatcgacgacaacgagtacgcgtacctaaaagcaataatattcttcgaccccgacgcccgcggcctctccgaccccggaagaatcaggcgactccgcgcccaagtccaagtaagcctcgaagactacatcaacgaccgccaatacgactcacgaggcagattcggcgaactactcctcctcctcccaacacttcaatcaatcacctggcaaatgatcgaacaaatccaattcatcaagctattcggcatggccaaaatcgacaacctcctacaagaaatgctactgggaggcgccccctccgacgccccccacgcccaccaccccctacatccacacctcatgcaggaacatatgggaaccaacgtcatcgtcgcaaacaccatgcccacccacctttccaacggccaaatgtgcgaatggccccgcccccgcggccaagcagccgcccccgaagccccccaacccgcaccacccggcggcagtggctcggaaccctacaaactcctccccggcgccgtagccaccatcgtccgaccactagaagcaataccacaacccaccataaccaaacaagaagtaatctaaggactagttataagactgactagcccgatgggcctcccaacgggccctcctcccctccttgcaccgagattaataaaaaaaaaaaaaaaaaaaaaaaaaaaaaaaaaaaaaaaaaaaaaaaaaaaaaaaaaaaaaaaatgcatcccccccccccccccccccccccccccccccaaaggctcttttcagagccaccagaatt

SEQ ID NO: 1916 - RNA, 1642 nt, synthetic construct
  misc_feature 1..1642: note = mRNA i-3 (A64-N5-C30-hSL-N5) (opt11) from Homo sapiens__NP_000448.3__HNF4A(1-474)(S87A_K106R_K108R_K126R_K 127R_S142A_S143A_S148A_T166A_S167A_S313A_S378A_T429A_T432A_ S436A_K447R_K458R_S461E_K470R)
  source 1..1642: mol_type = other RNA
aggagaaagcttaccatgagactatcaaaaaccctggtggacatggacatggccgactacagcgctgccctcgaccccgcctataccacactagagttcgaaaacgtccaagtcctaaccatgggcaacgacacatccccctccgaaggaacaaacctaaacgcccccaactccctcggtgtgtccgccttatgcgccatctgcggagaccgcgccacaggcaaacactacggcgcatcaagctgcgacggctgtaaaggattcttccgccgcgccgtgcgcaaaaaccacatgtactcatgccgcttctcccgccagtgcgtcgtcgaccgcgaccgccgcaaccaatgccgatactgccgcctcaagaaatgcttccgagccggcatgcgacgagaagcagtccaaaacgaacgcgatcgcatctccacaagacgcgcagcatatgaagactcggccctcccatcaatcaacgccctcctacaagccgaagtactatcccgccaaatcgccgcccccgtctccggcatcaacggcgacatacgcgctaagaaaatcgcctcaatagcagacgtctgcgaatcaatgaaagaacaactgctcgtactcgtggaatgggccaaatacatcccagcgttctgcgaactccccctcgacgaccaagtagcattactacgcgcccacgccggcgaacaccttctactaggagcaaccaaacgatccatggtcttcaaagacgtcctgctcctaggaaatgactacatcgtcccccgccattgccctgaactagcagaaatgtcgcgcgtctcaatccgaatcctcgacgaactcgttctaccattccaagaactacaaatcgacgacaacgaatacgcctaccttaaagcaataatcttcttcgacccagatgcaaaaggcctctccgaccccggcaaaatcaaacgcctacgagcacaagtccaagtctctctcgaagactacatcaacgaccgccaatacgactcacgtggccgcttcggcgaactcctcctcctcctacccacccttcaatcaatcacatggcaaatgatcgaacaaatacaattcataaaactattcggcatggccaaaatcgacaacctcctccaagaaatgctactcggcggtgccccgtccgacgcaccccacgcccaccaccccctccatccacacctcatgcaggaacacatgggaaccaacgtcatcgtcgccaacaccatgcccactcacctcagcaacggacaaatgtgcgaatggccaagaccgcgaggacaagccgccgcccccgaagccccacaacctgcacccccaggaggctccggatcagaaccttaccgcctcctccccggcgccgtcgccacaatcgtacgcccactcgaagccatcccccaaccaaccatcacccgccaagaagtcatctaaggactagttataagactgactagcccgatgggcctcccaacgggccctcctcccctccttgcaccgagattaataaaaaaaaaaaaaaaaaaaaaaaaaaaaaaaaaaaaaaaaaaaaaaaaaaaaaaaaaaaaaaaatgcatcccccccccccccccccccccccccccccccaaaggctcttttcagagccaccagaatt

SEQ ID NO: 1917 - RNA, 1642 nt, synthetic construct
  misc_feature 1..1642: note = mRNA i-3 (A64-N5-C30-hSL-N5) (opt11) from Homo sapiens__NP_000448.3__HNF4A(1-474)(S87A_K106R_K108R_K126R_K 127R_S142A_S143A_S148A_T166A_S167A_K179R_K180R_K234R_K300R_ K307R_K309R_S313A_S378A_T429A_T432A_S436A_K447R_K458R_S461E _K470R)
  source 1..1642: mol_type = other RNA
aggagaaagcttaccatgcgcctttccaaaaccctagtcgacatggacatggccgactactccgcagccctagacccagcgtacaccaccctcgagttcgaaaacgtccaagtactcacaatgggcaacgacacctccccctcggaaggcaccaacctcaacgcccctaactcactcggcgtttccgctctctgcgccatctgcggagaccgagcgacaggaaaacactacggagcctcctcatgcgatggctgcaaaggcttcttccgccgcgcagtacgcaaaaaccacatgtactcatgcagattctcaagacaatgcgtcgtcgaccgcgaccgacgcaaccaatgccgatactgccgcctcaagaaatgcttccgcgccggcatgcgccgagaagcagtccaaaacgaacgcgacagaataagtactcgccgagccgcatacgaagacagcgccctaccatccatcaacgcactcctccaagccgaagtcctatcacgacaaatcgcagctcccgtttccggcatcaacggcgatatccgcgcaagacgaatagcaagcattgcagacgtctgcgaatcaatgaaagaacaactcctcgtcctcgtcgaatgggccaaatacatccccgcattctgcgaactccccctcgacgaccaagtcgccctactaagagcccacgccggcgaacacctcctcctaggcgctacccgacgctccatggtattcaaagacgtcctactcctaggtaacgactacatcgtaccccgccactgccccgaactcgcagaaatgagcagagtttcaatccgcatcctagacgagctagttctccccttccaagaacttcaaatcgacgataacgaatacgcctacctaaaagccatcatcttcttcgacccagacgcccgaggcctctccgacccaggacgaataagaagactacgcgcccaagtacaagtttccctcgaagattacatcaacgacagacagtacgactccagaggccgattcggtgaactcctcctgctactccccaccctccaaagcataacatggcaaatgatcgaacaaatccaattcatcaaactcttcggcatggccaaaatcgacaacctcctacaagaaatgctactgggcggtgcaccctccgacgccccacacgctcaccaccccctccacccccatcttatgcaagaacacatgggaaccaatgtcatcgtcgcaaacacaatgcccacccacctaagcaacggccaaatgtgcgaatggcccagaccacgcggccaagcagccgcccccgaagccccacaaccagcccctcccggaggatcaggatctgaaccctaccgactactccccggagccgtcgccaccatcgtccgccccctcgaagcaataccacaaccgaccataacgcgccaagaagtcatctaaggactagttataagactgactagcccgatgggcctcccaacgggccctcctcccctccttgcaccgagattaataaaaaaaaaaaaaaaaaaaaaaaaaaaaaaaaaaaaaaaaaaaaaaaaaaaaaaaaaaaaaaaatgcatcccccccccccccccccccccccccccccccaaaggctcttttcagagccaccagaatt

SEQ ID NO: 1918 - RNA, 1642 nt, synthetic construct
  misc_feature 1..1642: note = mRNA i-3 (A64-N5-C30-hSL-N5) (opt11) from Homo sapiens__NP_000448.3__HNF4A(1-474)(S87A_S95A_S99A_K106R_K10 8R_K126R_K127R_S142A_S143A_S148A_T166A_S167A_S313A_S378A_T4 29A_T432A_S436A_K458R_S461E)
  source 1..1642: mol_type = other RNA
aggagaaagcttaccatgagactaagcaaaaccctcgtcgacatggacatggccgactacagcgccgccctcgaccccgcatacaccaccctcgaatttgaaaacgtacaagtcctcaccatgggtaacgatacctccccatccgaaggaaccaacctcaacgccccaaactcactaggcgtctccgccctctgcgccatctgcggcgaccgcgccaccggcaaacactacggcgcctcttcctgtgacggatgcaaaggctttttccggcgcgcagtccgcaaaaaccacatgtacgcctgccgtttcgcccgacagtgcgtagtcgaccgcgaccgtcgaaaccaatgcagatactgccgactaaagaaatgcttccgcgccggcatgcgcagagaagcagtacaaaacgaacgagaccgcatctcaacccgccgtgcggcatatgaagactcggccctaccatccatcaacgccctgctccaagccgaagtattatcccgccaaatcgcagcccccgttagtggaatcaacggcgacatccgagccaagaaaatcgcctccatagccgacgtctgcgagagcatgaaagaacaactcctcgtactcgtagaatgggcaaaatacatacccgccttctgcgaactccccctagacgaccaagtagccctactccgagcccacgccggtgaacatctactcctcggagccaccaaaagatccatggtattcaaagacgtcctcctcctaggcaacgactacatcgtcccccgccactgccccgaactcgccgaaatgtcccgcgtctcaatccgcatactggacgagctcgtactccccttccaagaactacaaatcgacgacaacgaatacgcttacctaaaagcaatcatcttcttcgacccagacgcgaaaggcctatcagatcccggcaaaatcaaacgcctacgcgcacaagtacaagtatcccttgaagactacataaacgaccgacaatacgacagccggggccgtttcggagaacttctcctcctcctacccacactccaatccattacctggcaaatgatagaacaaatccaattcatcaaactcttcggaatggccaagatcgacaacctcctccaagaaatgctactcggaggcgcccccagtgacgctccccacgcccatcaccccctccacccccacctaatgcaagaacacatgggcaccaacgtcatagtcgccaacaccatgccaacccacctctcaaacggccaaatgtgcgaatggcctcgccccagaggccaagcggccgcccccgaagccccacaacccgccccacccggcggctccggatcagaaccatacaaactcctacccggcgccgtagccactatcgtacgaccactcgaagccatcccacaacccacaatcaccaaacaagaagtcatctaaggactagttataagactgactagcccgatgggcctcccaacgggccctcctcccctccttgcaccgagattaataaaaaaaaaaaaaaaaaaaaaaaaaaaaaaaaaaaaaaaaaaaaaaaaaaaaaaaaaaaaaaaatgcatcccccccccccccccccccccccccccccccaaaggctcttttcagagccaccagaatt

SEQ ID NO: 1919 - RNA, 1642 nt, synthetic construct
  misc_feature 1..1642: note = mRNA i-3 (A64-N5-C30-hSL-N5) (opt11) from Homo sapiens__NP_000448.3__HNF4A(1-474)(S87A_K106R_K108R_K126R_K 127R_S138A_T139A_S142A_S143A_S148A_T166A_S167A_S313A_S378A_ T429A_T432A_S436A_K458R_S461E)
  source 1..1642: mol_type = other RNA
aggagaaagcttaccatgcgcctctccaaaaccctagtagatatggacatggcagactatagcgcagcactcgaccccgcctacactacccttgaattcgaaaacgtccaagtcctcacaatgggaaacgacacctctccttccgaaggcaccaacctcaacgccccaaactccctcggcgtctccgccttgtgcgccatctgcggcgaccgagccacaggaaaacactacggagcctcctcctgcgatggctgcaaaggcttcttccgccgcgcagtaagaaaaaaccacatgtactcatgccgcttctcccgccagtgcgtcgtagaccgcgaccgccgcaaccaatgccgctactgccgcctcaaaaaatgcttccgagccggaatgcgaagagaagccgtccaaaacgaacgcgaccgcatcgccgcccgacgggccgcatacgaggatagcgccctcccaagcatcaatgctcttctccaagccgaggtcctttcccgtcaaatcgcagcccccgtatccggaatcaacggagacatacgcgccaaaaaaatcgcaagcatcgccgacgtctgcgaaagcatgaaagaacaactcctcgtactcgtcgaatgggccaaatacataccagccttctgcgaactacccctcgacgatcaagtagccctcctacgagcccacgccggagaacacctcctacttggcgccacaaaacgaagcatggttttcaaggacgtcctcctcctcggcaacgactacatagtaccccgccactgccccgaactagcagaaatgtcccgggtatcgatccgcatactagacgaactagtcctcccctttcaagaactccaaatcgatgacaacgaatacgcttacctgaaagcaataatcttcttcgaccctgacgccaaaggcctctccgacccaggaaaaataaaacgcctccgcgcccaagtacaagtctccctagaagactacataaacgaccgacaatacgactcccgaggacgattcggcgaactactattattactacctacactacaatccatcacctggcaaatgatcgaacaaatccaattcatcaaactattcggcatggccaaaatcgacaacctactccaagaaatgctcctaggcggcgcccccagcgacgccccacacgcccaccaccccctccacccccacctaatgcaagaacacatgggcacaaacgtcatagtagccaacaccatgcccacccacctcagcaacggccaaatgtgcgagtggccccgaccacgcggccaagccgcagcccctgaagccccccaacctgccccccccggcggctccggctccgaaccatacaaactactccccggggccgtcgccacaatcgtcagacccctcgaagcaatcccccaacctacaatcaccaaacaagaagtaatttaaggactagttataagactgactagcccgatgggcctcccaacgggccctcctcccctccttgcaccgagattaataaaaaaaaaaaaaaaaaaaaaaaaaaaaaaaaaaaaaaaaaaaaaaaaaaaaaaaaaaaaaaaatgcatcccccccccccccccccccccccccccccccaaaggctcttttcagagccaccagaatt

SEQ ID NO: 1920 - RNA, 1642 nt, synthetic construct
  misc_feature 1..1642: note = mRNA i-3 (A64-N5-C30-hSL-N5) (opt11) from Homo sapiens__NP_000448.3__HNF4A(1-474)(S87A_S95A_S99A_K106R_K10 8R_K126R_K127R_S138A_T139A_S142A_S143A_S148A_T166A_S167A_S3 13A_S378A_T429A_T432A_S436A_K458R_S461E)
  source 1..1642: mol_type = other RNA
aggagaaagcttaccatgcgactaagcaaaaccctagtcgacatggacatggcagactatagcgccgcactcgacccagcctacacaacgctcgagttcgaaaacgttcaagtccttaccatgggcaacgacacctcccccagcgaaggcaccaacctaaacgcccctaactcactcggagtgtccgcactatgcgcaatctgcggggaccgcgccaccggcaaacactacggcgcctccagctgcgacggctgcaaaggcttcttccgccgagccgtccgcaagaaccacatgtacgcctgccgcttcgctcgccaatgcgtcgtagaccgagaccgcagaaaccaatgcagatactgcagactcaagaaatgcttccgcgccggcatgcgacgcgaagccgtacaaaacgaacgcgaccgcatcgccgctcgtcgagcagcctatgaagactcagcccttccctcaataaacgcactactccaagccgaagtcctcagccgacaaatcgccgccccagtctcaggcatcaacggcgacatccgcgccaagaaaatagcctccatcgcggacgtctgcgagtccatgaaagaacaactcctagttctggtcgaatgggctaaatacatccccgcattctgcgaactcccactcgacgaccaagtagccctactccgagcccacgcaggagaacacctactcctaggagccacaaaacgttccatggtatttaaagacgtcctcctactaggcaacgactacatcgtcccccgccactgccccgaactcgccgaaatgtcccgcgtctccatccgcatcctagacgagctcgtactcccattccaagaactccaaatagacgacaacgaatacgcctacctaaaagccatcatcttcttcgatccagacgcaaaaggcctctcagacccaggcaaaatcaaaagacttagagcccaagtccaagtatcactcgaagactacatcaacgaccgacaatacgactcccgcggaaggttcggcgaactcctcctcctcctccccacactacaatccatcacctggcaaatgatagaacaaattcaattcataaaactattcggcatggccaagatagacaacctcctccaagaaatgctcctcggcggagccccctccgacgcaccccacgcccaccaccccctacacccccacctgatgcaagaacacatgggaacaaacgtaatcgtagccaacaccatgccgacacatctctctaacggccaaatgtgcgaatggccacgcccacgcggccaagccgcagcccccgaagcaccacaaccagccccacccggaggctccggatccgaaccctacaagttgctccccggcgccgtagccacaatcgtccgccccctagaggccataccacaacccacaatcacaaaacaagaagtcatataaggactagttataagactgactagcccgatgggcctcccaacgggccctcctcccctccttgcaccgagattaataaaaaaaaaaaaaaaaaaaaaaaaaaaaaaaaaaaaaaaaaaaaaaaaaaaaaaaaaaaaaaaatgcatcccccccccccccccccccccccccccccccaaaggctcttttcagagccaccagaatt

SEQ ID NO: 1921 - RNA, 1642 nt, synthetic construct
  misc_feature 1..1642: note = mRNA i-3 (A64-N5-C30-hSL-N5) (opt28) from Homo sapiens__NP_000448.3__HNF4A(1-474)
  source 1..1642: mol_type = other RNA
aggagaaagcttaccatgcggctgagcaagaccctggtggacatggatatggcagactactccgccgctctggatccagcatatacaactctggagttcgaaaacgtccaggtgctgaccatgggaaatgacacatctcccagtgagggcactaacctgaatgcccctaactcactgggggtgagcgctctgtgcgcaatctgcggagacagggccaccggcaaacactacggggcttcctcttgtgatggatgcaagggctttttcagacgcagcgtccggaaaaatcatatgtacagttgccgattttcaaggcagtgcgtggtggacaaggacaagagaaaccagtgccgctattgtcggctgaaaaagtgcttcagggcaggaatgaaaaaggaagccgtccagaatgagagagatcgaatttccacacggcgcagctcttacgaagacagctccctgccaagtatcaacgctctgctgcaggcagaggtgctgtcaaggcagatcactagccccgtgtctgggattaacggcgatatcagagccaagaaaattgcttccatcgcagacgtctgcgaaagcatgaaggagcagctgctggtgctggtggagtgggccaaatacatccctgcattttgcgaactgccactggacgatcaggtcgctctgctgcgggcccacgcaggagagcatctgctgctgggcgctaccaagcgaagtatggtgttcaaggacgtgctgctgctggggaatgactatattgtccccaggcactgccctgaactggccgagatgtcaagagtgtctatccgcatcctggatgaactggtgctgccattccaggagctgcagattgacgataacgaatacgcatacctgaaagctatcatctttttcgaccccgacgccaagggactgtccgatcctggcaaaattaagcggctgaggagccaggtccaggtgagtctggaggactatatcaatgacagacagtacgatagccgagggcggtttggagaactgctgctgctgctgccaacactgcagtccattacctggcagatgatcgagcagatccagttcattaaactgttcggcatggcaaagatcgacaacctgctgcaggagatgctgctgggagggtcaccctctgatgcccctcatgctcaccacccactgcatccccacctgatgcaggaacatatgggcactaatgtgatcgtcgcaaacacaatgcctacccacctgagcaatggacagatgtgtgagtggccacgccccaggggccaggccgcaactcctgaaaccccacagccctcccctccagggggatctggcagcgagccctacaagctgctgcctggagctgtggccacaattgtgaaaccactgagtgcaatcccccagcctaccattactaagcaggaagtcatctgaggactagttataagactgactagcccgatgggcctcccaacgggccctcctcccctccttgcaccgagattaataaaaaaaaaaaaaaaaaaaaaaaaaaaaaaaaaaaaaaaaaaaaaaaaaaaaaaaaaaaaaaaatgcatcccccccccccccccccccccccccccccccaaaggctcttttcagagccaccagaatt

SEQ ID NO: 1922 - RNA, 1642 nt, synthetic construct
  misc_feature 1..1642: note = mRNA i-3 (A64-N5-C30-hSL-N5) (opt28) from Homo sapiens__NP_000448.3__HNF4A(1-474)(S313A)
  source 1..1642: mol_type = other RNA
aggagaaagcttaccatgcggctgagcaagaccctggtggacatggatatggcagactactccgccgctctggatccagcatatacaactctggagttcgaaaacgtccaggtgctgaccatgggaaatgacacatctccctcagagggcactaacctgaatgcccctaacagtctgggggtgagcgctctgtgcgcaatctgcggagacagggccaccggcaaacactacggggcttcctcttgtgatggatgcaagggctttttcagacgcagcgtccggaaaaatcatatgtactcatgccgatttagtaggcagtgcgtggtggacaaggacaagagaaaccagtgccgctattgtcggctgaaaaagtgcttcagggcaggaatgaaaaaggaagccgtccagaatgagagagatcgaatttccacacggcgcagctcttacgaagacagctccctgccatcaatcaacgctctgctgcaggcagaggtgctgagtaggcagatcactagccccgtgtctgggattaacggcgatatcagagccaagaaaattgcatccatcgctgacgtctgcgaaagcatgaaggagcagctgctggtgctggtggagtgggccaaatacatccctgcattttgcgaactgccactggacgatcaggtcgctctgctgcgggcccacgcaggagagcatctgctgctgggcgctaccaagcgatcaatggtgttcaaggacgtgctgctgctggggaatgactatattgtccccaggcactgccctgaactggccgagatgagtagagtgtctatccgcatcctggatgaactggtgctgccattccaggagctgcagattgacgataacgaatacgcatacctgaaagctatcatctttttcgaccccgacgccaagggactgtccgatcctggcaaaattaagcggctgagggcacaggtccaggtgagcctggaggactatatcaatgacagacagtacgatagccgagggcggtttggagaactgctgctgctgctgccaacactgcagtccattacctggcagatgatcgagcagatccagttcattaaactgttcggcatggccaagatcgacaacctgctgcaggagatgctgctgggagggtcaccctctgatgctcctcatgcacaccacccactgcatccccacctgatgcaggaacatatgggcactaatgtgatcgtcgccaacacaatgcctacccacctgagtaatggacagatgtgtgagtggccacgccccaggggccaggcagctactcctgaaaccccacagcccagccctccagggggatccggctctgagccctacaagctgctgcctggagcagtggccacaattgtgaaaccactgagcgctatcccccagcctaccattactaagcaggaagtcatctgaggactagttataagactgactagcccgatgggcctcccaacgggccctcctcccctccttgcaccgagattaataaaaaaaaaaaaaaaaaaaaaaaaaaaaaaaaaaaaaaaaaaaaaaaaaaaaaaaaaaaaaaaatgcatcccccccccccccccccccccccccccccccaaaggctcttttcagagccaccagaatt

SEQ ID NO: 1923 - RNA, 1642 nt, synthetic construct
  misc_feature 1..1642: note = mRNA i-3 (A64-N5-C30-hSL-N5) (opt28) from Homo sapiens__NP_000448.3__HNF4A(1-474)(S313E)
  source 1..1642: mol_type = other RNA
aggagaaagcttaccatgcggctgagcaagaccctggtggacatggatatggcagactactccgccgctctggatccagcatatacaactctggagttcgaaaacgtccaggtgctgaccatgggaaatgacacatctccctcagagggcactaacctgaatgcccctaacagtctgggggtgagcgctctgtgcgcaatctgcggagacagggccaccggcaaacactacggggcttcctcttgtgatggatgcaagggctttttcagacgcagcgtccggaaaaatcatatgtactcatgccgatttagtaggcagtgcgtggtggacaaggacaagagaaaccagtgccgctattgtcggctgaaaaagtgcttcagggcaggaatgaaaaaggaagccgtccagaatgagagagatcgaatttccacacggcgcagctcttacgaagacagctccctgccatcaatcaacgctctgctgcaggcagaggtgctgagtaggcagatcactagccccgtgtctgggattaacggcgatatcagagccaagaaaattgcatccatcgctgacgtctgcgaaagcatgaaggagcagctgctggtgctggtggagtgggccaaatacatccctgcattttgcgaactgccactggacgatcaggtcgctctgctgcgggcccacgcaggagagcatctgctgctgggcgctaccaagcgatcaatggtgttcaaggacgtgctgctgctggggaatgactatattgtccccaggcactgccctgaactggccgagatgagtagagtgtctatccgcatcctggatgaactggtgctgccattccaggagctgcagattgacgataacgaatacgcatacctgaaagctatcatctttttcgaccccgacgccaagggactgtccgatcctggcaaaattaagcggctgagggagcaggtccaggtgagcctggaagactatatcaatgacagacagtacgatagccgagggcggtttggagagctgctgctgctgctgccaacactgcagtccattacctggcagatgatcgagcagatccagttcattaaactgttcggcatggcaaagatcgacaacctgctgcaggaaatgctgctgggagggtcaccctctgatgcccctcatgctcaccacccactgcatccccacctgatgcaggagcatatgggcactaatgtgatcgtcgcaaacacaatgcctacccacctgagtaatggacagatgtgtgaatggccacgccccaggggccaggccgcaactcctgagaccccacagcccagccctccagggggatccggctctgaaccctacaagctgctgcctggagctgtggcaacaattgtgaaaccactgagcgccatcccccagcctaccattactaagcaggaggtcatctgaggactagttataagactgactagcccgatgggcctcccaacgggccctcctcccctccttgcaccgagattaataaaaaaaaaaaaaaaaaaaaaaaaaaaaaaaaaaaaaaaaaaaaaaaaaaaaaaaaaaaaaaaatgcatcccccccccccccccccccccccccccccccaaaggctcttttcagagccaccagaatt

SEQ ID NO: 1924 - RNA, 1642 nt, synthetic construct
  misc_feature 1..1642: note = mRNA i-3 (A64-N5-C30-hSL-N5) (opt28) from Homo sapiens__NP_000448.3__HNF4A(1-474)(S142A_S143A)
  source 1..1642: mol_type = other RNA
aggagaaagcttaccatgcggctgagcaagaccctggtggacatggatatggcagactactccgccgctctggatccagcatatacaactctggagttcgaaaacgtccaggtgctgaccatgggaaatgacacatctccctcagagggcactaacctgaatgcccctaacagtctgggggtgagcgctctgtgcgcaatctgcggagacagggccaccggcaaacactacggggcttcctcttgtgatggatgcaagggctttttcagacgcagcgtccggaaaaatcatatgtactcatgccgatttagtaggcagtgcgtggtggacaaggacaagagaaaccagtgccgctattgtcggctgaaaaagtgcttcagggcaggaatgaaaaaggaagccgtccagaatgagagagatcgaatttccacacggcgcgctgcatacgaagacagctctctgccaagcatcaacgccctgctgcaggcagaggtgctgtccaggcagatcacttcacccgtgagtgggattaacggcgatatcagagctaagaaaattgccagcatcgcagacgtctgcgaatctatgaaggagcagctgctggtgctggtggagtgggctaaatacatccctgccttttgcgaactgccactggacgatcaggtcgcactgctgcgggctcacgccggagagcatctgctgctgggcgcaaccaagcgatccatggtgttcaaggacgtgctgctgctggggaatgactatattgtccccaggcactgccctgaactggctgagatgagcagagtgtcaatccgcatcctggatgaactggtgctgccattccaggagctgcagattgacgataacgaatacgcctacctgaaagcaatcatctttttcgaccccgacgccaagggactgagtgatcctggcaaaattaagcggctgaggtctcaggtccaggtgtccctggaggactatatcaatgacagacagtacgatagccgagggcggtttggagaactgctgctgctgctgccaacactgcagagcattacctggcagatgatcgagcagatccagttcattaaactgttcggcatggctaagatcgacaacctgctgcaggagatgctgctgggagggtccccctcagatgcacctcatgcccaccacccactgcatccccacctgatgcaggaacatatgggcactaatgtgatcgtcgcaaacacaatgcctacccacctgtctaatggacagatgtgtgagtggccacgccccaggggccaggctgcaactcctgaaaccccacagcccagtcctccagggggaagcggctccgagccctacaagctgctgcctggagccgtggctacaattgtgaaaccactgtctgcaatcccccagcctaccattactaagcaggaagtcatctgaggactagttataagactgactagcccgatgggcctcccaacgggccctcctcccctccttgcaccgagattaataaaaaaaaaaaaaaaaaaaaaaaaaaaaaaaaaaaaaaaaaaaaaaaaaaaaaaaaaaaaaaaatgcatcccccccccccccccccccccccccccccccaaaggctcttttcagagccaccagaatt

SEQ ID NO: 1925 - RNA, 1642 nt, synthetic construct
  misc_feature 1..1642: note = mRNA i-3 (A64-N5-C30-hSL-N5) (opt28) from Homo sapiens__NP_000448.3__HNF4A(1-474)(S142E_S143E)
  source 1..1642: mol_type = other RNA
aggagaaagcttaccatgcggctgagcaagaccctggtggacatggatatggcagactactccgccgctctggatccagcatatacaactctggagttcgaaaacgtccaggtgctgaccatgggaaatgacacatctccctcagagggcactaacctgaatgcccctaacagtctgggggtgagcgctctgtgcgcaatctgcggagacagggccaccggcaaacactacggggcttcctcttgtgatggatgcaagggctttttcagacgcagcgtccggaaaaatcatatgtactcatgccgatttagtaggcagtgcgtggtggacaaggacaagagaaaccagtgccgctattgtcggctgaaaaagtgcttcagggcaggaatgaaaaaggaagccgtccagaatgagagagatcgaatttccacacggcgcgaagagtacgaagacagctctctgccaagcatcaacgctctgctgcaggcagaggtgctgtccaggcagatcacttcacccgtgagtgggattaacggcgatatcagagccaagaaaattgcaagcatcgctgacgtctgcgagtctatgaaggaacagctgctggtgctggtggagtgggccaaatacatccctgcattttgcgaactgccactggacgatcaggtcgctctgctgcgggcccacgcaggagagcatctgctgctgggcgctaccaagcgatccatggtgttcaaggacgtgctgctgctggggaatgactatattgtccccaggcactgccctgaactggccgagatgagcagagtgtcaatccgcatcctggatgaactggtgctgccattccaggagctgcagattgacgataacgaatacgcatacctgaaagctatcatctttttcgaccccgacgccaagggactgagtgatcctggcaaaattaagcggctgaggtctcaggtccaggtgtccctggaggactatatcaatgacagacagtacgatagccgagggcggtttggagagctgctgctgctgctgccaacactgcagagcattacctggcagatgatcgaacagatccagttcattaaactgttcggcatggcaaagatcgacaacctgctgcaggagatgctgctgggagggtccccctcagatgcccctcatgctcaccacccactgcatccccacctgatgcaggaacatatgggcactaatgtgatcgtcgcaaacacaatgcctacccacctgtctaatggacagatgtgtgagtggccacgccccaggggccaggccgcaactcctgaaaccccacagcccagtcctccagggggaagcggctccgagccctacaagctgctgcctggagctgtggcaacaattgtgaaaccactgtctgccatcccccagcctaccattactaagcaggaagtcatctgaggactagttataagactgactagcccgatgggcctcccaacgggccctcctcccctccttgcaccgagattaataaaaaaaaaaaaaaaaaaaaaaaaaaaaaaaaaaaaaaaaaaaaaaaaaaaaaaaaaaaaaaaatgcatcccccccccccccccccccccccccccccccaaaggctcttttcagagccaccagaatt

SEQ ID NO: 1926 - RNA, 1642 nt, synthetic construct
  misc_feature 1..1642: note = mRNA i-3 (A64-N5-C30-hSL-N5) (opt28) from Homo sapiens__NP_000448.3__HNF4A(1-474)(S143A)
  source 1..1642: mol_type = other RNA
aggagaaagcttaccatgcggctgagcaagaccctggtggacatggatatggcagactactccgccgctctggatccagcatatacaactctggagttcgaaaacgtccaggtgctgaccatgggaaatgacacatctccctcagagggcactaacctgaatgcccctaacagtctgggggtgagcgctctgtgcgcaatctgcggagacagggccaccggcaaacactacggggcttcctcttgtgatggatgcaagggctttttcagacgcagcgtccggaaaaatcatatgtactcatgccgatttagtaggcagtgcgtggtggacaaggacaagagaaaccagtgccgctattgtcggctgaaaaagtgcttcagggcaggaatgaaaaaggaagccgtccagaatgagagagatcgaatttccacacggcgcagcgcttacgaagactctagcctgccatccatcaacgcactgctgcaggccgaggtgctgtcaaggcagatcaccagtcccgtgagcgggattaacggcgatatcagagcaaagaaaattgcttctatcgccgacgtctgcgaatccatgaaggagcagctgctggtgctggtggagtgggcaaaatacatccctgctttttgcgaactgccactggacgatcaggtcgccctgctgcgggcacacgctggagagcatctgctgctgggcgccactaagcgaagcatggtgttcaaggacgtgctgctgctggggaatgactatattgtccccaggcactgccctgaactggcagagatgtcaagagtgagtatccgcatcctggatgaactggtgctgccattccaggagctgcagattgacgataacgaatacgcttacctgaaagccatcatctttttcgaccccgacgcaaagggactgtctgatcctggcaaaattaagcggctgaggtcccaggtccaggtgagcctggaggactatatcaatgacagacagtacgatagccgagggcggtttggagaactgctgctgctgctgccaacactgcagtccattacctggcagatgatcgagcagatccagttcattaaactgttcggcatggccaagatcgacaacctgctgcaggagatgctgctgggagggtcaccctctgatgctcctcatgcacaccacccactgcatccccacctgatgcaggaacatatgggcactaatgtgatcgtcgccaacacaatgcctacccacctgagtaatggacagatgtgtgagtggccacgccccaggggccaggcagctactcctgaaaccccacagcccagccctccagggggatccggctctgagccctacaagctgctgcctggagcagtggccacaattgtgaaaccactgagcgctatcccccagcctaccattactaagcaggaagtcatctgaggactagttataagactgactagcccgatgggcctcccaacgggccctcctcccctccttgcaccgagattaataaaaaaaaaaaaaaaaaaaaaaaaaaaaaaaaaaaaaaaaaaaaaaaaaaaaaaaaaaaaaaaatgcatcccccccccccccccccccccccccccccccaaaggctcttttcagagccaccagaatt

SEQ ID NO: 1927 - RNA, 1642 nt, synthetic construct
  misc_feature 1..1642: note = mRNA i-3 (A64-N5-C30-hSL-N5) (opt28) from Homo sapiens__NP_000448.3__HNF4A(1-474)(T166A)
  source 1..1642: mol_type = other RNA
aggagaaagcttaccatgcggctgagcaagaccctggtggacatggatatggcagactactccgccgctctggatccagcatatacaactctggagttcgaaaacgtccaggtgctgaccatgggaaatgacacatctccctcagagggcactaacctgaatgcccctaacagtctgggggtgagcgctctgtgcgcaatctgcggagacagggccaccggcaaacactacggggcttcctcttgtgatggatgcaagggctttttcagacgcagcgtccggaaaaatcatatgtactcatgccgatttagtaggcagtgcgtggtggacaaggacaagagaaaccagtgccgctattgtcggctgaaaaagtgcttcagggcaggaatgaaaaaggaagccgtccagaatgagagagatcgaatttccacacggcgcagctcttacgaagacagctccctgccatcaatcaacgctctgctgcaggcagaggtgctgagtaggcagatcgccagccccgtgtctgggattaacggcgatatcagagcaaagaaaattgcttccatcgccgacgtctgcgaaagcatgaaggagcagctgctggtgctggtggagtgggcaaaatacatccctgctttttgcgaactgccactggacgatcaggtcgccctgctgcgggcacacgctggagagcatctgctgctgggcgccactaagcgatcaatggtgttcaaggacgtgctgctgctggggaatgactatattgtccccaggcactgccctgaactggcagagatgagtagagtgtctatccgcatcctggatgaactggtgctgccattccaggagctgcagattgacgataacgaatacgcttacctgaaagccatcatctttttcgaccccgacgcaaagggactgtccgatcctggcaaaattaagcggctgaggagccaggtccaggtgagcctggaggactatatcaatgacagacagtacgattcccgagggcggtttggagaactgctgctgctgctgccaaccctgcagtcaattacatggcagatgatcgagcagatccagttcattaaactgttcggcatggccaagatcgacaacctgctgcaggagatgctgctgggagggtctcccagtgatgctcctcatgcacaccacccactgcatccccacctgatgcaggaacatatgggcaccaatgtgatcgtcgccaacactatgcctacacacctgagcaatggacagatgtgtgagtggccacgccccaggggccaggcagctacccctgaaactccacagccctcccctccagggggatctggcagcgagccctacaagctgctgcctggagcagtggccaccattgtgaaaccactgtcagctatcccccagcctacaattaccaagcaggaagtcatctgaggactagttataagactgactagcccgatgggcctcccaacgggccctcctcccctccttgcaccgagattaataaaaaaaaaaaaaaaaaaaaaaaaaaaaaaaaaaaaaaaaaaaaaaaaaaaaaaaaaaaaaaaatgcatcccccccccccccccccccccccccccccccaaaggctcttttcagagccaccagaatt

SEQ ID NO: 1928 - RNA, 1642 nt, synthetic construct
  misc_feature 1..1642: note = mRNA i-3 (A64-N5-C30-hSL-N5) (opt28) from Homo sapiens__NP_000448.3__HNF4A(1-474)(S167E)
  source 1..1642: mol_type = other RNA
aggagaaagcttaccatgcggctgagcaagaccctggtggacatggatatggcagactactccgccgctctggatccagcatatacaactctggagttcgaaaacgtccaggtgctgaccatgggaaatgacacatctccctcagagggcactaacctgaatgcccctaacagtctgggggtgagcgctctgtgcgcaatctgcggagacagggccaccggcaaacactacggggcttcctcttgtgatggatgcaagggctttttcagacgcagcgtccggaaaaatcatatgtactcatgccgatttagtaggcagtgcgtggtggacaaggacaagagaaaccagtgccgctattgtcggctgaaaaagtgcttcagggcaggaatgaaaaaggaagccgtccagaatgagagagatcgaatttccacacggcgcagctcttacgaagacagctccctgccatcaatcaacgctctgctgcaggcagaggtgctgagtaggcagatcactgaacccgtgagcgggattaacggcgatatcagagccaagaaaattgcatctatcgctgacgtctgcgagtccatgaaggagcagctgctggtgctggtggaatgggccaaatacatccctgcattttgcgagctgccactggacgatcaggtcgctctgctgcgggcccacgcaggagaacatctgctgctgggcgctaccaagcgaagcatggtgttcaaggacgtgctgctgctggggaatgactatattgtccccaggcactgccctgagctggccgaaatgtcaagagtgagtatccgcatcctggatgagctggtgctgccattccaggaactgcagattgacgataacgagtacgcatacctgaaagctatcatctttttcgaccccgacgccaagggactgtctgatcctggcaaaattaagcggctgaggtcccaggtccaggtgagcctggaagactatatcaatgacagacagtacgatagccgagggcggtttggagagctgctgctgctgctgccaacactgcagtccattacctggcagatgatcgagcagatccagttcattaaactgttcggcatggcaaagatcgacaacctgctgcaggaaatgctgctgggagggtcaccctctgatgcccctcatgctcaccacccactgcatccccacctgatgcaggagcatatgggcactaatgtgatcgtcgcaaacacaatgcctacccacctgagtaatggacagatgtgtgaatggccacgccccaggggccaggccgcaactcctgagaccccacagcccagccctccagggggatccggctctgaaccctacaagctgctgcctggagctgtggcaacaattgtgaaaccactgagcgccatcccccagcctaccattactaagcaggaggtcatctgaggactagttataagactgactagcccgatgggcctcccaacgggccctcctcccctccttgcaccgagattaataaaaaaaaaaaaaaaaaaaaaaaaaaaaaaaaaaaaaaaaaaaaaaaaaaaaaaaaaaaaaaaatgcatcccccccccccccccccccccccccccccccaaaggctcttttcagagccaccagaatt

SEQ ID NO: 1929 - RNA, 1642 nt, synthetic construct
  misc_feature 1..1642: note = mRNA i-3 (A64-N5-C30-hSL-N5) (opt28) from Homo sapiens__NP_000448.3__HNF4A(1-474)(S167A)
  source 1..1642: mol_type = other RNA
aggagaaagcttaccatgcggctgagcaagaccctggtggacatggatatggcagactactccgccgctctggatccagcatatacaactctggagttcgaaaacgtccaggtgctgaccatgggaaatgacacatctccctcagagggcactaacctgaatgcccctaacagtctgggggtgagcgctctgtgcgcaatctgcggagacagggccaccggcaaacactacggggcttcctcttgtgatggatgcaagggctttttcagacgcagcgtccggaaaaatcatatgtactcatgccgatttagtaggcagtgcgtggtggacaaggacaagagaaaccagtgccgctattgtcggctgaaaaagtgcttcagggcaggaatgaaaaaggaagccgtccagaatgagagagatcgaatttccacacggcgcagctcttacgaagacagctccctgccatcaatcaacgctctgctgcaggcagaggtgctgagtaggcagatcactgcccccgtgagcgggattaacggcgatatcagagcaaagaaaattgcttctatcgccgacgtctgcgaatccatgaaggagcagctgctggtgctggtggagtgggcaaaatacatccctgctttttgcgaactgccactggacgatcaggtcgccctgctgcgggcacacgctggagagcatctgctgctgggcgccaccaagcgaagcatggtgttcaaggacgtgctgctgctggggaatgactatattgtccccaggcactgccctgaactggcagagatgtcaagagtgagtatccgcatcctggatgaactggtgctgccattccaggagctgcagattgacgataacgaatacgcttacctgaaagccatcatctttttcgaccccgacgcaaagggactgtctgatcctggcaaaattaagcggctgaggtcccaggtccaggtgagcctggaggactatatcaatgacagacagtacgatagccgagggcggtttggagaactgctgctgctgctgccaacactgcagtccattacctggcagatgatcgagcagatccagttcattaaactgttcggcatggccaagatcgacaacctgctgcaggagatgctgctgggagggtcaccctctgatgctcctcatgcacaccacccactgcatccccacctgatgcaggaacatatgggcactaatgtgatcgtcgccaacacaatgcctacccacctgagtaatggacagatgtgtgagtggccacgccccaggggccaggcagctactcctgaaaccccacagcccagccctccagggggatccggctctgagccctacaagctgctgcctggagcagtggccacaattgtgaaaccactgagcgctatcccccagcctaccattactaagcaggaagtcatctgaggactagttataagactgactagcccgatgggcctcccaacgggccctcctcccctccttgcaccgagattaataaaaaaaaaaaaaaaaaaaaaaaaaaaaaaaaaaaaaaaaaaaaaaaaaaaaaaaaaaaaaaaatgcatcccccccccccccccccccccccccccccccaaaggctcttttcagagccaccagaatt

SEQ ID NO: 1930 - RNA, 1642 nt, synthetic construct
  misc_feature 1..1642: note = mRNA i-3 (A64-N5-C30-hSL-N5) (opt28) from Homo sapiens__NP_000448.3__HNF4A(1-474)(S167A_S378A_T429A_T432A_ S436A)
  source 1..1642: mol_type = other RNA
aggagaaagcttaccatgcggctgagcaagaccctggtggacatggatatggcagactactccgccgctctggatccagcatatacaactctggagttcgaaaacgtccaggtgctgaccatgggaaatgacacatctccctcagagggcactaacctgaatgcccctaacagtctgggggtgagcgctctgtgcgcaatctgcggagacagggccaccggcaaacactacggggcttcctcttgtgatggatgcaagggctttttcagacgcagcgtccggaaaaatcatatgtactcatgccgatttagtaggcagtgcgtggtggacaaggacaagagaaaccagtgccgctattgtcggctgaaaaagtgcttcagggcaggaatgaaaaaggaagccgtccagaatgagagagatcgaatttccacacggcgcagctcttacgaagacagctccctgccatcaatcaacgctctgctgcaggcagaggtgctgagtaggcagatcactgcccccgtgagcgggattaacggcgatatcagagcaaagaaaattgcttctatcgccgacgtctgcgaatccatgaaggagcagctgctggtgctggtggagtgggcaaaatacatccctgctttttgcgaactgccactggacgatcaggtcgccctgctgcgggcacacgctggagagcatctgctgctgggcgccaccaagcgaagcatggtgttcaaggacgtgctgctgctggggaatgactatattgtccccaggcactgccctgaactggcagagatgtcaagagtgagtatccgcatcctggatgaactggtgctgccattccaggagctgcagattgacgataacgaatacgcttacctgaaagccatcatctttttcgaccccgacgcaaagggactgtctgatcctggcaaaattaagcggctgaggtcccaggtccaggtgagcctggaggactatatcaatgacagacagtacgatagccgagggcggtttggagaactgctgctgctgctgccaacactgcagtccattacctggcagatgatcgagcagatccagttcattaaactgttcggcatggccaagatcgacaacctgctgcaggagatgctgctgggaggggctccctcagatgcacctcatgcccaccacccactgcatccccacctgatgcaggaacatatgggcactaatgtgatcgtcgcaaacacaatgcctacccacctgtctaatggacagatgtgtgagtggccacgccccaggggccaggctgcagcccctgaagctccacagcccgcacctccagggggaagtggcagcgagccctacaagctgctgcctggagccgtggctactattgtgaaaccactgtccgcaatcccccagcctaccattacaaagcaggaagtcatctgaggactagttataagactgactagcccgatgggcctcccaacgggccctcctcccctccttgcaccgagattaataaaaaaaaaaaaaaaaaaaaaaaaaaaaaaaaaaaaaaaaaaaaaaaaaaaaaaaaaaaaaaaatgcatcccccccccccccccccccccccccccccccaaaggctcttttcagagccaccagaatt

SEQ ID NO: 1931 - RNA, 1642 nt, synthetic construct
  misc_feature 1..1642: note = mRNA i-3 (A64-N5-C30-hSL-N5) (opt28) from Homo sapiens__NP_000448.3__HNF4A(1-474)(S167E_S378E_T429E_T432E_ S436E)
  source 1..1642: mol_type = other RNA
aggagaaagcttaccatgcggctgagcaagaccctggtggacatggatatggcagactactccgccgctctggatccagcatatacaactctggagttcgaaaacgtccaggtgctgaccatgggaaatgacacatctccctcagagggcactaacctgaatgcccctaacagtctgggggtgagcgctctgtgcgcaatctgcggagacagggccaccggcaaacactacggggcttcctcttgtgatggatgcaagggctttttcagacgcagcgtccggaaaaatcatatgtactcatgccgatttagtaggcagtgcgtggtggacaaggacaagagaaaccagtgccgctattgtcggctgaaaaagtgcttcagggcaggaatgaaaaaggaagccgtccagaatgagagagatcgaatttccacacggcgcagctcttacgaagacagctccctgccatcaatcaacgctctgctgcaggcagaggtgctgagtaggcagatcactgaacccgtgagcgggattaacggcgatatcagagccaagaaaattgcatctatcgctgacgtctgcgagtccatgaaggagcagctgctggtgctggtggaatgggccaaatacatccctgcattttgcgagctgccactggacgatcaggtcgctctgctgcgggcccacgcaggagaacatctgctgctgggcgctaccaagcgaagcatggtgttcaaggacgtgctgctgctggggaatgactatattgtccccaggcactgccctgagctggccgaaatgtcaagagtgagtatccgcatcctggatgagctggtgctgccattccaggaactgcagattgacgataacgagtacgcatacctgaaagctatcatctttttcgaccccgacgccaagggactgtctgatcctggcaaaattaagcggctgaggtcccaggtccaggtgagcctggaagactatatcaatgacagacagtacgatagccgagggcggtttggagagctgctgctgctgctgccaacactgcagtccattacctggcagatgatcgagcagatccagttcattaaactgttcggcatggcaaagatcgacaacctgctgcaggaaatgctgctgggaggggagccctcagatgcccctcatgctcaccacccactgcatccccacctgatgcaggaacatatgggcactaatgtgatcgtcgcaaacacaatgcctacccacctgtctaatggacagatgtgtgagtggccacgccccaggggccaggccgcagaacctgaggaaccacagcccgagcctccagggggaagtggcagcgagccctacaagctgctgcctggagctgtggcaactattgtgaaaccactgtccgccatcccccagcctaccattacaaagcaggaagtcatctgaggactagttataagactgactagcccgatgggcctcccaacgggccctcctcccctccttgcaccgagattaataaaaaaaaaaaaaaaaaaaaaaaaaaaaaaaaaaaaaaaaaaaaaaaaaaaaaaaaaaaaaaaatgcatcccccccccccccccccccccccccccccccaaaggctcttttcagagccaccagaatt

SEQ ID NO: 1932 - RNA, 1642 nt, synthetic construct
  misc_feature 1..1642: note = mRNA i-3 (A64-N5-C30-hSL-N5) (opt28) from Homo sapiens__NP_000448.3__HNF4A(1-474)(S87A)
  source 1..1642: mol_type = other RNA
aggagaaagcttaccatgcggctgagcaagaccctggtggacatggatatggcagactactccgccgctctggatccagcatatacaactctggagttcgaaaacgtccaggtgctgaccatgggaaatgacacatctccctcagagggcactaacctgaatgcccctaacagtctgggggtgagcgctctgtgcgcaatctgcggagacagggccaccggcaaacactacggggcttcctcttgtgatggatgcaagggctttttcagacgcgcagtccggaaaaatcatatgtacagctgccgattttcaaggcagtgcgtggtggacaaggacaagagaaaccagtgccgctattgtcggctgaaaaagtgcttcagggccggaatgaaaaaggaagctgtccagaatgagagagatcgaattagtacacggcgctccagctacgaagactctagcctgccatccatcaacgcactgctgcaggccgaggtgctgtcaaggcagatcaccagtcccgtgagcgggattaacggcgatatcagagcaaagaaaattgcttctatcgccgacgtctgcgaatccatgaaggagcagctgctggtgctggtggagtgggcaaaatacatccctgctttttgcgaactgccactggacgatcaggtcgccctgctgcgggcacacgctggagagcatctgctgctgggcgccactaagcgaagcatggtgttcaaggacgtgctgctgctggggaatgactatattgtccccaggcactgccctgaactggcagagatgtcaagagtgagtatccgcatcctggatgaactggtgctgccattccaggagctgcagattgacgataacgaatacgcttacctgaaagccatcatctttttcgaccccgacgcaaagggactgtctgatcctggcaaaattaagcggctgaggtcccaggtccaggtgagcctggaggactatatcaatgacagacagtacgatagccgagggcggtttggagaactgctgctgctgctgccaacactgcagtccattacctggcagatgatcgagcagatccagttcattaaactgttcggcatggccaagatcgacaacctgctgcaggagatgctgctgggagggtcaccctctgatgctcctcatgcacaccacccactgcatccccacctgatgcaggaacatatgggcactaatgtgatcgtcgccaacacaatgcctacccacctgagtaatggacagatgtgtgagtggccacgccccaggggccaggcagctactcctgaaaccccacagcccagccctccagggggatccggctctgagccctacaagctgctgcctggagcagtggccacaattgtgaaaccactgagcgctatcccccagcctaccattactaagcaggaagtcatctgaggactagttataagactgactagcccgatgggcctcccaacgggccctcctcccctccttgcaccgagattaataaaaaaaaaaaaaaaaaaaaaaaaaaaaaaaaaaaaaaaaaaaaaaaaaaaaaaaaaaaaaaaatgcatcccccccccccccccccccccccccccccccaaaggctcttttcagagccaccagaatt

SEQ ID NO: 1933 - RNA, 1642 nt, synthetic construct
  misc_feature 1..1642: note = mRNA i-3 (A64-N5-C30-hSL-N5) (opt28) from Homo sapiens__NP_000448.3__HNF4A(1-474)(S87E)
  source 1..1642: mol_type = other RNA
aggagaaagcttaccatgcggctgagcaagaccctggtggacatggatatggcagactactccgccgctctggatccagcatatacaactctggagttcgaaaacgtccaggtgctgaccatgggaaatgacacatctccctcagagggcactaacctgaatgcccctaacagtctgggggtgagcgctctgtgcgcaatctgcggagacagggccaccggcaaacactacggggcttcctcttgtgatggatgcaagggctttttcagacgcgaagtccggaaaaatcatatgtacagctgccgattttcaaggcagtgcgtggtggacaaggacaagagaaaccagtgccgctattgtcggctgaaaaagtgcttcagggcaggaatgaaaaaggaggccgtccagaatgaaagagatcgaattagtacacggcgctccagctacgaggactctagcctgccatccatcaacgctctgctgcaggcagaagtgctgtcaaggcagatcaccagtcccgtgagcgggattaacggcgatatcagagccaagaaaattgcatctatcgctgacgtctgcgagtccatgaaggagcagctgctggtgctggtggaatgggccaaatacatccctgcattttgcgagctgccactggacgatcaggtcgctctgctgcgggcccacgcaggagaacatctgctgctgggcgctactaagcgaagcatggtgttcaaggacgtgctgctgctggggaatgactatattgtccccaggcactgccctgagctggccgaaatgtcaagagtgagtatccgcatcctggatgagctggtgctgccattccaggaactgcagattgacgataacgagtacgcatacctgaaagctatcatctttttcgaccccgacgccaagggactgtctgatcctggcaaaattaagcggctgaggtcccaggtccaggtgagcctggaagactatatcaatgacagacagtacgatagccgagggcggtttggagagctgctgctgctgctgccaacactgcagtccattacctggcagatgatcgagcagatccagttcattaaactgttcggcatggcaaagatcgacaacctgctgcaggaaatgctgctgggagggtcaccctctgatgcccctcatgctcaccacccactgcatccccacctgatgcaggagcatatgggcactaatgtgatcgtcgcaaacacaatgcctacccacctgagtaatggacagatgtgtgaatggccacgccccaggggccaggccgcaactcctgagaccccacagcccagccctccagggggatccggctctgaaccctacaagctgctgcctggagctgtggcaacaattgtgaaaccactgagcgccatcccccagcctaccattactaagcaggaggtcatctgaggactagttataagactgactagcccgatgggcctcccaacgggccctcctcccctccttgcaccgagattaataaaaaaaaaaaaaaaaaaaaaaaaaaaaaaaaaaaaaaaaaaaaaaaaaaaaaaaaaaaaaaaatgcatcccccccccccccccccccccccccccccccaaaggctcttttcagagccaccagaatt

SEQ ID NO: 1934 - RNA, 1642 nt, synthetic construct
  misc_feature 1..1642: note = mRNA i-3 (A64-N5-C30-hSL-N5) (opt28) from Homo sapiens__NP_000448.3__HNF4A(1-474)(R2V)
  source 1..1642: mol_type = other RNA
aggagaaagcttaccatggtgctgagcaagaccctggtcgacatggatatggcagactactccgccgctctggatccagcatatacaactctggagttcgaaaacgtccaggtgctgaccatgggaaatgacacatctccctcagagggcactaacctgaatgcccctaacagtctgggggtgagcgctctgtgcgcaatctgcggagaccgggccaccggcaaacactacggggcttcctcttgtgatggatgcaagggctttttcaggagaagcgtgcgcaaaaatcatatgtactcatgccgatttagtcggcagtgcgtggtcgacaaggacaagaggaaccagtgcagatattgtcgcctgaaaaagtgcttccgggcaggaatgaaaaaggaagccgtgcagaatgagagggatagaatttccacacgacggagctcttacgaagacagctccctgccatcaatcaacgctctgctgcaggcagaggtgctgagtcgccagatcactagccccgtctctgggattaacggcgatatcagggccaagaaaattgcatccatcgctgacgtgtgcgaaagcatgaaggagcagctgctggtgctggtcgagtgggccaaatacatccctgcattttgcgaactgccactggacgatcaggtggctctgctgagagcccacgcaggagagcatctgctgctgggcgctaccaagcggtcaatggtgttcaaggacgtcctgctgctggggaatgactatattgtgccccgacactgccctgaactggccgagatgagtagggtgtctatcagaatcctggatgaactggtcctgccattccaggagctgcagattgacgataacgaatacgcatacctgaaagctatcatctttttcgaccccgacgccaagggactgtccgatcctggcaaaattaagcgcctgcggagccaggtccaggtgagcctggaggactatatcaatgacaggcagtacgattccagagggcgatttggagaactgctgctgctgctgccaacactgcagtcaattacctggcagatgatcgagcagatccagttcattaaactgttcggcatggcaaagatcgacaacctgctgcaggagatgctgctgggagggtctcccagtgatgcccctcatgctcaccacccactgcatccccacctgatgcaggaacatatgggcactaatgtgatcgtggcaaacacaatgcctacccacctgagcaatggacagatgtgtgagtggccacggccccgcggccaggccgcaactcctgaaaccccacagccctcccctccagggggatctggcagcgagccctacaagctgctgcctggagctgtggcaacaattgtcaaaccactgtcagccatcccccagcctaccattactaagcaggaagtgatctgaggactagttataagactgactagcccgatgggcctcccaacgggccctcctcccctccttgcaccgagattaataaaaaaaaaaaaaaaaaaaaaaaaaaaaaaaaaaaaaaaaaaaaaaaaaaaaaaaaaaaaaaaatgcatcccccccccccccccccccccccccccccccaaaggctcttttcagagccaccagaatt

SEQ ID NO: 1935 - RNA, 1642 nt, synthetic construct
  misc_feature 1..1642: note = mRNA i-3 (A64-N5-C30-hSL-N5) (opt28) from Homo sapiens__NP_000448.3__HNF4A(1-474)(R2V_K5V)
  source 1..1642: mol_type = other RNA
aggagaaagcttaccatggtgctgagcgtcaccctggtggacatggatatggcagactactccgccgctctggatccagcatatacaactctggagttcgaaaacgtgcaggtcctgaccatgggaaatgacacatctccctcagagggcactaacctgaatgcccctaacagtctgggggtgagcgctctgtgcgcaatctgcggagaccgggccaccggcaagcactacggggcttcctcttgtgatggatgcaaaggctttttcaggagaagcgtgcgcaagaatcatatgtactcatgccgatttagtcggcagtgcgtcgtggacaaagacaagaggaaccagtgcagatattgtcgcctgaagaaatgcttccgggcaggaatgaagaaagaagccgtgcagaatgagagggatagaatttccacacgacggagctcttacgaagacagctccctgccatcaatcaacgctctgctgcaggcagaggtcctgagtcgccagatcactagccccgtgtctgggattaacggcgatatcagggccaagaagattgcatccatcgctgacgtgtgcgaaagcatgaaagagcagctgctggtcctggtggagtgggccaagtacatccctgcattttgcgaactgccactggacgatcaggtggctctgctgagagcccacgcaggagagcatctgctgctgggcgctaccaaacggtcaatggtcttcaaggacgtgctgctgctggggaatgactatattgtgccccgacactgccctgaactggccgagatgagtagggtctctatcagaatcctggatgaactggtgctgccattccaggagctgcagattgacgataacgaatacgcatacctgaaggctatcatctttttcgaccccgacgccaaaggactgtccgatcctggcaagattaaacgcctgcggagccaggtgcaggtcagcctggaggactatatcaatgacaggcagtacgattccagagggcgatttggagaactgctgctgctgctgccaacactgcagtcaattacctggcagatgatcgagcagatccagttcattaagctgttcggcatggcaaaaatcgacaacctgctgcaggagatgctgctgggagggtctcccagtgatgcccctcatgctcaccacccactgcatccccacctgatgcaggaacatatgggcactaatgtgatcgtggcaaacacaatgcctacccacctgagcaatggacagatgtgtgagtggccacggccccgcggccaggccgcaactcctgaaaccccacagccctcccctccagggggatctggcagcgagccctacaagctgctgcctggagctgtcgcaacaattgtgaagccactgtcagccatcccccagcctaccattactaaacaggaagtcatctgaggactagttataagactgactagcccgatgggcctcccaacgggccctcctcccctccttgcaccgagattaataaaaaaaaaaaaaaaaaaaaaaaaaaaaaaaaaaaaaaaaaaaaaaaaaaaaaaaaaaaaaaaatgcatcccccccccccccccccccccccccccccccaaaggctcttttcagagccaccagaatt

SEQ ID NO: 1936 - RNA, 1642 nt, synthetic construct
  misc_feature 1..1642: note = mRNA i-3 (A64-N5-C30-hSL-N5) (opt28) from Homo sapiens__NP_000448.3__HNF4A(1-474)(K179R_K180R)
  source 1..1642: mol_type = other RNA
aggagaaagcttaccatgcggctgagcaagaccctggtggacatggatatggcagactactccgccgctctggatccagcatatacaactctggagttcgaaaacgtccaggtgctgaccatgggaaatgacacatctccctcagagggcactaacctgaatgcccctaacagtctgggggtgagcgctctgtgcgcaatctgcggagacagggccaccggcaaacactacggggcttcctcttgtgatggatgcaagggctttttcagacgcagcgtccggaaaaatcatatgtactcatgccgatttagtaggcagtgcgtggtggacaaggacaagagaaaccagtgccgctattgtcggctgaaaaagtgcttcagggcaggaatgaaaaaggaagccgtccagaatgagagagatcgaatttccacacggcgcagctcttacgaagacagctccctgccatcaatcaacgctctgctgcaggcagaggtgctgagtaggcagatcactagccccgtgtctgggattaacggcgatatcagagcccggcgaattgcatccatcgctgacgtctgcgaaagcatgaaggagcagctgctggtgctggtggagtgggccaaatacatccctgcattttgcgaactgccactggacgatcaggtcgctctgctgagggcccacgcaggagagcatctgctgctgggcgctaccaagagatcaatggtgttcaaagacgtgctgctgctggggaatgactatattgtcccccgccactgccctgaactggccgagatgagtcgggtgtctatcaggatcctggatgaactggtgctgccattccaggagctgcagattgacgataacgaatacgcatacctgaaggctatcatctttttcgaccccgacgccaagggactgtccgatcctggcaaaattaagagactgcgaagccaggtccaggtgagcctggaggactatatcaatgaccggcagtacgattcccgcgggaggtttggagaactgctgctgctgctgccaacactgcagtcaattacctggcagatgatcgagcagatccagttcattaaactgttcggcatggcaaagatcgacaacctgctgcaggagatgctgctgggagggtctcccagtgatgcccctcatgctcaccacccactgcatccccacctgatgcaggaacatatgggcactaatgtgatcgtcgcaaacacaatgcctacccacctgagcaatggacagatgtgtgagtggccaagaccccggggccaggccgcaactcctgaaaccccacagccctcccctccagggggatctggcagcgagccctacaaactgctgcctggagctgtggcaacaattgtgaagccactgtcagccatcccccagcctaccattactaagcaggaagtcatctgaggactagttataagactgactagcccgatgggcctcccaacgggccctcctcccctccttgcaccgagattaataaaaaaaaaaaaaaaaaaaaaaaaaaaaaaaaaaaaaaaaaaaaaaaaaaaaaaaaaaaaaaaatgcatcccccccccccccccccccccccccccccccaaaggctcttttcagagccaccagaatt

SEQ ID NO: 1937 - RNA, 1642 nt, synthetic construct
  misc_feature 1..1642: note = mRNA i-3 (A64-N5-C30-hSL-N5) (opt28) from Homo sapiens__NP_000448.3__HNF4A(1-474)(K234R)
  source 1..1642: mol_type = other RNA
aggagaaagcttaccatgcggctgagcaagaccctggtggacatggatatggcagactactccgccgctctggatccagcatatacaactctggagttcgaaaacgtccaggtgctgaccatgggaaatgacacatctccctcagagggcactaacctgaatgcccctaacagtctgggggtgagcgctctgtgcgcaatctgcggagacagggccaccggcaaacactacggggcttcctcttgtgatggatgcaagggctttttcagacgcagcgtccggaaaaatcatatgtactcatgccgatttagtaggcagtgcgtggtggacaaggacaagagaaaccagtgccgctattgtcggctgaaaaagtgcttcagggcaggaatgaaaaaggaagccgtccagaatgagagagatcgaatttccacacggcgcagctcttacgaagacagctccctgccatcaatcaacgctctgctgcaggcagaggtgctgagtaggcagatcactagccccgtgtctgggattaacggcgatatcagagccaagaaaattgcatccatcgctgacgtctgcgaaagcatgaaggagcagctgctggtgctggtggagtgggccaaatacatccctgcattttgcgaactgccactggacgatcaggtcgctctgctgcgggcccacgcaggagagcatctgctgctgggcgctacccgaaggtcaatggtgttcaaggacgtgctgctgctggggaatgactatattgtccccagacactgccctgaactggccgagatgagtcgcgtgtctatccggatcctggatgaactggtgctgccattccaggagctgcagattgacgataacgaatacgcatacctgaaggctatcatctttttcgaccccgacgccaaaggactgtccgatcctggcaagattaaaaggctgagaagccaggtccaggtgagcctggaggactatatcaatgaccgacagtacgattcccgggggcgctttggagaactgctgctgctgctgccaacactgcagtcaattacctggcagatgatcgagcagatccagttcattaagctgttcggcatggcaaaaatcgacaacctgctgcaggagatgctgctgggagggtctcccagtgatgcccctcatgctcaccacccactgcatccccacctgatgcaggaacatatgggcactaatgtgatcgtcgcaaacacaatgcctacccacctgagcaatggacagatgtgtgagtggccaaggcccagaggccaggccgcaactcctgaaaccccacagccctcccctccagggggatctggcagcgagccctacaagctgctgcctggagctgtggcaacaattgtgaagccactgtcagccatcccccagcctaccattactaaacaggaagtcatctgaggactagttataagactgactagcccgatgggcctcccaacgggccctcctcccctccttgcaccgagattaataaaaaaaaaaaaaaaaaaaaaaaaaaaaaaaaaaaaaaaaaaaaaaaaaaaaaaaaaaaaaaaatgcatcccccccccccccccccccccccccccccccaaaggctcttttcagagccaccagaatt

SEQ ID NO: 1938 - RNA, 1642 nt, synthetic construct
  misc_feature 1..1642: note = mRNA i-3 (A64-N5-C30-hSL-N5) (opt28) from Homo sapiens__NP_000448.3__HNF4A(1-474)(K300R)
  source 1..1642: mol_type = other RNA
aggagaaagcttaccatgcggctgagcaagaccctggtggacatggatatggcagactactccgccgctctggatccagcatatacaactctggagttcgaaaacgtccaggtgctgaccatgggaaatgacacatctccctcagagggcactaacctgaatgcccctaacagtctgggggtgagcgctctgtgcgcaatctgcggagacagggccaccggcaaacactacggggcttcctcttgtgatggatgcaagggctttttcagacgcagcgtccggaaaaatcatatgtactcatgccgatttagtaggcagtgcgtggtggacaaggacaagagaaaccagtgccgctattgtcggctgaaaaagtgcttcagggcaggaatgaaaaaggaagccgtccagaatgagagagatcgaatttccacacggcgcagctcttacgaagacagctccctgccatcaatcaacgctctgctgcaggcagaggtgctgagtaggcagatcactagccccgtgtctgggattaacggcgatatcagagccaagaaaattgcatccatcgctgacgtctgcgaaagcatgaaggagcagctgctggtgctggtggagtgggccaaatacatccctgcattttgcgaactgccactggacgatcaggtcgctctgctgcgggcccacgcaggagagcatctgctgctgggcgctaccaagcgatcaatggtgttcaaggacgtgctgctgctggggaatgactatattgtccccaggcactgccctgaactggccgagatgagtagagtgtctatccgcatcctggatgaactggtgctgccattccaggagctgcagattgacgataacgaatacgcatacctgaaagctatcatctttttcgaccccgacgcccggggactgtccgatcctggcaagattaaaaggctgagaagccaggtccaggtgagcctggaggactatatcaatgaccgacagtacgattcccgggggcgctttggagaactgctgctgctgctgccaacactgcagtcaattacctggcagatgatcgagcagatccagttcattaagctgttcggcatggcaaaaatcgacaacctgctgcaggagatgctgctgggagggtctcccagtgatgcccctcatgctcaccacccactgcatccccacctgatgcaggaacatatgggcactaatgtgatcgtcgcaaacacaatgcctacccacctgagcaatggacagatgtgtgagtggccaaggcccagaggccaggccgcaactcctgaaaccccacagccctcccctccagggggatctggcagcgagccctacaagctgctgcctggagctgtggcaacaattgtgaagccactgtcagccatcccccagcctaccattactaaacaggaagtcatctgaggactagttataagactgactagcccgatgggcctcccaacgggccctcctcccctccttgcaccgagattaataaaaaaaaaaaaaaaaaaaaaaaaaaaaaaaaaaaaaaaaaaaaaaaaaaaaaaaaaaaaaaaatgcatcccccccccccccccccccccccccccccccaaaggctcttttcagagccaccagaatt

SEQ ID NO: 1939 - RNA, 1642 nt, synthetic construct
  misc_feature 1..1642: note = mRNA i-3 (A64-N5-C30-hSL-N5) (opt28) from Homo sapiens__NP_000448.3__HNF4A(1-474)(K300R_K307R_K309R)
  source 1..1642: mol_type = other RNA
aggagaaagcttaccatgcggctgagcaagaccctggtggacatggatatggcagactactccgccgctctggatccagcatatacaactctggagttcgaaaacgtccaggtgctgaccatgggaaatgacacatctccctcagagggcactaacctgaatgcccctaacagtctgggggtgagcgctctgtgcgcaatctgcggagacagggccaccggcaaacactacggggcttcctcttgtgatggatgcaagggctttttcagacgcagcgtccggaaaaatcatatgtactcatgccgatttagtaggcagtgcgtggtggacaaggacaagagaaaccagtgccgctattgtcggctgaaaaagtgcttcagggcaggaatgaaaaaggaagccgtccagaatgagagagatcgaatttccacacggcgcagctcttacgaagacagctccctgccatcaatcaacgctctgctgcaggcagaggtgctgagtaggcagatcactagccccgtgtctgggattaacggcgatatcagagccaagaaaattgcatccatcgctgacgtctgcgaaagcatgaaggagcagctgctggtgctggtggagtgggccaaatacatccctgcattttgcgaactgccactggacgatcaggtcgctctgctgcgggcccacgcaggagagcatctgctgctgggcgctaccaagcgatcaatggtgttcaaggacgtgctgctgctggggaatgactatattgtccccaggcactgccctgaactggccgagatgagtagagtgtctatccgcatcctggatgaactggtgctgccattccaggagctgcagattgacgataacgaatacgcatacctgaaagctatcatctttttcgaccccgacgcccggggactgtccgatcctggcaggattagacgactgcggagccaggtccaggtgagcctggaggactatatcaatgaccgccagtacgattccagggggagatttggagaactgctgctgctgctgccaacactgcagtcaattacctggcagatgatcgagcagatccagttcattaagctgttcggcatggcaaaaatcgacaacctgctgcaggagatgctgctgggagggtctcccagtgatgcccctcatgctcaccacccactgcatccccacctgatgcaggaacatatgggcactaatgtgatcgtcgcaaacacaatgcctacccacctgagcaatggacagatgtgtgagtggccacggccccgcggccaggccgcaactcctgaaaccccacagccctcccctccagggggatctggcagcgagccctacaagctgctgcctggagctgtggcaacaattgtgaaaccactgtcagccatcccccagcctaccattactaagcaggaagtcatctgaggactagttataagactgactagcccgatgggcctcccaacgggccctcctcccctccttgcaccgagattaataaaaaaaaaaaaaaaaaaaaaaaaaaaaaaaaaaaaaaaaaaaaaaaaaaaaaaaaaaaaaaaatgcatcccccccccccccccccccccccccccccccaaaggctcttttcagagccaccagaatt

SEQ ID NO: 1940 - RNA, 1642 nt, synthetic construct
  misc_feature 1..1642: note = mRNA i-3 (A64-N5-C30-hSL-N5) (opt28) from Homo sapiens__NP_000448.3__HNF4A(1-474)(K447R_K470R)
  source 1..1642: mol_type = other RNA
aggagaaagcttaccatgcggctgagcaagaccctggtggacatggatatggcagactactccgccgctctggatccagcatatacaactctggagttcgaaaacgtccaggtgctgaccatgggaaatgacacatctccctcagagggcactaacctgaatgcccctaacagtctgggggtgagcgctctgtgcgcaatctgcggagacagggccaccggcaaacactacggggcttcctcttgtgatggatgcaagggctttttcagacgcagcgtccggaaaaatcatatgtactcatgccgatttagtaggcagtgcgtggtggacaaggacaagagaaaccagtgccgctattgtcggctgaaaaagtgcttcagggcaggaatgaaaaaggaagccgtccagaatgagagagatcgaatttccacacggcgcagctcttacgaagacagctccctgccatcaatcaacgctctgctgcaggcagaggtgctgagtaggcagatcactagccccgtgtctgggattaacggcgatatcagagccaagaaaattgcatccatcgctgacgtctgcgaaagcatgaaggagcagctgctggtgctggtggagtgggccaaatacatccctgcattttgcgaactgccactggacgatcaggtcgctctgctgcgggcccacgcaggagagcatctgctgctgggcgctaccaagcgatcaatggtgttcaaggacgtgctgctgctggggaatgactatattgtccccaggcactgccctgaactggccgagatgagtagagtgtctatccgcatcctggatgaactggtgctgccattccaggagctgcagattgacgataacgaatacgcatacctgaaagctatcatctttttcgaccccgacgccaagggactgtccgatcctggcaaaattaagcggctgaggagccaggtccaggtgagcctggaggactatatcaatgacagacagtacgattcccgagggcggtttggagaactgctgctgctgctgccaacactgcagtcaattacctggcagatgatcgagcagatccagttcattaaactgttcggcatggcaaagatcgacaacctgctgcaggagatgctgctgggagggtctcccagtgatgcccctcatgctcaccacccactgcatccccacctgatgcaggaacatatgggcactaatgtgatcgtcgcaaacacaatgcctacccacctgagcaatggacagatgtgtgagtggccacgccccaggggccaggccgcaactcctgaaaccccacagccctcccctccagggggatctggcagcgagccctacagactgctgcctggagctgtggcaacaattgtgaagccactgtcagccatcccccagcctaccattactcggcaggaagtcatctgaggactagttataagactgactagcccgatgggcctcccaacgggccctcctcccctccttgcaccgagattaataaaaaaaaaaaaaaaaaaaaaaaaaaaaaaaaaaaaaaaaaaaaaaaaaaaaaaaaaaaaaaaatgcatcccccccccccccccccccccccccccccccaaaggctcttttcagagccaccagaatt

SEQ ID NO: 1941 - RNA, 1642 nt, synthetic construct
  misc_feature 1..1642: note = mRNA i-3 (A64-N5-C30-hSL-N5) (opt28) from Homo sapiens__NP_000448.3__HNF4A(1-474)(K458R)
  source 1..1642: mol_type = other RNA
aggagaaagcttaccatgcggctgagcaagaccctggtggacatggatatggcagactactccgccgctctggatccagcatatacaactctggagttcgaaaacgtccaggtgctgaccatgggaaatgacacatctccctcagagggcactaacctgaatgcccctaacagtctgggggtgagcgctctgtgcgcaatctgcggagacagggccaccggcaaacactacggggcttcctcttgtgatggatgcaagggctttttcagacgcagcgtccggaaaaatcatatgtactcatgccgatttagtaggcagtgcgtggtggacaaggacaagagaaaccagtgccgctattgtcggctgaaaaagtgcttcagggcaggaatgaaaaaggaagccgtccagaatgagagagatcgaatttccacacggcgcagctcttacgaagacagctccctgccatcaatcaacgctctgctgcaggcagaggtgctgagtaggcagatcactagccccgtgtctgggattaacggcgatatcagagccaagaaaattgcatccatcgctgacgtctgcgaaagcatgaaggagcagctgctggtgctggtggagtgggccaaatacatccctgcattttgcgaactgccactggacgatcaggtcgctctgctgcgggcccacgcaggagagcatctgctgctgggcgctaccaagcgatcaatggtgttcaaggacgtgctgctgctggggaatgactatattgtccccaggcactgccctgaactggccgagatgagtagagtgtctatccgcatcctggatgaactggtgctgccattccaggagctgcagattgacgataacgaatacgcatacctgaaagctatcatctttttcgaccccgacgccaagggactgtccgatcctggcaaaattaagcggctgaggagccaggtccaggtgagcctggaggactatatcaatgacagacagtacgattcccgagggcggtttggagaactgctgctgctgctgccaacactgcagtcaattacctggcagatgatcgagcagatccagttcattaaactgttcggcatggcaaagatcgacaacctgctgcaggagatgctgctgggagggtctcccagtgatgcccctcatgctcaccacccactgcatccccacctgatgcaggaacatatgggcactaatgtgatcgtcgcaaacacaatgcctacccacctgagcaatggacagatgtgtgagtggccacgccccaggggccaggccgcaactcctgaaaccccacagccctcccctccagggggatctggcagcgagccctacaagctgctgcctggagctgtggcaacaattgtgagaccactgtcagccatcccccagcctaccattactaaacaggaagtcatctgaggactagttataagactgactagcccgatgggcctcccaacgggccctcctcccctccttgcaccgagattaataaaaaaaaaaaaaaaaaaaaaaaaaaaaaaaaaaaaaaaaaaaaaaaaaaaaaaaaaaaaaaaatgcatcccccccccccccccccccccccccccccccaaaggctcttttcagagccaccagaatt

SEQ ID NO: 1942 - RNA, 1642 nt, synthetic construct
  misc_feature 1..1642: note = mRNA i-3 (A64-N5-C30-hSL-N5) (opt28) from Homo sapiens__NP_000448.3__HNF4A(1-474)(K106R_K108R_K126R_K127R)
  source 1..1642: mol_type = other RNA
aggagaaagcttaccatgcggctgagcaagaccctggtggacatggatatggcagactactccgccgctctggatccagcatatacaactctggagttcgaaaacgtccaggtgctgaccatgggaaatgacacatctccctcagagggcactaacctgaatgcccctaacagtctgggggtgagcgctctgtgcgcaatctgcggagacagggccaccggcaaacactacggggcttcctcttgtgatggatgcaagggctttttcagacgcagcgtccggaaaaatcatatgtactcatgccgatttagtaggcagtgcgtggtggacagagaccgccggaaccagtgcaggtattgtagactgaagaagtgcttccgagcaggaatgcggcgcgaagccgtccagaatgagagggatagaatttccacacggcgaagctcttacgaagacagctccctgccatcaatcaacgctctgctgcaggcagaggtgctgagtaggcagatcactagccccgtgtctgggattaacggcgatatcagagccaaaaagattgcatccatcgctgacgtctgcgaaagcatgaaagagcagctgctggtgctggtggagtgggccaagtacatccctgcattttgcgaactgccactggacgatcaggtcgctctgctgcgcgcccacgcaggagagcatctgctgctgggcgctaccaagcggtcaatggtgttcaaagacgtgctgctgctggggaatgactatattgtccccaggcactgccctgaactggccgagatgagtagagtgtctatccgaatcctggatgaactggtgctgccattccaggagctgcagattgacgataacgaatacgcatacctgaaggctatcatctttttcgaccccgacgccaaaggactgtccgatcctggcaagattaagcggctgcgcagccaggtccaggtgagcctggaggactatatcaatgacaggcagtacgattccagagggcggtttggagaactgctgctgctgctgccaacactgcagtcaattacctggcagatgatcgagcagatccagttcattaaactgttcggcatggcaaagatcgacaacctgctgcaggagatgctgctgggagggtctcccagtgatgcccctcatgctcaccacccactgcatccccacctgatgcaggaacatatgggcactaatgtgatcgtcgcaaacacaatgcctacccacctgagcaatggacagatgtgtgagtggccacgccccaggggccaggccgcaactcctgaaaccccacagccctcccctccagggggatctggcagcgagccctacaaactgctgcctggagctgtggcaacaattgtgaagccactgtcagccatcccccagcctaccattactaaacaggaagtcatctgaggactagttataagactgactagcccgatgggcctcccaacgggccctcctcccctccttgcaccgagattaataaaaaaaaaaaaaaaaaaaaaaaaaaaaaaaaaaaaaaaaaaaaaaaaaaaaaaaaaaaaaaaatgcatcccccccccccccccccccccccccccccccaaaggctcttttcagagccaccagaatt

SEQ ID NO: 1943 - RNA, 1642 nt, synthetic construct
  misc_feature 1..1642: note = mRNA i-3 (A64-N5-C30-hSL-N5) (opt28) from Homo sapiens__NP_000448.3__HNF4A(1-474)(E285Q)
  source 1..1642: mol_type = other RNA
aggagaaagcttaccatgcggctgagcaagaccctggtggacatggatatggcagactactccgccgctctggatccagcatatacaactctggagttcgaaaacgtccaggtgctgaccatgggaaatgacacatctccctcagagggcactaacctgaatgcccctaacagtctgggggtgagcgctctgtgcgcaatctgcggagacagggccaccggcaaacactacggggcttcctcttgtgatggatgcaagggctttttcagacgcagcgtccggaaaaatcatatgtactcatgccgatttagtaggcagtgcgtggtggacaaggacaagagaaaccagtgccgctattgtcggctgaaaaagtgcttcagggcaggaatgaaaaaggaagccgtccagaatgagagagatcgaatttccacacggcgcagctcttacgaagacagctccctgccatcaatcaacgctctgctgcaggcagaggtgctgagtaggcagatcactagccccgtgtctgggattaacggcgatatcagagccaagaaaattgcatccatcgctgacgtctgcgaaagcatgaaggagcagctgctggtgctggtggagtgggccaaatacatccctgcattttgcgaactgccactggacgatcaggtcgctctgctgcgggcccacgcaggagagcatctgctgctgggcgctaccaagcgatcaatggtgttcaaggacgtgctgctgctggggaatgactatattgtccccaggcactgccctgaactggccgagatgagtagagtgtctatccgcatcctggatgaactggtgctgccattccaggagctgcagattgacgataaccagtacgcatacctgaaagctatcatctttttcgaccccgacgccaagggactgtccgatcctggcaaaattaagcggctgaggagccaggtccaggtgagcctggaagactatatcaatgacagacagtacgattcccgagggcggtttggagagctgctgctgctgctgccaacactgcagtcaattacctggcagatgatcgaacagatccagttcattaaactgttcggcatggcaaagatcgacaacctgctgcaggagatgctgctgggagggtctcccagtgatgcccctcatgctcaccacccactgcatccccacctgatgcaggagcatatgggcactaatgtgatcgtcgcaaacacaatgcctacccacctgagcaatggacagatgtgtgaatggccacgccccaggggccaggccgcaactcctgagaccccacagccctcccctccagggggatctggcagcgaaccctacaagctgctgcctggagctgtggcaacaattgtgaaaccactgtcagccatcccccagcctaccattactaagcaggaggtcatctgaggactagttataagactgactagcccgatgggcctcccaacgggccctcctcccctccttgcaccgagattaataaaaaaaaaaaaaaaaaaaaaaaaaaaaaaaaaaaaaaaaaaaaaaaaaaaaaaaaaaaaaaaatgcatcccccccccccccccccccccccccccccccaaaggctcttttcagagccaccagaatt

SEQ ID NO: 1944 - RNA, 1642 nt, synthetic construct
  misc_feature 1..1642: note = mRNA i-3 (A64-N5-C30-hSL-N5) (opt28) from Homo sapiens__NP_000448.3__HNF4A(1-474)(T166E)
  source 1..1642: mol_type = other RNA
aggagaaagcttaccatgcggctgagcaagaccctggtggacatggatatggcagactactccgccgctctggatccagcatatacaactctggagttcgaaaacgtccaggtgctgaccatgggaaatgacacatctccctcagagggcactaacctgaatgcccctaacagtctgggggtgagcgctctgtgcgcaatctgcggagacagggccaccggcaaacactacggggcttcctcttgtgatggatgcaagggctttttcagacgcagcgtccggaaaaatcatatgtactcatgccgatttagtaggcagtgcgtggtggacaaggacaagagaaaccagtgccgctattgtcggctgaaaaagtgcttcagggcaggaatgaaaaaggaagccgtccagaatgagagagatcgaatttccacacggcgcagctcttacgaagacagctccctgccatcaatcaacgctctgctgcaggcagaggtgctgagtaggcagatcgaaagccccgtgtctgggattaacggcgatatcagagccaagaaaattgcatccatcgctgacgtctgcgagagcatgaaggagcagctgctggtgctggtggaatgggccaaatacatccctgcattttgcgagctgccactggacgatcaggtcgctctgctgcgggcccacgcaggagaacatctgctgctgggcgctactaagcgatcaatggtgttcaaggacgtgctgctgctggggaatgactatattgtccccaggcactgccctgagctggccgaaatgagtagagtgtctatccgcatcctggatgagctggtgctgccattccaggaactgcagattgacgataacgagtacgcatacctgaaagctatcatctttttcgaccccgacgccaagggactgtccgatcctggcaaaattaagcggctgaggagccaggtccaggtgagcctggaagactatatcaatgacagacagtacgattcccgagggcggtttggagagctgctgctgctgctgccaaccctgcagtcaattacatggcagatgatcgagcagatccagttcattaaactgttcggcatggcaaagatcgacaacctgctgcaggaaatgctgctgggagggtctcccagtgatgcccctcatgctcaccacccactgcatccccacctgatgcaggagcatatgggcaccaatgtgatcgtcgcaaacactatgcctacacacctgagcaatggacagatgtgtgaatggccacgccccaggggccaggccgcaacccctgagactccacagccctcccctccagggggatctggcagcgaaccctacaagctgctgcctggagctgtggcaaccattgtgaaaccactgtcagccatcccccagcctacaattaccaagcaggaggtcatctgaggactagttataagactgactagcccgatgggcctcccaacgggccctcctcccctccttgcaccgagattaataaaaaaaaaaaaaaaaaaaaaaaaaaaaaaaaaaaaaaaaaaaaaaaaaaaaaaaaaaaaaaaatgcatcccccccccccccccccccccccccccccccaaaggctcttttcagagccaccagaatt

SEQ ID NO: 1945 - RNA, 1642 nt, synthetic construct
  misc_feature 1..1642: note = mRNA i-3 (A64-N5-C30-hSL-N5) (opt28) from Homo sapiens__NP_000448.3__HNF4A(1-474)(S148A)
  source 1..1642: mol_type = other RNA
aggagaaagcttaccatgcggctgagcaagaccctggtggacatggatatggcagactactccgccgctctggatccagcatatacaactctggagttcgaaaacgtccaggtgctgaccatgggaaatgacacatctccctcagagggcactaacctgaatgcccctaacagtctgggggtgagcgctctgtgcgcaatctgcggagacagggccaccggcaaacactacggggcttcctcttgtgatggatgcaagggctttttcagacgcagcgtccggaaaaatcatatgtactcatgccgatttagtaggcagtgcgtggtggacaaggacaagagaaaccagtgccgctattgtcggctgaaaaagtgcttcagggcaggaatgaaaaaggaagccgtccagaatgagagagatcgaatttccacacggcgcagctcttacgaagacagcgctctgccatccatcaacgcactgctgcaggccgaggtgctgtcaaggcagatcaccagtcccgtgagcgggattaacggcgatatcagagcaaagaaaattgcttctatcgccgacgtctgcgaatccatgaaggagcagctgctggtgctggtggagtgggcaaaatacatccctgctttttgcgaactgccactggacgatcaggtcgccctgctgcgggcacacgctggagagcatctgctgctgggcgccactaagcgaagcatggtgttcaaggacgtgctgctgctggggaatgactatattgtccccaggcactgccctgaactggcagagatgtcaagagtgagtatccgcatcctggatgaactggtgctgccattccaggagctgcagattgacgataacgaatacgcttacctgaaagccatcatctttttcgaccccgacgcaaagggactgtctgatcctggcaaaattaagcggctgaggtcccaggtccaggtgagcctggaggactatatcaatgacagacagtacgatagccgagggcggtttggagaactgctgctgctgctgccaacactgcagtccattacctggcagatgatcgagcagatccagttcattaaactgttcggcatggccaagatcgacaacctgctgcaggagatgctgctgggagggtcaccctctgatgctcctcatgcacaccacccactgcatccccacctgatgcaggaacatatgggcactaatgtgatcgtcgccaacacaatgcctacccacctgagtaatggacagatgtgtgagtggccacgccccaggggccaggcagctactcctgaaaccccacagcccagccctccagggggatccggctctgagccctacaagctgctgcctggagcagtggccacaattgtgaaaccactgagcgctatcccccagcctaccattactaagcaggaagtcatctgaggactagttataagactgactagcccgatgggcctcccaacgggccctcctcccctccttgcaccgagattaataaaaaaaaaaaaaaaaaaaaaaaaaaaaaaaaaaaaaaaaaaaaaaaaaaaaaaaaaaaaaaaatgcatcccccccccccccccccccccccccccccccaaaggctcttttcagagccaccagaatt

SEQ ID NO: 1946 - RNA, 1642 nt, synthetic construct
  misc_feature 1..1642: note = mRNA i-3 (A64-N5-C30-hSL-N5) (opt28) from Homo sapiens__NP_000448.3__HNF4A(1-474)(S148E)
  source 1..1642: mol_type = other RNA
aggagaaagcttaccatgcggctgagcaagaccctggtggacatggatatggcagactactccgccgctctggatccagcatatacaactctggagttcgaaaacgtccaggtgctgaccatgggaaatgacacatctccctcagagggcactaacctgaatgcccctaacagtctgggggtgagcgctctgtgcgcaatctgcggagacagggccaccggcaaacactacggggcttcctcttgtgatggatgcaagggctttttcagacgcagcgtccggaaaaatcatatgtactcatgccgatttagtaggcagtgcgtggtggacaaggacaagagaaaccagtgccgctattgtcggctgaaaaagtgcttcagggcaggaatgaaaaaggaagccgtccagaatgagagagatcgaatttccacacggcgcagctcttacgaagacagcgagctgccatccatcaacgctctgctgcaggcagaagtgctgtcaaggcagatcaccagtcccgtgagcgggattaacggcgatatcagagccaagaaaattgcatctatcgctgacgtctgcgagtccatgaaggagcagctgctggtgctggtggaatgggccaaatacatccctgcattttgcgagctgccactggacgatcaggtcgctctgctgcgggcccacgcaggagaacatctgctgctgggcgctactaagcgaagcatggtgttcaaggacgtgctgctgctggggaatgactatattgtccccaggcactgccctgagctggccgaaatgtcaagagtgagtatccgcatcctggatgagctggtgctgccattccaggaactgcagattgacgataacgagtacgcatacctgaaagctatcatctttttcgaccccgacgccaagggactgtctgatcctggcaaaattaagcggctgaggtcccaggtccaggtgagcctggaagactatatcaatgacagacagtacgatagccgagggcggtttggagagctgctgctgctgctgccaacactgcagtccattacctggcagatgatcgagcagatccagttcattaaactgttcggcatggcaaagatcgacaacctgctgcaggaaatgctgctgggagggtcaccctctgatgcccctcatgctcaccacccactgcatccccacctgatgcaggagcatatgggcactaatgtgatcgtcgcaaacacaatgcctacccacctgagtaatggacagatgtgtgaatggccacgccccaggggccaggccgcaactcctgagaccccacagcccagccctccagggggatccggctctgaaccctacaagctgctgcctggagctgtggcaacaattgtgaaaccactgagcgccatcccccagcctaccattactaagcaggaggtcatctgaggactagttataagactgactagcccgatgggcctcccaacgggccctcctcccctccttgcaccgagattaataaaaaaaaaaaaaaaaaaaaaaaaaaaaaaaaaaaaaaaaaaaaaaaaaaaaaaaaaaaaaaaatgcatcccccccccccccccccccccccccccccccaaaggctcttttcagagccaccagaatt

SEQ ID NO: 1947 - RNA, 1642 nt, synthetic construct
  misc_feature 1..1642: note = mRNA i-3 (A64-N5-C30-hSL-N5) (opt28) from Homo sapiens__NP_000448.3__HNF4A(1-474)(S183A)
  source 1..1642: mol_type = other RNA
aggagaaagcttaccatgcggctgagcaagaccctggtggacatggatatggcagactactccgccgctctggatccagcatatacaactctggagttcgaaaacgtccaggtgctgaccatgggaaatgacacatctccctcagagggcactaacctgaatgcccctaacagtctgggggtgagcgctctgtgcgcaatctgcggagacagggccaccggcaaacactacggggcttcctcttgtgatggatgcaagggctttttcagacgcagcgtccggaaaaatcatatgtactcatgccgatttagtaggcagtgcgtggtggacaaggacaagagaaaccagtgccgctattgtcggctgaaaaagtgcttcagggcaggaatgaaaaaggaagccgtccagaatgagagagatcgaatttccacacggcgcagctcttacgaagacagctccctgccatcaatcaacgctctgctgcaggcagaggtgctgagtaggcagatcactagccccgtgtctgggattaacggcgatatcagagccaagaaaattgcagctatcgccgacgtctgcgaatccatgaaggagcagctgctggtgctggtggagtgggcaaaatacatccctgctttttgcgaactgccactggacgatcaggtcgccctgctgcgggcacacgctggagagcatctgctgctgggcgccaccaagcgaagcatggtgttcaaggacgtgctgctgctggggaatgactatattgtccccaggcactgccctgaactggcagagatgtcaagagtgagtatccgcatcctggatgaactggtgctgccattccaggagctgcagattgacgataacgaatacgcttacctgaaagccatcatctttttcgaccccgacgcaaagggactgtctgatcctggcaaaattaagcggctgaggtcccaggtccaggtgagcctggaggactatatcaatgacagacagtacgatagccgagggcggtttggagaactgctgctgctgctgccaacactgcagtccattacctggcagatgatcgagcagatccagttcattaaactgttcggcatggccaagatcgacaacctgctgcaggagatgctgctgggagggtcaccctctgatgctcctcatgcacaccacccactgcatccccacctgatgcaggaacatatgggcactaatgtgatcgtcgccaacacaatgcctacccacctgagtaatggacagatgtgtgagtggccacgccccaggggccaggcagctactcctgaaaccccacagcccagccctccagggggatccggctctgagccctacaagctgctgcctggagcagtggccacaattgtgaaaccactgagcgctatcccccagcctaccattactaagcaggaagtcatctgaggactagttataagactgactagcccgatgggcctcccaacgggccctcctcccctccttgcaccgagattaataaaaaaaaaaaaaaaaaaaaaaaaaaaaaaaaaaaaaaaaaaaaaaaaaaaaaaaaaaaaaaaatgcatcccccccccccccccccccccccccccccccaaaggctcttttcagagccaccagaatt

SEQ ID NO: 1948 - RNA, 1642 nt, synthetic construct
  misc_feature 1..1642: note = mRNA i-3 (A64-N5-C30-hSL-N5) (opt28) from Homo sapiens__NP_000448.3__HNF4A(1-474)(S183E)
  source 1..1642: mol_type = other RNA
aggagaaagcttaccatgcggctgagcaagaccctggtggacatggatatggcagactactccgccgctctggatccagcatatacaactctggagttcgaaaacgtccaggtgctgaccatgggaaatgacacatctccctcagagggcactaacctgaatgcccctaacagtctgggggtgagcgctctgtgcgcaatctgcggagacagggccaccggcaaacactacggggcttcctcttgtgatggatgcaagggctttttcagacgcagcgtccggaaaaatcatatgtactcatgccgatttagtaggcagtgcgtggtggacaaggacaagagaaaccagtgccgctattgtcggctgaaaaagtgcttcagggcaggaatgaaaaaggaagccgtccagaatgagagagatcgaatttccacacggcgcagctcttacgaagacagctccctgccatcaatcaacgctctgctgcaggcagaggtgctgagtaggcagatcactagccccgtgtctgggattaacggcgatatcagagccaagaaaattgcagaaatcgctgacgtctgcgagtccatgaaggagcagctgctggtgctggtggaatgggccaaatacatccctgcattttgcgagctgccactggacgatcaggtcgctctgctgcgggcccacgcaggagaacatctgctgctgggcgctaccaagcgaagcatggtgttcaaggacgtgctgctgctggggaatgactatattgtccccaggcactgccctgagctggccgaaatgtcaagagtgagtatccgcatcctggatgagctggtgctgccattccaggaactgcagattgacgataacgagtacgcatacctgaaagctatcatctttttcgaccccgacgccaagggactgtctgatcctggcaaaattaagcggctgaggtcccaggtccaggtgagcctggaagactatatcaatgacagacagtacgatagccgagggcggtttggagagctgctgctgctgctgccaacactgcagtccattacctggcagatgatcgagcagatccagttcattaaactgttcggcatggcaaagatcgacaacctgctgcaggaaatgctgctgggagggtcaccctctgatgcccctcatgctcaccacccactgcatccccacctgatgcaggagcatatgggcactaatgtgatcgtcgcaaacacaatgcctacccacctgagtaatggacagatgtgtgaatggccacgccccaggggccaggccgcaactcctgagaccccacagcccagccctccagggggatccggctctgaaccctacaagctgctgcctggagctgtggcaacaattgtgaaaccactgagcgccatcccccagcctaccattactaagcaggaggtcatctgaggactagttataagactgactagcccgatgggcctcccaacgggccctcctcccctccttgcaccgagattaataaaaaaaaaaaaaaaaaaaaaaaaaaaaaaaaaaaaaaaaaaaaaaaaaaaaaaaaaaaaaaaatgcatcccccccccccccccccccccccccccccccaaaggctcttttcagagccaccagaatt

SEQ ID NO: 1949 - RNA, 1642 nt, synthetic construct
  misc_feature 1..1642: note = mRNA i-3 (A64-N5-C30-hSL-N5) (opt28) from Homo sapiens__NP_000448.3__HNF4A(1-474)(S461A)
  source 1..1642: mol_type = other RNA
aggagaaagcttaccatgcggctgagcaagaccctggtggacatggatatggcagactactccgccgctctggatccagcatatacaactctggagttcgaaaacgtccaggtgctgaccatgggaaatgacacatctccctcagagggcactaacctgaatgcccctaacagtctgggggtgagcgctctgtgcgcaatctgcggagacagggccaccggcaaacactacggggcttcctcttgtgatggatgcaagggctttttcagacgcagcgtccggaaaaatcatatgtactcatgccgatttagtaggcagtgcgtggtggacaaggacaagagaaaccagtgccgctattgtcggctgaaaaagtgcttcagggcaggaatgaaaaaggaagccgtccagaatgagagagatcgaatttccacacggcgcagctcttacgaagacagctccctgccatcaatcaacgctctgctgcaggcagaggtgctgagtaggcagatcactagccccgtgtctgggattaacggcgatatcagagccaagaaaattgcatccatcgctgacgtctgcgaaagcatgaaggagcagctgctggtgctggtggagtgggccaaatacatccctgcattttgcgaactgccactggacgatcaggtcgctctgctgcgggcccacgcaggagagcatctgctgctgggcgctaccaagcgatcaatggtgttcaaggacgtgctgctgctggggaatgactatattgtccccaggcactgccctgaactggccgagatgagtagagtgtctatccgcatcctggatgaactggtgctgccattccaggagctgcagattgacgataacgaatacgcatacctgaaagctatcatctttttcgaccccgacgccaagggactgtccgatcctggcaaaattaagcggctgaggagccaggtccaggtgagcctggaggactatatcaatgacagacagtacgattcccgagggcggtttggagaactgctgctgctgctgccaacactgcagtcaattacctggcagatgatcgagcagatccagttcattaaactgttcggcatggcaaagatcgacaacctgctgcaggagatgctgctgggagggtctcccagtgatgcccctcatgctcaccacccactgcatccccacctgatgcaggaacatatgggcactaatgtgatcgtcgcaaacacaatgcctacccacctgagcaatggacagatgtgtgagtggccacgccccaggggccaggccgcaactcctgaaaccccacagccctcccctccagggggatctggcagcgagccctacaagctgctgcctggagctgtggcaacaattgtgaaaccactggccgctatcccccagcctaccattactaagcaggaagtcatctgaggactagttataagactgactagcccgatgggcctcccaacgggccctcctcccctccttgcaccgagattaataaaaaaaaaaaaaaaaaaaaaaaaaaaaaaaaaaaaaaaaaaaaaaaaaaaaaaaaaaaaaaaatgcatcccccccccccccccccccccccccccccccaaaggctcttttcagagccaccagaatt

SEQ ID NO: 1950 - RNA, 1642 nt, synthetic construct
  misc_feature 1..1642: note = mRNA i-3 (A64-N5-C30-hSL-N5) (opt28) from Homo sapiens__NP_000448.3__HNF4A(1-474)(S461E)
  source 1..1642: mol_type = other RNA
aggagaaagcttaccatgcggctgagcaagaccctggtggacatggatatggcagactactccgccgctctggatccagcatatacaactctggagttcgaaaacgtccaggtgctgaccatgggaaatgacacatctccctcagagggcactaacctgaatgcccctaacagtctgggggtgagcgctctgtgcgcaatctgcggagacagggccaccggcaaacactacggggcttcctcttgtgatggatgcaagggctttttcagacgcagcgtccggaaaaatcatatgtactcatgccgatttagtaggcagtgcgtggtggacaaggacaagagaaaccagtgccgctattgtcggctgaaaaagtgcttcagggcaggaatgaaaaaggaagccgtccagaatgagagagatcgaatttccacacggcgcagctcttacgaagacagctccctgccatcaatcaacgctctgctgcaggcagaggtgctgagtaggcagatcactagccccgtgtctgggattaacggcgatatcagagccaagaaaattgcatccatcgctgacgtctgcgaaagcatgaaggagcagctgctggtgctggtggagtgggccaaatacatccctgcattttgcgaactgccactggacgatcaggtcgctctgctgcgggcccacgcaggagagcatctgctgctgggcgctaccaagcgatcaatggtgttcaaggacgtgctgctgctggggaatgactatattgtccccaggcactgccctgaactggccgagatgagtagagtgtctatccgcatcctggatgaactggtgctgccattccaggagctgcagattgacgataacgaatacgcatacctgaaagctatcatctttttcgaccccgacgccaagggactgtccgatcctggcaaaattaagcggctgaggagccaggtccaggtgagcctggaggactatatcaatgacagacagtacgattcccgagggcggtttggagaactgctgctgctgctgccaacactgcagtcaattacctggcagatgatcgagcagatccagttcattaaactgttcggcatggcaaagatcgacaacctgctgcaggagatgctgctgggagggtctcccagtgatgcccctcatgctcaccacccactgcatccccacctgatgcaggaacatatgggcactaatgtgatcgtcgcaaacacaatgcctacccacctgagcaatggacagatgtgtgagtggccacgccccaggggccaggccgcaactcctgaaaccccacagccctcccctccagggggatctggcagcgagccctacaagctgctgcctggagctgtggcaacaattgtgaaaccactggaagccatcccccagcctaccattactaagcaggaggtcatctgaggactagttataagactgactagcccgatgggcctcccaacgggccctcctcccctccttgcaccgagattaataaaaaaaaaaaaaaaaaaaaaaaaaaaaaaaaaaaaaaaaaaaaaaaaaaaaaaaaaaaaaaaatgcatcccccccccccccccccccccccccccccccaaaggctcttttcagagccaccagaatt

SEQ ID NO: 1951 - RNA, 1642 nt, synthetic construct
  misc_feature 1..1642: note = mRNA i-3 (A64-N5-C30-hSL-N5) (opt28) from Homo sapiens__NP_000448.3__HNF4A(1-474)(S142A_S143A_S313A)
  source 1..1642: mol_type = other RNA
aggagaaagcttaccatgcggctgagcaagaccctggtggacatggatatggcagactactccgccgctctggatccagcatatacaactctggagttcgaaaacgtccaggtgctgaccatgggaaatgacacatctccctcagagggcactaacctgaatgcccctaacagtctgggggtgagcgctctgtgcgcaatctgcggagacagggccaccggcaaacactacggggcttcctcttgtgatggatgcaagggctttttcagacgcagcgtccggaaaaatcatatgtactcatgccgatttagtaggcagtgcgtggtggacaaggacaagagaaaccagtgccgctattgtcggctgaaaaagtgcttcagggcaggaatgaaaaaggaagccgtccagaatgagagagatcgaatttccacacggcgcgctgcatacgaagacagctctctgccaagcatcaacgccctgctgcaggcagaggtgctgtccaggcagatcacttcacccgtgagtgggattaacggcgatatcagagctaagaaaattgccagcatcgcagacgtctgcgaatctatgaaggagcagctgctggtgctggtggagtgggctaaatacatccctgccttttgcgaactgccactggacgatcaggtcgcactgctgcgggctcacgccggagagcatctgctgctgggcgcaaccaagcgatccatggtgttcaaggacgtgctgctgctggggaatgactatattgtccccaggcactgccctgaactggctgagatgagcagagtgtcaatccgcatcctggatgaactggtgctgccattccaggagctgcagattgacgataacgaatacgcctacctgaaagcaatcatctttttcgaccccgacgccaagggactgagtgatcctggcaaaattaagcggctgagggctcaggtccaggtgtctctggaggactatatcaatgacagacagtacgattcccgagggcggtttggagaactgctgctgctgctgccaacactgcagagcattacctggcagatgatcgagcagatccagttcattaaactgttcggcatggcaaagatcgacaacctgctgcaggagatgctgctgggagggagcccctccgatgcccctcatgcacaccacccactgcatccccacctgatgcaggaacatatgggcactaatgtgatcgtcgctaacacaatgcctacccacctgtcaaatggacagatgtgtgagtggccacgccccaggggccaggcagccactcctgaaaccccacagccctctcctccagggggaagtggcagcgagccctacaagctgctgcctggagctgtggcaacaattgtgaaaccactgtccgccatcccccagcctaccattactaagcaggaagtcatctgaggactagttataagactgactagcccgatgggcctcccaacgggccctcctcccctccttgcaccgagattaataaaaaaaaaaaaaaaaaaaaaaaaaaaaaaaaaaaaaaaaaaaaaaaaaaaaaaaaaaaaaaaatgcatcccccccccccccccccccccccccccccccaaaggctcttttcagagccaccagaatt

SEQ ID NO: 1952 - RNA, 1642 nt, synthetic construct
  misc_feature 1..1642: note = mRNA i-3 (A64-N5-C30-hSL-N5) (opt28) from Homo sapiens__NP_000448.3__HNF4A(1-474)(S142A_S143A_S313A_K458R)
  source 1..1642: mol_type = other RNA
aggagaaagcttaccatgcggctgagcaagaccctggtggacatggatatggcagactactccgccgctctggatccagcatatacaactctggagttcgaaaacgtccaggtgctgaccatgggaaatgacacatctccctcagagggcactaacctgaatgcccctaacagtctgggggtgagcgctctgtgcgcaatctgcggagacagggccaccggcaaacactacggggcttcctcttgtgatggatgcaagggctttttcagacgcagcgtccggaaaaatcatatgtactcatgccgatttagtaggcagtgcgtggtggacaaggacaagagaaaccagtgccgctattgtcggctgaaaaagtgcttcagggcaggaatgaaaaaggaagccgtccagaatgagagagatcgaatttccacacggcgcgctgcatacgaagacagctctctgccaagcatcaacgccctgctgcaggcagaggtgctgtccaggcagatcacttcacccgtgagtgggattaacggcgatatcagagctaagaaaattgccagcatcgcagacgtctgcgaatctatgaaggagcagctgctggtgctggtggagtgggctaaatacatccctgccttttgcgaactgccactggacgatcaggtcgcactgctgcgggctcacgccggagagcatctgctgctgggcgcaaccaagcgatccatggtgttcaaggacgtgctgctgctggggaatgactatattgtccccaggcactgccctgaactggctgagatgagcagagtgtcaatccgcatcctggatgaactggtgctgccattccaggagctgcagattgacgataacgaatacgcctacctgaaagcaatcatctttttcgaccccgacgccaagggactgagtgatcctggcaaaattaagcggctgagggctcaggtccaggtgtctctggaggactatatcaatgacagacagtacgattcccgagggcggtttggagaactgctgctgctgctgccaacactgcagagcattacctggcagatgatcgagcagatccagttcattaaactgttcggcatggcaaagatcgacaacctgctgcaggagatgctgctgggagggagcccctccgatgcccctcatgcacaccacccactgcatccccacctgatgcaggaacatatgggcactaatgtgatcgtcgctaacacaatgcctacccacctgtcaaatggacagatgtgtgagtggccacgccccaggggccaggcagccactcctgaaaccccacagccctctcctccagggggaagtggcagcgagccctacaagctgctgcctggagctgtggcaacaattgtgagaccactgtccgccatcccccagcctaccattactaaacaggaagtcatctgaggactagttataagactgactagcccgatgggcctcccaacgggccctcctcccctccttgcaccgagattaataaaaaaaaaaaaaaaaaaaaaaaaaaaaaaaaaaaaaaaaaaaaaaaaaaaaaaaaaaaaaaaatgcatcccccccccccccccccccccccccccccccaaaggctcttttcagagccaccagaatt

SEQ ID NO: 1953 - RNA, 1642 nt, synthetic construct
  misc_feature 1..1642: note = mRNA i-3 (A64-N5-C30-hSL-N5) (opt28) from Homo sapiens__NP_000448.3__HNF4A(1-474)(S142A_S143A_S167A_S313A_ S378A_T429A_T432A_S436A_K458R)
  source 1..1642: mol_type = other RNA
aggagaaagcttaccatgcggctgagcaagaccctggtggacatggatatggcagactactccgccgctctggatccagcatatacaactctggagttcgaaaacgtccaggtgctgaccatgggaaatgacacatctccctcagagggcactaacctgaatgcccctaacagtctgggggtgagcgctctgtgcgcaatctgcggagacagggccaccggcaaacactacggggcttcctcttgtgatggatgcaagggctttttcagacgcagcgtccggaaaaatcatatgtactcatgccgatttagtaggcagtgcgtggtggacaaggacaagagaaaccagtgccgctattgtcggctgaaaaagtgcttcagggcaggaatgaaaaaggaagccgtccagaatgagagagatcgaatttccacacggcgcgctgcatacgaagacagctctctgccaagcatcaacgccctgctgcaggcagaggtgctgtccaggcagatcactgctcccgtgtcagggattaacggcgatatcagagccaagaaaattgcaagtatcgctgacgtctgcgaaagcatgaaggagcagctgctggtgctggtggagtgggccaaatacatccctgcattttgcgaactgccactggacgatcaggtcgctctgctgcgggcccacgcaggagagcatctgctgctgggcgctaccaagcgatctatggtgttcaaggacgtgctgctgctggggaatgactatattgtccccaggcactgccctgaactggccgagatgtccagagtgagcatccgcatcctggatgaactggtgctgccattccaggagctgcagattgacgataacgaatacgcatacctgaaagccatcatctttttcgaccccgacgctaagggactgtcagatcctggcaaaattaagcggctgagggcacaggtccaggtgagtctggaggactatatcaatgacagacagtacgattctcgagggcggtttggagaactgctgctgctgctgccaacactgcagtccattacctggcagatgatcgagcagatccagttcattaaactgttcggcatggccaagatcgacaacctgctgcaggagatgctgctgggaggggcacccagcgatgctcctcatgcacaccacccactgcatccccacctgatgcaggaacatatgggcactaatgtgatcgtcgccaacacaatgcctacccacctgagcaatggacagatgtgtgagtggccacgccccaggggccaggctgcagcccctgaagctccacagcccgcacctccagggggatccggctcagagccctacaagctgctgcctggagccgtggctactattgtgagaccactgtctgcaatcccccagcctaccattacaaaacaggaagtcatctgaggactagttataagactgactagcccgatgggcctcccaacgggccctcctcccctccttgcaccgagattaataaaaaaaaaaaaaaaaaaaaaaaaaaaaaaaaaaaaaaaaaaaaaaaaaaaaaaaaaaaaaaaatgcatcccccccccccccccccccccccccccccccaaaggctcttttcagagccaccagaatt

SEQ ID NO: 1954 - RNA, 1642 nt, synthetic construct
  misc_feature 1..1642: note = mRNA i-3 (A64-N5-C30-hSL-N5) (opt28) from Homo sapiens__NP_000448.3__HNF4A(1-474)(S142A_S143A_S148A_S167A_ S313A_S378A_T429A_T432A_S436A_K458R)
  source 1..1642: mol_type = other RNA
aggagaaagcttaccatgcggctgagcaagaccctggtggacatggatatggcagactactccgccgctctggatccagcatatacaactctggagttcgaaaacgtccaggtgctgaccatgggaaatgacacatctccctcagagggcactaacctgaatgcccctaacagtctgggggtgagcgctctgtgcgcaatctgcggagacagggccaccggcaaacactacggggcttcctcttgtgatggatgcaagggctttttcagacgcagcgtccggaaaaatcatatgtactcatgccgatttagtaggcagtgcgtggtggacaaggacaagagaaaccagtgccgctattgtcggctgaaaaagtgcttcagggcaggaatgaaaaaggaagccgtccagaatgagagagatcgaatttccacacggcgcgctgcatacgaagacagcgccctgccatctatcaacgcactgctgcaggctgaggtgctgagcaggcagatcactgcccccgtgtccgggattaacggcgatatcagagcaaagaaaattgcttcaatcgccgacgtctgcgaaagtatgaaggagcagctgctggtgctggtggagtgggcaaaatacatccctgctttttgcgaactgccactggacgatcaggtcgccctgctgcgggcacacgctggagagcatctgctgctgggcgccaccaagcgaagcatggtgttcaaggacgtgctgctgctggggaatgactatattgtccccaggcactgccctgaactggcagagatgtctagagtgtccatccgcatcctggatgaactggtgctgccattccaggagctgcagattgacgataacgaatacgcctacctgaaagctatcatctttttcgaccccgacgcaaagggactgagcgatcctggcaaaattaagcggctgagggcccaggtccaggtgtcactggaggactatatcaatgacagacagtacgatagtcgagggcggtttggagaactgctgctgctgctgccaacactgcagtctattacctggcagatgatcgagcagatccagttcattaaactgttcggcatggcaaagatcgacaacctgctgcaggagatgctgctgggaggggctccctccgatgcacctcatgcccaccacccactgcatccccacctgatgcaggaacatatgggcactaatgtgatcgtcgctaacacaatgcctacccacctgagcaatggacagatgtgtgagtggccacgccccaggggccaggcagccgctcctgaagcaccacagcccgcccctccagggggaagcggctccgagccctacaagctgctgcctggagctgtggcaactattgtgagaccactgtcagccatcccccagcctaccattacaaaacaggaagtcatctgaggactagttataagactgactagcccgatgggcctcccaacgggccctcctcccctccttgcaccgagattaataaaaaaaaaaaaaaaaaaaaaaaaaaaaaaaaaaaaaaaaaaaaaaaaaaaaaaaaaaaaaaaatgcatcccccccccccccccccccccccccccccccaaaggctcttttcagagccaccagaatt

SEQ ID NO: 1955 - RNA, 1642 nt, synthetic construct
  misc_feature 1..1642: note = mRNA i-3 (A64-N5-C30-hSL-N5) (opt28) from Homo sapiens__NP_000448.3__HNF4A(1-474)(K106R_K108R_K126R_K127R_ S142A_S143A_S148A_S167A_S313A_S378A_T429A_T432A_S436A_K458R )
  source 1..1642: mol_type = other RNA
aggagaaagcttaccatgcggctgagcaagaccctggtggacatggatatggcagactactccgccgctctggatccagcatatacaactctggagttcgaaaacgtccaggtgctgaccatgggaaatgacacatctccctcagagggcactaacctgaatgcccctaacagtctgggggtgagcgctctgtgcgcaatctgcggagacagggccaccggcaaacactacggggcttcctcttgtgatggatgcaagggctttttcagacgcagcgtccggaaaaatcatatgtactcatgccgatttagtaggcagtgcgtggtggacagagaccgccggaaccagtgcaggtattgtagactgaagaagtgcttccgagcaggaatgcggcgcgaagccgtccagaatgagagggatagaatttccacacggcgagctgcatacgaagacagcgccctgccatctatcaacgcactgctgcaggctgaggtgctgagcaggcagatcactgcccccgtgtccgggattaacggcgatatcagagctaaaaagattgcatcaatcgccgacgtctgcgaaagtatgaaagagcagctgctggtgctggtggagtgggcaaagtacatccctgctttttgcgaactgccactggacgatcaggtcgccctgctgcgcgcacacgctggagagcatctgctgctgggcgccaccaagcggagcatggtgttcaaagacgtgctgctgctggggaatgactatattgtccccaggcactgccctgaactggcagagatgtctagagtgtccatccgaatcctggatgaactggtgctgccattccaggagctgcagattgacgataacgaatacgcctacctgaaggctatcatctttttcgaccccgacgcaaaaggactgagcgatcctggcaagattaagcggctgcgcgcccaggtccaggtgtcactggaggactatatcaatgacaggcagtacgatagtagagggcggtttggagaactgctgctgctgctgccaacactgcagtctattacctggcagatgatcgagcagatccagttcattaaactgttcggcatggcaaagatcgacaacctgctgcaggagatgctgctgggaggggctccctccgatgcacctcatgcccaccacccactgcatccccacctgatgcaggaacatatgggcactaatgtgatcgtcgctaacacaatgcctacccacctgagcaatggacagatgtgtgagtggccacgccccaggggccaggcagccgctcctgaagcaccacagcccgcccctccagggggaagcggctccgagccctacaaactgctgcctggagctgtggcaactattgtgagaccactgtcagccatcccccagcctaccattacaaagcaggaagtcatctgaggactagttataagactgactagcccgatgggcctcccaacgggccctcctcccctccttgcaccgagattaataaaaaaaaaaaaaaaaaaaaaaaaaaaaaaaaaaaaaaaaaaaaaaaaaaaaaaaaaaaaaaaatgcatcccccccccccccccccccccccccccccccaaaggctcttttcagagccaccagaatt

SEQ ID NO: 1956 - RNA, 1642 nt, synthetic construct
  misc_feature 1..1642: note = mRNA i-3 (A64-N5-C30-hSL-N5) (opt28) from Homo sapiens__NP_000448.3__HNF4A(1-474)(S142A_S143A_S148A_T166A_ S167A_S313A_S378A_T429A_T432A_S436A_K458R)
  source 1..1642: mol_type = other RNA
aggagaaagcttaccatgcggctgagcaagaccctggtggacatggatatggcagactactccgccgctctggatccagcatatacaactctggagttcgaaaacgtccaggtgctgaccatgggaaatgacacatctccctcagagggcactaacctgaatgcccctaacagtctgggggtgagcgctctgtgcgcaatctgcggagacagggccaccggcaaacactacggggcttcctcttgtgatggatgcaagggctttttcagacgcagcgtccggaaaaatcatatgtactcatgccgatttagtaggcagtgcgtggtggacaaggacaagagaaaccagtgccgctattgtcggctgaaaaagtgcttcagggcaggaatgaaaaaggaagccgtccagaatgagagagatcgaatttccacacggcgcgctgcatacgaagacagcgccctgccatctatcaacgcactgctgcaggctgaggtgctgagcaggcagatcgccgcacccgtgtccgggattaacggcgatatcagagctaagaaaattgcctcaatcgcagacgtctgcgaaagtatgaaggagcagctgctggtgctggtggagtgggctaaatacatccctgccttttgcgaactgccactggacgatcaggtcgcactgctgcgggctcacgccggagagcatctgctgctgggcgcaactaagcgaagcatggtgttcaaggacgtgctgctgctggggaatgactatattgtccccaggcactgccctgaactggccgagatgtctagagtgtccatccgcatcctggatgaactggtgctgccattccaggagctgcagattgacgataacgaatacgcttacctgaaagcaatcatctttttcgaccccgacgccaagggactgagcgatcctggcaaaattaagcggctgagggcacaggtccaggtgtcactggaggactatatcaatgacagacagtacgatagtcgagggcggtttggagaactgctgctgctgctgccaaccctgcagtctattacatggcagatgatcgagcagatccagttcattaaactgttcggcatggctaagatcgacaacctgctgcaggagatgctgctgggaggggcaccctccgatgcccctcatgctcaccacccactgcatccccacctgatgcaggaacatatgggcaccaatgtgatcgtcgcaaacactatgcctacacacctgagcaatggacagatgtgtgagtggccacgccccaggggccaggccgctgcacctgaagccccacagcccgctcctccagggggaagcggctccgagccctacaagctgctgcctggagcagtggccaccattgtgagaccactgtcagcaatcccccagcctactattaccaaacaggaagtcatctgaggactagttataagactgactagcccgatgggcctcccaacgggccctcctcccctccttgcaccgagattaataaaaaaaaaaaaaaaaaaaaaaaaaaaaaaaaaaaaaaaaaaaaaaaaaaaaaaaaaaaaaaaatgcatcccccccccccccccccccccccccccccccaaaggctcttttcagagccaccagaatt

SEQ ID NO: 1957 - RNA, 1642 nt, synthetic construct
  misc_feature 1..1642: note = mRNA i-3 (A64-N5-C30-hSL-N5) (opt28) from Homo sapiens__NP_000448.3__HNF4A(1-474)(S87A_S142A_S143A_S148A_T 166A_S167A_S313A_S378A_T429A_T432A_S436A_K458R)
  source 1..1642: mol_type = other RNA
aggagaaagcttaccatgcggctgagcaagaccctggtggacatggatatggcagactactccgccgctctggatccagcatatacaactctggagttcgaaaacgtccaggtgctgaccatgggaaatgacacatctccctcagagggcactaacctgaatgcccctaacagtctgggggtgagcgctctgtgcgcaatctgcggagacagggccaccggcaaacactacggggcttcctcttgtgatggatgcaagggctttttcagacgcgcagtccggaaaaatcatatgtacagctgccgattttcaaggcagtgcgtggtggacaaggacaagagaaaccagtgccgctattgtcggctgaaaaagtgcttcagggccggaatgaaaaaggaagctgtccagaatgagagagatcgaattagtacacggcgcgcagcctacgaagactccgcactgccaagcatcaacgctctgctgcaggccgaggtgctgtctaggcagatcgcagctcccgtgagcgggattaacggcgatatcagagccaagaaaattgcatccatcgctgacgtctgcgaatcaatgaaggagcagctgctggtgctggtggagtgggccaaatacatccctgcattttgcgaactgccactggacgatcaggtcgctctgctgcgggcccacgcaggagagcatctgctgctgggcgccactaagcgaagtatggtgttcaaggacgtgctgctgctggggaatgactatattgtccccaggcactgccctgaactggctgagatgagcagagtgtctatccgcatcctggatgaactggtgctgccattccaggagctgcagattgacgataacgaatacgcatacctgaaagccatcatctttttcgaccccgacgcaaagggactgtccgatcctggcaaaattaagcggctgagggctcaggtccaggtgagcctggaggactatatcaatgacagacagtacgattcacgagggcggtttggagaactgctgctgctgctgccaaccctgcagagtattacatggcagatgatcgagcagatccagttcattaaactgttcggcatggcaaagatcgacaacctgctgcaggagatgctgctgggaggggccccctctgatgctcctcatgcacaccacccactgcatccccacctgatgcaggaacatatgggcaccaatgtgatcgtcgccaacactatgcctacacacctgtccaatggacagatgtgtgagtggccacgccccaggggccaggctgcagcccctgaagctccacagcccgcacctccagggggaagcggcagcgagccctacaagctgctgcctggagccgtggcaaccattgtgagaccactgtccgctatcccccagcctactattaccaaacaggaagtcatctgaggactagttataagactgactagcccgatgggcctcccaacgggccctcctcccctccttgcaccgagattaataaaaaaaaaaaaaaaaaaaaaaaaaaaaaaaaaaaaaaaaaaaaaaaaaaaaaaaaaaaaaaaatgcatcccccccccccccccccccccccccccccccaaaggctcttttcagagccaccagaatt

SEQ ID NO: 1958 - RNA, 1642 nt, synthetic construct
  misc_feature 1..1642: note = mRNA i-3 (A64-N5-C30-hSL-N5) (opt28) from Homo sapiens__NP_000448.3__HNF4A(1-474)(S87A_K106R_K108R_K126R_K 127R_S142A_S143A_S148A_T166A_S167A_S313A_S378A_T429A_T432A_ S436A_K458R)
  source 1..1642: mol_type = other RNA
aggagaaagcttaccatgcggctgagcaagaccctggtggacatggatatggcagactactccgccgctctggatccagcatatacaactctggagttcgaaaacgtccaggtgctgaccatgggaaatgacacatctccctcagagggcactaacctgaatgcccctaacagtctgggggtgagcgctctgtgcgcaatctgcggagacagggccaccggcaaacactacggggcttcctcttgtgatggatgcaagggctttttcagacgcgcagtccggaaaaatcatatgtacagctgccgattttcaaggcagtgcgtggtggacagagaccgccggaaccagtgcaggtattgtagactgaagaagtgcttccgagccggaatgcggcgcgaagctgtccagaatgagagggatagaattagtacacggcgagcagcctacgaagactccgcactgccaagcatcaacgctctgctgcaggccgaggtgctgtctaggcagatcgcagctcccgtgagcgggattaacggcgatatcagagccaaaaagattgcatccatcgctgacgtctgcgaatcaatgaaagagcagctgctggtgctggtggagtgggccaagtacatccctgcattttgcgaactgccactggacgatcaggtcgctctgctgcgcgcccacgcaggagagcatctgctgctgggcgccactaagcggagtatggtgttcaaagacgtgctgctgctggggaatgactatattgtccccaggcactgccctgaactggctgagatgagcagagtgtctatccgaatcctggatgaactggtgctgccattccaggagctgcagattgacgataacgaatacgcatacctgaaggccatcatctttttcgaccccgacgcaaaaggactgtccgatcctggcaagattaagcggctgcgcgctcaggtccaggtgagcctggaggactatatcaatgacaggcagtacgattcaagagggcggtttggagaactgctgctgctgctgccaaccctgcagagtattacatggcagatgatcgagcagatccagttcattaaactgttcggcatggcaaagatcgacaacctgctgcaggagatgctgctgggaggggccccctctgatgctcctcatgcacaccacccactgcatccccacctgatgcaggaacatatgggcaccaatgtgatcgtcgccaacactatgcctacacacctgtccaatggacagatgtgtgagtggccacgccccaggggccaggctgcagcccctgaagctccacagcccgcacctccagggggaagcggcagcgagccctacaaactgctgcctggagccgtggcaaccattgtgagaccactgtccgctatcccccagcctactattaccaagcaggaagtcatctgaggactagttataagactgactagcccgatgggcctcccaacgggccctcctcccctccttgcaccgagattaataaaaaaaaaaaaaaaaaaaaaaaaaaaaaaaaaaaaaaaaaaaaaaaaaaaaaaaaaaaaaaaatgcatcccccccccccccccccccccccccccccccaaaggctcttttcagagccaccagaatt

SEQ ID NO: 1959 - RNA, 1642 nt, synthetic construct
  misc_feature 1..1642: note = mRNA i-3 (A64-N5-C30-hSL-N5) (opt28) from Homo sapiens__NP_000448.3__HNF4A(1-474)(S87A_K106R_K108R_K126R_K 127R)
  source 1..1642: mol_type = other RNA
aggagaaagcttaccatgcggctgagcaagaccctggtggacatggatatggcagactactccgccgctctggatccagcatatacaactctggagttcgaaaacgtccaggtgctgaccatgggaaatgacacatctccctcagagggcactaacctgaatgcccctaacagtctgggggtgagcgctctgtgcgcaatctgcggagacagggccaccggcaaacactacggggcttcctcttgtgatggatgcaagggctttttcagacgcgcagtccggaaaaatcatatgtacagctgccgattttcaaggcagtgcgtggtggacagagaccgccggaaccagtgcaggtattgtagactgaagaagtgcttccgagccggaatgcggcgcgaagctgtccagaatgagagggatagaattagtacacggcgatccagctacgaagactctagcctgccatccatcaacgcactgctgcaggccgaggtgctgtcaaggcagatcaccagtcccgtgagcgggattaacggcgatatcagagctaaaaagattgcatctatcgccgacgtctgcgaatccatgaaagagcagctgctggtgctggtggagtgggcaaagtacatccctgctttttgcgaactgccactggacgatcaggtcgccctgctgcgcgcacacgctggagagcatctgctgctgggcgccactaagcggagcatggtgttcaaagacgtgctgctgctggggaatgactatattgtccccaggcactgccctgaactggcagagatgtcaagagtgagtatccgaatcctggatgaactggtgctgccattccaggagctgcagattgacgataacgaatacgcttacctgaaggccatcatctttttcgaccccgacgcaaaaggactgtctgatcctggcaagattaagcggctgcgctcccaggtccaggtgagcctggaggactatatcaatgacaggcagtacgatagcagagggcggtttggagaactgctgctgctgctgccaacactgcagtccattacctggcagatgatcgagcagatccagttcattaaactgttcggcatggccaagatcgacaacctgctgcaggagatgctgctgggagggtcaccctctgatgctcctcatgcacaccacccactgcatccccacctgatgcaggaacatatgggcactaatgtgatcgtcgccaacacaatgcctacccacctgagtaatggacagatgtgtgagtggccacgccccaggggccaggcagctactcctgaaaccccacagcccagccctccagggggatccggctctgagccctacaaactgctgcctggagcagtggccacaattgtgaagccactgagcgctatcccccagcctaccattactaaacaggaagtcatctgaggactagttataagactgactagcccgatgggcctcccaacgggccctcctcccctccttgcaccgagattaataaaaaaaaaaaaaaaaaaaaaaaaaaaaaaaaaaaaaaaaaaaaaaaaaaaaaaaaaaaaaaaatgcatcccccccccccccccccccccccccccccccaaaggctcttttcagagccaccagaatt

SEQ ID NO: 1960 - RNA, 1642 nt, synthetic construct
  misc_feature 1..1642: note = mRNA i-3 (A64-N5-C30-hSL-N5) (opt28) from Homo sapiens__NP_000448.3__HNF4A(1-474)(S87A_K106R_K108R_K126R_K 127R_S142A_S143A_S148A_T166A_S167A_S313A_S378A_T429A_T432A_ S436A_K458R_S461A)
  source 1..1642: mol_type = other RNA
aggagaaagcttaccatgcggctgagcaagaccctggtggacatggatatggcagactactccgccgctctggatccagcatatacaactctggagttcgaaaacgtccaggtgctgaccatgggaaatgacacatctccctcagagggcactaacctgaatgcccctaacagtctgggggtgagcgctctgtgcgcaatctgcggagacagggccaccggcaaacactacggggcttcctcttgtgatggatgcaagggctttttcagacgcgcagtccggaaaaatcatatgtacagctgccgattttcaaggcagtgcgtggtggacagagaccgccggaaccagtgcaggtattgtagactgaagaagtgcttccgagccggaatgcggcgcgaagctgtccagaatgagagggatagaattagtacacggcgagcagcctacgaagactccgcactgccaagcatcaacgctctgctgcaggccgaggtgctgtctaggcagatcgcagctcccgtgagcgggattaacggcgatatcagagccaaaaagattgcatccatcgctgacgtctgcgaatcaatgaaagagcagctgctggtgctggtggagtgggccaagtacatccctgcattttgcgaactgccactggacgatcaggtcgctctgctgcgcgcccacgcaggagagcatctgctgctgggcgccactaagcggagtatggtgttcaaagacgtgctgctgctggggaatgactatattgtccccaggcactgccctgaactggctgagatgagcagagtgtctatccgaatcctggatgaactggtgctgccattccaggagctgcagattgacgataacgaatacgcatacctgaaggccatcatctttttcgaccccgacgcaaaaggactgtccgatcctggcaagattaagcggctgcgcgctcaggtccaggtgagcctggaggactatatcaatgacaggcagtacgattcaagagggcggtttggagaactgctgctgctgctgccaaccctgcagagtattacatggcagatgatcgagcagatccagttcattaaactgttcggcatggcaaagatcgacaacctgctgcaggagatgctgctgggaggggccccctctgatgctcctcatgcacaccacccactgcatccccacctgatgcaggaacatatgggcaccaatgtgatcgtcgccaacactatgcctacacacctgtccaatggacagatgtgtgagtggccacgccccaggggccaggctgcagcccctgaagctccacagcccgcacctccagggggaagcggcagcgagccctacaaactgctgcctggagccgtggcaaccattgtgagaccactggctgccatcccccagcctactattaccaagcaggaagtcatctgaggactagttataagactgactagcccgatgggcctcccaacgggccctcctcccctccttgcaccgagattaataaaaaaaaaaaaaaaaaaaaaaaaaaaaaaaaaaaaaaaaaaaaaaaaaaaaaaaaaaaaaaaatgcatcccccccccccccccccccccccccccccccaaaggctcttttcagagccaccagaatt

SEQ ID NO: 1961 - RNA, 1642 nt, synthetic construct
  misc_feature 1..1642: note = mRNA i-3 (A64-N5-C30-hSL-N5) (opt28) from Homo sapiens__NP_000448.3__HNF4A(1-474)(S87A_K106R_K108R_K126R_K 127R_S142A_S143A_S148A_T166A_S167A_S313A_S378A_T429A_T432A_ S436A_K458R_S461E)
  source 1..1642: mol_type = other RNA
aggagaaagcttaccatgcggctgagcaagaccctggtggacatggatatggcagactactccgccgctctggatccagcatatacaactctggagttcgaaaacgtccaggtgctgaccatgggaaatgacacatctccctcagagggcactaacctgaatgcccctaacagtctgggggtgagcgctctgtgcgcaatctgcggagacagggccaccggcaaacactacggggcttcctcttgtgatggatgcaagggctttttcagacgcgcagtccggaaaaatcatatgtacagctgccgattttcaaggcagtgcgtggtggacagagaccgccggaaccagtgcaggtattgtagactgaagaagtgcttccgagccggaatgcggcgcgaagctgtccagaatgagagggatagaattagtacacggcgagcagcctacgaagactccgcactgccaagcatcaacgctctgctgcaggccgaggtgctgtctaggcagatcgcagctcccgtgagcgggattaacggcgatatcagagccaaaaagattgcatccatcgctgacgtctgcgaatcaatgaaagagcagctgctggtgctggtggagtgggccaagtacatccctgcattttgcgaactgccactggacgatcaggtcgctctgctgcgcgcccacgcaggagagcatctgctgctgggcgccactaagcggagtatggtgttcaaagacgtgctgctgctggggaatgactatattgtccccaggcactgccctgaactggctgagatgagcagagtgtctatccgaatcctggatgaactggtgctgccattccaggagctgcagattgacgataacgaatacgcatacctgaaggccatcatctttttcgaccccgacgcaaaaggactgtccgatcctggcaagattaagcggctgcgcgctcaggtccaggtgagcctggaggactatatcaatgacaggcagtacgattcaagagggcggtttggagaactgctgctgctgctgccaaccctgcagagtattacatggcagatgatcgagcagatccagttcattaaactgttcggcatggcaaagatcgacaacctgctgcaggagatgctgctgggaggggccccctctgatgctcctcatgcacaccacccactgcatccccacctgatgcaggaacatatgggcaccaatgtgatcgtcgccaacactatgcctacacacctgtccaatggacagatgtgtgagtggccacgccccaggggccaggctgcagcccctgaagctccacagcccgcacctccagggggaagcggcagcgagccctacaaactgctgcctggagccgtggcaaccattgtgagaccactggaagctatcccccagcctactattaccaagcaggaggtcatctgaggactagttataagactgactagcccgatgggcctcccaacgggccctcctcccctccttgcaccgagattaataaaaaaaaaaaaaaaaaaaaaaaaaaaaaaaaaaaaaaaaaaaaaaaaaaaaaaaaaaaaaaaatgcatcccccccccccccccccccccccccccccccaaaggctcttttcagagccaccagaatt

SEQ ID NO: 1962 - RNA, 1642 nt, synthetic construct
  misc_feature 1..1642: note = mRNA i-3 (A64-N5-C30-hSL-N5) (opt28) from Homo sapiens__NP_000448.3__HNF4A(1-474)(S87A_K106R_K108R_K126R_K 127R_S142A_S143A_S148E_T166A_S167E_S313A_S378E_T429E_T432E_ S436E_K458R_S461E)
  source 1..1642: mol_type = other RNA
aggagaaagcttaccatgcggctgagcaagaccctggtggacatggatatggcagactactccgccgctctggatccagcatatacaactctggagttcgaaaacgtccaggtgctgaccatgggaaatgacacatctccctcagagggcactaacctgaatgcccctaacagtctgggggtgagcgctctgtgcgcaatctgcggagacagggccaccggcaaacactacggggcttcctcttgtgatggatgcaagggctttttcagacgcgcagtccggaaaaatcatatgtacagctgccgattttcaaggcagtgcgtggtggacagagaccgccggaaccagtgcaggtattgtagactgaagaagtgcttccgagccggaatgcggcgcgaagctgtccagaatgagagggatagaattagtacacggcgagcagcctacgaagactccgagctgccaagcatcaacgcactgctgcaggctgaagtgctgtctaggcagatcgccgagcccgtgagcgggattaacggcgatatcagagctaaaaagattgcatccatcgccgacgtctgcgagtcaatgaaagaacagctgctggtgctggtggagtgggcaaagtacatccctgctttttgcgaactgccactggacgatcaggtcgccctgctgcgcgcacacgctggagagcatctgctgctgggcgccactaagcggagtatggtgttcaaagacgtgctgctgctggggaatgactatattgtccccaggcactgccctgaactggcagagatgagcagagtgtctatccgaatcctggatgaactggtgctgccattccaggagctgcagattgacgataacgaatacgcctacctgaaggctatcatctttttcgaccccgacgcaaaaggactgtccgatcctggcaagattaagcggctgcgcgcccaggtccaggtgagcctggaggactatatcaatgacaggcagtacgattcaagagggcggtttggagagctgctgctgctgctgccaaccctgcagagtattacatggcagatgatcgaacagatccagttcattaaactgttcggcatggcaaagatcgacaacctgctgcaggagatgctgctgggaggggaaccctctgatgctcctcatgcacaccacccactgcatccccacctgatgcaggagcatatgggcaccaatgtgatcgtcgccaacactatgcctacacacctgtccaatggacagatgtgtgaatggccacgccccaggggccaggctgcagagcctgaggaaccacagcccgagcctccagggggaagcggcagcgaaccctacaaactgctgcctggagccgtggctaccattgtgagaccactggaggcaatcccccagcctactattaccaagcaggaagtcatctgaggactagttataagactgactagcccgatgggcctcccaacgggccctcctcccctccttgcaccgagattaataaaaaaaaaaaaaaaaaaaaaaaaaaaaaaaaaaaaaaaaaaaaaaaaaaaaaaaaaaaaaaaatgcatcccccccccccccccccccccccccccccccaaaggctcttttcagagccaccagaatt

SEQ ID NO: 1963 - RNA, 1642 nt, synthetic construct
  misc_feature 1..1642: note = mRNA i-3 (A64-N5-C30-hSL-N5) (opt28) from Homo sapiens__NP_000448.3__HNF4A(1-474)(S87A_K106R_K108R_K126R_K 127R_S142A_S143A_S148A_T166A_S167A_K179R_K180R_S313A_S378A_ T429A_T432A_S436A_K458R_S461E)
  source 1..1642: mol_type = other RNA
aggagaaagcttaccatgcggctgagcaagaccctggtggacatggatatggcagactactccgccgctctggatccagcatatacaactctggagttcgaaaacgtccaggtgctgaccatgggaaatgacacatctccctcagagggcactaacctgaatgcccctaacagtctgggggtgagcgctctgtgcgcaatctgcggagacagggccaccggcaaacactacggggcttcctcttgtgatggatgcaagggctttttcagacgcgcagtccggaaaaatcatatgtacagctgccgattttcaaggcagtgcgtggtggacagagaccgccggaaccagtgcaggtattgtagactgaagaagtgcttccgagccggaatgcggcgcgaagctgtccagaatgagagggatagaattagtacacggcgagcagcctacgaagactccgcactgccaagcatcaacgctctgctgcaggccgaggtgctgtctaggcagatcgcagctcccgtgagcgggattaacggcgatatcagagcccgccggattgcatccatcgctgacgtctgcgaatcaatgaaagagcagctgctggtgctggtggagtgggccaagtacatccctgcattttgcgaactgccactggacgatcaggtcgctctgctgagggcccacgcaggagagcatctgctgctgggcgccactaaaagaagtatggtgttcaaggacgtgctgctgctggggaatgactatattgtcccccgacactgccctgaactggctgagatgagccgggtgtctatccgcatcctggatgaactggtgctgccattccaggagctgcagattgacgataacgaatacgcatacctgaaggccatcatctttttcgaccccgacgcaaaaggactgtccgatcctggcaagattaaaaggctgagagctcaggtccaggtgagcctggaggactatatcaatgaccggcagtacgattcacgcgggaggtttggagaactgctgctgctgctgccaaccctgcagagtattacatggcagatgatcgagcagatccagttcattaagctgttcggcatggcaaagatcgacaacctgctgcaggagatgctgctgggaggggccccctctgatgctcctcatgcacaccacccactgcatccccacctgatgcaggaacatatgggcaccaatgtgatcgtcgccaacactatgcctacacacctgtccaatggacagatgtgtgagtggccaagaccccgaggccaggctgcagcccctgaagctccacagcccgcacctccagggggaagcggcagcgagccctacaaactgctgcctggagccgtggcaaccattgtgcggccactggaagctatcccccagcctactattaccaagcaggaggtcatctgaggactagttataagactgactagcccgatgggcctcccaacgggccctcctcccctccttgcaccgagattaataaaaaaaaaaaaaaaaaaaaaaaaaaaaaaaaaaaaaaaaaaaaaaaaaaaaaaaaaaaaaaaatgcatcccccccccccccccccccccccccccccccaaaggctcttttcagagccaccagaatt

SEQ ID NO: 1964 - RNA, 1642 nt, synthetic construct
  misc_feature 1..1642: note = mRNA i-3 (A64-N5-C30-hSL-N5) (opt28) from Homo sapiens__NP_000448.3__HNF4A(1-474)(S87A_K106R_K108R_K126R_K 127R_S142A_S143A_S148A_T166A_S167A_K300R_K307R_K309R_S313A_ S378A_T429A_T432A_S436A_K458R_S461E)
  source 1..1642: mol_type = other RNA
aggagaaagcttaccatgcggctgagcaagaccctggtggacatggatatggcagactactccgccgctctggatccagcatatacaactctggagttcgaaaacgtccaggtgctgaccatgggaaatgacacatctccctcagagggcactaacctgaatgcccctaacagtctgggggtgagcgctctgtgcgcaatctgcggagacagggccaccggcaaacactacggggcttcctcttgtgatggatgcaagggctttttcagacgcgcagtccggaaaaatcatatgtacagctgccgattttcaaggcagtgcgtggtggacagagaccgccggaaccagtgcaggtattgtagactgaagaagtgcttccgagccggaatgcggcgcgaagctgtccagaatgagagggatagaattagtacacggcgagcagcctacgaagactccgcactgccaagcatcaacgctctgctgcaggccgaggtgctgtctaggcagatcgcagctcccgtgagcgggattaacggcgatatcagagccaaaaagattgcatccatcgctgacgtctgcgaatcaatgaaagagcagctgctggtgctggtggagtgggccaagtacatccctgcattttgcgaactgccactggacgatcaggtcgctctgctgcgcgcccacgcaggagagcatctgctgctgggcgccactaagcggagtatggtgttcaaagacgtgctgctgctggggaatgactatattgtccccaggcactgccctgaactggctgagatgagcagagtgtctatccgaatcctggatgaactggtgctgccattccaggagctgcagattgacgataacgaatacgcatacctgaaggccatcatctttttcgaccccgacgcacggggactgtccgatcctggccgcattaggagactgcgggctcaggtccaggtgagcctggaggactatatcaatgaccgccagtacgattcaagggggagatttggagaactgctgctgctgctgccaaccctgcagagtattacatggcagatgatcgagcagatccagttcattaaactgttcggcatggcaaagatcgacaacctgctgcaggagatgctgctgggaggggccccctctgatgctcctcatgcacaccacccactgcatccccacctgatgcaggaacatatgggcaccaatgtgatcgtcgccaacactatgcctacacacctgtccaatggacagatgtgtgagtggccacgaccccggggccaggctgcagcccctgaagctccacagcccgcacctccagggggaagcggcagcgagccctacaagctgctgcctggagccgtggcaaccattgtgaggccactggaagctatcccccagcctactattaccaaacaggaggtcatctgaggactagttataagactgactagcccgatgggcctcccaacgggccctcctcccctccttgcaccgagattaataaaaaaaaaaaaaaaaaaaaaaaaaaaaaaaaaaaaaaaaaaaaaaaaaaaaaaaaaaaaaaaatgcatcccccccccccccccccccccccccccccccaaaggctcttttcagagccaccagaatt

SEQ ID NO: 1965 - RNA, 1642 nt, synthetic construct
  misc_feature 1..1642: note = mRNA i-3 (A64-N5-C30-hSL-N5) (opt28) from Homo sapiens__NP_000448.3__HNF4A(1-474)(S87A_K106R_K108R_K126R_K 127R_S142A_S143A_S148A_T166A_S167A_S313A_S378A_T429A_T432A_ S436A_K447R_K458R_S461E_K470R)
  source 1..1642: mol_type = other RNA
aggagaaagcttaccatgcggctgagcaagaccctggtggacatggatatggcagactactccgccgctctggatccagcatatacaactctggagttcgaaaacgtccaggtgctgaccatgggaaatgacacatctccctcagagggcactaacctgaatgcccctaacagtctgggggtgagcgctctgtgcgcaatctgcggagacagggccaccggcaaacactacggggcttcctcttgtgatggatgcaagggctttttcagacgcgcagtccggaaaaatcatatgtacagctgccgattttcaaggcagtgcgtggtggacagagaccgccggaaccagtgcaggtattgtagactgaagaagtgcttccgagccggaatgcggcgcgaagctgtccagaatgagagggatagaattagtacacggcgagcagcctacgaagactccgcactgccaagcatcaacgctctgctgcaggccgaggtgctgtctaggcagatcgcagctcccgtgagcgggattaacggcgatatcagagccaaaaagattgcatccatcgctgacgtctgcgaatcaatgaaagagcagctgctggtgctggtggagtgggccaagtacatccctgcattttgcgaactgccactggacgatcaggtcgctctgctgcgcgcccacgcaggagagcatctgctgctgggcgccactaagcggagtatggtgttcaaagacgtgctgctgctggggaatgactatattgtccccaggcactgccctgaactggctgagatgagcagagtgtctatccgaatcctggatgaactggtgctgccattccaggagctgcagattgacgataacgaatacgcatacctgaaggccatcatctttttcgaccccgacgcaaaaggactgtccgatcctggcaagattaagcggctgcgcgctcaggtccaggtgagcctggaggactatatcaatgacaggcagtacgattcaagagggcggtttggagaactgctgctgctgctgccaaccctgcagagtattacatggcagatgatcgagcagatccagttcattaaactgttcggcatggcaaagatcgacaacctgctgcaggagatgctgctgggaggggccccctctgatgctcctcatgcacaccacccactgcatccccacctgatgcaggaacatatgggcaccaatgtgatcgtcgccaacactatgcctacacacctgtccaatggacagatgtgtgagtggccacgccccaggggccaggctgcagcccctgaagctccacagcccgcacctccagggggaagcggcagcgagccctacagactgctgcctggagccgtggcaaccattgtgcgaccactggaagctatcccccagcctactattacccggcaggaggtcatctgaggactagttataagactgactagcccgatgggcctcccaacgggccctcctcccctccttgcaccgagattaataaaaaaaaaaaaaaaaaaaaaaaaaaaaaaaaaaaaaaaaaaaaaaaaaaaaaaaaaaaaaaaatgcatcccccccccccccccccccccccccccccccaaaggctcttttcagagccaccagaatt

SEQ ID NO: 1966 - RNA, 1642 nt, synthetic construct
  misc_feature 1..1642: note = mRNA i-3 (A64-N5-C30-hSL-N5) (opt28) from Homo sapiens__NP_000448.3__HNF4A(1-474)(S87A_K106R_K108R_K126R_K 127R_S142A_S143A_S148A_T166A_S167A_K179R_K180R_K234R_K300R_ K307R_K309R_S313A_S378A_T429A_T432A_S436A_K447R_K458R_S461E _K470R)
  source 1..1642: mol_type = other RNA
aggagaaagcttaccatgcggctgagcaagaccctggtggacatggatatggcagactactccgccgctctggatccagcatatacaactctggagttcgaaaacgtccaggtgctgaccatgggaaatgacacatctccctcagagggcactaacctgaatgcccctaacagtctgggggtgagcgctctgtgcgcaatctgcggagacagggccaccggcaaacactacggggcttcctcttgtgatggatgcaagggctttttcagacgcgcagtccggaaaaatcatatgtacagctgccgattttcaaggcagtgcgtggtggacagagaccgccggaaccagtgcaggtattgtagactgaagaagtgcttccgagccggaatgcggcgcgaagctgtccagaatgagagggatagaattagtacacggcgagcagcctacgaagactccgcactgccaagcatcaacgctctgctgcaggccgaggtgctgtctaggcagatcgcagctcccgtgagcgggattaacggcgatatcagagcccgccggattgcatccatcgctgacgtctgcgaatcaatgaaagagcagctgctggtgctggtggagtgggccaagtacatccctgcattttgcgaactgccactggacgatcaggtcgctctgctgagggcccacgcaggagagcatctgctgctgggcgccactagacgaagtatggtgttcaaagacgtgctgctgctggggaatgactatattgtcccccggcactgccctgaactggctgagatgagccgcgtgtctatcaggatcctggatgaactggtgctgccattccaggagctgcagattgacgataacgaatacgcatacctgaaggccatcatctttttcgaccccgacgcaagaggactgtccgatcctggccggattcgcaggctgagagctcaggtccaggtgagcctggaggactatatcaatgaccgacagtacgattcacgggggaggtttggagaactgctgctgctgctgccaaccctgcagagtattacatggcagatgatcgagcagatccagttcattaagctgttcggcatggcaaaaatcgacaacctgctgcaggagatgctgctgggaggggccccctctgatgctcctcatgcacaccacccactgcatccccacctgatgcaggaacatatgggcaccaatgtgatcgtcgccaacactatgcctacacacctgtccaatggacagatgtgtgagtggccaagaccccgcggccaggctgcagcccctgaagctccacagcccgcacctccagggggaagcggcagcgagccctaccggctgctgcctggagccgtggcaaccattgtgcgaccactggaagctatcccccagcctactattaccaggcaggaggtcatctgaggactagttataagactgactagcccgatgggcctcccaacgggccctcctcccctccttgcaccgagattaataaaaaaaaaaaaaaaaaaaaaaaaaaaaaaaaaaaaaaaaaaaaaaaaaaaaaaaaaaaaaaaatgcatcccccccccccccccccccccccccccccccaaaggctcttttcagagccaccagaatt

SEQ ID NO: 1967 - RNA, 1642 nt, synthetic construct
  misc_feature 1..1642: note = mRNA i-3 (A64-N5-C30-hSL-N5) (opt28) from Homo sapiens__NP_000448.3__HNF4A(1-474)(S87A_S95A_S99A_K106R_K10 8R_K126R_K127R_S142A_S143A_S148A_T166A_S167A_S313A_S378A_T4 29A_T432A_S436A_K458R_S461E)
  source 1..1642: mol_type = other RNA
aggagaaagcttaccatgcggctgagcaagaccctggtggacatggatatggcagactactccgccgctctggatccagcatatacaactctggagttcgaaaacgtccaggtgctgaccatgggaaatgacacatctccctcagagggcactaacctgaatgcccctaacagtctgggggtgagcgctctgtgcgcaatctgcggagacagggccaccggcaaacactacggggcttcctcttgtgatggatgcaagggctttttcagacgcgcagtccggaaaaatcatatgtacgcctgccgatttgctaggcagtgcgtggtggacagagaccgccggaaccagtgcaggtattgtagactgaagaagtgcttccgagcaggaatgcggcgcgaagccgtccagaatgagagggatagaattagcacacggcgagcagcttacgaagactcagccctgccaagtatcaacgcactgctgcaggctgaggtgctgtccaggcagatcgccgcacccgtgagcgggattaacggcgatatcagagctaaaaagattgcctctatcgcagacgtctgcgaaagcatgaaagagcagctgctggtgctggtggagtgggctaagtacatccctgccttttgcgaactgccactggacgatcaggtcgcactgctgcgcgcccacgctggagagcatctgctgctgggcgcaactaagcggtccatggtgttcaaagacgtgctgctgctggggaatgactatattgtccccaggcactgccctgaactggccgagatgtcaagagtgagtatccgaatcctggatgaactggtgctgccattccaggagctgcagattgacgataacgaatacgcatacctgaaggctatcatctttttcgaccccgacgcaaaaggactgagcgatcctggcaagattaagcggctgcgcgcccaggtccaggtgtctctggaggactatatcaatgacaggcagtacgattccagagggcggtttggagaactgctgctgctgctgccaaccctgcagagcattacatggcagatgatcgagcagatccagttcattaaactgttcggcatggctaagatcgacaacctgctgcaggagatgctgctgggaggggcaccctcagatgcccctcatgctcaccacccactgcatccccacctgatgcaggaacatatgggcaccaatgtgatcgtcgcaaacactatgcctacacacctgagtaatggacagatgtgtgagtggccacgccccaggggccaggccgctgcacctgaagccccacagcccgcacctccagggggatctggctccgagccctacaaactgctgcctggagctgtggccaccattgtgagaccactggaagcaatcccccagcctactattaccaagcaggaggtcatctgaggactagttataagactgactagcccgatgggcctcccaacgggccctcctcccctccttgcaccgagattaataaaaaaaaaaaaaaaaaaaaaaaaaaaaaaaaaaaaaaaaaaaaaaaaaaaaaaaaaaaaaaaatgcatcccccccccccccccccccccccccccccccaaaggctcttttcagagccaccagaatt

SEQ ID NO: 1968 - RNA, 1642 nt, synthetic construct
  misc_feature 1..1642: note = mRNA i-3 (A64-N5-C30-hSL-N5) (opt28) from Homo sapiens__NP_000448.3__HNF4A(1-474)(S87A_K106R_K108R_K126R_K 127R_S138A_T139A_S142A_S143A_S148A_T166A_S167A_S313A_S378A_ T429A_T432A_S436A_K458R_S461E)
  source 1..1642: mol_type = other RNA
aggagaaagcttaccatgcggctgagcaagaccctggtggacatggatatggcagactactccgccgctctggatccagcatatacaactctggagttcgaaaacgtccaggtgctgaccatgggaaatgacacatctccctcagagggcactaacctgaatgcccctaacagtctgggggtgagcgctctgtgcgcaatctgcggagacagggccaccggcaaacactacggggcttcctcttgtgatggatgcaagggctttttcagacgcgcagtccggaaaaatcatatgtacagctgccgattttcaaggcagtgcgtggtggacagagaccgccggaaccagtgcaggtattgtagactgaagaagtgcttccgagccggaatgcggcgcgaagctgtccagaatgagagggatagaattgcagcccggcgagcagcttacgaagacagtgccctgccatccatcaacgcactgctgcaggctgaggtgctgagcaggcagatcgccgcacccgtgtctgggattaacggcgatatcagagctaaaaagattgccagcatcgcagacgtctgcgaatccatgaaagagcagctgctggtgctggtggagtgggctaagtacatccctgccttttgcgaactgccactggacgatcaggtcgcactgctgcgcgcccacgctggagagcatctgctgctgggcgcaacaaagcggtcaatggtgttcaaagacgtgctgctgctggggaatgactatattgtccccaggcactgccctgaactggccgagatgagtagagtgagcatccgaatcctggatgaactggtgctgccattccaggagctgcagattgacgataacgaatacgcatacctgaaggctatcatctttttcgaccccgacgcaaaaggactgtctgatcctggcaagattaagcggctgcgcgcccaggtccaggtgtccctggaggactatatcaatgacaggcagtacgatagcagagggcggtttggagaactgctgctgctgctgccaactctgcagtcaattacctggcagatgatcgagcagatccagttcattaaactgttcggcatggctaagatcgacaacctgctgcaggagatgctgctgggaggggcacccagtgatgcccctcatgctcaccacccactgcatccccacctgatgcaggaacatatgggcacaaatgtgatcgtcgcaaacaccatgcctactcacctgtctaatggacagatgtgtgagtggccacgccccaggggccaggccgctgcacctgaagccccacagcccgcacctccagggggatccggcagcgagccctacaaactgctgcctggagctgtggccacaattgtgagaccactggaagcaatcccccagcctaccattactaagcaggaggtcatctgaggactagttataagactgactagcccgatgggcctcccaacgggccctcctcccctccttgcaccgagattaataaaaaaaaaaaaaaaaaaaaaaaaaaaaaaaaaaaaaaaaaaaaaaaaaaaaaaaaaaaaaaaatgcatcccccccccccccccccccccccccccccccaaaggctcttttcagagccaccagaatt

SEQ ID NO: 1969 - RNA, 1642 nt, synthetic construct
  misc_feature 1..1642: note = mRNA i-3 (A64-N5-C30-hSL-N5) (opt28) from Homo sapiens__NP_000448.3__HNF4A(1-474)(S87A_S95A_S99A_K106R_K10 8R_K126R_K127R_S138A_T139A_S142A_S143A_S148A_T166A_S167A_S3 13A_S378A_T429A_T432A_S436A_K458R_S461E)
  source 1..1642: mol_type = other RNA
aggagaaagcttaccatgcggctgagcaagaccctggtggacatggatatggcagactactccgccgctctggatccagcatatacaactctggagttcgaaaacgtccaggtgctgaccatgggaaatgacacatctccctcagagggcactaacctgaatgcccctaacagtctgggggtgagcgctctgtgcgcaatctgcggagacagggccaccggcaaacactacggggcttcctcttgtgatggatgcaagggctttttcagacgcgcagtccggaaaaatcatatgtacgcctgccgatttgctaggcagtgcgtggtggacagagaccgccggaaccagtgcaggtattgtagactgaagaagtgcttccgagcaggaatgcggcgcgaagccgtccagaatgagagggatagaattgcagctcggcgagccgcatacgaagacagcgctctgccatcaatcaacgccctgctgcaggcagaggtgctgagtaggcagatcgctgcccccgtgtccgggattaacggcgatatcagagctaaaaagattgcaagcatcgccgacgtctgcgaatctatgaaagagcagctgctggtgctggtggagtgggcaaagtacatccctgccttttgcgaactgccactggacgatcaggtcgctctgctgcgcgcacacgccggagagcatctgctgctgggcgcaacaaagcggagcatggtgttcaaagacgtgctgctgctggggaatgactatattgtccccaggcactgccctgaactggctgagatgtccagagtgtcaatccgaatcctggatgaactggtgctgccattccaggagctgcagattgacgataacgaatacgcatacctgaaggccatcatctttttcgaccccgacgctaaaggactgagtgatcctggcaagattaagcggctgcgcgcacaggtccaggtgagcctggaggactatatcaatgacaggcagtacgattctagagggcggtttggagaactgctgctgctgctgccaactctgcagtccattacctggcagatgatcgagcagatccagttcattaaactgttcggcatggccaagatcgacaacctgctgcaggagatgctgctgggaggggctcccagcgatgcacctcatgcccaccacccactgcatccccacctgatgcaggaacatatgggcacaaatgtgatcgtcgctaacaccatgcctactcacctgtcaaatggacagatgtgtgagtggccacgccccaggggccaggcagccgcacctgaagctccacagcccgcccctccagggggaagtggctctgagccctacaaactgctgcctggagcagtggctacaattgtgagaccactggaagccatcccccagcctaccattactaagcaggaggtcatctgaggactagttataagactgactagcccgatgggcctcccaacgggccctcctcccctccttgcaccgagattaataaaaaaaaaaaaaaaaaaaaaaaaaaaaaaaaaaaaaaaaaaaaaaaaaaaaaaaaaaaaaaaatgcatcccccccccccccccccccccccccccccccaaaggctcttttcagagccaccagaatt

SEQ ID NO: 1970 - RNA, 1642 nt, synthetic construct
  misc_feature 1..1642: note = mRNA i-3 (A64-N5-C30-hSL-N5) (opt29) from Homo sapiens__NP_000448.3__HNF4A(1-474)
  source 1..1642: mol_type = other RNA
aggagaaagcttaccatgagactgagcaagaccctggtggacatggacatggccgactactctgccgccctggaccctgcctacaccaccctggagttcgaaaacgtgcaagtgctgaccatgggcaacgacaccagccctagcgagggcaccaacctgaacgcccctaatagcctgggagtgtccgccctgtgtgccatctgtggcgatagagccaccggcaagcactacggcgccagctcttgtgatggctgcaagggcttcttccggcggagcgtgcggaagaaccacatgtacagctgccggttcagccggcagtgcgtggtggacaaggataagcggaaccagtgccggtactgcagactgaagaagtgcttcagagccggcatgaagaaagaagccgtgcagaacgagcgggaccggatcagcaccagaagaagcagctacgaggacagcagcctgcccagcatcaacgccctgctgcaggccgaggtgctgagcagacagatcaccagcccagtgtccggcatcaacggcgacatccgggccaagaagatcgccagcattgccgacgtgtgcgagagcatgaaggaacagctgctggtgctggtggaatgggccaagtacatccccgccttttgcgagctgcccctggacgatcaggtggccctgctgagagcacacgccggcgaacatctgctgctgggagccaccaagcggagcatggtgttcaaggacgtgctgctgctgggcaacgactacatcgtgcccagacactgccctgagctggccgagatgagccgggtgtccatcagaatcctggacgaactggtgctgccgtttcaggaactgcagatcgacgacaacgagtacgcctacctgaaggccatcatctttttcgaccccgacgccaagggcctgagcgaccctggcaagatcaagcggctgagaagccaggtgcaagtgtccctggaagattacatcaacgaccggcagtacgacagccggggcagatttggcgaactgctcctgctgctgcccaccctgcagagcatcacctggcagatgatcgagcagatccagttcatcaagctgttcggcatggccaagatcgacaatctgctgcaggaaatgctgctcgggggcagcccttctgatgcccctcatgcccaccaccctctgcaccctcacctgatgcaagaacacatgggcaccaatgtgatcgtggccaacacaatgcccacccacctgagcaacggccagatgtgcgagtggcccagacctagaggacaggccgccacacctgagacacctcagccttctccacctggcggctctggcagcgagccttacaaactgctgcctggcgctgtggccaccatcgtgaaacctctgagcgccatcccccagcccaccatcaccaagcaggaagtgatctgaggactagttataagactgactagcccgatgggcctcccaacgggccctcctcccctccttgcaccgagattaataaaaaaaaaaaaaaaaaaaaaaaaaaaaaaaaaaaaaaaaaaaaaaaaaaaaaaaaaaaaaaaatgcatcccccccccccccccccccccccccccccccaaaggctcttttcagagccaccagaatt

SEQ ID NO: 1971 - RNA, 1642 nt, synthetic construct
  misc_feature 1..1642: note = mRNA i-3 (A64-N5-C30-hSL-N5) (opt29) from Homo sapiens__NP_000448.3__HNF4A(1-474)(S313A)
  source 1..1642: mol_type = other RNA
aggagaaagcttaccatgagactgagcaagaccctggtggacatggacatggccgactactctgccgccctggaccctgcctacaccaccctggagttcgaaaacgtgcaagtgctgaccatgggcaacgacaccagccctagcgagggcaccaacctgaacgcccctaatagcctgggagtgtccgccctgtgtgccatctgtggcgatagagccaccggcaagcactacggcgccagctcttgtgatggctgcaagggcttcttccggcggagcgtgcggaagaaccacatgtacagctgccggttcagccggcagtgcgtggtggacaaggataagcggaaccagtgccggtactgcagactgaagaagtgcttcagagccggcatgaagaaagaagccgtgcagaacgagcgggaccggatcagcaccagaagaagcagctacgaggacagcagcctgcccagcatcaacgccctgctgcaggccgaggtgctgagcagacagatcaccagcccagtgtccggcatcaacggcgacatccgggccaagaagatcgccagcattgccgacgtgtgcgagagcatgaaggaacagctgctggtgctggtggaatgggccaagtacatccccgccttttgcgagctgcccctggacgatcaggtggccctgctgagagcacacgccggcgaacatctgctgctgggagccaccaagcggagcatggtgttcaaggacgtgctgctgctgggcaacgactacatcgtgcccagacactgccctgagctggccgagatgagccgggtgtccatcagaatcctggacgaactggtgctgccgtttcaggaactgcagatcgacgacaacgagtacgcctacctgaaggccatcatctttttcgaccccgacgccaagggcctgagcgaccctggcaagatcaagcggctgagagcccaggtgcaagtgtccctggaagattacatcaacgaccggcagtacgacagccggggcagatttggcgaactgctcctgctgctgcccaccctgcagagcatcacctggcagatgatcgagcagatccagttcatcaagctgttcggcatggccaagatcgacaatctgctgcaggaaatgctgctcgggggcagcccttctgatgcccctcatgcccaccaccctctgcaccctcacctgatgcaagaacacatgggcaccaatgtgatcgtggccaacacaatgcccacccacctgagcaacggccagatgtgcgagtggcccagacctagaggacaggccgccacacctgagacacctcagccttctccacctggcggctctggcagcgagccttacaaactgctgcctggcgctgtggccaccatcgtgaaacctctgagcgccatcccccagcccaccatcaccaagcaggaagtgatctgaggactagttataagactgactagcccgatgggcctcccaacgggccctcctcccctccttgcaccgagattaataaaaaaaaaaaaaaaaaaaaaaaaaaaaaaaaaaaaaaaaaaaaaaaaaaaaaaaaaaaaaaaatgcatcccccccccccccccccccccccccccccccaaaggctcttttcagagccaccagaatt

SEQ ID NO: 1972 - RNA, 1642 nt, synthetic construct
  misc_feature 1..1642: note = mRNA i-3 (A64-N5-C30-hSL-N5) (opt29) from Homo sapiens__NP_000448.3__HNF4A(1-474)(S313E)
  source 1..1642: mol_type = other RNA
aggagaaagcttaccatgagactgagcaagaccctggtggacatggacatggccgactactctgccgccctggaccctgcctacaccaccctggagttcgaaaacgtgcaagtgctgaccatgggcaacgacaccagccctagcgagggcaccaacctgaacgcccctaatagcctgggagtgtccgccctgtgtgccatctgtggcgatagagccaccggcaagcactacggcgccagctcttgtgatggctgcaagggcttcttccggcggagcgtgcggaagaaccacatgtacagctgccggttcagccggcagtgcgtggtggacaaggataagcggaaccagtgccggtactgcagactgaagaagtgcttcagagccggcatgaagaaagaagccgtgcagaacgagcgggaccggatcagcaccagaagaagcagctacgaggacagcagcctgcccagcatcaacgccctgctgcaggccgaggtgctgagcagacagatcaccagcccagtgtccggcatcaacggcgacatccgggccaagaagatcgccagcattgccgacgtgtgcgagagcatgaaggaacagctgctggtgctggtggaatgggccaagtacatccccgccttttgcgagctgcccctggacgatcaggtggccctgctgagagcacacgccggcgaacatctgctgctgggagccaccaagcggagcatggtgttcaaggacgtgctgctgctgggcaacgactacatcgtgcccagacactgccctgagctggccgagatgagccgggtgtccatcagaatcctggacgaactggtgctgccgtttcaggaactgcagatcgacgacaacgagtacgcctacctgaaggccatcatctttttcgaccccgacgccaagggcctgagcgaccctggcaagatcaagcggctgagagaacaggtgcaagtgtccctggaagattacatcaacgaccggcagtacgacagccggggcagatttggcgaactgctcctgctgctgcccaccctgcagagcatcacctggcagatgatcgagcagatccagttcatcaagctgttcggcatggccaagatcgacaatctgctgcaggaaatgctgctcgggggcagcccttctgatgcccctcatgcccaccaccctctgcaccctcacctgatgcaagaacacatgggcaccaatgtgatcgtggccaacacaatgcccacccacctgagcaacggccagatgtgcgagtggcccagacctagaggacaggccgccacacctgagacacctcagccttctccacctggcggctctggcagcgagccttacaaactgctgcctggcgctgtggccaccatcgtgaaacctctgagcgccatcccccagcccaccatcaccaagcaggaagtgatctgaggactagttataagactgactagcccgatgggcctcccaacgggccctcctcccctccttgcaccgagattaataaaaaaaaaaaaaaaaaaaaaaaaaaaaaaaaaaaaaaaaaaaaaaaaaaaaaaaaaaaaaaaatgcatcccccccccccccccccccccccccccccccaaaggctcttttcagagccaccagaatt

SEQ ID NO: 1973 - RNA, 1642 nt, synthetic construct
  misc_feature 1..1642: note = mRNA i-3 (A64-N5-C30-hSL-N5) (opt29) from Homo sapiens__NP_000448.3__HNF4A(1-474)(S142A_S143A)
  source 1..1642: mol_type = other RNA
aggagaaagcttaccatgagactgagcaagaccctggtggacatggacatggccgactactctgccgccctggaccctgcctacaccaccctggagttcgaaaacgtgcaagtgctgaccatgggcaacgacaccagccctagcgagggcaccaacctgaacgcccctaatagcctgggagtgtccgccctgtgtgccatctgtggcgatagagccaccggcaagcactacggcgccagctcttgtgatggctgcaagggcttcttccggcggagcgtgcggaagaaccacatgtacagctgccggttcagccggcagtgcgtggtggacaaggataagcggaaccagtgccggtactgcagactgaagaagtgcttcagagccggcatgaagaaagaagccgtgcagaacgagcgggaccggatcagcaccagaagagccgcctacgaggacagcagcctgcccagcatcaacgccctgctgcaggccgaggtgctgagcagacagatcaccagcccagtgtccggcatcaacggcgacatccgggccaagaagatcgccagcattgccgacgtgtgcgagagcatgaaggaacagctgctggtgctggtggaatgggccaagtacatccccgccttttgcgagctgcccctggacgatcaggtggccctgctgagagcacacgccggcgaacatctgctgctgggagccaccaagcggagcatggtgttcaaggacgtgctgctgctgggcaacgactacatcgtgcccagacactgccctgagctggccgagatgagccgggtgtccatcagaatcctggacgaactggtgctgccgtttcaggaactgcagatcgacgacaacgagtacgcctacctgaaggccatcatctttttcgaccccgacgccaagggcctgagcgaccctggcaagatcaagcggctgagaagccaggtgcaagtgtccctggaagattacatcaacgaccggcagtacgacagccggggcagatttggcgaactgctcctgctgctgcccaccctgcagagcatcacctggcagatgatcgagcagatccagttcatcaagctgttcggcatggccaagatcgacaatctgctgcaggaaatgctgctcgggggcagcccttctgatgcccctcatgcccaccaccctctgcaccctcacctgatgcaagaacacatgggcaccaatgtgatcgtggccaacacaatgcccacccacctgagcaacggccagatgtgcgagtggcccagacctagaggacaggccgccacacctgagacacctcagccttctccacctggcggctctggcagcgagccttacaaactgctgcctggcgctgtggccaccatcgtgaaacctctgagcgccatcccccagcccaccatcaccaagcaggaagtgatctgaggactagttataagactgactagcccgatgggcctcccaacgggccctcctcccctccttgcaccgagattaataaaaaaaaaaaaaaaaaaaaaaaaaaaaaaaaaaaaaaaaaaaaaaaaaaaaaaaaaaaaaaaatgcatcccccccccccccccccccccccccccccccaaaggctcttttcagagccaccagaatt

SEQ ID NO: 1974 - RNA, 1642 nt, synthetic construct
  misc_feature 1..1642: note = mRNA i-3 (A64-N5-C30-hSL-N5) (opt29) from Homo sapiens__NP_000448.3__HNF4A(1-474)(S142E_S143E)
  source 1..1642: mol_type = other RNA
aggagaaagcttaccatgagactgagcaagaccctggtggacatggacatggccgactactctgccgccctggaccctgcctacaccaccctggagttcgaaaacgtgcaagtgctgaccatgggcaacgacaccagccctagcgagggcaccaacctgaacgcccctaatagcctgggagtgtccgccctgtgtgccatctgtggcgatagagccaccggcaagcactacggcgccagctcttgtgatggctgcaagggcttcttccggcggagcgtgcggaagaaccacatgtacagctgccggttcagccggcagtgcgtggtggacaaggataagcggaaccagtgccggtactgcagactgaagaagtgcttcagagccggcatgaagaaagaagccgtgcagaacgagcgggaccggatcagcaccagaagagaagagtacgaggacagcagcctgcccagcatcaacgccctgctgcaggccgaggtgctgagcagacagatcaccagcccagtgtccggcatcaacggcgacatccgggccaagaagatcgccagcattgccgacgtgtgcgagagcatgaaggaacagctgctggtgctggtggaatgggccaagtacatccccgccttttgcgagctgcccctggacgatcaggtggccctgctgagagcacacgccggcgaacatctgctgctgggagccaccaagcggagcatggtgttcaaggacgtgctgctgctgggcaacgactacatcgtgcccagacactgccctgagctggccgagatgagccgggtgtccatcagaatcctggacgaactggtgctgccgtttcaggaactgcagatcgacgacaacgagtacgcctacctgaaggccatcatctttttcgaccccgacgccaagggcctgagcgaccctggcaagatcaagcggctgagaagccaggtgcaagtgtccctggaagattacatcaacgaccggcagtacgacagccggggcagatttggcgaactgctcctgctgctgcccaccctgcagagcatcacctggcagatgatcgagcagatccagttcatcaagctgttcggcatggccaagatcgacaatctgctgcaggaaatgctgctcgggggcagcccttctgatgcccctcatgcccaccaccctctgcaccctcacctgatgcaagaacacatgggcaccaatgtgatcgtggccaacacaatgcccacccacctgagcaacggccagatgtgcgagtggcccagacctagaggacaggccgccacacctgagacacctcagccttctccacctggcggctctggcagcgagccttacaaactgctgcctggcgctgtggccaccatcgtgaaacctctgagcgccatcccccagcccaccatcaccaagcaggaagtgatctgaggactagttataagactgactagcccgatgggcctcccaacgggccctcctcccctccttgcaccgagattaataaaaaaaaaaaaaaaaaaaaaaaaaaaaaaaaaaaaaaaaaaaaaaaaaaaaaaaaaaaaaaaatgcatcccccccccccccccccccccccccccccccaaaggctcttttcagagccaccagaatt

SEQ ID NO: 1975 - RNA, 1642 nt, synthetic construct
  misc_feature 1..1642: note = mRNA i-3 (A64-N5-C30-hSL-N5) (opt29) from Homo sapiens__NP_000448.3__HNF4A(1-474)(S143A)
  source 1..1642: mol_type = other RNA
aggagaaagcttaccatgagactgagcaagaccctggtggacatggacatggccgactactctgccgccctggaccctgcctacaccaccctggagttcgaaaacgtgcaagtgctgaccatgggcaacgacaccagccctagcgagggcaccaacctgaacgcccctaatagcctgggagtgtccgccctgtgtgccatctgtggcgatagagccaccggcaagcactacggcgccagctcttgtgatggctgcaagggcttcttccggcggagcgtgcggaagaaccacatgtacagctgccggttcagccggcagtgcgtggtggacaaggataagcggaaccagtgccggtactgcagactgaagaagtgcttcagagccggcatgaagaaagaagccgtgcagaacgagcgggaccggatcagcaccagaagaagcgcctacgaggacagcagcctgcccagcatcaacgccctgctgcaggccgaggtgctgagcagacagatcaccagcccagtgtccggcatcaacggcgacatccgggccaagaagatcgccagcattgccgacgtgtgcgagagcatgaaggaacagctgctggtgctggtggaatgggccaagtacatccccgccttttgcgagctgcccctggacgatcaggtggccctgctgagagcacacgccggcgaacatctgctgctgggagccaccaagcggagcatggtgttcaaggacgtgctgctgctgggcaacgactacatcgtgcccagacactgccctgagctggccgagatgagccgggtgtccatcagaatcctggacgaactggtgctgccgtttcaggaactgcagatcgacgacaacgagtacgcctacctgaaggccatcatctttttcgaccccgacgccaagggcctgagcgaccctggcaagatcaagcggctgagaagccaggtgcaagtgtccctggaagattacatcaacgaccggcagtacgacagccggggcagatttggcgaactgctcctgctgctgcccaccctgcagagcatcacctggcagatgatcgagcagatccagttcatcaagctgttcggcatggccaagatcgacaatctgctgcaggaaatgctgctcgggggcagcccttctgatgcccctcatgcccaccaccctctgcaccctcacctgatgcaagaacacatgggcaccaatgtgatcgtggccaacacaatgcccacccacctgagcaacggccagatgtgcgagtggcccagacctagaggacaggccgccacacctgagacacctcagccttctccacctggcggctctggcagcgagccttacaaactgctgcctggcgctgtggccaccatcgtgaaacctctgagcgccatcccccagcccaccatcaccaagcaggaagtgatctgaggactagttataagactgactagcccgatgggcctcccaacgggccctcctcccctccttgcaccgagattaataaaaaaaaaaaaaaaaaaaaaaaaaaaaaaaaaaaaaaaaaaaaaaaaaaaaaaaaaaaaaaaatgcatcccccccccccccccccccccccccccccccaaaggctcttttcagagccaccagaatt

SEQ ID NO: 1976 - RNA, 1642 nt, synthetic construct
  misc_feature 1..1642: note = mRNA i-3 (A64-N5-C30-hSL-N5) (opt29) from Homo sapiens__NP_000448.3__HNF4A(1-474)(T166A)
  source 1..1642: mol_type = other RNA
aggagaaagcttaccatgagactgagcaagaccctggtggacatggacatggccgactactctgccgccctggaccctgcctacaccaccctggagttcgaaaacgtgcaagtgctgaccatgggcaacgacaccagccctagcgagggcaccaacctgaacgcccctaatagcctgggagtgtccgccctgtgtgccatctgtggcgatagagccaccggcaagcactacggcgccagctcttgtgatggctgcaagggcttcttccggcggagcgtgcggaagaaccacatgtacagctgccggttcagccggcagtgcgtggtggacaaggataagcggaaccagtgccggtactgcagactgaagaagtgcttcagagccggcatgaagaaagaagccgtgcagaacgagcgggaccggatcagcaccagaagaagcagctacgaggacagcagcctgcccagcatcaacgccctgctgcaggccgaggtgctgagcagacagatcgccagcccagtgtccggcatcaacggcgacatccgggccaagaagatcgccagcattgccgacgtgtgcgagagcatgaaggaacagctgctggtgctggtggaatgggccaagtacatccccgccttttgcgagctgcccctggacgatcaggtggccctgctgagagcacacgccggcgaacatctgctgctgggagccaccaagcggagcatggtgttcaaggacgtgctgctgctgggcaacgactacatcgtgcccagacactgccctgagctggccgagatgagccgggtgtccatcagaatcctggacgaactggtgctgccgtttcaggaactgcagatcgacgacaacgagtacgcctacctgaaggccatcatctttttcgaccccgacgccaagggcctgagcgaccctggcaagatcaagcggctgagaagccaggtgcaagtgtccctggaagattacatcaacgaccggcagtacgacagccggggcagatttggcgaactgctcctgctgctgcccaccctgcagagcatcacctggcagatgatcgagcagatccagttcatcaagctgttcggcatggccaagatcgacaatctgctgcaggaaatgctgctcgggggcagcccttctgatgcccctcatgcccaccaccctctgcaccctcacctgatgcaagaacacatgggcaccaatgtgatcgtggccaacacaatgcccacccacctgagcaacggccagatgtgcgagtggcccagacctagaggacaggccgccacacctgagacacctcagccttctccacctggcggctctggcagcgagccttacaaactgctgcctggcgctgtggccaccatcgtgaaacctctgagcgccatcccccagcccaccatcaccaagcaggaagtgatctgaggactagttataagactgactagcccgatgggcctcccaacgggccctcctcccctccttgcaccgagattaataaaaaaaaaaaaaaaaaaaaaaaaaaaaaaaaaaaaaaaaaaaaaaaaaaaaaaaaaaaaaaaatgcatcccccccccccccccccccccccccccccccaaaggctcttttcagagccaccagaatt

SEQ ID NO: 1977 - RNA, 1642 nt, synthetic construct
  misc_feature 1..1642: note = mRNA i-3 (A64-N5-C30-hSL-N5) (opt29) from Homo sapiens__NP_000448.3__HNF4A(1-474)(S167E)
  source 1..1642: mol_type = other RNA
aggagaaagcttaccatgagactgagcaagaccctggtggacatggacatggccgactactctgccgccctggaccctgcctacaccaccctggagttcgaaaacgtgcaagtgctgaccatgggcaacgacaccagccctagcgagggcaccaacctgaacgcccctaatagcctgggagtgtccgccctgtgtgccatctgtggcgatagagccaccggcaagcactacggcgccagctcttgtgatggctgcaagggcttcttccggcggagcgtgcggaagaaccacatgtacagctgccggttcagccggcagtgcgtggtggacaaggataagcggaaccagtgccggtactgcagactgaagaagtgcttcagagccggcatgaagaaagaagccgtgcagaacgagcgggaccggatcagcaccagaagaagcagctacgaggacagcagcctgcccagcatcaacgccctgctgcaggccgaggtgctgagcagacagatcaccgaaccagtgtccggcatcaacggcgacatccgggccaagaagatcgccagcattgccgacgtgtgcgagagcatgaaggaacagctgctggtgctggtggaatgggccaagtacatccccgccttttgcgagctgcccctggacgatcaggtggccctgctgagagcacacgccggcgaacatctgctgctgggagccaccaagcggagcatggtgttcaaggacgtgctgctgctgggcaacgactacatcgtgcccagacactgccctgagctggccgagatgagccgggtgtccatcagaatcctggacgaactggtgctgccgtttcaggaactgcagatcgacgacaacgagtacgcctacctgaaggccatcatctttttcgaccccgacgccaagggcctgagcgaccctggcaagatcaagcggctgagaagccaggtgcaagtgtccctggaagattacatcaacgaccggcagtacgacagccggggcagatttggcgaactgctcctgctgctgcccaccctgcagagcatcacctggcagatgatcgagcagatccagttcatcaagctgttcggcatggccaagatcgacaatctgctgcaggaaatgctgctcgggggcagcccttctgatgcccctcatgcccaccaccctctgcaccctcacctgatgcaagaacacatgggcaccaatgtgatcgtggccaacacaatgcccacccacctgagcaacggccagatgtgcgagtggcccagacctagaggacaggccgccacacctgagacacctcagccttctccacctggcggctctggcagcgagccttacaaactgctgcctggcgctgtggccaccatcgtgaaacctctgagcgccatcccccagcccaccatcaccaagcaggaagtgatctgaggactagttataagactgactagcccgatgggcctcccaacgggccctcctcccctccttgcaccgagattaataaaaaaaaaaaaaaaaaaaaaaaaaaaaaaaaaaaaaaaaaaaaaaaaaaaaaaaaaaaaaaaatgcatcccccccccccccccccccccccccccccccaaaggctcttttcagagccaccagaatt

SEQ ID NO: 1978 - RNA, 1642 nt, synthetic construct
  misc_feature 1..1642: note = mRNA i-3 (A64-N5-C30-hSL-N5) (opt29) from Homo sapiens__NP_000448.3__HNF4A(1-474)(S167A)
  source 1..1642: mol_type = other RNA
aggagaaagcttaccatgagactgagcaagaccctggtggacatggacatggccgactactctgccgccctggaccctgcctacaccaccctggagttcgaaaacgtgcaagtgctgaccatgggcaacgacaccagccctagcgagggcaccaacctgaacgcccctaatagcctgggagtgtccgccctgtgtgccatctgtggcgatagagccaccggcaagcactacggcgccagctcttgtgatggctgcaagggcttcttccggcggagcgtgcggaagaaccacatgtacagctgccggttcagccggcagtgcgtggtggacaaggataagcggaaccagtgccggtactgcagactgaagaagtgcttcagagccggcatgaagaaagaagccgtgcagaacgagcgggaccggatcagcaccagaagaagcagctacgaggacagcagcctgcccagcatcaacgccctgctgcaggccgaggtgctgagcagacagatcaccgccccagtgtccggcatcaacggcgacatccgggccaagaagatcgccagcattgccgacgtgtgcgagagcatgaaggaacagctgctggtgctggtggaatgggccaagtacatccccgccttttgcgagctgcccctggacgatcaggtggccctgctgagagcacacgccggcgaacatctgctgctgggagccaccaagcggagcatggtgttcaaggacgtgctgctgctgggcaacgactacatcgtgcccagacactgccctgagctggccgagatgagccgggtgtccatcagaatcctggacgaactggtgctgccgtttcaggaactgcagatcgacgacaacgagtacgcctacctgaaggccatcatctttttcgaccccgacgccaagggcctgagcgaccctggcaagatcaagcggctgagaagccaggtgcaagtgtccctggaagattacatcaacgaccggcagtacgacagccggggcagatttggcgaactgctcctgctgctgcccaccctgcagagcatcacctggcagatgatcgagcagatccagttcatcaagctgttcggcatggccaagatcgacaatctgctgcaggaaatgctgctcgggggcagcccttctgatgcccctcatgcccaccaccctctgcaccctcacctgatgcaagaacacatgggcaccaatgtgatcgtggccaacacaatgcccacccacctgagcaacggccagatgtgcgagtggcccagacctagaggacaggccgccacacctgagacacctcagccttctccacctggcggctctggcagcgagccttacaaactgctgcctggcgctgtggccaccatcgtgaaacctctgagcgccatcccccagcccaccatcaccaagcaggaagtgatctgaggactagttataagactgactagcccgatgggcctcccaacgggccctcctcccctccttgcaccgagattaataaaaaaaaaaaaaaaaaaaaaaaaaaaaaaaaaaaaaaaaaaaaaaaaaaaaaaaaaaaaaaaatgcatcccccccccccccccccccccccccccccccaaaggctcttttcagagccaccagaatt

SEQ ID NO: 1979 - RNA, 1642 nt, synthetic construct
  misc_feature 1..1642: note = mRNA i-3 (A64-N5-C30-hSL-N5) (opt29) from Homo sapiens__NP_000448.3__HNF4A(1-474)(S167A_S378A_T429A_T432A_ S436A)
  source 1..1642: mol_type = other RNA
aggagaaagcttaccatgagactgagcaagaccctggtggacatggacatggccgactactctgccgccctggaccctgcctacaccaccctggagttcgaaaacgtgcaagtgctgaccatgggcaacgacaccagccctagcgagggcaccaacctgaacgcccctaatagcctgggagtgtccgccctgtgtgccatctgtggcgatagagccaccggcaagcactacggcgccagctcttgtgatggctgcaagggcttcttccggcggagcgtgcggaagaaccacatgtacagctgccggttcagccggcagtgcgtggtggacaaggataagcggaaccagtgccggtactgcagactgaagaagtgcttcagagccggcatgaagaaagaagccgtgcagaacgagcgggaccggatcagcaccagaagaagcagctacgaggacagcagcctgcccagcatcaacgccctgctgcaggccgaggtgctgagcagacagatcaccgccccagtgtccggcatcaacggcgacatccgggccaagaagatcgccagcattgccgacgtgtgcgagagcatgaaggaacagctgctggtgctggtggaatgggccaagtacatccccgccttttgcgagctgcccctggacgatcaggtggccctgctgagagcacacgccggcgaacatctgctgctgggagccaccaagcggagcatggtgttcaaggacgtgctgctgctgggcaacgactacatcgtgcccagacactgccctgagctggccgagatgagccgggtgtccatcagaatcctggacgaactggtgctgccgtttcaggaactgcagatcgacgacaacgagtacgcctacctgaaggccatcatctttttcgaccccgacgccaagggcctgagcgaccctggcaagatcaagcggctgagaagccaggtgcaagtgtccctggaagattacatcaacgaccggcagtacgacagccggggcagatttggcgaactgctcctgctgctgcccaccctgcagagcatcacctggcagatgatcgagcagatccagttcatcaagctgttcggcatggccaagatcgacaatctgctgcaggaaatgctgctcgggggcgccccttctgatgcccctcatgcccaccaccctctgcaccctcacctgatgcaagaacacatgggcaccaatgtgatcgtggccaacacaatgcccacccacctgagcaacggccagatgtgcgagtggcccagacctagaggacaggccgccgcccctgaggcccctcagcctgccccacctggcggctctggcagcgagccttacaaactgctgcctggcgctgtggccaccatcgtgaaacctctgagcgccatcccccagcccaccatcaccaagcaggaagtgatctgaggactagttataagactgactagcccgatgggcctcccaacgggccctcctcccctccttgcaccgagattaataaaaaaaaaaaaaaaaaaaaaaaaaaaaaaaaaaaaaaaaaaaaaaaaaaaaaaaaaaaaaaaatgcatcccccccccccccccccccccccccccccccaaaggctcttttcagagccaccagaatt

SEQ ID NO: 1980 - RNA, 1642 nt, synthetic construct
  misc_feature 1..1642: note = mRNA i-3 (A64-N5-C30-hSL-N5) (opt29) from Homo sapiens__NP_000448.3__HNF4A(1-474)(S167E_S378E_T429E_T432E_ S436E)
  source 1..1642: mol_type = other RNA
aggagaaagcttaccatgagactgagcaagaccctggtggacatggacatggccgactactctgccgccctggaccctgcctacaccaccctggagttcgaaaacgtgcaagtgctgaccatgggcaacgacaccagccctagcgagggcaccaacctgaacgcccctaatagcctgggagtgtccgccctgtgtgccatctgtggcgatagagccaccggcaagcactacggcgccagctcttgtgatggctgcaagggcttcttccggcggagcgtgcggaagaaccacatgtacagctgccggttcagccggcagtgcgtggtggacaaggataagcggaaccagtgccggtactgcagactgaagaagtgcttcagagccggcatgaagaaagaagccgtgcagaacgagcgggaccggatcagcaccagaagaagcagctacgaggacagcagcctgcccagcatcaacgccctgctgcaggccgaggtgctgagcagacagatcaccgaaccagtgtccggcatcaacggcgacatccgggccaagaagatcgccagcattgccgacgtgtgcgagagcatgaaggaacagctgctggtgctggtggaatgggccaagtacatccccgccttttgcgagctgcccctggacgatcaggtggccctgctgagagcacacgccggcgaacatctgctgctgggagccaccaagcggagcatggtgttcaaggacgtgctgctgctgggcaacgactacatcgtgcccagacactgccctgagctggccgagatgagccgggtgtccatcagaatcctggacgaactggtgctgccgtttcaggaactgcagatcgacgacaacgagtacgcctacctgaaggccatcatctttttcgaccccgacgccaagggcctgagcgaccctggcaagatcaagcggctgagaagccaggtgcaagtgtccctggaagattacatcaacgaccggcagtacgacagccggggcagatttggcgaactgctcctgctgctgcccaccctgcagagcatcacctggcagatgatcgagcagatccagttcatcaagctgttcggcatggccaagatcgacaatctgctgcaggaaatgctgctcgggggcgagccttctgatgcccctcatgcccaccaccctctgcaccctcacctgatgcaagaacacatgggcaccaatgtgatcgtggccaacacaatgcccacccacctgagcaacggccagatgtgcgagtggcccagacctagaggacaggccgccgaacctgaggagcctcagcctgaaccacctggcggctctggcagcgagccttacaaactgctgcctggcgctgtggccaccatcgtgaaacctctgagcgccatcccccagcccaccatcaccaagcaggaagtgatctgaggactagttataagactgactagcccgatgggcctcccaacgggccctcctcccctccttgcaccgagattaataaaaaaaaaaaaaaaaaaaaaaaaaaaaaaaaaaaaaaaaaaaaaaaaaaaaaaaaaaaaaaaatgcatcccccccccccccccccccccccccccccccaaaggctcttttcagagccaccagaatt

SEQ ID NO: 1981 - RNA, 1642 nt, synthetic construct
  misc_feature 1..1642: note = mRNA i-3 (A64-N5-C30-hSL-N5) (opt29) from Homo sapiens__NP_000448.3__HNF4A(1-474)(S87A)
  source 1..1642: mol_type = other RNA
aggagaaagcttaccatgagactgagcaagaccctggtggacatggacatggccgactactctgccgccctggaccctgcctacaccaccctggagttcgaaaacgtgcaagtgctgaccatgggcaacgacaccagccctagcgagggcaccaacctgaacgcccctaatagcctgggagtgtccgccctgtgtgccatctgtggcgatagagccaccggcaagcactacggcgccagctcttgtgatggctgcaagggcttcttccggcgggccgtgcggaagaaccacatgtacagctgccggttcagccggcagtgcgtggtggacaaggataagcggaaccagtgccggtactgcagactgaagaagtgcttcagagccggcatgaagaaagaagccgtgcagaacgagcgggaccggatcagcaccagaagaagcagctacgaggacagcagcctgcccagcatcaacgccctgctgcaggccgaggtgctgagcagacagatcaccagcccagtgtccggcatcaacggcgacatccgggccaagaagatcgccagcattgccgacgtgtgcgagagcatgaaggaacagctgctggtgctggtggaatgggccaagtacatccccgccttttgcgagctgcccctggacgatcaggtggccctgctgagagcacacgccggcgaacatctgctgctgggagccaccaagcggagcatggtgttcaaggacgtgctgctgctgggcaacgactacatcgtgcccagacactgccctgagctggccgagatgagccgggtgtccatcagaatcctggacgaactggtgctgccgtttcaggaactgcagatcgacgacaacgagtacgcctacctgaaggccatcatctttttcgaccccgacgccaagggcctgagcgaccctggcaagatcaagcggctgagaagccaggtgcaagtgtccctggaagattacatcaacgaccggcagtacgacagccggggcagatttggcgaactgctcctgctgctgcccaccctgcagagcatcacctggcagatgatcgagcagatccagttcatcaagctgttcggcatggccaagatcgacaatctgctgcaggaaatgctgctcgggggcagcccttctgatgcccctcatgcccaccaccctctgcaccctcacctgatgcaagaacacatgggcaccaatgtgatcgtggccaacacaatgcccacccacctgagcaacggccagatgtgcgagtggcccagacctagaggacaggccgccacacctgagacacctcagccttctccacctggcggctctggcagcgagccttacaaactgctgcctggcgctgtggccaccatcgtgaaacctctgagcgccatcccccagcccaccatcaccaagcaggaagtgatctgaggactagttataagactgactagcccgatgggcctcccaacgggccctcctcccctccttgcaccgagattaataaaaaaaaaaaaaaaaaaaaaaaaaaaaaaaaaaaaaaaaaaaaaaaaaaaaaaaaaaaaaaaatgcatcccccccccccccccccccccccccccccccaaaggctcttttcagagccaccagaatt

SEQ ID NO: 1982 - RNA, 1642 nt, synthetic construct
  misc_feature 1..1642: note = mRNA i-3 (A64-N5-C30-hSL-N5) (opt29) from Homo sapiens__NP_000448.3__HNF4A(1-474)(S87E)
  source 1..1642: mol_type = other RNA
aggagaaagcttaccatgagactgagcaagaccctggtggacatggacatggccgactactctgccgccctggaccctgcctacaccaccctggagttcgaaaacgtgcaagtgctgaccatgggcaacgacaccagccctagcgagggcaccaacctgaacgcccctaatagcctgggagtgtccgccctgtgtgccatctgtggcgatagagccaccggcaagcactacggcgccagctcttgtgatggctgcaagggcttcttccggcgggaggtgcggaagaaccacatgtacagctgccggttcagccggcagtgcgtggtggacaaggataagcggaaccagtgccggtactgcagactgaagaagtgcttcagagccggcatgaagaaagaagccgtgcagaacgagcgggaccggatcagcaccagaagaagcagctacgaggacagcagcctgcccagcatcaacgccctgctgcaggccgaggtgctgagcagacagatcaccagcccagtgtccggcatcaacggcgacatccgggccaagaagatcgccagcattgccgacgtgtgcgagagcatgaaggaacagctgctggtgctggtggaatgggccaagtacatccccgccttttgcgagctgcccctggacgatcaggtggccctgctgagagcacacgccggcgaacatctgctgctgggagccaccaagcggagcatggtgttcaaggacgtgctgctgctgggcaacgactacatcgtgcccagacactgccctgagctggccgagatgagccgggtgtccatcagaatcctggacgaactggtgctgccgtttcaggaactgcagatcgacgacaacgagtacgcctacctgaaggccatcatctttttcgaccccgacgccaagggcctgagcgaccctggcaagatcaagcggctgagaagccaggtgcaagtgtccctggaagattacatcaacgaccggcagtacgacagccggggcagatttggcgaactgctcctgctgctgcccaccctgcagagcatcacctggcagatgatcgagcagatccagttcatcaagctgttcggcatggccaagatcgacaatctgctgcaggaaatgctgctcgggggcagcccttctgatgcccctcatgcccaccaccctctgcaccctcacctgatgcaagaacacatgggcaccaatgtgatcgtggccaacacaatgcccacccacctgagcaacggccagatgtgcgagtggcccagacctagaggacaggccgccacacctgagacacctcagccttctccacctggcggctctggcagcgagccttacaaactgctgcctggcgctgtggccaccatcgtgaaacctctgagcgccatcccccagcccaccatcaccaagcaggaagtgatctgaggactagttataagactgactagcccgatgggcctcccaacgggccctcctcccctccttgcaccgagattaataaaaaaaaaaaaaaaaaaaaaaaaaaaaaaaaaaaaaaaaaaaaaaaaaaaaaaaaaaaaaaaatgcatcccccccccccccccccccccccccccccccaaaggctcttttcagagccaccagaatt

SEQ ID NO: 1983 - RNA, 1642 nt, synthetic construct
  misc_feature 1..1642: note = mRNA i-3 (A64-N5-C30-hSL-N5) (opt29) from Homo sapiens__NP_000448.3__HNF4A(1-474)(R2V)
  source 1..1642: mol_type = other RNA
aggagaaagcttaccatggtgctgagcaagaccctggtggacatggacatggccgactactctgccgccctggaccctgcctacaccaccctggagttcgaaaacgtgcaagtgctgaccatgggcaacgacaccagccctagcgagggcaccaacctgaacgcccctaatagcctgggagtgtccgccctgtgtgccatctgtggcgatagagccaccggcaagcactacggcgccagctcttgtgatggctgcaagggcttcttccggcggagcgtgcggaagaaccacatgtacagctgccggttcagccggcagtgcgtggtggacaaggataagcggaaccagtgccggtactgcagactgaagaagtgcttcagagccggcatgaagaaagaagccgtgcagaacgagcgggaccggatcagcaccagaagaagcagctacgaggacagcagcctgcccagcatcaacgccctgctgcaggccgaggtgctgagcagacagatcaccagcccagtgtccggcatcaacggcgacatccgggccaagaagatcgccagcattgccgacgtgtgcgagagcatgaaggaacagctgctggtgctggtggaatgggccaagtacatccccgccttttgcgagctgcccctggacgatcaggtggccctgctgagagcacacgccggcgaacatctgctgctgggagccaccaagcggagcatggtgttcaaggacgtgctgctgctgggcaacgactacatcgtgcccagacactgccctgagctggccgagatgagccgggtgtccatcagaatcctggacgaactggtgctgccgtttcaggaactgcagatcgacgacaacgagtacgcctacctgaaggccatcatctttttcgaccccgacgccaagggcctgagcgaccctggcaagatcaagcggctgagaagccaggtgcaagtgtccctggaagattacatcaacgaccggcagtacgacagccggggcagatttggcgaactgctcctgctgctgcccaccctgcagagcatcacctggcagatgatcgagcagatccagttcatcaagctgttcggcatggccaagatcgacaatctgctgcaggaaatgctgctcgggggcagcccttctgatgcccctcatgcccaccaccctctgcaccctcacctgatgcaagaacacatgggcaccaatgtgatcgtggccaacacaatgcccacccacctgagcaacggccagatgtgcgagtggcccagacctagaggacaggccgccacacctgagacacctcagccttctccacctggcggctctggcagcgagccttacaaactgctgcctggcgctgtggccaccatcgtgaaacctctgagcgccatcccccagcccaccatcaccaagcaggaagtgatctgaggactagttataagactgactagcccgatgggcctcccaacgggccctcctcccctccttgcaccgagattaataaaaaaaaaaaaaaaaaaaaaaaaaaaaaaaaaaaaaaaaaaaaaaaaaaaaaaaaaaaaaaaatgcatcccccccccccccccccccccccccccccccaaaggctcttttcagagccaccagaatt

SEQ ID NO: 1984 - RNA, 1642 nt, synthetic construct
  misc_feature 1..1642: note = mRNA i-3 (A64-N5-C30-hSL-N5) (opt29) from Homo sapiens__NP_000448.3__HNF4A(1-474)(R2V_K5V)
  source 1..1642: mol_type = other RNA
aggagaaagcttaccatggtgctgagcgtgaccctggtggacatggacatggccgactactctgccgccctggaccctgcctacaccaccctggagttcgaaaacgtgcaagtgctgaccatgggcaacgacaccagccctagcgagggcaccaacctgaacgcccctaatagcctgggagtgtccgccctgtgtgccatctgtggcgatagagccaccggcaagcactacggcgccagctcttgtgatggctgcaagggcttcttccggcggagcgtgcggaagaaccacatgtacagctgccggttcagccggcagtgcgtggtggacaaggataagcggaaccagtgccggtactgcagactgaagaagtgcttcagagccggcatgaagaaagaagccgtgcagaacgagcgggaccggatcagcaccagaagaagcagctacgaggacagcagcctgcccagcatcaacgccctgctgcaggccgaggtgctgagcagacagatcaccagcccagtgtccggcatcaacggcgacatccgggccaagaagatcgccagcattgccgacgtgtgcgagagcatgaaggaacagctgctggtgctggtggaatgggccaagtacatccccgccttttgcgagctgcccctggacgatcaggtggccctgctgagagcacacgccggcgaacatctgctgctgggagccaccaagcggagcatggtgttcaaggacgtgctgctgctgggcaacgactacatcgtgcccagacactgccctgagctggccgagatgagccgggtgtccatcagaatcctggacgaactggtgctgccgtttcaggaactgcagatcgacgacaacgagtacgcctacctgaaggccatcatctttttcgaccccgacgccaagggcctgagcgaccctggcaagatcaagcggctgagaagccaggtgcaagtgtccctggaagattacatcaacgaccggcagtacgacagccggggcagatttggcgaactgctcctgctgctgcccaccctgcagagcatcacctggcagatgatcgagcagatccagttcatcaagctgttcggcatggccaagatcgacaatctgctgcaggaaatgctgctcgggggcagcccttctgatgcccctcatgcccaccaccctctgcaccctcacctgatgcaagaacacatgggcaccaatgtgatcgtggccaacacaatgcccacccacctgagcaacggccagatgtgcgagtggcccagacctagaggacaggccgccacacctgagacacctcagccttctccacctggcggctctggcagcgagccttacaaactgctgcctggcgctgtggccaccatcgtgaaacctctgagcgccatcccccagcccaccatcaccaagcaggaagtgatctgaggactagttataagactgactagcccgatgggcctcccaacgggccctcctcccctccttgcaccgagattaataaaaaaaaaaaaaaaaaaaaaaaaaaaaaaaaaaaaaaaaaaaaaaaaaaaaaaaaaaaaaaaatgcatcccccccccccccccccccccccccccccccaaaggctcttttcagagccaccagaatt

SEQ ID NO: 1985 - RNA, 1642 nt, synthetic construct
  misc_feature 1..1642: note = mRNA i-3 (A64-N5-C30-hSL-N5) (opt29) from Homo sapiens__NP_000448.3__HNF4A(1-474)(K179R_K180R)
  source 1..1642: mol_type = other RNA
aggagaaagcttaccatgagactgagcaagaccctggtggacatggacatggccgactactctgccgccctggaccctgcctacaccaccctggagttcgaaaacgtgcaagtgctgaccatgggcaacgacaccagccctagcgagggcaccaacctgaacgcccctaatagcctgggagtgtccgccctgtgtgccatctgtggcgatagagccaccggcaagcactacggcgccagctcttgtgatggctgcaagggcttcttccggcggagcgtgcggaagaaccacatgtacagctgccggttcagccggcagtgcgtggtggacaaggataagcggaaccagtgccggtactgcagactgaagaagtgcttcagagccggcatgaagaaagaagccgtgcagaacgagcgggaccggatcagcaccagaagaagcagctacgaggacagcagcctgcccagcatcaacgccctgctgcaggccgaggtgctgagcagacagatcaccagcccagtgtccggcatcaacggcgacatccgggcccggagaatcgccagcattgccgacgtgtgcgagagcatgaaggaacagctgctggtgctggtggaatgggccaagtacatccccgccttttgcgagctgcccctggacgatcaggtggccctgctgagagcacacgccggcgaacatctgctgctgggagccaccaagcggagcatggtgttcaaggacgtgctgctgctgggcaacgactacatcgtgcccagacactgccctgagctggccgagatgagccgggtgtccatcagaatcctggacgaactggtgctgccgtttcaggaactgcagatcgacgacaacgagtacgcctacctgaaggccatcatctttttcgaccccgacgccaagggcctgagcgaccctggcaagatcaagcggctgagaagccaggtgcaagtgtccctggaagattacatcaacgaccggcagtacgacagccggggcagatttggcgaactgctcctgctgctgcccaccctgcagagcatcacctggcagatgatcgagcagatccagttcatcaagctgttcggcatggccaagatcgacaatctgctgcaggaaatgctgctcgggggcagcccttctgatgcccctcatgcccaccaccctctgcaccctcacctgatgcaagaacacatgggcaccaatgtgatcgtggccaacacaatgcccacccacctgagcaacggccagatgtgcgagtggcccagacctagaggacaggccgccacacctgagacacctcagccttctccacctggcggctctggcagcgagccttacaaactgctgcctggcgctgtggccaccatcgtgaaacctctgagcgccatcccccagcccaccatcaccaagcaggaagtgatctgaggactagttataagactgactagcccgatgggcctcccaacgggccctcctcccctccttgcaccgagattaataaaaaaaaaaaaaaaaaaaaaaaaaaaaaaaaaaaaaaaaaaaaaaaaaaaaaaaaaaaaaaaatgcatcccccccccccccccccccccccccccccccaaaggctcttttcagagccaccagaatt

SEQ ID NO: 1986 - RNA, 1642 nt, synthetic construct
  misc_feature 1..1642: note = mRNA i-3 (A64-N5-C30-hSL-N5) (opt29) from Homo sapiens__NP_000448.3__HNF4A(1-474)(K234R)
  source 1..1642: mol_type = other RNA
aggagaaagcttaccatgagactgagcaagaccctggtggacatggacatggccgactactctgccgccctggaccctgcctacaccaccctggagttcgaaaacgtgcaagtgctgaccatgggcaacgacaccagccctagcgagggcaccaacctgaacgcccctaatagcctgggagtgtccgccctgtgtgccatctgtggcgatagagccaccggcaagcactacggcgccagctcttgtgatggctgcaagggcttcttccggcggagcgtgcggaagaaccacatgtacagctgccggttcagccggcagtgcgtggtggacaaggataagcggaaccagtgccggtactgcagactgaagaagtgcttcagagccggcatgaagaaagaagccgtgcagaacgagcgggaccggatcagcaccagaagaagcagctacgaggacagcagcctgcccagcatcaacgccctgctgcaggccgaggtgctgagcagacagatcaccagcccagtgtccggcatcaacggcgacatccgggccaagaagatcgccagcattgccgacgtgtgcgagagcatgaaggaacagctgctggtgctggtggaatgggccaagtacatccccgccttttgcgagctgcccctggacgatcaggtggccctgctgagagcacacgccggcgaacatctgctgctgggagccacccggcggagcatggtgttcaaggacgtgctgctgctgggcaacgactacatcgtgcccagacactgccctgagctggccgagatgagccgggtgtccatcagaatcctggacgaactggtgctgccgtttcaggaactgcagatcgacgacaacgagtacgcctacctgaaggccatcatctttttcgaccccgacgccaagggcctgagcgaccctggcaagatcaagcggctgagaagccaggtgcaagtgtccctggaagattacatcaacgaccggcagtacgacagccggggcagatttggcgaactgctcctgctgctgcccaccctgcagagcatcacctggcagatgatcgagcagatccagttcatcaagctgttcggcatggccaagatcgacaatctgctgcaggaaatgctgctcgggggcagcccttctgatgcccctcatgcccaccaccctctgcaccctcacctgatgcaagaacacatgggcaccaatgtgatcgtggccaacacaatgcccacccacctgagcaacggccagatgtgcgagtggcccagacctagaggacaggccgccacacctgagacacctcagccttctccacctggcggctctggcagcgagccttacaaactgctgcctggcgctgtggccaccatcgtgaaacctctgagcgccatcccccagcccaccatcaccaagcaggaagtgatctgaggactagttataagactgactagcccgatgggcctcccaacgggccctcctcccctccttgcaccgagattaataaaaaaaaaaaaaaaaaaaaaaaaaaaaaaaaaaaaaaaaaaaaaaaaaaaaaaaaaaaaaaaatgcatcccccccccccccccccccccccccccccccaaaggctcttttcagagccaccagaatt

SEQ ID NO: 1987 - RNA, 1642 nt, synthetic construct
  misc_feature 1..1642: note = mRNA i-3 (A64-N5-C30-hSL-N5) (opt29) from Homo sapiens__NP_000448.3__HNF4A(1-474)(K300R)
  source 1..1642: mol_type = other RNA
aggagaaagcttaccatgagactgagcaagaccctggtggacatggacatggccgactactctgccgccctggaccctgcctacaccaccctggagttcgaaaacgtgcaagtgctgaccatgggcaacgacaccagccctagcgagggcaccaacctgaacgcccctaatagcctgggagtgtccgccctgtgtgccatctgtggcgatagagccaccggcaagcactacggcgccagctcttgtgatggctgcaagggcttcttccggcggagcgtgcggaagaaccacatgtacagctgccggttcagccggcagtgcgtggtggacaaggataagcggaaccagtgccggtactgcagactgaagaagtgcttcagagccggcatgaagaaagaagccgtgcagaacgagcgggaccggatcagcaccagaagaagcagctacgaggacagcagcctgcccagcatcaacgccctgctgcaggccgaggtgctgagcagacagatcaccagcccagtgtccggcatcaacggcgacatccgggccaagaagatcgccagcattgccgacgtgtgcgagagcatgaaggaacagctgctggtgctggtggaatgggccaagtacatccccgccttttgcgagctgcccctggacgatcaggtggccctgctgagagcacacgccggcgaacatctgctgctgggagccaccaagcggagcatggtgttcaaggacgtgctgctgctgggcaacgactacatcgtgcccagacactgccctgagctggccgagatgagccgggtgtccatcagaatcctggacgaactggtgctgccgtttcaggaactgcagatcgacgacaacgagtacgcctacctgaaggccatcatctttttcgaccccgacgccagaggcctgagcgaccctggcaagatcaagcggctgagaagccaggtgcaagtgtccctggaagattacatcaacgaccggcagtacgacagccggggcagatttggcgaactgctcctgctgctgcccaccctgcagagcatcacctggcagatgatcgagcagatccagttcatcaagctgttcggcatggccaagatcgacaatctgctgcaggaaatgctgctcgggggcagcccttctgatgcccctcatgcccaccaccctctgcaccctcacctgatgcaagaacacatgggcaccaatgtgatcgtggccaacacaatgcccacccacctgagcaacggccagatgtgcgagtggcccagacctagaggacaggccgccacacctgagacacctcagccttctccacctggcggctctggcagcgagccttacaaactgctgcctggcgctgtggccaccatcgtgaaacctctgagcgccatcccccagcccaccatcaccaagcaggaagtgatctgaggactagttataagactgactagcccgatgggcctcccaacgggccctcctcccctccttgcaccgagattaataaaaaaaaaaaaaaaaaaaaaaaaaaaaaaaaaaaaaaaaaaaaaaaaaaaaaaaaaaaaaaaatgcatcccccccccccccccccccccccccccccccaaaggctcttttcagagccaccagaatt

SEQ ID NO: 1988 - RNA, 1642 nt, synthetic construct
  misc_feature 1..1642: note = mRNA i-3 (A64-N5-C30-hSL-N5) (opt29) from Homo sapiens__NP_000448.3__HNF4A(1-474)(K300R_K307R_K309R)
  source 1..1642: mol_type = other RNA
aggagaaagcttaccatgagactgagcaagaccctggtggacatggacatggccgactactctgccgccctggaccctgcctacaccaccctggagttcgaaaacgtgcaagtgctgaccatgggcaacgacaccagccctagcgagggcaccaacctgaacgcccctaatagcctgggagtgtccgccctgtgtgccatctgtggcgatagagccaccggcaagcactacggcgccagctcttgtgatggctgcaagggcttcttccggcggagcgtgcggaagaaccacatgtacagctgccggttcagccggcagtgcgtggtggacaaggataagcggaaccagtgccggtactgcagactgaagaagtgcttcagagccggcatgaagaaagaagccgtgcagaacgagcgggaccggatcagcaccagaagaagcagctacgaggacagcagcctgcccagcatcaacgccctgctgcaggccgaggtgctgagcagacagatcaccagcccagtgtccggcatcaacggcgacatccgggccaagaagatcgccagcattgccgacgtgtgcgagagcatgaaggaacagctgctggtgctggtggaatgggccaagtacatccccgccttttgcgagctgcccctggacgatcaggtggccctgctgagagcacacgccggcgaacatctgctgctgggagccaccaagcggagcatggtgttcaaggacgtgctgctgctgggcaacgactacatcgtgcccagacactgccctgagctggccgagatgagccgggtgtccatcagaatcctggacgaactggtgctgccgtttcaggaactgcagatcgacgacaacgagtacgcctacctgaaggccatcatctttttcgaccccgacgccagaggcctgagcgaccctggccggatcagacggctgagaagccaggtgcaagtgtccctggaagattacatcaacgaccggcagtacgacagccggggcagatttggcgaactgctcctgctgctgcccaccctgcagagcatcacctggcagatgatcgagcagatccagttcatcaagctgttcggcatggccaagatcgacaatctgctgcaggaaatgctgctcgggggcagcccttctgatgcccctcatgcccaccaccctctgcaccctcacctgatgcaagaacacatgggcaccaatgtgatcgtggccaacacaatgcccacccacctgagcaacggccagatgtgcgagtggcccagacctagaggacaggccgccacacctgagacacctcagccttctccacctggcggctctggcagcgagccttacaaactgctgcctggcgctgtggccaccatcgtgaaacctctgagcgccatcccccagcccaccatcaccaagcaggaagtgatctgaggactagttataagactgactagcccgatgggcctcccaacgggccctcctcccctccttgcaccgagattaataaaaaaaaaaaaaaaaaaaaaaaaaaaaaaaaaaaaaaaaaaaaaaaaaaaaaaaaaaaaaaaatgcatcccccccccccccccccccccccccccccccaaaggctcttttcagagccaccagaatt

SEQ ID NO: 1989 - RNA, 1642 nt, synthetic construct
  misc_feature 1..1642: note = mRNA i-3 (A64-N5-C30-hSL-N5) (opt29) from Homo sapiens__NP_000448.3__HNF4A(1-474)(K447R_K470R)
  source 1..1642: mol_type = other RNA
aggagaaagcttaccatgagactgagcaagaccctggtggacatggacatggccgactactctgccgccctggaccctgcctacaccaccctggagttcgaaaacgtgcaagtgctgaccatgggcaacgacaccagccctagcgagggcaccaacctgaacgcccctaatagcctgggagtgtccgccctgtgtgccatctgtggcgatagagccaccggcaagcactacggcgccagctcttgtgatggctgcaagggcttcttccggcggagcgtgcggaagaaccacatgtacagctgccggttcagccggcagtgcgtggtggacaaggataagcggaaccagtgccggtactgcagactgaagaagtgcttcagagccggcatgaagaaagaagccgtgcagaacgagcgggaccggatcagcaccagaagaagcagctacgaggacagcagcctgcccagcatcaacgccctgctgcaggccgaggtgctgagcagacagatcaccagcccagtgtccggcatcaacggcgacatccgggccaagaagatcgccagcattgccgacgtgtgcgagagcatgaaggaacagctgctggtgctggtggaatgggccaagtacatccccgccttttgcgagctgcccctggacgatcaggtggccctgctgagagcacacgccggcgaacatctgctgctgggagccaccaagcggagcatggtgttcaaggacgtgctgctgctgggcaacgactacatcgtgcccagacactgccctgagctggccgagatgagccgggtgtccatcagaatcctggacgaactggtgctgccgtttcaggaactgcagatcgacgacaacgagtacgcctacctgaaggccatcatctttttcgaccccgacgccaagggcctgagcgaccctggcaagatcaagcggctgagaagccaggtgcaagtgtccctggaagattacatcaacgaccggcagtacgacagccggggcagatttggcgaactgctcctgctgctgcccaccctgcagagcatcacctggcagatgatcgagcagatccagttcatcaagctgttcggcatggccaagatcgacaatctgctgcaggaaatgctgctcgggggcagcccttctgatgcccctcatgcccaccaccctctgcaccctcacctgatgcaagaacacatgggcaccaatgtgatcgtggccaacacaatgcccacccacctgagcaacggccagatgtgcgagtggcccagacctagaggacaggccgccacacctgagacacctcagccttctccacctggcggctctggcagcgagccttaccggctgctgcctggcgctgtggccaccatcgtgaaacctctgagcgccatcccccagcccaccatcacccggcaggaagtgatctgaggactagttataagactgactagcccgatgggcctcccaacgggccctcctcccctccttgcaccgagattaataaaaaaaaaaaaaaaaaaaaaaaaaaaaaaaaaaaaaaaaaaaaaaaaaaaaaaaaaaaaaaaatgcatcccccccccccccccccccccccccccccccaaaggctcttttcagagccaccagaatt

SEQ ID NO: 1990 - RNA, 1642 nt, synthetic construct
  misc_feature 1..1642: note = mRNA i-3 (A64-N5-C30-hSL-N5) (opt29) from Homo sapiens__NP_000448.3__HNF4A(1-474)(K458R)
  source 1..1642: mol_type = other RNA
aggagaaagcttaccatgagactgagcaagaccctggtggacatggacatggccgactactctgccgccctggaccctgcctacaccaccctggagttcgaaaacgtgcaagtgctgaccatgggcaacgacaccagccctagcgagggcaccaacctgaacgcccctaatagcctgggagtgtccgccctgtgtgccatctgtggcgatagagccaccggcaagcactacggcgccagctcttgtgatggctgcaagggcttcttccggcggagcgtgcggaagaaccacatgtacagctgccggttcagccggcagtgcgtggtggacaaggataagcggaaccagtgccggtactgcagactgaagaagtgcttcagagccggcatgaagaaagaagccgtgcagaacgagcgggaccggatcagcaccagaagaagcagctacgaggacagcagcctgcccagcatcaacgccctgctgcaggccgaggtgctgagcagacagatcaccagcccagtgtccggcatcaacggcgacatccgggccaagaagatcgccagcattgccgacgtgtgcgagagcatgaaggaacagctgctggtgctggtggaatgggccaagtacatccccgccttttgcgagctgcccctggacgatcaggtggccctgctgagagcacacgccggcgaacatctgctgctgggagccaccaagcggagcatggtgttcaaggacgtgctgctgctgggcaacgactacatcgtgcccagacactgccctgagctggccgagatgagccgggtgtccatcagaatcctggacgaactggtgctgccgtttcaggaactgcagatcgacgacaacgagtacgcctacctgaaggccatcatctttttcgaccccgacgccaagggcctgagcgaccctggcaagatcaagcggctgagaagccaggtgcaagtgtccctggaagattacatcaacgaccggcagtacgacagccggggcagatttggcgaactgctcctgctgctgcccaccctgcagagcatcacctggcagatgatcgagcagatccagttcatcaagctgttcggcatggccaagatcgacaatctgctgcaggaaatgctgctcgggggcagcccttctgatgcccctcatgcccaccaccctctgcaccctcacctgatgcaagaacacatgggcaccaatgtgatcgtggccaacacaatgcccacccacctgagcaacggccagatgtgcgagtggcccagacctagaggacaggccgccacacctgagacacctcagccttctccacctggcggctctggcagcgagccttacaaactgctgcctggcgctgtggccaccatcgtgagacctctgagcgccatcccccagcccaccatcaccaagcaggaagtgatctgaggactagttataagactgactagcccgatgggcctcccaacgggccctcctcccctccttgcaccgagattaataaaaaaaaaaaaaaaaaaaaaaaaaaaaaaaaaaaaaaaaaaaaaaaaaaaaaaaaaaaaaaaatgcatcccccccccccccccccccccccccccccccaaaggctcttttcagagccaccagaatt

SEQ ID NO: 1991 - RNA, 1642 nt, synthetic construct
  misc_feature 1..1642: note = mRNA i-3 (A64-N5-C30-hSL-N5) (opt29) from Homo sapiens__NP_000448.3__HNF4A(1-474)(K106R_K108R_K126R_K127R)
  source 1..1642: mol_type = other RNA
aggagaaagcttaccatgagactgagcaagaccctggtggacatggacatggccgactactctgccgccctggaccctgcctacaccaccctggagttcgaaaacgtgcaagtgctgaccatgggcaacgacaccagccctagcgagggcaccaacctgaacgcccctaatagcctgggagtgtccgccctgtgtgccatctgtggcgatagagccaccggcaagcactacggcgccagctcttgtgatggctgcaagggcttcttccggcggagcgtgcggaagaaccacatgtacagctgccggttcagccggcagtgcgtggtggaccgggatagacggaaccagtgccggtactgcagactgaagaagtgcttcagagccggcatgcggagagaagccgtgcagaacgagcgggaccggatcagcaccagaagaagcagctacgaggacagcagcctgcccagcatcaacgccctgctgcaggccgaggtgctgagcagacagatcaccagcccagtgtccggcatcaacggcgacatccgggccaagaagatcgccagcattgccgacgtgtgcgagagcatgaaggaacagctgctggtgctggtggaatgggccaagtacatccccgccttttgcgagctgcccctggacgatcaggtggccctgctgagagcacacgccggcgaacatctgctgctgggagccaccaagcggagcatggtgttcaaggacgtgctgctgctgggcaacgactacatcgtgcccagacactgccctgagctggccgagatgagccgggtgtccatcagaatcctggacgaactggtgctgccgtttcaggaactgcagatcgacgacaacgagtacgcctacctgaaggccatcatctttttcgaccccgacgccaagggcctgagcgaccctggcaagatcaagcggctgagaagccaggtgcaagtgtccctggaagattacatcaacgaccggcagtacgacagccggggcagatttggcgaactgctcctgctgctgcccaccctgcagagcatcacctggcagatgatcgagcagatccagttcatcaagctgttcggcatggccaagatcgacaatctgctgcaggaaatgctgctcgggggcagcccttctgatgcccctcatgcccaccaccctctgcaccctcacctgatgcaagaacacatgggcaccaatgtgatcgtggccaacacaatgcccacccacctgagcaacggccagatgtgcgagtggcccagacctagaggacaggccgccacacctgagacacctcagccttctccacctggcggctctggcagcgagccttacaaactgctgcctggcgctgtggccaccatcgtgaaacctctgagcgccatcccccagcccaccatcaccaagcaggaagtgatctgaggactagttataagactgactagcccgatgggcctcccaacgggccctcctcccctccttgcaccgagattaataaaaaaaaaaaaaaaaaaaaaaaaaaaaaaaaaaaaaaaaaaaaaaaaaaaaaaaaaaaaaaaatgcatcccccccccccccccccccccccccccccccaaaggctcttttcagagccaccagaatt

SEQ ID NO: 1992 - RNA, 1642 nt, synthetic construct
  misc_feature 1..1642: note = mRNA i-3 (A64-N5-C30-hSL-N5) (opt29) from Homo sapiens__NP_000448.3__HNF4A(1-474)(E285Q)
  source 1..1642: mol_type = other RNA
aggagaaagcttaccatgagactgagcaagaccctggtggacatggacatggccgactactctgccgccctggaccctgcctacaccaccctggagttcgaaaacgtgcaagtgctgaccatgggcaacgacaccagccctagcgagggcaccaacctgaacgcccctaatagcctgggagtgtccgccctgtgtgccatctgtggcgatagagccaccggcaagcactacggcgccagctcttgtgatggctgcaagggcttcttccggcggagcgtgcggaagaaccacatgtacagctgccggttcagccggcagtgcgtggtggacaaggataagcggaaccagtgccggtactgcagactgaagaagtgcttcagagccggcatgaagaaagaagccgtgcagaacgagcgggaccggatcagcaccagaagaagcagctacgaggacagcagcctgcccagcatcaacgccctgctgcaggccgaggtgctgagcagacagatcaccagcccagtgtccggcatcaacggcgacatccgggccaagaagatcgccagcattgccgacgtgtgcgagagcatgaaggaacagctgctggtgctggtggaatgggccaagtacatccccgccttttgcgagctgcccctggacgatcaggtggccctgctgagagcacacgccggcgaacatctgctgctgggagccaccaagcggagcatggtgttcaaggacgtgctgctgctgggcaacgactacatcgtgcccagacactgccctgagctggccgagatgagccgggtgtccatcagaatcctggacgaactggtgctgccgtttcaggaactgcagatcgacgacaaccagtacgcctacctgaaggccatcatctttttcgaccccgacgccaagggcctgagcgaccctggcaagatcaagcggctgagaagccaggtgcaagtgtccctggaagattacatcaacgaccggcagtacgacagccggggcagatttggcgaactgctcctgctgctgcccaccctgcagagcatcacctggcagatgatcgagcagatccagttcatcaagctgttcggcatggccaagatcgacaatctgctgcaggaaatgctgctcgggggcagcccttctgatgcccctcatgcccaccaccctctgcaccctcacctgatgcaagaacacatgggcaccaatgtgatcgtggccaacacaatgcccacccacctgagcaacggccagatgtgcgagtggcccagacctagaggacaggccgccacacctgagacacctcagccttctccacctggcggctctggcagcgagccttacaaactgctgcctggcgctgtggccaccatcgtgaaacctctgagcgccatcccccagcccaccatcaccaagcaggaagtgatctgaggactagttataagactgactagcccgatgggcctcccaacgggccctcctcccctccttgcaccgagattaataaaaaaaaaaaaaaaaaaaaaaaaaaaaaaaaaaaaaaaaaaaaaaaaaaaaaaaaaaaaaaaatgcatcccccccccccccccccccccccccccccccaaaggctcttttcagagccaccagaatt

SEQ ID NO: 1993 - RNA, 1642 nt, synthetic construct
  misc_feature 1..1642: note = mRNA i-3 (A64-N5-C30-hSL-N5) (opt29) from Homo sapiens__NP_000448.3__HNF4A(1-474)(T166E)
  source 1..1642: mol_type = other RNA
aggagaaagcttaccatgagactgagcaagaccctggtggacatggacatggccgactactctgccgccctggaccctgcctacaccaccctggagttcgaaaacgtgcaagtgctgaccatgggcaacgacaccagccctagcgagggcaccaacctgaacgcccctaatagcctgggagtgtccgccctgtgtgccatctgtggcgatagagccaccggcaagcactacggcgccagctcttgtgatggctgcaagggcttcttccggcggagcgtgcggaagaaccacatgtacagctgccggttcagccggcagtgcgtggtggacaaggataagcggaaccagtgccggtactgcagactgaagaagtgcttcagagccggcatgaagaaagaagccgtgcagaacgagcgggaccggatcagcaccagaagaagcagctacgaggacagcagcctgcccagcatcaacgccctgctgcaggccgaggtgctgagcagacagatcgagagcccagtgtccggcatcaacggcgacatccgggccaagaagatcgccagcattgccgacgtgtgcgagagcatgaaggaacagctgctggtgctggtggaatgggccaagtacatccccgccttttgcgagctgcccctggacgatcaggtggccctgctgagagcacacgccggcgaacatctgctgctgggagccaccaagcggagcatggtgttcaaggacgtgctgctgctgggcaacgactacatcgtgcccagacactgccctgagctggccgagatgagccgggtgtccatcagaatcctggacgaactggtgctgccgtttcaggaactgcagatcgacgacaacgagtacgcctacctgaaggccatcatctttttcgaccccgacgccaagggcctgagcgaccctggcaagatcaagcggctgagaagccaggtgcaagtgtccctggaagattacatcaacgaccggcagtacgacagccggggcagatttggcgaactgctcctgctgctgcccaccctgcagagcatcacctggcagatgatcgagcagatccagttcatcaagctgttcggcatggccaagatcgacaatctgctgcaggaaatgctgctcgggggcagcccttctgatgcccctcatgcccaccaccctctgcaccctcacctgatgcaagaacacatgggcaccaatgtgatcgtggccaacacaatgcccacccacctgagcaacggccagatgtgcgagtggcccagacctagaggacaggccgccacacctgagacacctcagccttctccacctggcggctctggcagcgagccttacaaactgctgcctggcgctgtggccaccatcgtgaaacctctgagcgccatcccccagcccaccatcaccaagcaggaagtgatctgaggactagttataagactgactagcccgatgggcctcccaacgggccctcctcccctccttgcaccgagattaataaaaaaaaaaaaaaaaaaaaaaaaaaaaaaaaaaaaaaaaaaaaaaaaaaaaaaaaaaaaaaaatgcatcccccccccccccccccccccccccccccccaaaggctcttttcagagccaccagaatt

SEQ ID NO: 1994 - RNA, 1642 nt, synthetic construct
  misc_feature 1..1642: note = mRNA i-3 (A64-N5-C30-hSL-N5) (opt29) from Homo sapiens__NP_000448.3__HNF4A(1-474)(S148A)
  source 1..1642: mol_type = other RNA
aggagaaagcttaccatgagactgagcaagaccctggtggacatggacatggccgactactctgccgccctggaccctgcctacaccaccctggagttcgaaaacgtgcaagtgctgaccatgggcaacgacaccagccctagcgagggcaccaacctgaacgcccctaatagcctgggagtgtccgccctgtgtgccatctgtggcgatagagccaccggcaagcactacggcgccagctcttgtgatggctgcaagggcttcttccggcggagcgtgcggaagaaccacatgtacagctgccggttcagccggcagtgcgtggtggacaaggataagcggaaccagtgccggtactgcagactgaagaagtgcttcagagccggcatgaagaaagaagccgtgcagaacgagcgggaccggatcagcaccagaagaagcagctacgaggacagcgccctgcccagcatcaacgccctgctgcaggccgaggtgctgagcagacagatcaccagcccagtgtccggcatcaacggcgacatccgggccaagaagatcgccagcattgccgacgtgtgcgagagcatgaaggaacagctgctggtgctggtggaatgggccaagtacatccccgccttttgcgagctgcccctggacgatcaggtggccctgctgagagcacacgccggcgaacatctgctgctgggagccaccaagcggagcatggtgttcaaggacgtgctgctgctgggcaacgactacatcgtgcccagacactgccctgagctggccgagatgagccgggtgtccatcagaatcctggacgaactggtgctgccgtttcaggaactgcagatcgacgacaacgagtacgcctacctgaaggccatcatctttttcgaccccgacgccaagggcctgagcgaccctggcaagatcaagcggctgagaagccaggtgcaagtgtccctggaagattacatcaacgaccggcagtacgacagccggggcagatttggcgaactgctcctgctgctgcccaccctgcagagcatcacctggcagatgatcgagcagatccagttcatcaagctgttcggcatggccaagatcgacaatctgctgcaggaaatgctgctcgggggcagcccttctgatgcccctcatgcccaccaccctctgcaccctcacctgatgcaagaacacatgggcaccaatgtgatcgtggccaacacaatgcccacccacctgagcaacggccagatgtgcgagtggcccagacctagaggacaggccgccacacctgagacacctcagccttctccacctggcggctctggcagcgagccttacaaactgctgcctggcgctgtggccaccatcgtgaaacctctgagcgccatcccccagcccaccatcaccaagcaggaagtgatctgaggactagttataagactgactagcccgatgggcctcccaacgggccctcctcccctccttgcaccgagattaataaaaaaaaaaaaaaaaaaaaaaaaaaaaaaaaaaaaaaaaaaaaaaaaaaaaaaaaaaaaaaaatgcatcccccccccccccccccccccccccccccccaaaggctcttttcagagccaccagaatt

SEQ ID NO: 1995 - RNA, 1642 nt, synthetic construct
  misc_feature 1..1642: note = mRNA i-3 (A64-N5-C30-hSL-N5) (opt29) from Homo sapiens__NP_000448.3__HNF4A(1-474)(S148E)
  source 1..1642: mol_type = other RNA
aggagaaagcttaccatgagactgagcaagaccctggtggacatggacatggccgactactctgccgccctggaccctgcctacaccaccctggagttcgaaaacgtgcaagtgctgaccatgggcaacgacaccagccctagcgagggcaccaacctgaacgcccctaatagcctgggagtgtccgccctgtgtgccatctgtggcgatagagccaccggcaagcactacggcgccagctcttgtgatggctgcaagggcttcttccggcggagcgtgcggaagaaccacatgtacagctgccggttcagccggcagtgcgtggtggacaaggataagcggaaccagtgccggtactgcagactgaagaagtgcttcagagccggcatgaagaaagaagccgtgcagaacgagcgggaccggatcagcaccagaagaagcagctacgaggacagcgaactgcccagcatcaacgccctgctgcaggccgaggtgctgagcagacagatcaccagcccagtgtccggcatcaacggcgacatccgggccaagaagatcgccagcattgccgacgtgtgcgagagcatgaaggaacagctgctggtgctggtggaatgggccaagtacatccccgccttttgcgagctgcccctggacgatcaggtggccctgctgagagcacacgccggcgaacatctgctgctgggagccaccaagcggagcatggtgttcaaggacgtgctgctgctgggcaacgactacatcgtgcccagacactgccctgagctggccgagatgagccgggtgtccatcagaatcctggacgaactggtgctgccgtttcaggaactgcagatcgacgacaacgagtacgcctacctgaaggccatcatctttttcgaccccgacgccaagggcctgagcgaccctggcaagatcaagcggctgagaagccaggtgcaagtgtccctggaagattacatcaacgaccggcagtacgacagccggggcagatttggcgaactgctcctgctgctgcccaccctgcagagcatcacctggcagatgatcgagcagatccagttcatcaagctgttcggcatggccaagatcgacaatctgctgcaggaaatgctgctcgggggcagcccttctgatgcccctcatgcccaccaccctctgcaccctcacctgatgcaagaacacatgggcaccaatgtgatcgtggccaacacaatgcccacccacctgagcaacggccagatgtgcgagtggcccagacctagaggacaggccgccacacctgagacacctcagccttctccacctggcggctctggcagcgagccttacaaactgctgcctggcgctgtggccaccatcgtgaaacctctgagcgccatcccccagcccaccatcaccaagcaggaagtgatctgaggactagttataagactgactagcccgatgggcctcccaacgggccctcctcccctccttgcaccgagattaataaaaaaaaaaaaaaaaaaaaaaaaaaaaaaaaaaaaaaaaaaaaaaaaaaaaaaaaaaaaaaaatgcatcccccccccccccccccccccccccccccccaaaggctcttttcagagccaccagaatt

SEQ ID NO: 1996 - RNA, 1642 nt, synthetic construct
  misc_feature 1..1642: note = mRNA i-3 (A64-N5-C30-hSL-N5) (opt29) from Homo sapiens__NP_000448.3__HNF4A(1-474)(S183A)
  source 1..1642: mol_type = other RNA
aggagaaagcttaccatgagactgagcaagaccctggtggacatggacatggccgactactctgccgccctggaccctgcctacaccaccctggagttcgaaaacgtgcaagtgctgaccatgggcaacgacaccagccctagcgagggcaccaacctgaacgcccctaatagcctgggagtgtccgccctgtgtgccatctgtggcgatagagccaccggcaagcactacggcgccagctcttgtgatggctgcaagggcttcttccggcggagcgtgcggaagaaccacatgtacagctgccggttcagccggcagtgcgtggtggacaaggataagcggaaccagtgccggtactgcagactgaagaagtgcttcagagccggcatgaagaaagaagccgtgcagaacgagcgggaccggatcagcaccagaagaagcagctacgaggacagcagcctgcccagcatcaacgccctgctgcaggccgaggtgctgagcagacagatcaccagcccagtgtccggcatcaacggcgacatccgggccaagaagatcgccgccattgccgacgtgtgcgagagcatgaaggaacagctgctggtgctggtggaatgggccaagtacatccccgccttttgcgagctgcccctggacgatcaggtggccctgctgagagcacacgccggcgaacatctgctgctgggagccaccaagcggagcatggtgttcaaggacgtgctgctgctgggcaacgactacatcgtgcccagacactgccctgagctggccgagatgagccgggtgtccatcagaatcctggacgaactggtgctgccgtttcaggaactgcagatcgacgacaacgagtacgcctacctgaaggccatcatctttttcgaccccgacgccaagggcctgagcgaccctggcaagatcaagcggctgagaagccaggtgcaagtgtccctggaagattacatcaacgaccggcagtacgacagccggggcagatttggcgaactgctcctgctgctgcccaccctgcagagcatcacctggcagatgatcgagcagatccagttcatcaagctgttcggcatggccaagatcgacaatctgctgcaggaaatgctgctcgggggcagcccttctgatgcccctcatgcccaccaccctctgcaccctcacctgatgcaagaacacatgggcaccaatgtgatcgtggccaacacaatgcccacccacctgagcaacggccagatgtgcgagtggcccagacctagaggacaggccgccacacctgagacacctcagccttctccacctggcggctctggcagcgagccttacaaactgctgcctggcgctgtggccaccatcgtgaaacctctgagcgccatcccccagcccaccatcaccaagcaggaagtgatctgaggactagttataagactgactagcccgatgggcctcccaacgggccctcctcccctccttgcaccgagattaataaaaaaaaaaaaaaaaaaaaaaaaaaaaaaaaaaaaaaaaaaaaaaaaaaaaaaaaaaaaaaaatgcatcccccccccccccccccccccccccccccccaaaggctcttttcagagccaccagaatt

SEQ ID NO: 1997 - RNA, 1642 nt, synthetic construct
  misc_feature 1..1642: note = mRNA i-3 (A64-N5-C30-hSL-N5) (opt29) from Homo sapiens__NP_000448.3__HNF4A(1-474)(S183E)
  source 1..1642: mol_type = other RNA
aggagaaagcttaccatgagactgagcaagaccctggtggacatggacatggccgactactctgccgccctggaccctgcctacaccaccctggagttcgaaaacgtgcaagtgctgaccatgggcaacgacaccagccctagcgagggcaccaacctgaacgcccctaatagcctgggagtgtccgccctgtgtgccatctgtggcgatagagccaccggcaagcactacggcgccagctcttgtgatggctgcaagggcttcttccggcggagcgtgcggaagaaccacatgtacagctgccggttcagccggcagtgcgtggtggacaaggataagcggaaccagtgccggtactgcagactgaagaagtgcttcagagccggcatgaagaaagaagccgtgcagaacgagcgggaccggatcagcaccagaagaagcagctacgaggacagcagcctgcccagcatcaacgccctgctgcaggccgaggtgctgagcagacagatcaccagcccagtgtccggcatcaacggcgacatccgggccaagaagatcgccgagattgccgacgtgtgcgagagcatgaaggaacagctgctggtgctggtggaatgggccaagtacatccccgccttttgcgagctgcccctggacgatcaggtggccctgctgagagcacacgccggcgaacatctgctgctgggagccaccaagcggagcatggtgttcaaggacgtgctgctgctgggcaacgactacatcgtgcccagacactgccctgagctggccgagatgagccgggtgtccatcagaatcctggacgaactggtgctgccgtttcaggaactgcagatcgacgacaacgagtacgcctacctgaaggccatcatctttttcgaccccgacgccaagggcctgagcgaccctggcaagatcaagcggctgagaagccaggtgcaagtgtccctggaagattacatcaacgaccggcagtacgacagccggggcagatttggcgaactgctcctgctgctgcccaccctgcagagcatcacctggcagatgatcgagcagatccagttcatcaagctgttcggcatggccaagatcgacaatctgctgcaggaaatgctgctcgggggcagcccttctgatgcccctcatgcccaccaccctctgcaccctcacctgatgcaagaacacatgggcaccaatgtgatcgtggccaacacaatgcccacccacctgagcaacggccagatgtgcgagtggcccagacctagaggacaggccgccacacctgagacacctcagccttctccacctggcggctctggcagcgagccttacaaactgctgcctggcgctgtggccaccatcgtgaaacctctgagcgccatcccccagcccaccatcaccaagcaggaagtgatctgaggactagttataagactgactagcccgatgggcctcccaacgggccctcctcccctccttgcaccgagattaataaaaaaaaaaaaaaaaaaaaaaaaaaaaaaaaaaaaaaaaaaaaaaaaaaaaaaaaaaaaaaaatgcatcccccccccccccccccccccccccccccccaaaggctcttttcagagccaccagaatt

SEQ ID NO: 1998 - RNA, 1642 nt, synthetic construct
  misc_feature 1..1642: note = mRNA i-3 (A64-N5-C30-hSL-N5) (opt29) from Homo sapiens__NP_000448.3__HNF4A(1-474)(S461A)
  source 1..1642: mol_type = other RNA
aggagaaagcttaccatgagactgagcaagaccctggtggacatggacatggccgactactctgccgccctggaccctgcctacaccaccctggagttcgaaaacgtgcaagtgctgaccatgggcaacgacaccagccctagcgagggcaccaacctgaacgcccctaatagcctgggagtgtccgccctgtgtgccatctgtggcgatagagccaccggcaagcactacggcgccagctcttgtgatggctgcaagggcttcttccggcggagcgtgcggaagaaccacatgtacagctgccggttcagccggcagtgcgtggtggacaaggataagcggaaccagtgccggtactgcagactgaagaagtgcttcagagccggcatgaagaaagaagccgtgcagaacgagcgggaccggatcagcaccagaagaagcagctacgaggacagcagcctgcccagcatcaacgccctgctgcaggccgaggtgctgagcagacagatcaccagcccagtgtccggcatcaacggcgacatccgggccaagaagatcgccagcattgccgacgtgtgcgagagcatgaaggaacagctgctggtgctggtggaatgggccaagtacatccccgccttttgcgagctgcccctggacgatcaggtggccctgctgagagcacacgccggcgaacatctgctgctgggagccaccaagcggagcatggtgttcaaggacgtgctgctgctgggcaacgactacatcgtgcccagacactgccctgagctggccgagatgagccgggtgtccatcagaatcctggacgaactggtgctgccgtttcaggaactgcagatcgacgacaacgagtacgcctacctgaaggccatcatctttttcgaccccgacgccaagggcctgagcgaccctggcaagatcaagcggctgagaagccaggtgcaagtgtccctggaagattacatcaacgaccggcagtacgacagccggggcagatttggcgaactgctcctgctgctgcccaccctgcagagcatcacctggcagatgatcgagcagatccagttcatcaagctgttcggcatggccaagatcgacaatctgctgcaggaaatgctgctcgggggcagcccttctgatgcccctcatgcccaccaccctctgcaccctcacctgatgcaagaacacatgggcaccaatgtgatcgtggccaacacaatgcccacccacctgagcaacggccagatgtgcgagtggcccagacctagaggacaggccgccacacctgagacacctcagccttctccacctggcggctctggcagcgagccttacaaactgctgcctggcgctgtggccaccatcgtgaaacctctggccgccatcccccagcccaccatcaccaagcaggaagtgatctgaggactagttataagactgactagcccgatgggcctcccaacgggccctcctcccctccttgcaccgagattaataaaaaaaaaaaaaaaaaaaaaaaaaaaaaaaaaaaaaaaaaaaaaaaaaaaaaaaaaaaaaaaatgcatcccccccccccccccccccccccccccccccaaaggctcttttcagagccaccagaatt

SEQ ID NO: 1999 - RNA, 1642 nt, synthetic construct
  misc_feature 1..1642: note = mRNA i-3 (A64-N5-C30-hSL-N5) (opt29) from Homo sapiens__NP_000448.3__HNF4A(1-474)(S461E)
  source 1..1642: mol_type = other RNA
aggagaaagcttaccatgagactgagcaagaccctggtggacatggacatggccgactactctgccgccctggaccctgcctacaccaccctggagttcgaaaacgtgcaagtgctgaccatgggcaacgacaccagccctagcgagggcaccaacctgaacgcccctaatagcctgggagtgtccgccctgtgtgccatctgtggcgatagagccaccggcaagcactacggcgccagctcttgtgatggctgcaagggcttcttccggcggagcgtgcggaagaaccacatgtacagctgccggttcagccggcagtgcgtggtggacaaggataagcggaaccagtgccggtactgcagactgaagaagtgcttcagagccggcatgaagaaagaagccgtgcagaacgagcgggaccggatcagcaccagaagaagcagctacgaggacagcagcctgcccagcatcaacgccctgctgcaggccgaggtgctgagcagacagatcaccagcccagtgtccggcatcaacggcgacatccgggccaagaagatcgccagcattgccgacgtgtgcgagagcatgaaggaacagctgctggtgctggtggaatgggccaagtacatccccgccttttgcgagctgcccctggacgatcaggtggccctgctgagagcacacgccggcgaacatctgctgctgggagccaccaagcggagcatggtgttcaaggacgtgctgctgctgggcaacgactacatcgtgcccagacactgccctgagctggccgagatgagccgggtgtccatcagaatcctggacgaactggtgctgccgtttcaggaactgcagatcgacgacaacgagtacgcctacctgaaggccatcatctttttcgaccccgacgccaagggcctgagcgaccctggcaagatcaagcggctgagaagccaggtgcaagtgtccctggaagattacatcaacgaccggcagtacgacagccggggcagatttggcgaactgctcctgctgctgcccaccctgcagagcatcacctggcagatgatcgagcagatccagttcatcaagctgttcggcatggccaagatcgacaatctgctgcaggaaatgctgctcgggggcagcccttctgatgcccctcatgcccaccaccctctgcaccctcacctgatgcaagaacacatgggcaccaatgtgatcgtggccaacacaatgcccacccacctgagcaacggccagatgtgcgagtggcccagacctagaggacaggccgccacacctgagacacctcagccttctccacctggcggctctggcagcgagccttacaaactgctgcctggcgctgtggccaccatcgtgaaacctctggaggccatcccccagcccaccatcaccaagcaggaagtgatctgaggactagttataagactgactagcccgatgggcctcccaacgggccctcctcccctccttgcaccgagattaataaaaaaaaaaaaaaaaaaaaaaaaaaaaaaaaaaaaaaaaaaaaaaaaaaaaaaaaaaaaaaaatgcatcccccccccccccccccccccccccccccccaaaggctcttttcagagccaccagaatt

SEQ ID NO: 2000 - RNA, 1642 nt, synthetic construct
  misc_feature 1..1642: note = mRNA i-3 (A64-N5-C30-hSL-N5) (opt29) from Homo sapiens__NP_000448.3__HNF4A(1-474)(S142A_S143A_S313A)
  source 1..1642: mol_type = other RNA
aggagaaagcttaccatgagactgagcaagaccctggtggacatggacatggccgactactctgccgccctggaccctgcctacaccaccctggagttcgaaaacgtgcaagtgctgaccatgggcaacgacaccagccctagcgagggcaccaacctgaacgcccctaatagcctgggagtgtccgccctgtgtgccatctgtggcgatagagccaccggcaagcactacggcgccagctcttgtgatggctgcaagggcttcttccggcggagcgtgcggaagaaccacatgtacagctgccggttcagccggcagtgcgtggtggacaaggataagcggaaccagtgccggtactgcagactgaagaagtgcttcagagccggcatgaagaaagaagccgtgcagaacgagcgggaccggatcagcaccagaagagccgcctacgaggacagcagcctgcccagcatcaacgccctgctgcaggccgaggtgctgagcagacagatcaccagcccagtgtccggcatcaacggcgacatccgggccaagaagatcgccagcattgccgacgtgtgcgagagcatgaaggaacagctgctggtgctggtggaatgggccaagtacatccccgccttttgcgagctgcccctggacgatcaggtggccctgctgagagcacacgccggcgaacatctgctgctgggagccaccaagcggagcatggtgttcaaggacgtgctgctgctgggcaacgactacatcgtgcccagacactgccctgagctggccgagatgagccgggtgtccatcagaatcctggacgaactggtgctgccgtttcaggaactgcagatcgacgacaacgagtacgcctacctgaaggccatcatctttttcgaccccgacgccaagggcctgagcgaccctggcaagatcaagcggctgagagcccaggtgcaagtgtccctggaagattacatcaacgaccggcagtacgacagccggggcagatttggcgaactgctcctgctgctgcccaccctgcagagcatcacctggcagatgatcgagcagatccagttcatcaagctgttcggcatggccaagatcgacaatctgctgcaggaaatgctgctcgggggcagcccttctgatgcccctcatgcccaccaccctctgcaccctcacctgatgcaagaacacatgggcaccaatgtgatcgtggccaacacaatgcccacccacctgagcaacggccagatgtgcgagtggcccagacctagaggacaggccgccacacctgagacacctcagccttctccacctggcggctctggcagcgagccttacaaactgctgcctggcgctgtggccaccatcgtgaaacctctgagcgccatcccccagcccaccatcaccaagcaggaagtgatctgaggactagttataagactgactagcccgatgggcctcccaacgggccctcctcccctccttgcaccgagattaataaaaaaaaaaaaaaaaaaaaaaaaaaaaaaaaaaaaaaaaaaaaaaaaaaaaaaaaaaaaaaaatgcatcccccccccccccccccccccccccccccccaaaggctcttttcagagccaccagaatt

SEQ ID NO: 2001 - RNA, 1642 nt, synthetic construct
  misc_feature 1..1642: note = mRNA i-3 (A64-N5-C30-hSL-N5) (opt29) from Homo sapiens__NP_000448.3__HNF4A(1-474)(S142A_S143A_S313A_K458R)
  source 1..1642: mol_type = other RNA
aggagaaagcttaccatgagactgagcaagaccctggtggacatggacatggccgactactctgccgccctggaccctgcctacaccaccctggagttcgaaaacgtgcaagtgctgaccatgggcaacgacaccagccctagcgagggcaccaacctgaacgcccctaatagcctgggagtgtccgccctgtgtgccatctgtggcgatagagccaccggcaagcactacggcgccagctcttgtgatggctgcaagggcttcttccggcggagcgtgcggaagaaccacatgtacagctgccggttcagccggcagtgcgtggtggacaaggataagcggaaccagtgccggtactgcagactgaagaagtgcttcagagccggcatgaagaaagaagccgtgcagaacgagcgggaccggatcagcaccagaagagccgcctacgaggacagcagcctgcccagcatcaacgccctgctgcaggccgaggtgctgagcagacagatcaccagcccagtgtccggcatcaacggcgacatccgggccaagaagatcgccagcattgccgacgtgtgcgagagcatgaaggaacagctgctggtgctggtggaatgggccaagtacatccccgccttttgcgagctgcccctggacgatcaggtggccctgctgagagcacacgccggcgaacatctgctgctgggagccaccaagcggagcatggtgttcaaggacgtgctgctgctgggcaacgactacatcgtgcccagacactgccctgagctggccgagatgagccgggtgtccatcagaatcctggacgaactggtgctgccgtttcaggaactgcagatcgacgacaacgagtacgcctacctgaaggccatcatctttttcgaccccgacgccaagggcctgagcgaccctggcaagatcaagcggctgagagcccaggtgcaagtgtccctggaagattacatcaacgaccggcagtacgacagccggggcagatttggcgaactgctcctgctgctgcccaccctgcagagcatcacctggcagatgatcgagcagatccagttcatcaagctgttcggcatggccaagatcgacaatctgctgcaggaaatgctgctcgggggcagcccttctgatgcccctcatgcccaccaccctctgcaccctcacctgatgcaagaacacatgggcaccaatgtgatcgtggccaacacaatgcccacccacctgagcaacggccagatgtgcgagtggcccagacctagaggacaggccgccacacctgagacacctcagccttctccacctggcggctctggcagcgagccttacaaactgctgcctggcgctgtggccaccatcgtgagacctctgagcgccatcccccagcccaccatcaccaagcaggaagtgatctgaggactagttataagactgactagcccgatgggcctcccaacgggccctcctcccctccttgcaccgagattaataaaaaaaaaaaaaaaaaaaaaaaaaaaaaaaaaaaaaaaaaaaaaaaaaaaaaaaaaaaaaaaatgcatcccccccccccccccccccccccccccccccaaaggctcttttcagagccaccagaatt

SEQ ID NO: 2002 - RNA, 1642 nt, synthetic construct
  misc_feature 1..1642: note = mRNA i-3 (A64-N5-C30-hSL-N5) (opt29) from Homo sapiens__NP_000448.3__HNF4A(1-474)(S142A_S143A_S167A_S313A_ S378A_T429A_T432A_S436A_K458R)
  source 1..1642: mol_type = other RNA
aggagaaagcttaccatgagactgagcaagaccctggtggacatggacatggccgactactctgccgccctggaccctgcctacaccaccctggagttcgaaaacgtgcaagtgctgaccatgggcaacgacaccagccctagcgagggcaccaacctgaacgcccctaatagcctgggagtgtccgccctgtgtgccatctgtggcgatagagccaccggcaagcactacggcgccagctcttgtgatggctgcaagggcttcttccggcggagcgtgcggaagaaccacatgtacagctgccggttcagccggcagtgcgtggtggacaaggataagcggaaccagtgccggtactgcagactgaagaagtgcttcagagccggcatgaagaaagaagccgtgcagaacgagcgggaccggatcagcaccagaagagccgcctacgaggacagcagcctgcccagcatcaacgccctgctgcaggccgaggtgctgagcagacagatcaccgccccagtgtccggcatcaacggcgacatccgggccaagaagatcgccagcattgccgacgtgtgcgagagcatgaaggaacagctgctggtgctggtggaatgggccaagtacatccccgccttttgcgagctgcccctggacgatcaggtggccctgctgagagcacacgccggcgaacatctgctgctgggagccaccaagcggagcatggtgttcaaggacgtgctgctgctgggcaacgactacatcgtgcccagacactgccctgagctggccgagatgagccgggtgtccatcagaatcctggacgaactggtgctgccgtttcaggaactgcagatcgacgacaacgagtacgcctacctgaaggccatcatctttttcgaccccgacgccaagggcctgagcgaccctggcaagatcaagcggctgagagcccaggtgcaagtgtccctggaagattacatcaacgaccggcagtacgacagccggggcagatttggcgaactgctcctgctgctgcccaccctgcagagcatcacctggcagatgatcgagcagatccagttcatcaagctgttcggcatggccaagatcgacaatctgctgcaggaaatgctgctcgggggcgccccttctgatgcccctcatgcccaccaccctctgcaccctcacctgatgcaagaacacatgggcaccaatgtgatcgtggccaacacaatgcccacccacctgagcaacggccagatgtgcgagtggcccagacctagaggacaggccgccgcccctgaggcccctcagcctgccccacctggcggctctggcagcgagccttacaaactgctgcctggcgctgtggccaccatcgtgagacctctgagcgccatcccccagcccaccatcaccaagcaggaagtgatctgaggactagttataagactgactagcccgatgggcctcccaacgggccctcctcccctccttgcaccgagattaataaaaaaaaaaaaaaaaaaaaaaaaaaaaaaaaaaaaaaaaaaaaaaaaaaaaaaaaaaaaaaaatgcatcccccccccccccccccccccccccccccccaaaggctcttttcagagccaccagaatt

SEQ ID NO: 2003 - RNA, 1642 nt, synthetic construct
  misc_feature 1..1642: note = mRNA i-3 (A64-N5-C30-hSL-N5) (opt29) from Homo sapiens__NP_000448.3__HNF4A(1-474)(S142A_S143A_S148A_S167A_ S313A_S378A_T429A_T432A_S436A_K458R)
  source 1..1642: mol_type = other RNA
aggagaaagcttaccatgagactgagcaagaccctggtggacatggacatggccgactactctgccgccctggaccctgcctacaccaccctggagttcgaaaacgtgcaagtgctgaccatgggcaacgacaccagccctagcgagggcaccaacctgaacgcccctaatagcctgggagtgtccgccctgtgtgccatctgtggcgatagagccaccggcaagcactacggcgccagctcttgtgatggctgcaagggcttcttccggcggagcgtgcggaagaaccacatgtacagctgccggttcagccggcagtgcgtggtggacaaggataagcggaaccagtgccggtactgcagactgaagaagtgcttcagagccggcatgaagaaagaagccgtgcagaacgagcgggaccggatcagcaccagaagagccgcctacgaggacagcgccctgcccagcatcaacgccctgctgcaggccgaggtgctgagcagacagatcaccgccccagtgtccggcatcaacggcgacatccgggccaagaagatcgccagcattgccgacgtgtgcgagagcatgaaggaacagctgctggtgctggtggaatgggccaagtacatccccgccttttgcgagctgcccctggacgatcaggtggccctgctgagagcacacgccggcgaacatctgctgctgggagccaccaagcggagcatggtgttcaaggacgtgctgctgctgggcaacgactacatcgtgcccagacactgccctgagctggccgagatgagccgggtgtccatcagaatcctggacgaactggtgctgccgtttcaggaactgcagatcgacgacaacgagtacgcctacctgaaggccatcatctttttcgaccccgacgccaagggcctgagcgaccctggcaagatcaagcggctgagagcccaggtgcaagtgtccctggaagattacatcaacgaccggcagtacgacagccggggcagatttggcgaactgctcctgctgctgcccaccctgcagagcatcacctggcagatgatcgagcagatccagttcatcaagctgttcggcatggccaagatcgacaatctgctgcaggaaatgctgctcgggggcgccccttctgatgcccctcatgcccaccaccctctgcaccctcacctgatgcaagaacacatgggcaccaatgtgatcgtggccaacacaatgcccacccacctgagcaacggccagatgtgcgagtggcccagacctagaggacaggccgccgcccctgaggcccctcagcctgccccacctggcggctctggcagcgagccttacaaactgctgcctggcgctgtggccaccatcgtgagacctctgagcgccatcccccagcccaccatcaccaagcaggaagtgatctgaggactagttataagactgactagcccgatgggcctcccaacgggccctcctcccctccttgcaccgagattaataaaaaaaaaaaaaaaaaaaaaaaaaaaaaaaaaaaaaaaaaaaaaaaaaaaaaaaaaaaaaaaatgcatcccccccccccccccccccccccccccccccaaaggctcttttcagagccaccagaatt

SEQ ID NO: 2004 - RNA, 1642 nt, synthetic construct
  misc_feature 1..1642: note = mRNA i-3 (A64-N5-C30-hSL-N5) (opt29) from Homo sapiens__NP_000448.3__HNF4A(1-474)(K106R_K108R_K126R_K127R_ S142A_S143A_S148A_S167A_S313A_S378A_T429A_T432A_S436A_K458R )
  source 1..1642: mol_type = other RNA
aggagaaagcttaccatgagactgagcaagaccctggtggacatggacatggccgactactctgccgccctggaccctgcctacaccaccctggagttcgaaaacgtgcaagtgctgaccatgggcaacgacaccagccctagcgagggcaccaacctgaacgcccctaatagcctgggagtgtccgccctgtgtgccatctgtggcgatagagccaccggcaagcactacggcgccagctcttgtgatggctgcaagggcttcttccggcggagcgtgcggaagaaccacatgtacagctgccggttcagccggcagtgcgtggtggaccgggatagacggaaccagtgccggtactgcagactgaagaagtgcttcagagccggcatgcggagagaagccgtgcagaacgagcgggaccggatcagcaccagaagagccgcctacgaggacagcgccctgcccagcatcaacgccctgctgcaggccgaggtgctgagcagacagatcaccgccccagtgtccggcatcaacggcgacatccgggccaagaagatcgccagcattgccgacgtgtgcgagagcatgaaggaacagctgctggtgctggtggaatgggccaagtacatccccgccttttgcgagctgcccctggacgatcaggtggccctgctgagagcacacgccggcgaacatctgctgctgggagccaccaagcggagcatggtgttcaaggacgtgctgctgctgggcaacgactacatcgtgcccagacactgccctgagctggccgagatgagccgggtgtccatcagaatcctggacgaactggtgctgccgtttcaggaactgcagatcgacgacaacgagtacgcctacctgaaggccatcatctttttcgaccccgacgccaagggcctgagcgaccctggcaagatcaagcggctgagagcccaggtgcaagtgtccctggaagattacatcaacgaccggcagtacgacagccggggcagatttggcgaactgctcctgctgctgcccaccctgcagagcatcacctggcagatgatcgagcagatccagttcatcaagctgttcggcatggccaagatcgacaatctgctgcaggaaatgctgctcgggggcgccccttctgatgcccctcatgcccaccaccctctgcaccctcacctgatgcaagaacacatgggcaccaatgtgatcgtggccaacacaatgcccacccacctgagcaacggccagatgtgcgagtggcccagacctagaggacaggccgccgcccctgaggcccctcagcctgccccacctggcggctctggcagcgagccttacaaactgctgcctggcgctgtggccaccatcgtgagacctctgagcgccatcccccagcccaccatcaccaagcaggaagtgatctgaggactagttataagactgactagcccgatgggcctcccaacgggccctcctcccctccttgcaccgagattaataaaaaaaaaaaaaaaaaaaaaaaaaaaaaaaaaaaaaaaaaaaaaaaaaaaaaaaaaaaaaaaatgcatcccccccccccccccccccccccccccccccaaaggctcttttcagagccaccagaatt

SEQ ID NO: 2005 - RNA, 1642 nt, synthetic construct
  misc_feature 1..1642: note = mRNA i-3 (A64-N5-C30-hSL-N5) (opt29) from Homo sapiens__NP_000448.3__HNF4A(1-474)(S142A_S143A_S148A_T166A_ S167A_S313A_S378A_T429A_T432A_S436A_K458R)
  source 1..1642: mol_type = other RNA
aggagaaagcttaccatgagactgagcaagaccctggtggacatggacatggccgactactctgccgccctggaccctgcctacaccaccctggagttcgaaaacgtgcaagtgctgaccatgggcaacgacaccagccctagcgagggcaccaacctgaacgcccctaatagcctgggagtgtccgccctgtgtgccatctgtggcgatagagccaccggcaagcactacggcgccagctcttgtgatggctgcaagggcttcttccggcggagcgtgcggaagaaccacatgtacagctgccggttcagccggcagtgcgtggtggacaaggataagcggaaccagtgccggtactgcagactgaagaagtgcttcagagccggcatgaagaaagaagccgtgcagaacgagcgggaccggatcagcaccagaagagccgcctacgaggacagcgccctgcccagcatcaacgccctgctgcaggccgaggtgctgagcagacagatcgccgccccagtgtccggcatcaacggcgacatccgggccaagaagatcgccagcattgccgacgtgtgcgagagcatgaaggaacagctgctggtgctggtggaatgggccaagtacatccccgccttttgcgagctgcccctggacgatcaggtggccctgctgagagcacacgccggcgaacatctgctgctgggagccaccaagcggagcatggtgttcaaggacgtgctgctgctgggcaacgactacatcgtgcccagacactgccctgagctggccgagatgagccgggtgtccatcagaatcctggacgaactggtgctgccgtttcaggaactgcagatcgacgacaacgagtacgcctacctgaaggccatcatctttttcgaccccgacgccaagggcctgagcgaccctggcaagatcaagcggctgagagcccaggtgcaagtgtccctggaagattacatcaacgaccggcagtacgacagccggggcagatttggcgaactgctcctgctgctgcccaccctgcagagcatcacctggcagatgatcgagcagatccagttcatcaagctgttcggcatggccaagatcgacaatctgctgcaggaaatgctgctcgggggcgccccttctgatgcccctcatgcccaccaccctctgcaccctcacctgatgcaagaacacatgggcaccaatgtgatcgtggccaacacaatgcccacccacctgagcaacggccagatgtgcgagtggcccagacctagaggacaggccgccgcccctgaggcccctcagcctgccccacctggcggctctggcagcgagccttacaaactgctgcctggcgctgtggccaccatcgtgagacctctgagcgccatcccccagcccaccatcaccaagcaggaagtgatctgaggactagttataagactgactagcccgatgggcctcccaacgggccctcctcccctccttgcaccgagattaataaaaaaaaaaaaaaaaaaaaaaaaaaaaaaaaaaaaaaaaaaaaaaaaaaaaaaaaaaaaaaaatgcatcccccccccccccccccccccccccccccccaaaggctcttttcagagccaccagaatt

SEQ ID NO: 2006 - RNA, 1642 nt, synthetic construct
  misc_feature 1..1642: note = mRNA i-3 (A64-N5-C30-hSL-N5) (opt29) from Homo sapiens__NP_000448.3__HNF4A(1-474)(S87A_S142A_S143A_S148A_T 166A_S167A_S313A_S378A_T429A_T432A_S436A_K458R)
  source 1..1642: mol_type = other RNA
aggagaaagcttaccatgagactgagcaagaccctggtggacatggacatggccgactactctgccgccctggaccctgcctacaccaccctggagttcgaaaacgtgcaagtgctgaccatgggcaacgacaccagccctagcgagggcaccaacctgaacgcccctaatagcctgggagtgtccgccctgtgtgccatctgtggcgatagagccaccggcaagcactacggcgccagctcttgtgatggctgcaagggcttcttccggcgggccgtgcggaagaaccacatgtacagctgccggttcagccggcagtgcgtggtggacaaggataagcggaaccagtgccggtactgcagactgaagaagtgcttcagagccggcatgaagaaagaagccgtgcagaacgagcgggaccggatcagcaccagaagagccgcctacgaggacagcgccctgcccagcatcaacgccctgctgcaggccgaggtgctgagcagacagatcgccgccccagtgtccggcatcaacggcgacatccgggccaagaagatcgccagcattgccgacgtgtgcgagagcatgaaggaacagctgctggtgctggtggaatgggccaagtacatccccgccttttgcgagctgcccctggacgatcaggtggccctgctgagagcacacgccggcgaacatctgctgctgggagccaccaagcggagcatggtgttcaaggacgtgctgctgctgggcaacgactacatcgtgcccagacactgccctgagctggccgagatgagccgggtgtccatcagaatcctggacgaactggtgctgccgtttcaggaactgcagatcgacgacaacgagtacgcctacctgaaggccatcatctttttcgaccccgacgccaagggcctgagcgaccctggcaagatcaagcggctgagagcccaggtgcaagtgtccctggaagattacatcaacgaccggcagtacgacagccggggcagatttggcgaactgctcctgctgctgcccaccctgcagagcatcacctggcagatgatcgagcagatccagttcatcaagctgttcggcatggccaagatcgacaatctgctgcaggaaatgctgctcgggggcgccccttctgatgcccctcatgcccaccaccctctgcaccctcacctgatgcaagaacacatgggcaccaatgtgatcgtggccaacacaatgcccacccacctgagcaacggccagatgtgcgagtggcccagacctagaggacaggccgccgcccctgaggcccctcagcctgccccacctggcggctctggcagcgagccttacaaactgctgcctggcgctgtggccaccatcgtgagacctctgagcgccatcccccagcccaccatcaccaagcaggaagtgatctgaggactagttataagactgactagcccgatgggcctcccaacgggccctcctcccctccttgcaccgagattaataaaaaaaaaaaaaaaaaaaaaaaaaaaaaaaaaaaaaaaaaaaaaaaaaaaaaaaaaaaaaaaatgcatcccccccccccccccccccccccccccccccaaaggctcttttcagagccaccagaatt

SEQ ID NO: 2007 - RNA, 1642 nt, synthetic construct
  misc_feature 1..1642: note = mRNA i-3 (A64-N5-C30-hSL-N5) (opt29) from Homo sapiens__NP_000448.3__HNF4A(1-474)(S87A_K106R_K108R_K126R_K 127R_S142A_S143A_S148A_T166A_S167A_S313A_S378A_T429A_T432A_ S436A_K458R)
  source 1..1642: mol_type = other RNA
aggagaaagcttaccatgagactgagcaagaccctggtggacatggacatggccgactactctgccgccctggaccctgcctacaccaccctggagttcgaaaacgtgcaagtgctgaccatgggcaacgacaccagccctagcgagggcaccaacctgaacgcccctaatagcctgggagtgtccgccctgtgtgccatctgtggcgatagagccaccggcaagcactacggcgccagctcttgtgatggctgcaagggcttcttccggcgggccgtgcggaagaaccacatgtacagctgccggttcagccggcagtgcgtggtggaccgggatagacggaaccagtgccggtactgcagactgaagaagtgcttcagagccggcatgcggagagaagccgtgcagaacgagcgggaccggatcagcaccagaagagccgcctacgaggacagcgccctgcccagcatcaacgccctgctgcaggccgaggtgctgagcagacagatcgccgccccagtgtccggcatcaacggcgacatccgggccaagaagatcgccagcattgccgacgtgtgcgagagcatgaaggaacagctgctggtgctggtggaatgggccaagtacatccccgccttttgcgagctgcccctggacgatcaggtggccctgctgagagcacacgccggcgaacatctgctgctgggagccaccaagcggagcatggtgttcaaggacgtgctgctgctgggcaacgactacatcgtgcccagacactgccctgagctggccgagatgagccgggtgtccatcagaatcctggacgaactggtgctgccgtttcaggaactgcagatcgacgacaacgagtacgcctacctgaaggccatcatctttttcgaccccgacgccaagggcctgagcgaccctggcaagatcaagcggctgagagcccaggtgcaagtgtccctggaagattacatcaacgaccggcagtacgacagccggggcagatttggcgaactgctcctgctgctgcccaccctgcagagcatcacctggcagatgatcgagcagatccagttcatcaagctgttcggcatggccaagatcgacaatctgctgcaggaaatgctgctcgggggcgccccttctgatgcccctcatgcccaccaccctctgcaccctcacctgatgcaagaacacatgggcaccaatgtgatcgtggccaacacaatgcccacccacctgagcaacggccagatgtgcgagtggcccagacctagaggacaggccgccgcccctgaggcccctcagcctgccccacctggcggctctggcagcgagccttacaaactgctgcctggcgctgtggccaccatcgtgagacctctgagcgccatcccccagcccaccatcaccaagcaggaagtgatctgaggactagttataagactgactagcccgatgggcctcccaacgggccctcctcccctccttgcaccgagattaataaaaaaaaaaaaaaaaaaaaaaaaaaaaaaaaaaaaaaaaaaaaaaaaaaaaaaaaaaaaaaaatgcatcccccccccccccccccccccccccccccccaaaggctcttttcagagccaccagaatt

SEQ ID NO: 2008 - RNA, 1642 nt, synthetic construct
  misc_feature 1..1642: note = mRNA i-3 (A64-N5-C30-hSL-N5) (opt29) from Homo sapiens__NP_000448.3__HNF4A(1-474)(S87A_K106R_K108R_K126R_K 127R)
  source 1..1642: mol_type = other RNA
aggagaaagcttaccatgagactgagcaagaccctggtggacatggacatggccgactactctgccgccctggaccctgcctacaccaccctggagttcgaaaacgtgcaagtgctgaccatgggcaacgacaccagccctagcgagggcaccaacctgaacgcccctaatagcctgggagtgtccgccctgtgtgccatctgtggcgatagagccaccggcaagcactacggcgccagctcttgtgatggctgcaagggcttcttccggcgggccgtgcggaagaaccacatgtacagctgccggttcagccggcagtgcgtggtggaccgggatagacggaaccagtgccggtactgcagactgaagaagtgcttcagagccggcatgcggagagaagccgtgcagaacgagcgggaccggatcagcaccagaagaagcagctacgaggacagcagcctgcccagcatcaacgccctgctgcaggccgaggtgctgagcagacagatcaccagcccagtgtccggcatcaacggcgacatccgggccaagaagatcgccagcattgccgacgtgtgcgagagcatgaaggaacagctgctggtgctggtggaatgggccaagtacatccccgccttttgcgagctgcccctggacgatcaggtggccctgctgagagcacacgccggcgaacatctgctgctgggagccaccaagcggagcatggtgttcaaggacgtgctgctgctgggcaacgactacatcgtgcccagacactgccctgagctggccgagatgagccgggtgtccatcagaatcctggacgaactggtgctgccgtttcaggaactgcagatcgacgacaacgagtacgcctacctgaaggccatcatctttttcgaccccgacgccaagggcctgagcgaccctggcaagatcaagcggctgagaagccaggtgcaagtgtccctggaagattacatcaacgaccggcagtacgacagccggggcagatttggcgaactgctcctgctgctgcccaccctgcagagcatcacctggcagatgatcgagcagatccagttcatcaagctgttcggcatggccaagatcgacaatctgctgcaggaaatgctgctcgggggcagcccttctgatgcccctcatgcccaccaccctctgcaccctcacctgatgcaagaacacatgggcaccaatgtgatcgtggccaacacaatgcccacccacctgagcaacggccagatgtgcgagtggcccagacctagaggacaggccgccacacctgagacacctcagccttctccacctggcggctctggcagcgagccttacaaactgctgcctggcgctgtggccaccatcgtgaaacctctgagcgccatcccccagcccaccatcaccaagcaggaagtgatctgaggactagttataagactgactagcccgatgggcctcccaacgggccctcctcccctccttgcaccgagattaataaaaaaaaaaaaaaaaaaaaaaaaaaaaaaaaaaaaaaaaaaaaaaaaaaaaaaaaaaaaaaaatgcatcccccccccccccccccccccccccccccccaaaggctcttttcagagccaccagaatt

SEQ ID NO: 2009 - RNA, 1642 nt, synthetic construct
  misc_feature 1..1642: note = mRNA i-3 (A64-N5-C30-hSL-N5) (opt29) from Homo sapiens__NP_000448.3__HNF4A(1-474)(S87A_K106R_K108R_K126R_K 127R_S142A_S143A_S148A_T166A_S167A_S313A_S378A_T429A_T432A_ S436A_K458R_S461A)
  source 1..1642: mol_type = other RNA
aggagaaagcttaccatgagactgagcaagaccctggtggacatggacatggccgactactctgccgccctggaccctgcctacaccaccctggagttcgaaaacgtgcaagtgctgaccatgggcaacgacaccagccctagcgagggcaccaacctgaacgcccctaatagcctgggagtgtccgccctgtgtgccatctgtggcgatagagccaccggcaagcactacggcgccagctcttgtgatggctgcaagggcttcttccggcgggccgtgcggaagaaccacatgtacagctgccggttcagccggcagtgcgtggtggaccgggatagacggaaccagtgccggtactgcagactgaagaagtgcttcagagccggcatgcggagagaagccgtgcagaacgagcgggaccggatcagcaccagaagagccgcctacgaggacagcgccctgcccagcatcaacgccctgctgcaggccgaggtgctgagcagacagatcgccgccccagtgtccggcatcaacggcgacatccgggccaagaagatcgccagcattgccgacgtgtgcgagagcatgaaggaacagctgctggtgctggtggaatgggccaagtacatccccgccttttgcgagctgcccctggacgatcaggtggccctgctgagagcacacgccggcgaacatctgctgctgggagccaccaagcggagcatggtgttcaaggacgtgctgctgctgggcaacgactacatcgtgcccagacactgccctgagctggccgagatgagccgggtgtccatcagaatcctggacgaactggtgctgccgtttcaggaactgcagatcgacgacaacgagtacgcctacctgaaggccatcatctttttcgaccccgacgccaagggcctgagcgaccctggcaagatcaagcggctgagagcccaggtgcaagtgtccctggaagattacatcaacgaccggcagtacgacagccggggcagatttggcgaactgctcctgctgctgcccaccctgcagagcatcacctggcagatgatcgagcagatccagttcatcaagctgttcggcatggccaagatcgacaatctgctgcaggaaatgctgctcgggggcgccccttctgatgcccctcatgcccaccaccctctgcaccctcacctgatgcaagaacacatgggcaccaatgtgatcgtggccaacacaatgcccacccacctgagcaacggccagatgtgcgagtggcccagacctagaggacaggccgccgcccctgaggcccctcagcctgccccacctggcggctctggcagcgagccttacaaactgctgcctggcgctgtggccaccatcgtgagacctctggccgccatcccccagcccaccatcaccaagcaggaagtgatctgaggactagttataagactgactagcccgatgggcctcccaacgggccctcctcccctccttgcaccgagattaataaaaaaaaaaaaaaaaaaaaaaaaaaaaaaaaaaaaaaaaaaaaaaaaaaaaaaaaaaaaaaaatgcatcccccccccccccccccccccccccccccccaaaggctcttttcagagccaccagaatt

SEQ ID NO: 2010 - RNA, 1642 nt, synthetic construct
  misc_feature 1..1642: note = mRNA i-3 (A64-N5-C30-hSL-N5) (opt29) from Homo sapiens__NP_000448.3__HNF4A(1-474)(S87A_K106R_K108R_K126R_K 127R_S142A_S143A_S148A_T166A_S167A_S313A_S378A_T429A_T432A_ S436A_K458R_S461E)
  source 1..1642: mol_type = other RNA
aggagaaagcttaccatgagactgagcaagaccctggtggacatggacatggccgactactctgccgccctggaccctgcctacaccaccctggagttcgaaaacgtgcaagtgctgaccatgggcaacgacaccagccctagcgagggcaccaacctgaacgcccctaatagcctgggagtgtccgccctgtgtgccatctgtggcgatagagccaccggcaagcactacggcgccagctcttgtgatggctgcaagggcttcttccggcgggccgtgcggaagaaccacatgtacagctgccggttcagccggcagtgcgtggtggaccgggatagacggaaccagtgccggtactgcagactgaagaagtgcttcagagccggcatgcggagagaagccgtgcagaacgagcgggaccggatcagcaccagaagagccgcctacgaggacagcgccctgcccagcatcaacgccctgctgcaggccgaggtgctgagcagacagatcgccgccccagtgtccggcatcaacggcgacatccgggccaagaagatcgccagcattgccgacgtgtgcgagagcatgaaggaacagctgctggtgctggtggaatgggccaagtacatccccgccttttgcgagctgcccctggacgatcaggtggccctgctgagagcacacgccggcgaacatctgctgctgggagccaccaagcggagcatggtgttcaaggacgtgctgctgctgggcaacgactacatcgtgcccagacactgccctgagctggccgagatgagccgggtgtccatcagaatcctggacgaactggtgctgccgtttcaggaactgcagatcgacgacaacgagtacgcctacctgaaggccatcatctttttcgaccccgacgccaagggcctgagcgaccctggcaagatcaagcggctgagagcccaggtgcaagtgtccctggaagattacatcaacgaccggcagtacgacagccggggcagatttggcgaactgctcctgctgctgcccaccctgcagagcatcacctggcagatgatcgagcagatccagttcatcaagctgttcggcatggccaagatcgacaatctgctgcaggaaatgctgctcgggggcgccccttctgatgcccctcatgcccaccaccctctgcaccctcacctgatgcaagaacacatgggcaccaatgtgatcgtggccaacacaatgcccacccacctgagcaacggccagatgtgcgagtggcccagacctagaggacaggccgccgcccctgaggcccctcagcctgccccacctggcggctctggcagcgagccttacaaactgctgcctggcgctgtggccaccatcgtgagacctctggaggccatcccccagcccaccatcaccaagcaggaagtgatctgaggactagttataagactgactagcccgatgggcctcccaacgggccctcctcccctccttgcaccgagattaataaaaaaaaaaaaaaaaaaaaaaaaaaaaaaaaaaaaaaaaaaaaaaaaaaaaaaaaaaaaaaaatgcatcccccccccccccccccccccccccccccccaaaggctcttttcagagccaccagaatt

SEQ ID NO: 2011 - RNA, 1642 nt, synthetic construct
  misc_feature 1..1642: note = mRNA i-3 (A64-N5-C30-hSL-N5) (opt29) from Homo sapiens__NP_000448.3__HNF4A(1-474)(S87A_K106R_K108R_K126R_K 127R_S142A_S143A_S148E_T166A_S167E_S313A_S378E_T429E_T432E_ S436E_K458R_S461E)
  source 1..1642: mol_type = other RNA
aggagaaagcttaccatgagactgagcaagaccctggtggacatggacatggccgactactctgccgccctggaccctgcctacaccaccctggagttcgaaaacgtgcaagtgctgaccatgggcaacgacaccagccctagcgagggcaccaacctgaacgcccctaatagcctgggagtgtccgccctgtgtgccatctgtggcgatagagccaccggcaagcactacggcgccagctcttgtgatggctgcaagggcttcttccggcgggccgtgcggaagaaccacatgtacagctgccggttcagccggcagtgcgtggtggaccgggatagacggaaccagtgccggtactgcagactgaagaagtgcttcagagccggcatgcggagagaagccgtgcagaacgagcgggaccggatcagcaccagaagagccgcctacgaggacagcgaactgcccagcatcaacgccctgctgcaggccgaggtgctgagcagacagatcgccgaaccagtgtccggcatcaacggcgacatccgggccaagaagatcgccagcattgccgacgtgtgcgagagcatgaaggaacagctgctggtgctggtggaatgggccaagtacatccccgccttttgcgagctgcccctggacgatcaggtggccctgctgagagcacacgccggcgaacatctgctgctgggagccaccaagcggagcatggtgttcaaggacgtgctgctgctgggcaacgactacatcgtgcccagacactgccctgagctggccgagatgagccgggtgtccatcagaatcctggacgaactggtgctgccgtttcaggaactgcagatcgacgacaacgagtacgcctacctgaaggccatcatctttttcgaccccgacgccaagggcctgagcgaccctggcaagatcaagcggctgagagcccaggtgcaagtgtccctggaagattacatcaacgaccggcagtacgacagccggggcagatttggcgaactgctcctgctgctgcccaccctgcagagcatcacctggcagatgatcgagcagatccagttcatcaagctgttcggcatggccaagatcgacaatctgctgcaggaaatgctgctcgggggcgagccttctgatgcccctcatgcccaccaccctctgcaccctcacctgatgcaagaacacatgggcaccaatgtgatcgtggccaacacaatgcccacccacctgagcaacggccagatgtgcgagtggcccagacctagaggacaggccgccgaacctgaggagcctcagcctgaaccacctggcggctctggcagcgagccttacaaactgctgcctggcgctgtggccaccatcgtgagacctctggaggccatcccccagcccaccatcaccaagcaggaagtgatctgaggactagttataagactgactagcccgatgggcctcccaacgggccctcctcccctccttgcaccgagattaataaaaaaaaaaaaaaaaaaaaaaaaaaaaaaaaaaaaaaaaaaaaaaaaaaaaaaaaaaaaaaaatgcatcccccccccccccccccccccccccccccccaaaggctcttttcagagccaccagaatt

SEQ ID NO: 2012 - RNA, 1642 nt, synthetic construct
  misc_feature 1..1642: note = mRNA i-3 (A64-N5-C30-hSL-N5) (opt29) from Homo sapiens__NP_000448.3__HNF4A(1-474)(S87A_K106R_K108R_K126R_K 127R_S142A_S143A_S148A_T166A_S167A_K179R_K180R_S313A_S378A_ T429A_T432A_S436A_K458R_S461E)
  source 1..1642: mol_type = other RNA
aggagaaagcttaccatgagactgagcaagaccctggtggacatggacatggccgactactctgccgccctggaccctgcctacaccaccctggagttcgaaaacgtgcaagtgctgaccatgggcaacgacaccagccctagcgagggcaccaacctgaacgcccctaatagcctgggagtgtccgccctgtgtgccatctgtggcgatagagccaccggcaagcactacggcgccagctcttgtgatggctgcaagggcttcttccggcgggccgtgcggaagaaccacatgtacagctgccggttcagccggcagtgcgtggtggaccgggatagacggaaccagtgccggtactgcagactgaagaagtgcttcagagccggcatgcggagagaagccgtgcagaacgagcgggaccggatcagcaccagaagagccgcctacgaggacagcgccctgcccagcatcaacgccctgctgcaggccgaggtgctgagcagacagatcgccgccccagtgtccggcatcaacggcgacatccgggcccggagaatcgccagcattgccgacgtgtgcgagagcatgaaggaacagctgctggtgctggtggaatgggccaagtacatccccgccttttgcgagctgcccctggacgatcaggtggccctgctgagagcacacgccggcgaacatctgctgctgggagccaccaagcggagcatggtgttcaaggacgtgctgctgctgggcaacgactacatcgtgcccagacactgccctgagctggccgagatgagccgggtgtccatcagaatcctggacgaactggtgctgccgtttcaggaactgcagatcgacgacaacgagtacgcctacctgaaggccatcatctttttcgaccccgacgccaagggcctgagcgaccctggcaagatcaagcggctgagagcccaggtgcaagtgtccctggaagattacatcaacgaccggcagtacgacagccggggcagatttggcgaactgctcctgctgctgcccaccctgcagagcatcacctggcagatgatcgagcagatccagttcatcaagctgttcggcatggccaagatcgacaatctgctgcaggaaatgctgctcgggggcgccccttctgatgcccctcatgcccaccaccctctgcaccctcacctgatgcaagaacacatgggcaccaatgtgatcgtggccaacacaatgcccacccacctgagcaacggccagatgtgcgagtggcccagacctagaggacaggccgccgcccctgaggcccctcagcctgccccacctggcggctctggcagcgagccttacaaactgctgcctggcgctgtggccaccatcgtgagacctctggaggccatcccccagcccaccatcaccaagcaggaagtgatctgaggactagttataagactgactagcccgatgggcctcccaacgggccctcctcccctccttgcaccgagattaataaaaaaaaaaaaaaaaaaaaaaaaaaaaaaaaaaaaaaaaaaaaaaaaaaaaaaaaaaaaaaaatgcatcccccccccccccccccccccccccccccccaaaggctcttttcagagccaccagaatt

SEQ ID NO: 2013 - RNA, 1642 nt, synthetic construct
  misc_feature 1..1642: note = mRNA i-3 (A64-N5-C30-hSL-N5) (opt29) from Homo sapiens__NP_000448.3__HNF4A(1-474)(S87A_K106R_K108R_K126R_K 127R_S142A_S143A_S148A_T166A_S167A_K300R_K307R_K309R_S313A_ S378A_T429A_T432A_S436A_K458R_S461E)
  source 1..1642: mol_type = other RNA
aggagaaagcttaccatgagactgagcaagaccctggtggacatggacatggccgactactctgccgccctggaccctgcctacaccaccctggagttcgaaaacgtgcaagtgctgaccatgggcaacgacaccagccctagcgagggcaccaacctgaacgcccctaatagcctgggagtgtccgccctgtgtgccatctgtggcgatagagccaccggcaagcactacggcgccagctcttgtgatggctgcaagggcttcttccggcgggccgtgcggaagaaccacatgtacagctgccggttcagccggcagtgcgtggtggaccgggatagacggaaccagtgccggtactgcagactgaagaagtgcttcagagccggcatgcggagagaagccgtgcagaacgagcgggaccggatcagcaccagaagagccgcctacgaggacagcgccctgcccagcatcaacgccctgctgcaggccgaggtgctgagcagacagatcgccgccccagtgtccggcatcaacggcgacatccgggccaagaagatcgccagcattgccgacgtgtgcgagagcatgaaggaacagctgctggtgctggtggaatgggccaagtacatccccgccttttgcgagctgcccctggacgatcaggtggccctgctgagagcacacgccggcgaacatctgctgctgggagccaccaagcggagcatggtgttcaaggacgtgctgctgctgggcaacgactacatcgtgcccagacactgccctgagctggccgagatgagccgggtgtccatcagaatcctggacgaactggtgctgccgtttcaggaactgcagatcgacgacaacgagtacgcctacctgaaggccatcatctttttcgaccccgacgccagaggcctgagcgaccctggccggatcagacggctgagagcccaggtgcaagtgtccctggaagattacatcaacgaccggcagtacgacagccggggcagatttggcgaactgctcctgctgctgcccaccctgcagagcatcacctggcagatgatcgagcagatccagttcatcaagctgttcggcatggccaagatcgacaatctgctgcaggaaatgctgctcgggggcgccccttctgatgcccctcatgcccaccaccctctgcaccctcacctgatgcaagaacacatgggcaccaatgtgatcgtggccaacacaatgcccacccacctgagcaacggccagatgtgcgagtggcccagacctagaggacaggccgccgcccctgaggcccctcagcctgccccacctggcggctctggcagcgagccttacaaactgctgcctggcgctgtggccaccatcgtgagacctctggaggccatcccccagcccaccatcaccaagcaggaagtgatctgaggactagttataagactgactagcccgatgggcctcccaacgggccctcctcccctccttgcaccgagattaataaaaaaaaaaaaaaaaaaaaaaaaaaaaaaaaaaaaaaaaaaaaaaaaaaaaaaaaaaaaaaaatgcatcccccccccccccccccccccccccccccccaaaggctcttttcagagccaccagaatt

SEQ ID NO: 2014 - RNA, 1642 nt, synthetic construct
  misc_feature 1..1642: note = mRNA i-3 (A64-N5-C30-hSL-N5) (opt29) from Homo sapiens__NP_000448.3__HNF4A(1-474)(S87A_K106R_K108R_K126R_K 127R_S142A_S143A_S148A_T166A_S167A_S313A_S378A_T429A_T432A_ S436A_K447R_K458R_S461E_K470R)
  source 1..1642: mol_type = other RNA
aggagaaagcttaccatgagactgagcaagaccctggtggacatggacatggccgactactctgccgccctggaccctgcctacaccaccctggagttcgaaaacgtgcaagtgctgaccatgggcaacgacaccagccctagcgagggcaccaacctgaacgcccctaatagcctgggagtgtccgccctgtgtgccatctgtggcgatagagccaccggcaagcactacggcgccagctcttgtgatggctgcaagggcttcttccggcgggccgtgcggaagaaccacatgtacagctgccggttcagccggcagtgcgtggtggaccgggatagacggaaccagtgccggtactgcagactgaagaagtgcttcagagccggcatgcggagagaagccgtgcagaacgagcgggaccggatcagcaccagaagagccgcctacgaggacagcgccctgcccagcatcaacgccctgctgcaggccgaggtgctgagcagacagatcgccgccccagtgtccggcatcaacggcgacatccgggccaagaagatcgccagcattgccgacgtgtgcgagagcatgaaggaacagctgctggtgctggtggaatgggccaagtacatccccgccttttgcgagctgcccctggacgatcaggtggccctgctgagagcacacgccggcgaacatctgctgctgggagccaccaagcggagcatggtgttcaaggacgtgctgctgctgggcaacgactacatcgtgcccagacactgccctgagctggccgagatgagccgggtgtccatcagaatcctggacgaactggtgctgccgtttcaggaactgcagatcgacgacaacgagtacgcctacctgaaggccatcatctttttcgaccccgacgccaagggcctgagcgaccctggcaagatcaagcggctgagagcccaggtgcaagtgtccctggaagattacatcaacgaccggcagtacgacagccggggcagatttggcgaactgctcctgctgctgcccaccctgcagagcatcacctggcagatgatcgagcagatccagttcatcaagctgttcggcatggccaagatcgacaatctgctgcaggaaatgctgctcgggggcgccccttctgatgcccctcatgcccaccaccctctgcaccctcacctgatgcaagaacacatgggcaccaatgtgatcgtggccaacacaatgcccacccacctgagcaacggccagatgtgcgagtggcccagacctagaggacaggccgccgcccctgaggcccctcagcctgccccacctggcggctctggcagcgagccttaccggctgctgcctggcgctgtggccaccatcgtgagacctctggaggccatcccccagcccaccatcacccggcaggaagtgatctgaggactagttataagactgactagcccgatgggcctcccaacgggccctcctcccctccttgcaccgagattaataaaaaaaaaaaaaaaaaaaaaaaaaaaaaaaaaaaaaaaaaaaaaaaaaaaaaaaaaaaaaaaatgcatcccccccccccccccccccccccccccccccaaaggctcttttcagagccaccagaatt

SEQ ID NO: 2015 - RNA, 1642 nt, synthetic construct
  misc_feature 1..1642: note = mRNA i-3 (A64-N5-C30-hSL-N5) (opt29) from Homo sapiens__NP_000448.3__HNF4A(1-474)(S87A_K106R_K108R_K126R_K 127R_S142A_S143A_S148A_T166A_S167A_K179R_K180R_K234R_K300R_ K307R_K309R_S313A_S378A_T429A_T432A_S436A_K447R_K458R_S461E _K470R)
  source 1..1642: mol_type = other RNA
aggagaaagcttaccatgagactgagcaagaccctggtggacatggacatggccgactactctgccgccctggaccctgcctacaccaccctggagttcgaaaacgtgcaagtgctgaccatgggcaacgacaccagccctagcgagggcaccaacctgaacgcccctaatagcctgggagtgtccgccctgtgtgccatctgtggcgatagagccaccggcaagcactacggcgccagctcttgtgatggctgcaagggcttcttccggcgggccgtgcggaagaaccacatgtacagctgccggttcagccggcagtgcgtggtggaccgggatagacggaaccagtgccggtactgcagactgaagaagtgcttcagagccggcatgcggagagaagccgtgcagaacgagcgggaccggatcagcaccagaagagccgcctacgaggacagcgccctgcccagcatcaacgccctgctgcaggccgaggtgctgagcagacagatcgccgccccagtgtccggcatcaacggcgacatccgggcccggagaatcgccagcattgccgacgtgtgcgagagcatgaaggaacagctgctggtgctggtggaatgggccaagtacatccccgccttttgcgagctgcccctggacgatcaggtggccctgctgagagcacacgccggcgaacatctgctgctgggagccacccggcggagcatggtgttcaaggacgtgctgctgctgggcaacgactacatcgtgcccagacactgccctgagctggccgagatgagccgggtgtccatcagaatcctggacgaactggtgctgccgtttcaggaactgcagatcgacgacaacgagtacgcctacctgaaggccatcatctttttcgaccccgacgccagaggcctgagcgaccctggccggatcagacggctgagagcccaggtgcaagtgtccctggaagattacatcaacgaccggcagtacgacagccggggcagatttggcgaactgctcctgctgctgcccaccctgcagagcatcacctggcagatgatcgagcagatccagttcatcaagctgttcggcatggccaagatcgacaatctgctgcaggaaatgctgctcgggggcgccccttctgatgcccctcatgcccaccaccctctgcaccctcacctgatgcaagaacacatgggcaccaatgtgatcgtggccaacacaatgcccacccacctgagcaacggccagatgtgcgagtggcccagacctagaggacaggccgccgcccctgaggcccctcagcctgccccacctggcggctctggcagcgagccttaccggctgctgcctggcgctgtggccaccatcgtgagacctctggaggccatcccccagcccaccatcacccggcaggaagtgatctgaggactagttataagactgactagcccgatgggcctcccaacgggccctcctcccctccttgcaccgagattaataaaaaaaaaaaaaaaaaaaaaaaaaaaaaaaaaaaaaaaaaaaaaaaaaaaaaaaaaaaaaaaatgcatcccccccccccccccccccccccccccccccaaaggctcttttcagagccaccagaatt

SEQ ID NO: 2016 - RNA, 1642 nt, synthetic construct
  misc_feature 1..1642: note = mRNA i-3 (A64-N5-C30-hSL-N5) (opt29) from Homo sapiens__NP_000448.3__HNF4A(1-474)(S87A_S95A_S99A_K106R_K10 8R_K126R_K127R_S142A_S143A_S148A_T166A_S167A_S313A_S378A_T4 29A_T432A_S436A_K458R_S461E)
  source 1..1642: mol_type = other RNA
aggagaaagcttaccatgagactgagcaagaccctggtggacatggacatggccgactactctgccgccctggaccctgcctacaccaccctggagttcgaaaacgtgcaagtgctgaccatgggcaacgacaccagccctagcgagggcaccaacctgaacgcccctaatagcctgggagtgtccgccctgtgtgccatctgtggcgatagagccaccggcaagcactacggcgccagctcttgtgatggctgcaagggcttcttccggcgggccgtgcggaagaaccacatgtacgcctgccggttcgcccggcagtgcgtggtggaccgggatagacggaaccagtgccggtactgcagactgaagaagtgcttcagagccggcatgcggagagaagccgtgcagaacgagcgggaccggatcagcaccagaagagccgcctacgaggacagcgccctgcccagcatcaacgccctgctgcaggccgaggtgctgagcagacagatcgccgccccagtgtccggcatcaacggcgacatccgggccaagaagatcgccagcattgccgacgtgtgcgagagcatgaaggaacagctgctggtgctggtggaatgggccaagtacatccccgccttttgcgagctgcccctggacgatcaggtggccctgctgagagcacacgccggcgaacatctgctgctgggagccaccaagcggagcatggtgttcaaggacgtgctgctgctgggcaacgactacatcgtgcccagacactgccctgagctggccgagatgagccgggtgtccatcagaatcctggacgaactggtgctgccgtttcaggaactgcagatcgacgacaacgagtacgcctacctgaaggccatcatctttttcgaccccgacgccaagggcctgagcgaccctggcaagatcaagcggctgagagcccaggtgcaagtgtccctggaagattacatcaacgaccggcagtacgacagccggggcagatttggcgaactgctcctgctgctgcccaccctgcagagcatcacctggcagatgatcgagcagatccagttcatcaagctgttcggcatggccaagatcgacaatctgctgcaggaaatgctgctcgggggcgccccttctgatgcccctcatgcccaccaccctctgcaccctcacctgatgcaagaacacatgggcaccaatgtgatcgtggccaacacaatgcccacccacctgagcaacggccagatgtgcgagtggcccagacctagaggacaggccgccgcccctgaggcccctcagcctgccccacctggcggctctggcagcgagccttacaaactgctgcctggcgctgtggccaccatcgtgagacctctggaggccatcccccagcccaccatcaccaagcaggaagtgatctgaggactagttataagactgactagcccgatgggcctcccaacgggccctcctcccctccttgcaccgagattaataaaaaaaaaaaaaaaaaaaaaaaaaaaaaaaaaaaaaaaaaaaaaaaaaaaaaaaaaaaaaaaatgcatcccccccccccccccccccccccccccccccaaaggctcttttcagagccaccagaatt

SEQ ID NO: 2017 - RNA, 1642 nt, synthetic construct
  misc_feature 1..1642: note = mRNA i-3 (A64-N5-C30-hSL-N5) (opt29) from Homo sapiens__NP_000448.3__HNF4A(1-474)(S87A_K106R_K108R_K126R_K 127R_S138A_T139A_S142A_S143A_S148A_T166A_S167A_S313A_S378A_ T429A_T432A_S436A_K458R_S461E)
  source 1..1642: mol_type = other RNA
aggagaaagcttaccatgagactgagcaagaccctggtggacatggacatggccgactactctgccgccctggaccctgcctacaccaccctggagttcgaaaacgtgcaagtgctgaccatgggcaacgacaccagccctagcgagggcaccaacctgaacgcccctaatagcctgggagtgtccgccctgtgtgccatctgtggcgatagagccaccggcaagcactacggcgccagctcttgtgatggctgcaagggcttcttccggcgggccgtgcggaagaaccacatgtacagctgccggttcagccggcagtgcgtggtggaccgggatagacggaaccagtgccggtactgcagactgaagaagtgcttcagagccggcatgcggagagaagccgtgcagaacgagcgggaccggatcgccgccagaagagccgcctacgaggacagcgccctgcccagcatcaacgccctgctgcaggccgaggtgctgagcagacagatcgccgccccagtgtccggcatcaacggcgacatccgggccaagaagatcgccagcattgccgacgtgtgcgagagcatgaaggaacagctgctggtgctggtggaatgggccaagtacatccccgccttttgcgagctgcccctggacgatcaggtggccctgctgagagcacacgccggcgaacatctgctgctgggagccaccaagcggagcatggtgttcaaggacgtgctgctgctgggcaacgactacatcgtgcccagacactgccctgagctggccgagatgagccgggtgtccatcagaatcctggacgaactggtgctgccgtttcaggaactgcagatcgacgacaacgagtacgcctacctgaaggccatcatctttttcgaccccgacgccaagggcctgagcgaccctggcaagatcaagcggctgagagcccaggtgcaagtgtccctggaagattacatcaacgaccggcagtacgacagccggggcagatttggcgaactgctcctgctgctgcccaccctgcagagcatcacctggcagatgatcgagcagatccagttcatcaagctgttcggcatggccaagatcgacaatctgctgcaggaaatgctgctcgggggcgccccttctgatgcccctcatgcccaccaccctctgcaccctcacctgatgcaagaacacatgggcaccaatgtgatcgtggccaacacaatgcccacccacctgagcaacggccagatgtgcgagtggcccagacctagaggacaggccgccgcccctgaggcccctcagcctgccccacctggcggctctggcagcgagccttacaaactgctgcctggcgctgtggccaccatcgtgagacctctggaggccatcccccagcccaccatcaccaagcaggaagtgatctgaggactagttataagactgactagcccgatgggcctcccaacgggccctcctcccctccttgcaccgagattaataaaaaaaaaaaaaaaaaaaaaaaaaaaaaaaaaaaaaaaaaaaaaaaaaaaaaaaaaaaaaaaatgcatcccccccccccccccccccccccccccccccaaaggctcttttcagagccaccagaatt

SEQ ID NO: 2018 - RNA, 1642 nt, synthetic construct
  misc_feature 1..1642: note = mRNA i-3 (A64-N5-C30-hSL-N5) (opt29) from Homo sapiens__NP_000448.3__HNF4A(1-474)(S87A_S95A_S99A_K106R_K10 8R_K126R_K127R_S138A_T139A_S142A_S143A_S148A_T166A_S167A_S3 13A_S378A_T429A_T432A_S436A_K458R_S461E)
  source 1..1642: mol_type = other RNA
aggagaaagcttaccatgagactgagcaagaccctggtggacatggacatggccgactactctgccgccctggaccctgcctacaccaccctggagttcgaaaacgtgcaagtgctgaccatgggcaacgacaccagccctagcgagggcaccaacctgaacgcccctaatagcctgggagtgtccgccctgtgtgccatctgtggcgatagagccaccggcaagcactacggcgccagctcttgtgatggctgcaagggcttcttccggcgggccgtgcggaagaaccacatgtacgcctgccggttcgcccggcagtgcgtggtggaccgggatagacggaaccagtgccggtactgcagactgaagaagtgcttcagagccggcatgcggagagaagccgtgcagaacgagcgggaccggatcgccgccagaagagccgcctacgaggacagcgccctgcccagcatcaacgccctgctgcaggccgaggtgctgagcagacagatcgccgccccagtgtccggcatcaacggcgacatccgggccaagaagatcgccagcattgccgacgtgtgcgagagcatgaaggaacagctgctggtgctggtggaatgggccaagtacatccccgccttttgcgagctgcccctggacgatcaggtggccctgctgagagcacacgccggcgaacatctgctgctgggagccaccaagcggagcatggtgttcaaggacgtgctgctgctgggcaacgactacatcgtgcccagacactgccctgagctggccgagatgagccgggtgtccatcagaatcctggacgaactggtgctgccgtttcaggaactgcagatcgacgacaacgagtacgcctacctgaaggccatcatctttttcgaccccgacgccaagggcctgagcgaccctggcaagatcaagcggctgagagcccaggtgcaagtgtccctggaagattacatcaacgaccggcagtacgacagccggggcagatttggcgaactgctcctgctgctgcccaccctgcagagcatcacctggcagatgatcgagcagatccagttcatcaagctgttcggcatggccaagatcgacaatctgctgcaggaaatgctgctcgggggcgccccttctgatgcccctcatgcccaccaccctctgcaccctcacctgatgcaagaacacatgggcaccaatgtgatcgtggccaacacaatgcccacccacctgagcaacggccagatgtgcgagtggcccagacctagaggacaggccgccgcccctgaggcccctcagcctgccccacctggcggctctggcagcgagccttacaaactgctgcctggcgctgtggccaccatcgtgagacctctggaggccatcccccagcccaccatcaccaagcaggaagtgatctgaggactagttataagactgactagcccgatgggcctcccaacgggccctcctcccctccttgcaccgagattaataaaaaaaaaaaaaaaaaaaaaaaaaaaaaaaaaaaaaaaaaaaaaaaaaaaaaaaaaaaaaaaatgcatcccccccccccccccccccccccccccccccaaaggctcttttcagagccaccagaatt

SEQ ID NO: 2019 - RNA, 1345 nt, synthetic construct
  misc_feature 1..1345: note = mRNA i-3 (A64-N5-C30-hSL-N5) (wt) from Homo sapiens__NP_000448.3__HNF4A(1-375)
  source 1..1345: mol_type = other RNA
aggagaaagcttaccatgcgactctccaaaaccctcgtcgacatggacatggccgactacagtgctgcactggacccagcctacaccaccctggaatttgagaatgtgcaggtgttgacgatgggcaatgacacgtccccatcagaaggcaccaacctcaacgcgcccaacagcctgggtgtcagcgccctgtgtgccatctgcggggaccgggccacgggcaaacactacggtgcctcgagctgtgacggctgcaagggcttcttccggaggagcgtgcggaagaaccacatgtactcctgcagatttagccggcagtgcgtggtggacaaagacaagaggaaccagtgccgctactgcaggctcaagaaatgcttccgggctggcatgaagaaggaagccgtccagaatgagcgggaccggatcagcactcgaaggtcaagctatgaggacagcagcctgccctccatcaatgcgctcctgcaggcggaggtcctgtcccgacagatcacctcccccgtctccgggatcaacggcgacattcgggcgaagaagattgccagcatcgcagatgtgtgtgagtccatgaaggagcagctgctggttctcgttgagtgggccaagtacatcccagctttctgcgagctccccctggacgaccaggtggccctgctcagagcccatgctggcgagcacctgctgctcggagccaccaagagatccatggtgttcaaggacgtgctgctcctaggcaatgactacattgtccctcggcactgcccggagctggcggagatgagccgggtgtccatacgcatccttgacgagctggtgctgcccttccaggagctgcagatcgatgacaatgagtatgcctacctcaaagccatcatcttctttgacccagatgccaaggggctgagcgatccagggaagatcaagcggctgcgttcccaggtgcaggtgagcttggaggactacatcaacgaccgccagtatgactcgcgtggccgctttggagagctgctgctgctgctgcccaccttgcagagcatcacctggcagatgatcgagcagatccagttcatcaagctcttcggcatggccaagattgacaacctgttgcaggagatgctgctgtgaggactagttataagactgactagcccgatgggcctcccaacgggccctcctcccctccttgcaccgagattaataaaaaaaaaaaaaaaaaaaaaaaaaaaaaaaaaaaaaaaaaaaaaaaaaaaaaaaaaaaaaaaatgcatcccccccccccccccccccccccccccccccaaaggctcttttcagagccaccagaatt

SEQ ID NO: 2020 - RNA, 1345 nt, synthetic construct
  misc_feature 1..1345: note = mRNA i-3 (A64-N5-C30-hSL-N5) (wt mod) from Homo sapiens__NP_000448.3__HNF4A(1-375)
  source 1..1345: mol_type = other RNA
aggagaaagcttaccatgcgactctccaaaaccctcgtcgacatggacatggccgactacagtgctgcactggacccagcctacaccaccctggaatttgagaatgtccaggtgttgacgatgggcaatgacacgtccccatcagaaggcaccaacctcaacgcgcccaacagcctgggtgtgagcgccctgtgtgccatctgcggggaccgggccacgggcaaacactacggtgcctcgagctgtgacggctgcaagggcttcttccggaggagcgtgcggaagaaccacatgtactcctgcagatttagccggcagtgcgtggtggacaaagacaagaggaaccagtgccgctactgcaggctcaagaaatgcttccgggctggcatgaagaaggaagccgtccagaatgagcgggaccggatcagcactcgaaggtcaagctatgaggacagcagcctgccctccatcaatgcgctcctgcaggcggaggtcctgtcccgacagatcacctcccccgtctccgggatcaacggcgacattcgggcgaagaagattgccagcatcgcagatgtgtgtgagtccatgaaggagcagctgctggttctcgttgagtgggccaagtacatcccagctttctgcgagctccccctggacgaccaggtggccctgctcagagcccatgctggcgagcacctcctgctcggagccaccaagagatccatggtgttcaaggacgtgctgctcctaggcaatgactacattgtccctcggcactgcccggagctggcggagatgagccgggtgtccatacgcatccttgacgagctggtgctgcccttccaggagctgcagatcgatgacaatgagtatgcctacctcaaagccatcatcttctttgacccagatgccaaggggctgagcgatccagggaagatcaagcggctgcgttcccaggtccaggtgagcttggaggactacatcaacgaccgccagtatgactcgcgtggccgctttggagagctgctgctgctgctgcccaccttgcagagcatcacctggcagatgatcgagcagatccagttcatcaagctgttcggcatggccaagattgacaacctgttgcaggagatgctgctgtgaggactagttataagactgactagcccgatgggcctcccaacgggccctcctcccctccttgcaccgagattaataaaaaaaaaaaaaaaaaaaaaaaaaaaaaaaaaaaaaaaaaaaaaaaaaaaaaaaaaaaaaaaatgcatcccccccccccccccccccccccccccccccaaaggctcttttcagagccaccagaatt

SEQ ID NO: 2021 - RNA, 1345 nt, synthetic construct
  misc_feature 1..1345: note = mRNA i-3 (A64-N5-C30-hSL-N5) (opt1) from Homo sapiens__NP_000448.3__HNF4A(1-375)
  source 1..1345: mol_type = other RNA
aggagaaagcttaccatgcgcctgagcaagaccctcgtggacatggacatggccgactactccgccgcgctggaccccgcctacaccacgctggagttcgagaacgtccaggtgctcaccatgggcaacgacaccagcccgtccgaggggaccaacctgaacgcccccaacagcctgggcgtgtccgccctctgcgccatctgcggggaccgggcgacgggcaagcactacggggccagctcctgcgacggctgcaagggcttcttccgccggagcgtccgcaagaaccacatgtactcctgccggttcagccgccagtgcgtggtggacaaggacaagcggaaccagtgccgctactgccggctgaagaagtgcttccgcgccgggatgaagaaggaggccgtccagaacgagcgggaccgcatctccacccggcgcagctcctacgaggacagctccctgcccagcatcaacgcgctcctgcaggccgaggtgctgtcccggcagatcaccagccccgtgtccggcatcaacggggacatccgcgccaagaagatcgccagcatcgccgacgtctgcgagagcatgaaggagcagctcctggtgctggtggagtgggcgaagtacatcccggccttctgcgagctccccctggacgaccaggtcgccctgctccgggcccacgccggcgagcacctcctgctgggggcgaccaagcgctccatggtgttcaaggacgtgctgctgctcggcaacgactacatcgtcccccggcactgccccgagctggccgagatgagccgcgtgtccatccggatcctggacgagctcgtgctgccgttccaggagctgcagatcgacgacaacgagtacgcctacctcaaggccatcatcttcttcgaccccgacgccaagggcctgagcgaccccgggaagatcaagcgcctgcgctcccaggtccaggtgagcctcgaggactacatcaacgaccggcagtacgactcccgcggccggttcggggagctgctgctcctgctgcccacgctccagagcatcacctggcagatgatcgagcagatccagttcatcaagctgttcggcatggcgaagatcgacaacctgctccaggagatgctgctgtgaggactagttataagactgactagcccgatgggcctcccaacgggccctcctcccctccttgcaccgagattaataaaaaaaaaaaaaaaaaaaaaaaaaaaaaaaaaaaaaaaaaaaaaaaaaaaaaaaaaaaaaaaatgcatcccccccccccccccccccccccccccccccaaaggctcttttcagagccaccagaatt

SEQ ID NO: 2022 - RNA, 1345 nt, synthetic construct
  misc_feature 1..1345: note = mRNA i-3 (A64-N5-C30-hSL-N5) (opt1) from Homo sapiens__NP_000448.3__HNF4A(1-375)(S313A)
  source 1..1345: mol_type = other RNA
aggagaaagcttaccatgcgcctgagcaagaccctcgtggacatggacatggccgactactccgccgcgctggaccccgcctacaccacgctggagttcgagaacgtccaggtgctcaccatgggcaacgacaccagcccgtccgaggggaccaacctgaacgcccccaacagcctgggcgtgtccgccctctgcgccatctgcggggaccgggcgacgggcaagcactacggggccagctcctgcgacggctgcaagggcttcttccgccggagcgtccgcaagaaccacatgtactcctgccggttcagccgccagtgcgtggtggacaaggacaagcggaaccagtgccgctactgccggctgaagaagtgcttccgcgccgggatgaagaaggaggccgtccagaacgagcgggaccgcatctccacccggcgcagctcctacgaggacagctccctgcccagcatcaacgcgctcctgcaggccgaggtgctgtcccggcagatcaccagccccgtgtccggcatcaacggggacatccgcgccaagaagatcgccagcatcgccgacgtctgcgagagcatgaaggagcagctcctggtgctggtggagtgggcgaagtacatcccggccttctgcgagctccccctggacgaccaggtcgccctgctccgggcccacgccggcgagcacctcctgctgggggcgaccaagcgctccatggtgttcaaggacgtgctgctgctcggcaacgactacatcgtcccccggcactgccccgagctggccgagatgagccgcgtgtccatccggatcctggacgagctcgtgctgccgttccaggagctgcagatcgacgacaacgagtacgcctacctcaaggccatcatcttcttcgaccccgacgccaagggcctgagcgaccccgggaagatcaagcgcctgcgcgcgcaggtccaggtgagcctcgaggactacatcaacgaccggcagtacgactcccgcggccggttcggggagctgctgctcctgctgcccacgctccagagcatcacctggcagatgatcgagcagatccagttcatcaagctgttcggcatggcgaagatcgacaacctgctccaggagatgctgctgtgaggactagttataagactgactagcccgatgggcctcccaacgggccctcctcccctccttgcaccgagattaataaaaaaaaaaaaaaaaaaaaaaaaaaaaaaaaaaaaaaaaaaaaaaaaaaaaaaaaaaaaaaaatgcatcccccccccccccccccccccccccccccccaaaggctcttttcagagccaccagaatt

SEQ ID NO: 2023 - RNA, 1345 nt, synthetic construct
  misc_feature 1..1345: note = mRNA i-3 (A64-N5-C30-hSL-N5) (opt1) from Homo sapiens__NP_000448.3__HNF4A(1-375)(S313E)
  source 1..1345: mol_type = other RNA
aggagaaagcttaccatgcgcctgagcaagaccctcgtggacatggacatggccgactactccgccgcgctggaccccgcctacaccacgctggagttcgagaacgtccaggtgctcaccatgggcaacgacaccagcccgtccgaggggaccaacctgaacgcccccaacagcctgggcgtgtccgccctctgcgccatctgcggggaccgggcgacgggcaagcactacggggccagctcctgcgacggctgcaagggcttcttccgccggagcgtccgcaagaaccacatgtactcctgccggttcagccgccagtgcgtggtggacaaggacaagcggaaccagtgccgctactgccggctgaagaagtgcttccgcgccgggatgaagaaggaggccgtccagaacgagcgggaccgcatctccacccggcgcagctcctacgaggacagctccctgcccagcatcaacgcgctcctgcaggccgaggtgctgtcccggcagatcaccagccccgtgtccggcatcaacggggacatccgcgccaagaagatcgccagcatcgccgacgtctgcgagagcatgaaggagcagctcctggtgctggtggagtgggcgaagtacatcccggccttctgcgagctccccctggacgaccaggtcgccctgctccgggcccacgccggcgagcacctcctgctgggggcgaccaagcgctccatggtgttcaaggacgtgctgctgctcggcaacgactacatcgtcccccggcactgccccgagctggccgagatgagccgcgtgtccatccggatcctggacgagctcgtgctgccgttccaggagctgcagatcgacgacaacgagtacgcctacctcaaggccatcatcttcttcgaccccgacgccaagggcctgagcgaccccgggaagatcaagcgcctgcgcgagcaggtccaggtgagcctcgaggactacatcaacgaccggcagtacgactcccgcggccggttcggggagctgctgctcctgctgcccacgctccagagcatcacctggcagatgatcgagcagatccagttcatcaagctgttcggcatggcgaagatcgacaacctgctccaggagatgctgctgtgaggactagttataagactgactagcccgatgggcctcccaacgggccctcctcccctccttgcaccgagattaataaaaaaaaaaaaaaaaaaaaaaaaaaaaaaaaaaaaaaaaaaaaaaaaaaaaaaaaaaaaaaaatgcatcccccccccccccccccccccccccccccccaaaggctcttttcagagccaccagaatt

SEQ ID NO: 2024 - RNA, 1345 nt, synthetic construct
  misc_feature 1..1345: note = mRNA i-3 (A64-N5-C30-hSL-N5) (opt1) from Homo sapiens__NP_000448.3__HNF4A(1-375)(S142A_S143A)
  source 1..1345: mol_type = other RNA
aggagaaagcttaccatgcgcctgagcaagaccctcgtggacatggacatggccgactactccgccgcgctggaccccgcctacaccacgctggagttcgagaacgtccaggtgctcaccatgggcaacgacaccagcccgtccgaggggaccaacctgaacgcccccaacagcctgggcgtgtccgccctctgcgccatctgcggggaccgggcgacgggcaagcactacggggccagctcctgcgacggctgcaagggcttcttccgccggagcgtccgcaagaaccacatgtactcctgccggttcagccgccagtgcgtggtggacaaggacaagcggaaccagtgccgctactgccggctgaagaagtgcttccgcgccgggatgaagaaggaggccgtccagaacgagcgggaccgcatctccacccggcgcgcggcctacgaggacagctccctgcccagcatcaacgcgctcctgcaggccgaggtgctgtcccggcagatcaccagccccgtgtccggcatcaacggggacatccgcgccaagaagatcgccagcatcgccgacgtctgcgagagcatgaaggagcagctcctggtgctggtggagtgggcgaagtacatcccggccttctgcgagctccccctggacgaccaggtcgccctgctccgggcccacgccggcgagcacctcctgctgggggcgaccaagcgctccatggtgttcaaggacgtgctgctgctcggcaacgactacatcgtcccccggcactgccccgagctggccgagatgagccgcgtgtccatccggatcctggacgagctcgtgctgccgttccaggagctgcagatcgacgacaacgagtacgcctacctcaaggccatcatcttcttcgaccccgacgccaagggcctgagcgaccccgggaagatcaagcgcctgcgctcccaggtccaggtgagcctcgaggactacatcaacgaccggcagtacgactcccgcggccggttcggggagctgctgctcctgctgcccacgctccagagcatcacctggcagatgatcgagcagatccagttcatcaagctgttcggcatggcgaagatcgacaacctgctccaggagatgctgctgtgaggactagttataagactgactagcccgatgggcctcccaacgggccctcctcccctccttgcaccgagattaataaaaaaaaaaaaaaaaaaaaaaaaaaaaaaaaaaaaaaaaaaaaaaaaaaaaaaaaaaaaaaaatgcatcccccccccccccccccccccccccccccccaaaggctcttttcagagccaccagaatt

SEQ ID NO: 2025 - RNA, 1345 nt, synthetic construct
  misc_feature 1..1345: note = mRNA i-3 (A64-N5-C30-hSL-N5) (opt1) from Homo sapiens__NP_000448.3__HNF4A(1-375)(S142E_S143E)
  source 1..1345: mol_type = other RNA
aggagaaagcttaccatgcgcctgagcaagaccctcgtggacatggacatggccgactactccgccgcgctggaccccgcctacaccacgctggagttcgagaacgtccaggtgctcaccatgggcaacgacaccagcccgtccgaggggaccaacctgaacgcccccaacagcctgggcgtgtccgccctctgcgccatctgcggggaccgggcgacgggcaagcactacggggccagctcctgcgacggctgcaagggcttcttccgccggagcgtccgcaagaaccacatgtactcctgccggttcagccgccagtgcgtggtggacaaggacaagcggaaccagtgccgctactgccggctgaagaagtgcttccgcgccgggatgaagaaggaggccgtccagaacgagcgggaccgcatctccacccggcgcgaggagtacgaggacagctccctgcccagcatcaacgcgctcctgcaggccgaggtgctgtcccggcagatcaccagccccgtgtccggcatcaacggggacatccgcgccaagaagatcgccagcatcgccgacgtctgcgagagcatgaaggagcagctcctggtgctggtggagtgggcgaagtacatcccggccttctgcgagctccccctggacgaccaggtcgccctgctccgggcccacgccggcgagcacctcctgctgggggcgaccaagcgctccatggtgttcaaggacgtgctgctgctcggcaacgactacatcgtcccccggcactgccccgagctggccgagatgagccgcgtgtccatccggatcctggacgagctcgtgctgccgttccaggagctgcagatcgacgacaacgagtacgcctacctcaaggccatcatcttcttcgaccccgacgccaagggcctgagcgaccccgggaagatcaagcgcctgcgctcccaggtccaggtgagcctcgaggactacatcaacgaccggcagtacgactcccgcggccggttcggggagctgctgctcctgctgcccacgctccagagcatcacctggcagatgatcgagcagatccagttcatcaagctgttcggcatggcgaagatcgacaacctgctccaggagatgctgctgtgaggactagttataagactgactagcccgatgggcctcccaacgggccctcctcccctccttgcaccgagattaataaaaaaaaaaaaaaaaaaaaaaaaaaaaaaaaaaaaaaaaaaaaaaaaaaaaaaaaaaaaaaaatgcatcccccccccccccccccccccccccccccccaaaggctcttttcagagccaccagaatt

SEQ ID NO: 2026 - RNA, 1345 nt, synthetic construct
  misc_feature 1..1345: note = mRNA i-3 (A64-N5-C30-hSL-N5) (opt1) from Homo sapiens__NP_000448.3__HNF4A(1-375)(S143A)
  source 1..1345: mol_type = other RNA
aggagaaagcttaccatgcgcctgagcaagaccctcgtggacatggacatggccgactactccgccgcgctggaccccgcctacaccacgctggagttcgagaacgtccaggtgctcaccatgggcaacgacaccagcccgtccgaggggaccaacctgaacgcccccaacagcctgggcgtgtccgccctctgcgccatctgcggggaccgggcgacgggcaagcactacggggccagctcctgcgacggctgcaagggcttcttccgccggagcgtccgcaagaaccacatgtactcctgccggttcagccgccagtgcgtggtggacaaggacaagcggaaccagtgccgctactgccggctgaagaagtgcttccgcgccgggatgaagaaggaggccgtccagaacgagcgggaccgcatctccacccggcgcagcgcgtacgaggacagctccctgcccagcatcaacgcgctcctgcaggccgaggtgctgtcccggcagatcaccagccccgtgtccggcatcaacggggacatccgcgccaagaagatcgccagcatcgccgacgtctgcgagagcatgaaggagcagctcctggtgctggtggagtgggcgaagtacatcccggccttctgcgagctccccctggacgaccaggtcgccctgctccgggcccacgccggcgagcacctcctgctgggggcgaccaagcgctccatggtgttcaaggacgtgctgctgctcggcaacgactacatcgtcccccggcactgccccgagctggccgagatgagccgcgtgtccatccggatcctggacgagctcgtgctgccgttccaggagctgcagatcgacgacaacgagtacgcctacctcaaggccatcatcttcttcgaccccgacgccaagggcctgagcgaccccgggaagatcaagcgcctgcgctcccaggtccaggtgagcctcgaggactacatcaacgaccggcagtacgactcccgcggccggttcggggagctgctgctcctgctgcccacgctccagagcatcacctggcagatgatcgagcagatccagttcatcaagctgttcggcatggcgaagatcgacaacctgctccaggagatgctgctgtgaggactagttataagactgactagcccgatgggcctcccaacgggccctcctcccctccttgcaccgagattaataaaaaaaaaaaaaaaaaaaaaaaaaaaaaaaaaaaaaaaaaaaaaaaaaaaaaaaaaaaaaaaatgcatcccccccccccccccccccccccccccccccaaaggctcttttcagagccaccagaatt

SEQ ID NO: 2027 - RNA, 1345 nt, synthetic construct
  misc_feature 1..1345: note = mRNA i-3 (A64-N5-C30-hSL-N5) (opt1) from Homo sapiens__NP_000448.3__HNF4A(1-375)(T166A)
  source 1..1345: mol_type = other RNA
aggagaaagcttaccatgcgcctgagcaagaccctcgtggacatggacatggccgactactccgccgcgctggaccccgcctacaccacgctggagttcgagaacgtccaggtgctcaccatgggcaacgacaccagcccgtccgaggggaccaacctgaacgcccccaacagcctgggcgtgtccgccctctgcgccatctgcggggaccgggcgacgggcaagcactacggggccagctcctgcgacggctgcaagggcttcttccgccggagcgtccgcaagaaccacatgtactcctgccggttcagccgccagtgcgtggtggacaaggacaagcggaaccagtgccgctactgccggctgaagaagtgcttccgcgccgggatgaagaaggaggccgtccagaacgagcgggaccgcatctccacccggcgcagctcctacgaggacagctccctgcccagcatcaacgcgctcctgcaggccgaggtgctgtcccggcagatcgcgagccccgtgtccggcatcaacggggacatccgcgccaagaagatcgccagcatcgccgacgtctgcgagagcatgaaggagcagctcctggtgctggtggagtgggcgaagtacatcccggccttctgcgagctccccctggacgaccaggtcgccctgctccgggcccacgccggcgagcacctcctgctgggggcgaccaagcgctccatggtgttcaaggacgtgctgctgctcggcaacgactacatcgtcccccggcactgccccgagctggccgagatgagccgcgtgtccatccggatcctggacgagctcgtgctgccgttccaggagctgcagatcgacgacaacgagtacgcctacctcaaggccatcatcttcttcgaccccgacgccaagggcctgagcgaccccgggaagatcaagcgcctgcgctcccaggtccaggtgagcctcgaggactacatcaacgaccggcagtacgactcccgcggccggttcggggagctgctgctcctgctgcccacgctccagagcatcacctggcagatgatcgagcagatccagttcatcaagctgttcggcatggcgaagatcgacaacctgctccaggagatgctgctgtgaggactagttataagactgactagcccgatgggcctcccaacgggccctcctcccctccttgcaccgagattaataaaaaaaaaaaaaaaaaaaaaaaaaaaaaaaaaaaaaaaaaaaaaaaaaaaaaaaaaaaaaaaatgcatcccccccccccccccccccccccccccccccaaaggctcttttcagagccaccagaatt

SEQ ID NO: 2028 - RNA, 1345 nt, synthetic construct
  misc_feature 1..1345: note = mRNA i-3 (A64-N5-C30-hSL-N5) (opt1) from Homo sapiens__NP_000448.3__HNF4A(1-375)(S167E)
  source 1..1345: mol_type = other RNA
aggagaaagcttaccatgcgcctgagcaagaccctcgtggacatggacatggccgactactccgccgcgctggaccccgcctacaccacgctggagttcgagaacgtccaggtgctcaccatgggcaacgacaccagcccgtccgaggggaccaacctgaacgcccccaacagcctgggcgtgtccgccctctgcgccatctgcggggaccgggcgacgggcaagcactacggggccagctcctgcgacggctgcaagggcttcttccgccggagcgtccgcaagaaccacatgtactcctgccggttcagccgccagtgcgtggtggacaaggacaagcggaaccagtgccgctactgccggctgaagaagtgcttccgcgccgggatgaagaaggaggccgtccagaacgagcgggaccgcatctccacccggcgcagctcctacgaggacagctccctgcccagcatcaacgcgctcctgcaggccgaggtgctgtcccggcagatcaccgagcccgtgtccggcatcaacggggacatccgcgccaagaagatcgccagcatcgccgacgtctgcgagagcatgaaggagcagctcctggtgctggtggagtgggcgaagtacatcccggccttctgcgagctccccctggacgaccaggtcgccctgctccgggcccacgccggcgagcacctcctgctgggggcgaccaagcgctccatggtgttcaaggacgtgctgctgctcggcaacgactacatcgtcccccggcactgccccgagctggccgagatgagccgcgtgtccatccggatcctggacgagctcgtgctgccgttccaggagctgcagatcgacgacaacgagtacgcctacctcaaggccatcatcttcttcgaccccgacgccaagggcctgagcgaccccgggaagatcaagcgcctgcgctcccaggtccaggtgagcctcgaggactacatcaacgaccggcagtacgactcccgcggccggttcggggagctgctgctcctgctgcccacgctccagagcatcacctggcagatgatcgagcagatccagttcatcaagctgttcggcatggcgaagatcgacaacctgctccaggagatgctgctgtgaggactagttataagactgactagcccgatgggcctcccaacgggccctcctcccctccttgcaccgagattaataaaaaaaaaaaaaaaaaaaaaaaaaaaaaaaaaaaaaaaaaaaaaaaaaaaaaaaaaaaaaaaatgcatcccccccccccccccccccccccccccccccaaaggctcttttcagagccaccagaatt

SEQ ID NO: 2029 - RNA, 1345 nt, synthetic construct
  misc_feature 1..1345: note = mRNA i-3 (A64-N5-C30-hSL-N5) (opt1) from Homo sapiens__NP_000448.3__HNF4A(1-375)(S167A)
  source 1..1345: mol_type = other RNA
aggagaaagcttaccatgcgcctgagcaagaccctcgtggacatggacatggccgactactccgccgcgctggaccccgcctacaccacgctggagttcgagaacgtccaggtgctcaccatgggcaacgacaccagcccgtccgaggggaccaacctgaacgcccccaacagcctgggcgtgtccgccctctgcgccatctgcggggaccgggcgacgggcaagcactacggggccagctcctgcgacggctgcaagggcttcttccgccggagcgtccgcaagaaccacatgtactcctgccggttcagccgccagtgcgtggtggacaaggacaagcggaaccagtgccgctactgccggctgaagaagtgcttccgcgccgggatgaagaaggaggccgtccagaacgagcgggaccgcatctccacccggcgcagctcctacgaggacagctccctgcccagcatcaacgcgctcctgcaggccgaggtgctgtcccggcagatcaccgcgcccgtgtccggcatcaacggggacatccgcgccaagaagatcgccagcatcgccgacgtctgcgagagcatgaaggagcagctcctggtgctggtggagtgggcgaagtacatcccggccttctgcgagctccccctggacgaccaggtcgccctgctccgggcccacgccggcgagcacctcctgctgggggcgaccaagcgctccatggtgttcaaggacgtgctgctgctcggcaacgactacatcgtcccccggcactgccccgagctggccgagatgagccgcgtgtccatccggatcctggacgagctcgtgctgccgttccaggagctgcagatcgacgacaacgagtacgcctacctcaaggccatcatcttcttcgaccccgacgccaagggcctgagcgaccccgggaagatcaagcgcctgcgctcccaggtccaggtgagcctcgaggactacatcaacgaccggcagtacgactcccgcggccggttcggggagctgctgctcctgctgcccacgctccagagcatcacctggcagatgatcgagcagatccagttcatcaagctgttcggcatggcgaagatcgacaacctgctccaggagatgctgctgtgaggactagttataagactgactagcccgatgggcctcccaacgggccctcctcccctccttgcaccgagattaataaaaaaaaaaaaaaaaaaaaaaaaaaaaaaaaaaaaaaaaaaaaaaaaaaaaaaaaaaaaaaaatgcatcccccccccccccccccccccccccccccccaaaggctcttttcagagccaccagaatt

SEQ ID NO: 2030 - RNA, 1345 nt, synthetic construct; identical to SEQ ID NO: 2029
  misc_feature 1..1345: note = mRNA i-3 (A64-N5-C30-hSL-N5) (opt1) from Homo sapiens__NP_000448.3__HNF4A(1-375)(S167A_S378A_T429A_T432A_ S436A)
  source 1..1345: mol_type = other RNA

SEQ ID NO: 2031 - RNA, 1345 nt, synthetic construct; identical to SEQ ID NO: 2028
  misc_feature 1..1345: note = mRNA i-3 (A64-N5-C30-hSL-N5) (opt1) from Homo sapiens__NP_000448.3__HNF4A(1-375)(S167E_S378E_T429E_T432E_ S436E)
  source 1..1345: mol_type = other RNA

SEQ ID NO: 2032 - RNA, 1345 nt, synthetic construct
  misc_feature 1..1345: note = mRNA i-3 (A64-N5-C30-hSL-N5) (opt1) from Homo sapiens__NP_000448.3__HNF4A(1-375)(S87A)
  source 1..1345: mol_type = other RNA
aggagaaagcttaccatgcgcctgagcaagaccctcgtggacatggacatggccgactactccgccgcgctggaccccgcctacaccacgctggagttcgagaacgtccaggtgctcaccatgggcaacgacaccagcccgtccgaggggaccaacctgaacgcccccaacagcctgggcgtgtccgccctctgcgccatctgcggggaccgggcgacgggcaagcactacggggccagctcctgcgacggctgcaagggcttcttccgccgggcggtccgcaagaaccacatgtactcctgccggttcagccgccagtgcgtggtggacaaggacaagcggaaccagtgccgctactgccggctgaagaagtgcttccgcgccgggatgaagaaggaggccgtccagaacgagcgggaccgcatctccacccggcgcagctcctacgaggacagctccctgcccagcatcaacgcgctcctgcaggccgaggtgctgtcccggcagatcaccagccccgtgtccggcatcaacggggacatccgcgccaagaagatcgccagcatcgccgacgtctgcgagagcatgaaggagcagctcctggtgctggtggagtgggcgaagtacatcccggccttctgcgagctccccctggacgaccaggtcgccctgctccgggcccacgccggcgagcacctcctgctgggggcgaccaagcgctccatggtgttcaaggacgtgctgctgctcggcaacgactacatcgtcccccggcactgccccgagctggccgagatgagccgcgtgtccatccggatcctggacgagctcgtgctgccgttccaggagctgcagatcgacgacaacgagtacgcctacctcaaggccatcatcttcttcgaccccgacgccaagggcctgagcgaccccgggaagatcaagcgcctgcgctcccaggtccaggtgagcctcgaggactacatcaacgaccggcagtacgactcccgcggccggttcggggagctgctgctcctgctgcccacgctccagagcatcacctggcagatgatcgagcagatccagttcatcaagctgttcggcatggcgaagatcgacaacctgctccaggagatgctgctgtgaggactagttataagactgactagcccgatgggcctcccaacgggccctcctcccctccttgcaccgagattaataaaaaaaaaaaaaaaaaaaaaaaaaaaaaaaaaaaaaaaaaaaaaaaaaaaaaaaaaaaaaaaatgcatcccccccccccccccccccccccccccccccaaaggctcttttcagagccaccagaatt

SEQ ID NO: 2033 - RNA, 1345 nt, synthetic construct
  misc_feature 1..1345: note = mRNA i-3 (A64-N5-C30-hSL-N5) (opt1) from Homo sapiens__NP_000448.3__HNF4A(1-375)(S87E)
  source 1..1345: mol_type = other RNA
aggagaaagcttaccatgcgcctgagcaagaccctcgtggacatggacatggccgactactccgccgcgctggaccccgcctacaccacgctggagttcgagaacgtccaggtgctcaccatgggcaacgacaccagcccgtccgaggggaccaacctgaacgcccccaacagcctgggcgtgtccgccctctgcgccatctgcggggaccgggcgacgggcaagcactacggggccagctcctgcgacggctgcaagggcttcttccgccgggaggtccgcaagaaccacatgtactcctgccggttcagccgccagtgcgtggtggacaaggacaagcggaaccagtgccgctactgccggctgaagaagtgcttccgcgccgggatgaagaaggaggccgtccagaacgagcgggaccgcatctccacccggcgcagctcctacgaggacagctccctgcccagcatcaacgcgctcctgcaggccgaggtgctgtcccggcagatcaccagccccgtgtccggcatcaacggggacatccgcgccaagaagatcgccagcatcgccgacgtctgcgagagcatgaaggagcagctcctggtgctggtggagtgggcgaagtacatcccggccttctgcgagctccccctggacgaccaggtcgccctgctccgggcccacgccggcgagcacctcctgctgggggcgaccaagcgctccatggtgttcaaggacgtgctgctgctcggcaacgactacatcgtcccccggcactgccccgagctggccgagatgagccgcgtgtccatccggatcctggacgagctcgtgctgccgttccaggagctgcagatcgacgacaacgagtacgcctacctcaaggccatcatcttcttcgaccccgacgccaagggcctgagcgaccccgggaagatcaagcgcctgcgctcccaggtccaggtgagcctcgaggactacatcaacgaccggcagtacgactcccgcggccggttcggggagctgctgctcctgctgcccacgctccagagcatcacctggcagatgatcgagcagatccagttcatcaagctgttcggcatggcgaagatcgacaacctgctccaggagatgctgctgtgaggactagttataagactgactagcccgatgggcctcccaacgggccctcctcccctccttgcaccgagattaataaaaaaaaaaaaaaaaaaaaaaaaaaaaaaaaaaaaaaaaaaaaaaaaaaaaaaaaaaaaaaaatgcatcccccccccccccccccccccccccccccccaaaggctcttttcagagccaccagaatt

SEQ ID NO: 2034 - RNA, 1345 nt, synthetic construct
  misc_feature 1..1345: note = mRNA i-3 (A64-N5-C30-hSL-N5) (opt1) from Homo sapiens__NP_000448.3__HNF4A(1-375)(R2V)
  source 1..1345: mol_type = other RNA
aggagaaagcttaccatggtgctgagcaagaccctcgtggacatggacatggccgactactccgccgcgctggaccccgcctacaccacgctggagttcgagaacgtccaggtgctcaccatgggcaacgacaccagcccgtccgaggggaccaacctgaacgcccccaacagcctgggcgtgtccgccctctgcgccatctgcggggaccgggcgacgggcaagcactacggggccagctcctgcgacggctgcaagggcttcttccgccggagcgtccgcaagaaccacatgtactcctgccggttcagccgccagtgcgtggtggacaaggacaagcggaaccagtgccgctactgccggctgaagaagtgcttccgcgccgggatgaagaaggaggccgtccagaacgagcgggaccgcatctccacccggcgcagctcctacgaggacagctccctgcccagcatcaacgcgctcctgcaggccgaggtgctgtcccggcagatcaccagccccgtgtccggcatcaacggggacatccgcgccaagaagatcgccagcatcgccgacgtctgcgagagcatgaaggagcagctcctggtgctggtggagtgggcgaagtacatcccggccttctgcgagctccccctggacgaccaggtcgccctgctccgggcccacgccggcgagcacctcctgctgggggcgaccaagcgctccatggtgttcaaggacgtgctgctgctcggcaacgactacatcgtcccccggcactgccccgagctggccgagatgagccgcgtgtccatccggatcctggacgagctcgtgctgccgttccaggagctgcagatcgacgacaacgagtacgcctacctcaaggccatcatcttcttcgaccccgacgccaagggcctgagcgaccccgggaagatcaagcgcctgcgctcccaggtccaggtgagcctcgaggactacatcaacgaccggcagtacgactcccgcggccggttcggggagctgctgctcctgctgcccacgctccagagcatcacctggcagatgatcgagcagatccagttcatcaagctgttcggcatggcgaagatcgacaacctgctccaggagatgctgctgtgaggactagttataagactgactagcccgatgggcctcccaacgggccctcctcccctccttgcaccgagattaataaaaaaaaaaaaaaaaaaaaaaaaaaaaaaaaaaaaaaaaaaaaaaaaaaaaaaaaaaaaaaaatgcatcccccccccccccccccccccccccccccccaaaggctcttttcagagccaccagaatt

SEQ ID NO: 2035 - RNA, 1345 nt, synthetic construct
  misc_feature 1..1345: note = mRNA i-3 (A64-N5-C30-hSL-N5) (opt1) from Homo sapiens__NP_000448.3__HNF4A(1-375)(R2V_K5V)
  source 1..1345: mol_type = other RNA
aggagaaagcttaccatggtgctgagcgtgaccctcgtggacatggacatggccgactactccgccgcgctggaccccgcctacaccacgctggagttcgagaacgtccaggtgctcaccatgggcaacgacaccagcccgtccgaggggaccaacctgaacgcccccaacagcctgggcgtgtccgccctctgcgccatctgcggggaccgggcgacgggcaagcactacggggccagctcctgcgacggctgcaagggcttcttccgccggagcgtccgcaagaaccacatgtactcctgccggttcagccgccagtgcgtggtggacaaggacaagcggaaccagtgccgctactgccggctgaagaagtgcttccgcgccgggatgaagaaggaggccgtccagaacgagcgggaccgcatctccacccggcgcagctcctacgaggacagctccctgcccagcatcaacgcgctcctgcaggccgaggtgctgtcccggcagatcaccagccccgtgtccggcatcaacggggacatccgcgccaagaagatcgccagcatcgccgacgtctgcgagagcatgaaggagcagctcctggtgctggtggagtgggcgaagtacatcccggccttctgcgagctccccctggacgaccaggtcgccctgctccgggcccacgccggcgagcacctcctgctgggggcgaccaagcgctccatggtgttcaaggacgtgctgctgctcggcaacgactacatcgtcccccggcactgccccgagctggccgagatgagccgcgtgtccatccggatcctggacgagctcgtgctgccgttccaggagctgcagatcgacgacaacgagtacgcctacctcaaggccatcatcttcttcgaccccgacgccaagggcctgagcgaccccgggaagatcaagcgcctgcgctcccaggtccaggtgagcctcgaggactacatcaacgaccggcagtacgactcccgcggccggttcggggagctgctgctcctgctgcccacgctccagagcatcacctggcagatgatcgagcagatccagttcatcaagctgttcggcatggcgaagatcgacaacctgctccaggagatgctgctgtgaggactagttataagactgactagcccgatgggcctcccaacgggccctcctcccctccttgcaccgagattaataaaaaaaaaaaaaaaaaaaaaaaaaaaaaaaaaaaaaaaaaaaaaaaaaaaaaaaaaaaaaaaatgcatcccccccccccccccccccccccccccccccaaaggctcttttcagagccaccagaatt

SEQ ID NO: 2036 - RNA, 1345 nt, synthetic construct
  misc_feature 1..1345: note = mRNA i-3 (A64-N5-C30-hSL-N5) (opt1) from Homo sapiens__NP_000448.3__HNF4A(1-375)(K179R_K180R)
  source 1..1345: mol_type = other RNA
aggagaaagcttaccatgcgcctgagcaagaccctcgtggacatggacatggccgactactccgccgcgctggaccccgcctacaccacgctggagttcgagaacgtccaggtgctcaccatgggcaacgacaccagcccgtccgaggggaccaacctgaacgcccccaacagcctgggcgtgtccgccctctgcgccatctgcggggaccgggcgacgggcaagcactacggggccagctcctgcgacggctgcaagggcttcttccgccggagcgtccgcaagaaccacatgtactcctgccggttcagccgccagtgcgtggtggacaaggacaagcggaaccagtgccgctactgccggctgaagaagtgcttccgcgccgggatgaagaaggaggccgtccagaacgagcgggaccgcatctccacccggcgcagctcctacgaggacagctccctgcccagcatcaacgcgctcctgcaggccgaggtgctgtcccggcagatcaccagccccgtgtccggcatcaacggggacatccgcgcccggcgcatcgccagcatcgccgacgtctgcgagagcatgaaggagcagctcctggtgctggtggagtgggcgaagtacatcccggccttctgcgagctccccctggacgaccaggtcgccctgctccgggcccacgccggcgagcacctcctgctgggggcgaccaagcgctccatggtgttcaaggacgtgctgctgctcggcaacgactacatcgtcccccggcactgccccgagctggccgagatgagccgcgtgtccatccggatcctggacgagctcgtgctgccgttccaggagctgcagatcgacgacaacgagtacgcctacctcaaggccatcatcttcttcgaccccgacgccaagggcctgagcgaccccgggaagatcaagcgcctgcgctcccaggtccaggtgagcctcgaggactacatcaacgaccggcagtacgactcccgcggccggttcggggagctgctgctcctgctgcccacgctccagagcatcacctggcagatgatcgagcagatccagttcatcaagctgttcggcatggcgaagatcgacaacctgctccaggagatgctgctgtgaggactagttataagactgactagcccgatgggcctcccaacgggccctcctcccctccttgcaccgagattaataaaaaaaaaaaaaaaaaaaaaaaaaaaaaaaaaaaaaaaaaaaaaaaaaaaaaaaaaaaaaaaatgcatcccccccccccccccccccccccccccccccaaaggctcttttcagagccaccagaatt

SEQ ID NO: 2037 - RNA, 1345 nt, synthetic construct
  misc_feature 1..1345: note = mRNA i-3 (A64-N5-C30-hSL-N5) (opt1) from Homo sapiens__NP_000448.3__HNF4A(1-375)(K234R)
  source 1..1345: mol_type = other RNA
aggagaaagcttaccatgcgcctgagcaagaccctcgtggacatggacatggccgactactccgccgcgctggaccccgcctacaccacgctggagttcgagaacgtccaggtgctcaccatgggcaacgacaccagcccgtccgaggggaccaacctgaacgcccccaacagcctgggcgtgtccgccctctgcgccatctgcggggaccgggcgacgggcaagcactacggggccagctcctgcgacggctgcaagggcttcttccgccggagcgtccgcaagaaccacatgtactcctgccggttcagccgccagtgcgtggtggacaaggacaagcggaaccagtgccgctactgccggctgaagaagtgcttccgcgccgggatgaagaaggaggccgtccagaacgagcgggaccgcatctccacccggcgcagctcctacgaggacagctccctgcccagcatcaacgcgctcctgcaggccgaggtgctgtcccggcagatcaccagccccgtgtccggcatcaacggggacatccgcgccaagaagatcgccagcatcgccgacgtctgcgagagcatgaaggagcagctcctggtgctggtggagtgggcgaagtacatcccggccttctgcgagctccccctggacgaccaggtcgccctgctccgggcccacgccggcgagcacctcctgctgggggcgacccgccgctccatggtgttcaaggacgtgctgctgctcggcaacgactacatcgtcccccggcactgccccgagctggccgagatgagccgcgtgtccatccggatcctggacgagctcgtgctgccgttccaggagctgcagatcgacgacaacgagtacgcctacctcaaggccatcatcttcttcgaccccgacgccaagggcctgagcgaccccgggaagatcaagcgcctgcgctcccaggtccaggtgagcctcgaggactacatcaacgaccggcagtacgactcccgcggccggttcggggagctgctgctcctgctgcccacgctccagagcatcacctggcagatgatcgagcagatccagttcatcaagctgttcggcatggcgaagatcgacaacctgctccaggagatgctgctgtgaggactagttataagactgactagcccgatgggcctcccaacgggccctcctcccctccttgcaccgagattaataaaaaaaaaaaaaaaaaaaaaaaaaaaaaaaaaaaaaaaaaaaaaaaaaaaaaaaaaaaaaaaatgcatcccccccccccccccccccccccccccccccaaaggctcttttcagagccaccagaatt

SEQ ID NO: 2038 - RNA, 1345 nt, synthetic construct
  misc_feature 1..1345: note = mRNA i-3 (A64-N5-C30-hSL-N5) (opt1) from Homo sapiens__NP_000448.3__HNF4A(1-375)(K300R)
  source 1..1345: mol_type = other RNA
aggagaaagcttaccatgcgcctgagcaagaccctcgtggacatggacatggccgactactccgccgcgctggaccccgcctacaccacgctggagttcgagaacgtccaggtgctcaccatgggcaacgacaccagcccgtccgaggggaccaacctgaacgcccccaacagcctgggcgtgtccgccctctgcgccatctgcggggaccgggcgacgggcaagcactacggggccagctcctgcgacggctgcaagggcttcttccgccggagcgtccgcaagaaccacatgtactcctgccggttcagccgccagtgcgtggtggacaaggacaagcggaaccagtgccgctactgccggctgaagaagtgcttccgcgccgggatgaagaaggaggccgtccagaacgagcgggaccgcatctccacccggcgcagctcctacgaggacagctccctgcccagcatcaacgcgctcctgcaggccgaggtgctgtcccggcagatcaccagccccgtgtccggcatcaacggggacatccgcgccaagaagatcgccagcatcgccgacgtctgcgagagcatgaaggagcagctcctggtgctggtggagtgggcgaagtacatcccggccttctgcgagctccccctggacgaccaggtcgccctgctccgggcccacgccggcgagcacctcctgctgggggcgaccaagcgctccatggtgttcaaggacgtgctgctgctcggcaacgactacatcgtcccccggcactgccccgagctggccgagatgagccgcgtgtccatccggatcctggacgagctcgtgctgccgttccaggagctgcagatcgacgacaacgagtacgcctacctcaaggccatcatcttcttcgaccccgacgcccgcggcctgagcgaccccgggaagatcaagcgcctgcgctcccaggtccaggtgagcctcgaggactacatcaacgaccggcagtacgactcccgcggccggttcggggagctgctgctcctgctgcccacgctccagagcatcacctggcagatgatcgagcagatccagttcatcaagctgttcggcatggcgaagatcgacaacctgctccaggagatgctgctgtgaggactagttataagactgactagcccgatgggcctcccaacgggccctcctcccctccttgcaccgagattaataaaaaaaaaaaaaaaaaaaaaaaaaaaaaaaaaaaaaaaaaaaaaaaaaaaaaaaaaaaaaaaatgcatcccccccccccccccccccccccccccccccaaaggctcttttcagagccaccagaatt

SEQ ID NO: 2039 - RNA, 1345 nt, synthetic construct
  misc_feature 1..1345: note = mRNA i-3 (A64-N5-C30-hSL-N5) (opt1) from Homo sapiens__NP_000448.3__HNF4A(1-375)(K300R_K307R_K309R)
  source 1..1345: mol_type = other RNA
aggagaaagcttaccatgcgcctgagcaagaccctcgtggacatggacatggccgactactccgccgcgctggaccccgcctacaccacgctggagttcgagaacgtccaggtgctcaccatgggcaacgacaccagcccgtccgaggggaccaacctgaacgcccccaacagcctgggcgtgtccgccctctgcgccatctgcggggaccgggcgacgggcaagcactacggggccagctcctgcgacggctgcaagggcttcttccgccggagcgtccgcaagaaccacatgtactcctgccggttcagccgccagtgcgtggtggacaaggacaagcggaaccagtgccgctactgccggctgaagaagtgcttccgcgccgggatgaagaaggaggccgtccagaacgagcgggaccgcatctccacccggcgcagctcctacgaggacagctccctgcccagcatcaacgcgctcctgcaggccgaggtgctgtcccggcagatcaccagccccgtgtccggcatcaacggggacatccgcgccaagaagatcgccagcatcgccgacgtctgcgagagcatgaaggagcagctcctggtgctggtggagtgggcgaagtacatcccggccttctgcgagctccccctggacgaccaggtcgccctgctccgggcccacgccggcgagcacctcctgctgggggcgaccaagcgctccatggtgttcaaggacgtgctgctgctcggcaacgactacatcgtcccccggcactgccccgagctggccgagatgagccgcgtgtccatccggatcctggacgagctcgtgctgccgttccaggagctgcagatcgacgacaacgagtacgcctacctcaaggccatcatcttcttcgaccccgacgcccgcggcctgagcgaccccgggcgcatccggcgcctgcgctcccaggtccaggtgagcctcgaggactacatcaacgaccggcagtacgactcccgcggccggttcggggagctgctgctcctgctgcccacgctccagagcatcacctggcagatgatcgagcagatccagttcatcaagctgttcggcatggcgaagatcgacaacctgctccaggagatgctgctgtgaggactagttataagactgactagcccgatgggcctcccaacgggccctcctcccctccttgcaccgagattaataaaaaaaaaaaaaaaaaaaaaaaaaaaaaaaaaaaaaaaaaaaaaaaaaaaaaaaaaaaaaaaatgcatcccccccccccccccccccccccccccccccaaaggctcttttcagagccaccagaatt

SEQ ID NO: 2040 - RNA, 1345 nt, synthetic construct; identical to SEQ ID NO: 2021
  misc_feature 1..1345: note = mRNA i-3 (A64-N5-C30-hSL-N5) (opt1) from Homo sapiens__NP_000448.3__HNF4A(1-375)(K447R_K470R)
  source 1..1345: mol_type = other RNA

SEQ ID NO: 2041 - RNA, 1345 nt, synthetic construct; identical to SEQ ID NO: 2021
  misc_feature 1..1345: note = mRNA i-3 (A64-N5-C30-hSL-N5) (opt1) from Homo sapiens__NP_000448.3__HNF4A(1-375)(K458R)
  source 1..1345: mol_type = other RNA

SEQ ID NO: 2042 - RNA, 1345 nt, synthetic construct
  misc_feature 1..1345: note = mRNA i-3 (A64-N5-C30-hSL-N5) (opt1) from Homo sapiens__NP_000448.3__HNF4A(1-375)(K106R_K108R_K126R_K127R)
  source 1..1345: mol_type = other RNA
aggagaaagcttaccatgcgcctgagcaagaccctcgtggacatggacatggccgactactccgccgcgctggaccccgcctacaccacgctggagttcgagaacgtccaggtgctcaccatgggcaacgacaccagcccgtccgaggggaccaacctgaacgcccccaacagcctgggcgtgtccgccctctgcgccatctgcggggaccgggcgacgggcaagcactacggggccagctcctgcgacggctgcaagggcttcttccgccggagcgtccgcaagaaccacatgtactcctgccggttcagccgccagtgcgtggtggaccgcgaccggcggaaccagtgccgctactgccggctgaagaagtgcttccgcgccgggatgcgccgcgaggccgtccagaacgagcgggaccgcatctccacccggcgcagctcctacgaggacagctccctgcccagcatcaacgcgctcctgcaggccgaggtgctgtcccggcagatcaccagccccgtgtccggcatcaacggggacatccgcgccaagaagatcgccagcatcgccgacgtctgcgagagcatgaaggagcagctcctggtgctggtggagtgggcgaagtacatcccggccttctgcgagctccccctggacgaccaggtcgccctgctccgggcccacgccggcgagcacctcctgctgggggcgaccaagcgctccatggtgttcaaggacgtgctgctgctcggcaacgactacatcgtcccccggcactgccccgagctggccgagatgagccgcgtgtccatccggatcctggacgagctcgtgctgccgttccaggagctgcagatcgacgacaacgagtacgcctacctcaaggccatcatcttcttcgaccccgacgccaagggcctgagcgaccccgggaagatcaagcgcctgcgctcccaggtccaggtgagcctcgaggactacatcaacgaccggcagtacgactcccgcggccggttcggggagctgctgctcctgctgcccacgctccagagcatcacctggcagatgatcgagcagatccagttcatcaagctgttcggcatggcgaagatcgacaacctgctccaggagatgctgctgtgaggactagttataagactgactagcccgatgggcctcccaacgggccctcctcccctccttgcaccgagattaataaaaaaaaaaaaaaaaaaaaaaaaaaaaaaaaaaaaaaaaaaaaaaaaaaaaaaaaaaaaaaaatgcatcccccccccccccccccccccccccccccccaaaggctcttttcagagccaccagaatt

SEQ ID NO: 2043 - RNA, 1345 nt, synthetic construct
  misc_feature 1..1345: note = mRNA i-3 (A64-N5-C30-hSL-N5) (opt1) from Homo sapiens__NP_000448.3__HNF4A(1-375)(E285Q)
  source 1..1345: mol_type = other RNA
aggagaaagcttaccatgcgcctgagcaagaccctcgtggacatggacatggccgactactccgccgcgctggaccccgcctacaccacgctggagttcgagaacgtccaggtgctcaccatgggcaacgacaccagcccgtccgaggggaccaacctgaacgcccccaacagcctgggcgtgtccgccctctgcgccatctgcggggaccgggcgacgggcaagcactacggggccagctcctgcgacggctgcaagggcttcttccgccggagcgtccgcaagaaccacatgtactcctgccggttcagccgccagtgcgtggtggacaaggacaagcggaaccagtgccgctactgccggctgaagaagtgcttccgcgccgggatgaagaaggaggccgtccagaacgagcgggaccgcatctccacccggcgcagctcctacgaggacagctccctgcccagcatcaacgcgctcctgcaggccgaggtgctgtcccggcagatcaccagccccgtgtccggcatcaacggggacatccgcgccaagaagatcgccagcatcgccgacgtctgcgagagcatgaaggagcagctcctggtgctggtggagtgggcgaagtacatcccggccttctgcgagctccccctggacgaccaggtcgccctgctccgggcccacgccggcgagcacctcctgctgggggcgaccaagcgctccatggtgttcaaggacgtgctgctgctcggcaacgactacatcgtcccccggcactgccccgagctggccgagatgagccgcgtgtccatccggatcctggacgagctcgtgctgccgttccaggagctgcagatcgacgacaaccagtacgcctacctcaaggccatcatcttcttcgaccccgacgccaagggcctgagcgaccccgggaagatcaagcgcctgcgctcccaggtccaggtgagcctcgaggactacatcaacgaccggcagtacgactcccgcggccggttcggggagctgctgctcctgctgcccacgctccagagcatcacctggcagatgatcgagcagatccagttcatcaagctgttcggcatggcgaagatcgacaacctgctccaggagatgctgctgtgaggactagttataagactgactagcccgatgggcctcccaacgggccctcctcccctccttgcaccgagattaataaaaaaaaaaaaaaaaaaaaaaaaaaaaaaaaaaaaaaaaaaaaaaaaaaaaaaaaaaaaaaaatgcatcccccccccccccccccccccccccccccccaaaggctcttttcagagccaccagaatt

SEQ ID NO: 2044 - RNA, 1345 nt, synthetic construct
  misc_feature 1..1345: note = mRNA i-3 (A64-N5-C30-hSL-N5) (opt1) from Homo sapiens__NP_000448.3__HNF4A(1-375)(T166E)
  source 1..1345: mol_type = other RNA
aggagaaagcttaccatgcgcctgagcaagaccctcgtggacatggacatggccgactactccgccgcgctggaccccgcctacaccacgctggagttcgagaacgtccaggtgctcaccatgggcaacgacaccagcccgtccgaggggaccaacctgaacgcccccaacagcctgggcgtgtccgccctctgcgccatctgcggggaccgggcgacgggcaagcactacggggccagctcctgcgacggctgcaagggcttcttccgccggagcgtccgcaagaaccacatgtactcctgccggttcagccgccagtgcgtggtggacaaggacaagcggaaccagtgccgctactgccggctgaagaagtgcttccgcgccgggatgaagaaggaggccgtccagaacgagcgggaccgcatctccacccggcgcagctcctacgaggacagctccctgcccagcatcaacgcgctcctgcaggccgaggtgctgtcccggcagatcgagagccccgtgtccggcatcaacggggacatccgcgccaagaagatcgccagcatcgccgacgtctgcgagagcatgaaggagcagctcctggtgctggtggagtgggcgaagtacatcccggccttctgcgagctccccctggacgaccaggtcgccctgctccgggcccacgccggcgagcacctcctgctgggggcgaccaagcgctccatggtgttcaaggacgtgctgctgctcggcaacgactacatcgtcccccggcactgccccgagctggccgagatgagccgcgtgtccatccggatcctggacgagctcgtgctgccgttccaggagctgcagatcgacgacaacgagtacgcctacctcaaggccatcatcttcttcgaccccgacgccaagggcctgagcgaccccgggaagatcaagcgcctgcgctcccaggtccaggtgagcctcgaggactacatcaacgaccggcagtacgactcccgcggccggttcggggagctgctgctcctgctgcccacgctccagagcatcacctggcagatgatcgagcagatccagttcatcaagctgttcggcatggcgaagatcgacaacctgctccaggagatgctgctgtgaggactagttataagactgactagcccgatgggcctcccaacgggccctcctcccctccttgcaccgagattaataaaaaaaaaaaaaaaaaaaaaaaaaaaaaaaaaaaaaaaaaaaaaaaaaaaaaaaaaaaaaaaatgcatcccccccccccccccccccccccccccccccaaaggctcttttcagagccaccagaatt

SEQ ID NO: 2045 - RNA, 1345 nt, synthetic construct
  misc_feature 1..1345: note = mRNA i-3 (A64-N5-C30-hSL-N5) (opt1) from Homo sapiens__NP_000448.3__HNF4A(1-375)(S148A)
  source 1..1345: mol_type = other RNA
aggagaaagcttaccatgcgcctgagcaagaccctcgtggacatggacatggccgactactccgccgcgctggaccccgcctacaccacgctggagttcgagaacgtccaggtgctcaccatgggcaacgacaccagcccgtccgaggggaccaacctgaacgcccccaacagcctgggcgtgtccgccctctgcgccatctgcggggaccgggcgacgggcaagcactacggggccagctcctgcgacggctgcaagggcttcttccgccggagcgtccgcaagaaccacatgtactcctgccggttcagccgccagtgcgtggtggacaaggacaagcggaaccagtgccgctactgccggctgaagaagtgcttccgcgccgggatgaagaaggaggccgtccagaacgagcgggaccgcatctccacccggcgcagctcctacgaggacagcgcgctgcccagcatcaacgcgctcctgcaggccgaggtgctgtcccggcagatcaccagccccgtgtccggcatcaacggggacatccgcgccaagaagatcgccagcatcgccgacgtctgcgagagcatgaaggagcagctcctggtgctggtggagtgggcgaagtacatcccggccttctgcgagctccccctggacgaccaggtcgccctgctccgggcccacgccggcgagcacctcctgctgggggcgaccaagcgctccatggtgttcaaggacgtgctgctgctcggcaacgactacatcgtcccccggcactgccccgagctggccgagatgagccgcgtgtccatccggatcctggacgagctcgtgctgccgttccaggagctgcagatcgacgacaacgagtacgcctacctcaaggccatcatcttcttcgaccccgacgccaagggcctgagcgaccccgggaagatcaagcgcctgcgctcccaggtccaggtgagcctcgaggactacatcaacgaccggcagtacgactcccgcggccggttcggggagctgctgctcctgctgcccacgctccagagcatcacctggcagatgatcgagcagatccagttcatcaagctgttcggcatggcgaagatcgacaacctgctccaggagatgctgctgtgaggactagttataagactgactagcccgatgggcctcccaacgggccctcctcccctccttgcaccgagattaataaaaaaaaaaaaaaaaaaaaaaaaaaaaaaaaaaaaaaaaaaaaaaaaaaaaaaaaaaaaaaaatgcatcccccccccccccccccccccccccccccccaaaggctcttttcagagccaccagaatt

SEQ ID NO: 2046 - RNA, 1345 nt, synthetic construct
  misc_feature 1..1345: note = mRNA i-3 (A64-N5-C30-hSL-N5) (opt1) from Homo sapiens__NP_000448.3__HNF4A(1-375)(S148E)
  source 1..1345: mol_type = other RNA
aggagaaagcttaccatgcgcctgagcaagaccctcgtggacatggacatggccgactactccgccgcgctggaccccgcctacaccacgctggagttcgagaacgtccaggtgctcaccatgggcaacgacaccagcccgtccgaggggaccaacctgaacgcccccaacagcctgggcgtgtccgccctctgcgccatctgcggggaccgggcgacgggcaagcactacggggccagctcctgcgacggctgcaagggcttcttccgccggagcgtccgcaagaaccacatgtactcctgccggttcagccgccagtgcgtggtggacaaggacaagcggaaccagtgccgctactgccggctgaagaagtgcttccgcgccgggatgaagaaggaggccgtccagaacgagcgggaccgcatctccacccggcgcagctcctacgaggacagcgagctgcccagcatcaacgcgctcctgcaggccgaggtgctgtcccggcagatcaccagccccgtgtccggcatcaacggggacatccgcgccaagaagatcgccagcatcgccgacgtctgcgagagcatgaaggagcagctcctggtgctggtggagtgggcgaagtacatcccggccttctgcgagctccccctggacgaccaggtcgccctgctccgggcccacgccggcgagcacctcctgctgggggcgaccaagcgctccatggtgttcaaggacgtgctgctgctcggcaacgactacatcgtcccccggcactgccccgagctggccgagatgagccgcgtgtccatccggatcctggacgagctcgtgctgccgttccaggagctgcagatcgacgacaacgagtacgcctacctcaaggccatcatcttcttcgaccccgacgccaagggcctgagcgaccccgggaagatcaagcgcctgcgctcccaggtccaggtgagcctcgaggactacatcaacgaccggcagtacgactcccgcggccggttcggggagctgctgctcctgctgcccacgctccagagcatcacctggcagatgatcgagcagatccagttcatcaagctgttcggcatggcgaagatcgacaacctgctccaggagatgctgctgtgaggactagttataagactgactagcccgatgggcctcccaacgggccctcctcccctccttgcaccgagattaataaaaaaaaaaaaaaaaaaaaaaaaaaaaaaaaaaaaaaaaaaaaaaaaaaaaaaaaaaaaaaaatgcatcccccccccccccccccccccccccccccccaaaggctcttttcagagccaccagaatt

SEQ ID NO: 2047 - RNA, 1345 nt, synthetic construct
  misc_feature 1..1345: note = mRNA i-3 (A64-N5-C30-hSL-N5) (opt1) from Homo sapiens__NP_000448.3__HNF4A(1-375)(S183A)
  source 1..1345: mol_type = other RNA
aggagaaagcttaccatgcgcctgagcaagaccctcgtggacatggacatggccgactactccgccgcgctggaccccgcctacaccacgctggagttcgagaacgtccaggtgctcaccatgggcaacgacaccagcccgtccgaggggaccaacctgaacgcccccaacagcctgggcgtgtccgccctctgcgccatctgcggggaccgggcgacgggcaagcactacggggccagctcctgcgacggctgcaagggcttcttccgccggagcgtccgcaagaaccacatgtactcctgccggttcagccgccagtgcgtggtggacaaggacaagcggaaccagtgccgctactgccggctgaagaagtgcttccgcgccgggatgaagaaggaggccgtccagaacgagcgggaccgcatctccacccggcgcagctcctacgaggacagctccctgcccagcatcaacgcgctcctgcaggccgaggtgctgtcccggcagatcaccagccccgtgtccggcatcaacggggacatccgcgccaagaagatcgccgcgatcgccgacgtctgcgagagcatgaaggagcagctcctggtgctggtggagtgggcgaagtacatcccggccttctgcgagctccccctggacgaccaggtcgccctgctccgggcccacgccggcgagcacctcctgctgggggcgaccaagcgctccatggtgttcaaggacgtgctgctgctcggcaacgactacatcgtcccccggcactgccccgagctggccgagatgagccgcgtgtccatccggatcctggacgagctcgtgctgccgttccaggagctgcagatcgacgacaacgagtacgcctacctcaaggccatcatcttcttcgaccccgacgccaagggcctgagcgaccccgggaagatcaagcgcctgcgctcccaggtccaggtgagcctcgaggactacatcaacgaccggcagtacgactcccgcggccggttcggggagctgctgctcctgctgcccacgctccagagcatcacctggcagatgatcgagcagatccagttcatcaagctgttcggcatggcgaagatcgacaacctgctccaggagatgctgctgtgaggactagttataagactgactagcccgatgggcctcccaacgggccctcctcccctccttgcaccgagattaataaaaaaaaaaaaaaaaaaaaaaaaaaaaaaaaaaaaaaaaaaaaaaaaaaaaaaaaaaaaaaaatgcatcccccccccccccccccccccccccccccccaaaggctcttttcagagccaccagaatt

SEQ ID NO: 2048 - RNA, 1345 nt, synthetic construct
  misc_feature 1..1345: note = mRNA i-3 (A64-N5-C30-hSL-N5) (opt1) from Homo sapiens__NP_000448.3__HNF4A(1-375)(S183E)
  source 1..1345: mol_type = other RNA
aggagaaagcttaccatgcgcctgagcaagaccctcgtggacatggacatggccgactactccgccgcgctggaccccgcctacaccacgctggagttcgagaacgtccaggtgctcaccatgggcaacgacaccagcccgtccgaggggaccaacctgaacgcccccaacagcctgggcgtgtccgccctctgcgccatctgcggggaccgggcgacgggcaagcactacggggccagctcctgcgacggctgcaagggcttcttccgccggagcgtccgcaagaaccacatgtactcctgccggttcagccgccagtgcgtggtggacaaggacaagcggaaccagtgccgctactgccggctgaagaagtgcttccgcgccgggatgaagaaggaggccgtccagaacgagcgggaccgcatctccacccggcgcagctcctacgaggacagctccctgcccagcatcaacgcgctcctgcaggccgaggtgctgtcccggcagatcaccagccccgtgtccggcatcaacggggacatccgcgccaagaagatcgccgagatcgccgacgtctgcgagagcatgaaggagcagctcctggtgctggtggagtgggcgaagtacatcccggccttctgcgagctccccctggacgaccaggtcgccctgctccgggcccacgccggcgagcacctcctgctgggggcgaccaagcgctccatggtgttcaaggacgtgctgctgctcggcaacgactacatcgtcccccggcactgccccgagctggccgagatgagccgcgtgtccatccggatcctggacgagctcgtgctgccgttccaggagctgcagatcgacgacaacgagtacgcctacctcaaggccatcatcttcttcgaccccgacgccaagggcctgagcgaccccgggaagatcaagcgcctgcgctcccaggtccaggtgagcctcgaggactacatcaacgaccggcagtacgactcccgcggccggttcggggagctgctgctcctgctgcccacgctccagagcatcacctggcagatgatcgagcagatccagttcatcaagctgttcggcatggcgaagatcgacaacctgctccaggagatgctgctgtgaggactagttataagactgactagcccgatgggcctcccaacgggccctcctcccctccttgcaccgagattaataaaaaaaaaaaaaaaaaaaaaaaaaaaaaaaaaaaaaaaaaaaaaaaaaaaaaaaaaaaaaaaatgcatcccccccccccccccccccccccccccccccaaaggctcttttcagagccaccagaatt

SEQ ID NO: 2049 - RNA, 1345 nt, synthetic construct; identical to SEQ ID NO: 2021
  misc_feature 1..1345: note = mRNA i-3 (A64-N5-C30-hSL-N5) (opt1) from Homo sapiens__NP_000448.3__HNF4A(1-375)(S461A)
  source 1..1345: mol_type = other RNA

SEQ ID NO: 2050 - RNA, 1345 nt, synthetic construct; identical to SEQ ID NO: 2021
  misc_feature 1..1345: note = mRNA i-3 (A64-N5-C30-hSL-N5) (opt1) from Homo sapiens__NP_000448.3__HNF4A(1-375)(S461E)
  source 1..1345: mol_type = other RNA

SEQ ID NO: 2051 - RNA, 1345 nt, synthetic construct
  misc_feature 1..1345: note = mRNA i-3 (A64-N5-C30-hSL-N5) (opt1) from Homo sapiens__NP_000448.3__HNF4A(1-375)(S142A_S143A_S313A)
  source 1..1345: mol_type = other RNA
aggagaaagcttaccatgcgcctgagcaagaccctcgtggacatggacatggccgactactccgccgcgctggaccccgcctacaccacgctggagttcgagaacgtccaggtgctcaccatgggcaacgacaccagcccgtccgaggggaccaacctgaacgcccccaacagcctgggcgtgtccgccctctgcgccatctgcggggaccgggcgacgggcaagcactacggggccagctcctgcgacggctgcaagggcttcttccgccggagcgtccgcaagaaccacatgtactcctgccggttcagccgccagtgcgtggtggacaaggacaagcggaaccagtgccgctactgccggctgaagaagtgcttccgcgccgggatgaagaaggaggccgtccagaacgagcgggaccgcatctccacccggcgcgcggcctacgaggacagctccctgcccagcatcaacgcgctcctgcaggccgaggtgctgtcccggcagatcaccagccccgtgtccggcatcaacggggacatccgcgccaagaagatcgccagcatcgccgacgtctgcgagagcatgaaggagcagctcctggtgctggtggagtgggcgaagtacatcccggccttctgcgagctccccctggacgaccaggtcgccctgctccgggcccacgccggcgagcacctcctgctgggggcgaccaagcgctccatggtgttcaaggacgtgctgctgctcggcaacgactacatcgtcccccggcactgccccgagctggccgagatgagccgcgtgtccatccggatcctggacgagctcgtgctgccgttccaggagctgcagatcgacgacaacgagtacgcctacctcaaggccatcatcttcttcgaccccgacgccaagggcctgagcgaccccgggaagatcaagcgcctgcgcgcgcaggtccaggtgagcctcgaggactacatcaacgaccggcagtacgactcccgcggccggttcggggagctgctgctcctgctgcccacgctccagagcatcacctggcagatgatcgagcagatccagttcatcaagctgttcggcatggcgaagatcgacaacctgctccaggagatgctgctgtgaggactagttataagactgactagcccgatgggcctcccaacgggccctcctcccctccttgcaccgagattaataaaaaaaaaaaaaaaaaaaaaaaaaaaaaaaaaaaaaaaaaaaaaaaaaaaaaaaaaaaaaaaatgcatcccccccccccccccccccccccccccccccaaaggctcttttcagagccaccagaatt

SEQ ID NO: 2052 - RNA, 1345 nt, synthetic construct; identical to SEQ ID NO: 2051
  misc_feature 1..1345: note = mRNA i-3 (A64-N5-C30-hSL-N5) (opt1) from Homo sapiens__NP_000448.3__HNF4A(1-375)(S142A_S143A_S313A_K458R)
  source 1..1345: mol_type = other RNA

SEQ ID NO: 2053 - RNA, 1345 nt, synthetic construct
  misc_feature 1..1345: note = mRNA i-3 (A64-N5-C30-hSL-N5) (opt1) from Homo sapiens__NP_000448.3__HNF4A(1-375)(S142A_S143A_S167A_S313A_ S378A_T429A_T432A_S436A_K458R)
  source 1..1345: mol_type = other RNA
aggagaaagcttaccatgcgcctgagcaagaccctcgtggacatggacatggccgactactccgccgcgctggaccccgcctacaccacgctggagttcgagaacgtccaggtgctcaccatgggcaacgacaccagcccgtccgaggggaccaacctgaacgcccccaacagcctgggcgtgtccgccctctgcgccatctgcggggaccgggcgacgggcaagcactacggggccagctcctgcgacggctgcaagggcttcttccgccggagcgtccgcaagaaccacatgtactcctgccggttcagccgccagtgcgtggtggacaaggacaagcggaaccagtgccgctactgccggctgaagaagtgcttccgcgccgggatgaagaaggaggccgtccagaacgagcgggaccgcatctccacccggcgcgcggcctacgaggacagctccctgcccagcatcaacgcgctcctgcaggccgaggtgctgtcccggcagatcaccgcgcccgtgtccggcatcaacggggacatccgcgccaagaagatcgccagcatcgccgacgtctgcgagagcatgaaggagcagctcctggtgctggtggagtgggcgaagtacatcccggccttctgcgagctccccctggacgaccaggtcgccctgctccgggcccacgccggcgagcacctcctgctgggggcgaccaagcgctccatggtgttcaaggacgtgctgctgctcggcaacgactacatcgtcccccggcactgccccgagctggccgagatgagccgcgtgtccatccggatcctggacgagctcgtgctgccgttccaggagctgcagatcgacgacaacgagtacgcctacctcaaggccatcatcttcttcgaccccgacgccaagggcctgagcgaccccgggaagatcaagcgcctgcgcgcgcaggtccaggtgagcctcgaggactacatcaacgaccggcagtacgactcccgcggccggttcggggagctgctgctcctgctgcccacgctccagagcatcacctggcagatgatcgagcagatccagttcatcaagctgttcggcatggcgaagatcgacaacctgctccaggagatgctgctgtgaggactagttataagactgactagcccgatgggcctcccaacgggccctcctcccctccttgcaccgagattaataaaaaaaaaaaaaaaaaaaaaaaaaaaaaaaaaaaaaaaaaaaaaaaaaaaaaaaaaaaaaaaatgcatcccccccccccccccccccccccccccccccaaaggctcttttcagagccaccagaatt

SEQ ID NO: 2054 - RNA, 1345 nt, synthetic construct
  misc_feature 1..1345: note = mRNA i-3 (A64-N5-C30-hSL-N5) (opt1) from Homo sapiens__NP_000448.3__HNF4A(1-375)(S142A_S143A_S148A_S167A_ S313A_S378A_T429A_T432A_S436A_K458R)
  source 1..1345: mol_type = other RNA
aggagaaagcttaccatgcgcctgagcaagaccctcgtggacatggacatggccgactactccgccgcgctggaccccgcctacaccacgctggagttcgagaacgtccaggtgctcaccatgggcaacgacaccagcccgtccgaggggaccaacctgaacgcccccaacagcctgggcgtgtccgccctctgcgccatctgcggggaccgggcgacgggcaagcactacggggccagctcctgcgacggctgcaagggcttcttccgccggagcgtccgcaagaaccacatgtactcctgccggttcagccgccagtgcgtggtggacaaggacaagcggaaccagtgccgctactgccggctgaagaagtgcttccgcgccgggatgaagaaggaggccgtccagaacgagcgggaccgcatctccacccggcgcgcggcctacgaggacagcgcgctgcccagcatcaacgcgctcctgcaggccgaggtgctgtcccggcagatcaccgcgcccgtgtccggcatcaacggggacatccgcgccaagaagatcgccagcatcgccgacgtctgcgagagcatgaaggagcagctcctggtgctggtggagtgggcgaagtacatcccggccttctgcgagctccccctggacgaccaggtcgccctgctccgggcccacgccggcgagcacctcctgctgggggcgaccaagcgctccatggtgttcaaggacgtgctgctgctcggcaacgactacatcgtcccccggcactgccccgagctggccgagatgagccgcgtgtccatccggatcctggacgagctcgtgctgccgttccaggagctgcagatcgacgacaacgagtacgcctacctcaaggccatcatcttcttcgaccccgacgccaagggcctgagcgaccccgggaagatcaagcgcctgcgcgcgcaggtccaggtgagcctcgaggactacatcaacgaccggcagtacgactcccgcggccggttcggggagctgctgctcctgctgcccacgctccagagcatcacctggcagatgatcgagcagatccagttcatcaagctgttcggcatggcgaagatcgacaacctgctccaggagatgctgctgtgaggactagttataagactgactagcccgatgggcctcccaacgggccctcctcccctccttgcaccgagattaataaaaaaaaaaaaaaaaaaaaaaaaaaaaaaaaaaaaaaaaaaaaaaaaaaaaaaaaaaaaaaaatgcatcccccccccccccccccccccccccccccccaaaggctcttttcagagccaccagaatt

SEQ ID NO: 2055 - RNA, 1345 nt, synthetic construct
  misc_feature 1..1345: note = mRNA i-3 (A64-N5-C30-hSL-N5) (opt1) from Homo sapiens__NP_000448.3__HNF4A(1-375)(K106R_K108R_K126R_K127R_ S142A_S143A_S148A_S167A_S313A_S378A_T429A_T432A_S436A_K458R )
  source 1..1345: mol_type = other RNA
aggagaaagcttaccatgcgcctgagcaagaccctcgtggacatggacatggccgactactccgccgcgctggaccccgcctacaccacgctggagttcgagaacgtccaggtgctcaccatgggcaacgacaccagcccgtccgaggggaccaacctgaacgcccccaacagcctgggcgtgtccgccctctgcgccatctgcggggaccgggcgacgggcaagcactacggggccagctcctgcgacggctgcaagggcttcttccgccggagcgtccgcaagaaccacatgtactcctgccggttcagccgccagtgcgtggtggaccgcgaccggcggaaccagtgccgctactgccggctgaagaagtgcttccgcgccgggatgcgccgcgaggccgtccagaacgagcgggaccgcatctccacccggcgcgcggcctacgaggacagcgcgctgcccagcatcaacgcgctcctgcaggccgaggtgctgtcccggcagatcaccgcgcccgtgtccggcatcaacggggacatccgcgccaagaagatcgccagcatcgccgacgtctgcgagagcatgaaggagcagctcctggtgctggtggagtgggcgaagtacatcccggccttctgcgagctccccctggacgaccaggtcgccctgctccgggcccacgccggcgagcacctcctgctgggggcgaccaagcgctccatggtgttcaaggacgtgctgctgctcggcaacgactacatcgtcccccggcactgccccgagctggccgagatgagccgcgtgtccatccggatcctggacgagctcgtgctgccgttccaggagctgcagatcgacgacaacgagtacgcctacctcaaggccatcatcttcttcgaccccgacgccaagggcctgagcgaccccgggaagatcaagcgcctgcgcgcgcaggtccaggtgagcctcgaggactacatcaacgaccggcagtacgactcccgcggccggttcggggagctgctgctcctgctgcccacgctccagagcatcacctggcagatgatcgagcagatccagttcatcaagctgttcggcatggcgaagatcgacaacctgctccaggagatgctgctgtgaggactagttataagactgactagcccgatgggcctcccaacgggccctcctcccctccttgcaccgagattaataaaaaaaaaaaaaaaaaaaaaaaaaaaaaaaaaaaaaaaaaaaaaaaaaaaaaaaaaaaaaaaatgcatcccccccccccccccccccccccccccccccaaaggctcttttcagagccaccagaatt

SEQ ID NO: 2056 - RNA, 1345 nt, synthetic construct
  misc_feature 1..1345: note = mRNA i-3 (A64-N5-C30-hSL-N5) (opt1) from Homo sapiens__NP_000448.3__HNF4A(1-375)(S142A_S143A_S148A_T166A_ S167A_S313A_S378A_T429A_T432A_S436A_K458R)
  source 1..1345: mol_type = other RNA
aggagaaagcttaccatgcgcctgagcaagaccctcgtggacatggacatggccgactactccgccgcgctggaccccgcctacaccacgctggagttcgagaacgtccaggtgctcaccatgggcaacgacaccagcccgtccgaggggaccaacctgaacgcccccaacagcctgggcgtgtccgccctctgcgccatctgcggggaccgggcgacgggcaagcactacggggccagctcctgcgacggctgcaagggcttcttccgccggagcgtccgcaagaaccacatgtactcctgccggttcagccgccagtgcgtggtggacaaggacaagcggaaccagtgccgctactgccggctgaagaagtgcttccgcgccgggatgaagaaggaggccgtccagaacgagcgggaccgcatctccacccggcgcgcggcctacgaggacagcgcgctgcccagcatcaacgcgctcctgcaggccgaggtgctgtcccggcagatcgcggcgcccgtgtccggcatcaacggggacatccgcgccaagaagatcgccagcatcgccgacgtctgcgagagcatgaaggagcagctcctggtgctggtggagtgggcgaagtacatcccggccttctgcgagctccccctggacgaccaggtcgccctgctccgggcccacgccggcgagcacctcctgctgggggcgaccaagcgctccatggtgttcaaggacgtgctgctgctcggcaacgactacatcgtcccccggcactgccccgagctggccgagatgagccgcgtgtccatccggatcctggacgagctcgtgctgccgttccaggagctgcagatcgacgacaacgagtacgcctacctcaaggccatcatcttcttcgaccccgacgccaagggcctgagcgaccccgggaagatcaagcgcctgcgcgcgcaggtccaggtgagcctcgaggactacatcaacgaccggcagtacgactcccgcggccggttcggggagctgctgctcctgctgcccacgctccagagcatcacctggcagatgatcgagcagatccagttcatcaagctgttcggcatggcgaagatcgacaacctgctccaggagatgctgctgtgaggactagttataagactgactagcccgatgggcctcccaacgggccctcctcccctccttgcaccgagattaataaaaaaaaaaaaaaaaaaaaaaaaaaaaaaaaaaaaaaaaaaaaaaaaaaaaaaaaaaaaaaaatgcatcccccccccccccccccccccccccccccccaaaggctcttttcagagccaccagaatt

SEQ ID NO: 2057 - RNA, 1345 nt, synthetic construct
  misc_feature 1..1345: note = mRNA i-3 (A64-N5-C30-hSL-N5) (opt1) from Homo sapiens__NP_000448.3__HNF4A(1-375)(S87A_S142A_S143A_S148A_T 166A_S167A_S313A_S378A_T429A_T432A_S436A_K458R)
  source 1..1345: mol_type = other RNA
aggagaaagcttaccatgcgcctgagcaagaccctcgtggacatggacatggccgactactccgccgcgctggaccccgcctacaccacgctggagttcgagaacgtccaggtgctcaccatgggcaacgacaccagcccgtccgaggggaccaacctgaacgcccccaacagcctgggcgtgtccgccctctgcgccatctgcggggaccgggcgacgggcaagcactacggggccagctcctgcgacggctgcaagggcttcttccgccgggcggtccgcaagaaccacatgtactcctgccggttcagccgccagtgcgtggtggacaaggacaagcggaaccagtgccgctactgccggctgaagaagtgcttccgcgccgggatgaagaaggaggccgtccagaacgagcgggaccgcatctccacccggcgcgcggcctacgaggacagcgcgctgcccagcatcaacgcgctcctgcaggccgaggtgctgtcccggcagatcgcggcgcccgtgtccggcatcaacggggacatccgcgccaagaagatcgccagcatcgccgacgtctgcgagagcatgaaggagcagctcctggtgctggtggagtgggcgaagtacatcccggccttctgcgagctccccctggacgaccaggtcgccctgctccgggcccacgccggcgagcacctcctgctgggggcgaccaagcgctccatggtgttcaaggacgtgctgctgctcggcaacgactacatcgtcccccggcactgccccgagctggccgagatgagccgcgtgtccatccggatcctggacgagctcgtgctgccgttccaggagctgcagatcgacgacaacgagtacgcctacctcaaggccatcatcttcttcgaccccgacgccaagggcctgagcgaccccgggaagatcaagcgcctgcgcgcgcaggtccaggtgagcctcgaggactacatcaacgaccggcagtacgactcccgcggccggttcggggagctgctgctcctgctgcccacgctccagagcatcacctggcagatgatcgagcagatccagttcatcaagctgttcggcatggcgaagatcgacaacctgctccaggagatgctgctgtgaggactagttataagactgactagcccgatgggcctcccaacgggccctcctcccctccttgcaccgagattaataaaaaaaaaaaaaaaaaaaaaaaaaaaaaaaaaaaaaaaaaaaaaaaaaaaaaaaaaaaaaaaatgcatcccccccccccccccccccccccccccccccaaaggctcttttcagagccaccagaatt

SEQ ID NO: 2058 - RNA, 1345 nt, synthetic construct
  misc_feature 1..1345: note = mRNA i-3 (A64-N5-C30-hSL-N5) (opt1) from Homo sapiens__NP_000448.3__HNF4A(1-375)(S87A_K106R_K108R_K126R_K 127R_S142A_S143A_S148A_T166A_S167A_S313A_S378A_T429A_T432A_ S436A_K458R)
  source 1..1345: mol_type = other RNA
aggagaaagcttaccatgcgcctgagcaagaccctcgtggacatggacatggccgactactccgccgcgctggaccccgcctacaccacgctggagttcgagaacgtccaggtgctcaccatgggcaacgacaccagcccgtccgaggggaccaacctgaacgcccccaacagcctgggcgtgtccgccctctgcgccatctgcggggaccgggcgacgggcaagcactacggggccagctcctgcgacggctgcaagggcttcttccgccgggcggtccgcaagaaccacatgtactcctgccggttcagccgccagtgcgtggtggaccgcgaccggcggaaccagtgccgctactgccggctgaagaagtgcttccgcgccgggatgcgccgcgaggccgtccagaacgagcgggaccgcatctccacccggcgcgcggcctacgaggacagcgcgctgcccagcatcaacgcgctcctgcaggccgaggtgctgtcccggcagatcgcggcgcccgtgtccggcatcaacggggacatccgcgccaagaagatcgccagcatcgccgacgtctgcgagagcatgaaggagcagctcctggtgctggtggagtgggcgaagtacatcccggccttctgcgagctccccctggacgaccaggtcgccctgctccgggcccacgccggcgagcacctcctgctgggggcgaccaagcgctccatggtgttcaaggacgtgctgctgctcggcaacgactacatcgtcccccggcactgccccgagctggccgagatgagccgcgtgtccatccggatcctggacgagctcgtgctgccgttccaggagctgcagatcgacgacaacgagtacgcctacctcaaggccatcatcttcttcgaccccgacgccaagggcctgagcgaccccgggaagatcaagcgcctgcgcgcgcaggtccaggtgagcctcgaggactacatcaacgaccggcagtacgactcccgcggccggttcggggagctgctgctcctgctgcccacgctccagagcatcacctggcagatgatcgagcagatccagttcatcaagctgttcggcatggcgaagatcgacaacctgctccaggagatgctgctgtgaggactagttataagactgactagcccgatgggcctcccaacgggccctcctcccctccttgcaccgagattaataaaaaaaaaaaaaaaaaaaaaaaaaaaaaaaaaaaaaaaaaaaaaaaaaaaaaaaaaaaaaaaatgcatcccccccccccccccccccccccccccccccaaaggctcttttcagagccaccagaatt

SEQ ID NO: 2059 - RNA, 1345 nt, synthetic construct
  misc_feature 1..1345: note = mRNA i-3 (A64-N5-C30-hSL-N5) (opt1) from Homo sapiens__NP_000448.3__HNF4A(1-375)(S87A_K106R_K108R_K126R_K 127R)
  source 1..1345: mol_type = other RNA
aggagaaagcttaccatgcgcctgagcaagaccctcgtggacatggacatggccgactactccgccgcgctggaccccgcctacaccacgctggagttcgagaacgtccaggtgctcaccatgggcaacgacaccagcccgtccgaggggaccaacctgaacgcccccaacagcctgggcgtgtccgccctctgcgccatctgcggggaccgggcgacgggcaagcactacggggccagctcctgcgacggctgcaagggcttcttccgccgggcggtccgcaagaaccacatgtactcctgccggttcagccgccagtgcgtggtggaccgcgaccggcggaaccagtgccgctactgccggctgaagaagtgcttccgcgccgggatgcgccgggaggccgtccagaacgagcgggaccgcatctccacccggcgcagctcctacgaggacagctccctgcccagcatcaacgcgctcctgcaggccgaggtgctgtcccggcagatcaccagccccgtgtccggcatcaacggggacatccgcgccaagaagatcgccagcatcgccgacgtctgcgagagcatgaaggagcagctcctggtgctggtggagtgggcgaagtacatcccggccttctgcgagctccccctggacgaccaggtcgccctgctccgggcccacgccggcgagcacctcctgctgggggcgaccaagcgctccatggtgttcaaggacgtgctgctgctcggcaacgactacatcgtcccccggcactgccccgagctggccgagatgagccgcgtgtccatccggatcctggacgagctcgtgctgccgttccaggagctgcagatcgacgacaacgagtacgcctacctcaaggccatcatcttcttcgaccccgacgccaagggcctgagcgaccccgggaagatcaagcgcctgcgctcccaggtccaggtgagcctcgaggactacatcaacgaccggcagtacgactcccgcggccggttcggggagctgctgctcctgctgcccacgctccagagcatcacctggcagatgatcgagcagatccagttcatcaagctgttcggcatggcgaagatcgacaacctgctccaggagatgctgctgtgaggactagttataagactgactagcccgatgggcctcccaacgggccctcctcccctccttgcaccgagattaataaaaaaaaaaaaaaaaaaaaaaaaaaaaaaaaaaaaaaaaaaaaaaaaaaaaaaaaaaaaaaaatgcatcccccccccccccccccccccccccccccccaaaggctcttttcagagccaccagaatt

SEQ ID NO: 2060 - RNA, 1345 nt, synthetic construct
  misc_feature 1..1345: note = mRNA i-3 (A64-N5-C30-hSL-N5) (opt1) from Homo sapiens__NP_000448.3__HNF4A(1-375)(S87A_K106R_K108R_K126R_K 127R_S142A_S143A_S148A_T166A_S167A_S313A_S378A_T429A_T432A_ S436A_K458R_S461A)
  source 1..1345: mol_type = other RNA
aggagaaagcttaccatgcgcctgagcaagaccctcgtggacatggacatggccgactactccgccgcgctggaccccgcctacaccacgctggagttcgagaacgtccaggtgctcaccatgggcaacgacaccagcccgtccgaggggaccaacctgaacgcccccaacagcctgggcgtgtccgccctctgcgccatctgcggggaccgggcgacgggcaagcactacggggccagctcctgcgacggctgcaagggcttcttccgccgggcggtccgcaagaaccacatgtactcctgccggttcagccgccagtgcgtggtggaccgcgaccggcggaaccagtgccgctactgccggctgaagaagtgcttccgcgccgggatgcgccgggaggccgtccagaacgagcgggaccgcatctccacccggcgcgccgcctacgaggacagcgccctgcccagcatcaacgcgctcctgcaggccgaggtgctgtcccggcagatcgccgcgcccgtgtccggcatcaacggggacatccgcgccaagaagatcgccagcatcgccgacgtctgcgagagcatgaaggagcagctcctggtgctggtggagtgggcgaagtacatcccggccttctgcgagctccccctggacgaccaggtcgccctgctccgggcccacgccggcgagcacctcctgctgggggcgaccaagcgctccatggtgttcaaggacgtgctgctgctcggcaacgactacatcgtcccccggcactgccccgagctggccgagatgagccgcgtgtccatccggatcctggacgagctcgtgctgccgttccaggagctgcagatcgacgacaacgagtacgcctacctcaaggccatcatcttcttcgaccccgacgccaagggcctgagcgaccccgggaagatcaagcgcctgcgcgcccaggtccaggtgagcctcgaggactacatcaacgaccggcagtacgactcccgcggccggttcggggagctgctgctcctgctgcccacgctccagagcatcacctggcagatgatcgagcagatccagttcatcaagctgttcggcatggcgaagatcgacaacctgctccaggagatgctgctgtgaggactagttataagactgactagcccgatgggcctcccaacgggccctcctcccctccttgcaccgagattaataaaaaaaaaaaaaaaaaaaaaaaaaaaaaaaaaaaaaaaaaaaaaaaaaaaaaaaaaaaaaaaatgcatcccccccccccccccccccccccccccccccaaaggctcttttcagagccaccagaatt

SEQ ID NO: 2061 - RNA, 1345 nt, synthetic construct; identical to SEQ ID NO: 2060
  misc_feature 1..1345: note = mRNA i-3 (A64-N5-C30-hSL-N5) (opt1) from Homo sapiens__NP_000448.3__HNF4A(1-375)(S87A_K106R_K108R_K126R_K 127R_S142A_S143A_S148A_T166A_S167A_S313A_S378A_T429A_T432A_ S436A_K458R_S461E)
  source 1..1345: mol_type = other RNA

SEQ ID NO: 2062 - RNA, 1345 nt, synthetic construct
  misc_feature 1..1345: note = mRNA i-3 (A64-N5-C30-hSL-N5) (opt1) from Homo sapiens__NP_000448.3__HNF4A(1-375)(S87A_K106R_K108R_K126R_K 127R_S142A_S143A_S148E_T166A_S167E_S313A_S378E_T429E_T432E_ S436E_K458R_S461E)
  source 1..1345: mol_type = other RNA
aggagaaagcttaccatgcgcctgagcaagaccctcgtggacatggacatggccgactactccgccgcgctggaccccgcctacaccacgctggagttcgagaacgtccaggtgctcaccatgggcaacgacaccagcccgtccgaggggaccaacctgaacgcccccaacagcctgggcgtgtccgccctctgcgccatctgcggggaccgggcgacgggcaagcactacggggccagctcctgcgacggctgcaagggcttcttccgccgggcggtccgcaagaaccacatgtactcctgccggttcagccgccagtgcgtggtggaccgcgaccggcggaaccagtgccgctactgccggctgaagaagtgcttccgcgccgggatgcgccgggaggccgtccagaacgagcgggaccgcatctccacccggcgcgccgcctacgaggacagcgagctgcccagcatcaacgcgctcctgcaggccgaggtgctgtcccggcagatcgccgagcccgtgtccggcatcaacggggacatccgcgccaagaagatcgccagcatcgccgacgtctgcgagagcatgaaggagcagctcctggtgctggtggagtgggcgaagtacatcccggccttctgcgagctccccctggacgaccaggtcgccctgctccgggcccacgccggcgagcacctcctgctgggggcgaccaagcgctccatggtgttcaaggacgtgctgctgctcggcaacgactacatcgtcccccggcactgccccgagctggccgagatgagccgcgtgtccatccggatcctggacgagctcgtgctgccgttccaggagctgcagatcgacgacaacgagtacgcctacctcaaggccatcatcttcttcgaccccgacgccaagggcctgagcgaccccgggaagatcaagcgcctgcgcgcccaggtccaggtgagcctcgaggactacatcaacgaccggcagtacgactcccgcggccggttcggggagctgctgctcctgctgcccacgctccagagcatcacctggcagatgatcgagcagatccagttcatcaagctgttcggcatggcgaagatcgacaacctgctccaggagatgctgctgtgaggactagttataagactgactagcccgatgggcctcccaacgggccctcctcccctccttgcaccgagattaataaaaaaaaaaaaaaaaaaaaaaaaaaaaaaaaaaaaaaaaaaaaaaaaaaaaaaaaaaaaaaaatgcatcccccccccccccccccccccccccccccccaaaggctcttttcagagccaccagaatt

SEQ ID NO: 2063 - RNA, 1345 nt, synthetic construct
  misc_feature 1..1345: note = mRNA i-3 (A64-N5-C30-hSL-N5) (opt1) from Homo sapiens__NP_000448.3__HNF4A(1-375)(S87A_K106R_K108R_K126R_K 127R_S142A_S143A_S148A_T166A_S167A_K179R_K180R_S313A_S378A_ T429A_T432A_S436A_K458R_S461E)
  source 1..1345: mol_type = other RNA
aggagaaagcttaccatgcgcctgagcaagaccctcgtggacatggacatggccgactactccgccgcgctggaccccgcctacaccacgctggagttcgagaacgtccaggtgctcaccatgggcaacgacaccagcccgtccgaggggaccaacctgaacgcccccaacagcctgggcgtgtccgccctctgcgccatctgcggggaccgggcgacgggcaagcactacggggccagctcctgcgacggctgcaagggcttcttccgccgggcggtccgcaagaaccacatgtactcctgccggttcagccgccagtgcgtggtggaccgcgaccggcggaaccagtgccgctactgccggctgaagaagtgcttccgcgccgggatgcgccgggaggccgtccagaacgagcgggaccgcatctccacccggcgcgccgcctacgaggacagcgccctgcccagcatcaacgcgctcctgcaggccgaggtgctgtcccggcagatcgccgcgcccgtgtccggcatcaacggggacatccgcgcccgccggatcgccagcatcgccgacgtctgcgagagcatgaaggagcagctcctggtgctggtggagtgggcgaagtacatcccggccttctgcgagctccccctggacgaccaggtcgccctgctccgggcccacgccggcgagcacctcctgctgggggcgaccaagcgctccatggtgttcaaggacgtgctgctgctcggcaacgactacatcgtcccccggcactgccccgagctggccgagatgagccgcgtgtccatccggatcctggacgagctcgtgctgccgttccaggagctgcagatcgacgacaacgagtacgcctacctcaaggccatcatcttcttcgaccccgacgccaagggcctgagcgaccccgggaagatcaagcgcctgcgcgcccaggtccaggtgagcctcgaggactacatcaacgaccggcagtacgactcccgcggccggttcggggagctgctgctcctgctgcccacgctccagagcatcacctggcagatgatcgagcagatccagttcatcaagctgttcggcatggcgaagatcgacaacctgctccaggagatgctgctgtgaggactagttataagactgactagcccgatgggcctcccaacgggccctcctcccctccttgcaccgagattaataaaaaaaaaaaaaaaaaaaaaaaaaaaaaaaaaaaaaaaaaaaaaaaaaaaaaaaaaaaaaaaatgcatcccccccccccccccccccccccccccccccaaaggctcttttcagagccaccagaatt

SEQ ID NO: 2064 - RNA, 1345 nt, synthetic construct
  misc_feature 1..1345: note = mRNA i-3 (A64-N5-C30-hSL-N5) (opt1) from Homo sapiens__NP_000448.3__HNF4A(1-375)(S87A_K106R_K108R_K126R_K 127R_S142A_S143A_S148A_T166A_S167A_K300R_K307R_K309R_S313A_ S378A_T429A_T432A_S436A_K458R_S461E)
  source 1..1345: mol_type = other RNA
aggagaaagcttaccatgcgcctgagcaagaccctcgtggacatggacatggccgactactccgccgcgctggaccccgcctacaccacgctggagttcgagaacgtccaggtgctcaccatgggcaacgacaccagcccgtccgaggggaccaacctgaacgcccccaacagcctgggcgtgtccgccctctgcgccatctgcggggaccgggcgacgggcaagcactacggggccagctcctgcgacggctgcaagggcttcttccgccgggcggtccgcaagaaccacatgtactcctgccggttcagccgccagtgcgtggtggaccgcgaccggcggaaccagtgccgctactgccggctgaagaagtgcttccgcgccgggatgcgccgggaggccgtccagaacgagcgggaccgcatctccacccggcgcgccgcctacgaggacagcgccctgcccagcatcaacgcgctcctgcaggccgaggtgctgtcccggcagatcgccgcgcccgtgtccggcatcaacggggacatccgcgccaagaagatcgccagcatcgccgacgtctgcgagagcatgaaggagcagctcctggtgctggtggagtgggcgaagtacatcccggccttctgcgagctccccctggacgaccaggtcgccctgctccgggcccacgccggcgagcacctcctgctgggggcgaccaagcgctccatggtgttcaaggacgtgctgctgctcggcaacgactacatcgtcccccggcactgccccgagctggccgagatgagccgcgtgtccatccggatcctggacgagctcgtgctgccgttccaggagctgcagatcgacgacaacgagtacgcctacctcaaggccatcatcttcttcgaccccgacgcccgcggcctgagcgaccccgggcggatccgccgcctgcgcgcccaggtccaggtgagcctcgaggactacatcaacgaccggcagtacgactcccgcggccggttcggggagctgctgctcctgctgcccacgctccagagcatcacctggcagatgatcgagcagatccagttcatcaagctgttcggcatggcgaagatcgacaacctgctccaggagatgctgctgtgaggactagttataagactgactagcccgatgggcctcccaacgggccctcctcccctccttgcaccgagattaataaaaaaaaaaaaaaaaaaaaaaaaaaaaaaaaaaaaaaaaaaaaaaaaaaaaaaaaaaaaaaaatgcatcccccccccccccccccccccccccccccccaaaggctcttttcagagccaccagaatt

SEQ ID NO: 2065 - RNA, 1345 nt, synthetic construct; identical to SEQ ID NO: 2060
  misc_feature 1..1345: note = mRNA i-3 (A64-N5-C30-hSL-N5) (opt1) from Homo sapiens__NP_000448.3__HNF4A(1-375)(S87A_K106R_K108R_K126R_K 127R_S142A_S143A_S148A_T166A_S167A_S313A_S378A_T429A_T432A_ S436A_K447R_K458R_S461E_K470R)
  source 1..1345: mol_type = other RNA

SEQ ID NO: 2066 - RNA, 1345 nt, synthetic construct
  misc_feature 1..1345: note = mRNA i-3 (A64-N5-C30-hSL-N5) (opt1) from Homo sapiens__NP_000448.3__HNF4A(1-375)(S87A_K106R_K108R_K126R_K 127R_S142A_S143A_S148A_T166A_S167A_K179R_K180R_K234R_K300R_ K307R_K309R_S313A_S378A_T429A_T432A_S436A_K447R_K458R_S461E _K470R)
  source 1..1345: mol_type = other RNA
aggagaaagcttaccatgcgcctgagcaagaccctcgtggacatggacatggccgactactccgccgcgctggaccccgcctacaccacgctggagttcgagaacgtccaggtgctcaccatgggcaacgacaccagcccgtccgaggggaccaacctgaacgcccccaacagcctgggcgtgtccgccctctgcgccatctgcggggaccgggcgacgggcaagcactacggggccagctcctgcgacggctgcaagggcttcttccgccgggcggtccgcaagaaccacatgtactcctgccggttcagccgccagtgcgtggtggaccgcgaccggcggaaccagtgccgctactgccggctgaagaagtgcttccgcgccgggatgcgccgggaggccgtccagaacgagcgggaccgcatctccacccggcgcgccgcctacgaggacagcgccctgcccagcatcaacgcgctcctgcaggccgaggtgctgtcccggcagatcgccgcgcccgtgtccggcatcaacggggacatccgcgcccgccggatcgccagcatcgccgacgtctgcgagagcatgaaggagcagctcctggtgctggtggagtgggcgaagtacatcccggccttctgcgagctccccctggacgaccaggtcgccctgctccgggcccacgccggcgagcacctcctgctgggggcgacccggcgctccatggtgttcaaggacgtgctgctgctcggcaacgactacatcgtcccccggcactgccccgagctggccgagatgagccgcgtgtccatccggatcctggacgagctcgtgctgccgttccaggagctgcagatcgacgacaacgagtacgcctacctcaaggccatcatcttcttcgaccccgacgcccgcggcctgagcgaccccgggcggatccgccgcctgcgcgcccaggtccaggtgagcctcgaggactacatcaacgaccggcagtacgactcccgcggccggttcggggagctgctgctcctgctgcccacgctccagagcatcacctggcagatgatcgagcagatccagttcatcaagctgttcggcatggcgaagatcgacaacctgctccaggagatgctgctgtgaggactagttataagactgactagcccgatgggcctcccaacgggccctcctcccctccttgcaccgagattaataaaaaaaaaaaaaaaaaaaaaaaaaaaaaaaaaaaaaaaaaaaaaaaaaaaaaaaaaaaaaaaatgcatcccccccccccccccccccccccccccccccaaaggctcttttcagagccaccagaatt

SEQ ID NO: 2067 - RNA, 1345 nt, synthetic construct
  misc_feature 1..1345: note = mRNA i-3 (A64-N5-C30-hSL-N5) (opt1) from Homo sapiens__NP_000448.3__HNF4A(1-375)(S87A_S95A_S99A_K106R_K10 8R_K126R_K127R_S142A_S143A_S148A_T166A_S167A_S313A_S378A_T4 29A_T432A_S436A_K458R_S461E)
  source 1..1345: mol_type = other RNA
aggagaaagcttaccatgcgcctgagcaagaccctcgtggacatggacatggccgactactccgccgcgctggaccccgcctacaccacgctggagttcgagaacgtccaggtgctcaccatgggcaacgacaccagcccgtccgaggggaccaacctgaacgcccccaacagcctgggcgtgtccgccctctgcgccatctgcggggaccgggcgacgggcaagcactacggggccagctcctgcgacggctgcaagggcttcttccgccgggcggtccgcaagaaccacatgtacgcctgccggttcgcccgccagtgcgtggtggaccgcgaccggcggaaccagtgccgctactgccggctgaagaagtgcttccgcgccgggatgcgccgggaggccgtccagaacgagcgggaccgcatctccacccggcgcgccgcctacgaggacagcgccctgcccagcatcaacgcgctcctgcaggccgaggtgctgtcccggcagatcgccgcgcccgtgtccggcatcaacggggacatccgcgccaagaagatcgccagcatcgccgacgtctgcgagagcatgaaggagcagctcctggtgctggtggagtgggcgaagtacatcccggccttctgcgagctccccctggacgaccaggtcgccctgctccgggcccacgccggcgagcacctcctgctgggggcgaccaagcgctccatggtgttcaaggacgtgctgctgctcggcaacgactacatcgtcccccggcactgccccgagctggccgagatgagccgcgtgtccatccggatcctggacgagctcgtgctgccgttccaggagctgcagatcgacgacaacgagtacgcctacctcaaggccatcatcttcttcgaccccgacgccaagggcctgagcgaccccgggaagatcaagcgcctgcgcgcccaggtccaggtgagcctcgaggactacatcaacgaccggcagtacgactcccgcggccggttcggggagctgctgctcctgctgcccacgctccagagcatcacctggcagatgatcgagcagatccagttcatcaagctgttcggcatggcgaagatcgacaacctgctccaggagatgctgctgtgaggactagttataagactgactagcccgatgggcctcccaacgggccctcctcccctccttgcaccgagattaataaaaaaaaaaaaaaaaaaaaaaaaaaaaaaaaaaaaaaaaaaaaaaaaaaaaaaaaaaaaaaaatgcatcccccccccccccccccccccccccccccccaaaggctcttttcagagccaccagaatt

SEQ ID NO: 2068 - RNA, 1345 nt, synthetic construct
  misc_feature 1..1345: note = mRNA i-3 (A64-N5-C30-hSL-N5) (opt1) from Homo sapiens__NP_000448.3__HNF4A(1-375)(S87A_K106R_K108R_K126R_K 127R_S138A_T139A_S142A_S143A_S148A_T166A_S167A_S313A_S378A_ T429A_T432A_S436A_K458R_S461E)
  source 1..1345: mol_type = other RNA
aggagaaagcttaccatgcgcctgagcaagaccctcgtggacatggacatggccgactactccgccgcgctggaccccgcctacaccacgctggagttcgagaacgtccaggtgctcaccatgggcaacgacaccagcccgtccgaggggaccaacctgaacgcccccaacagcctgggcgtgtccgccctctgcgccatctgcggggaccgggcgacgggcaagcactacggggccagctcctgcgacggctgcaagggcttcttccgccgggcggtccgcaagaaccacatgtactcctgccggttcagccgccagtgcgtggtggaccgcgaccggcggaaccagtgccgctactgccggctgaagaagtgcttccgcgccgggatgcgccgggaggccgtccagaacgagcgggaccgcatcgccgcccggcgcgccgcctacgaggacagcgccctgcccagcatcaacgcgctcctgcaggccgaggtgctgtcccggcagatcgccgcgcccgtgtccggcatcaacggggacatccgcgccaagaagatcgccagcatcgccgacgtctgcgagagcatgaaggagcagctcctggtgctggtggagtgggcgaagtacatcccggccttctgcgagctccccctggacgaccaggtcgccctgctccgggcccacgccggcgagcacctcctgctgggggcgaccaagcgctccatggtgttcaaggacgtgctgctgctcggcaacgactacatcgtcccccggcactgccccgagctggccgagatgagccgcgtgtccatccggatcctggacgagctcgtgctgccgttccaggagctgcagatcgacgacaacgagtacgcctacctcaaggccatcatcttcttcgaccccgacgccaagggcctgagcgaccccgggaagatcaagcgcctgcgcgcccaggtccaggtgagcctcgaggactacatcaacgaccggcagtacgactcccgcggccggttcggggagctgctgctcctgctgcccacgctccagagcatcacctggcagatgatcgagcagatccagttcatcaagctgttcggcatggcgaagatcgacaacctgctccaggagatgctgctgtgaggactagttataagactgactagcccgatgggcctcccaacgggccctcctcccctccttgcaccgagattaataaaaaaaaaaaaaaaaaaaaaaaaaaaaaaaaaaaaaaaaaaaaaaaaaaaaaaaaaaaaaaaatgcatcccccccccccccccccccccccccccccccaaaggctcttttcagagccaccagaatt

SEQ ID NO: 2069 - RNA, 1345 nt, synthetic construct
  misc_feature 1..1345: note = mRNA i-3 (A64-N5-C30-hSL-N5) (opt1) from Homo sapiens__NP_000448.3__HNF4A(1-375)(S87A_S95A_S99A_K106R_K10 8R_K126R_K127R_S138A_T139A_S142A_S143A_S148A_T166A_S167A_S3 13A_S378A_T429A_T432A_S436A_K458R_S461E)
  source 1..1345: mol_type = other RNA
aggagaaagcttaccatgcgcctgagcaagaccctcgtggacatggacatggccgactactccgccgcgctggaccccgcctacaccacgctggagttcgagaacgtccaggtgctcaccatgggcaacgacaccagcccgtccgaggggaccaacctgaacgcccccaacagcctgggcgtgtccgccctctgcgccatctgcggggaccgggcgacgggcaagcactacggggccagctcctgcgacggctgcaagggcttcttccgccgggcggtccgcaagaaccacatgtacgcctgccggttcgcccgccagtgcgtggtggaccgcgaccggcggaaccagtgccgctactgccggctgaagaagtgcttccgcgccgggatgcgccgggaggccgtccagaacgagcgggaccgcatcgccgcccggcgcgccgcctacgaggacagcgccctgcccagcatcaacgcgctcctgcaggccgaggtgctgtcccggcagatcgccgcgcccgtgtccggcatcaacggggacatccgcgccaagaagatcgccagcatcgccgacgtctgcgagagcatgaaggagcagctcctggtgctggtggagtgggcgaagtacatcccggccttctgcgagctccccctggacgaccaggtcgccctgctccgggcccacgccggcgagcacctcctgctgggggcgaccaagcgctccatggtgttcaaggacgtgctgctgctcggcaacgactacatcgtcccccggcactgccccgagctggccgagatgagccgcgtgtccatccggatcctggacgagctcgtgctgccgttccaggagctgcagatcgacgacaacgagtacgcctacctcaaggccatcatcttcttcgaccccgacgccaagggcctgagcgaccccgggaagatcaagcgcctgcgcgcccaggtccaggtgagcctcgaggactacatcaacgaccggcagtacgactcccgcggccggttcggggagctgctgctcctgctgcccacgctccagagcatcacctggcagatgatcgagcagatccagttcatcaagctgttcggcatggcgaagatcgacaacctgctccaggagatgctgctgtgaggactagttataagactgactagcccgatgggcctcccaacgggccctcctcccctccttgcaccgagattaataaaaaaaaaaaaaaaaaaaaaaaaaaaaaaaaaaaaaaaaaaaaaaaaaaaaaaaaaaaaaaaatgcatcccccccccccccccccccccccccccccccaaaggctcttttcagagccaccagaatt

SEQ ID NO: 2070 - RNA, 1345 nt, synthetic construct; identical to SEQ ID NO: 2021
  misc_feature 1..1345: note = mRNA i-3 (A64-N5-C30-hSL-N5) (opt1) from Homo sapiens__NP_000448.3__HNF4A(1-375)
  source 1..1345: mol_type = other RNA

SEQ ID NO: 2071 - RNA, 1345 nt, synthetic construct
  misc_feature 1..1345: note = mRNA i-3 (A64-N5-C30-hSL-N5) (opt1) from Homo sapiens__NP_000448.3__HNF4A(1-375)(S313A)
  source 1..1345: mol_type = other RNA
aggagaaagcttaccatgcgcctgagcaagaccctcgtggacatggacatggccgactactccgccgcgctggaccccgcctacaccacgctggagttcgagaacgtccaggtgctcaccatgggcaacgacaccagcccgtccgaggggaccaacctgaacgcccccaacagcctgggcgtgtccgccctctgcgccatctgcggggaccgggcgacgggcaagcactacggggccagctcctgcgacggctgcaagggcttcttccgccggagcgtccgcaagaaccacatgtactcctgccggttcagccgccagtgcgtggtggacaaggacaagcggaaccagtgccgctactgccggctgaagaagtgcttccgcgccgggatgaagaaggaggccgtccagaacgagcgggaccgcatctccacccggcgcagctcctacgaggacagctccctgcccagcatcaacgcgctcctgcaggccgaggtgctgtcccggcagatcaccagccccgtgtccggcatcaacggggacatccgcgccaagaagatcgccagcatcgccgacgtctgcgagagcatgaaggagcagctcctggtgctggtggagtgggcgaagtacatcccggccttctgcgagctccccctggacgaccaggtcgccctgctccgggcccacgccggcgagcacctcctgctgggggcgaccaagcgctccatggtgttcaaggacgtgctgctgctcggcaacgactacatcgtcccccggcactgccccgagctggccgagatgagccgcgtgtccatccggatcctggacgagctcgtgctgccgttccaggagctgcagatcgacgacaacgagtacgcctacctcaaggccatcatcttcttcgaccccgacgccaagggcctgagcgaccccgggaagatcaagcgcctgcgcgcgcaggtccaggtgtccctcgaggactacatcaacgaccggcagtacgacagccgcggccggttcggggagctgctgctcctgctgcccacgctccagtccatcacctggcagatgatcgagcagatccagttcatcaagctgttcggcatggccaagatcgacaacctgctccaggagatgctgctgtgaggactagttataagactgactagcccgatgggcctcccaacgggccctcctcccctccttgcaccgagattaataaaaaaaaaaaaaaaaaaaaaaaaaaaaaaaaaaaaaaaaaaaaaaaaaaaaaaaaaaaaaaaatgcatcccccccccccccccccccccccccccccccaaaggctcttttcagagccaccagaatt

SEQ ID NO: 2072 - RNA, 1345 nt, synthetic construct
  misc_feature 1..1345: note = mRNA i-3 (A64-N5-C30-hSL-N5) (opt1) from Homo sapiens__NP_000448.3__HNF4A(1-375)(S313E)
  source 1..1345: mol_type = other RNA
aggagaaagcttaccatgcgcctgagcaagaccctcgtggacatggacatggccgactactccgccgcgctggaccccgcctacaccacgctggagttcgagaacgtccaggtgctcaccatgggcaacgacaccagcccgtccgaggggaccaacctgaacgcccccaacagcctgggcgtgtccgccctctgcgccatctgcggggaccgggcgacgggcaagcactacggggccagctcctgcgacggctgcaagggcttcttccgccggagcgtccgcaagaaccacatgtactcctgccggttcagccgccagtgcgtggtggacaaggacaagcggaaccagtgccgctactgccggctgaagaagtgcttccgcgccgggatgaagaaggaggccgtccagaacgagcgggaccgcatctccacccggcgcagctcctacgaggacagctccctgcccagcatcaacgcgctcctgcaggccgaggtgctgtcccggcagatcaccagccccgtgtccggcatcaacggggacatccgcgccaagaagatcgccagcatcgccgacgtctgcgagagcatgaaggagcagctcctggtgctggtggagtgggcgaagtacatcccggccttctgcgagctccccctggacgaccaggtcgccctgctccgggcccacgccggcgagcacctcctgctgggggcgaccaagcgctccatggtgttcaaggacgtgctgctgctcggcaacgactacatcgtcccccggcactgccccgagctggccgagatgagccgcgtgtccatccggatcctggacgagctcgtgctgccgttccaggagctgcagatcgacgacaacgagtacgcctacctcaaggccatcatcttcttcgaccccgacgccaagggcctgagcgaccccgggaagatcaagcgcctgcgcgagcaggtccaggtgtccctcgaggactacatcaacgaccggcagtacgacagccgcggccggttcggggagctgctgctcctgctgcccacgctccagtccatcacctggcagatgatcgagcagatccagttcatcaagctgttcggcatggcgaagatcgacaacctgctccaggagatgctgctgtgaggactagttataagactgactagcccgatgggcctcccaacgggccctcctcccctccttgcaccgagattaataaaaaaaaaaaaaaaaaaaaaaaaaaaaaaaaaaaaaaaaaaaaaaaaaaaaaaaaaaaaaaaatgcatcccccccccccccccccccccccccccccccaaaggctcttttcagagccaccagaatt

SEQ ID NO: 2073 - RNA, 1345 nt, synthetic construct
  misc_feature 1..1345: note = mRNA i-3 (A64-N5-C30-hSL-N5) (opt1) from Homo sapiens__NP_000448.3__HNF4A(1-375)(S142A_S143A)
  source 1..1345: mol_type = other RNA
aggagaaagcttaccatgcgcctgagcaagaccctcgtggacatggacatggccgactactccgccgcgctggaccccgcctacaccacgctggagttcgagaacgtccaggtgctcaccatgggcaacgacaccagcccgtccgaggggaccaacctgaacgcccccaacagcctgggcgtgtccgccctctgcgccatctgcggggaccgggcgacgggcaagcactacggggccagctcctgcgacggctgcaagggcttcttccgccggagcgtccgcaagaaccacatgtactcctgccggttcagccgccagtgcgtggtggacaaggacaagcggaaccagtgccgctactgccggctgaagaagtgcttccgcgccgggatgaagaaggaggccgtccagaacgagcgggaccgcatctccacccggcgcgcggcctacgaggacagctccctgcccagcatcaacgccctcctgcaggccgaggtgctgtcccggcagatcaccagccccgtgtccggcatcaacggggacatccgcgccaagaagatcgcgagcatcgccgacgtctgcgagtccatgaaggagcagctcctggtgctggtggagtgggccaagtacatcccggccttctgcgagctccccctggacgaccaggtcgccctgctccgggcgcacgccggcgagcacctcctgctgggggccaccaagcgcagcatggtgttcaaggacgtgctgctgctcggcaacgactacatcgtcccccggcactgccccgagctggccgagatgagccgcgtgtccatccggatcctggacgagctcgtgctgccgttccaggagctgcagatcgacgacaacgagtacgcctacctcaaggcgatcatcttcttcgaccccgacgccaagggcctgagcgaccccgggaagatcaagcgcctgcgctcccaggtccaggtgagcctcgaggactacatcaacgaccggcagtacgactcccgcggccggttcggggagctgctgctcctgctgcccacgctccagagcatcacctggcagatgatcgagcagatccagttcatcaagctgttcggcatggccaagatcgacaacctgctccaggagatgctgctgtgaggactagttataagactgactagcccgatgggcctcccaacgggccctcctcccctccttgcaccgagattaataaaaaaaaaaaaaaaaaaaaaaaaaaaaaaaaaaaaaaaaaaaaaaaaaaaaaaaaaaaaaaaatgcatcccccccccccccccccccccccccccccccaaaggctcttttcagagccaccagaatt

SEQ ID NO: 2074 - RNA, 1345 nt, synthetic construct
  misc_feature 1..1345: note = mRNA i-3 (A64-N5-C30-hSL-N5) (opt1) from Homo sapiens__NP_000448.3__HNF4A(1-375)(S142E_S143E)
  source 1..1345: mol_type = other RNA
aggagaaagcttaccatgcgcctgagcaagaccctcgtggacatggacatggccgactactccgccgcgctggaccccgcctacaccacgctggagttcgagaacgtccaggtgctcaccatgggcaacgacaccagcccgtccgaggggaccaacctgaacgcccccaacagcctgggcgtgtccgccctctgcgccatctgcggggaccgggcgacgggcaagcactacggggccagctcctgcgacggctgcaagggcttcttccgccggagcgtccgcaagaaccacatgtactcctgccggttcagccgccagtgcgtggtggacaaggacaagcggaaccagtgccgctactgccggctgaagaagtgcttccgcgccgggatgaagaaggaggccgtccagaacgagcgggaccgcatctccacccggcgcgaggagtacgaggacagctccctgcccagcatcaacgcgctcctgcaggccgaggtgctgtcccggcagatcaccagccccgtgtccggcatcaacggggacatccgcgccaagaagatcgccagcatcgccgacgtctgcgagtccatgaaggagcagctcctggtgctggtggagtgggcgaagtacatcccggccttctgcgagctccccctggacgaccaggtcgccctgctccgggcccacgccggcgagcacctcctgctgggggcgaccaagcgcagcatggtgttcaaggacgtgctgctgctcggcaacgactacatcgtcccccggcactgccccgagctggccgagatgagccgcgtgtccatccggatcctggacgagctcgtgctgccgttccaggagctgcagatcgacgacaacgagtacgcctacctcaaggccatcatcttcttcgaccccgacgccaagggcctgagcgaccccgggaagatcaagcgcctgcgctcccaggtccaggtgagcctcgaggactacatcaacgaccggcagtacgactcccgcggccggttcggggagctgctgctcctgctgcccacgctccagagcatcacctggcagatgatcgagcagatccagttcatcaagctgttcggcatggcgaagatcgacaacctgctccaggagatgctgctgtgaggactagttataagactgactagcccgatgggcctcccaacgggccctcctcccctccttgcaccgagattaataaaaaaaaaaaaaaaaaaaaaaaaaaaaaaaaaaaaaaaaaaaaaaaaaaaaaaaaaaaaaaaatgcatcccccccccccccccccccccccccccccccaaaggctcttttcagagccaccagaatt

SEQ ID NO: 2075 - RNA, 1345 nt, synthetic construct
  misc_feature 1..1345: note = mRNA i-3 (A64-N5-C30-hSL-N5) (opt1) from Homo sapiens__NP_000448.3__HNF4A(1-375)(S143A)
  source 1..1345: mol_type = other RNA
aggagaaagcttaccatgcgcctgagcaagaccctcgtggacatggacatggccgactactccgccgcgctggaccccgcctacaccacgctggagttcgagaacgtccaggtgctcaccatgggcaacgacaccagcccgtccgaggggaccaacctgaacgcccccaacagcctgggcgtgtccgccctctgcgccatctgcggggaccgggcgacgggcaagcactacggggccagctcctgcgacggctgcaagggcttcttccgccggagcgtccgcaagaaccacatgtactcctgccggttcagccgccagtgcgtggtggacaaggacaagcggaaccagtgccgctactgccggctgaagaagtgcttccgcgccgggatgaagaaggaggccgtccagaacgagcgggaccgcatctccacccggcgcagcgcgtacgaggactccagcctgccctccatcaacgccctcctgcaggccgaggtgctgagccggcagatcacctcccccgtgagcggcatcaacggggacatccgcgccaagaagatcgcctccatcgcggacgtctgcgagagcatgaaggagcagctcctggtgctggtggagtgggccaagtacatcccggccttctgcgagctccccctggacgaccaggtcgccctgctccgggcccacgcgggcgagcacctcctgctgggggccaccaagcgcagcatggtgttcaaggacgtgctgctgctcggcaacgactacatcgtcccccggcactgccccgagctggccgagatgtcccgcgtgagcatccggatcctggacgagctcgtgctgccgttccaggagctgcagatcgacgacaacgagtacgcctacctcaaggccatcatcttcttcgaccccgacgcgaagggcctgtccgaccccgggaagatcaagcgcctgcgcagccaggtccaggtgtccctcgaggactacatcaacgaccggcagtacgacagccgcggccggttcggggagctgctgctcctgctgcccacgctccagtccatcacctggcagatgatcgagcagatccagttcatcaagctgttcggcatggccaagatcgacaacctgctccaggagatgctgctgtgaggactagttataagactgactagcccgatgggcctcccaacgggccctcctcccctccttgcaccgagattaataaaaaaaaaaaaaaaaaaaaaaaaaaaaaaaaaaaaaaaaaaaaaaaaaaaaaaaaaaaaaaaatgcatcccccccccccccccccccccccccccccccaaaggctcttttcagagccaccagaatt

SEQ ID NO: 2076 - RNA, 1345 nt, synthetic construct
  misc_feature 1..1345: note = mRNA i-3 (A64-N5-C30-hSL-N5) (opt1) from Homo sapiens__NP_000448.3__HNF4A(1-375)(T166A)
  source 1..1345: mol_type = other RNA
aggagaaagcttaccatgcgcctgagcaagaccctcgtggacatggacatggccgactactccgccgcgctggaccccgcctacaccacgctggagttcgagaacgtccaggtgctcaccatgggcaacgacaccagcccgtccgaggggaccaacctgaacgcccccaacagcctgggcgtgtccgccctctgcgccatctgcggggaccgggcgacgggcaagcactacggggccagctcctgcgacggctgcaagggcttcttccgccggagcgtccgcaagaaccacatgtactcctgccggttcagccgccagtgcgtggtggacaaggacaagcggaaccagtgccgctactgccggctgaagaagtgcttccgcgccgggatgaagaaggaggccgtccagaacgagcgggaccgcatctccacccggcgcagctcctacgaggacagctccctgcccagcatcaacgcgctcctgcaggccgaggtgctgtcccggcagatcgccagccccgtgtccggcatcaacggggacatccgcgccaagaagatcgccagcatcgcggacgtctgcgagagcatgaaggagcagctcctggtgctggtggagtgggccaagtacatcccggccttctgcgagctccccctggacgaccaggtcgccctgctccgggcccacgcgggcgagcacctcctgctgggggccaccaagcgctccatggtgttcaaggacgtgctgctgctcggcaacgactacatcgtcccccggcactgccccgagctggccgagatgagccgcgtgtccatccggatcctggacgagctcgtgctgccgttccaggagctgcagatcgacgacaacgagtacgcctacctcaaggccatcatcttcttcgaccccgacgcgaagggcctgagcgaccccgggaagatcaagcgcctgcgctcccaggtccaggtgagcctcgaggactacatcaacgaccggcagtacgactcccgcggccggttcggggagctgctgctcctgctgcccaccctccagagcatcacgtggcagatgatcgagcagatccagttcatcaagctgttcggcatggccaagatcgacaacctgctccaggagatgctgctgtgaggactagttataagactgactagcccgatgggcctcccaacgggccctcctcccctccttgcaccgagattaataaaaaaaaaaaaaaaaaaaaaaaaaaaaaaaaaaaaaaaaaaaaaaaaaaaaaaaaaaaaaaaatgcatcccccccccccccccccccccccccccccccaaaggctcttttcagagccaccagaatt

SEQ ID NO: 2077 - RNA, 1345 nt, synthetic construct
  misc_feature 1..1345: note = mRNA i-3 (A64-N5-C30-hSL-N5) (opt1) from Homo sapiens__NP_000448.3__HNF4A(1-375)(S167E)
  source 1..1345: mol_type = other RNA
aggagaaagcttaccatgcgcctgagcaagaccctcgtggacatggacatggccgactactccgccgcgctggaccccgcctacaccacgctggagttcgagaacgtccaggtgctcaccatgggcaacgacaccagcccgtccgaggggaccaacctgaacgcccccaacagcctgggcgtgtccgccctctgcgccatctgcggggaccgggcgacgggcaagcactacggggccagctcctgcgacggctgcaagggcttcttccgccggagcgtccgcaagaaccacatgtactcctgccggttcagccgccagtgcgtggtggacaaggacaagcggaaccagtgccgctactgccggctgaagaagtgcttccgcgccgggatgaagaaggaggccgtccagaacgagcgggaccgcatctccacccggcgcagctcctacgaggacagctccctgcccagcatcaacgcgctcctgcaggccgaggtgctgtcccggcagatcaccgagcccgtgagcggcatcaacggggacatccgcgccaagaagatcgcctccatcgccgacgtctgcgagagcatgaaggagcagctcctggtgctggtggagtgggcgaagtacatcccggccttctgcgagctccccctggacgaccaggtcgccctgctccgggcccacgccggcgagcacctcctgctgggggcgaccaagcgcagcatggtgttcaaggacgtgctgctgctcggcaacgactacatcgtcccccggcactgccccgagctggccgagatgtcccgcgtgagcatccggatcctggacgagctcgtgctgccgttccaggagctgcagatcgacgacaacgagtacgcctacctcaaggccatcatcttcttcgaccccgacgccaagggcctgtccgaccccgggaagatcaagcgcctgcgcagccaggtccaggtgtccctcgaggactacatcaacgaccggcagtacgacagccgcggccggttcggggagctgctgctcctgctgcccacgctccagtccatcacctggcagatgatcgagcagatccagttcatcaagctgttcggcatggcgaagatcgacaacctgctccaggagatgctgctgtgaggactagttataagactgactagcccgatgggcctcccaacgggccctcctcccctccttgcaccgagattaataaaaaaaaaaaaaaaaaaaaaaaaaaaaaaaaaaaaaaaaaaaaaaaaaaaaaaaaaaaaaaaatgcatcccccccccccccccccccccccccccccccaaaggctcttttcagagccaccagaatt

SEQ ID NO: 2078 - RNA, 1345 nt, synthetic construct
  misc_feature 1..1345: note = mRNA i-3 (A64-N5-C30-hSL-N5) (opt1) from Homo sapiens__NP_000448.3__HNF4A(1-375)(S167A)
  source 1..1345: mol_type = other RNA
aggagaaagcttaccatgcgcctgagcaagaccctcgtggacatggacatggccgactactccgccgcgctggaccccgcctacaccacgctggagttcgagaacgtccaggtgctcaccatgggcaacgacaccagcccgtccgaggggaccaacctgaacgcccccaacagcctgggcgtgtccgccctctgcgccatctgcggggaccgggcgacgggcaagcactacggggccagctcctgcgacggctgcaagggcttcttccgccggagcgtccgcaagaaccacatgtactcctgccggttcagccgccagtgcgtggtggacaaggacaagcggaaccagtgccgctactgccggctgaagaagtgcttccgcgccgggatgaagaaggaggccgtccagaacgagcgggaccgcatctccacccggcgcagctcctacgaggacagctccctgcccagcatcaacgcgctcctgcaggccgaggtgctgtcccggcagatcaccgcccccgtgagcggcatcaacggggacatccgcgccaagaagatcgcctccatcgcggacgtctgcgagagcatgaaggagcagctcctggtgctggtggagtgggccaagtacatcccggccttctgcgagctccccctggacgaccaggtcgccctgctccgggcccacgcgggcgagcacctcctgctgggggccaccaagcgcagcatggtgttcaaggacgtgctgctgctcggcaacgactacatcgtcccccggcactgccccgagctggccgagatgtcccgcgtgagcatccggatcctggacgagctcgtgctgccgttccaggagctgcagatcgacgacaacgagtacgcctacctcaaggccatcatcttcttcgaccccgacgcgaagggcctgtccgaccccgggaagatcaagcgcctgcgcagccaggtccaggtgtccctcgaggactacatcaacgaccggcagtacgacagccgcggccggttcggggagctgctgctcctgctgcccacgctccagtccatcacctggcagatgatcgagcagatccagttcatcaagctgttcggcatggccaagatcgacaacctgctccaggagatgctgctgtgaggactagttataagactgactagcccgatgggcctcccaacgggccctcctcccctccttgcaccgagattaataaaaaaaaaaaaaaaaaaaaaaaaaaaaaaaaaaaaaaaaaaaaaaaaaaaaaaaaaaaaaaaatgcatcccccccccccccccccccccccccccccccaaaggctcttttcagagccaccagaatt

SEQ ID NO: 2079 - RNA, 1345 nt, synthetic construct; identical to SEQ ID NO: 2078
  misc_feature 1..1345: note = mRNA i-3 (A64-N5-C30-hSL-N5) (opt1) from Homo sapiens__NP_000448.3__HNF4A(1-375)(S167A_S378A_T429A_T432A_ S436A)
  source 1..1345: mol_type = other RNA

SEQ ID NO: 2080 - RNA, 1345 nt, synthetic construct; identical to SEQ ID NO: 2077
  misc_feature 1..1345: note = mRNA i-3 (A64-N5-C30-hSL-N5) (opt1) from Homo sapiens__NP_000448.3__HNF4A(1-375)(S167E_S378E_T429E_T432E_ S436E)
  source 1..1345: mol_type = other RNA

SEQ ID NO: 2081 - RNA, 1345 nt, synthetic construct
  misc_feature 1..1345: note = mRNA i-3 (A64-N5-C30-hSL-N5) (opt1) from Homo sapiens__NP_000448.3__HNF4A(1-375)(S87A)
  source 1..1345: mol_type = other RNA
aggagaaagcttaccatgcgcctgagcaagaccctcgtggacatggacatggccgactactccgccgcgctggaccccgcctacaccacgctggagttcgagaacgtccaggtgctcaccatgggcaacgacaccagcccgtccgaggggaccaacctgaacgcccccaacagcctgggcgtgtccgccctctgcgccatctgcggggaccgggcgacgggcaagcactacggggccagctcctgcgacggctgcaagggcttcttccgccgggccgtccgcaagaaccacatgtacagctgccggttctcccgccagtgcgtggtggacaaggacaagcggaaccagtgccgctactgccggctgaagaagtgcttccgcgccgggatgaagaaggaggcggtccagaacgagcgggaccgcatcagcacccggcgctccagctacgaggactccagcctgccctccatcaacgccctcctgcaggccgaggtgctgagccggcagatcacctcccccgtgagcggcatcaacggggacatccgcgccaagaagatcgcctccatcgcggacgtctgcgagagcatgaaggagcagctcctggtgctggtggagtgggccaagtacatcccggccttctgcgagctccccctggacgaccaggtcgccctgctccgggcccacgcgggcgagcacctcctgctgggggccaccaagcgcagcatggtgttcaaggacgtgctgctgctcggcaacgactacatcgtcccccggcactgccccgagctggccgagatgtcccgcgtgagcatccggatcctggacgagctcgtgctgccgttccaggagctgcagatcgacgacaacgagtacgcctacctcaaggccatcatcttcttcgaccccgacgcgaagggcctgtccgaccccgggaagatcaagcgcctgcgcagccaggtccaggtgtccctcgaggactacatcaacgaccggcagtacgacagccgcggccggttcggggagctgctgctcctgctgcccacgctccagtccatcacctggcagatgatcgagcagatccagttcatcaagctgttcggcatggccaagatcgacaacctgctccaggagatgctgctgtgaggactagttataagactgactagcccgatgggcctcccaacgggccctcctcccctccttgcaccgagattaataaaaaaaaaaaaaaaaaaaaaaaaaaaaaaaaaaaaaaaaaaaaaaaaaaaaaaaaaaaaaaaatgcatcccccccccccccccccccccccccccccccaaaggctcttttcagagccaccagaatt

SEQ ID NO: 2082 - RNA, 1345 nt, synthetic construct
  misc_feature 1..1345: note = mRNA i-3 (A64-N5-C30-hSL-N5) (opt1) from Homo sapiens__NP_000448.3__HNF4A(1-375)(S87E)
  source 1..1345: mol_type = other RNA
aggagaaagcttaccatgcgcctgagcaagaccctcgtggacatggacatggccgactactccgccgcgctggaccccgcctacaccacgctggagttcgagaacgtccaggtgctcaccatgggcaacgacaccagcccgtccgaggggaccaacctgaacgcccccaacagcctgggcgtgtccgccctctgcgccatctgcggggaccgggcgacgggcaagcactacggggccagctcctgcgacggctgcaagggcttcttccgccgggaggtccgcaagaaccacatgtacagctgccggttctcccgccagtgcgtggtggacaaggacaagcggaaccagtgccgctactgccggctgaagaagtgcttccgcgccgggatgaagaaggaggccgtccagaacgagcgggaccgcatcagcacccggcgctccagctacgaggactccagcctgccctccatcaacgcgctcctgcaggccgaggtgctgagccggcagatcacctcccccgtgagcggcatcaacggggacatccgcgccaagaagatcgcctccatcgccgacgtctgcgagagcatgaaggagcagctcctggtgctggtggagtgggcgaagtacatcccggccttctgcgagctccccctggacgaccaggtcgccctgctccgggcccacgccggcgagcacctcctgctgggggcgaccaagcgcagcatggtgttcaaggacgtgctgctgctcggcaacgactacatcgtcccccggcactgccccgagctggccgagatgtcccgcgtgagcatccggatcctggacgagctcgtgctgccgttccaggagctgcagatcgacgacaacgagtacgcctacctcaaggccatcatcttcttcgaccccgacgccaagggcctgtccgaccccgggaagatcaagcgcctgcgcagccaggtccaggtgtccctcgaggactacatcaacgaccggcagtacgacagccgcggccggttcggggagctgctgctcctgctgcccacgctccagtccatcacctggcagatgatcgagcagatccagttcatcaagctgttcggcatggcgaagatcgacaacctgctccaggagatgctgctgtgaggactagttataagactgactagcccgatgggcctcccaacgggccctcctcccctccttgcaccgagattaataaaaaaaaaaaaaaaaaaaaaaaaaaaaaaaaaaaaaaaaaaaaaaaaaaaaaaaaaaaaaaaatgcatcccccccccccccccccccccccccccccccaaaggctcttttcagagccaccagaatt

SEQ ID NO: 2083 - RNA, 1345 nt, synthetic construct
  misc_feature 1..1345: note = mRNA i-3 (A64-N5-C30-hSL-N5) (opt1) from Homo sapiens__NP_000448.3__HNF4A(1-375)(R2V)
  source 1..1345: mol_type = other RNA
aggagaaagcttaccatggtgctgagcaagaccctcgtcgacatggacatggccgactactccgccgcgctggaccccgcctacaccacgctggagttcgagaacgtccaggtgctcaccatgggcaacgacaccagcccgtccgaggggaccaacctgaacgcccccaacagcctgggcgtgtccgccctctgcgccatctgcggggaccgcgcgacgggcaagcactacggggccagctcctgcgacggctgcaagggcttcttccggcgcagcgtgcggaagaaccacatgtactcctgccgcttcagccggcagtgcgtggtcgacaaggacaagcgcaaccagtgccggtactgccgcctgaagaagtgcttccgggccgggatgaagaaggaggccgtgcagaacgagcgcgaccggatctccacccgccggagctcctacgaggacagctccctgcccagcatcaacgcgctcctgcaggccgaggtgctgtcccgccagatcaccagccccgtctccggcatcaacggggacatccgggccaagaagatcgccagcatcgccgacgtgtgcgagagcatgaaggagcagctcctggtgctggtcgagtgggcgaagtacatcccggccttctgcgagctccccctggacgaccaggtggccctgctccgcgcccacgccggcgagcacctcctgctgggggcgaccaagcggtccatggtgttcaaggacgtcctgctgctcggcaacgactacatcgtgccccgccactgccccgagctggccgagatgagccgggtgtccatccgcatcctggacgagctcgtcctgccgttccaggagctgcagatcgacgacaacgagtacgcctacctcaaggccatcatcttcttcgaccccgacgccaagggcctgagcgaccccgggaagatcaagcggctgcgctcccaggtccaggtgagcctcgaggactacatcaacgaccgccagtacgactcccggggccgcttcggggagctgctgctcctgctgcccacgctccagagcatcacctggcagatgatcgagcagatccagttcatcaagctgttcggcatggcgaagatcgacaacctgctccaggagatgctgctgtgaggactagttataagactgactagcccgatgggcctcccaacgggccctcctcccctccttgcaccgagattaataaaaaaaaaaaaaaaaaaaaaaaaaaaaaaaaaaaaaaaaaaaaaaaaaaaaaaaaaaaaaaaatgcatcccccccccccccccccccccccccccccccaaaggctcttttcagagccaccagaatt

SEQ ID NO: 2084 - RNA, 1345 nt, synthetic construct
  misc_feature 1..1345: note = mRNA i-3 (A64-N5-C30-hSL-N5) (opt1) from Homo sapiens__NP_000448.3__HNF4A(1-375)(R2V_K5V)
  source 1..1345: mol_type = other RNA
aggagaaagcttaccatggtgctgagcgtcaccctcgtggacatggacatggccgactactccgccgcgctggaccccgcctacaccacgctggagttcgagaacgtgcaggtcctcaccatgggcaacgacaccagcccgtccgaggggaccaacctgaacgcccccaacagcctgggcgtgtccgccctctgcgccatctgcggggaccgcgcgacgggcaagcactacggggccagctcctgcgacggctgcaagggcttcttccggcgcagcgtgcggaagaaccacatgtactcctgccgcttcagccggcagtgcgtcgtggacaaggacaagcgcaaccagtgccggtactgccgcctgaagaagtgcttccgggccgggatgaagaaggaggccgtgcagaacgagcgcgaccggatctccacccgccggagctcctacgaggacagctccctgcccagcatcaacgcgctcctgcaggccgaggtcctgtcccgccagatcaccagccccgtgtccggcatcaacggggacatccgggccaagaagatcgccagcatcgccgacgtgtgcgagagcatgaaggagcagctcctggtcctggtggagtgggcgaagtacatcccggccttctgcgagctccccctggacgaccaggtggccctgctccgcgcccacgccggcgagcacctcctgctgggggcgaccaagcggtccatggtcttcaaggacgtgctgctgctcggcaacgactacatcgtgccccgccactgccccgagctggccgagatgagccgggtctccatccgcatcctggacgagctcgtgctgccgttccaggagctgcagatcgacgacaacgagtacgcctacctcaaggccatcatcttcttcgaccccgacgccaagggcctgagcgaccccgggaagatcaagcggctgcgctcccaggtgcaggtcagcctcgaggactacatcaacgaccgccagtacgactcccggggccgcttcggggagctgctgctcctgctgcccacgctccagagcatcacctggcagatgatcgagcagatccagttcatcaagctgttcggcatggcgaagatcgacaacctgctccaggagatgctgctgtgaggactagttataagactgactagcccgatgggcctcccaacgggccctcctcccctccttgcaccgagattaataaaaaaaaaaaaaaaaaaaaaaaaaaaaaaaaaaaaaaaaaaaaaaaaaaaaaaaaaaaaaaaatgcatcccccccccccccccccccccccccccccccaaaggctcttttcagagccaccagaatt

SEQ ID NO: 2085 - RNA, 1345 nt, synthetic construct
  misc_feature 1..1345: note = mRNA i-3 (A64-N5-C30-hSL-N5) (opt1) from Homo sapiens__NP_000448.3__HNF4A(1-375)(K179R_K180R)
  source 1..1345: mol_type = other RNA
aggagaaagcttaccatgcgcctgagcaagaccctcgtggacatggacatggccgactactccgccgcgctggaccccgcctacaccacgctggagttcgagaacgtccaggtgctcaccatgggcaacgacaccagcccgtccgaggggaccaacctgaacgcccccaacagcctgggcgtgtccgccctctgcgccatctgcggggaccgggcgacgggcaagcactacggggccagctcctgcgacggctgcaagggcttcttccgccggagcgtccgcaagaaccacatgtactcctgccggttcagccgccagtgcgtggtggacaaggacaagcggaaccagtgccgctactgccggctgaagaagtgcttccgcgccgggatgaagaaggaggccgtccagaacgagcgggaccgcatctccacccggcgcagctcctacgaggacagctccctgcccagcatcaacgcgctcctgcaggccgaggtgctgtcccggcagatcaccagccccgtgtccggcatcaacggggacatccgcgcccggcgcatcgccagcatcgccgacgtctgcgagagcatgaaggagcagctcctggtgctggtggagtgggcgaagtacatcccggccttctgcgagctccccctggacgaccaggtcgccctgctccgggcccacgccggcgagcacctcctgctgggggcgaccaagcgctccatggtgttcaaggacgtgctgctgctcggcaacgactacatcgtcccccggcactgccccgagctggccgagatgagccgcgtgtccatccgcatcctggacgagctcgtgctgccgttccaggagctgcagatcgacgacaacgagtacgcctacctcaaggccatcatcttcttcgaccccgacgccaagggcctgagcgaccccgggaagatcaagcggctgcgctcccaggtccaggtgagcctcgaggactacatcaacgaccggcagtacgactcccgcggccggttcggggagctgctgctcctgctgcccacgctccagagcatcacctggcagatgatcgagcagatccagttcatcaagctgttcggcatggcgaagatcgacaacctgctccaggagatgctgctgtgaggactagttataagactgactagcccgatgggcctcccaacgggccctcctcccctccttgcaccgagattaataaaaaaaaaaaaaaaaaaaaaaaaaaaaaaaaaaaaaaaaaaaaaaaaaaaaaaaaaaaaaaaatgcatcccccccccccccccccccccccccccccccaaaggctcttttcagagccaccagaatt

SEQ ID NO: 2086 - RNA, 1345 nt, synthetic construct
  misc_feature 1..1345: note = mRNA i-3 (A64-N5-C30-hSL-N5) (opt1) from Homo sapiens__NP_000448.3__HNF4A(1-375)(K234R)
  source 1..1345: mol_type = other RNA
aggagaaagcttaccatgcgcctgagcaagaccctcgtggacatggacatggccgactactccgccgcgctggaccccgcctacaccacgctggagttcgagaacgtccaggtgctcaccatgggcaacgacaccagcccgtccgaggggaccaacctgaacgcccccaacagcctgggcgtgtccgccctctgcgccatctgcggggaccgggcgacgggcaagcactacggggccagctcctgcgacggctgcaagggcttcttccgccggagcgtccgcaagaaccacatgtactcctgccggttcagccgccagtgcgtggtggacaaggacaagcggaaccagtgccgctactgccggctgaagaagtgcttccgcgccgggatgaagaaggaggccgtccagaacgagcgggaccgcatctccacccggcgcagctcctacgaggacagctccctgcccagcatcaacgcgctcctgcaggccgaggtgctgtcccggcagatcaccagccccgtgtccggcatcaacggggacatccgcgccaagaagatcgccagcatcgccgacgtctgcgagagcatgaaggagcagctcctggtgctggtggagtgggcgaagtacatcccggccttctgcgagctccccctggacgaccaggtcgccctgctccgggcccacgccggcgagcacctcctgctgggggcgacccgccggtccatggtgttcaaggacgtgctgctgctcggcaacgactacatcgtcccccgccactgccccgagctggccgagatgagccgggtgtccatccgcatcctggacgagctcgtgctgccgttccaggagctgcagatcgacgacaacgagtacgcctacctcaaggccatcatcttcttcgaccccgacgccaagggcctgagcgaccccgggaagatcaagcgcctgcggtcccaggtccaggtgagcctcgaggactacatcaacgaccgccagtacgactcccggggccgcttcggggagctgctgctcctgctgcccacgctccagagcatcacctggcagatgatcgagcagatccagttcatcaagctgttcggcatggcgaagatcgacaacctgctccaggagatgctgctgtgaggactagttataagactgactagcccgatgggcctcccaacgggccctcctcccctccttgcaccgagattaataaaaaaaaaaaaaaaaaaaaaaaaaaaaaaaaaaaaaaaaaaaaaaaaaaaaaaaaaaaaaaaatgcatcccccccccccccccccccccccccccccccaaaggctcttttcagagccaccagaatt

SEQ ID NO: 2087 - RNA, 1345 nt, synthetic construct
  misc_feature 1..1345: note = mRNA i-3 (A64-N5-C30-hSL-N5) (opt1) from Homo sapiens__NP_000448.3__HNF4A(1-375)(K300R)
  source 1..1345: mol_type = other RNA
aggagaaagcttaccatgcgcctgagcaagaccctcgtggacatggacatggccgactactccgccgcgctggaccccgcctacaccacgctggagttcgagaacgtccaggtgctcaccatgggcaacgacaccagcccgtccgaggggaccaacctgaacgcccccaacagcctgggcgtgtccgccctctgcgccatctgcggggaccgggcgacgggcaagcactacggggccagctcctgcgacggctgcaagggcttcttccgccggagcgtccgcaagaaccacatgtactcctgccggttcagccgccagtgcgtggtggacaaggacaagcggaaccagtgccgctactgccggctgaagaagtgcttccgcgccgggatgaagaaggaggccgtccagaacgagcgggaccgcatctccacccggcgcagctcctacgaggacagctccctgcccagcatcaacgcgctcctgcaggccgaggtgctgtcccggcagatcaccagccccgtgtccggcatcaacggggacatccgcgccaagaagatcgccagcatcgccgacgtctgcgagagcatgaaggagcagctcctggtgctggtggagtgggcgaagtacatcccggccttctgcgagctccccctggacgaccaggtcgccctgctccgggcccacgccggcgagcacctcctgctgggggcgaccaagcgctccatggtgttcaaggacgtgctgctgctcggcaacgactacatcgtcccccggcactgccccgagctggccgagatgagccgcgtgtccatccggatcctggacgagctcgtgctgccgttccaggagctgcagatcgacgacaacgagtacgcctacctcaaggccatcatcttcttcgaccccgacgcccgcggcctgagcgaccccgggaagatcaagcgcctgcggtcccaggtccaggtgagcctcgaggactacatcaacgaccgccagtacgactcccggggccgcttcggggagctgctgctcctgctgcccacgctccagagcatcacctggcagatgatcgagcagatccagttcatcaagctgttcggcatggcgaagatcgacaacctgctccaggagatgctgctgtgaggactagttataagactgactagcccgatgggcctcccaacgggccctcctcccctccttgcaccgagattaataaaaaaaaaaaaaaaaaaaaaaaaaaaaaaaaaaaaaaaaaaaaaaaaaaaaaaaaaaaaaaaatgcatcccccccccccccccccccccccccccccccaaaggctcttttcagagccaccagaatt

SEQ ID NO: 2088 - RNA, 1345 nt, synthetic construct
  misc_feature 1..1345: note = mRNA i-3 (A64-N5-C30-hSL-N5) (opt1) from Homo sapiens__NP_000448.3__HNF4A(1-375)(K300R_K307R_K309R)
  source 1..1345: mol_type = other RNA
aggagaaagcttaccatgcgcctgagcaagaccctcgtggacatggacatggccgactactccgccgcgctggaccccgcctacaccacgctggagttcgagaacgtccaggtgctcaccatgggcaacgacaccagcccgtccgaggggaccaacctgaacgcccccaacagcctgggcgtgtccgccctctgcgccatctgcggggaccgggcgacgggcaagcactacggggccagctcctgcgacggctgcaagggcttcttccgccggagcgtccgcaagaaccacatgtactcctgccggttcagccgccagtgcgtggtggacaaggacaagcggaaccagtgccgctactgccggctgaagaagtgcttccgcgccgggatgaagaaggaggccgtccagaacgagcgggaccgcatctccacccggcgcagctcctacgaggacagctccctgcccagcatcaacgcgctcctgcaggccgaggtgctgtcccggcagatcaccagccccgtgtccggcatcaacggggacatccgcgccaagaagatcgccagcatcgccgacgtctgcgagagcatgaaggagcagctcctggtgctggtggagtgggcgaagtacatcccggccttctgcgagctccccctggacgaccaggtcgccctgctccgggcccacgccggcgagcacctcctgctgggggcgaccaagcgctccatggtgttcaaggacgtgctgctgctcggcaacgactacatcgtcccccggcactgccccgagctggccgagatgagccgcgtgtccatccggatcctggacgagctcgtgctgccgttccaggagctgcagatcgacgacaacgagtacgcctacctcaaggccatcatcttcttcgaccccgacgcccgcggcctgagcgaccccgggcgcatccggcgcctgcggtcccaggtccaggtgagcctcgaggactacatcaacgaccgccagtacgactcccggggccgcttcggggagctgctgctcctgctgcccacgctccagagcatcacctggcagatgatcgagcagatccagttcatcaagctgttcggcatggcgaagatcgacaacctgctccaggagatgctgctgtgaggactagttataagactgactagcccgatgggcctcccaacgggccctcctcccctccttgcaccgagattaataaaaaaaaaaaaaaaaaaaaaaaaaaaaaaaaaaaaaaaaaaaaaaaaaaaaaaaaaaaaaaaatgcatcccccccccccccccccccccccccccccccaaaggctcttttcagagccaccagaatt

SEQ ID NO: 2089 - RNA, 1345 nt, synthetic construct; identical to SEQ ID NO: 2021
  misc_feature 1..1345: note = mRNA i-3 (A64-N5-C30-hSL-N5) (opt1) from Homo sapiens__NP_000448.3__HNF4A(1-375)(K447R_K470R)
  source 1..1345: mol_type = other RNA

SEQ ID NO: 2090 - RNA, 1345 nt, synthetic construct; identical to SEQ ID NO: 2021
  misc_feature 1..1345: note = mRNA i-3 (A64-N5-C30-hSL-N5) (opt1) from Homo sapiens__NP_000448.3__HNF4A(1-375)(K458R)
  source 1..1345: mol_type = other RNA

SEQ ID NO: 2091 - RNA, 1345 nt, synthetic construct
  misc_feature 1..1345: note = mRNA i-3 (A64-N5-C30-hSL-N5) (opt1) from Homo sapiens__NP_000448.3__HNF4A(1-375)(K106R_K108R_K126R_K127R)
  source 1..1345: mol_type = other RNA
aggagaaagcttaccatgcgcctgagcaagaccctcgtggacatggacatggccgactactccgccgcgctggaccccgcctacaccacgctggagttcgagaacgtccaggtgctcaccatgggcaacgacaccagcccgtccgaggggaccaacctgaacgcccccaacagcctgggcgtgtccgccctctgcgccatctgcggggaccgggcgacgggcaagcactacggggccagctcctgcgacggctgcaagggcttcttccgccggagcgtccgcaagaaccacatgtactcctgccggttcagccgccagtgcgtggtggaccgggaccgccggaaccagtgccgctactgccggctgaagaagtgcttccgcgccgggatgcggcgcgaggccgtccagaacgagcgggaccgcatctccacccggcgcagctcctacgaggacagctccctgcccagcatcaacgcgctcctgcaggccgaggtgctgtcccggcagatcaccagccccgtgtccggcatcaacggggacatccgcgccaagaagatcgccagcatcgccgacgtctgcgagagcatgaaggagcagctcctggtgctggtggagtgggcgaagtacatcccggccttctgcgagctccccctggacgaccaggtcgccctgctccgggcccacgccggcgagcacctcctgctgggggcgaccaagcgctccatggtgttcaaggacgtgctgctgctcggcaacgactacatcgtcccccgccactgccccgagctggccgagatgagccgggtgtccatccgcatcctggacgagctcgtgctgccgttccaggagctgcagatcgacgacaacgagtacgcctacctcaaggccatcatcttcttcgaccccgacgccaagggcctgagcgaccccgggaagatcaagcggctgcgctcccaggtccaggtgagcctcgaggactacatcaacgaccggcagtacgactcccgcggccggttcggggagctgctgctcctgctgcccacgctccagagcatcacctggcagatgatcgagcagatccagttcatcaagctgttcggcatggcgaagatcgacaacctgctccaggagatgctgctgtgaggactagttataagactgactagcccgatgggcctcccaacgggccctcctcccctccttgcaccgagattaataaaaaaaaaaaaaaaaaaaaaaaaaaaaaaaaaaaaaaaaaaaaaaaaaaaaaaaaaaaaaaaatgcatcccccccccccccccccccccccccccccccaaaggctcttttcagagccaccagaatt

SEQ ID NO: 2092 - RNA, 1345 nt, synthetic construct; identical to SEQ ID NO: 2043
  misc_feature 1..1345: note = mRNA i-3 (A64-N5-C30-hSL-N5) (opt1) from Homo sapiens__NP_000448.3__HNF4A(1-375)(E285Q)
  source 1..1345: mol_type = other RNA

SEQ ID NO: 2093 - RNA, 1345 nt, synthetic construct
  misc_feature 1..1345: note = mRNA i-3 (A64-N5-C30-hSL-N5) (opt1) from Homo sapiens__NP_000448.3__HNF4A(1-375)(T166E)
  source 1..1345: mol_type = other RNA
aggagaaagcttaccatgcgcctgagcaagaccctcgtggacatggacatggccgactactccgccgcgctggaccccgcctacaccacgctggagttcgagaacgtccaggtgctcaccatgggcaacgacaccagcccgtccgaggggaccaacctgaacgcccccaacagcctgggcgtgtccgccctctgcgccatctgcggggaccgggcgacgggcaagcactacggggccagctcctgcgacggctgcaagggcttcttccgccggagcgtccgcaagaaccacatgtactcctgccggttcagccgccagtgcgtggtggacaaggacaagcggaaccagtgccgctactgccggctgaagaagtgcttccgcgccgggatgaagaaggaggccgtccagaacgagcgggaccgcatctccacccggcgcagctcctacgaggacagctccctgcccagcatcaacgcgctcctgcaggccgaggtgctgtcccggcagatcgagagccccgtgtccggcatcaacggggacatccgcgccaagaagatcgccagcatcgccgacgtctgcgagagcatgaaggagcagctcctggtgctggtggagtgggcgaagtacatcccggccttctgcgagctccccctggacgaccaggtcgccctgctccgggcccacgccggcgagcacctcctgctgggggcgaccaagcgctccatggtgttcaaggacgtgctgctgctcggcaacgactacatcgtcccccggcactgccccgagctggccgagatgagccgcgtgtccatccggatcctggacgagctcgtgctgccgttccaggagctgcagatcgacgacaacgagtacgcctacctcaaggccatcatcttcttcgaccccgacgccaagggcctgagcgaccccgggaagatcaagcgcctgcgctcccaggtccaggtgagcctcgaggactacatcaacgaccggcagtacgactcccgcggccggttcggggagctgctgctcctgctgcccaccctccagagcatcacgtggcagatgatcgagcagatccagttcatcaagctgttcggcatggcgaagatcgacaacctgctccaggagatgctgctgtgaggactagttataagactgactagcccgatgggcctcccaacgggccctcctcccctccttgcaccgagattaataaaaaaaaaaaaaaaaaaaaaaaaaaaaaaaaaaaaaaaaaaaaaaaaaaaaaaaaaaaaaaaatgcatcccccccccccccccccccccccccccccccaaaggctcttttcagagccaccagaatt

SEQ ID NO: 2094 - RNA, 1345 nt, synthetic construct
  misc_feature 1..1345: note = mRNA i-3 (A64-N5-C30-hSL-N5) (opt1) from Homo sapiens__NP_000448.3__HNF4A(1-375)(S148A)
  source 1..1345: mol_type = other RNA
aggagaaagcttaccatgcgcctgagcaagaccctcgtggacatggacatggccgactactccgccgcgctggaccccgcctacaccacgctggagttcgagaacgtccaggtgctcaccatgggcaacgacaccagcccgtccgaggggaccaacctgaacgcccccaacagcctgggcgtgtccgccctctgcgccatctgcggggaccgggcgacgggcaagcactacggggccagctcctgcgacggctgcaagggcttcttccgccggagcgtccgcaagaaccacatgtactcctgccggttcagccgccagtgcgtggtggacaaggacaagcggaaccagtgccgctactgccggctgaagaagtgcttccgcgccgggatgaagaaggaggccgtccagaacgagcgggaccgcatctccacccggcgcagctcctacgaggacagcgcgctgccctccatcaacgccctcctgcaggccgaggtgctgagccggcagatcacctcccccgtgagcggcatcaacggggacatccgcgccaagaagatcgcctccatcgcggacgtctgcgagagcatgaaggagcagctcctggtgctggtggagtgggccaagtacatcccggccttctgcgagctccccctggacgaccaggtcgccctgctccgggcccacgcgggcgagcacctcctgctgggggccaccaagcgcagcatggtgttcaaggacgtgctgctgctcggcaacgactacatcgtcccccggcactgccccgagctggccgagatgtcccgcgtgagcatccggatcctggacgagctcgtgctgccgttccaggagctgcagatcgacgacaacgagtacgcctacctcaaggccatcatcttcttcgaccccgacgcgaagggcctgtccgaccccgggaagatcaagcgcctgcgcagccaggtccaggtgtccctcgaggactacatcaacgaccggcagtacgacagccgcggccggttcggggagctgctgctcctgctgcccacgctccagtccatcacctggcagatgatcgagcagatccagttcatcaagctgttcggcatggccaagatcgacaacctgctccaggagatgctgctgtgaggactagttataagactgactagcccgatgggcctcccaacgggccctcctcccctccttgcaccgagattaataaaaaaaaaaaaaaaaaaaaaaaaaaaaaaaaaaaaaaaaaaaaaaaaaaaaaaaaaaaaaaaatgcatcccccccccccccccccccccccccccccccaaaggctcttttcagagccaccagaatt

SEQ ID NO: 2095 - RNA, 1345 nt, synthetic construct
  misc_feature 1..1345: note = mRNA i-3 (A64-N5-C30-hSL-N5) (opt1) from Homo sapiens__NP_000448.3__HNF4A(1-375)(S148E)
  source 1..1345: mol_type = other RNA
aggagaaagcttaccatgcgcctgagcaagaccctcgtggacatggacatggccgactactccgccgcgctggaccccgcctacaccacgctggagttcgagaacgtccaggtgctcaccatgggcaacgacaccagcccgtccgaggggaccaacctgaacgcccccaacagcctgggcgtgtccgccctctgcgccatctgcggggaccgggcgacgggcaagcactacggggccagctcctgcgacggctgcaagggcttcttccgccggagcgtccgcaagaaccacatgtactcctgccggttcagccgccagtgcgtggtggacaaggacaagcggaaccagtgccgctactgccggctgaagaagtgcttccgcgccgggatgaagaaggaggccgtccagaacgagcgggaccgcatctccacccggcgcagctcctacgaggacagcgagctgccctccatcaacgcgctcctgcaggccgaggtgctgagccggcagatcacctcccccgtgagcggcatcaacggggacatccgcgccaagaagatcgcctccatcgccgacgtctgcgagagcatgaaggagcagctcctggtgctggtggagtgggcgaagtacatcccggccttctgcgagctccccctggacgaccaggtcgccctgctccgggcccacgccggcgagcacctcctgctgggggcgaccaagcgcagcatggtgttcaaggacgtgctgctgctcggcaacgactacatcgtcccccggcactgccccgagctggccgagatgtcccgcgtgagcatccggatcctggacgagctcgtgctgccgttccaggagctgcagatcgacgacaacgagtacgcctacctcaaggccatcatcttcttcgaccccgacgccaagggcctgtccgaccccgggaagatcaagcgcctgcgcagccaggtccaggtgtccctcgaggactacatcaacgaccggcagtacgacagccgcggccggttcggggagctgctgctcctgctgcccacgctccagtccatcacctggcagatgatcgagcagatccagttcatcaagctgttcggcatggcgaagatcgacaacctgctccaggagatgctgctgtgaggactagttataagactgactagcccgatgggcctcccaacgggccctcctcccctccttgcaccgagattaataaaaaaaaaaaaaaaaaaaaaaaaaaaaaaaaaaaaaaaaaaaaaaaaaaaaaaaaaaaaaaaatgcatcccccccccccccccccccccccccccccccaaaggctcttttcagagccaccagaatt

SEQ ID NO: 2096 - RNA, 1345 nt, synthetic construct
  misc_feature 1..1345: note = mRNA i-3 (A64-N5-C30-hSL-N5) (opt1) from Homo sapiens__NP_000448.3__HNF4A(1-375)(S183A)
  source 1..1345: mol_type = other RNA
aggagaaagcttaccatgcgcctgagcaagaccctcgtggacatggacatggccgactactccgccgcgctggaccccgcctacaccacgctggagttcgagaacgtccaggtgctcaccatgggcaacgacaccagcccgtccgaggggaccaacctgaacgcccccaacagcctgggcgtgtccgccctctgcgccatctgcggggaccgggcgacgggcaagcactacggggccagctcctgcgacggctgcaagggcttcttccgccggagcgtccgcaagaaccacatgtactcctgccggttcagccgccagtgcgtggtggacaaggacaagcggaaccagtgccgctactgccggctgaagaagtgcttccgcgccgggatgaagaaggaggccgtccagaacgagcgggaccgcatctccacccggcgcagctcctacgaggacagctccctgcccagcatcaacgcgctcctgcaggccgaggtgctgtcccggcagatcaccagccccgtgtccggcatcaacggggacatccgcgccaagaagatcgccgccatcgcggacgtctgcgagagcatgaaggagcagctcctggtgctggtggagtgggccaagtacatcccggccttctgcgagctccccctggacgaccaggtcgccctgctccgggcccacgcgggcgagcacctcctgctgggggccaccaagcgcagcatggtgttcaaggacgtgctgctgctcggcaacgactacatcgtcccccggcactgccccgagctggccgagatgtcccgcgtgagcatccggatcctggacgagctcgtgctgccgttccaggagctgcagatcgacgacaacgagtacgcctacctcaaggccatcatcttcttcgaccccgacgcgaagggcctgtccgaccccgggaagatcaagcgcctgcgcagccaggtccaggtgtccctcgaggactacatcaacgaccggcagtacgacagccgcggccggttcggggagctgctgctcctgctgcccacgctccagtccatcacctggcagatgatcgagcagatccagttcatcaagctgttcggcatggccaagatcgacaacctgctccaggagatgctgctgtgaggactagttataagactgactagcccgatgggcctcccaacgggccctcctcccctccttgcaccgagattaataaaaaaaaaaaaaaaaaaaaaaaaaaaaaaaaaaaaaaaaaaaaaaaaaaaaaaaaaaaaaaaatgcatcccccccccccccccccccccccccccccccaaaggctcttttcagagccaccagaatt

SEQ ID NO: 2097 - RNA, 1345 nt, synthetic construct
  misc_feature 1..1345: note = mRNA i-3 (A64-N5-C30-hSL-N5) (opt1) from Homo sapiens__NP_000448.3__HNF4A(1-375)(S183E)
  source 1..1345: mol_type = other RNA
aggagaaagcttaccatgcgcctgagcaagaccctcgtggacatggacatggccgactactccgccgcgctggaccccgcctacaccacgctggagttcgagaacgtccaggtgctcaccatgggcaacgacaccagcccgtccgaggggaccaacctgaacgcccccaacagcctgggcgtgtccgccctctgcgccatctgcggggaccgggcgacgggcaagcactacggggccagctcctgcgacggctgcaagggcttcttccgccggagcgtccgcaagaaccacatgtactcctgccggttcagccgccagtgcgtggtggacaaggacaagcggaaccagtgccgctactgccggctgaagaagtgcttccgcgccgggatgaagaaggaggccgtccagaacgagcgggaccgcatctccacccggcgcagctcctacgaggacagctccctgcccagcatcaacgcgctcctgcaggccgaggtgctgtcccggcagatcaccagccccgtgtccggcatcaacggggacatccgcgccaagaagatcgccgagatcgccgacgtctgcgagagcatgaaggagcagctcctggtgctggtggagtgggcgaagtacatcccggccttctgcgagctccccctggacgaccaggtcgccctgctccgggcccacgccggcgagcacctcctgctgggggcgaccaagcgcagcatggtgttcaaggacgtgctgctgctcggcaacgactacatcgtcccccggcactgccccgagctggccgagatgtcccgcgtgagcatccggatcctggacgagctcgtgctgccgttccaggagctgcagatcgacgacaacgagtacgcctacctcaaggccatcatcttcttcgaccccgacgccaagggcctgtccgaccccgggaagatcaagcgcctgcgcagccaggtccaggtgtccctcgaggactacatcaacgaccggcagtacgacagccgcggccggttcggggagctgctgctcctgctgcccacgctccagtccatcacctggcagatgatcgagcagatccagttcatcaagctgttcggcatggcgaagatcgacaacctgctccaggagatgctgctgtgaggactagttataagactgactagcccgatgggcctcccaacgggccctcctcccctccttgcaccgagattaataaaaaaaaaaaaaaaaaaaaaaaaaaaaaaaaaaaaaaaaaaaaaaaaaaaaaaaaaaaaaaaatgcatcccccccccccccccccccccccccccccccaaaggctcttttcagagccaccagaatt

SEQ ID NO: 2098 - RNA, 1345 nt, synthetic construct; identical to SEQ ID NO: 2021
  misc_feature 1..1345: note = mRNA i-3 (A64-N5-C30-hSL-N5) (opt1) from Homo sapiens__NP_000448.3__HNF4A(1-375)(S461A)
  source 1..1345: mol_type = other RNA

SEQ ID NO: 2099 - RNA, 1345 nt, synthetic construct; identical to SEQ ID NO: 2021
  misc_feature 1..1345: note = mRNA i-3 (A64-N5-C30-hSL-N5) (opt1) from Homo sapiens__NP_000448.3__HNF4A(1-375)(S461E)
  source 1..1345: mol_type = other RNA

SEQ ID NO: 2100 - RNA, 1345 nt, synthetic construct
  misc_feature 1..1345: note = mRNA i-3 (A64-N5-C30-hSL-N5) (opt1) from Homo sapiens__NP_000448.3__HNF4A(1-375)(S142A_S143A_S313A)
  source 1..1345: mol_type = other RNA
aggagaaagcttaccatgcgcctgagcaagaccctcgtggacatggacatggccgactactccgccgcgctggaccccgcctacaccacgctggagttcgagaacgtccaggtgctcaccatgggcaacgacaccagcccgtccgaggggaccaacctgaacgcccccaacagcctgggcgtgtccgccctctgcgccatctgcggggaccgggcgacgggcaagcactacggggccagctcctgcgacggctgcaagggcttcttccgccggagcgtccgcaagaaccacatgtactcctgccggttcagccgccagtgcgtggtggacaaggacaagcggaaccagtgccgctactgccggctgaagaagtgcttccgcgccgggatgaagaaggaggccgtccagaacgagcgggaccgcatctccacccggcgcgcggcctacgaggacagctccctgcccagcatcaacgccctcctgcaggccgaggtgctgtcccggcagatcaccagccccgtgtccggcatcaacggggacatccgcgccaagaagatcgcgagcatcgccgacgtctgcgagtccatgaaggagcagctcctggtgctggtggagtgggccaagtacatcccggccttctgcgagctccccctggacgaccaggtcgccctgctccgggcgcacgccggcgagcacctcctgctgggggccaccaagcgcagcatggtgttcaaggacgtgctgctgctcggcaacgactacatcgtcccccggcactgccccgagctggccgagatgagccgcgtgtccatccggatcctggacgagctcgtgctgccgttccaggagctgcagatcgacgacaacgagtacgcctacctcaaggcgatcatcttcttcgaccccgacgccaagggcctgagcgaccccgggaagatcaagcgcctgcgcgcccaggtccaggtgtccctcgaggactacatcaacgaccggcagtacgacagccgcggccggttcggggagctgctgctcctgctgcccacgctccagtccatcacctggcagatgatcgagcagatccagttcatcaagctgttcggcatggccaagatcgacaacctgctccaggagatgctgctgtgaggactagttataagactgactagcccgatgggcctcccaacgggccctcctcccctccttgcaccgagattaataaaaaaaaaaaaaaaaaaaaaaaaaaaaaaaaaaaaaaaaaaaaaaaaaaaaaaaaaaaaaaaatgcatcccccccccccccccccccccccccccccccaaaggctcttttcagagccaccagaatt

SEQ ID NO: 2101 - RNA, 1345 nt, synthetic construct; identical to SEQ ID NO: 2100
  misc_feature 1..1345: note = mRNA i-3 (A64-N5-C30-hSL-N5) (opt1) from Homo sapiens__NP_000448.3__HNF4A(1-375)(S142A_S143A_S313A_K458R)
  source 1..1345: mol_type = other RNA

SEQ ID NO: 2102 - RNA, 1345 nt, synthetic construct
  misc_feature 1..1345: note = mRNA i-3 (A64-N5-C30-hSL-N5) (opt1) from Homo sapiens__NP_000448.3__HNF4A(1-375)(S142A_S143A_S167A_S313A_ S378A_T429A_T432A_S436A_K458R)
  source 1..1345: mol_type = other RNA
aggagaaagcttaccatgcgcctgagcaagaccctcgtggacatggacatggccgactactccgccgcgctggaccccgcctacaccacgctggagttcgagaacgtccaggtgctcaccatgggcaacgacaccagcccgtccgaggggaccaacctgaacgcccccaacagcctgggcgtgtccgccctctgcgccatctgcggggaccgggcgacgggcaagcactacggggccagctcctgcgacggctgcaagggcttcttccgccggagcgtccgcaagaaccacatgtactcctgccggttcagccgccagtgcgtggtggacaaggacaagcggaaccagtgccgctactgccggctgaagaagtgcttccgcgccgggatgaagaaggaggccgtccagaacgagcgggaccgcatctccacccggcgcgcggcctacgaggacagctccctgcccagcatcaacgccctcctgcaggccgaggtgctgtcccggcagatcaccgcccccgtgagcggcatcaacggggacatccgcgcgaagaagatcgcctccatcgccgacgtctgcgagagcatgaaggagcagctcctggtgctggtggagtgggccaagtacatcccggccttctgcgagctccccctggacgaccaggtcgcgctgctccgggcccacgccggcgagcacctcctgctgggggccaccaagcgctccatggtgttcaaggacgtgctgctgctcggcaacgactacatcgtcccccggcactgccccgagctggccgagatgagccgcgtgagcatccggatcctggacgagctcgtgctgccgttccaggagctgcagatcgacgacaacgagtacgcgtacctcaaggccatcatcttcttcgaccccgacgccaagggcctgtccgaccccgggaagatcaagcgcctgcgcgcccaggtccaggtgagcctcgaggactacatcaacgaccggcagtacgactcccgcggccggttcggggagctgctgctcctgctgcccacgctccagagcatcacctggcagatgatcgagcagatccagttcatcaagctgttcggcatggccaagatcgacaacctgctccaggagatgctgctgtgaggactagttataagactgactagcccgatgggcctcccaacgggccctcctcccctccttgcaccgagattaataaaaaaaaaaaaaaaaaaaaaaaaaaaaaaaaaaaaaaaaaaaaaaaaaaaaaaaaaaaaaaaatgcatcccccccccccccccccccccccccccccccaaaggctcttttcagagccaccagaatt

SEQ ID NO: 2103 - RNA, 1345 nt, synthetic construct
  misc_feature 1..1345: note = mRNA i-3 (A64-N5-C30-hSL-N5) (opt1) from Homo sapiens__NP_000448.3__HNF4A(1-375)(S142A_S143A_S148A_S167A_ S313A_S378A_T429A_T432A_S436A_K458R)
  source 1..1345: mol_type = other RNA
aggagaaagcttaccatgcgcctgagcaagaccctcgtggacatggacatggccgactactccgccgcgctggaccccgcctacaccacgctggagttcgagaacgtccaggtgctcaccatgggcaacgacaccagcccgtccgaggggaccaacctgaacgcccccaacagcctgggcgtgtccgccctctgcgccatctgcggggaccgggcgacgggcaagcactacggggccagctcctgcgacggctgcaagggcttcttccgccggagcgtccgcaagaaccacatgtactcctgccggttcagccgccagtgcgtggtggacaaggacaagcggaaccagtgccgctactgccggctgaagaagtgcttccgcgccgggatgaagaaggaggccgtccagaacgagcgggaccgcatctccacccggcgcgcggcctacgaggacagcgccctgccctccatcaacgccctcctgcaggccgaggtgctgagccggcagatcaccgcgcccgtgtccggcatcaacggggacatccgcgccaagaagatcgccagcatcgccgacgtctgcgagtccatgaaggagcagctcctggtgctggtggagtgggccaagtacatcccggcgttctgcgagctccccctggacgaccaggtcgccctgctccgggcccacgccggcgagcacctcctgctgggggccaccaagcgcagcatggtgttcaaggacgtgctgctgctcggcaacgactacatcgtcccccggcactgccccgagctggcggagatgtcccgcgtgagcatccggatcctggacgagctcgtgctgccgttccaggagctgcagatcgacgacaacgagtacgcctacctcaaggccatcatcttcttcgaccccgacgccaagggcctgagcgaccccgggaagatcaagcgcctgcgcgcccaggtccaggtgtccctcgaggactacatcaacgaccggcagtacgacagccgcggccggttcggggagctgctgctcctgctgcccacgctccagtccatcacctggcagatgatcgagcagatccagttcatcaagctgttcggcatggcgaagatcgacaacctgctccaggagatgctgctgtgaggactagttataagactgactagcccgatgggcctcccaacgggccctcctcccctccttgcaccgagattaataaaaaaaaaaaaaaaaaaaaaaaaaaaaaaaaaaaaaaaaaaaaaaaaaaaaaaaaaaaaaaaatgcatcccccccccccccccccccccccccccccccaaaggctcttttcagagccaccagaatt

SEQ ID NO: 2104 - RNA, 1345 nt, synthetic construct
  misc_feature 1..1345: note = mRNA i-3 (A64-N5-C30-hSL-N5) (opt1) from Homo sapiens__NP_000448.3__HNF4A(1-375)(K106R_K108R_K126R_K127R_ S142A_S143A_S148A_S167A_S313A_S378A_T429A_T432A_S436A_K458R )
  source 1..1345: mol_type = other RNA
aggagaaagcttaccatgcgcctgagcaagaccctcgtggacatggacatggccgactactccgccgcgctggaccccgcctacaccacgctggagttcgagaacgtccaggtgctcaccatgggcaacgacaccagcccgtccgaggggaccaacctgaacgcccccaacagcctgggcgtgtccgccctctgcgccatctgcggggaccgggcgacgggcaagcactacggggccagctcctgcgacggctgcaagggcttcttccgccggagcgtccgcaagaaccacatgtactcctgccggttcagccgccagtgcgtggtggaccgggaccgccggaaccagtgccgctactgccggctgaagaagtgcttccgcgccgggatgcggcgcgaggccgtccagaacgagcgggaccgcatctccacccggcgcgcggcctacgaggacagcgccctgccctccatcaacgccctcctgcaggccgaggtgctgagccggcagatcaccgcgcccgtgtccggcatcaacggggacatccgcgccaagaagatcgccagcatcgccgacgtctgcgagtccatgaaggagcagctcctggtgctggtggagtgggccaagtacatcccggcgttctgcgagctccccctggacgaccaggtcgccctgctccgggcccacgccggcgagcacctcctgctgggggccaccaagcgcagcatggtgttcaaggacgtgctgctgctcggcaacgactacatcgtcccccgccactgccccgagctggcggagatgtcccgggtgagcatccgcatcctggacgagctcgtgctgccgttccaggagctgcagatcgacgacaacgagtacgcctacctcaaggccatcatcttcttcgaccccgacgccaagggcctgagcgaccccgggaagatcaagcggctgcgcgcccaggtccaggtgtccctcgaggactacatcaacgaccggcagtacgacagccgcggccggttcggggagctgctgctcctgctgcccacgctccagtccatcacctggcagatgatcgagcagatccagttcatcaagctgttcggcatggcgaagatcgacaacctgctccaggagatgctgctgtgaggactagttataagactgactagcccgatgggcctcccaacgggccctcctcccctccttgcaccgagattaataaaaaaaaaaaaaaaaaaaaaaaaaaaaaaaaaaaaaaaaaaaaaaaaaaaaaaaaaaaaaaaatgcatcccccccccccccccccccccccccccccccaaaggctcttttcagagccaccagaatt

SEQ ID NO: 2105 - RNA, 1345 nt, synthetic construct
  misc_feature 1..1345: note = mRNA i-3 (A64-N5-C30-hSL-N5) (opt1) from Homo sapiens__NP_000448.3__HNF4A(1-375)(S142A_S143A_S148A_T166A_ S167A_S313A_S378A_T429A_T432A_S436A_K458R)
  source 1..1345: mol_type = other RNA
aggagaaagcttaccatgcgcctgagcaagaccctcgtggacatggacatggccgactactccgccgcgctggaccccgcctacaccacgctggagttcgagaacgtccaggtgctcaccatgggcaacgacaccagcccgtccgaggggaccaacctgaacgcccccaacagcctgggcgtgtccgccctctgcgccatctgcggggaccgggcgacgggcaagcactacggggccagctcctgcgacggctgcaagggcttcttccgccggagcgtccgcaagaaccacatgtactcctgccggttcagccgccagtgcgtggtggacaaggacaagcggaaccagtgccgctactgccggctgaagaagtgcttccgcgccgggatgaagaaggaggccgtccagaacgagcgggaccgcatctccacccggcgcgcggcctacgaggacagcgccctgccctccatcaacgccctcctgcaggccgaggtgctgagccggcagatcgcggcccccgtgtccggcatcaacggggacatccgcgccaagaagatcgccagcatcgccgacgtctgcgagtccatgaaggagcagctcctggtgctggtggagtgggcgaagtacatcccggccttctgcgagctccccctggacgaccaggtcgccctgctccgggcccacgccggcgagcacctcctgctgggggcgaccaagcgcagcatggtgttcaaggacgtgctgctgctcggcaacgactacatcgtcccccggcactgccccgagctggccgagatgtcccgcgtgagcatccggatcctggacgagctcgtgctgccgttccaggagctgcagatcgacgacaacgagtacgcctacctcaaggccatcatcttcttcgaccccgacgccaagggcctgagcgaccccgggaagatcaagcgcctgcgcgcgcaggtccaggtgtccctcgaggactacatcaacgaccggcagtacgacagccgcggccggttcggggagctgctgctcctgctgcccaccctccagtccatcacgtggcagatgatcgagcagatccagttcatcaagctgttcggcatggccaagatcgacaacctgctccaggagatgctgctgtgaggactagttataagactgactagcccgatgggcctcccaacgggccctcctcccctccttgcaccgagattaataaaaaaaaaaaaaaaaaaaaaaaaaaaaaaaaaaaaaaaaaaaaaaaaaaaaaaaaaaaaaaaatgcatcccccccccccccccccccccccccccccccaaaggctcttttcagagccaccagaatt

SEQ ID NO: 2106 - RNA, 1345 nt, synthetic construct
  misc_feature 1..1345: note = mRNA i-3 (A64-N5-C30-hSL-N5) (opt1) from Homo sapiens__NP_000448.3__HNF4A(1-375)(S87A_S142A_S143A_S148A_T 166A_S167A_S313A_S378A_T429A_T432A_S436A_K458R)
  source 1..1345: mol_type = other RNA
aggagaaagcttaccatgcgcctgagcaagaccctcgtggacatggacatggccgactactccgccgcgctggaccccgcctacaccacgctggagttcgagaacgtccaggtgctcaccatgggcaacgacaccagcccgtccgaggggaccaacctgaacgcccccaacagcctgggcgtgtccgccctctgcgccatctgcggggaccgggcgacgggcaagcactacggggccagctcctgcgacggctgcaagggcttcttccgccgggccgtccgcaagaaccacatgtacagctgccggttctcccgccagtgcgtggtggacaaggacaagcggaaccagtgccgctactgccggctgaagaagtgcttccgcgccgggatgaagaaggaggcggtccagaacgagcgggaccgcatcagcacccggcgcgccgcctacgaggactccgccctgcccagcatcaacgccctcctgcaggcggaggtgctgtcccggcagatcgccgcccccgtgagcggcatcaacggggacatccgcgccaagaagatcgcctccatcgcggacgtctgcgagagcatgaaggagcagctcctggtgctggtggagtgggccaagtacatcccggccttctgcgagctccccctggacgaccaggtcgccctgctccgggcccacgcgggcgagcacctcctgctgggggccaccaagcgctccatggtgttcaaggacgtgctgctgctcggcaacgactacatcgtcccccggcactgccccgagctggccgagatgagccgcgtgtccatccggatcctggacgagctcgtgctgccgttccaggagctgcagatcgacgacaacgagtacgcctacctcaaggccatcatcttcttcgaccccgacgcgaagggcctgagcgaccccgggaagatcaagcgcctgcgcgcccaggtccaggtgagcctcgaggactacatcaacgaccggcagtacgactcccgcggccggttcggggagctgctgctcctgctgcccaccctccagagcatcacgtggcagatgatcgagcagatccagttcatcaagctgttcggcatggccaagatcgacaacctgctccaggagatgctgctgtgaggactagttataagactgactagcccgatgggcctcccaacgggccctcctcccctccttgcaccgagattaataaaaaaaaaaaaaaaaaaaaaaaaaaaaaaaaaaaaaaaaaaaaaaaaaaaaaaaaaaaaaaaatgcatcccccccccccccccccccccccccccccccaaaggctcttttcagagccaccagaatt

SEQ ID NO: 2107 - RNA, 1345 nt, synthetic construct
  misc_feature 1..1345: note = mRNA i-3 (A64-N5-C30-hSL-N5) (opt1) from Homo sapiens__NP_000448.3__HNF4A(1-375)(S87A_K106R_K108R_K126R_K 127R_S142A_S143A_S148A_T166A_S167A_S313A_S378A_T429A_T432A_ S436A_K458R)
  source 1..1345: mol_type = other RNA
aggagaaagcttaccatgcgcctgagcaagaccctcgtggacatggacatggccgactactccgccgcgctggaccccgcctacaccacgctggagttcgagaacgtccaggtgctcaccatgggcaacgacaccagcccgtccgaggggaccaacctgaacgcccccaacagcctgggcgtgtccgccctctgcgccatctgcggggaccgggcgacgggcaagcactacggggccagctcctgcgacggctgcaagggcttcttccgccgggccgtccgcaagaaccacatgtacagctgccggttctcccgccagtgcgtggtggaccgggaccgccggaaccagtgccgctactgccggctgaagaagtgcttccgcgccgggatgcggcgcgaggcggtccagaacgagcgggaccgcatcagcacccggcgcgccgcctacgaggactccgccctgcccagcatcaacgccctcctgcaggcggaggtgctgtcccggcagatcgccgcccccgtgagcggcatcaacggggacatccgcgccaagaagatcgcctccatcgcggacgtctgcgagagcatgaaggagcagctcctggtgctggtggagtgggccaagtacatcccggccttctgcgagctccccctggacgaccaggtcgccctgctccgggcccacgcgggcgagcacctcctgctgggggccaccaagcgctccatggtgttcaaggacgtgctgctgctcggcaacgactacatcgtcccccgccactgccccgagctggccgagatgagccgggtgtccatccgcatcctggacgagctcgtgctgccgttccaggagctgcagatcgacgacaacgagtacgcctacctcaaggccatcatcttcttcgaccccgacgcgaagggcctgagcgaccccgggaagatcaagcggctgcgcgcccaggtccaggtgagcctcgaggactacatcaacgaccggcagtacgactcccgcggccggttcggggagctgctgctcctgctgcccaccctccagagcatcacgtggcagatgatcgagcagatccagttcatcaagctgttcggcatggccaagatcgacaacctgctccaggagatgctgctgtgaggactagttataagactgactagcccgatgggcctcccaacgggccctcctcccctccttgcaccgagattaataaaaaaaaaaaaaaaaaaaaaaaaaaaaaaaaaaaaaaaaaaaaaaaaaaaaaaaaaaaaaaaatgcatcccccccccccccccccccccccccccccccaaaggctcttttcagagccaccagaatt

SEQ ID NO: 2108 - RNA, 1345 nt, synthetic construct
  misc_feature 1..1345: note = mRNA i-3 (A64-N5-C30-hSL-N5) (opt1) from Homo sapiens__NP_000448.3__HNF4A(1-375)(S87A_K106R_K108R_K126R_K 127R)
  source 1..1345: mol_type = other RNA
aggagaaagcttaccatgcgcctgagcaagaccctcgtggacatggacatggccgactactccgccgcgctggaccccgcctacaccacgctggagttcgagaacgtccaggtgctcaccatgggcaacgacaccagcccgtccgaggggaccaacctgaacgcccccaacagcctgggcgtgtccgccctctgcgccatctgcggggaccgggcgacgggcaagcactacggggccagctcctgcgacggctgcaagggcttcttccgccgggccgtccgcaagaaccacatgtacagctgccggttctcccgccagtgcgtggtggaccgggaccgccggaaccagtgccgctactgccggctgaagaagtgcttccgcgccgggatgcggcgcgaggcggtccagaacgagcgggaccgcatcagcacccggcgctccagctacgaggactccagcctgccctccatcaacgccctcctgcaggccgaggtgctgagccggcagatcacctcccccgtgagcggcatcaacggggacatccgcgccaagaagatcgcctccatcgcggacgtctgcgagagcatgaaggagcagctcctggtgctggtggagtgggccaagtacatcccggccttctgcgagctccccctggacgaccaggtcgccctgctccgggcccacgcgggcgagcacctcctgctgggggccaccaagcgcagcatggtgttcaaggacgtgctgctgctcggcaacgactacatcgtcccccgccactgccccgagctggccgagatgtcccgggtgagcatccgcatcctggacgagctcgtgctgccgttccaggagctgcagatcgacgacaacgagtacgcctacctcaaggccatcatcttcttcgaccccgacgcgaagggcctgtccgaccccgggaagatcaagcggctgcgcagccaggtccaggtgtccctcgaggactacatcaacgaccggcagtacgacagccgcggccggttcggggagctgctgctcctgctgcccacgctccagtccatcacctggcagatgatcgagcagatccagttcatcaagctgttcggcatggccaagatcgacaacctgctccaggagatgctgctgtgaggactagttataagactgactagcccgatgggcctcccaacgggccctcctcccctccttgcaccgagattaataaaaaaaaaaaaaaaaaaaaaaaaaaaaaaaaaaaaaaaaaaaaaaaaaaaaaaaaaaaaaaaatgcatcccccccccccccccccccccccccccccccaaaggctcttttcagagccaccagaatt

SEQ ID NO: 2109 - RNA, 1345 nt, synthetic construct; identical to SEQ ID NO: 2107
  misc_feature 1..1345: note = mRNA i-3 (A64-N5-C30-hSL-N5) (opt1) from Homo sapiens__NP_000448.3__HNF4A(1-375)(S87A_K106R_K108R_K126R_K 127R_S142A_S143A_S148A_T166A_S167A_S313A_S378A_T429A_T432A_ S436A_K458R_S461A)
  source 1..1345: mol_type = other RNA

SEQ ID NO: 2110 - RNA, 1345 nt, synthetic construct; identical to SEQ ID NO: 2107
  misc_feature 1..1345: note = mRNA i-3 (A64-N5-C30-hSL-N5) (opt1) from Homo sapiens__NP_000448.3__HNF4A(1-375)(S87A_K106R_K108R_K126R_K 127R_S142A_S143A_S148A_T166A_S167A_S313A_S378A_T429A_T432A_ S436A_K458R_S461E)
  source 1..1345: mol_type = other RNA

SEQ ID NO: 2111 - RNA, 1345 nt, synthetic construct
  misc_feature 1..1345: note = mRNA i-3 (A64-N5-C30-hSL-N5) (opt1) from Homo sapiens__NP_000448.3__HNF4A(1-375)(S87A_K106R_K108R_K126R_K 127R_S142A_S143A_S148E_T166A_S167E_S313A_S378E_T429E_T432E_ S436E_K458R_S461E)
  source 1..1345: mol_type = other RNA
aggagaaagcttaccatgcgcctgagcaagaccctcgtggacatggacatggccgactactccgccgcgctggaccccgcctacaccacgctggagttcgagaacgtccaggtgctcaccatgggcaacgacaccagcccgtccgaggggaccaacctgaacgcccccaacagcctgggcgtgtccgccctctgcgccatctgcggggaccgggcgacgggcaagcactacggggccagctcctgcgacggctgcaagggcttcttccgccgggccgtccgcaagaaccacatgtacagctgccggttctcccgccagtgcgtggtggaccgggaccgccggaaccagtgccgctactgccggctgaagaagtgcttccgcgccgggatgcggcgcgaggcggtccagaacgagcgggaccgcatcagcacccggcgcgccgcctacgaggactccgagctgcccagcatcaacgccctcctgcaggccgaggtgctgtcccggcagatcgcggagcccgtgagcggcatcaacggggacatccgcgccaagaagatcgcctccatcgccgacgtctgcgagagcatgaaggagcagctcctggtgctggtggagtgggccaagtacatcccggcgttctgcgagctccccctggacgaccaggtcgccctgctccgggcccacgccggcgagcacctcctgctgggggccaccaagcgctccatggtgttcaaggacgtgctgctgctcggcaacgactacatcgtcccccgccactgccccgagctggcggagatgagccgggtgtccatccgcatcctggacgagctcgtgctgccgttccaggagctgcagatcgacgacaacgagtacgcctacctcaaggccatcatcttcttcgaccccgacgccaagggcctgagcgaccccgggaagatcaagcggctgcgcgcccaggtccaggtgagcctcgaggactacatcaacgaccggcagtacgactcccgcggccggttcggggagctgctgctcctgctgcccaccctccagagcatcacgtggcagatgatcgagcagatccagttcatcaagctgttcggcatggcgaagatcgacaacctgctccaggagatgctgctgtgaggactagttataagactgactagcccgatgggcctcccaacgggccctcctcccctccttgcaccgagattaataaaaaaaaaaaaaaaaaaaaaaaaaaaaaaaaaaaaaaaaaaaaaaaaaaaaaaaaaaaaaaaatgcatcccccccccccccccccccccccccccccccaaaggctcttttcagagccaccagaatt

SEQ ID NO: 2112 - RNA, 1345 nt, synthetic construct
  misc_feature 1..1345: note = mRNA i-3 (A64-N5-C30-hSL-N5) (opt1) from Homo sapiens__NP_000448.3__HNF4A(1-375)(S87A_K106R_K108R_K126R_K 127R_S142A_S143A_S148A_T166A_S167A_K179R_K180R_S313A_S378A_ T429A_T432A_S436A_K458R_S461E)
  source 1..1345: mol_type = other RNA
aggagaaagcttaccatgcgcctgagcaagaccctcgtggacatggacatggccgactactccgccgcgctggaccccgcctacaccacgctggagttcgagaacgtccaggtgctcaccatgggcaacgacaccagcccgtccgaggggaccaacctgaacgcccccaacagcctgggcgtgtccgccctctgcgccatctgcggggaccgggcgacgggcaagcactacggggccagctcctgcgacggctgcaagggcttcttccgccgggccgtccgcaagaaccacatgtacagctgccggttctcccgccagtgcgtggtggaccgggaccgccggaaccagtgccgctactgccggctgaagaagtgcttccgcgccgggatgcggcgcgaggcggtccagaacgagcgggaccgcatcagcacccggcgcgccgcctacgaggactccgccctgcccagcatcaacgccctcctgcaggcggaggtgctgtcccggcagatcgccgcccccgtgagcggcatcaacggggacatccgcgcccggcgcatcgcctccatcgcggacgtctgcgagagcatgaaggagcagctcctggtgctggtggagtgggccaagtacatcccggccttctgcgagctccccctggacgaccaggtcgccctgctccgcgcccacgcgggcgagcacctcctgctgggggccaccaagcggtccatggtgttcaaggacgtgctgctgctcggcaacgactacatcgtcccccgccactgccccgagctggccgagatgagccgggtgtccatccgcatcctggacgagctcgtgctgccgttccaggagctgcagatcgacgacaacgagtacgcctacctcaaggccatcatcttcttcgaccccgacgcgaagggcctgagcgaccccgggaagatcaagcggctgcgcgcccaggtccaggtgagcctcgaggactacatcaacgaccggcagtacgactcccgcggccggttcggggagctgctgctcctgctgcccaccctccagagcatcacgtggcagatgatcgagcagatccagttcatcaagctgttcggcatggccaagatcgacaacctgctccaggagatgctgctgtgaggactagttataagactgactagcccgatgggcctcccaacgggccctcctcccctccttgcaccgagattaataaaaaaaaaaaaaaaaaaaaaaaaaaaaaaaaaaaaaaaaaaaaaaaaaaaaaaaaaaaaaaaatgcatcccccccccccccccccccccccccccccccaaaggctcttttcagagccaccagaatt

SEQ ID NO: 2113 - RNA, 1345 nt, synthetic construct
  misc_feature 1..1345: note = mRNA i-3 (A64-N5-C30-hSL-N5) (opt1) from Homo sapiens__NP_000448.3__HNF4A(1-375)(S87A_K106R_K108R_K126R_K 127R_S142A_S143A_S148A_T166A_S167A_K300R_K307R_K309R_S313A_ S378A_T429A_T432A_S436A_K458R_S461E)
  source 1..1345: mol_type = other RNA
aggagaaagcttaccatgcgcctgagcaagaccctcgtggacatggacatggccgactactccgccgcgctggaccccgcctacaccacgctggagttcgagaacgtccaggtgctcaccatgggcaacgacaccagcccgtccgaggggaccaacctgaacgcccccaacagcctgggcgtgtccgccctctgcgccatctgcggggaccgggcgacgggcaagcactacggggccagctcctgcgacggctgcaagggcttcttccgccgggccgtccgcaagaaccacatgtacagctgccggttctcccgccagtgcgtggtggaccgggaccgccggaaccagtgccgctactgccggctgaagaagtgcttccgcgccgggatgcggcgcgaggcggtccagaacgagcgggaccgcatcagcacccggcgcgccgcctacgaggactccgccctgcccagcatcaacgccctcctgcaggcggaggtgctgtcccggcagatcgccgcccccgtgagcggcatcaacggggacatccgcgccaagaagatcgcctccatcgcggacgtctgcgagagcatgaaggagcagctcctggtgctggtggagtgggccaagtacatcccggccttctgcgagctccccctggacgaccaggtcgccctgctccgggcccacgcgggcgagcacctcctgctgggggccaccaagcgctccatggtgttcaaggacgtgctgctgctcggcaacgactacatcgtcccccgccactgccccgagctggccgagatgagccgggtgtccatccgcatcctggacgagctcgtgctgccgttccaggagctgcagatcgacgacaacgagtacgcctacctcaaggccatcatcttcttcgaccccgacgcgcggggcctgagcgaccccgggcgcatccggcgcctgcgggcccaggtccaggtgagcctcgaggactacatcaacgaccgccagtacgactcccggggccgcttcggggagctgctgctcctgctgcccaccctccagagcatcacgtggcagatgatcgagcagatccagttcatcaagctgttcggcatggccaagatcgacaacctgctccaggagatgctgctgtgaggactagttataagactgactagcccgatgggcctcccaacgggccctcctcccctccttgcaccgagattaataaaaaaaaaaaaaaaaaaaaaaaaaaaaaaaaaaaaaaaaaaaaaaaaaaaaaaaaaaaaaaaatgcatcccccccccccccccccccccccccccccccaaaggctcttttcagagccaccagaatt

SEQ ID NO: 2114 - RNA, 1345 nt, synthetic construct; identical to SEQ ID NO: 2107
  misc_feature 1..1345: note = mRNA i-3 (A64-N5-C30-hSL-N5) (opt1) from Homo sapiens__NP_000448.3__HNF4A(1-375)(S87A_K106R_K108R_K126R_K 127R_S142A_S143A_S148A_T166A_S167A_S313A_S378A_T429A_T432A_ S436A_K447R_K458R_S461E_K470R)
  source 1..1345: mol_type = other RNA

SEQ ID NO: 2115 - RNA, 1345 nt, synthetic construct
  misc_feature 1..1345: note = mRNA i-3 (A64-N5-C30-hSL-N5) (opt1) from Homo sapiens__NP_000448.3__HNF4A(1-375)(S87A_K106R_K108R_K126R_K 127R_S142A_S143A_S148A_T166A_S167A_K179R_K180R_K234R_K300R_ K307R_K309R_S313A_S378A_T429A_T432A_S436A_K447R_K458R_S461E _K470R)
  source 1..1345: mol_type = other RNA
aggagaaagcttaccatgcgcctgagcaagaccctcgtggacatggacatggccgactactccgccgcgctggaccccgcctacaccacgctggagttcgagaacgtccaggtgctcaccatgggcaacgacaccagcccgtccgaggggaccaacctgaacgcccccaacagcctgggcgtgtccgccctctgcgccatctgcggggaccgggcgacgggcaagcactacggggccagctcctgcgacggctgcaagggcttcttccgccgggccgtccgcaagaaccacatgtacagctgccggttctcccgccagtgcgtggtggaccgggaccgccggaaccagtgccgctactgccggctgaagaagtgcttccgcgccgggatgcggcgcgaggcggtccagaacgagcgggaccgcatcagcacccggcgcgccgcctacgaggactccgccctgcccagcatcaacgccctcctgcaggcggaggtgctgtcccggcagatcgccgcccccgtgagcggcatcaacggggacatccgcgcccggcgcatcgcctccatcgcggacgtctgcgagagcatgaaggagcagctcctggtgctggtggagtgggccaagtacatcccggccttctgcgagctccccctggacgaccaggtcgccctgctccgcgcccacgcgggcgagcacctcctgctgggggccacccggcgctccatggtgttcaaggacgtgctgctgctcggcaacgactacatcgtcccccggcactgccccgagctggccgagatgagccgcgtgtccatccggatcctggacgagctcgtgctgccgttccaggagctgcagatcgacgacaacgagtacgcctacctcaaggccatcatcttcttcgaccccgacgcgcgcggcctgagcgaccccgggcggatccgccggctgcgcgcccaggtccaggtgagcctcgaggactacatcaacgaccggcagtacgactcccgcggccggttcggggagctgctgctcctgctgcccaccctccagagcatcacgtggcagatgatcgagcagatccagttcatcaagctgttcggcatggccaagatcgacaacctgctccaggagatgctgctgtgaggactagttataagactgactagcccgatgggcctcccaacgggccctcctcccctccttgcaccgagattaataaaaaaaaaaaaaaaaaaaaaaaaaaaaaaaaaaaaaaaaaaaaaaaaaaaaaaaaaaaaaaaatgcatcccccccccccccccccccccccccccccccaaaggctcttttcagagccaccagaatt

SEQ ID NO: 2116 - RNA, 1345 nt, synthetic construct
  misc_feature 1..1345: note = mRNA i-3 (A64-N5-C30-hSL-N5) (opt1) from Homo sapiens__NP_000448.3__HNF4A(1-375)(S87A_S95A_S99A_K106R_K10 8R_K126R_K127R_S142A_S143A_S148A_T166A_S167A_S313A_S378A_T4 29A_T432A_S436A_K458R_S461E)
  source 1..1345: mol_type = other RNA
aggagaaagcttaccatgcgcctgagcaagaccctcgtggacatggacatggccgactactccgccgcgctggaccccgcctacaccacgctggagttcgagaacgtccaggtgctcaccatgggcaacgacaccagcccgtccgaggggaccaacctgaacgcccccaacagcctgggcgtgtccgccctctgcgccatctgcggggaccgggcgacgggcaagcactacggggccagctcctgcgacggctgcaagggcttcttccgccgggccgtccgcaagaaccacatgtacgcctgccggttcgcgcgccagtgcgtggtggaccgggaccgccggaaccagtgccgctactgccggctgaagaagtgcttccgcgccgggatgcggcgcgaggccgtccagaacgagcgggaccgcatcagcacccggcgcgccgcctacgaggactccgcgctgcccagcatcaacgccctcctgcaggccgaggtgctgtcccggcagatcgccgcccccgtgagcggcatcaacggggacatccgcgcgaagaagatcgcctccatcgccgacgtctgcgagagcatgaaggagcagctcctggtgctggtggagtgggccaagtacatcccggccttctgcgagctccccctggacgaccaggtcgcgctgctccgggcccacgccggcgagcacctcctgctgggggccaccaagcgctccatggtgttcaaggacgtgctgctgctcggcaacgactacatcgtcccccgccactgccccgagctggccgagatgagccgggtgtccatccgcatcctggacgagctcgtgctgccgttccaggagctgcagatcgacgacaacgagtacgcgtacctcaaggccatcatcttcttcgaccccgacgccaagggcctgagcgaccccgggaagatcaagcggctgcgcgcccaggtccaggtgtccctcgaggactacatcaacgaccggcagtacgacagccgcggccggttcggggagctgctgctcctgctgcccaccctccagagcatcacgtggcagatgatcgagcagatccagttcatcaagctgttcggcatggcgaagatcgacaacctgctccaggagatgctgctgtgaggactagttataagactgactagcccgatgggcctcccaacgggccctcctcccctccttgcaccgagattaataaaaaaaaaaaaaaaaaaaaaaaaaaaaaaaaaaaaaaaaaaaaaaaaaaaaaaaaaaaaaaaatgcatcccccccccccccccccccccccccccccccaaaggctcttttcagagccaccagaatt

SEQ ID NO: 2117 - RNA, 1345 nt, synthetic construct
  misc_feature 1..1345: note = mRNA i-3 (A64-N5-C30-hSL-N5) (opt1) from Homo sapiens__NP_000448.3__HNF4A(1-375)(S87A_K106R_K108R_K126R_K 127R_S138A_T139A_S142A_S143A_S148A_T166A_S167A_S313A_S378A_ T429A_T432A_S436A_K458R_S461E)
  source 1..1345: mol_type = other RNA
aggagaaagcttaccatgcgcctgagcaagaccctcgtggacatggacatggccgactactccgccgcgctggaccccgcctacaccacgctggagttcgagaacgtccaggtgctcaccatgggcaacgacaccagcccgtccgaggggaccaacctgaacgcccccaacagcctgggcgtgtccgccctctgcgccatctgcggggaccgggcgacgggcaagcactacggggccagctcctgcgacggctgcaagggcttcttccgccgggccgtccgcaagaaccacatgtacagctgccggttctcccgccagtgcgtggtggaccgggaccgccggaaccagtgccgctactgccggctgaagaagtgcttccgcgccgggatgcggcgcgaggcggtccagaacgagcgggaccgcatcgccgcccggcgcgccgcctacgaggacagcgcgctgccctccatcaacgccctcctgcaggccgaggtgctgagccggcagatcgccgcccccgtgtccggcatcaacggggacatccgcgcgaagaagatcgccagcatcgccgacgtctgcgagtccatgaaggagcagctcctggtgctggtggagtgggccaagtacatcccggccttctgcgagctccccctggacgaccaggtcgcgctgctccgggcccacgccggcgagcacctcctgctgggggccaccaagcgcagcatggtgttcaaggacgtgctgctgctcggcaacgactacatcgtcccccgccactgccccgagctggccgagatgtcccgggtgagcatccgcatcctggacgagctcgtgctgccgttccaggagctgcagatcgacgacaacgagtacgcgtacctcaaggccatcatcttcttcgaccccgacgccaagggcctgtccgaccccgggaagatcaagcggctgcgcgcccaggtccaggtgagcctcgaggactacatcaacgaccggcagtacgacagccgcggccggttcggggagctgctgctcctgctgcccaccctccagtccatcacctggcagatgatcgagcagatccagttcatcaagctgttcggcatggcgaagatcgacaacctgctccaggagatgctgctgtgaggactagttataagactgactagcccgatgggcctcccaacgggccctcctcccctccttgcaccgagattaataaaaaaaaaaaaaaaaaaaaaaaaaaaaaaaaaaaaaaaaaaaaaaaaaaaaaaaaaaaaaaaatgcatcccccccccccccccccccccccccccccccaaaggctcttttcagagccaccagaatt

SEQ ID NO: 2118 - RNA, 1345 nt, synthetic construct
  misc_feature 1..1345: note = mRNA i-3 (A64-N5-C30-hSL-N5) (opt1) from Homo sapiens__NP_000448.3__HNF4A(1-375)(S87A_S95A_S99A_K106R_K10 8R_K126R_K127R_S138A_T139A_S142A_S143A_S148A_T166A_S167A_S3 13A_S378A_T429A_T432A_S436A_K458R_S461E)
  source 1..1345: mol_type = other RNA
aggagaaagcttaccatgcgcctgagcaagaccctcgtggacatggacatggccgactactccgccgcgctggaccccgcctacaccacgctggagttcgagaacgtccaggtgctcaccatgggcaacgacaccagcccgtccgaggggaccaacctgaacgcccccaacagcctgggcgtgtccgccctctgcgccatctgcggggaccgggcgacgggcaagcactacggggccagctcctgcgacggctgcaagggcttcttccgccgggccgtccgcaagaaccacatgtacgcctgccggttcgcgcgccagtgcgtggtggaccgggaccgccggaaccagtgccgctactgccggctgaagaagtgcttccgcgccgggatgcggcgcgaggccgtccagaacgagcgggaccgcatcgccgcccggcgcgcggcctacgaggacagcgccctgccctccatcaacgccctcctgcaggccgaggtgctgagccggcagatcgcggcccccgtgtccggcatcaacggggacatccgcgccaagaagatcgccagcatcgccgacgtctgcgagtccatgaaggagcagctcctggtgctggtggagtgggcgaagtacatcccggccttctgcgagctccccctggacgaccaggtcgccctgctccgggcccacgccggcgagcacctcctgctgggggcgaccaagcgcagcatggtgttcaaggacgtgctgctgctcggcaacgactacatcgtcccccgccactgccccgagctggccgagatgtcccgggtgagcatccgcatcctggacgagctcgtgctgccgttccaggagctgcagatcgacgacaacgagtacgcctacctcaaggccatcatcttcttcgaccccgacgcgaagggcctgtccgaccccgggaagatcaagcggctgcgcgcccaggtccaggtgagcctcgaggactacatcaacgaccggcagtacgactcccgcggccggttcggggagctgctgctcctgctgcccaccctccagagcatcacctggcagatgatcgagcagatccagttcatcaagctgttcggcatggccaagatcgacaacctgctccaggagatgctgctgtgaggactagttataagactgactagcccgatgggcctcccaacgggccctcctcccctccttgcaccgagattaataaaaaaaaaaaaaaaaaaaaaaaaaaaaaaaaaaaaaaaaaaaaaaaaaaaaaaaaaaaaaaaatgcatcccccccccccccccccccccccccccccccaaaggctcttttcagagccaccagaatt

SEQ ID NO: 2119 - RNA, 1345 nt, synthetic construct
  misc_feature 1..1345: note = mRNA i-3 (A64-N5-C30-hSL-N5) (opt2) from Homo sapiens__NP_000448.3__HNF4A(1-375)
  source 1..1345: mol_type = other RNA
aggagaaagcttaccatgcgcctctccaagaccctcgtcgacatggacatggccgactactccgccgccctcgaccccgcctacaccaccctcgagttcgagaacgtccaggtcctcaccatgggcaacgacacctccccctccgagggcaccaacctcaacgcccccaactccctcggcgtctccgccctctgcgccatctgcggcgaccgcgccaccggcaagcactacggcgcctcctcctgcgacggctgcaagggcttcttccgccgctccgtccgcaagaaccacatgtactcctgccgcttctcccgccagtgcgtcgtcgacaaggacaagcgcaaccagtgccgctactgccgcctcaagaagtgcttccgcgccggcatgaagaaggaggccgtccagaacgagcgcgaccgcatctccacccgccgctcctcctacgaggactcctccctcccctccatcaacgccctcctccaggccgaggtcctctcccgccagatcacctcccccgtctccggcatcaacggcgacatccgcgccaagaagatcgcctccatcgccgacgtctgcgagtccatgaaggagcagctcctcgtcctcgtcgagtgggccaagtacatccccgccttctgcgagctccccctcgacgaccaggtcgccctcctccgcgcccacgccggcgagcacctcctcctcggcgccaccaagcgctccatggtcttcaaggacgtcctcctcctcggcaacgactacatcgtcccccgccactgccccgagctcgccgagatgtcccgcgtctccatccgcatcctcgacgagctcgtcctccccttccaggagctccagatcgacgacaacgagtacgcctacctcaaggccatcatcttcttcgaccccgacgccaagggcctctccgaccccggcaagatcaagcgcctccgctcccaggtccaggtctccctcgaggactacatcaacgaccgccagtacgactcgcgcgggcgcttcggcgagctcctcctcctcctccccaccctccagtccatcacctggcagatgatcgagcagatccagttcatcaagctgttcggcatggccaagatcgacaacctcctccaggagatgctcctctgaggactagttataagactgactagcccgatgggcctcccaacgggccctcctcccctccttgcaccgagattaataaaaaaaaaaaaaaaaaaaaaaaaaaaaaaaaaaaaaaaaaaaaaaaaaaaaaaaaaaaaaaaatgcatcccccccccccccccccccccccccccccccaaaggctcttttcagagccaccagaatt

SEQ ID NO: 2120 - RNA, 1345 nt, synthetic construct
  misc_feature 1..1345: note = mRNA i-3 (A64-N5-C30-hSL-N5) (opt2) from Homo sapiens__NP_000448.3__HNF4A(1-375)(S313A)
  source 1..1345: mol_type = other RNA
aggagaaagcttaccatgcgcctctccaagaccctcgtcgacatggacatggccgactactccgccgccctcgaccccgcctacaccaccctcgagttcgagaacgtccaggtcctcaccatgggcaacgacacctccccctccgagggcaccaacctcaacgcccccaactccctcggcgtctccgccctctgcgccatctgcggcgaccgcgccaccggcaagcactacggcgcctcctcctgcgacggctgcaagggcttcttccgccgctccgtccgcaagaaccacatgtactcctgccgcttctcccgccagtgcgtcgtcgacaaggacaagcgcaaccagtgccgctactgccgcctcaagaagtgcttccgcgccggcatgaagaaggaggccgtccagaacgagcgcgaccgcatctccacccgccgctcctcctacgaggactcctccctcccctccatcaacgccctcctccaggccgaggtcctctcccgccagatcacctcccccgtctccggcatcaacggcgacatccgcgccaagaagatcgcctccatcgccgacgtctgcgagtccatgaaggagcagctcctcgtcctcgtcgagtgggccaagtacatccccgccttctgcgagctccccctcgacgaccaggtcgccctcctccgcgcccacgccggcgagcacctcctcctcggcgccaccaagcgctccatggtcttcaaggacgtcctcctcctcggcaacgactacatcgtcccccgccactgccccgagctcgccgagatgtcccgcgtctccatccgcatcctcgacgagctcgtcctccccttccaggagctccagatcgacgacaacgagtacgcctacctcaaggccatcatcttcttcgaccccgacgccaagggcctctccgaccccggcaagatcaagcgcctccgcgcccaggtccaggtctccctcgaggactacatcaacgaccgccagtacgactcccgcggccgcttcggcgagctcctcctcctcctccccaccctccagtccatcacctggcagatgatcgagcagatccagttcatcaagctcttcggcatggccaagatcgacaacctcctccaggagatgctcctctgaggactagttataagactgactagcccgatgggcctcccaacgggccctcctcccctccttgcaccgagattaataaaaaaaaaaaaaaaaaaaaaaaaaaaaaaaaaaaaaaaaaaaaaaaaaaaaaaaaaaaaaaaatgcatcccccccccccccccccccccccccccccccaaaggctcttttcagagccaccagaatt

SEQ ID NO: 2121 - RNA, 1345 nt, synthetic construct
  misc_feature 1..1345: note = mRNA i-3 (A64-N5-C30-hSL-N5) (opt2) from Homo sapiens__NP_000448.3__HNF4A(1-375)(S313E)
  source 1..1345: mol_type = other RNA
aggagaaagcttaccatgcgcctctccaagaccctcgtcgacatggacatggccgactactccgccgccctcgaccccgcctacaccaccctcgagttcgagaacgtccaggtcctcaccatgggcaacgacacctccccctccgagggcaccaacctcaacgcccccaactccctcggcgtctccgccctctgcgccatctgcggcgaccgcgccaccggcaagcactacggcgcctcctcctgcgacggctgcaagggcttcttccgccgctccgtccgcaagaaccacatgtactcctgccgcttctcccgccagtgcgtcgtcgacaaggacaagcgcaaccagtgccgctactgccgcctcaagaagtgcttccgcgccggcatgaagaaggaggccgtccagaacgagcgcgaccgcatctccacccgccgctcctcctacgaggactcctccctcccctccatcaacgccctcctccaggccgaggtcctctcccgccagatcacctcccccgtctccggcatcaacggcgacatccgcgccaagaagatcgcctccatcgccgacgtctgcgagtccatgaaggagcagctcctcgtcctcgtcgagtgggccaagtacatccccgccttctgcgagctccccctcgacgaccaggtcgccctcctccgcgcccacgccggcgagcacctcctcctcggcgccaccaagcgctccatggtcttcaaggacgtcctcctcctcggcaacgactacatcgtcccccgccactgccccgagctcgccgagatgtcccgcgtctccatccgcatcctcgacgagctcgtcctccccttccaggagctccagatcgacgacaacgagtacgcctacctcaaggccatcatcttcttcgaccccgacgccaagggcctctccgaccccggcaagatcaagcgcctccgcgagcaggtccaggtctccctcgaggactacatcaacgaccgccagtacgactcccgcggccgcttcggcgagctcctcctcctcctccccaccctccagtccatcacctggcagatgatcgagcagatccagttcatcaagctcttcggcatggccaagatcgacaacctcctccaggagatgctcctctgaggactagttataagactgactagcccgatgggcctcccaacgggccctcctcccctccttgcaccgagattaataaaaaaaaaaaaaaaaaaaaaaaaaaaaaaaaaaaaaaaaaaaaaaaaaaaaaaaaaaaaaaaatgcatcccccccccccccccccccccccccccccccaaaggctcttttcagagccaccagaatt

SEQ ID NO: 2122 - RNA, 1345 nt, synthetic construct
  misc_feature 1..1345: note = mRNA i-3 (A64-N5-C30-hSL-N5) (opt2) from Homo sapiens__NP_000448.3__HNF4A(1-375)(S142A_S143A)
  source 1..1345: mol_type = other RNA
aggagaaagcttaccatgcgcctctccaagaccctcgtcgacatggacatggccgactactccgccgccctcgaccccgcctacaccaccctcgagttcgagaacgtccaggtcctcaccatgggcaacgacacctccccctccgagggcaccaacctcaacgcccccaactccctcggcgtctccgccctctgcgccatctgcggcgaccgcgccaccggcaagcactacggcgcctcctcctgcgacggctgcaagggcttcttccgccgctccgtccgcaagaaccacatgtactcctgccgcttctcccgccagtgcgtcgtcgacaaggacaagcgcaaccagtgccgctactgccgcctcaagaagtgcttccgcgccggcatgaagaaggaggccgtccagaacgagcgcgaccgcatctccacccgccgcgccgcctacgaggactcctccctcccctccatcaacgccctcctccaggccgaggtcctctcccgccagatcacctcccccgtctccggcatcaacggcgacatccgcgccaagaagatcgcctccatcgccgacgtctgcgagtccatgaaggagcagctcctcgtcctcgtcgagtgggccaagtacatccccgccttctgcgagctccccctcgacgaccaggtcgccctcctccgcgcccacgccggcgagcacctcctcctcggcgccaccaagcgctccatggtcttcaaggacgtcctcctcctcggcaacgactacatcgtcccccgccactgccccgagctcgccgagatgtcccgcgtctccatccgcatcctcgacgagctcgtcctccccttccaggagctccagatcgacgacaacgagtacgcctacctcaaggccatcatcttcttcgaccccgacgccaagggcctctccgaccccggcaagatcaagcgcctccgctcccaggtccaggtctccctcgaggactacatcaacgaccgccagtacgactcccgcggccgcttcggcgagctcctcctcctcctccccaccctccagtccatcacctggcagatgatcgagcagatccagttcatcaagctcttcggcatggccaagatcgacaacctcctccaggagatgctcctctgaggactagttataagactgactagcccgatgggcctcccaacgggccctcctcccctccttgcaccgagattaataaaaaaaaaaaaaaaaaaaaaaaaaaaaaaaaaaaaaaaaaaaaaaaaaaaaaaaaaaaaaaaatgcatcccccccccccccccccccccccccccccccaaaggctcttttcagagccaccagaatt

SEQ ID NO: 2123 - RNA, 1345 nt, synthetic construct
  misc_feature 1..1345: note = mRNA i-3 (A64-N5-C30-hSL-N5) (opt2) from Homo sapiens__NP_000448.3__HNF4A(1-375)(S142E_S143E)
  source 1..1345: mol_type = other RNA
aggagaaagcttaccatgcgcctctccaagaccctcgtcgacatggacatggccgactactccgccgccctcgaccccgcctacaccaccctcgagttcgagaacgtccaggtcctcaccatgggcaacgacacctccccctccgagggcaccaacctcaacgcccccaactccctcggcgtctccgccctctgcgccatctgcggcgaccgcgccaccggcaagcactacggcgcctcctcctgcgacggctgcaagggcttcttccgccgctccgtccgcaagaaccacatgtactcctgccgcttctcccgccagtgcgtcgtcgacaaggacaagcgcaaccagtgccgctactgccgcctcaagaagtgcttccgcgccggcatgaagaaggaggccgtccagaacgagcgcgaccgcatctccacccgccgcgaggagtacgaggactcctccctcccctccatcaacgccctcctccaggccgaggtcctctcccgccagatcacctcccccgtctccggcatcaacggcgacatccgcgccaagaagatcgcctccatcgccgacgtctgcgagtccatgaaggagcagctcctcgtcctcgtcgagtgggccaagtacatccccgccttctgcgagctccccctcgacgaccaggtcgccctcctccgcgcccacgccggcgagcacctcctcctcggcgccaccaagcgctccatggtcttcaaggacgtcctcctcctcggcaacgactacatcgtcccccgccactgccccgagctcgccgagatgtcccgcgtctccatccgcatcctcgacgagctcgtcctccccttccaggagctccagatcgacgacaacgagtacgcctacctcaaggccatcatcttcttcgaccccgacgccaagggcctctccgaccccggcaagatcaagcgcctccgctcccaggtccaggtctccctcgaggactacatcaacgaccgccagtacgactcccgcggccgcttcggcgagctcctcctcctcctccccaccctccagtccatcacctggcagatgatcgagcagatccagttcatcaagctcttcggcatggccaagatcgacaacctcctccaggagatgctcctctgaggactagttataagactgactagcccgatgggcctcccaacgggccctcctcccctccttgcaccgagattaataaaaaaaaaaaaaaaaaaaaaaaaaaaaaaaaaaaaaaaaaaaaaaaaaaaaaaaaaaaaaaaatgcatcccccccccccccccccccccccccccccccaaaggctcttttcagagccaccagaatt

SEQ ID NO: 2124 - RNA, 1345 nt, synthetic construct
  misc_feature 1..1345: note = mRNA i-3 (A64-N5-C30-hSL-N5) (opt2) from Homo sapiens__NP_000448.3__HNF4A(1-375)(S143A)
  source 1..1345: mol_type = other RNA
aggagaaagcttaccatgcgcctctccaagaccctcgtcgacatggacatggccgactactccgccgccctcgaccccgcctacaccaccctcgagttcgagaacgtccaggtcctcaccatgggcaacgacacctccccctccgagggcaccaacctcaacgcccccaactccctcggcgtctccgccctctgcgccatctgcggcgaccgcgccaccggcaagcactacggcgcctcctcctgcgacggctgcaagggcttcttccgccgctccgtccgcaagaaccacatgtactcctgccgcttctcccgccagtgcgtcgtcgacaaggacaagcgcaaccagtgccgctactgccgcctcaagaagtgcttccgcgccggcatgaagaaggaggccgtccagaacgagcgcgaccgcatctccacccgccgctccgcctacgaggactcctccctcccctccatcaacgccctcctccaggccgaggtcctctcccgccagatcacctcccccgtctccggcatcaacggcgacatccgcgccaagaagatcgcctccatcgccgacgtctgcgagtccatgaaggagcagctcctcgtcctcgtcgagtgggccaagtacatccccgccttctgcgagctccccctcgacgaccaggtcgccctcctccgcgcccacgccggcgagcacctcctcctcggcgccaccaagcgctccatggtcttcaaggacgtcctcctcctcggcaacgactacatcgtcccccgccactgccccgagctcgccgagatgtcccgcgtctccatccgcatcctcgacgagctcgtcctccccttccaggagctccagatcgacgacaacgagtacgcctacctcaaggccatcatcttcttcgaccccgacgccaagggcctctccgaccccggcaagatcaagcgcctccgctcccaggtccaggtctccctcgaggactacatcaacgaccgccagtacgactcccgcggccgcttcggcgagctcctcctcctcctccccaccctccagtccatcacctggcagatgatcgagcagatccagttcatcaagctcttcggcatggccaagatcgacaacctcctccaggagatgctcctctgaggactagttataagactgactagcccgatgggcctcccaacgggccctcctcccctccttgcaccgagattaataaaaaaaaaaaaaaaaaaaaaaaaaaaaaaaaaaaaaaaaaaaaaaaaaaaaaaaaaaaaaaaatgcatcccccccccccccccccccccccccccccccaaaggctcttttcagagccaccagaatt

SEQ ID NO: 2125 - RNA, 1345 nt, synthetic construct
  misc_feature 1..1345: note = mRNA i-3 (A64-N5-C30-hSL-N5) (opt2) from Homo sapiens__NP_000448.3__HNF4A(1-375)(T166A)
  source 1..1345: mol_type = other RNA
aggagaaagcttaccatgcgcctctccaagaccctcgtcgacatggacatggccgactactccgccgccctcgaccccgcctacaccaccctcgagttcgagaacgtccaggtcctcaccatgggcaacgacacctccccctccgagggcaccaacctcaacgcccccaactccctcggcgtctccgccctctgcgccatctgcggcgaccgcgccaccggcaagcactacggcgcctcctcctgcgacggctgcaagggcttcttccgccgctccgtccgcaagaaccacatgtactcctgccgcttctcccgccagtgcgtcgtcgacaaggacaagcgcaaccagtgccgctactgccgcctcaagaagtgcttccgcgccggcatgaagaaggaggccgtccagaacgagcgcgaccgcatctccacccgccgctcctcctacgaggactcctccctcccctccatcaacgccctcctccaggccgaggtcctctcccgccagatcgcctcccccgtctccggcatcaacggcgacatccgcgccaagaagatcgcctccatcgccgacgtctgcgagtccatgaaggagcagctcctcgtcctcgtcgagtgggccaagtacatccccgccttctgcgagctccccctcgacgaccaggtcgccctcctccgcgcccacgccggcgagcacctcctcctcggcgccaccaagcgctccatggtcttcaaggacgtcctcctcctcggcaacgactacatcgtcccccgccactgccccgagctcgccgagatgtcccgcgtctccatccgcatcctcgacgagctcgtcctccccttccaggagctccagatcgacgacaacgagtacgcctacctcaaggccatcatcttcttcgaccccgacgccaagggcctctccgaccccggcaagatcaagcgcctccgctcccaggtccaggtctccctcgaggactacatcaacgaccgccagtacgactcccgcggccgcttcggcgagctcctcctcctcctccccaccctccagtccatcacctggcagatgatcgagcagatccagttcatcaagctcttcggcatggccaagatcgacaacctcctccaggagatgctcctctgaggactagttataagactgactagcccgatgggcctcccaacgggccctcctcccctccttgcaccgagattaataaaaaaaaaaaaaaaaaaaaaaaaaaaaaaaaaaaaaaaaaaaaaaaaaaaaaaaaaaaaaaaatgcatcccccccccccccccccccccccccccccccaaaggctcttttcagagccaccagaatt

SEQ ID NO: 2126 - RNA, 1345 nt, synthetic construct
  misc_feature 1..1345: note = mRNA i-3 (A64-N5-C30-hSL-N5) (opt2) from Homo sapiens__NP_000448.3__HNF4A(1-375)(S167E)
  source 1..1345: mol_type = other RNA
aggagaaagcttaccatgcgcctctccaagaccctcgtcgacatggacatggccgactactccgccgccctcgaccccgcctacaccaccctcgagttcgagaacgtccaggtcctcaccatgggcaacgacacctccccctccgagggcaccaacctcaacgcccccaactccctcggcgtctccgccctctgcgccatctgcggcgaccgcgccaccggcaagcactacggcgcctcctcctgcgacggctgcaagggcttcttccgccgctccgtccgcaagaaccacatgtactcctgccgcttctcccgccagtgcgtcgtcgacaaggacaagcgcaaccagtgccgctactgccgcctcaagaagtgcttccgcgccggcatgaagaaggaggccgtccagaacgagcgcgaccgcatctccacccgccgctcctcctacgaggactcctccctcccctccatcaacgccctcctccaggccgaggtcctctcccgccagatcaccgagcccgtctccggcatcaacggcgacatccgcgccaagaagatcgcctccatcgccgacgtctgcgagtccatgaaggagcagctcctcgtcctcgtcgagtgggccaagtacatccccgccttctgcgagctccccctcgacgaccaggtcgccctcctccgcgcccacgccggcgagcacctcctcctcggcgccaccaagcgctccatggtcttcaaggacgtcctcctcctcggcaacgactacatcgtcccccgccactgccccgagctcgccgagatgtcccgcgtctccatccgcatcctcgacgagctcgtcctccccttccaggagctccagatcgacgacaacgagtacgcctacctcaaggccatcatcttcttcgaccccgacgccaagggcctctccgaccccggcaagatcaagcgcctccgctcccaggtccaggtctccctcgaggactacatcaacgaccgccagtacgactcccgcggccgcttcggcgagctcctcctcctcctccccaccctccagtccatcacctggcagatgatcgagcagatccagttcatcaagctcttcggcatggccaagatcgacaacctcctccaggagatgctcctctgaggactagttataagactgactagcccgatgggcctcccaacgggccctcctcccctccttgcaccgagattaataaaaaaaaaaaaaaaaaaaaaaaaaaaaaaaaaaaaaaaaaaaaaaaaaaaaaaaaaaaaaaaatgcatcccccccccccccccccccccccccccccccaaaggctcttttcagagccaccagaatt

SEQ ID NO: 2127 - RNA, 1345 nt, synthetic construct
  misc_feature 1..1345: note = mRNA i-3 (A64-N5-C30-hSL-N5) (opt2) from Homo sapiens__NP_000448.3__HNF4A(1-375)(S167A)
  source 1..1345: mol_type = other RNA
aggagaaagcttaccatgcgcctctccaagaccctcgtcgacatggacatggccgactactccgccgccctcgaccccgcctacaccaccctcgagttcgagaacgtccaggtcctcaccatgggcaacgacacctccccctccgagggcaccaacctcaacgcccccaactccctcggcgtctccgccctctgcgccatctgcggcgaccgcgccaccggcaagcactacggcgcctcctcctgcgacggctgcaagggcttcttccgccgctccgtccgcaagaaccacatgtactcctgccgcttctcccgccagtgcgtcgtcgacaaggacaagcgcaaccagtgccgctactgccgcctcaagaagtgcttccgcgccggcatgaagaaggaggccgtccagaacgagcgcgaccgcatctccacccgccgctcctcctacgaggactcctccctcccctccatcaacgccctcctccaggccgaggtcctctcccgccagatcaccgcccccgtctccggcatcaacggcgacatccgcgccaagaagatcgcctccatcgccgacgtctgcgagtccatgaaggagcagctcctcgtcctcgtcgagtgggccaagtacatccccgccttctgcgagctccccctcgacgaccaggtcgccctcctccgcgcccacgccggcgagcacctcctcctcggcgccaccaagcgctccatggtcttcaaggacgtcctcctcctcggcaacgactacatcgtcccccgccactgccccgagctcgccgagatgtcccgcgtctccatccgcatcctcgacgagctcgtcctccccttccaggagctccagatcgacgacaacgagtacgcctacctcaaggccatcatcttcttcgaccccgacgccaagggcctctccgaccccggcaagatcaagcgcctccgctcccaggtccaggtctccctcgaggactacatcaacgaccgccagtacgactcccgcggccgcttcggcgagctcctcctcctcctccccaccctccagtccatcacctggcagatgatcgagcagatccagttcatcaagctcttcggcatggccaagatcgacaacctcctccaggagatgctcctctgaggactagttataagactgactagcccgatgggcctcccaacgggccctcctcccctccttgcaccgagattaataaaaaaaaaaaaaaaaaaaaaaaaaaaaaaaaaaaaaaaaaaaaaaaaaaaaaaaaaaaaaaaatgcatcccccccccccccccccccccccccccccccaaaggctcttttcagagccaccagaatt

SEQ ID NO: 2128 - RNA, 1345 nt, synthetic construct; identical to SEQ ID NO: 2127
  misc_feature 1..1345: note = mRNA i-3 (A64-N5-C30-hSL-N5) (opt2) from Homo sapiens__NP_000448.3__HNF4A(1-375)(S167A_S378A_T429A_T432A_ S436A)
  source 1..1345: mol_type = other RNA

SEQ ID NO: 2129 - RNA, 1345 nt, synthetic construct; identical to SEQ ID NO: 2126
  misc_feature 1..1345: note = mRNA i-3 (A64-N5-C30-hSL-N5) (opt2) from Homo sapiens__NP_000448.3__HNF4A(1-375)(S167E_S378E_T429E_T432E_ S436E)
  source 1..1345: mol_type = other RNA

SEQ ID NO: 2130 - RNA, 1345 nt, synthetic construct
  misc_feature 1..1345: note = mRNA i-3 (A64-N5-C30-hSL-N5) (opt2) from Homo sapiens__NP_000448.3__HNF4A(1-375)(S87A)
  source 1..1345: mol_type = other RNA
aggagaaagcttaccatgcgcctctccaagaccctcgtcgacatggacatggccgactactccgccgccctcgaccccgcctacaccaccctcgagttcgagaacgtccaggtcctcaccatgggcaacgacacctccccctccgagggcaccaacctcaacgcccccaactccctcggcgtctccgccctctgcgccatctgcggcgaccgcgccaccggcaagcactacggcgcctcctcctgcgacggctgcaagggcttcttccgccgcgccgtccgcaagaaccacatgtactcctgccgcttctcccgccagtgcgtcgtcgacaaggacaagcgcaaccagtgccgctactgccgcctcaagaagtgcttccgcgccggcatgaagaaggaggccgtccagaacgagcgcgaccgcatctccacccgccgctcctcctacgaggactcctccctcccctccatcaacgccctcctccaggccgaggtcctctcccgccagatcacctcccccgtctccggcatcaacggcgacatccgcgccaagaagatcgcctccatcgccgacgtctgcgagtccatgaaggagcagctcctcgtcctcgtcgagtgggccaagtacatccccgccttctgcgagctccccctcgacgaccaggtcgccctcctccgcgcccacgccggcgagcacctcctcctcggcgccaccaagcgctccatggtcttcaaggacgtcctcctcctcggcaacgactacatcgtcccccgccactgccccgagctcgccgagatgtcccgcgtctccatccgcatcctcgacgagctcgtcctccccttccaggagctccagatcgacgacaacgagtacgcctacctcaaggccatcatcttcttcgaccccgacgccaagggcctctccgaccccggcaagatcaagcgcctccgctcccaggtccaggtctccctcgaggactacatcaacgaccgccagtacgactcccgcggccgcttcggcgagctcctcctcctcctccccaccctccagtccatcacctggcagatgatcgagcagatccagttcatcaagctcttcggcatggccaagatcgacaacctcctccaggagatgctcctctgaggactagttataagactgactagcccgatgggcctcccaacgggccctcctcccctccttgcaccgagattaataaaaaaaaaaaaaaaaaaaaaaaaaaaaaaaaaaaaaaaaaaaaaaaaaaaaaaaaaaaaaaaatgcatcccccccccccccccccccccccccccccccaaaggctcttttcagagccaccagaatt

SEQ ID NO: 2131 - RNA, 1345 nt, synthetic construct
  misc_feature 1..1345: note = mRNA i-3 (A64-N5-C30-hSL-N5) (opt2) from Homo sapiens__NP_000448.3__HNF4A(1-375)(S87E)
  source 1..1345: mol_type = other RNA
aggagaaagcttaccatgcgcctctccaagaccctcgtcgacatggacatggccgactactccgccgccctcgaccccgcctacaccaccctcgagttcgagaacgtccaggtcctcaccatgggcaacgacacctccccctccgagggcaccaacctcaacgcccccaactccctcggcgtctccgccctctgcgccatctgcggcgaccgcgccaccggcaagcactacggcgcctcctcctgcgacggctgcaagggcttcttccgccgcgaggtccgcaagaaccacatgtactcctgccgcttctcccgccagtgcgtcgtcgacaaggacaagcgcaaccagtgccgctactgccgcctcaagaagtgcttccgcgccggcatgaagaaggaggccgtccagaacgagcgcgaccgcatctccacccgccgctcctcctacgaggactcctccctcccctccatcaacgccctcctccaggccgaggtcctctcccgccagatcacctcccccgtctccggcatcaacggcgacatccgcgccaagaagatcgcctccatcgccgacgtctgcgagtccatgaaggagcagctcctcgtcctcgtcgagtgggccaagtacatccccgccttctgcgagctccccctcgacgaccaggtcgccctcctccgcgcccacgccggcgagcacctcctcctcggcgccaccaagcgctccatggtcttcaaggacgtcctcctcctcggcaacgactacatcgtcccccgccactgccccgagctcgccgagatgtcccgcgtctccatccgcatcctcgacgagctcgtcctccccttccaggagctccagatcgacgacaacgagtacgcctacctcaaggccatcatcttcttcgaccccgacgccaagggcctctccgaccccggcaagatcaagcgcctccgctcccaggtccaggtctccctcgaggactacatcaacgaccgccagtacgactcccgcggccgcttcggcgagctcctcctcctcctccccaccctccagtccatcacctggcagatgatcgagcagatccagttcatcaagctcttcggcatggccaagatcgacaacctcctccaggagatgctcctctgaggactagttataagactgactagcccgatgggcctcccaacgggccctcctcccctccttgcaccgagattaataaaaaaaaaaaaaaaaaaaaaaaaaaaaaaaaaaaaaaaaaaaaaaaaaaaaaaaaaaaaaaaatgcatcccccccccccccccccccccccccccccccaaaggctcttttcagagccaccagaatt

SEQ ID NO: 2132 - RNA, 1345 nt, synthetic construct
  misc_feature 1..1345: note = mRNA i-3 (A64-N5-C30-hSL-N5) (opt2) from Homo sapiens__NP_000448.3__HNF4A(1-375)(R2V)
  source 1..1345: mol_type = other RNA
aggagaaagcttaccatggtcctctccaagaccctcgtcgacatggacatggccgactactccgccgccctcgaccccgcctacaccaccctcgagttcgagaacgtccaggtcctcaccatgggcaacgacacctccccctccgagggcaccaacctcaacgcccccaactccctcggcgtctccgccctctgcgccatctgcggcgaccgcgccaccggcaagcactacggcgcctcctcctgcgacggctgcaagggcttcttccgccgctccgtccgcaagaaccacatgtactcctgccgcttctcccgccagtgcgtcgtcgacaaggacaagcgcaaccagtgccgctactgccgcctcaagaagtgcttccgcgccggcatgaagaaggaggccgtccagaacgagcgcgaccgcatctccacccgccgctcctcctacgaggactcctccctcccctccatcaacgccctcctccaggccgaggtcctctcccgccagatcacctcccccgtctccggcatcaacggcgacatccgcgccaagaagatcgcctccatcgccgacgtctgcgagtccatgaaggagcagctcctcgtcctcgtcgagtgggccaagtacatccccgccttctgcgagctccccctcgacgaccaggtcgccctcctccgcgcccacgccggcgagcacctcctcctcggcgccaccaagcgctccatggtcttcaaggacgtcctcctcctcggcaacgactacatcgtcccccgccactgccccgagctcgccgagatgtcccgcgtctccatccgcatcctcgacgagctcgtcctccccttccaggagctccagatcgacgacaacgagtacgcctacctcaaggccatcatcttcttcgaccccgacgccaagggcctctccgaccccggcaagatcaagcgcctccgctcccaggtccaggtctccctcgaggactacatcaacgaccgccagtacgactcccgcggccgcttcggcgagctcctcctcctcctccccaccctccagtccatcacctggcagatgatcgagcagatccagttcatcaagctcttcggcatggccaagatcgacaacctcctccaggagatgctcctctgaggactagttataagactgactagcccgatgggcctcccaacgggccctcctcccctccttgcaccgagattaataaaaaaaaaaaaaaaaaaaaaaaaaaaaaaaaaaaaaaaaaaaaaaaaaaaaaaaaaaaaaaaatgcatcccccccccccccccccccccccccccccccaaaggctcttttcagagccaccagaatt

SEQ ID NO: 2133 - RNA, 1345 nt, synthetic construct
  misc_feature 1..1345: note = mRNA i-3 (A64-N5-C30-hSL-N5) (opt2) from Homo sapiens__NP_000448.3__HNF4A(1-375)(R2V_K5V)
  source 1..1345: mol_type = other RNA
aggagaaagcttaccatggtcctctccgtcaccctcgtcgacatggacatggccgactactccgccgccctcgaccccgcctacaccaccctcgagttcgagaacgtccaggtcctcaccatgggcaacgacacctccccctccgagggcaccaacctcaacgcccccaactccctcggcgtctccgccctctgcgccatctgcggcgaccgcgccaccggcaagcactacggcgcctcctcctgcgacggctgcaagggcttcttccgccgctccgtccgcaagaaccacatgtactcctgccgcttctcccgccagtgcgtcgtcgacaaggacaagcgcaaccagtgccgctactgccgcctcaagaagtgcttccgcgccggcatgaagaaggaggccgtccagaacgagcgcgaccgcatctccacccgccgctcctcctacgaggactcctccctcccctccatcaacgccctcctccaggccgaggtcctctcccgccagatcacctcccccgtctccggcatcaacggcgacatccgcgccaagaagatcgcctccatcgccgacgtctgcgagtccatgaaggagcagctcctcgtcctcgtcgagtgggccaagtacatccccgccttctgcgagctccccctcgacgaccaggtcgccctcctccgcgcccacgccggcgagcacctcctcctcggcgccaccaagcgctccatggtcttcaaggacgtcctcctcctcggcaacgactacatcgtcccccgccactgccccgagctcgccgagatgtcccgcgtctccatccgcatcctcgacgagctcgtcctccccttccaggagctccagatcgacgacaacgagtacgcctacctcaaggccatcatcttcttcgaccccgacgccaagggcctctccgaccccggcaagatcaagcgcctccgctcccaggtccaggtctccctcgaggactacatcaacgaccgccagtacgactcccgcggccgcttcggcgagctcctcctcctcctccccaccctccagtccatcacctggcagatgatcgagcagatccagttcatcaagctcttcggcatggccaagatcgacaacctcctccaggagatgctcctctgaggactagttataagactgactagcccgatgggcctcccaacgggccctcctcccctccttgcaccgagattaataaaaaaaaaaaaaaaaaaaaaaaaaaaaaaaaaaaaaaaaaaaaaaaaaaaaaaaaaaaaaaaatgcatcccccccccccccccccccccccccccccccaaaggctcttttcagagccaccagaatt

SEQ ID NO: 2134 - RNA, 1345 nt, synthetic construct
  misc_feature 1..1345: note = mRNA i-3 (A64-N5-C30-hSL-N5) (opt2) from Homo sapiens__NP_000448.3__HNF4A(1-375)(K179R_K180R)
  source 1..1345: mol_type = other RNA
aggagaaagcttaccatgcgcctctccaagaccctcgtcgacatggacatggccgactactccgccgccctcgaccccgcctacaccaccctcgagttcgagaacgtccaggtcctcaccatgggcaacgacacctccccctccgagggcaccaacctcaacgcccccaactccctcggcgtctccgccctctgcgccatctgcggcgaccgcgccaccggcaagcactacggcgcctcctcctgcgacggctgcaagggcttcttccgccgctccgtccgcaagaaccacatgtactcctgccgcttctcccgccagtgcgtcgtcgacaaggacaagcgcaaccagtgccgctactgccgcctcaagaagtgcttccgcgccggcatgaagaaggaggccgtccagaacgagcgcgaccgcatctccacccgccgctcctcctacgaggactcctccctcccctccatcaacgccctcctccaggccgaggtcctctcccgccagatcacctcccccgtctccggcatcaacggcgacatccgcgcccgccgcatcgcctccatcgccgacgtctgcgagtccatgaaggagcagctcctcgtcctcgtcgagtgggccaagtacatccccgccttctgcgagctccccctcgacgaccaggtcgccctcctccgcgcccacgccggcgagcacctcctcctcggcgccaccaagcgctccatggtcttcaaggacgtcctcctcctcggcaacgactacatcgtcccccgccactgccccgagctcgccgagatgtcccgcgtctccatccgcatcctcgacgagctcgtcctccccttccaggagctccagatcgacgacaacgagtacgcctacctcaaggccatcatcttcttcgaccccgacgccaagggcctctccgaccccggcaagatcaagcgcctccgctcccaggtccaggtctccctcgaggactacatcaacgaccgccagtacgactcccgcggccgcttcggcgagctcctcctcctcctccccaccctccagtccatcacctggcagatgatcgagcagatccagttcatcaagctcttcggcatggccaagatcgacaacctcctccaggagatgctcctctgaggactagttataagactgactagcccgatgggcctcccaacgggccctcctcccctccttgcaccgagattaataaaaaaaaaaaaaaaaaaaaaaaaaaaaaaaaaaaaaaaaaaaaaaaaaaaaaaaaaaaaaaaatgcatcccccccccccccccccccccccccccccccaaaggctcttttcagagccaccagaatt

SEQ ID NO: 2135 - RNA, 1345 nt, synthetic construct
  misc_feature 1..1345: note = mRNA i-3 (A64-N5-C30-hSL-N5) (opt2) from Homo sapiens__NP_000448.3__HNF4A(1-375)(K234R)
  source 1..1345: mol_type = other RNA
aggagaaagcttaccatgcgcctctccaagaccctcgtcgacatggacatggccgactactccgccgccctcgaccccgcctacaccaccctcgagttcgagaacgtccaggtcctcaccatgggcaacgacacctccccctccgagggcaccaacctcaacgcccccaactccctcggcgtctccgccctctgcgccatctgcggcgaccgcgccaccggcaagcactacggcgcctcctcctgcgacggctgcaagggcttcttccgccgctccgtccgcaagaaccacatgtactcctgccgcttctcccgccagtgcgtcgtcgacaaggacaagcgcaaccagtgccgctactgccgcctcaagaagtgcttccgcgccggcatgaagaaggaggccgtccagaacgagcgcgaccgcatctccacccgccgctcctcctacgaggactcctccctcccctccatcaacgccctcctccaggccgaggtcctctcccgccagatcacctcccccgtctccggcatcaacggcgacatccgcgccaagaagatcgcctccatcgccgacgtctgcgagtccatgaaggagcagctcctcgtcctcgtcgagtgggccaagtacatccccgccttctgcgagctccccctcgacgaccaggtcgccctcctccgcgcccacgccggcgagcacctcctcctcggcgccacccgccgctccatggtcttcaaggacgtcctcctcctcggcaacgactacatcgtcccccgccactgccccgagctcgccgagatgtcccgcgtctccatccgcatcctcgacgagctcgtcctccccttccaggagctccagatcgacgacaacgagtacgcctacctcaaggccatcatcttcttcgaccccgacgccaagggcctctccgaccccggcaagatcaagcgcctccgctcccaggtccaggtctccctcgaggactacatcaacgaccgccagtacgactcccgcggccgcttcggcgagctcctcctcctcctccccaccctccagtccatcacctggcagatgatcgagcagatccagttcatcaagctcttcggcatggccaagatcgacaacctcctccaggagatgctcctctgaggactagttataagactgactagcccgatgggcctcccaacgggccctcctcccctccttgcaccgagattaataaaaaaaaaaaaaaaaaaaaaaaaaaaaaaaaaaaaaaaaaaaaaaaaaaaaaaaaaaaaaaaatgcatcccccccccccccccccccccccccccccccaaaggctcttttcagagccaccagaatt

SEQ ID NO: 2136 - RNA, 1345 nt, synthetic construct
  misc_feature 1..1345: note = mRNA i-3 (A64-N5-C30-hSL-N5) (opt2) from Homo sapiens__NP_000448.3__HNF4A(1-375)(K300R)
  source 1..1345: mol_type = other RNA
aggagaaagcttaccatgcgcctctccaagaccctcgtcgacatggacatggccgactactccgccgccctcgaccccgcctacaccaccctcgagttcgagaacgtccaggtcctcaccatgggcaacgacacctccccctccgagggcaccaacctcaacgcccccaactccctcggcgtctccgccctctgcgccatctgcggcgaccgcgccaccggcaagcactacggcgcctcctcctgcgacggctgcaagggcttcttccgccgctccgtccgcaagaaccacatgtactcctgccgcttctcccgccagtgcgtcgtcgacaaggacaagcgcaaccagtgccgctactgccgcctcaagaagtgcttccgcgccggcatgaagaaggaggccgtccagaacgagcgcgaccgcatctccacccgccgctcctcctacgaggactcctccctcccctccatcaacgccctcctccaggccgaggtcctctcccgccagatcacctcccccgtctccggcatcaacggcgacatccgcgccaagaagatcgcctccatcgccgacgtctgcgagtccatgaaggagcagctcctcgtcctcgtcgagtgggccaagtacatccccgccttctgcgagctccccctcgacgaccaggtcgccctcctccgcgcccacgccggcgagcacctcctcctcggcgccaccaagcgctccatggtcttcaaggacgtcctcctcctcggcaacgactacatcgtcccccgccactgccccgagctcgccgagatgtcccgcgtctccatccgcatcctcgacgagctcgtcctccccttccaggagctccagatcgacgacaacgagtacgcctacctcaaggccatcatcttcttcgaccccgacgcccgcggcctctccgaccccggcaagatcaagcgcctccgctcccaggtccaggtctccctcgaggactacatcaacgaccgccagtacgactcccgcggccgcttcggcgagctcctcctcctcctccccaccctccagtccatcacctggcagatgatcgagcagatccagttcatcaagctcttcggcatggccaagatcgacaacctcctccaggagatgctcctctgaggactagttataagactgactagcccgatgggcctcccaacgggccctcctcccctccttgcaccgagattaataaaaaaaaaaaaaaaaaaaaaaaaaaaaaaaaaaaaaaaaaaaaaaaaaaaaaaaaaaaaaaaatgcatcccccccccccccccccccccccccccccccaaaggctcttttcagagccaccagaatt

SEQ ID NO: 2137 - RNA, 1345 nt, synthetic construct
  misc_feature 1..1345: note = mRNA i-3 (A64-N5-C30-hSL-N5) (opt2) from Homo sapiens__NP_000448.3__HNF4A(1-375)(K300R_K307R_K309R)
  source 1..1345: mol_type = other RNA
aggagaaagcttaccatgcgcctctccaagaccctcgtcgacatggacatggccgactactccgccgccctcgaccccgcctacaccaccctcgagttcgagaacgtccaggtcctcaccatgggcaacgacacctccccctccgagggcaccaacctcaacgcccccaactccctcggcgtctccgccctctgcgccatctgcggcgaccgcgccaccggcaagcactacggcgcctcctcctgcgacggctgcaagggcttcttccgccgctccgtccgcaagaaccacatgtactcctgccgcttctcccgccagtgcgtcgtcgacaaggacaagcgcaaccagtgccgctactgccgcctcaagaagtgcttccgcgccggcatgaagaaggaggccgtccagaacgagcgcgaccgcatctccacccgccgctcctcctacgaggactcctccctcccctccatcaacgccctcctccaggccgaggtcctctcccgccagatcacctcccccgtctccggcatcaacggcgacatccgcgccaagaagatcgcctccatcgccgacgtctgcgagtccatgaaggagcagctcctcgtcctcgtcgagtgggccaagtacatccccgccttctgcgagctccccctcgacgaccaggtcgccctcctccgcgcccacgccggcgagcacctcctcctcggcgccaccaagcgctccatggtcttcaaggacgtcctcctcctcggcaacgactacatcgtcccccgccactgccccgagctcgccgagatgtcccgcgtctccatccgcatcctcgacgagctcgtcctccccttccaggagctccagatcgacgacaacgagtacgcctacctcaaggccatcatcttcttcgaccccgacgcccgcggcctctccgaccccggccgcatccgccgcctccgctcccaggtccaggtctccctcgaggactacatcaacgaccgccagtacgactcccgcggccgcttcggcgagctcctcctcctcctccccaccctccagtccatcacctggcagatgatcgagcagatccagttcatcaagctcttcggcatggccaagatcgacaacctcctccaggagatgctcctctgaggactagttataagactgactagcccgatgggcctcccaacgggccctcctcccctccttgcaccgagattaataaaaaaaaaaaaaaaaaaaaaaaaaaaaaaaaaaaaaaaaaaaaaaaaaaaaaaaaaaaaaaaatgcatcccccccccccccccccccccccccccccccaaaggctcttttcagagccaccagaatt

SEQ ID NO: 2138 - RNA, 1345 nt, synthetic construct
  misc_feature 1..1345: note = mRNA i-3 (A64-N5-C30-hSL-N5) (opt2) from Homo sapiens__NP_000448.3__HNF4A(1-375)(K447R_K470R)
  source 1..1345: mol_type = other RNA
aggagaaagcttaccatgcgcctctccaagaccctcgtcgacatggacatggccgactactccgccgccctcgaccccgcctacaccaccctcgagttcgagaacgtccaggtcctcaccatgggcaacgacacctccccctccgagggcaccaacctcaacgcccccaactccctcggcgtctccgccctctgcgccatctgcggcgaccgcgccaccggcaagcactacggcgcctcctcctgcgacggctgcaagggcttcttccgccgctccgtccgcaagaaccacatgtactcctgccgcttctcccgccagtgcgtcgtcgacaaggacaagcgcaaccagtgccgctactgccgcctcaagaagtgcttccgcgccggcatgaagaaggaggccgtccagaacgagcgcgaccgcatctccacccgccgctcctcctacgaggactcctccctcccctccatcaacgccctcctccaggccgaggtcctctcccgccagatcacctcccccgtctccggcatcaacggcgacatccgcgccaagaagatcgcctccatcgccgacgtctgcgagtccatgaaggagcagctcctcgtcctcgtcgagtgggccaagtacatccccgccttctgcgagctccccctcgacgaccaggtcgccctcctccgcgcccacgccggcgagcacctcctcctcggcgccaccaagcgctccatggtcttcaaggacgtcctcctcctcggcaacgactacatcgtcccccgccactgccccgagctcgccgagatgtcccgcgtctccatccgcatcctcgacgagctcgtcctccccttccaggagctccagatcgacgacaacgagtacgcctacctcaaggccatcatcttcttcgaccccgacgccaagggcctctccgaccccggcaagatcaagcgcctccgctcccaggtccaggtctccctcgaggactacatcaacgaccgccagtacgactcccgcggccgcttcggcgagctcctcctcctcctccccaccctccagtccatcacctggcagatgatcgagcagatccagttcatcaagctcttcggcatggccaagatcgacaacctcctccaggagatgctcctctgaggactagttataagactgactagcccgatgggcctcccaacgggccctcctcccctccttgcaccgagattaataaaaaaaaaaaaaaaaaaaaaaaaaaaaaaaaaaaaaaaaaaaaaaaaaaaaaaaaaaaaaaaatgcatcccccccccccccccccccccccccccccccaaaggctcttttcagagccaccagaatt

SEQ ID NO: 2139 - RNA, 1345 nt, synthetic construct; identical to SEQ ID NO: 2138
  misc_feature 1..1345: note = mRNA i-3 (A64-N5-C30-hSL-N5) (opt2) from Homo sapiens__NP_000448.3__HNF4A(1-375)(K458R)
  source 1..1345: mol_type = other RNA

SEQ ID NO: 2140 - RNA, 1345 nt, synthetic construct
  misc_feature 1..1345: note = mRNA i-3 (A64-N5-C30-hSL-N5) (opt2) from Homo sapiens__NP_000448.3__HNF4A(1-375)(K106R_K108R_K126R_K127R)
  source 1..1345: mol_type = other RNA
aggagaaagcttaccatgcgcctctccaagaccctcgtcgacatggacatggccgactactccgccgccctcgaccccgcctacaccaccctcgagttcgagaacgtccaggtcctcaccatgggcaacgacacctccccctccgagggcaccaacctcaacgcccccaactccctcggcgtctccgccctctgcgccatctgcggcgaccgcgccaccggcaagcactacggcgcctcctcctgcgacggctgcaagggcttcttccgccgctccgtccgcaagaaccacatgtactcctgccgcttctcccgccagtgcgtcgtcgaccgcgaccgccgcaaccagtgccgctactgccgcctcaagaagtgcttccgcgccggcatgcgccgcgaggccgtccagaacgagcgcgaccgcatctccacccgccgctcctcctacgaggactcctccctcccctccatcaacgccctcctccaggccgaggtcctctcccgccagatcacctcccccgtctccggcatcaacggcgacatccgcgccaagaagatcgcctccatcgccgacgtctgcgagtccatgaaggagcagctcctcgtcctcgtcgagtgggccaagtacatccccgccttctgcgagctccccctcgacgaccaggtcgccctcctccgcgcccacgccggcgagcacctcctcctcggcgccaccaagcgctccatggtcttcaaggacgtcctcctcctcggcaacgactacatcgtcccccgccactgccccgagctcgccgagatgtcccgcgtctccatccgcatcctcgacgagctcgtcctccccttccaggagctccagatcgacgacaacgagtacgcctacctcaaggccatcatcttcttcgaccccgacgccaagggcctctccgaccccggcaagatcaagcgcctccgctcccaggtccaggtctccctcgaggactacatcaacgaccgccagtacgactcccgcggccgcttcggcgagctcctcctcctcctccccaccctccagtccatcacctggcagatgatcgagcagatccagttcatcaagctcttcggcatggccaagatcgacaacctcctccaggagatgctcctctgaggactagttataagactgactagcccgatgggcctcccaacgggccctcctcccctccttgcaccgagattaataaaaaaaaaaaaaaaaaaaaaaaaaaaaaaaaaaaaaaaaaaaaaaaaaaaaaaaaaaaaaaaatgcatcccccccccccccccccccccccccccccccaaaggctcttttcagagccaccagaatt

SEQ ID NO: 2141 - RNA, 1345 nt, synthetic construct
  misc_feature 1..1345: note = mRNA i-3 (A64-N5-C30-hSL-N5) (opt2) from Homo sapiens__NP_000448.3__HNF4A(1-375)(E285Q)
  source 1..1345: mol_type = other RNA
aggagaaagcttaccatgcgcctctccaagaccctcgtcgacatggacatggccgactactccgccgccctcgaccccgcctacaccaccctcgagttcgagaacgtccaggtcctcaccatgggcaacgacacctccccctccgagggcaccaacctcaacgcccccaactccctcggcgtctccgccctctgcgccatctgcggcgaccgcgccaccggcaagcactacggcgcctcctcctgcgacggctgcaagggcttcttccgccgctccgtccgcaagaaccacatgtactcctgccgcttctcccgccagtgcgtcgtcgacaaggacaagcgcaaccagtgccgctactgccgcctcaagaagtgcttccgcgccggcatgaagaaggaggccgtccagaacgagcgcgaccgcatctccacccgccgctcctcctacgaggactcctccctcccctccatcaacgccctcctccaggccgaggtcctctcccgccagatcacctcccccgtctccggcatcaacggcgacatccgcgccaagaagatcgcctccatcgccgacgtctgcgagtccatgaaggagcagctcctcgtcctcgtcgagtgggccaagtacatccccgccttctgcgagctccccctcgacgaccaggtcgccctcctccgcgcccacgccggcgagcacctcctcctcggcgccaccaagcgctccatggtcttcaaggacgtcctcctcctcggcaacgactacatcgtcccccgccactgccccgagctcgccgagatgtcccgcgtctccatccgcatcctcgacgagctcgtcctccccttccaggagctccagatcgacgacaaccagtacgcctacctcaaggccatcatcttcttcgaccccgacgccaagggcctctccgaccccggcaagatcaagcgcctccgctcccaggtccaggtctccctcgaggactacatcaacgaccgccagtacgactcccgcggccgcttcggcgagctcctcctcctcctccccaccctccagtccatcacctggcagatgatcgagcagatccagttcatcaagctcttcggcatggccaagatcgacaacctcctccaggagatgctcctctgaggactagttataagactgactagcccgatgggcctcccaacgggccctcctcccctccttgcaccgagattaataaaaaaaaaaaaaaaaaaaaaaaaaaaaaaaaaaaaaaaaaaaaaaaaaaaaaaaaaaaaaaaatgcatcccccccccccccccccccccccccccccccaaaggctcttttcagagccaccagaatt

SEQ ID NO: 2142 - RNA, 1345 nt, synthetic construct
  misc_feature 1..1345: note = mRNA i-3 (A64-N5-C30-hSL-N5) (opt2) from Homo sapiens__NP_000448.3__HNF4A(1-375)(T166E)
  source 1..1345: mol_type = other RNA
aggagaaagcttaccatgcgcctctccaagaccctcgtcgacatggacatggccgactactccgccgccctcgaccccgcctacaccaccctcgagttcgagaacgtccaggtcctcaccatgggcaacgacacctccccctccgagggcaccaacctcaacgcccccaactccctcggcgtctccgccctctgcgccatctgcggcgaccgcgccaccggcaagcactacggcgcctcctcctgcgacggctgcaagggcttcttccgccgctccgtccgcaagaaccacatgtactcctgccgcttctcccgccagtgcgtcgtcgacaaggacaagcgcaaccagtgccgctactgccgcctcaagaagtgcttccgcgccggcatgaagaaggaggccgtccagaacgagcgcgaccgcatctccacccgccgctcctcctacgaggactcctccctcccctccatcaacgccctcctccaggccgaggtcctctcccgccagatcgagtcccccgtctccggcatcaacggcgacatccgcgccaagaagatcgcctccatcgccgacgtctgcgagtccatgaaggagcagctcctcgtcctcgtcgagtgggccaagtacatccccgccttctgcgagctccccctcgacgaccaggtcgccctcctccgcgcccacgccggcgagcacctcctcctcggcgccaccaagcgctccatggtcttcaaggacgtcctcctcctcggcaacgactacatcgtcccccgccactgccccgagctcgccgagatgtcccgcgtctccatccgcatcctcgacgagctcgtcctccccttccaggagctccagatcgacgacaacgagtacgcctacctcaaggccatcatcttcttcgaccccgacgccaagggcctctccgaccccggcaagatcaagcgcctccgctcccaggtccaggtctccctcgaggactacatcaacgaccgccagtacgactcccgcggccgcttcggcgagctcctcctcctcctccccaccctccagtccatcacctggcagatgatcgagcagatccagttcatcaagctcttcggcatggccaagatcgacaacctcctccaggagatgctcctctgaggactagttataagactgactagcccgatgggcctcccaacgggccctcctcccctccttgcaccgagattaataaaaaaaaaaaaaaaaaaaaaaaaaaaaaaaaaaaaaaaaaaaaaaaaaaaaaaaaaaaaaaaatgcatcccccccccccccccccccccccccccccccaaaggctcttttcagagccaccagaatt

SEQ ID NO: 2143 - RNA, 1345 nt, synthetic construct
  misc_feature 1..1345: note = mRNA i-3 (A64-N5-C30-hSL-N5) (opt2) from Homo sapiens__NP_000448.3__HNF4A(1-375)(S148A)
  source 1..1345: mol_type = other RNA
aggagaaagcttaccatgcgcctctccaagaccctcgtcgacatggacatggccgactactccgccgccctcgaccccgcctacaccaccctcgagttcgagaacgtccaggtcctcaccatgggcaacgacacctccccctccgagggcaccaacctcaacgcccccaactccctcggcgtctccgccctctgcgccatctgcggcgaccgcgccaccggcaagcactacggcgcctcctcctgcgacggctgcaagggcttcttccgccgctccgtccgcaagaaccacatgtactcctgccgcttctcccgccagtgcgtcgtcgacaaggacaagcgcaaccagtgccgctactgccgcctcaagaagtgcttccgcgccggcatgaagaaggaggccgtccagaacgagcgcgaccgcatctccacccgccgctcctcctacgaggactccgccctcccctccatcaacgccctcctccaggccgaggtcctctcccgccagatcacctcccccgtctccggcatcaacggcgacatccgcgccaagaagatcgcctccatcgccgacgtctgcgagtccatgaaggagcagctcctcgtcctcgtcgagtgggccaagtacatccccgccttctgcgagctccccctcgacgaccaggtcgccctcctccgcgcccacgccggcgagcacctcctcctcggcgccaccaagcgctccatggtcttcaaggacgtcctcctcctcggcaacgactacatcgtcccccgccactgccccgagctcgccgagatgtcccgcgtctccatccgcatcctcgacgagctcgtcctccccttccaggagctccagatcgacgacaacgagtacgcctacctcaaggccatcatcttcttcgaccccgacgccaagggcctctccgaccccggcaagatcaagcgcctccgctcccaggtccaggtctccctcgaggactacatcaacgaccgccagtacgactcccgcggccgcttcggcgagctcctcctcctcctccccaccctccagtccatcacctggcagatgatcgagcagatccagttcatcaagctcttcggcatggccaagatcgacaacctcctccaggagatgctcctctgaggactagttataagactgactagcccgatgggcctcccaacgggccctcctcccctccttgcaccgagattaataaaaaaaaaaaaaaaaaaaaaaaaaaaaaaaaaaaaaaaaaaaaaaaaaaaaaaaaaaaaaaaatgcatcccccccccccccccccccccccccccccccaaaggctcttttcagagccaccagaatt

SEQ ID NO: 2144 - RNA, 1345 nt, synthetic construct
  misc_feature 1..1345: note = mRNA i-3 (A64-N5-C30-hSL-N5) (opt2) from Homo sapiens__NP_000448.3__HNF4A(1-375)(S148E)
  source 1..1345: mol_type = other RNA
aggagaaagcttaccatgcgcctctccaagaccctcgtcgacatggacatggccgactactccgccgccctcgaccccgcctacaccaccctcgagttcgagaacgtccaggtcctcaccatgggcaacgacacctccccctccgagggcaccaacctcaacgcccccaactccctcggcgtctccgccctctgcgccatctgcggcgaccgcgccaccggcaagcactacggcgcctcctcctgcgacggctgcaagggcttcttccgccgctccgtccgcaagaaccacatgtactcctgccgcttctcccgccagtgcgtcgtcgacaaggacaagcgcaaccagtgccgctactgccgcctcaagaagtgcttccgcgccggcatgaagaaggaggccgtccagaacgagcgcgaccgcatctccacccgccgctcctcctacgaggactccgagctcccctccatcaacgccctcctccaggccgaggtcctctcccgccagatcacctcccccgtctccggcatcaacggcgacatccgcgccaagaagatcgcctccatcgccgacgtctgcgagtccatgaaggagcagctcctcgtcctcgtcgagtgggccaagtacatccccgccttctgcgagctccccctcgacgaccaggtcgccctcctccgcgcccacgccggcgagcacctcctcctcggcgccaccaagcgctccatggtcttcaaggacgtcctcctcctcggcaacgactacatcgtcccccgccactgccccgagctcgccgagatgtcccgcgtctccatccgcatcctcgacgagctcgtcctccccttccaggagctccagatcgacgacaacgagtacgcctacctcaaggccatcatcttcttcgaccccgacgccaagggcctctccgaccccggcaagatcaagcgcctccgctcccaggtccaggtctccctcgaggactacatcaacgaccgccagtacgactcccgcggccgcttcggcgagctcctcctcctcctccccaccctccagtccatcacctggcagatgatcgagcagatccagttcatcaagctcttcggcatggccaagatcgacaacctcctccaggagatgctcctctgaggactagttataagactgactagcccgatgggcctcccaacgggccctcctcccctccttgcaccgagattaataaaaaaaaaaaaaaaaaaaaaaaaaaaaaaaaaaaaaaaaaaaaaaaaaaaaaaaaaaaaaaaatgcatcccccccccccccccccccccccccccccccaaaggctcttttcagagccaccagaatt

SEQ ID NO: 2145 - RNA, 1345 nt, synthetic construct
  misc_feature 1..1345: note = mRNA i-3 (A64-N5-C30-hSL-N5) (opt2) from Homo sapiens__NP_000448.3__HNF4A(1-375)(S183A)
  source 1..1345: mol_type = other RNA
aggagaaagcttaccatgcgcctctccaagaccctcgtcgacatggacatggccgactactccgccgccctcgaccccgcctacaccaccctcgagttcgagaacgtccaggtcctcaccatgggcaacgacacctccccctccgagggcaccaacctcaacgcccccaactccctcggcgtctccgccctctgcgccatctgcggcgaccgcgccaccggcaagcactacggcgcctcctcctgcgacggctgcaagggcttcttccgccgctccgtccgcaagaaccacatgtactcctgccgcttctcccgccagtgcgtcgtcgacaaggacaagcgcaaccagtgccgctactgccgcctcaagaagtgcttccgcgccggcatgaagaaggaggccgtccagaacgagcgcgaccgcatctccacccgccgctcctcctacgaggactcctccctcccctccatcaacgccctcctccaggccgaggtcctctcccgccagatcacctcccccgtctccggcatcaacggcgacatccgcgccaagaagatcgccgccatcgccgacgtctgcgagtccatgaaggagcagctcctcgtcctcgtcgagtgggccaagtacatccccgccttctgcgagctccccctcgacgaccaggtcgccctcctccgcgcccacgccggcgagcacctcctcctcggcgccaccaagcgctccatggtcttcaaggacgtcctcctcctcggcaacgactacatcgtcccccgccactgccccgagctcgccgagatgtcccgcgtctccatccgcatcctcgacgagctcgtcctccccttccaggagctccagatcgacgacaacgagtacgcctacctcaaggccatcatcttcttcgaccccgacgccaagggcctctccgaccccggcaagatcaagcgcctccgctcccaggtccaggtctccctcgaggactacatcaacgaccgccagtacgactcccgcggccgcttcggcgagctcctcctcctcctccccaccctccagtccatcacctggcagatgatcgagcagatccagttcatcaagctcttcggcatggccaagatcgacaacctcctccaggagatgctcctctgaggactagttataagactgactagcccgatgggcctcccaacgggccctcctcccctccttgcaccgagattaataaaaaaaaaaaaaaaaaaaaaaaaaaaaaaaaaaaaaaaaaaaaaaaaaaaaaaaaaaaaaaaatgcatcccccccccccccccccccccccccccccccaaaggctcttttcagagccaccagaatt

SEQ ID NO: 2146 - RNA, 1345 nt, synthetic construct
  misc_feature 1..1345: note = mRNA i-3 (A64-N5-C30-hSL-N5) (opt2) from Homo sapiens__NP_000448.3__HNF4A(1-375)(S183E)
  source 1..1345: mol_type = other RNA
aggagaaagcttaccatgcgcctctccaagaccctcgtcgacatggacatggccgactactccgccgccctcgaccccgcctacaccaccctcgagttcgagaacgtccaggtcctcaccatgggcaacgacacctccccctccgagggcaccaacctcaacgcccccaactccctcggcgtctccgccctctgcgccatctgcggcgaccgcgccaccggcaagcactacggcgcctcctcctgcgacggctgcaagggcttcttccgccgctccgtccgcaagaaccacatgtactcctgccgcttctcccgccagtgcgtcgtcgacaaggacaagcgcaaccagtgccgctactgccgcctcaagaagtgcttccgcgccggcatgaagaaggaggccgtccagaacgagcgcgaccgcatctccacccgccgctcctcctacgaggactcctccctcccctccatcaacgccctcctccaggccgaggtcctctcccgccagatcacctcccccgtctccggcatcaacggcgacatccgcgccaagaagatcgccgagatcgccgacgtctgcgagtccatgaaggagcagctcctcgtcctcgtcgagtgggccaagtacatccccgccttctgcgagctccccctcgacgaccaggtcgccctcctccgcgcccacgccggcgagcacctcctcctcggcgccaccaagcgctccatggtcttcaaggacgtcctcctcctcggcaacgactacatcgtcccccgccactgccccgagctcgccgagatgtcccgcgtctccatccgcatcctcgacgagctcgtcctccccttccaggagctccagatcgacgacaacgagtacgcctacctcaaggccatcatcttcttcgaccccgacgccaagggcctctccgaccccggcaagatcaagcgcctccgctcccaggtccaggtctccctcgaggactacatcaacgaccgccagtacgactcccgcggccgcttcggcgagctcctcctcctcctccccaccctccagtccatcacctggcagatgatcgagcagatccagttcatcaagctcttcggcatggccaagatcgacaacctcctccaggagatgctcctctgaggactagttataagactgactagcccgatgggcctcccaacgggccctcctcccctccttgcaccgagattaataaaaaaaaaaaaaaaaaaaaaaaaaaaaaaaaaaaaaaaaaaaaaaaaaaaaaaaaaaaaaaaatgcatcccccccccccccccccccccccccccccccaaaggctcttttcagagccaccagaatt

SEQ ID NO: 2147 - RNA, 1345 nt, synthetic construct; identical to SEQ ID NO: 2138
  misc_feature 1..1345: note = mRNA i-3 (A64-N5-C30-hSL-N5) (opt2) from Homo sapiens__NP_000448.3__HNF4A(1-375)(S461A)
  source 1..1345: mol_type = other RNA

SEQ ID NO: 2148 - RNA, 1345 nt, synthetic construct; identical to SEQ ID NO: 2138
  misc_feature 1..1345: note = mRNA i-3 (A64-N5-C30-hSL-N5) (opt2) from Homo sapiens__NP_000448.3__HNF4A(1-375)(S461E)
  source 1..1345: mol_type = other RNA

SEQ ID NO: 2149 - RNA, 1345 nt, synthetic construct
  misc_feature 1..1345: note = mRNA i-3 (A64-N5-C30-hSL-N5) (opt2) from Homo sapiens__NP_000448.3__HNF4A(1-375)(S142A_S143A_S313A)
  source 1..1345: mol_type = other RNA
aggagaaagcttaccatgcgcctctccaagaccctcgtcgacatggacatggccgactactccgccgccctcgaccccgcctacaccaccctcgagttcgagaacgtccaggtcctcaccatgggcaacgacacctccccctccgagggcaccaacctcaacgcccccaactccctcggcgtctccgccctctgcgccatctgcggcgaccgcgccaccggcaagcactacggcgcctcctcctgcgacggctgcaagggcttcttccgccgctccgtccgcaagaaccacatgtactcctgccgcttctcccgccagtgcgtcgtcgacaaggacaagcgcaaccagtgccgctactgccgcctcaagaagtgcttccgcgccggcatgaagaaggaggccgtccagaacgagcgcgaccgcatctccacccgccgcgccgcctacgaggactcctccctcccctccatcaacgccctcctccaggccgaggtcctctcccgccagatcacctcccccgtctccggcatcaacggcgacatccgcgccaagaagatcgcctccatcgccgacgtctgcgagtccatgaaggagcagctcctcgtcctcgtcgagtgggccaagtacatccccgccttctgcgagctccccctcgacgaccaggtcgccctcctccgcgcccacgccggcgagcacctcctcctcggcgccaccaagcgctccatggtcttcaaggacgtcctcctcctcggcaacgactacatcgtcccccgccactgccccgagctcgccgagatgtcccgcgtctccatccgcatcctcgacgagctcgtcctccccttccaggagctccagatcgacgacaacgagtacgcctacctcaaggccatcatcttcttcgaccccgacgccaagggcctctccgaccccggcaagatcaagcgcctccgcgcccaggtccaggtctccctcgaggactacatcaacgaccgccagtacgactcccgcggccgcttcggcgagctcctcctcctcctccccaccctccagtccatcacctggcagatgatcgagcagatccagttcatcaagctcttcggcatggccaagatcgacaacctcctccaggagatgctcctctgaggactagttataagactgactagcccgatgggcctcccaacgggccctcctcccctccttgcaccgagattaataaaaaaaaaaaaaaaaaaaaaaaaaaaaaaaaaaaaaaaaaaaaaaaaaaaaaaaaaaaaaaaatgcatcccccccccccccccccccccccccccccccaaaggctcttttcagagccaccagaatt

SEQ ID NO: 2150 - RNA, 1345 nt, synthetic construct; identical to SEQ ID NO: 2149
  misc_feature 1..1345: note = mRNA i-3 (A64-N5-C30-hSL-N5) (opt2) from Homo sapiens__NP_000448.3__HNF4A(1-375)(S142A_S143A_S313A_K458R)
  source 1..1345: mol_type = other RNA

SEQ ID NO: 2151 - RNA, 1345 nt, synthetic construct
  misc_feature 1..1345: note = mRNA i-3 (A64-N5-C30-hSL-N5) (opt2) from Homo sapiens__NP_000448.3__HNF4A(1-375)(S142A_S143A_S167A_S313A_ S378A_T429A_T432A_S436A_K458R)
  source 1..1345: mol_type = other RNA
aggagaaagcttaccatgcgcctctccaagaccctcgtcgacatggacatggccgactactccgccgccctcgaccccgcctacaccaccctcgagttcgagaacgtccaggtcctcaccatgggcaacgacacctccccctccgagggcaccaacctcaacgcccccaactccctcggcgtctccgccctctgcgccatctgcggcgaccgcgccaccggcaagcactacggcgcctcctcctgcgacggctgcaagggcttcttccgccgctccgtccgcaagaaccacatgtactcctgccgcttctcccgccagtgcgtcgtcgacaaggacaagcgcaaccagtgccgctactgccgcctcaagaagtgcttccgcgccggcatgaagaaggaggccgtccagaacgagcgcgaccgcatctccacccgccgcgccgcctacgaggactcctccctcccctccatcaacgccctcctccaggccgaggtcctctcccgccagatcaccgcccccgtctccggcatcaacggcgacatccgcgccaagaagatcgcctccatcgccgacgtctgcgagtccatgaaggagcagctcctcgtcctcgtcgagtgggccaagtacatccccgccttctgcgagctccccctcgacgaccaggtcgccctcctccgcgcccacgccggcgagcacctcctcctcggcgccaccaagcgctccatggtcttcaaggacgtcctcctcctcggcaacgactacatcgtcccccgccactgccccgagctcgccgagatgtcccgcgtctccatccgcatcctcgacgagctcgtcctccccttccaggagctccagatcgacgacaacgagtacgcctacctcaaggccatcatcttcttcgaccccgacgccaagggcctctccgaccccggcaagatcaagcgcctccgcgcccaggtccaggtctccctcgaggactacatcaacgaccgccagtacgactcccgcggccgcttcggcgagctcctcctcctcctccccaccctccagtccatcacctggcagatgatcgagcagatccagttcatcaagctcttcggcatggccaagatcgacaacctcctccaggagatgctcctctgaggactagttataagactgactagcccgatgggcctcccaacgggccctcctcccctccttgcaccgagattaataaaaaaaaaaaaaaaaaaaaaaaaaaaaaaaaaaaaaaaaaaaaaaaaaaaaaaaaaaaaaaaatgcatcccccccccccccccccccccccccccccccaaaggctcttttcagagccaccagaatt

SEQ ID NO: 2152 - RNA, 1345 nt, synthetic construct
  misc_feature 1..1345: note = mRNA i-3 (A64-N5-C30-hSL-N5) (opt2) from Homo sapiens__NP_000448.3__HNF4A(1-375)(S142A_S143A_S148A_S167A_ S313A_S378A_T429A_T432A_S436A_K458R)
  source 1..1345: mol_type = other RNA
aggagaaagcttaccatgcgcctctccaagaccctcgtcgacatggacatggccgactactccgccgccctcgaccccgcctacaccaccctcgagttcgagaacgtccaggtcctcaccatgggcaacgacacctccccctccgagggcaccaacctcaacgcccccaactccctcggcgtctccgccctctgcgccatctgcggcgaccgcgccaccggcaagcactacggcgcctcctcctgcgacggctgcaagggcttcttccgccgctccgtccgcaagaaccacatgtactcctgccgcttctcccgccagtgcgtcgtcgacaaggacaagcgcaaccagtgccgctactgccgcctcaagaagtgcttccgcgccggcatgaagaaggaggccgtccagaacgagcgcgaccgcatctccacccgccgcgccgcctacgaggactccgccctcccctccatcaacgccctcctccaggccgaggtcctctcccgccagatcaccgcccccgtctccggcatcaacggcgacatccgcgccaagaagatcgcctccatcgccgacgtctgcgagtccatgaaggagcagctcctcgtcctcgtcgagtgggccaagtacatccccgccttctgcgagctccccctcgacgaccaggtcgccctcctccgcgcccacgccggcgagcacctcctcctcggcgccaccaagcgctccatggtcttcaaggacgtcctcctcctcggcaacgactacatcgtcccccgccactgccccgagctcgccgagatgtcccgcgtctccatccgcatcctcgacgagctcgtcctccccttccaggagctccagatcgacgacaacgagtacgcctacctcaaggccatcatcttcttcgaccccgacgccaagggcctctccgaccccggcaagatcaagcgcctccgcgcccaggtccaggtctccctcgaggactacatcaacgaccgccagtacgactcccgcggccgcttcggcgagctcctcctcctcctccccaccctccagtccatcacctggcagatgatcgagcagatccagttcatcaagctcttcggcatggccaagatcgacaacctcctccaggagatgctcctctgaggactagttataagactgactagcccgatgggcctcccaacgggccctcctcccctccttgcaccgagattaataaaaaaaaaaaaaaaaaaaaaaaaaaaaaaaaaaaaaaaaaaaaaaaaaaaaaaaaaaaaaaaatgcatcccccccccccccccccccccccccccccccaaaggctcttttcagagccaccagaatt

SEQ ID NO: 2153 - RNA, 1345 nt, synthetic construct
  misc_feature 1..1345: note = mRNA i-3 (A64-N5-C30-hSL-N5) (opt2) from Homo sapiens__NP_000448.3__HNF4A(1-375)(K106R_K108R_K126R_K127R_ S142A_S143A_S148A_S167A_S313A_S378A_T429A_T432A_S436A_K458R )
  source 1..1345: mol_type = other RNA
aggagaaagcttaccatgcgcctctccaagaccctcgtcgacatggacatggccgactactccgccgccctcgaccccgcctacaccaccctcgagttcgagaacgtccaggtcctcaccatgggcaacgacacctccccctccgagggcaccaacctcaacgcccccaactccctcggcgtctccgccctctgcgccatctgcggcgaccgcgccaccggcaagcactacggcgcctcctcctgcgacggctgcaagggcttcttccgccgctccgtccgcaagaaccacatgtactcctgccgcttctcccgccagtgcgtcgtcgaccgcgaccgccgcaaccagtgccgctactgccgcctcaagaagtgcttccgcgccggcatgcgccgcgaggccgtccagaacgagcgcgaccgcatctccacccgccgcgccgcctacgaggactccgccctcccctccatcaacgccctcctccaggccgaggtcctctcccgccagatcaccgcccccgtctccggcatcaacggcgacatccgcgccaagaagatcgcctccatcgccgacgtctgcgagtccatgaaggagcagctcctcgtcctcgtcgagtgggccaagtacatccccgccttctgcgagctccccctcgacgaccaggtcgccctcctccgcgcccacgccggcgagcacctcctcctcggcgccaccaagcgctccatggtcttcaaggacgtcctcctcctcggcaacgactacatcgtcccccgccactgccccgagctcgccgagatgtcccgcgtctccatccgcatcctcgacgagctcgtcctccccttccaggagctccagatcgacgacaacgagtacgcctacctcaaggccatcatcttcttcgaccccgacgccaagggcctctccgaccccggcaagatcaagcgcctccgcgcccaggtccaggtctccctcgaggactacatcaacgaccgccagtacgactcccgcggccgcttcggcgagctcctcctcctcctccccaccctccagtccatcacctggcagatgatcgagcagatccagttcatcaagctcttcggcatggccaagatcgacaacctcctccaggagatgctcctctgaggactagttataagactgactagcccgatgggcctcccaacgggccctcctcccctccttgcaccgagattaataaaaaaaaaaaaaaaaaaaaaaaaaaaaaaaaaaaaaaaaaaaaaaaaaaaaaaaaaaaaaaaatgcatcccccccccccccccccccccccccccccccaaaggctcttttcagagccaccagaatt

SEQ ID NO: 2154 - RNA, 1345 nt, synthetic construct
  misc_feature 1..1345: note = mRNA i-3 (A64-N5-C30-hSL-N5) (opt2) from Homo sapiens__NP_000448.3__HNF4A(1-375)(S142A_S143A_S148A_T166A_ S167A_S313A_S378A_T429A_T432A_S436A_K458R)
  source 1..1345: mol_type = other RNA
aggagaaagcttaccatgcgcctctccaagaccctcgtcgacatggacatggccgactactccgccgccctcgaccccgcctacaccaccctcgagttcgagaacgtccaggtcctcaccatgggcaacgacacctccccctccgagggcaccaacctcaacgcccccaactccctcggcgtctccgccctctgcgccatctgcggcgaccgcgccaccggcaagcactacggcgcctcctcctgcgacggctgcaagggcttcttccgccgctccgtccgcaagaaccacatgtactcctgccgcttctcccgccagtgcgtcgtcgacaaggacaagcgcaaccagtgccgctactgccgcctcaagaagtgcttccgcgccggcatgaagaaggaggccgtccagaacgagcgcgaccgcatctccacccgccgcgccgcctacgaggactccgccctcccctccatcaacgccctcctccaggccgaggtcctctcccgccagatcgccgcccccgtctccggcatcaacggcgacatccgcgccaagaagatcgcctccatcgccgacgtctgcgagtccatgaaggagcagctcctcgtcctcgtcgagtgggccaagtacatccccgccttctgcgagctccccctcgacgaccaggtcgccctcctccgcgcccacgccggcgagcacctcctcctcggcgccaccaagcgctccatggtcttcaaggacgtcctcctcctcggcaacgactacatcgtcccccgccactgccccgagctcgccgagatgtcccgcgtctccatccgcatcctcgacgagctcgtcctccccttccaggagctccagatcgacgacaacgagtacgcctacctcaaggccatcatcttcttcgaccccgacgccaagggcctctccgaccccggcaagatcaagcgcctccgcgcccaggtccaggtctccctcgaggactacatcaacgaccgccagtacgactcccgcggccgcttcggcgagctcctcctcctcctccccaccctccagtccatcacctggcagatgatcgagcagatccagttcatcaagctcttcggcatggccaagatcgacaacctcctccaggagatgctcctctgaggactagttataagactgactagcccgatgggcctcccaacgggccctcctcccctccttgcaccgagattaataaaaaaaaaaaaaaaaaaaaaaaaaaaaaaaaaaaaaaaaaaaaaaaaaaaaaaaaaaaaaaaatgcatcccccccccccccccccccccccccccccccaaaggctcttttcagagccaccagaatt

SEQ ID NO: 2155 - RNA, 1345 nt, synthetic construct
  misc_feature 1..1345: note = mRNA i-3 (A64-N5-C30-hSL-N5) (opt2) from Homo sapiens__NP_000448.3__HNF4A(1-375)(S87A_S142A_S143A_S148A_T 166A_S167A_S313A_S378A_T429A_T432A_S436A_K458R)
  source 1..1345: mol_type = other RNA
aggagaaagcttaccatgcgcctctccaagaccctcgtcgacatggacatggccgactactccgccgccctcgaccccgcctacaccaccctcgagttcgagaacgtccaggtcctcaccatgggcaacgacacctccccctccgagggcaccaacctcaacgcccccaactccctcggcgtctccgccctctgcgccatctgcggcgaccgcgccaccggcaagcactacggcgcctcctcctgcgacggctgcaagggcttcttccgccgcgccgtccgcaagaaccacatgtactcctgccgcttctcccgccagtgcgtcgtcgacaaggacaagcgcaaccagtgccgctactgccgcctcaagaagtgcttccgcgccggcatgaagaaggaggccgtccagaacgagcgcgaccgcatctccacccgccgcgccgcctacgaggactccgccctcccctccatcaacgccctcctccaggccgaggtcctctcccgccagatcgccgcccccgtctccggcatcaacggcgacatccgcgccaagaagatcgcctccatcgccgacgtctgcgagtccatgaaggagcagctcctcgtcctcgtcgagtgggccaagtacatccccgccttctgcgagctccccctcgacgaccaggtcgccctcctccgcgcccacgccggcgagcacctcctcctcggcgccaccaagcgctccatggtcttcaaggacgtcctcctcctcggcaacgactacatcgtcccccgccactgccccgagctcgccgagatgtcccgcgtctccatccgcatcctcgacgagctcgtcctccccttccaggagctccagatcgacgacaacgagtacgcctacctcaaggccatcatcttcttcgaccccgacgccaagggcctctccgaccccggcaagatcaagcgcctccgcgcccaggtccaggtctccctcgaggactacatcaacgaccgccagtacgactcccgcggccgcttcggcgagctcctcctcctcctccccaccctccagtccatcacctggcagatgatcgagcagatccagttcatcaagctcttcggcatggccaagatcgacaacctcctccaggagatgctcctctgaggactagttataagactgactagcccgatgggcctcccaacgggccctcctcccctccttgcaccgagattaataaaaaaaaaaaaaaaaaaaaaaaaaaaaaaaaaaaaaaaaaaaaaaaaaaaaaaaaaaaaaaaatgcatcccccccccccccccccccccccccccccccaaaggctcttttcagagccaccagaatt

SEQ ID NO: 2156 - RNA, 1345 nt, synthetic construct
  misc_feature 1..1345: note = mRNA i-3 (A64-N5-C30-hSL-N5) (opt2) from Homo sapiens__NP_000448.3__HNF4A(1-375)(S87A_K106R_K108R_K126R_K 127R_S142A_S143A_S148A_T166A_S167A_S313A_S378A_T429A_T432A_ S436A_K458R)
  source 1..1345: mol_type = other RNA
aggagaaagcttaccatgcgcctctccaagaccctcgtcgacatggacatggccgactactccgccgccctcgaccccgcctacaccaccctcgagttcgagaacgtccaggtcctcaccatgggcaacgacacctccccctccgagggcaccaacctcaacgcccccaactccctcggcgtctccgccctctgcgccatctgcggcgaccgcgccaccggcaagcactacggcgcctcctcctgcgacggctgcaagggcttcttccgccgcgccgtccgcaagaaccacatgtactcctgccgcttctcccgccagtgcgtcgtcgaccgcgaccgccgcaaccagtgccgctactgccgcctcaagaagtgcttccgcgccggcatgcgccgcgaggccgtccagaacgagcgcgaccgcatctccacccgccgcgccgcctacgaggactccgccctcccctccatcaacgccctcctccaggccgaggtcctctcccgccagatcgccgcccccgtctccggcatcaacggcgacatccgcgccaagaagatcgcctccatcgccgacgtctgcgagtccatgaaggagcagctcctcgtcctcgtcgagtgggccaagtacatccccgccttctgcgagctccccctcgacgaccaggtcgccctcctccgcgcccacgccggcgagcacctcctcctcggcgccaccaagcgctccatggtcttcaaggacgtcctcctcctcggcaacgactacatcgtcccccgccactgccccgagctcgccgagatgtcccgcgtctccatccgcatcctcgacgagctcgtcctccccttccaggagctccagatcgacgacaacgagtacgcctacctcaaggccatcatcttcttcgaccccgacgccaagggcctctccgaccccggcaagatcaagcgcctccgcgcccaggtccaggtctccctcgaggactacatcaacgaccgccagtacgactcccgcggccgcttcggcgagctcctcctcctcctccccaccctccagtccatcacctggcagatgatcgagcagatccagttcatcaagctcttcggcatggccaagatcgacaacctcctccaggagatgctcctctgaggactagttataagactgactagcccgatgggcctcccaacgggccctcctcccctccttgcaccgagattaataaaaaaaaaaaaaaaaaaaaaaaaaaaaaaaaaaaaaaaaaaaaaaaaaaaaaaaaaaaaaaaatgcatcccccccccccccccccccccccccccccccaaaggctcttttcagagccaccagaatt

SEQ ID NO: 2157 - RNA, 1345 nt, synthetic construct
  misc_feature 1..1345: note = mRNA i-3 (A64-N5-C30-hSL-N5) (opt2) from Homo sapiens__NP_000448.3__HNF4A(1-375)(S87A_K106R_K108R_K126R_K 127R)
  source 1..1345: mol_type = other RNA
aggagaaagcttaccatgcgcctctccaagaccctcgtcgacatggacatggccgactactccgccgccctcgaccccgcctacaccaccctcgagttcgagaacgtccaggtcctcaccatgggcaacgacacctccccctccgagggcaccaacctcaacgcccccaactccctcggcgtctccgccctctgcgccatctgcggcgaccgcgccaccggcaagcactacggcgcctcctcctgcgacggctgcaagggcttcttccgccgcgccgtccgcaagaaccacatgtactcctgccgcttctcccgccagtgcgtcgtcgaccgcgaccgccgcaaccagtgccgctactgccgcctcaagaagtgcttccgcgccggcatgcgccgcgaggccgtccagaacgagcgcgaccgcatctccacccgccgctcctcctacgaggactcctccctcccctccatcaacgccctcctccaggccgaggtcctctcccgccagatcacctcccccgtctccggcatcaacggcgacatccgcgccaagaagatcgcctccatcgccgacgtctgcgagtccatgaaggagcagctcctcgtcctcgtcgagtgggccaagtacatccccgccttctgcgagctccccctcgacgaccaggtcgccctcctccgcgcccacgccggcgagcacctcctcctcggcgccaccaagcgctccatggtcttcaaggacgtcctcctcctcggcaacgactacatcgtcccccgccactgccccgagctcgccgagatgtcccgcgtctccatccgcatcctcgacgagctcgtcctccccttccaggagctccagatcgacgacaacgagtacgcctacctcaaggccatcatcttcttcgaccccgacgccaagggcctctccgaccccggcaagatcaagcgcctccgctcccaggtccaggtctccctcgaggactacatcaacgaccgccagtacgactcccgcggccgcttcggcgagctcctcctcctcctccccaccctccagtccatcacctggcagatgatcgagcagatccagttcatcaagctcttcggcatggccaagatcgacaacctcctccaggagatgctcctctgaggactagttataagactgactagcccgatgggcctcccaacgggccctcctcccctccttgcaccgagattaataaaaaaaaaaaaaaaaaaaaaaaaaaaaaaaaaaaaaaaaaaaaaaaaaaaaaaaaaaaaaaaatgcatcccccccccccccccccccccccccccccccaaaggctcttttcagagccaccagaatt

SEQ ID NO: 2158 - RNA, 1345 nt, synthetic construct; identical to SEQ ID NO: 2156
  misc_feature 1..1345: note = mRNA i-3 (A64-N5-C30-hSL-N5) (opt2) from Homo sapiens__NP_000448.3__HNF4A(1-375)(S87A_K106R_K108R_K126R_K 127R_S142A_S143A_S148A_T166A_S167A_S313A_S378A_T429A_T432A_ S436A_K458R_S461A)
  source 1..1345: mol_type = other RNA

SEQ ID NO: 2159 - RNA, 1345 nt, synthetic construct; identical to SEQ ID NO: 2156
  misc_feature 1..1345: note = mRNA i-3 (A64-N5-C30-hSL-N5) (opt2) from Homo sapiens__NP_000448.3__HNF4A(1-375)(S87A_K106R_K108R_K126R_K 127R_S142A_S143A_S148A_T166A_S167A_S313A_S378A_T429A_T432A_ S436A_K458R_S461E)
  source 1..1345: mol_type = other RNA

SEQ ID NO: 2160 - RNA, 1345 nt, synthetic construct
  misc_feature 1..1345: note = mRNA i-3 (A64-N5-C30-hSL-N5) (opt2) from Homo sapiens__NP_000448.3__HNF4A(1-375)(S87A_K106R_K108R_K126R_K 127R_S142A_S143A_S148E_T166A_S167E_S313A_S378E_T429E_T432E_ S436E_K458R_S461E)
  source 1..1345: mol_type = other RNA
aggagaaagcttaccatgcgcctctccaagaccctcgtcgacatggacatggccgactactccgccgccctcgaccccgcctacaccaccctcgagttcgagaacgtccaggtcctcaccatgggcaacgacacctccccctccgagggcaccaacctcaacgcccccaactccctcggcgtctccgccctctgcgccatctgcggcgaccgcgccaccggcaagcactacggcgcctcctcctgcgacggctgcaagggcttcttccgccgcgccgtccgcaagaaccacatgtactcctgccgcttctcccgccagtgcgtcgtcgaccgcgaccgccgcaaccagtgccgctactgccgcctcaagaagtgcttccgcgccggcatgcgccgcgaggccgtccagaacgagcgcgaccgcatctccacccgccgcgccgcctacgaggactccgagctcccctccatcaacgccctcctccaggccgaggtcctctcccgccagatcgccgagcccgtctccggcatcaacggcgacatccgcgccaagaagatcgcctccatcgccgacgtctgcgagtccatgaaggagcagctcctcgtcctcgtcgagtgggccaagtacatccccgccttctgcgagctccccctcgacgaccaggtcgccctcctccgcgcccacgccggcgagcacctcctcctcggcgccaccaagcgctccatggtcttcaaggacgtcctcctcctcggcaacgactacatcgtcccccgccactgccccgagctcgccgagatgtcccgcgtctccatccgcatcctcgacgagctcgtcctccccttccaggagctccagatcgacgacaacgagtacgcctacctcaaggccatcatcttcttcgaccccgacgccaagggcctctccgaccccggcaagatcaagcgcctccgcgcccaggtccaggtctccctcgaggactacatcaacgaccgccagtacgactcccgcggccgcttcggcgagctcctcctcctcctccccaccctccagtccatcacctggcagatgatcgagcagatccagttcatcaagctcttcggcatggccaagatcgacaacctcctccaggagatgctcctctgaggactagttataagactgactagcccgatgggcctcccaacgggccctcctcccctccttgcaccgagattaataaaaaaaaaaaaaaaaaaaaaaaaaaaaaaaaaaaaaaaaaaaaaaaaaaaaaaaaaaaaaaaatgcatcccccccccccccccccccccccccccccccaaaggctcttttcagagccaccagaatt

SEQ ID NO: 2161 - RNA, 1345 nt, synthetic construct
  misc_feature 1..1345: note = mRNA i-3 (A64-N5-C30-hSL-N5) (opt2) from Homo sapiens__NP_000448.3__HNF4A(1-375)(S87A_K106R_K108R_K126R_K 127R_S142A_S143A_S148A_T166A_S167A_K179R_K180R_S313A_S378A_ T429A_T432A_S436A_K458R_S461E)
  source 1..1345: mol_type = other RNA
aggagaaagcttaccatgcgcctctccaagaccctcgtcgacatggacatggccgactactccgccgccctcgaccccgcctacaccaccctcgagttcgagaacgtccaggtcctcaccatgggcaacgacacctccccctccgagggcaccaacctcaacgcccccaactccctcggcgtctccgccctctgcgccatctgcggcgaccgcgccaccggcaagcactacggcgcctcctcctgcgacggctgcaagggcttcttccgccgcgccgtccgcaagaaccacatgtactcctgccgcttctcccgccagtgcgtcgtcgaccgcgaccgccgcaaccagtgccgctactgccgcctcaagaagtgcttccgcgccggcatgcgccgcgaggccgtccagaacgagcgcgaccgcatctccacccgccgcgccgcctacgaggactccgccctcccctccatcaacgccctcctccaggccgaggtcctctcccgccagatcgccgcccccgtctccggcatcaacggcgacatccgcgcccgccgcatcgcctccatcgccgacgtctgcgagtccatgaaggagcagctcctcgtcctcgtcgagtgggccaagtacatccccgccttctgcgagctccccctcgacgaccaggtcgccctcctccgcgcccacgccggcgagcacctcctcctcggcgccaccaagcgctccatggtcttcaaggacgtcctcctcctcggcaacgactacatcgtcccccgccactgccccgagctcgccgagatgtcccgcgtctccatccgcatcctcgacgagctcgtcctccccttccaggagctccagatcgacgacaacgagtacgcctacctcaaggccatcatcttcttcgaccccgacgccaagggcctctccgaccccggcaagatcaagcgcctccgcgcccaggtccaggtctccctcgaggactacatcaacgaccgccagtacgactcccgcggccgcttcggcgagctcctcctcctcctccccaccctccagtccatcacctggcagatgatcgagcagatccagttcatcaagctcttcggcatggccaagatcgacaacctcctccaggagatgctcctctgaggactagttataagactgactagcccgatgggcctcccaacgggccctcctcccctccttgcaccgagattaataaaaaaaaaaaaaaaaaaaaaaaaaaaaaaaaaaaaaaaaaaaaaaaaaaaaaaaaaaaaaaaatgcatcccccccccccccccccccccccccccccccaaaggctcttttcagagccaccagaatt

SEQ ID NO: 2162 - RNA, 1345 nt, synthetic construct
  misc_feature 1..1345: note = mRNA i-3 (A64-N5-C30-hSL-N5) (opt2) from Homo sapiens__NP_000448.3__HNF4A(1-375)(S87A_K106R_K108R_K126R_K 127R_S142A_S143A_S148A_T166A_S167A_K300R_K307R_K309R_S313A_ S378A_T429A_T432A_S436A_K458R_S461E)
  source 1..1345: mol_type = other RNA
aggagaaagcttaccatgcgcctctccaagaccctcgtcgacatggacatggccgactactccgccgccctcgaccccgcctacaccaccctcgagttcgagaacgtccaggtcctcaccatgggcaacgacacctccccctccgagggcaccaacctcaacgcccccaactccctcggcgtctccgccctctgcgccatctgcggcgaccgcgccaccggcaagcactacggcgcctcctcctgcgacggctgcaagggcttcttccgccgcgccgtccgcaagaaccacatgtactcctgccgcttctcccgccagtgcgtcgtcgaccgcgaccgccgcaaccagtgccgctactgccgcctcaagaagtgcttccgcgccggcatgcgccgcgaggccgtccagaacgagcgcgaccgcatctccacccgccgcgccgcctacgaggactccgccctcccctccatcaacgccctcctccaggccgaggtcctctcccgccagatcgccgcccccgtctccggcatcaacggcgacatccgcgccaagaagatcgcctccatcgccgacgtctgcgagtccatgaaggagcagctcctcgtcctcgtcgagtgggccaagtacatccccgccttctgcgagctccccctcgacgaccaggtcgccctcctccgcgcccacgccggcgagcacctcctcctcggcgccaccaagcgctccatggtcttcaaggacgtcctcctcctcggcaacgactacatcgtcccccgccactgccccgagctcgccgagatgtcccgcgtctccatccgcatcctcgacgagctcgtcctccccttccaggagctccagatcgacgacaacgagtacgcctacctcaaggccatcatcttcttcgaccccgacgcccgcggcctctccgaccccggccgcatccgccgcctccgcgcccaggtccaggtctccctcgaggactacatcaacgaccgccagtacgactcccgcggccgcttcggcgagctcctcctcctcctccccaccctccagtccatcacctggcagatgatcgagcagatccagttcatcaagctcttcggcatggccaagatcgacaacctcctccaggagatgctcctctgaggactagttataagactgactagcccgatgggcctcccaacgggccctcctcccctccttgcaccgagattaataaaaaaaaaaaaaaaaaaaaaaaaaaaaaaaaaaaaaaaaaaaaaaaaaaaaaaaaaaaaaaaatgcatcccccccccccccccccccccccccccccccaaaggctcttttcagagccaccagaatt

SEQ ID NO: 2163 - RNA, 1345 nt, synthetic construct; identical to SEQ ID NO: 2156
  misc_feature 1..1345: note = mRNA i-3 (A64-N5-C30-hSL-N5) (opt2) from Homo sapiens__NP_000448.3__HNF4A(1-375)(S87A_K106R_K108R_K126R_K 127R_S142A_S143A_S148A_T166A_S167A_S313A_S378A_T429A_T432A_ S436A_K447R_K458R_S461E_K470R)
  source 1..1345: mol_type = other RNA

SEQ ID NO: 2164 - RNA, 1345 nt, synthetic construct
  misc_feature 1..1345: note = mRNA i-3 (A64-N5-C30-hSL-N5) (opt2) from Homo sapiens__NP_000448.3__HNF4A(1-375)(S87A_K106R_K108R_K126R_K 127R_S142A_S143A_S148A_T166A_S167A_K179R_K180R_K234R_K300R_ K307R_K309R_S313A_S378A_T429A_T432A_S436A_K447R_K458R_S461E _K470R)
  source 1..1345: mol_type = other RNA
aggagaaagcttaccatgcgcctctccaagaccctcgtcgacatggacatggccgactactccgccgccctcgaccccgcctacaccaccctcgagttcgagaacgtccaggtcctcaccatgggcaacgacacctccccctccgagggcaccaacctcaacgcccccaactccctcggcgtctccgccctctgcgccatctgcggcgaccgcgccaccggcaagcactacggcgcctcctcctgcgacggctgcaagggcttcttccgccgcgccgtccgcaagaaccacatgtactcctgccgcttctcccgccagtgcgtcgtcgaccgcgaccgccgcaaccagtgccgctactgccgcctcaagaagtgcttccgcgccggcatgcgccgcgaggccgtccagaacgagcgcgaccgcatctccacccgccgcgccgcctacgaggactccgccctcccctccatcaacgccctcctccaggccgaggtcctctcccgccagatcgccgcccccgtctccggcatcaacggcgacatccgcgcccgccgcatcgcctccatcgccgacgtctgcgagtccatgaaggagcagctcctcgtcctcgtcgagtgggccaagtacatccccgccttctgcgagctccccctcgacgaccaggtcgccctcctccgcgcccacgccggcgagcacctcctcctcggcgccacccgccgctccatggtcttcaaggacgtcctcctcctcggcaacgactacatcgtcccccgccactgccccgagctcgccgagatgtcccgcgtctccatccgcatcctcgacgagctcgtcctccccttccaggagctccagatcgacgacaacgagtacgcctacctcaaggccatcatcttcttcgaccccgacgcccgcggcctctccgaccccggccgcatccgccgcctccgcgcccaggtccaggtctccctcgaggactacatcaacgaccgccagtacgactcccgcggccgcttcggcgagctcctcctcctcctccccaccctccagtccatcacctggcagatgatcgagcagatccagttcatcaagctcttcggcatggccaagatcgacaacctcctccaggagatgctcctctgaggactagttataagactgactagcccgatgggcctcccaacgggccctcctcccctccttgcaccgagattaataaaaaaaaaaaaaaaaaaaaaaaaaaaaaaaaaaaaaaaaaaaaaaaaaaaaaaaaaaaaaaaatgcatcccccccccccccccccccccccccccccccaaaggctcttttcagagccaccagaatt

SEQ ID NO: 2165 - RNA, 1345 nt, synthetic construct
  misc_feature 1..1345: note = mRNA i-3 (A64-N5-C30-hSL-N5) (opt2) from Homo sapiens__NP_000448.3__HNF4A(1-375)(S87A_S95A_S99A_K106R_K10 8R_K126R_K127R_S142A_S143A_S148A_T166A_S167A_S313A_S378A_T4 29A_T432A_S436A_K458R_S461E)
  source 1..1345: mol_type = other RNA
aggagaaagcttaccatgcgcctctccaagaccctcgtcgacatggacatggccgactactccgccgccctcgaccccgcctacaccaccctcgagttcgagaacgtccaggtcctcaccatgggcaacgacacctccccctccgagggcaccaacctcaacgcccccaactccctcggcgtctccgccctctgcgccatctgcggcgaccgcgccaccggcaagcactacggcgcctcctcctgcgacggctgcaagggcttcttccgccgcgccgtccgcaagaaccacatgtacgcctgccgcttcgcccgccagtgcgtcgtcgaccgcgaccgccgcaaccagtgccgctactgccgcctcaagaagtgcttccgcgccggcatgcgccgcgaggccgtccagaacgagcgcgaccgcatctccacccgccgcgccgcctacgaggactccgccctcccctccatcaacgccctcctccaggccgaggtcctctcccgccagatcgccgcccccgtctccggcatcaacggcgacatccgcgccaagaagatcgcctccatcgccgacgtctgcgagtccatgaaggagcagctcctcgtcctcgtcgagtgggccaagtacatccccgccttctgcgagctccccctcgacgaccaggtcgccctcctccgcgcccacgccggcgagcacctcctcctcggcgccaccaagcgctccatggtcttcaaggacgtcctcctcctcggcaacgactacatcgtcccccgccactgccccgagctcgccgagatgtcccgcgtctccatccgcatcctcgacgagctcgtcctccccttccaggagctccagatcgacgacaacgagtacgcctacctcaaggccatcatcttcttcgaccccgacgccaagggcctctccgaccccggcaagatcaagcgcctccgcgcccaggtccaggtctccctcgaggactacatcaacgaccgccagtacgactcccgcggccgcttcggcgagctcctcctcctcctccccaccctccagtccatcacctggcagatgatcgagcagatccagttcatcaagctcttcggcatggccaagatcgacaacctcctccaggagatgctcctctgaggactagttataagactgactagcccgatgggcctcccaacgggccctcctcccctccttgcaccgagattaataaaaaaaaaaaaaaaaaaaaaaaaaaaaaaaaaaaaaaaaaaaaaaaaaaaaaaaaaaaaaaaatgcatcccccccccccccccccccccccccccccccaaaggctcttttcagagccaccagaatt

SEQ ID NO: 2166 - RNA, 1345 nt, synthetic construct
  misc_feature 1..1345: note = mRNA i-3 (A64-N5-C30-hSL-N5) (opt2) from Homo sapiens__NP_000448.3__HNF4A(1-375)(S87A_K106R_K108R_K126R_K 127R_S138A_T139A_S142A_S143A_S148A_T166A_S167A_S313A_S378A_ T429A_T432A_S436A_K458R_S461E)
  source 1..1345: mol_type = other RNA
aggagaaagcttaccatgcgcctctccaagaccctcgtcgacatggacatggccgactactccgccgccctcgaccccgcctacaccaccctcgagttcgagaacgtccaggtcctcaccatgggcaacgacacctccccctccgagggcaccaacctcaacgcccccaactccctcggcgtctccgccctctgcgccatctgcggcgaccgcgccaccggcaagcactacggcgcctcctcctgcgacggctgcaagggcttcttccgccgcgccgtccgcaagaaccacatgtactcctgccgcttctcccgccagtgcgtcgtcgaccgcgaccgccgcaaccagtgccgctactgccgcctcaagaagtgcttccgcgccggcatgcgccgcgaggccgtccagaacgagcgcgaccgcatcgccgcccgccgcgccgcctacgaggactccgccctcccctccatcaacgccctcctccaggccgaggtcctctcccgccagatcgccgcccccgtctccggcatcaacggcgacatccgcgccaagaagatcgcctccatcgccgacgtctgcgagtccatgaaggagcagctcctcgtcctcgtcgagtgggccaagtacatccccgccttctgcgagctccccctcgacgaccaggtcgccctcctccgcgcccacgccggcgagcacctcctcctcggcgccaccaagcgctccatggtcttcaaggacgtcctcctcctcggcaacgactacatcgtcccccgccactgccccgagctcgccgagatgtcccgcgtctccatccgcatcctcgacgagctcgtcctccccttccaggagctccagatcgacgacaacgagtacgcctacctcaaggccatcatcttcttcgaccccgacgccaagggcctctccgaccccggcaagatcaagcgcctccgcgcccaggtccaggtctccctcgaggactacatcaacgaccgccagtacgactcccgcggccgcttcggcgagctcctcctcctcctccccaccctccagtccatcacctggcagatgatcgagcagatccagttcatcaagctcttcggcatggccaagatcgacaacctcctccaggagatgctcctctgaggactagttataagactgactagcccgatgggcctcccaacgggccctcctcccctccttgcaccgagattaataaaaaaaaaaaaaaaaaaaaaaaaaaaaaaaaaaaaaaaaaaaaaaaaaaaaaaaaaaaaaaaatgcatcccccccccccccccccccccccccccccccaaaggctcttttcagagccaccagaatt

SEQ ID NO: 2167 - RNA, 1345 nt, synthetic construct
  misc_feature 1..1345: note = mRNA i-3 (A64-N5-C30-hSL-N5) (opt2) from Homo sapiens__NP_000448.3__HNF4A(1-375)(S87A_S95A_S99A_K106R_K10 8R_K126R_K127R_S138A_T139A_S142A_S143A_S148A_T166A_S167A_S3 13A_S378A_T429A_T432A_S436A_K458R_S461E)
  source 1..1345: mol_type = other RNA
aggagaaagcttaccatgcgcctctccaagaccctcgtcgacatggacatggccgactactccgccgccctcgaccccgcctacaccaccctcgagttcgagaacgtccaggtcctcaccatgggcaacgacacctccccctccgagggcaccaacctcaacgcccccaactccctcggcgtctccgccctctgcgccatctgcggcgaccgcgccaccggcaagcactacggcgcctcctcctgcgacggctgcaagggcttcttccgccgcgccgtccgcaagaaccacatgtacgcctgccgcttcgcccgccagtgcgtcgtcgaccgcgaccgccgcaaccagtgccgctactgccgcctcaagaagtgcttccgcgccggcatgcgccgcgaggccgtccagaacgagcgcgaccgcatcgccgcccgccgcgccgcctacgaggactccgccctcccctccatcaacgccctcctccaggccgaggtcctctcccgccagatcgccgcccccgtctccggcatcaacggcgacatccgcgccaagaagatcgcctccatcgccgacgtctgcgagtccatgaaggagcagctcctcgtcctcgtcgagtgggccaagtacatccccgccttctgcgagctccccctcgacgaccaggtcgccctcctccgcgcccacgccggcgagcacctcctcctcggcgccaccaagcgctccatggtcttcaaggacgtcctcctcctcggcaacgactacatcgtcccccgccactgccccgagctcgccgagatgtcccgcgtctccatccgcatcctcgacgagctcgtcctccccttccaggagctccagatcgacgacaacgagtacgcctacctcaaggccatcatcttcttcgaccccgacgccaagggcctctccgaccccggcaagatcaagcgcctccgcgcccaggtccaggtctccctcgaggactacatcaacgaccgccagtacgactcccgcggccgcttcggcgagctcctcctcctcctccccaccctccagtccatcacctggcagatgatcgagcagatccagttcatcaagctcttcggcatggccaagatcgacaacctcctccaggagatgctcctctgaggactagttataagactgactagcccgatgggcctcccaacgggccctcctcccctccttgcaccgagattaataaaaaaaaaaaaaaaaaaaaaaaaaaaaaaaaaaaaaaaaaaaaaaaaaaaaaaaaaaaaaaaatgcatcccccccccccccccccccccccccccccccaaaggctcttttcagagccaccagaatt

SEQ ID NO: 2168 - RNA, 1345 nt, synthetic construct
  misc_feature 1..1345: note = mRNA i-3 (A64-N5-C30-hSL-N5) (opt3) from Homo sapiens__NP_000448.3__HNF4A(1-375)
  source 1..1345: mol_type = other RNA
aggagaaagcttaccatgagactgagcaagaccctcgtggacatggatatggccgactactccgctgcacttgatcccgcctatacaactctggagttcgaaaacgtccaggttttgacgatgggcaatgacacctctccttcagaggggacaaacttaaatgcgccaaacagtctgggagtgagcgctctatgcgccatctgtggtgatagggcaactggcaaacactacggggcctcctcttgcgacggatgtaagggctttttccggcgctcggtacgtaaaaatcatatgtattcatgccgatttagcagacaatgtgtggtcgataaggacaaaaggaaccagtgccggtactgtcgcctcaagaagtgcttcagagctggtatgaaaaaggaagcagtgcagaatgagagggatcggattagtacccgccgatcctcttatgaagacagctccctgccgtcaataaacgcccttctgcaggctgaggttttgagtagacaaatcacaagccccgtgtctgggattaatggagatatcagggccaaaaagattgcgtccatcgcagacgtctgtgagtcaatgaaagaacagctcctggtgctggtagagtgggccaagtacatacctgctttttgcgaactcccattagatgaccaggttgccctgcttcgggcacacgctggcgagcatttgctgctaggcgccaccaagcgtagcatggtgttcaaagacgtcctcctgcttgggaacgattatatcgtgccccgccactgtcctgagctggcggaaatgagtagagtgtctattaggatcttggacgagctcgtcctgccatttcaggaattacaaattgatgacaatgagtacgcctacctgaaggcaatcatattctttgatcccgacgctaaaggactctccgatcctggtaagattaaacggcttcgaagccaggttcaggtgtcgctggaagactatatcaacgatcgccagtacgactctagaggcaggttcggggagttgctactgctcctgccaactcttcaatccattacatggcagatgatcgagcagatccaatttattaagctgttcggaatggccaaaatagataatttgctccaggaaatgctgttatgaggactagttataagactgactagcccgatgggcctcccaacgggccctcctcccctccttgcaccgagattaataaaaaaaaaaaaaaaaaaaaaaaaaaaaaaaaaaaaaaaaaaaaaaaaaaaaaaaaaaaaaaaatgcatcccccccccccccccccccccccccccccccaaaggctcttttcagagccaccagaatt

SEQ ID NO: 2169 - RNA, 1345 nt, synthetic construct
  misc_feature 1..1345: note = mRNA i-3 (A64-N5-C30-hSL-N5) (opt3) from Homo sapiens__NP_000448.3__HNF4A(1-375)(S313A)
  source 1..1345: mol_type = other RNA
aggagaaagcttaccatgagactgagcaagaccctcgtggacatggatatggccgactactccgctgcacttgatcccgcctatacaactctggagttcgaaaacgtccaggttttgacgatgggcaatgacacctctccttcagaggggacaaacttaaatgcgccaaacagtctgggagtgagcgctctatgcgccatctgtggtgatagggcaactggcaaacactacggggcctcctcttgcgacggatgtaagggctttttccggcgctcggtacgtaaaaatcatatgtattcatgccgatttagcagacaatgtgtggtcgataaggacaaaaggaaccagtgccggtactgtcgcctcaagaagtgcttcagagctggtatgaaaaaggaagcagtgcagaatgagagggatcggattagtacccgccgatcctcttatgaagacagctccctgccgtcaataaacgcccttctgcaggctgaggttttgagtagacaaatcacaagccccgtgtctgggattaatggagatatcagggccaaaaagattgcgtccatcgcagacgtctgtgagtcaatgaaagaacagctcctggtgctggtagagtgggccaagtacatacctgctttttgcgaactcccattagatgaccaggttgccctgcttcgggcacacgctggcgagcatttgctgctaggcgccaccaagcgtagcatggtgttcaaagacgtcctcctgcttgggaacgattatatcgtgccccgccactgtcctgagctggcggaaatgagtagagtgtctattaggatcttggacgagctcgtcctgccatttcaggaattacaaattgatgacaatgagtacgcctacctgaaggcaatcatattctttgatcccgacgctaaaggactctccgatcctggtaagattaaacggcttcgagcccaggttcaggtgagcctggaagactatatcaacgatcgccagtacgactcgagaggcaggttcggggagttgctactgctcctgccaactcttcaatctattacatggcagatgatcgagcagatccaatttattaagctgttcggaatggctaaaatagataatttgctccaggaaatgctgttatgaggactagttataagactgactagcccgatgggcctcccaacgggccctcctcccctccttgcaccgagattaataaaaaaaaaaaaaaaaaaaaaaaaaaaaaaaaaaaaaaaaaaaaaaaaaaaaaaaaaaaaaaaatgcatcccccccccccccccccccccccccccccccaaaggctcttttcagagccaccagaatt

SEQ ID NO: 2170 - RNA, 1345 nt, synthetic construct
  misc_feature 1..1345: note = mRNA i-3 (A64-N5-C30-hSL-N5) (opt3) from Homo sapiens__NP_000448.3__HNF4A(1-375)(S313E)
  source 1..1345: mol_type = other RNA
aggagaaagcttaccatgagactgagcaagaccctcgtggacatggatatggccgactactccgctgcacttgatcccgcctatacaactctggagttcgaaaacgtccaggttttgacgatgggcaatgacacctctccttcagaggggacaaacttaaatgcgccaaacagtctgggagtgagcgctctatgcgccatctgtggtgatagggcaactggcaaacactacggggcctcctcttgcgacggatgtaagggctttttccggcgctcggtacgtaaaaatcatatgtattcatgccgatttagcagacaatgtgtggtcgataaggacaaaaggaaccagtgccggtactgtcgcctcaagaagtgcttcagagctggtatgaaaaaggaagcagtgcagaatgagagggatcggattagtacccgccgatcctcttatgaagacagctccctgccgtcaataaacgcccttctgcaggctgaggttttgagtagacaaatcacaagccccgtgtctgggattaatggagatatcagggccaaaaagattgcgtccatcgcagacgtctgtgagtcaatgaaagaacagctcctggtgctggtagagtgggccaagtacatacctgctttttgcgaactcccattagatgaccaggttgccctgcttcgggcacacgctggcgagcatttgctgctaggcgccaccaagcgtagcatggtgttcaaagacgtcctcctgcttgggaacgattatatcgtgccccgccactgtcctgagctggcggaaatgagtagagtgtctattaggatcttggacgagctcgtcctgccatttcaggaattacaaattgatgacaatgagtacgcctacctgaaggcaatcatattctttgatcccgacgctaaaggactctccgatcctggtaagattaaacggcttcgagaacaggttcaggtgagcctggaggactatatcaacgatcgccagtacgactcgagaggcaggttcggggagttgctactgctcctgccaactcttcaatctattacatggcagatgatcgaacagatccaatttattaagctgttcggaatggccaaaatagataatttgctccaggagatgctgttatgaggactagttataagactgactagcccgatgggcctcccaacgggccctcctcccctccttgcaccgagattaataaaaaaaaaaaaaaaaaaaaaaaaaaaaaaaaaaaaaaaaaaaaaaaaaaaaaaaaaaaaaaaatgcatcccccccccccccccccccccccccccccccaaaggctcttttcagagccaccagaatt

SEQ ID NO: 2171 - RNA, 1345 nt, synthetic construct
  misc_feature 1..1345: note = mRNA i-3 (A64-N5-C30-hSL-N5) (opt3) from Homo sapiens__NP_000448.3__HNF4A(1-375)(S142A_S143A)
  source 1..1345: mol_type = other RNA
aggagaaagcttaccatgagactgagcaagaccctcgtggacatggatatggccgactactccgctgcacttgatcccgcctatacaactctggagttcgaaaacgtccaggttttgacgatgggcaatgacacctctccttcagaggggacaaacttaaatgcgccaaacagtctgggagtgagcgctctatgcgccatctgtggtgatagggcaactggcaaacactacggggcctcctcttgcgacggatgtaagggctttttccggcgctcggtacgtaaaaatcatatgtattcatgccgatttagcagacaatgtgtggtcgataaggacaaaaggaaccagtgccggtactgtcgcctcaagaagtgcttcagagctggtatgaaaaaggaagcagtgcagaatgagagggatcggattagtacccgccgagccgcttatgaagactcctctctgccgagcataaacgcccttctgcaggcggaggttttgtccagacaaatcacatcacccgtgagtgggattaatggagatatcagggccaaaaagattgcaagcatcgctgacgtctgtgagtctatgaaagaacagctcctggtgctggtagagtgggccaagtacatacctgcattttgcgaactcccattagatgaccaggttgctctgcttcgggcccacgcgggcgagcatttgctgctaggcgccaccaagcgttccatggtgttcaaagacgtcctcctgcttgggaacgattatatcgtgccccgccactgtcctgagctggcagaaatgtcaagagtgagcattaggatcttggacgagctcgtcctgccatttcaggaattacaaattgatgacaatgagtacgcttacctgaaggccatcatattctttgatcccgacgctaaaggactcagtgatcctggtaagattaaacggcttcgatctcaggttcaggtgtccctggaagactatatcaacgatcgccagtacgacagcagaggcaggttcggggagttgctactgctcctgccaactcttcaatcgattacatggcagatgatcgagcagatccaatttattaagctgttcggaatggccaaaatagataatttgctccaggaaatgctgttatgaggactagttataagactgactagcccgatgggcctcccaacgggccctcctcccctccttgcaccgagattaataaaaaaaaaaaaaaaaaaaaaaaaaaaaaaaaaaaaaaaaaaaaaaaaaaaaaaaaaaaaaaaatgcatcccccccccccccccccccccccccccccccaaaggctcttttcagagccaccagaatt

SEQ ID NO: 2172 - RNA, 1345 nt, synthetic construct
  misc_feature 1..1345: note = mRNA i-3 (A64-N5-C30-hSL-N5) (opt3) from Homo sapiens__NP_000448.3__HNF4A(1-375)(S142E_S143E)
  source 1..1345: mol_type = other RNA
aggagaaagcttaccatgagactgagcaagaccctcgtggacatggatatggccgactactccgctgcacttgatcccgcctatacaactctggagttcgaaaacgtccaggttttgacgatgggcaatgacacctctccttcagaggggacaaacttaaatgcgccaaacagtctgggagtgagcgctctatgcgccatctgtggtgatagggcaactggcaaacactacggggcctcctcttgcgacggatgtaagggctttttccggcgctcggtacgtaaaaatcatatgtattcatgccgatttagcagacaatgtgtggtcgataaggacaaaaggaaccagtgccggtactgtcgcctcaagaagtgcttcagagctggtatgaaaaaggaagcagtgcagaatgagagggatcggattagtacccgccgagaagagtatgaggactcctctctgccgagcataaacgcccttctgcaggctgaagttttgtccagacaaatcacatcacccgtgagtgggattaatggagatatcagggccaaaaagattgcgagcatcgcagacgtctgtgagtctatgaaagaacagctcctggtgctggtagagtgggccaagtacatacctgctttttgcgagctcccattagatgaccaggttgccctgcttcgggcacacgctggcgaacatttgctgctaggcgccaccaagcgttccatggtgttcaaagacgtcctcctgcttgggaacgattatatcgtgccccgccactgtcctgagctggcggaaatgtcaagagtgagcattaggatcttggacgagctcgtcctgccatttcaggaattacaaattgatgacaatgagtacgcctacctgaaggcaatcatattctttgatcccgacgctaaaggactcagtgatcctggtaagattaaacggcttcgatctcaggttcaggtgtccctggaggactatatcaacgatcgccagtacgacagcagaggcaggttcggggaattgctactgctcctgccaactcttcaatcgattacatggcagatgatcgagcagatccaatttattaagctgttcggaatggccaaaatagataatttgctccaggaaatgctgttatgaggactagttataagactgactagcccgatgggcctcccaacgggccctcctcccctccttgcaccgagattaataaaaaaaaaaaaaaaaaaaaaaaaaaaaaaaaaaaaaaaaaaaaaaaaaaaaaaaaaaaaaaaatgcatcccccccccccccccccccccccccccccccaaaggctcttttcagagccaccagaatt

SEQ ID NO: 2173 - RNA, 1345 nt, synthetic construct
  misc_feature 1..1345: note = mRNA i-3 (A64-N5-C30-hSL-N5) (opt3) from Homo sapiens__NP_000448.3__HNF4A(1-375)(S143A)
  source 1..1345: mol_type = other RNA
aggagaaagcttaccatgagactgagcaagaccctcgtggacatggatatggccgactactccgctgcacttgatcccgcctatacaactctggagttcgaaaacgtccaggttttgacgatgggcaatgacacctctccttcagaggggacaaacttaaatgcgccaaacagtctgggagtgagcgctctatgcgccatctgtggtgatagggcaactggcaaacactacggggcctcctcttgcgacggatgtaagggctttttccggcgctcggtacgtaaaaatcatatgtattcatgccgatttagcagacaatgtgtggtcgataaggacaaaaggaaccagtgccggtactgtcgcctcaagaagtgcttcagagctggtatgaaaaaggaagcagtgcagaatgagagggatcggattagtacccgccgatccgcctatgaagactctagcctgccgtccataaacgcccttctgcaggccgaggttttgtcaagacaaatcacaagtcccgtgagcgggattaatggagatatcagggcgaaaaagattgcatctatcgccgacgtctgtgagtccatgaaagaacagctcctggtgctggtagagtgggctaagtacatacctgccttttgcgaactcccattagatgaccaggttgcactgcttcgggctcacgccggcgagcatttgctgctaggcgcgaccaagcgttcaatggtgttcaaagacgtcctcctgcttgggaacgattatatcgtgccccgccactgtcctgagctggccgaaatgagcagagtgagtattaggatcttggacgagctcgtcctgccatttcaggaattacaaattgatgacaatgagtacgcatacctgaaggctatcatattctttgatcccgacgccaaaggactctctgatcctggtaagattaaacggcttcgatcccaggttcaggtgagcctggaagactatatcaacgatcgccagtacgactcgagaggcaggttcggggagttgctactgctcctgccaactcttcaatctattacatggcagatgatcgagcagatccaatttattaagctgttcggaatggctaaaatagataatttgctccaggaaatgctgttatgaggactagttataagactgactagcccgatgggcctcccaacgggccctcctcccctccttgcaccgagattaataaaaaaaaaaaaaaaaaaaaaaaaaaaaaaaaaaaaaaaaaaaaaaaaaaaaaaaaaaaaaaaatgcatcccccccccccccccccccccccccccccccaaaggctcttttcagagccaccagaatt

SEQ ID NO: 2174 - RNA, 1345 nt, synthetic construct
  misc_feature 1..1345: note = mRNA i-3 (A64-N5-C30-hSL-N5) (opt3) from Homo sapiens__NP_000448.3__HNF4A(1-375)(T166A)
  source 1..1345: mol_type = other RNA
aggagaaagcttaccatgagactgagcaagaccctcgtggacatggatatggccgactactccgctgcacttgatcccgcctatacaactctggagttcgaaaacgtccaggttttgacgatgggcaatgacacctctccttcagaggggacaaacttaaatgcgccaaacagtctgggagtgagcgctctatgcgccatctgtggtgatagggcaactggcaaacactacggggcctcctcttgcgacggatgtaagggctttttccggcgctcggtacgtaaaaatcatatgtattcatgccgatttagcagacaatgtgtggtcgataaggacaaaaggaaccagtgccggtactgtcgcctcaagaagtgcttcagagctggtatgaaaaaggaagcagtgcagaatgagagggatcggattagtacccgccgatcctcttatgaagacagctccctgccgtcaataaacgcccttctgcaggctgaggttttgagtagacaaatcgccagccccgtgtctgggattaatggagatatcagggcgaaaaagattgcatccatcgccgacgtctgtgagtcaatgaaagaacagctcctggtgctggtagagtgggctaagtacatacctgccttttgcgaactcccattagatgaccaggttgcactgcttcgggctcacgccggcgagcatttgctgctaggcgcgacaaagcgtagcatggtgttcaaagacgtcctcctgcttgggaacgattatatcgtgccccgccactgtcctgagctggccgaaatgagtagagtgtctattaggatcttggacgagctcgtcctgccatttcaggaattacaaattgatgacaatgagtacgcatacctgaaggctatcatattctttgatcccgacgccaaaggactctccgatcctggtaagattaaacggcttcgaagccaggttcaggtgtcgctggaagactatatcaacgatcgccagtacgactctagaggcaggttcggggagttgctactgctcctgccaacccttcaatccattacttggcagatgatcgagcagatccaatttattaagctgttcggaatggctaaaatagataatttgctccaggaaatgctgttatgaggactagttataagactgactagcccgatgggcctcccaacgggccctcctcccctccttgcaccgagattaataaaaaaaaaaaaaaaaaaaaaaaaaaaaaaaaaaaaaaaaaaaaaaaaaaaaaaaaaaaaaaaatgcatcccccccccccccccccccccccccccccccaaaggctcttttcagagccaccagaatt

SEQ ID NO: 2175 - RNA, 1345 nt, synthetic construct
  misc_feature 1..1345: note = mRNA i-3 (A64-N5-C30-hSL-N5) (opt3) from Homo sapiens__NP_000448.3__HNF4A(1-375)(S167E)
  source 1..1345: mol_type = other RNA
aggagaaagcttaccatgagactgagcaagaccctcgtggacatggatatggccgactactccgctgcacttgatcccgcctatacaactctggagttcgaaaacgtccaggttttgacgatgggcaatgacacctctccttcagaggggacaaacttaaatgcgccaaacagtctgggagtgagcgctctatgcgccatctgtggtgatagggcaactggcaaacactacggggcctcctcttgcgacggatgtaagggctttttccggcgctcggtacgtaaaaatcatatgtattcatgccgatttagcagacaatgtgtggtcgataaggacaaaaggaaccagtgccggtactgtcgcctcaagaagtgcttcagagctggtatgaaaaaggaagcagtgcagaatgagagggatcggattagtacccgccgatcctcttatgaagacagctccctgccgtcaataaacgcccttctgcaggctgaggttttgagtagacaaatcacagagcccgtgagcgggattaatggagatatcagggccaaaaagattgcgtctatcgcagacgtctgtgaatccatgaaagagcagctcctggtgctggtagaatgggccaagtacatacctgctttttgcgagctcccattagatgaccaggttgccctgcttcgggcacacgctggcgagcatttgctgctaggcgccaccaagcgttcaatggtgttcaaagacgtcctcctgcttgggaacgattatatcgtgccccgccactgtcctgaactggcggagatgagcagagtgagtattaggatcttggacgaactcgtcctgccatttcaggagttacaaattgatgacaatgaatacgcctacctgaaggcaatcatattctttgatcccgacgctaaaggactctctgatcctggtaagattaaacggcttcgatcccaggttcaggtgagcctggaggactatatcaacgatcgccagtacgactcgagaggcaggttcggggagttgctactgctcctgccaactcttcaatctattacatggcagatgatcgaacagatccaatttattaagctgttcggaatggccaaaatagataatttgctccaggagatgctgttatgaggactagttataagactgactagcccgatgggcctcccaacgggccctcctcccctccttgcaccgagattaataaaaaaaaaaaaaaaaaaaaaaaaaaaaaaaaaaaaaaaaaaaaaaaaaaaaaaaaaaaaaaaatgcatcccccccccccccccccccccccccccccccaaaggctcttttcagagccaccagaatt

SEQ ID NO: 2176 - RNA, 1345 nt, synthetic construct
  misc_feature 1..1345: note = mRNA i-3 (A64-N5-C30-hSL-N5) (opt3) from Homo sapiens__NP_000448.3__HNF4A(1-375)(S167A)
  source 1..1345: mol_type = other RNA
aggagaaagcttaccatgagactgagcaagaccctcgtggacatggatatggccgactactccgctgcacttgatcccgcctatacaactctggagttcgaaaacgtccaggttttgacgatgggcaatgacacctctccttcagaggggacaaacttaaatgcgccaaacagtctgggagtgagcgctctatgcgccatctgtggtgatagggcaactggcaaacactacggggcctcctcttgcgacggatgtaagggctttttccggcgctcggtacgtaaaaatcatatgtattcatgccgatttagcagacaatgtgtggtcgataaggacaaaaggaaccagtgccggtactgtcgcctcaagaagtgcttcagagctggtatgaaaaaggaagcagtgcagaatgagagggatcggattagtacccgccgatcctcttatgaagacagctccctgccgtcaataaacgcccttctgcaggctgaggttttgagtagacaaatcacagcccccgtgagcgggattaatggagatatcagggcgaaaaagattgcatctatcgccgacgtctgtgagtccatgaaagaacagctcctggtgctggtagagtgggctaagtacatacctgccttttgcgaactcccattagatgaccaggttgcactgcttcgggctcacgccggcgagcatttgctgctaggcgcgaccaagcgttcaatggtgttcaaagacgtcctcctgcttgggaacgattatatcgtgccccgccactgtcctgagctggccgaaatgagcagagtgagtattaggatcttggacgagctcgtcctgccatttcaggaattacaaattgatgacaatgagtacgcatacctgaaggctatcatattctttgatcccgacgccaaaggactctctgatcctggtaagattaaacggcttcgatcccaggttcaggtgagcctggaagactatatcaacgatcgccagtacgactcgagaggcaggttcggggagttgctactgctcctgccaactcttcaatctattacatggcagatgatcgagcagatccaatttattaagctgttcggaatggctaaaatagataatttgctccaggaaatgctgttatgaggactagttataagactgactagcccgatgggcctcccaacgggccctcctcccctccttgcaccgagattaataaaaaaaaaaaaaaaaaaaaaaaaaaaaaaaaaaaaaaaaaaaaaaaaaaaaaaaaaaaaaaaatgcatcccccccccccccccccccccccccccccccaaaggctcttttcagagccaccagaatt

SEQ ID NO: 2177 - RNA, 1345 nt, synthetic construct; identical to SEQ ID NO: 2176
  misc_feature 1..1345: note = mRNA i-3 (A64-N5-C30-hSL-N5) (opt3) from Homo sapiens__NP_000448.3__HNF4A(1-375)(S167A_S378A_T429A_T432A_ S436A)
  source 1..1345: mol_type = other RNA

SEQ ID NO: 2178 - RNA, 1345 nt, synthetic construct; identical to SEQ ID NO: 2175
  misc_feature 1..1345: note = mRNA i-3 (A64-N5-C30-hSL-N5) (opt3) from Homo sapiens__NP_000448.3__HNF4A(1-375)(S167E_S378E_T429E_T432E_ S436E)
  source 1..1345: mol_type = other RNA

SEQ ID NO: 2179 - RNA, 1345 nt, synthetic construct
  misc_feature 1..1345: note = mRNA i-3 (A64-N5-C30-hSL-N5) (opt3) from Homo sapiens__NP_000448.3__HNF4A(1-375)(S87A)
  source 1..1345: mol_type = other RNA
aggagaaagcttaccatgagactgagcaagaccctcgtggacatggatatggccgactactccgctgcacttgatcccgcctatacaactctggagttcgaaaacgtccaggttttgacgatgggcaatgacacctctccttcagaggggacaaacttaaatgcgccaaacagtctgggagtgagcgctctatgcgccatctgtggtgatagggcaactggcaaacactacggggcctcctcttgcgacggatgtaagggctttttccggcgcgctgtacgtaaaaatcatatgtattcgtgccgattttcaagacaatgtgtggtcgataaggacaaaaggaaccagtgccggtactgtcgcctcaagaagtgcttcagagcaggtatgaaaaaggaagccgtgcagaatgagagggatcggattagcacccgccgaagttcctatgaagactctagcctgccgtccataaacgcccttctgcaggccgaggttttgtcaagacaaatcacaagtcccgtgagcgggattaatggagatatcagggcgaaaaagattgcatctatcgccgacgtctgtgagtccatgaaagaacagctcctggtgctggtagagtgggctaagtacatacctgccttttgcgaactcccattagatgaccaggttgcactgcttcgggctcacgccggcgagcatttgctgctaggcgcgaccaagcgttcaatggtgttcaaagacgtcctcctgcttgggaacgattatatcgtgccccgccactgtcctgagctggccgaaatgagcagagtgagtattaggatcttggacgagctcgtcctgccatttcaggaattacaaattgatgacaatgagtacgcatacctgaaggctatcatattctttgatcccgacgccaaaggactctctgatcctggtaagattaaacggcttcgatcccaggttcaggtgagcctggaagactatatcaacgatcgccagtacgactcgagaggcaggttcggggagttgctactgctcctgccaactcttcaatctattacatggcagatgatcgagcagatccaatttattaagctgttcggaatggctaaaatagataatttgctccaggaaatgctgttatgaggactagttataagactgactagcccgatgggcctcccaacgggccctcctcccctccttgcaccgagattaataaaaaaaaaaaaaaaaaaaaaaaaaaaaaaaaaaaaaaaaaaaaaaaaaaaaaaaaaaaaaaaatgcatcccccccccccccccccccccccccccccccaaaggctcttttcagagccaccagaatt

SEQ ID NO: 2180 - RNA, 1345 nt, synthetic construct
  misc_feature 1..1345: note = mRNA i-3 (A64-N5-C30-hSL-N5) (opt3) from Homo sapiens__NP_000448.3__HNF4A(1-375)(S87E)
  source 1..1345: mol_type = other RNA
aggagaaagcttaccatgagactgagcaagaccctcgtggacatggatatggccgactactccgctgcacttgatcccgcctatacaactctggagttcgaaaacgtccaggttttgacgatgggcaatgacacctctccttcagaggggacaaacttaaatgcgccaaacagtctgggagtgagcgctctatgcgccatctgtggtgatagggcaactggcaaacactacggggcctcctcttgcgacggatgtaagggctttttccggcgcgaagtacgtaaaaatcatatgtattcgtgccgattttcaagacaatgtgtggtcgataaggacaaaaggaaccagtgccggtactgtcgcctcaagaagtgcttcagagctggtatgaaaaaggaggcagtgcagaatgaaagggatcggattagcacccgccgaagttcctatgaggactctagcctgccgtccataaacgcccttctgcaggctgaggttttgtcaagacaaatcacaagtcccgtgagcgggattaatggagatatcagggccaaaaagattgcgtctatcgcagacgtctgtgaatccatgaaagagcagctcctggtgctggtagaatgggccaagtacatacctgctttttgcgagctcccattagatgaccaggttgccctgcttcgggcacacgctggcgagcatttgctgctaggcgccaccaagcgttcaatggtgttcaaagacgtcctcctgcttgggaacgattatatcgtgccccgccactgtcctgaactggcggagatgagcagagtgagtattaggatcttggacgaactcgtcctgccatttcaggagttacaaattgatgacaatgaatacgcctacctgaaggcaatcatattctttgatcccgacgctaaaggactctctgatcctggtaagattaaacggcttcgatcccaggttcaggtgagcctggaggactatatcaacgatcgccagtacgactcgagaggcaggttcggggagttgctactgctcctgccaactcttcaatctattacatggcagatgatcgaacagatccaatttattaagctgttcggaatggccaaaatagataatttgctccaggagatgctgttatgaggactagttataagactgactagcccgatgggcctcccaacgggccctcctcccctccttgcaccgagattaataaaaaaaaaaaaaaaaaaaaaaaaaaaaaaaaaaaaaaaaaaaaaaaaaaaaaaaaaaaaaaaatgcatcccccccccccccccccccccccccccccccaaaggctcttttcagagccaccagaatt

SEQ ID NO: 2181 - RNA, 1345 nt, synthetic construct
  misc_feature 1..1345: note = mRNA i-3 (A64-N5-C30-hSL-N5) (opt3) from Homo sapiens__NP_000448.3__HNF4A(1-375)(R2V)
  source 1..1345: mol_type = other RNA
aggagaaagcttaccatggtgctgagcaagaccctcgtcgacatggatatggccgactactccgctgcacttgatcccgcctatacaactctggagttcgaaaacgttcaggtgttgacgatgggcaatgacacctctccttcagaggggacaaacttaaatgcgccaaacagtctgggagtaagcgctctatgcgccatctgtggtgatagagcaactggcaaacactacggggcctcctcttgcgacggatgtaagggctttttcaggcggtcggtgcgcaaaaatcatatgtattcatgccgatttagccgtcaatgtgtcgtggataaggacaaaagaaaccagtgcaggtactgtcggctcaagaagtgcttccgcgctggtatgaaaaaggaagcagttcagaatgagagagataggattagtacccggcgctcctcttatgaagacagctccctgccgtcaataaacgcccttctgcaggctgaggtgttgagtcgacaaatcacaagccccgtctctgggattaatggagatatcagagccaaaaagattgcgtccatcgcagacgtgtgtgagtcaatgaaagaacagctcctggtactggttgagtgggccaagtacatacctgctttttgcgaactcccattagatgaccaggtggccctgcttagggcacacgctggcgagcatttgctgctaggcgccaccaagcggagcatggtcttcaaagacgtgctcctgcttgggaacgattatatcgtgccccgtcactgtcctgagctggcggaaatgagtcgcgtctctattagaatcttggacgagctcgttctgccatttcaggaattacaaattgatgacaatgagtacgcctacctgaaggcaatcatattctttgatcccgacgctaaaggactctccgatcctggtaagattaaaaggcttcggagccaggtgcaggtatcgctggaagactatatcaacgatcgacagtacgactctcgcggcagattcggggagttgctactgctcctgccaactcttcaatccattacatggcagatgatcgagcagatccaatttattaagctgttcggaatggccaaaatagataatttgctccaggaaatgctgttatgaggactagttataagactgactagcccgatgggcctcccaacgggccctcctcccctccttgcaccgagattaataaaaaaaaaaaaaaaaaaaaaaaaaaaaaaaaaaaaaaaaaaaaaaaaaaaaaaaaaaaaaaaatgcatcccccccccccccccccccccccccccccccaaaggctcttttcagagccaccagaatt

SEQ ID NO: 2182 - RNA, 1345 nt, synthetic construct
  misc_feature 1..1345: note = mRNA i-3 (A64-N5-C30-hSL-N5) (opt3) from Homo sapiens__NP_000448.3__HNF4A(1-375)(R2V_K5V)
  source 1..1345: mol_type = other RNA
aggagaaagcttaccatggtgctgagcgtcaccctcgttgacatggatatggccgactactccgctgcacttgatcccgcctatacaactctggagttcgaaaacgtgcaggtattgacgatgggcaatgacacctctccttcagaggggacaaacttaaatgcgccaaacagtctgggagtgagcgctctatgcgccatctgtggtgatagagcaactggcaagcactacggggcctcctcttgcgacggatgtaaaggctttttcaggcggtcggtccgcaagaatcatatgtattcatgccgatttagccgtcaatgtgtggttgataaagacaagagaaaccagtgcaggtactgtcggctcaaaaagtgcttccgcgctggtatgaagaaagaagcagtgcagaatgagagagataggattagtacccggcgctcctcttatgaagacagctccctgccgtcaataaacgcccttctgcaggctgaggtcttgagtcgacaaatcacaagccccgtgtctgggattaatggagatatcagagccaagaaaattgcgtccatcgcagacgtatgtgagtcaatgaaggaacagctcctggttctggtggagtgggccaaatacatacctgctttttgcgaactcccattagatgaccaggtcgccctgcttagggcacacgctggcgagcatttgctgctaggcgccaccaagcggagcatggtgttcaaggacgtgctcctgcttgggaacgattatatcgtcccccgtcactgtcctgagctggcggaaatgagtcgcgtttctattagaatcttggacgagctcgtgctgccatttcaggaattacaaattgatgacaatgagtacgcctacctgaaagcaatcatattctttgatcccgacgctaagggactctccgatcctggtaaaattaagaggcttcggagccaggtacaggtgtcgctggaagactatatcaacgatcgacagtacgactctcgcggcagattcggggagttgctactgctcctgccaactcttcaatccattacatggcagatgatcgagcagatccaatttattaaactgttcggaatggccaagatagataatttgctccaggaaatgctgttatgaggactagttataagactgactagcccgatgggcctcccaacgggccctcctcccctccttgcaccgagattaataaaaaaaaaaaaaaaaaaaaaaaaaaaaaaaaaaaaaaaaaaaaaaaaaaaaaaaaaaaaaaaatgcatcccccccccccccccccccccccccccccccaaaggctcttttcagagccaccagaatt

SEQ ID NO: 2183 - RNA, 1345 nt, synthetic construct
  misc_feature 1..1345: note = mRNA i-3 (A64-N5-C30-hSL-N5) (opt3) from Homo sapiens__NP_000448.3__HNF4A(1-375)(K179R_K180R)
  source 1..1345: mol_type = other RNA
aggagaaagcttaccatgagactgagcaagaccctcgtggacatggatatggccgactactccgctgcacttgatcccgcctatacaactctggagttcgaaaacgtccaggttttgacgatgggcaatgacacctctccttcagaggggacaaacttaaatgcgccaaacagtctgggagtgagcgctctatgcgccatctgtggtgatagggcaactggcaaacactacggggcctcctcttgcgacggatgtaagggctttttccggcgctcggtacgtaaaaatcatatgtattcatgccgatttagcagacaatgtgtggtcgataaggacaaaaggaaccagtgccggtactgtcgcctcaagaagtgcttcagagctggtatgaaaaaggaagcagtgcagaatgagagggatcggattagtacccgccgatcctcttatgaagacagctccctgccgtcaataaacgcccttctgcaggctgaggttttgagtagacaaatcacaagccccgtgtctgggattaatggagatatcagggcccggcgtattgcgtccatcgcagacgtctgtgagtcaatgaaagaacagctcctggtgctggtagagtgggccaagtacatacctgctttttgcgaactcccattagatgaccaggttgccctgcttcgcgcacacgctggcgagcatttgctgctaggcgccaccaaaagaagcatggtgttcaaggacgtcctcctgcttgggaacgattatatcgtgcccaggcactgtcctgagctggcggaaatgagtcgggtgtctattcgaatcttggacgagctcgtcctgccatttcaggaattacaaattgatgacaatgagtacgcctacctgaaggcaatcatattctttgatcccgacgctaaaggactctccgatcctggtaagattaaacgccttagaagccaggttcaggtgtcgctggaagactatatcaacgataggcagtacgactctcggggccgcttcggggagttgctactgctcctgccaactcttcaatccattacatggcagatgatcgagcagatccaatttattaagctgttcggaatggccaaaatagataatttgctccaggaaatgctgttatgaggactagttataagactgactagcccgatgggcctcccaacgggccctcctcccctccttgcaccgagattaataaaaaaaaaaaaaaaaaaaaaaaaaaaaaaaaaaaaaaaaaaaaaaaaaaaaaaaaaaaaaaaatgcatcccccccccccccccccccccccccccccccaaaggctcttttcagagccaccagaatt

SEQ ID NO: 2184 - RNA, 1345 nt, synthetic construct
  misc_feature 1..1345: note = mRNA i-3 (A64-N5-C30-hSL-N5) (opt3) from Homo sapiens__NP_000448.3__HNF4A(1-375)(K234R)
  source 1..1345: mol_type = other RNA
aggagaaagcttaccatgagactgagcaagaccctcgtggacatggatatggccgactactccgctgcacttgatcccgcctatacaactctggagttcgaaaacgtccaggttttgacgatgggcaatgacacctctccttcagaggggacaaacttaaatgcgccaaacagtctgggagtgagcgctctatgcgccatctgtggtgatagggcaactggcaaacactacggggcctcctcttgcgacggatgtaagggctttttccggcgctcggtacgtaaaaatcatatgtattcatgccgatttagcagacaatgtgtggtcgataaggacaaaaggaaccagtgccggtactgtcgcctcaagaagtgcttcagagctggtatgaaaaaggaagcagtgcagaatgagagggatcggattagtacccgccgatcctcttatgaagacagctccctgccgtcaataaacgcccttctgcaggctgaggttttgagtagacaaatcacaagccccgtgtctgggattaatggagatatcagggccaaaaagattgcgtccatcgcagacgtctgtgagtcaatgaaagaacagctcctggtgctggtagagtgggccaagtacatacctgctttttgcgaactcccattagatgaccaggttgccctgcttcgggcacacgctggcgagcatttgctgctaggcgccacccgtcgcagcatggtgttcaaggacgtcctcctgcttgggaacgattatatcgtgcccagacactgtcctgagctggcggaaatgagtagggtgtctattcggatcttggacgagctcgtcctgccatttcaggaattacaaattgatgacaatgagtacgcctacctgaaagcaatcatattctttgatcccgacgctaagggactctccgatcctggtaaaattaagcgacttcgcagccaggttcaggtgtcgctggaagactatatcaacgatagacagtacgactctaggggccggttcggggagttgctactgctcctgccaactcttcaatccattacatggcagatgatcgagcagatccaatttattaaactgttcggaatggccaagatagataatttgctccaggaaatgctgttatgaggactagttataagactgactagcccgatgggcctcccaacgggccctcctcccctccttgcaccgagattaataaaaaaaaaaaaaaaaaaaaaaaaaaaaaaaaaaaaaaaaaaaaaaaaaaaaaaaaaaaaaaaatgcatcccccccccccccccccccccccccccccccaaaggctcttttcagagccaccagaatt

SEQ ID NO: 2185 - RNA, 1345 nt, synthetic construct
  misc_feature 1..1345: note = mRNA i-3 (A64-N5-C30-hSL-N5) (opt3) from Homo sapiens__NP_000448.3__HNF4A(1-375)(K300R)
  source 1..1345: mol_type = other RNA
aggagaaagcttaccatgagactgagcaagaccctcgtggacatggatatggccgactactccgctgcacttgatcccgcctatacaactctggagttcgaaaacgtccaggttttgacgatgggcaatgacacctctccttcagaggggacaaacttaaatgcgccaaacagtctgggagtgagcgctctatgcgccatctgtggtgatagggcaactggcaaacactacggggcctcctcttgcgacggatgtaagggctttttccggcgctcggtacgtaaaaatcatatgtattcatgccgatttagcagacaatgtgtggtcgataaggacaaaaggaaccagtgccggtactgtcgcctcaagaagtgcttcagagctggtatgaaaaaggaagcagtgcagaatgagagggatcggattagtacccgccgatcctcttatgaagacagctccctgccgtcaataaacgcccttctgcaggctgaggttttgagtagacaaatcacaagccccgtgtctgggattaatggagatatcagggccaaaaagattgcgtccatcgcagacgtctgtgagtcaatgaaagaacagctcctggtgctggtagagtgggccaagtacatacctgctttttgcgaactcccattagatgaccaggttgccctgcttcgggcacacgctggcgagcatttgctgctaggcgccaccaagcgtagcatggtgttcaaagacgtcctcctgcttgggaacgattatatcgtgccccgccactgtcctgagctggcggaaatgagtagagtgtctattaggatcttggacgagctcgtcctgccatttcaggaattacaaattgatgacaatgagtacgcctacctgaaggcaatcatattctttgatcccgacgctcggggactctccgatcctggtaaaattaagcgacttcgcagccaggttcaggtgtcgctggaagactatatcaacgatagacagtacgactctaggggccggttcggggagttgctactgctcctgccaactcttcaatccattacatggcagatgatcgagcagatccaatttattaaactgttcggaatggccaagatagataatttgctccaggaaatgctgttatgaggactagttataagactgactagcccgatgggcctcccaacgggccctcctcccctccttgcaccgagattaataaaaaaaaaaaaaaaaaaaaaaaaaaaaaaaaaaaaaaaaaaaaaaaaaaaaaaaaaaaaaaaatgcatcccccccccccccccccccccccccccccccaaaggctcttttcagagccaccagaatt

SEQ ID NO: 2186 - RNA, 1345 nt, synthetic construct
  misc_feature 1..1345: note = mRNA i-3 (A64-N5-C30-hSL-N5) (opt3) from Homo sapiens__NP_000448.3__HNF4A(1-375)(K300R_K307R_K309R)
  source 1..1345: mol_type = other RNA
aggagaaagcttaccatgagactgagcaagaccctcgtggacatggatatggccgactactccgctgcacttgatcccgcctatacaactctggagttcgaaaacgtccaggttttgacgatgggcaatgacacctctccttcagaggggacaaacttaaatgcgccaaacagtctgggagtgagcgctctatgcgccatctgtggtgatagggcaactggcaaacactacggggcctcctcttgcgacggatgtaagggctttttccggcgctcggtacgtaaaaatcatatgtattcatgccgatttagcagacaatgtgtggtcgataaggacaaaaggaaccagtgccggtactgtcgcctcaagaagtgcttcagagctggtatgaaaaaggaagcagtgcagaatgagagggatcggattagtacccgccgatcctcttatgaagacagctccctgccgtcaataaacgcccttctgcaggctgaggttttgagtagacaaatcacaagccccgtgtctgggattaatggagatatcagggccaaaaagattgcgtccatcgcagacgtctgtgagtcaatgaaagaacagctcctggtgctggtagagtgggccaagtacatacctgctttttgcgaactcccattagatgaccaggttgccctgcttcgggcacacgctggcgagcatttgctgctaggcgccaccaagcgtagcatggtgttcaaagacgtcctcctgcttgggaacgattatatcgtgccccgccactgtcctgagctggcggaaatgagtagagtgtctattaggatcttggacgagctcgtcctgccatttcaggaattacaaattgatgacaatgagtacgcctacctgaaggcaatcatattctttgatcccgacgctcggggactctccgatcctggtcgcattcgaagacttaggagccaggttcaggtgtcgctggaagactatatcaacgatcggcagtacgactctcgcggcagattcggggagttgctactgctcctgccaactcttcaatccattacatggcagatgatcgagcagatccaatttattaaactgttcggaatggccaagatagataatttgctccaggaaatgctgttatgaggactagttataagactgactagcccgatgggcctcccaacgggccctcctcccctccttgcaccgagattaataaaaaaaaaaaaaaaaaaaaaaaaaaaaaaaaaaaaaaaaaaaaaaaaaaaaaaaaaaaaaaaatgcatcccccccccccccccccccccccccccccccaaaggctcttttcagagccaccagaatt

SEQ ID NO: 2187 - RNA, 1345 nt, synthetic construct; identical to SEQ ID NO: 2168
  misc_feature 1..1345: note = mRNA i-3 (A64-N5-C30-hSL-N5) (opt3) from Homo sapiens__NP_000448.3__HNF4A(1-375)(K447R_K470R)
  source 1..1345: mol_type = other RNA

SEQ ID NO: 2188 - RNA, 1345 nt, synthetic construct; identical to SEQ ID NO: 2168
  misc_feature 1..1345: note = mRNA i-3 (A64-N5-C30-hSL-N5) (opt3) from Homo sapiens__NP_000448.3__HNF4A(1-375)(K458R)
  source 1..1345: mol_type = other RNA

SEQ ID NO: 2189 - RNA, 1345 nt, synthetic construct
  misc_feature 1..1345: note = mRNA i-3 (A64-N5-C30-hSL-N5) (opt3) from Homo sapiens__NP_000448.3__HNF4A(1-375)(K106R_K108R_K126R_K127R)
  source 1..1345: mol_type = other RNA
aggagaaagcttaccatgagactgagcaagaccctcgtggacatggatatggccgactactccgctgcacttgatcccgcctatacaactctggagttcgaaaacgtccaggttttgacgatgggcaatgacacctctccttcagaggggacaaacttaaatgcgccaaacagtctgggagtgagcgctctatgcgccatctgtggtgatagggcaactggcaaacactacggggcctcctcttgcgacggatgtaagggctttttccggcgctcggtacgtaaaaatcatatgtattcatgccgatttagcagacaatgtgtggtcgatagggaccggcgcaaccagtgcagatactgtaggctcaagaaatgcttccgggctggtatgcgccgagaagcagtgcagaatgagagagataggattagtacccggcgttcctcttatgaagacagctccctgccgtcaataaacgcccttctgcaggctgaggttttgagtcgccaaatcacaagccccgtgtctgggattaatggagatatcagagccaagaagattgcgtccatcgcagacgtctgtgagtcaatgaaagaacagctcctggtgctggtagagtgggccaagtacatacctgctttttgcgaactcccattagatgaccaggttgccctgcttagggcacacgctggcgagcatttgctgctaggcgccaccaaacggagcatggtgttcaaggacgtcctcctgcttgggaacgattatatcgtgccccgacactgtcctgagctggcggaaatgagtcgcgtgtctattagaatcttggacgagctcgtcctgccatttcaggaattacaaattgatgacaatgagtacgcctacctgaaagcaatcatattctttgatcccgacgctaagggactctccgatcctggtaagattaaaaggcttcggagccaggttcaggtgtcgctggaagactatatcaacgatcgccagtacgactctagaggcaggttcggggagttgctactgctcctgccaactcttcaatccattacatggcagatgatcgagcagatccaatttattaagctgttcggaatggccaaaatagataatttgctccaggaaatgctgttatgaggactagttataagactgactagcccgatgggcctcccaacgggccctcctcccctccttgcaccgagattaataaaaaaaaaaaaaaaaaaaaaaaaaaaaaaaaaaaaaaaaaaaaaaaaaaaaaaaaaaaaaaaatgcatcccccccccccccccccccccccccccccccaaaggctcttttcagagccaccagaatt

SEQ ID NO: 2190 - RNA, 1345 nt, synthetic construct
  misc_feature 1..1345: note = mRNA i-3 (A64-N5-C30-hSL-N5) (opt3) from Homo sapiens__NP_000448.3__HNF4A(1-375)(E285Q)
  source 1..1345: mol_type = other RNA
aggagaaagcttaccatgagactgagcaagaccctcgtggacatggatatggccgactactccgctgcacttgatcccgcctatacaactctggagttcgaaaacgtccaggttttgacgatgggcaatgacacctctccttcagaggggacaaacttaaatgcgccaaacagtctgggagtgagcgctctatgcgccatctgtggtgatagggcaactggcaaacactacggggcctcctcttgcgacggatgtaagggctttttccggcgctcggtacgtaaaaatcatatgtattcatgccgatttagcagacaatgtgtggtcgataaggacaaaaggaaccagtgccggtactgtcgcctcaagaagtgcttcagagctggtatgaaaaaggaagcagtgcagaatgagagggatcggattagtacccgccgatcctcttatgaagacagctccctgccgtcaataaacgcccttctgcaggctgaggttttgagtagacaaatcacaagccccgtgtctgggattaatggagatatcagggccaaaaagattgcgtccatcgcagacgtctgtgagtcaatgaaagaacagctcctggtgctggtagagtgggccaagtacatacctgctttttgcgaactcccattagatgaccaggttgccctgcttcgggcacacgctggcgagcatttgctgctaggcgccaccaagcgtagcatggtgttcaaagacgtcctcctgcttgggaacgattatatcgtgccccgccactgtcctgagctggcggaaatgagtagagtgtctattaggatcttggacgagctcgtcctgccatttcaggaattacaaattgatgacaatcagtacgcctacctgaaggcaatcatattctttgatcccgacgctaaaggactctccgatcctggtaagattaaacggcttcgaagccaggttcaggtgtcgctggaggactatatcaacgatcgccaatacgactctagaggcaggttcggggaattgctactgctcctgccaactcttcagtccattacatggcagatgatcgagcaaatccagtttattaagctgttcggaatggccaaaatagataatttgctccaggagatgctgttatgaggactagttataagactgactagcccgatgggcctcccaacgggccctcctcccctccttgcaccgagattaataaaaaaaaaaaaaaaaaaaaaaaaaaaaaaaaaaaaaaaaaaaaaaaaaaaaaaaaaaaaaaaatgcatcccccccccccccccccccccccccccccccaaaggctcttttcagagccaccagaatt

SEQ ID NO: 2191 - RNA, 1345 nt, synthetic construct
  misc_feature 1..1345: note = mRNA i-3 (A64-N5-C30-hSL-N5) (opt3) from Homo sapiens__NP_000448.3__HNF4A(1-375)(T166E)
  source 1..1345: mol_type = other RNA
aggagaaagcttaccatgagactgagcaagaccctcgtggacatggatatggccgactactccgctgcacttgatcccgcctatacaactctggagttcgaaaacgtccaggttttgacgatgggcaatgacacctctccttcagaggggacaaacttaaatgcgccaaacagtctgggagtgagcgctctatgcgccatctgtggtgatagggcaactggcaaacactacggggcctcctcttgcgacggatgtaagggctttttccggcgctcggtacgtaaaaatcatatgtattcatgccgatttagcagacaatgtgtggtcgataaggacaaaaggaaccagtgccggtactgtcgcctcaagaagtgcttcagagctggtatgaaaaaggaagcagtgcagaatgagagggatcggattagtacccgccgatcctcttatgaagacagctccctgccgtcaataaacgcccttctgcaggctgaggttttgagtagacaaatcgagagccccgtgtctgggattaatggagatatcagggccaaaaagattgcgtccatcgcagacgtctgtgaatcaatgaaagagcagctcctggtgctggtagaatgggccaagtacatacctgctttttgcgagctcccattagatgaccaggttgccctgcttcgggcacacgctggcgagcatttgctgctaggcgccacaaagcgtagcatggtgttcaaagacgtcctcctgcttgggaacgattatatcgtgccccgccactgtcctgaactggcggagatgagtagagtgtctattaggatcttggacgaactcgtcctgccatttcaggagttacaaattgatgacaatgaatacgcctacctgaaggcaatcatattctttgatcccgacgctaaaggactctccgatcctggtaagattaaacggcttcgaagccaggttcaggtgtcgctggaggactatatcaacgatcgccagtacgactctagaggcaggttcggggagttgctactgctcctgccaacccttcaatccattacttggcagatgatcgaacagatccaatttattaagctgttcggaatggccaaaatagataatttgctccaggagatgctgttatgaggactagttataagactgactagcccgatgggcctcccaacgggccctcctcccctccttgcaccgagattaataaaaaaaaaaaaaaaaaaaaaaaaaaaaaaaaaaaaaaaaaaaaaaaaaaaaaaaaaaaaaaaatgcatcccccccccccccccccccccccccccccccaaaggctcttttcagagccaccagaatt

SEQ ID NO: 2192 - RNA, 1345 nt, synthetic construct
  misc_feature 1..1345: note = mRNA i-3 (A64-N5-C30-hSL-N5) (opt3) from Homo sapiens__NP_000448.3__HNF4A(1-375)(S148A)
  source 1..1345: mol_type = other RNA
aggagaaagcttaccatgagactgagcaagaccctcgtggacatggatatggccgactactccgctgcacttgatcccgcctatacaactctggagttcgaaaacgtccaggttttgacgatgggcaatgacacctctccttcagaggggacaaacttaaatgcgccaaacagtctgggagtgagcgctctatgcgccatctgtggtgatagggcaactggcaaacactacggggcctcctcttgcgacggatgtaagggctttttccggcgctcggtacgtaaaaatcatatgtattcatgccgatttagcagacaatgtgtggtcgataaggacaaaaggaaccagtgccggtactgtcgcctcaagaagtgcttcagagctggtatgaaaaaggaagcagtgcagaatgagagggatcggattagtacccgccgatcctcttatgaagacagcgccctgccgtccataaacgcccttctgcaggccgaggttttgtcaagacaaatcacaagtcccgtgagcgggattaatggagatatcagggcgaaaaagattgcatctatcgccgacgtctgtgagtccatgaaagaacagctcctggtgctggtagagtgggctaagtacatacctgccttttgcgaactcccattagatgaccaggttgcactgcttcgggctcacgccggcgagcatttgctgctaggcgcgaccaagcgttcaatggtgttcaaagacgtcctcctgcttgggaacgattatatcgtgccccgccactgtcctgagctggccgaaatgagcagagtgagtattaggatcttggacgagctcgtcctgccatttcaggaattacaaattgatgacaatgagtacgcatacctgaaggctatcatattctttgatcccgacgccaaaggactctctgatcctggtaagattaaacggcttcgatcccaggttcaggtgagcctggaagactatatcaacgatcgccagtacgactcgagaggcaggttcggggagttgctactgctcctgccaactcttcaatctattacatggcagatgatcgagcagatccaatttattaagctgttcggaatggctaaaatagataatttgctccaggaaatgctgttatgaggactagttataagactgactagcccgatgggcctcccaacgggccctcctcccctccttgcaccgagattaataaaaaaaaaaaaaaaaaaaaaaaaaaaaaaaaaaaaaaaaaaaaaaaaaaaaaaaaaaaaaaaatgcatcccccccccccccccccccccccccccccccaaaggctcttttcagagccaccagaatt

SEQ ID NO: 2193 - RNA, 1345 nt, synthetic construct
  misc_feature 1..1345: note = mRNA i-3 (A64-N5-C30-hSL-N5) (opt3) from Homo sapiens__NP_000448.3__HNF4A(1-375)(S148E)
  source 1..1345: mol_type = other RNA
aggagaaagcttaccatgagactgagcaagaccctcgtggacatggatatggccgactactccgctgcacttgatcccgcctatacaactctggagttcgaaaacgtccaggttttgacgatgggcaatgacacctctccttcagaggggacaaacttaaatgcgccaaacagtctgggagtgagcgctctatgcgccatctgtggtgatagggcaactggcaaacactacggggcctcctcttgcgacggatgtaagggctttttccggcgctcggtacgtaaaaatcatatgtattcatgccgatttagcagacaatgtgtggtcgataaggacaaaaggaaccagtgccggtactgtcgcctcaagaagtgcttcagagctggtatgaaaaaggaagcagtgcagaatgagagggatcggattagtacccgccgatcctcttatgaagacagcgagctgccgtccataaacgcccttctgcaggctgaggttttgtcaagacaaatcacaagtcccgtgagcgggattaatggagatatcagggccaaaaagattgcgtctatcgcagacgtctgtgaatccatgaaagagcagctcctggtgctggtagaatgggccaagtacatacctgctttttgcgagctcccattagatgaccaggttgccctgcttcgggcacacgctggcgagcatttgctgctaggcgccaccaagcgttcaatggtgttcaaagacgtcctcctgcttgggaacgattatatcgtgccccgccactgtcctgaactggcggagatgagcagagtgagtattaggatcttggacgaactcgtcctgccatttcaggagttacaaattgatgacaatgaatacgcctacctgaaggcaatcatattctttgatcccgacgctaaaggactctctgatcctggtaagattaaacggcttcgatcccaggttcaggtgagcctggaggactatatcaacgatcgccagtacgactcgagaggcaggttcggggagttgctactgctcctgccaactcttcaatctattacatggcagatgatcgaacagatccaatttattaagctgttcggaatggccaaaatagataatttgctccaggagatgctgttatgaggactagttataagactgactagcccgatgggcctcccaacgggccctcctcccctccttgcaccgagattaataaaaaaaaaaaaaaaaaaaaaaaaaaaaaaaaaaaaaaaaaaaaaaaaaaaaaaaaaaaaaaaatgcatcccccccccccccccccccccccccccccccaaaggctcttttcagagccaccagaatt

SEQ ID NO: 2194 - RNA, 1345 nt, synthetic construct
  misc_feature 1..1345: note = mRNA i-3 (A64-N5-C30-hSL-N5) (opt3) from Homo sapiens__NP_000448.3__HNF4A(1-375)(S183A)
  source 1..1345: mol_type = other RNA
aggagaaagcttaccatgagactgagcaagaccctcgtggacatggatatggccgactactccgctgcacttgatcccgcctatacaactctggagttcgaaaacgtccaggttttgacgatgggcaatgacacctctccttcagaggggacaaacttaaatgcgccaaacagtctgggagtgagcgctctatgcgccatctgtggtgatagggcaactggcaaacactacggggcctcctcttgcgacggatgtaagggctttttccggcgctcggtacgtaaaaatcatatgtattcatgccgatttagcagacaatgtgtggtcgataaggacaaaaggaaccagtgccggtactgtcgcctcaagaagtgcttcagagctggtatgaaaaaggaagcagtgcagaatgagagggatcggattagtacccgccgatcctcttatgaagacagctccctgccgtcaataaacgcccttctgcaggctgaggttttgagtagacaaatcacaagccccgtgtctgggattaatggagatatcagggccaaaaagattgcggcaatcgccgacgtctgtgagtccatgaaagaacagctcctggtgctggtagagtgggctaagtacatacctgccttttgcgaactcccattagatgaccaggttgcactgcttcgggctcacgccggcgagcatttgctgctaggcgcgaccaagcgttcaatggtgttcaaagacgtcctcctgcttgggaacgattatatcgtgccccgccactgtcctgagctggccgaaatgagcagagtgagtattaggatcttggacgagctcgtcctgccatttcaggaattacaaattgatgacaatgagtacgcatacctgaaggctatcatattctttgatcccgacgccaaaggactctctgatcctggtaagattaaacggcttcgatcccaggttcaggtgagcctggaagactatatcaacgatcgccagtacgactcgagaggcaggttcggggagttgctactgctcctgccaactcttcaatctattacatggcagatgatcgagcagatccaatttattaagctgttcggaatggctaaaatagataatttgctccaggaaatgctgttatgaggactagttataagactgactagcccgatgggcctcccaacgggccctcctcccctccttgcaccgagattaataaaaaaaaaaaaaaaaaaaaaaaaaaaaaaaaaaaaaaaaaaaaaaaaaaaaaaaaaaaaaaaatgcatcccccccccccccccccccccccccccccccaaaggctcttttcagagccaccagaatt

SEQ ID NO: 2195 - RNA, 1345 nt, synthetic construct
  misc_feature 1..1345: note = mRNA i-3 (A64-N5-C30-hSL-N5) (opt3) from Homo sapiens__NP_000448.3__HNF4A(1-375)(S183E)
  source 1..1345: mol_type = other RNA
aggagaaagcttaccatgagactgagcaagaccctcgtggacatggatatggccgactactccgctgcacttgatcccgcctatacaactctggagttcgaaaacgtccaggttttgacgatgggcaatgacacctctccttcagaggggacaaacttaaatgcgccaaacagtctgggagtgagcgctctatgcgccatctgtggtgatagggcaactggcaaacactacggggcctcctcttgcgacggatgtaagggctttttccggcgctcggtacgtaaaaatcatatgtattcatgccgatttagcagacaatgtgtggtcgataaggacaaaaggaaccagtgccggtactgtcgcctcaagaagtgcttcagagctggtatgaaaaaggaagcagtgcagaatgagagggatcggattagtacccgccgatcctcttatgaagacagctccctgccgtcaataaacgcccttctgcaggctgaggttttgagtagacaaatcacaagccccgtgtctgggattaatggagatatcagggccaaaaagattgcggagatcgcagacgtctgtgaatccatgaaagagcagctcctggtgctggtagaatgggccaagtacatacctgctttttgcgagctcccattagatgaccaggttgccctgcttcgggcacacgctggcgagcatttgctgctaggcgccaccaagcgttcaatggtgttcaaagacgtcctcctgcttgggaacgattatatcgtgccccgccactgtcctgaactggcggagatgagcagagtgagtattaggatcttggacgaactcgtcctgccatttcaggagttacaaattgatgacaatgaatacgcctacctgaaggcaatcatattctttgatcccgacgctaaaggactctctgatcctggtaagattaaacggcttcgatcccaggttcaggtgagcctggaggactatatcaacgatcgccagtacgactcgagaggcaggttcggggagttgctactgctcctgccaactcttcaatctattacatggcagatgatcgaacagatccaatttattaagctgttcggaatggccaaaatagataatttgctccaggagatgctgttatgaggactagttataagactgactagcccgatgggcctcccaacgggccctcctcccctccttgcaccgagattaataaaaaaaaaaaaaaaaaaaaaaaaaaaaaaaaaaaaaaaaaaaaaaaaaaaaaaaaaaaaaaaatgcatcccccccccccccccccccccccccccccccaaaggctcttttcagagccaccagaatt

SEQ ID NO: 2196 - RNA, 1345 nt, synthetic construct; identical to SEQ ID NO: 2168
  misc_feature 1..1345: note = mRNA i-3 (A64-N5-C30-hSL-N5) (opt3) from Homo sapiens__NP_000448.3__HNF4A(1-375)(S461A)
  source 1..1345: mol_type = other RNA

SEQ ID NO: 2197 - RNA, 1345 nt, synthetic construct; identical to SEQ ID NO: 2168
  misc_feature 1..1345: note = mRNA i-3 (A64-N5-C30-hSL-N5) (opt3) from Homo sapiens__NP_000448.3__HNF4A(1-375)(S461E)
  source 1..1345: mol_type = other RNA

SEQ ID NO: 2198 - RNA, 1345 nt, synthetic construct
  misc_feature 1..1345: note = mRNA i-3 (A64-N5-C30-hSL-N5) (opt3) from Homo sapiens__NP_000448.3__HNF4A(1-375)(S142A_S143A_S313A)
  source 1..1345: mol_type = other RNA
aggagaaagcttaccatgagactgagcaagaccctcgtggacatggatatggccgactactccgctgcacttgatcccgcctatacaactctggagttcgaaaacgtccaggttttgacgatgggcaatgacacctctccttcagaggggacaaacttaaatgcgccaaacagtctgggagtgagcgctctatgcgccatctgtggtgatagggcaactggcaaacactacggggcctcctcttgcgacggatgtaagggctttttccggcgctcggtacgtaaaaatcatatgtattcatgccgatttagcagacaatgtgtggtcgataaggacaaaaggaaccagtgccggtactgtcgcctcaagaagtgcttcagagctggtatgaaaaaggaagcagtgcagaatgagagggatcggattagtacccgccgagccgcttatgaagactcctctctgccgagcataaacgcccttctgcaggcggaggttttgtccagacaaatcacatcacccgtgagtgggattaatggagatatcagggccaaaaagattgccagcatcgctgacgtctgtgagtctatgaaagaacagctcctggtgctggtagagtgggccaagtacatacctgcattttgcgaactcccattagatgaccaggttgctctgcttcgggcccacgcgggcgagcatttgctgctaggcgccaccaagcgttccatggtgttcaaagacgtcctcctgcttgggaacgattatatcgtgccccgccactgtcctgagctggcagaaatgtcaagagtgagcattaggatcttggacgagctcgtcctgccatttcaggaattacaaattgatgacaatgagtacgcttacctgaaggccatcatattctttgatcccgacgctaaaggactcagtgatcctggtaagattaaacggcttcgagcccaggttcaggtgtctctggaagactatatcaacgatcgccagtacgactccagaggcaggttcggggagttgctactgctcctgccaactcttcaaagcattacatggcagatgatcgagcagatccaatttattaagctgttcggaatggcaaaaatagataatttgctccaggaaatgctgttatgaggactagttataagactgactagcccgatgggcctcccaacgggccctcctcccctccttgcaccgagattaataaaaaaaaaaaaaaaaaaaaaaaaaaaaaaaaaaaaaaaaaaaaaaaaaaaaaaaaaaaaaaaatgcatcccccccccccccccccccccccccccccccaaaggctcttttcagagccaccagaatt

SEQ ID NO: 2199 - RNA, 1345 nt, synthetic construct; identical to SEQ ID NO: 2198
  misc_feature 1..1345: note = mRNA i-3 (A64-N5-C30-hSL-N5) (opt3) from Homo sapiens__NP_000448.3__HNF4A(1-375)(S142A_S143A_S313A_K458R)
  source 1..1345: mol_type = other RNA

SEQ ID NO: 2200 - RNA, 1345 nt, synthetic construct
  misc_feature 1..1345: note = mRNA i-3 (A64-N5-C30-hSL-N5) (opt3) from Homo sapiens__NP_000448.3__HNF4A(1-375)(S142A_S143A_S167A_S313A_ S378A_T429A_T432A_S436A_K458R)
  source 1..1345: mol_type = other RNA
aggagaaagcttaccatgagactgagcaagaccctcgtggacatggatatggccgactactccgctgcacttgatcccgcctatacaactctggagttcgaaaacgtccaggttttgacgatgggcaatgacacctctccttcagaggggacaaacttaaatgcgccaaacagtctgggagtgagcgctctatgcgccatctgtggtgatagggcaactggcaaacactacggggcctcctcttgcgacggatgtaagggctttttccggcgctcggtacgtaaaaatcatatgtattcatgccgatttagcagacaatgtgtggtcgataaggacaaaaggaaccagtgccggtactgtcgcctcaagaagtgcttcagagctggtatgaaaaaggaagcagtgcagaatgagagggatcggattagtacccgccgagccgcttatgaagactcctctctgccgagcataaacgcccttctgcaggcggaggttttgtccagacaaatcacagcacccgtgtcagggattaatggagatatcagggccaaaaagattgctagtatcgccgacgtctgtgagagcatgaaagaacagctcctggtgctggtagagtgggcaaagtacatacctgctttttgcgaactcccattagatgaccaggttgccctgcttcgggcgcacgccggcgagcatttgctgctaggcgcaaccaagcgttctatggtgttcaaagacgtcctcctgcttgggaacgattatatcgtgccccgccactgtcctgagctggctgaaatgtccagagtgtcaattaggatcttggacgagctcgtcctgccatttcaggaattacaaattgatgacaatgagtacgcctacctgaaggctatcatattctttgatcccgacgccaaaggactcagcgatcctggtaagattaaacggcttcgagcacaggttcaggtgagtctggaagactatatcaacgatcgccagtacgactctagaggcaggttcggggagttgctactgctcctgccaactcttcaatccattacatggcagatgatcgagcagatccaatttattaagctgttcggaatggccaaaatagataatttgctccaggaaatgctgttatgaggactagttataagactgactagcccgatgggcctcccaacgggccctcctcccctccttgcaccgagattaataaaaaaaaaaaaaaaaaaaaaaaaaaaaaaaaaaaaaaaaaaaaaaaaaaaaaaaaaaaaaaaatgcatcccccccccccccccccccccccccccccccaaaggctcttttcagagccaccagaatt

SEQ ID NO: 2201 - RNA, 1345 nt, synthetic construct
  misc_feature 1..1345: note = mRNA i-3 (A64-N5-C30-hSL-N5) (opt3) from Homo sapiens__NP_000448.3__HNF4A(1-375)(S142A_S143A_S148A_S167A_ S313A_S378A_T429A_T432A_S436A_K458R)
  source 1..1345: mol_type = other RNA
aggagaaagcttaccatgagactgagcaagaccctcgtggacatggatatggccgactactccgctgcacttgatcccgcctatacaactctggagttcgaaaacgtccaggttttgacgatgggcaatgacacctctccttcagaggggacaaacttaaatgcgccaaacagtctgggagtgagcgctctatgcgccatctgtggtgatagggcaactggcaaacactacggggcctcctcttgcgacggatgtaagggctttttccggcgctcggtacgtaaaaatcatatgtattcatgccgatttagcagacaatgtgtggtcgataaggacaaaaggaaccagtgccggtactgtcgcctcaagaagtgcttcagagctggtatgaaaaaggaagcagtgcagaatgagagggatcggattagtacccgccgagccgcttatgaagactccgccctgccgtctataaacgcgcttctgcaggcagaggttttgagcagacaaatcacagcccccgtgtccgggattaatggagatatcagggctaaaaagattgcctcaatcgcagacgtctgtgagagtatgaaagaacagctcctggtgctggtagagtgggctaagtacatacctgccttttgcgaactcccattagatgaccaggttgcgctgcttcgggcccacgcaggcgagcatttgctgctaggcgctaccaagcgtagcatggtgttcaaagacgtcctcctgcttgggaacgattatatcgtgccccgccactgtcctgagctggccgaaatgtctagagtgtccattaggatcttggacgagctcgtcctgccatttcaggaattacaaattgatgacaatgagtacgcttacctgaaggccatcatattctttgatcccgacgcaaaaggactctcagatcctggtaagattaaacggcttcgagcccaggttcaggtgagcctggaagactatatcaacgatcgccagtacgacagtagaggcaggttcggggagttgctactgctcctgccaactcttcaatctattacatggcagatgatcgagcagatccaatttattaagctgttcggaatggctaaaatagataatttgctccaggaaatgctgttatgaggactagttataagactgactagcccgatgggcctcccaacgggccctcctcccctccttgcaccgagattaataaaaaaaaaaaaaaaaaaaaaaaaaaaaaaaaaaaaaaaaaaaaaaaaaaaaaaaaaaaaaaaatgcatcccccccccccccccccccccccccccccccaaaggctcttttcagagccaccagaatt

SEQ ID NO: 2202 - RNA, 1345 nt, synthetic construct
  misc_feature 1..1345: note = mRNA i-3 (A64-N5-C30-hSL-N5) (opt3) from Homo sapiens__NP_000448.3__HNF4A(1-375)(K106R_K108R_K126R_K127R_ S142A_S143A_S148A_S167A_S313A_S378A_T429A_T432A_S436A_K458R )
  source 1..1345: mol_type = other RNA
aggagaaagcttaccatgagactgagcaagaccctcgtggacatggatatggccgactactccgctgcacttgatcccgcctatacaactctggagttcgaaaacgtccaggttttgacgatgggcaatgacacctctccttcagaggggacaaacttaaatgcgccaaacagtctgggagtgagcgctctatgcgccatctgtggtgatagggcaactggcaaacactacggggcctcctcttgcgacggatgtaagggctttttccggcgctcggtacgtaaaaatcatatgtattcatgccgatttagcagacaatgtgtggtcgatagggaccggcgcaaccagtgcagatactgtaggctcaagaaatgcttccgggctggtatgcgccgagaagcagtgcagaatgagagagataggattagtacccggcgtgccgcttatgaagactccgccctgccgtctataaacgcgcttctgcaggcagaggttttgagccgccaaatcacagcccccgtgtccgggattaatggagatatcagagctaagaagattgcctcaatcgcagacgtctgtgagagtatgaaagaacagctcctggtgctggtagagtgggctaagtacatacctgccttttgcgaactcccattagatgaccaggttgcgctgcttagggcccacgcaggcgagcatttgctgctaggcgctaccaaacggagcatggtgttcaaggacgtcctcctgcttgggaacgattatatcgtgccccgacactgtcctgagctggccgaaatgtctcgcgtgtccattagaatcttggacgagctcgtcctgccatttcaggaattacaaattgatgacaatgagtacgcttacctgaaagccatcatattctttgatcccgacgcaaagggactctcagatcctggtaagattaaaaggcttcgggcccaggttcaggtgagcctggaagactatatcaacgatcgccagtacgacagtagaggcaggttcggggagttgctactgctcctgccaactcttcaatctattacatggcagatgatcgagcagatccaatttattaagctgttcggaatggctaaaatagataatttgctccaggaaatgctgttatgaggactagttataagactgactagcccgatgggcctcccaacgggccctcctcccctccttgcaccgagattaataaaaaaaaaaaaaaaaaaaaaaaaaaaaaaaaaaaaaaaaaaaaaaaaaaaaaaaaaaaaaaaatgcatcccccccccccccccccccccccccccccccaaaggctcttttcagagccaccagaatt

SEQ ID NO: 2203 - RNA, 1345 nt, synthetic construct
  misc_feature 1..1345: note = mRNA i-3 (A64-N5-C30-hSL-N5) (opt3) from Homo sapiens__NP_000448.3__HNF4A(1-375)(S142A_S143A_S148A_T166A_ S167A_S313A_S378A_T429A_T432A_S436A_K458R)
  source 1..1345: mol_type = other RNA
aggagaaagcttaccatgagactgagcaagaccctcgtggacatggatatggccgactactccgctgcacttgatcccgcctatacaactctggagttcgaaaacgtccaggttttgacgatgggcaatgacacctctccttcagaggggacaaacttaaatgcgccaaacagtctgggagtgagcgctctatgcgccatctgtggtgatagggcaactggcaaacactacggggcctcctcttgcgacggatgtaagggctttttccggcgctcggtacgtaaaaatcatatgtattcatgccgatttagcagacaatgtgtggtcgataaggacaaaaggaaccagtgccggtactgtcgcctcaagaagtgcttcagagctggtatgaaaaaggaagcagtgcagaatgagagggatcggattagtacccgccgagccgcttatgaagactccgccctgccgtctataaacgcgcttctgcaggcagaggttttgagcagacaaatcgccgctcccgtgtccgggattaatggagatatcagggccaaaaagattgcatcaatcgctgacgtctgtgagagtatgaaagaacagctcctggtgctggtagagtgggccaagtacatacctgcgttttgcgaactcccattagatgaccaggttgccctgcttcgggcacacgctggcgagcatttgctgctaggcgccacaaagcgtagcatggtgttcaaagacgtcctcctgcttgggaacgattatatcgtgccccgccactgtcctgagctggctgaaatgtctagagtgtccattaggatcttggacgagctcgtcctgccatttcaggaattacaaattgatgacaatgagtacgcctacctgaaggcaatcatattctttgatcccgacgccaaaggactctcagatcctggtaagattaaacggcttcgagctcaggttcaggtgagcctggaagactatatcaacgatcgccagtacgacagtagaggcaggttcggggagttgctactgctcctgccaacccttcaatctattacttggcagatgatcgagcagatccaatttattaagctgttcggaatggcgaaaatagataatttgctccaggaaatgctgttatgaggactagttataagactgactagcccgatgggcctcccaacgggccctcctcccctccttgcaccgagattaataaaaaaaaaaaaaaaaaaaaaaaaaaaaaaaaaaaaaaaaaaaaaaaaaaaaaaaaaaaaaaaatgcatcccccccccccccccccccccccccccccccaaaggctcttttcagagccaccagaatt

SEQ ID NO: 2204 - RNA, 1345 nt, synthetic construct
  misc_feature 1..1345: note = mRNA i-3 (A64-N5-C30-hSL-N5) (opt3) from Homo sapiens__NP_000448.3__HNF4A(1-375)(S87A_S142A_S143A_S148A_T 166A_S167A_S313A_S378A_T429A_T432A_S436A_K458R)
  source 1..1345: mol_type = other RNA
aggagaaagcttaccatgagactgagcaagaccctcgtggacatggatatggccgactactccgctgcacttgatcccgcctatacaactctggagttcgaaaacgtccaggttttgacgatgggcaatgacacctctccttcagaggggacaaacttaaatgcgccaaacagtctgggagtgagcgctctatgcgccatctgtggtgatagggcaactggcaaacactacggggcctcctcttgcgacggatgtaagggctttttccggcgcgctgtacgtaaaaatcatatgtattcgtgccgattttcaagacaatgtgtggtcgataaggacaaaaggaaccagtgccggtactgtcgcctcaagaagtgcttcagagcaggtatgaaaaaggaagccgtgcagaatgagagggatcggattagcacccgccgagctgcctatgaagacagtgcgctgccgtccataaacgcacttctgcaggccgaggttttgtctagacaaatcgctgcccccgtgagcgggattaatggagatatcagggctaaaaagattgcatccatcgccgacgtctgtgagtcaatgaaagaacagctcctggtgctggtagagtgggcgaagtacatacctgccttttgcgaactcccattagatgaccaggttgcactgcttcgggctcacgccggcgagcatttgctgctaggcgctacaaagcgtagtatggtgttcaaagacgtcctcctgcttgggaacgattatatcgtgccccgccactgtcctgagctggccgaaatgagcagagtgtctattaggatcttggacgagctcgtcctgccatttcaggaattacaaattgatgacaatgagtacgcatacctgaaggccatcatattctttgatcccgacgctaaaggactctccgatcctggtaagattaaacggcttcgagcgcaggttcaggtgtcactggaagactatatcaacgatcgccagtacgacagcagaggcaggttcggggagttgctactgctcctgccaacccttcaaagtattacttggcagatgatcgagcagatccaatttattaagctgttcggaatggcaaaaatagataatttgctccaggaaatgctgttatgaggactagttataagactgactagcccgatgggcctcccaacgggccctcctcccctccttgcaccgagattaataaaaaaaaaaaaaaaaaaaaaaaaaaaaaaaaaaaaaaaaaaaaaaaaaaaaaaaaaaaaaaaatgcatcccccccccccccccccccccccccccccccaaaggctcttttcagagccaccagaatt

SEQ ID NO: 2205 - RNA, 1345 nt, synthetic construct
  misc_feature 1..1345: note = mRNA i-3 (A64-N5-C30-hSL-N5) (opt3) from Homo sapiens__NP_000448.3__HNF4A(1-375)(S87A_K106R_K108R_K126R_K 127R_S142A_S143A_S148A_T166A_S167A_S313A_S378A_T429A_T432A_ S436A_K458R)
  source 1..1345: mol_type = other RNA
aggagaaagcttaccatgagactgagcaagaccctcgtggacatggatatggccgactactccgctgcacttgatcccgcctatacaactctggagttcgaaaacgtccaggttttgacgatgggcaatgacacctctccttcagaggggacaaacttaaatgcgccaaacagtctgggagtgagcgctctatgcgccatctgtggtgatagggcaactggcaaacactacggggcctcctcttgcgacggatgtaagggctttttccggcgcgctgtacgtaaaaatcatatgtattcgtgccgattttcaagacaatgtgtggtcgatagggaccggcgcaaccagtgcagatactgtaggctcaagaaatgcttccgggcaggtatgcgccgagaagccgtgcagaatgagagagataggattagcacccggcgtgctgcctatgaagacagtgcgctgccgtccataaacgcacttctgcaggccgaggttttgtctcgccaaatcgctgcccccgtgagcgggattaatggagatatcagagcaaagaagattgcttccatcgccgacgtctgtgagtcaatgaaagaacagctcctggtgctggtagagtgggcgaagtacatacctgccttttgcgaactcccattagatgaccaggttgcactgcttagggctcacgccggcgagcatttgctgctaggcgctacaaaacggagtatggtgttcaaggacgtcctcctgcttgggaacgattatatcgtgccccgacactgtcctgagctggccgaaatgagccgcgtgtctattagaatcttggacgagctcgtcctgccatttcaggaattacaaattgatgacaatgagtacgcatacctgaaagccatcatattctttgatcccgacgctaagggactctccgatcctggtaagattaaaaggcttcgggcgcaggttcaggtgtcactggaagactatatcaacgatcgccagtacgacagcagaggcaggttcggggagttgctactgctcctgccaacccttcaaagtattacttggcagatgatcgagcagatccaatttattaagctgttcggaatggcaaaaatagataatttgctccaggaaatgctgttatgaggactagttataagactgactagcccgatgggcctcccaacgggccctcctcccctccttgcaccgagattaataaaaaaaaaaaaaaaaaaaaaaaaaaaaaaaaaaaaaaaaaaaaaaaaaaaaaaaaaaaaaaaatgcatcccccccccccccccccccccccccccccccaaaggctcttttcagagccaccagaatt

SEQ ID NO: 2206 - RNA, 1345 nt, synthetic construct
  misc_feature 1..1345: note = mRNA i-3 (A64-N5-C30-hSL-N5) (opt3) from Homo sapiens__NP_000448.3__HNF4A(1-375)(S87A_K106R_K108R_K126R_K 127R)
  source 1..1345: mol_type = other RNA
aggagaaagcttaccatgagactgagcaagaccctcgtggacatggatatggccgactactccgctgcacttgatcccgcctatacaactctggagttcgaaaacgtccaggttttgacgatgggcaatgacacctctccttcagaggggacaaacttaaatgcgccaaacagtctgggagtgagcgctctatgcgccatctgtggtgatagggcaactggcaaacactacggggcctcctcttgcgacggatgtaagggctttttccggcgcgctgtacgtaaaaatcatatgtattcgtgccgattttcaagacaatgtgtggtcgatagggaccggcgcaaccagtgcagatactgtaggctcaagaaatgcttccgggcaggtatgcgccgagaagccgtgcagaatgagagagataggattagcacccggcgtagttcctatgaagactctagcctgccgtccataaacgcccttctgcaggccgaggttttgtcacgccaaatcacaagtcccgtgagcgggattaatggagatatcagagcgaagaagattgcatctatcgccgacgtctgtgagtccatgaaagaacagctcctggtgctggtagagtgggctaagtacatacctgccttttgcgaactcccattagatgaccaggttgcactgcttagggctcacgccggcgagcatttgctgctaggcgcgaccaaacggtcaatggtgttcaaggacgtcctcctgcttgggaacgattatatcgtgccccgacactgtcctgagctggccgaaatgagccgcgtgagtattagaatcttggacgagctcgtcctgccatttcaggaattacaaattgatgacaatgagtacgcatacctgaaagctatcatattctttgatcccgacgccaagggactctctgatcctggtaagattaaaaggcttcggtcccaggttcaggtgagcctggaagactatatcaacgatcgccagtacgactcgagaggcaggttcggggagttgctactgctcctgccaactcttcaatctattacatggcagatgatcgagcagatccaatttattaagctgttcggaatggctaaaatagataatttgctccaggaaatgctgttatgaggactagttataagactgactagcccgatgggcctcccaacgggccctcctcccctccttgcaccgagattaataaaaaaaaaaaaaaaaaaaaaaaaaaaaaaaaaaaaaaaaaaaaaaaaaaaaaaaaaaaaaaaatgcatcccccccccccccccccccccccccccccccaaaggctcttttcagagccaccagaatt

SEQ ID NO: 2207 - RNA, 1345 nt, synthetic construct; identical to SEQ ID NO: 2205
  misc_feature 1..1345: note = mRNA i-3 (A64-N5-C30-hSL-N5) (opt3) from Homo sapiens__NP_000448.3__HNF4A(1-375)(S87A_K106R_K108R_K126R_K 127R_S142A_S143A_S148A_T166A_S167A_S313A_S378A_T429A_T432A_ S436A_K458R_S461A)
  source 1..1345: mol_type = other RNA

SEQ ID NO: 2208 - RNA, 1345 nt, synthetic construct; identical to SEQ ID NO: 2205
  misc_feature 1..1345: note = mRNA i-3 (A64-N5-C30-hSL-N5) (opt3) from Homo sapiens__NP_000448.3__HNF4A(1-375)(S87A_K106R_K108R_K126R_K 127R_S142A_S143A_S148A_T166A_S167A_S313A_S378A_T429A_T432A_ S436A_K458R_S461E)
  source 1..1345: mol_type = other RNA

SEQ ID NO: 2209 - RNA, 1345 nt, synthetic construct
  misc_feature 1..1345: note = mRNA i-3 (A64-N5-C30-hSL-N5) (opt3) from Homo sapiens__NP_000448.3__HNF4A(1-375)(S87A_K106R_K108R_K126R_K 127R_S142A_S143A_S148E_T166A_S167E_S313A_S378E_T429E_T432E_ S436E_K458R_S461E)
  source 1..1345: mol_type = other RNA
aggagaaagcttaccatgagactgagcaagaccctcgtggacatggatatggccgactactccgctgcacttgatcccgcctatacaactctggagttcgaaaacgtccaggttttgacgatgggcaatgacacctctccttcagaggggacaaacttaaatgcgccaaacagtctgggagtgagcgctctatgcgccatctgtggtgatagggcaactggcaaacactacggggcctcctcttgcgacggatgtaagggctttttccggcgcgctgtacgtaaaaatcatatgtattcgtgccgattttcaagacaatgtgtggtcgatagggaccggcgcaaccagtgcagatactgtaggctcaagaaatgcttccgggcaggtatgcgccgagaagccgtgcagaatgagagagataggattagcacccggcgtgctgcctatgaagacagtgagctgccgtccataaacgcgcttctgcaggcagaggttttgtctcgccaaatcgccgaacccgtgagcgggattaatggagatatcagagctaagaagattgcctccatcgcagacgtctgtgagtcaatgaaagaacagctcctggtgctggtagagtgggctaagtacatacctgccttttgcgagctcccattagatgaccaggttgcgctgcttagggcccacgcaggcgaacatttgctgctaggcgctacaaaacggagtatggtgttcaaggacgtcctcctgcttgggaacgattatatcgtgccccgacactgtcctgagctggccgaaatgagccgcgtgtctattagaatcttggacgagctcgtcctgccatttcaggaattacaaattgatgacaatgagtacgcttacctgaaagccatcatattctttgatcccgacgcaaagggactctccgatcctggtaagattaaaaggcttcgggcccaggttcaggtgtcactggaggactatatcaacgatcgccagtacgacagcagaggcaggttcggggaattgctactgctcctgccaacccttcaaagtattacttggcagatgatcgagcagatccaatttattaagctgttcggaatggctaaaatagataatttgctccaggaaatgctgttatgaggactagttataagactgactagcccgatgggcctcccaacgggccctcctcccctccttgcaccgagattaataaaaaaaaaaaaaaaaaaaaaaaaaaaaaaaaaaaaaaaaaaaaaaaaaaaaaaaaaaaaaaaatgcatcccccccccccccccccccccccccccccccaaaggctcttttcagagccaccagaatt

SEQ ID NO: 2210 - RNA, 1345 nt, synthetic construct
  misc_feature 1..1345: note = mRNA i-3 (A64-N5-C30-hSL-N5) (opt3) from Homo sapiens__NP_000448.3__HNF4A(1-375)(S87A_K106R_K108R_K126R_K 127R_S142A_S143A_S148A_T166A_S167A_K179R_K180R_S313A_S378A_ T429A_T432A_S436A_K458R_S461E)
  source 1..1345: mol_type = other RNA
aggagaaagcttaccatgagactgagcaagaccctcgtggacatggatatggccgactactccgctgcacttgatcccgcctatacaactctggagttcgaaaacgtccaggttttgacgatgggcaatgacacctctccttcagaggggacaaacttaaatgcgccaaacagtctgggagtgagcgctctatgcgccatctgtggtgatagggcaactggcaaacactacggggcctcctcttgcgacggatgtaagggctttttccggcgcgctgtacgtaaaaatcatatgtattcgtgccgattttcaagacaatgtgtggtcgatagggaccggcgcaaccagtgcagatactgtaggctcaagaaatgcttccgggcaggtatgcgccgagaagccgtgcagaatgagagagataggattagcacccggcgtgctgcctatgaagacagtgcgctgccgtccataaacgcacttctgcaggccgaggttttgtctcgccaaatcgctgcccccgtgagcgggattaatggagatatcagagcaaggcggattgcttccatcgccgacgtctgtgagtcaatgaaggaacagctcctggtgctggtagagtgggcgaagtacatacctgccttttgcgaactcccattagatgaccaggttgcactgcttcgagctcacgccggcgagcatttgctgctaggcgctacaaaacgcagtatggtgttcaaggacgtcctcctgcttgggaacgattatatcgtgcccagacactgtcctgagctggccgaaatgagcagggtgtctattcggatcttggacgagctcgtcctgccatttcaggaattacaaattgatgacaatgagtacgcatacctgaaagccatcatattctttgatcccgacgctaagggactctccgatcctggtaaaattaagcgccttagagcgcaggttcaggtgtcactggaagactatatcaacgataggcagtacgacagccgtggccggttcggggagttgctactgctcctgccaacccttcaaagtattacttggcagatgatcgagcagatccaatttattaagctgttcggaatggcaaaaatagataatttgctccaggaaatgctgttatgaggactagttataagactgactagcccgatgggcctcccaacgggccctcctcccctccttgcaccgagattaataaaaaaaaaaaaaaaaaaaaaaaaaaaaaaaaaaaaaaaaaaaaaaaaaaaaaaaaaaaaaaaatgcatcccccccccccccccccccccccccccccccaaaggctcttttcagagccaccagaatt

SEQ ID NO: 2211 - RNA, 1345 nt, synthetic construct
  misc_feature 1..1345: note = mRNA i-3 (A64-N5-C30-hSL-N5) (opt3) from Homo sapiens__NP_000448.3__HNF4A(1-375)(S87A_K106R_K108R_K126R_K 127R_S142A_S143A_S148A_T166A_S167A_K300R_K307R_K309R_S313A_ S378A_T429A_T432A_S436A_K458R_S461E)
  source 1..1345: mol_type = other RNA
aggagaaagcttaccatgagactgagcaagaccctcgtggacatggatatggccgactactccgctgcacttgatcccgcctatacaactctggagttcgaaaacgtccaggttttgacgatgggcaatgacacctctccttcagaggggacaaacttaaatgcgccaaacagtctgggagtgagcgctctatgcgccatctgtggtgatagggcaactggcaaacactacggggcctcctcttgcgacggatgtaagggctttttccggcgcgctgtacgtaaaaatcatatgtattcgtgccgattttcaagacaatgtgtggtcgatagggaccggcgcaaccagtgcagatactgtaggctcaagaaatgcttccgggcaggtatgcgccgagaagccgtgcagaatgagagagataggattagcacccggcgtgctgcctatgaagacagtgcgctgccgtccataaacgcacttctgcaggccgaggttttgtctcgccaaatcgctgcccccgtgagcgggattaatggagatatcagagcaaagaagattgcttccatcgccgacgtctgtgagtcaatgaaagaacagctcctggtgctggtagagtgggcgaagtacatacctgccttttgcgaactcccattagatgaccaggttgcactgcttagggctcacgccggcgagcatttgctgctaggcgctacaaaacggagtatggtgttcaaggacgtcctcctgcttgggaacgattatatcgtgccccgacactgtcctgagctggccgaaatgagccgcgtgtctattagaatcttggacgagctcgtcctgccatttcaggaattacaaattgatgacaatgagtacgcatacctgaaagccatcatattctttgatcccgacgctaggggactctccgatcctggtcggattcgcagacttagggcgcaggttcaggtgtcactggaagactatatcaacgatcgtcagtacgacagccggggccgattcggggagttgctactgctcctgccaacccttcaaagtattacttggcagatgatcgagcagatccaatttattaagctgttcggaatggcaaagatagataatttgctccaggaaatgctgttatgaggactagttataagactgactagcccgatgggcctcccaacgggccctcctcccctccttgcaccgagattaataaaaaaaaaaaaaaaaaaaaaaaaaaaaaaaaaaaaaaaaaaaaaaaaaaaaaaaaaaaaaaaatgcatcccccccccccccccccccccccccccccccaaaggctcttttcagagccaccagaatt

SEQ ID NO: 2212 - RNA, 1345 nt, synthetic construct; identical to SEQ ID NO: 2205
  misc_feature 1..1345: note = mRNA i-3 (A64-N5-C30-hSL-N5) (opt3) from Homo sapiens__NP_000448.3__HNF4A(1-375)(S87A_K106R_K108R_K126R_K 127R_S142A_S143A_S148A_T166A_S167A_S313A_S378A_T429A_T432A_ S436A_K447R_K458R_S461E_K470R)
  source 1..1345: mol_type = other RNA

SEQ ID NO: 2213 - RNA, 1345 nt, synthetic construct
  misc_feature 1..1345: note = mRNA i-3 (A64-N5-C30-hSL-N5) (opt3) from Homo sapiens__NP_000448.3__HNF4A(1-375)(S87A_K106R_K108R_K126R_K 127R_S142A_S143A_S148A_T166A_S167A_K179R_K180R_K234R_K300R_ K307R_K309R_S313A_S378A_T429A_T432A_S436A_K447R_K458R_S461E _K470R)
  source 1..1345: mol_type = other RNA
aggagaaagcttaccatgagactgagcaagaccctcgtggacatggatatggccgactactccgctgcacttgatcccgcctatacaactctggagttcgaaaacgtccaggttttgacgatgggcaatgacacctctccttcagaggggacaaacttaaatgcgccaaacagtctgggagtgagcgctctatgcgccatctgtggtgatagggcaactggcaaacactacggggcctcctcttgcgacggatgtaagggctttttccggcgcgctgtacgtaaaaatcatatgtattcgtgccgattttcaagacaatgtgtggtcgatagggaccggcgcaaccagtgcagatactgtaggctcaagaaatgcttccgggcaggtatgcgccgagaagccgtgcagaatgagagagataggattagcacccggcgtgctgcctatgaagacagtgcgctgccgtccataaacgcacttctgcaggccgaggttttgtctcgccaaatcgctgcccccgtgagcgggattaatggagatatcagagcaaggcggattgcttccatcgccgacgtctgtgagtcaatgaaggaacagctcctggtgctggtagagtgggcgaagtacatacctgccttttgcgaactcccattagatgaccaggttgcactgcttcgagctcacgccggcgagcatttgctgctaggcgctacacgcagaagtatggtgttcaaagacgtcctcctgcttgggaacgattatatcgtgcccaggcactgtcctgagctggccgaaatgagccgggtgtctattcgcatcttggacgagctcgtcctgccatttcaggaattacaaattgatgacaatgagtacgcatacctgaaggccatcatattctttgatcccgacgctagaggactctccgatcctggtaggattcgtcggcttcgagcgcaggttcaggtgtcactggaagactatatcaacgatagacagtacgacagcaggggccgcttcggggagttgctactgctcctgccaacccttcaaagtattacttggcagatgatcgagcagatccaatttattaaactgttcggaatggcaaagatagataatttgctccaggaaatgctgttatgaggactagttataagactgactagcccgatgggcctcccaacgggccctcctcccctccttgcaccgagattaataaaaaaaaaaaaaaaaaaaaaaaaaaaaaaaaaaaaaaaaaaaaaaaaaaaaaaaaaaaaaaaatgcatcccccccccccccccccccccccccccccccaaaggctcttttcagagccaccagaatt

SEQ ID NO: 2214 - RNA, 1345 nt, synthetic construct
  misc_feature 1..1345: note = mRNA i-3 (A64-N5-C30-hSL-N5) (opt3) from Homo sapiens__NP_000448.3__HNF4A(1-375)(S87A_S95A_S99A_K106R_K10 8R_K126R_K127R_S142A_S143A_S148A_T166A_S167A_S313A_S378A_T4 29A_T432A_S436A_K458R_S461E)
  source 1..1345: mol_type = other RNA
aggagaaagcttaccatgagactgagcaagaccctcgtggacatggatatggccgactactccgctgcacttgatcccgcctatacaactctggagttcgaaaacgtccaggttttgacgatgggcaatgacacctctccttcagaggggacaaacttaaatgcgccaaacagtctgggagtgagcgctctatgcgccatctgtggtgatagggcaactggcaaacactacggggcctcctcttgcgacggatgtaagggctttttccggcgcgctgtacgtaaaaatcatatgtatgcatgccgatttgccagacaatgtgtggtcgatagggaccggcgcaaccagtgcagatactgtaggctcaagaaatgcttccgggctggtatgcgccgagaagccgtgcagaatgagagagataggatttcgacccggcgtgcggcatatgaagactcagccctgccgagcataaacgcccttctgcaggccgaggttttgagtcgccaaatcgcagctcccgtgtccgggattaatggagatatcagagccaagaagattgcgtctatcgccgacgtctgtgagagcatgaaagaacagctcctggtgctggtagagtgggcaaagtacatacctgctttttgcgaactcccattagatgaccaggttgccctgcttagggctcacgccggcgagcatttgctgctaggcgcaacaaaacggtccatggtgttcaaggacgtcctcctgcttgggaacgattatatcgtgccccgacactgtcctgagctggccgaaatgtcacgcgtgagtattagaatcttggacgagctcgtcctgccatttcaggaattacaaattgatgacaatgagtacgcttacctgaaagcgatcatattctttgatcccgacgcaaagggactcagcgatcctggtaagattaaaaggcttcgggcccaggttcaggtgtctctggaagactatatcaacgatcgccagtacgactccagaggcaggttcggggagttgctactgctcctgccaacccttcaatcaattacttggcagatgatcgagcagatccaatttattaagctgttcggaatggctaaaatagataatttgctccaggaaatgctgttatgaggactagttataagactgactagcccgatgggcctcccaacgggccctcctcccctccttgcaccgagattaataaaaaaaaaaaaaaaaaaaaaaaaaaaaaaaaaaaaaaaaaaaaaaaaaaaaaaaaaaaaaaaatgcatcccccccccccccccccccccccccccccccaaaggctcttttcagagccaccagaatt

SEQ ID NO: 2215 - RNA, 1345 nt, synthetic construct
  misc_feature 1..1345: note = mRNA i-3 (A64-N5-C30-hSL-N5) (opt3) from Homo sapiens__NP_000448.3__HNF4A(1-375)(S87A_K106R_K108R_K126R_K 127R_S138A_T139A_S142A_S143A_S148A_T166A_S167A_S313A_S378A_ T429A_T432A_S436A_K458R_S461E)
  source 1..1345: mol_type = other RNA
aggagaaagcttaccatgagactgagcaagaccctcgtggacatggatatggccgactactccgctgcacttgatcccgcctatacaactctggagttcgaaaacgtccaggttttgacgatgggcaatgacacctctccttcagaggggacaaacttaaatgcgccaaacagtctgggagtgagcgctctatgcgccatctgtggtgatagggcaactggcaaacactacggggcctcctcttgcgacggatgtaagggctttttccggcgcgctgtacgtaaaaatcatatgtattcgtgccgattttcaagacaatgtgtggtcgatagggaccggcgcaaccagtgcagatactgtaggctcaagaaatgcttccgggcaggtatgcgccgagaagccgtgcagaatgagagagataggattgctgcccggcgtgcggcatatgaagacagcgccctgccgagtataaacgcccttctgcaggccgaggttttgtcccgccaaatcgcagctcccgtgtctgggattaatggagatatcagagccaagaagattgcgagcatcgccgacgtctgtgagtccatgaaagaacagctcctggtgctggtagagtgggcaaagtacatacctgctttttgcgaactcccattagatgaccaggttgccctgcttagggctcacgccggcgagcatttgctgctaggcgcaaccaaacggtcaatggtgttcaaggacgtcctcctgcttgggaacgattatatcgtgccccgacactgtcctgagctggccgaaatgagtcgcgtgagcattagaatcttggacgagctcgtcctgccatttcaggaattacaaattgatgacaatgagtacgcttacctgaaagcgatcatattctttgatcccgacgcaaagggactctctgatcctggtaagattaaaaggcttcgggcccaggttcaggtgtccctggaagactatatcaacgatcgccagtacgactcaagaggcaggttcggggagttgctactgctcctgccaacacttcaaagcattacctggcagatgatcgagcagatccaatttattaagctgttcggaatggctaaaatagataatttgctccaggaaatgctgttatgaggactagttataagactgactagcccgatgggcctcccaacgggccctcctcccctccttgcaccgagattaataaaaaaaaaaaaaaaaaaaaaaaaaaaaaaaaaaaaaaaaaaaaaaaaaaaaaaaaaaaaaaaatgcatcccccccccccccccccccccccccccccccaaaggctcttttcagagccaccagaatt

SEQ ID NO: 2216 - RNA, 1345 nt, synthetic construct
  misc_feature 1..1345: note = mRNA i-3 (A64-N5-C30-hSL-N5) (opt3) from Homo sapiens__NP_000448.3__HNF4A(1-375)(S87A_S95A_S99A_K106R_K10 8R_K126R_K127R_S138A_T139A_S142A_S143A_S148A_T166A_S167A_S3 13A_S378A_T429A_T432A_S436A_K458R_S461E)
  source 1..1345: mol_type = other RNA
aggagaaagcttaccatgagactgagcaagaccctcgtggacatggatatggccgactactccgctgcacttgatcccgcctatacaactctggagttcgaaaacgtccaggttttgacgatgggcaatgacacctctccttcagaggggacaaacttaaatgcgccaaacagtctgggagtgagcgctctatgcgccatctgtggtgatagggcaactggcaaacactacggggcctcctcttgcgacggatgtaagggctttttccggcgcgctgtacgtaaaaatcatatgtatgcatgccgatttgccagacaatgtgtggtcgatagggaccggcgcaaccagtgcagatactgtaggctcaagaaatgcttccgggctggtatgcgccgagaagccgtgcagaatgagagagataggattgcggcacggcgtgccgcttatgaagactcggccctgccgtcaataaacgcacttctgcaggctgaggttttgagccgccaaatcgccgcgcccgtgagtgggattaatggagatatcagagccaagaagattgcatccatcgctgacgtctgtgagtctatgaaagaacagctcctggtgctggtagagtgggccaagtacatacctgctttttgcgaactcccattagatgaccaggttgccctgcttagggcacacgccggcgagcatttgctgctaggcgctaccaaacggagcatggtgttcaaggacgtcctcctgcttgggaacgattatatcgtgccccgacactgtcctgagctggcggaaatgtcccgcgtgtcaattagaatcttggacgagctcgtcctgccatttcaggaattacaaattgatgacaatgagtacgcatacctgaaagccatcatattctttgatcccgacgctaagggactcagtgatcctggtaagattaaaaggcttcgggcccaggttcaggtgagcctggaagactatatcaacgatcgccagtacgactctagaggcaggttcggggagttgctactgctcctgccaacacttcaatccattacctggcagatgatcgagcagatccaatttattaagctgttcggaatggcaaaaatagataatttgctccaggaaatgctgttatgaggactagttataagactgactagcccgatgggcctcccaacgggccctcctcccctccttgcaccgagattaataaaaaaaaaaaaaaaaaaaaaaaaaaaaaaaaaaaaaaaaaaaaaaaaaaaaaaaaaaaaaaaatgcatcccccccccccccccccccccccccccccccaaaggctcttttcagagccaccagaatt

SEQ ID NO: 2217 - RNA, 1345 nt, synthetic construct
  misc_feature 1..1345: note = mRNA i-3 (A64-N5-C30-hSL-N5) (opt4) from Homo sapiens__NP_000448.3__HNF4A(1-375)
  source 1..1345: mol_type = other RNA
aggagaaagcttaccatgagactgagcaagaccctggtggacatggacatggccgactacagcgccgccctggaccccgcctacaccaccctggagttcgagaacgtgcaggtgctgaccatgggcaacgacaccagccccagcgagggcaccaacctgaacgcccccaacagcctgggcgtgagcgccctgtgcgccatctgcggcgacagagccaccggcaagcactacggcgccagcagctgcgacggctgcaagggcttcttcagaagaagcgtgagaaagaaccacatgtacagctgcagattcagcagacagtgcgtggtggacaaggacaagagaaaccagtgcagatactgcagactgaagaagtgcttcagagccggcatgaagaaggaggccgtgcagaacgagagagacagaatcagcaccagaagaagcagctacgaggacagcagcctgcccagcatcaacgccctgctgcaggccgaggtgctgagcagacagatcaccagccccgtgagcggcatcaacggcgacatcagagccaagaagatcgccagcatcgccgacgtgtgcgagagcatgaaggagcagctgctggtgctggtggagtgggccaagtacatccccgccttctgcgagctgcccctggacgaccaggtggccctgctgagagcccacgccggcgagcacctgctgctgggcgccaccaagagaagcatggtgttcaaggacgtgctgctgctgggcaacgactacatcgtgcccagacactgccccgagctggccgagatgagcagagtgagcatcagaatcctggacgagctggtgctgcccttccaggagctgcagatcgacgacaacgagtacgcctacctgaaggccatcatcttcttcgaccccgacgccaagggcctgagcgaccccggcaagatcaagagactgagaagccaggtgcaggtgagcctggaggactacatcaacgacagacagtacgacagcagaggcagattcggcgagctgctgctgctgctgcccaccctgcagagcatcacctggcagatgatcgagcagatccagttcatcaagctgttcggcatggccaagatcgacaacctgctgcaggagatgctgctgtgaggactagttataagactgactagcccgatgggcctcccaacgggccctcctcccctccttgcaccgagattaataaaaaaaaaaaaaaaaaaaaaaaaaaaaaaaaaaaaaaaaaaaaaaaaaaaaaaaaaaaaaaaatgcatcccccccccccccccccccccccccccccccaaaggctcttttcagagccaccagaatt

SEQ ID NO: 2218 - RNA, 1345 nt, synthetic construct
  misc_feature 1..1345: note = mRNA i-3 (A64-N5-C30-hSL-N5) (opt4) from Homo sapiens__NP_000448.3__HNF4A(1-375)(S313A)
  source 1..1345: mol_type = other RNA
aggagaaagcttaccatgagactgagcaagaccctggtggacatggacatggccgactacagcgccgccctggaccccgcctacaccaccctggagttcgagaacgtgcaggtgctgaccatgggcaacgacaccagccccagcgagggcaccaacctgaacgcccccaacagcctgggcgtgagcgccctgtgcgccatctgcggcgacagagccaccggcaagcactacggcgccagcagctgcgacggctgcaagggcttcttcagaagaagcgtgagaaagaaccacatgtacagctgcagattcagcagacagtgcgtggtggacaaggacaagagaaaccagtgcagatactgcagactgaagaagtgcttcagagccggcatgaagaaggaggccgtgcagaacgagagagacagaatcagcaccagaagaagcagctacgaggacagcagcctgcccagcatcaacgccctgctgcaggccgaggtgctgagcagacagatcaccagccccgtgagcggcatcaacggcgacatcagagccaagaagatcgccagcatcgccgacgtgtgcgagagcatgaaggagcagctgctggtgctggtggagtgggccaagtacatccccgccttctgcgagctgcccctggacgaccaggtggccctgctgagagcccacgccggcgagcacctgctgctgggcgccaccaagagaagcatggtgttcaaggacgtgctgctgctgggcaacgactacatcgtgcccagacactgccccgagctggccgagatgagcagagtgagcatcagaatcctggacgagctggtgctgcccttccaggagctgcagatcgacgacaacgagtacgcctacctgaaggccatcatcttcttcgaccccgacgccaagggcctgagcgaccccggcaagatcaagagactgagagcccaggtgcaggtgagcctggaggactacatcaacgacagacagtacgacagcagaggcagattcggcgagctgctgctgctgctgcccaccctgcagagcatcacctggcagatgatcgagcagatccagttcatcaagctgttcggcatggccaagatcgacaacctgctgcaggagatgctgctgtgaggactagttataagactgactagcccgatgggcctcccaacgggccctcctcccctccttgcaccgagattaataaaaaaaaaaaaaaaaaaaaaaaaaaaaaaaaaaaaaaaaaaaaaaaaaaaaaaaaaaaaaaaatgcatcccccccccccccccccccccccccccccccaaaggctcttttcagagccaccagaatt

SEQ ID NO: 2219 - RNA, 1345 nt, synthetic construct
  misc_feature 1..1345: note = mRNA i-3 (A64-N5-C30-hSL-N5) (opt4) from Homo sapiens__NP_000448.3__HNF4A(1-375)(S313E)
  source 1..1345: mol_type = other RNA
aggagaaagcttaccatgagactgagcaagaccctggtggacatggacatggccgactacagcgccgccctggaccccgcctacaccaccctggagttcgagaacgtgcaggtgctgaccatgggcaacgacaccagccccagcgagggcaccaacctgaacgcccccaacagcctgggcgtgagcgccctgtgcgccatctgcggcgacagagccaccggcaagcactacggcgccagcagctgcgacggctgcaagggcttcttcagaagaagcgtgagaaagaaccacatgtacagctgcagattcagcagacagtgcgtggtggacaaggacaagagaaaccagtgcagatactgcagactgaagaagtgcttcagagccggcatgaagaaggaggccgtgcagaacgagagagacagaatcagcaccagaagaagcagctacgaggacagcagcctgcccagcatcaacgccctgctgcaggccgaggtgctgagcagacagatcaccagccccgtgagcggcatcaacggcgacatcagagccaagaagatcgccagcatcgccgacgtgtgcgagagcatgaaggagcagctgctggtgctggtggagtgggccaagtacatccccgccttctgcgagctgcccctggacgaccaggtggccctgctgagagcccacgccggcgagcacctgctgctgggcgccaccaagagaagcatggtgttcaaggacgtgctgctgctgggcaacgactacatcgtgcccagacactgccccgagctggccgagatgagcagagtgagcatcagaatcctggacgagctggtgctgcccttccaggagctgcagatcgacgacaacgagtacgcctacctgaaggccatcatcttcttcgaccccgacgccaagggcctgagcgaccccggcaagatcaagagactgagagagcaggtgcaggtgagcctggaggactacatcaacgacagacagtacgacagcagaggcagattcggcgagctgctgctgctgctgcccaccctgcagagcatcacctggcagatgatcgagcagatccagttcatcaagctgttcggcatggccaagatcgacaacctgctgcaggagatgctgctgtgaggactagttataagactgactagcccgatgggcctcccaacgggccctcctcccctccttgcaccgagattaataaaaaaaaaaaaaaaaaaaaaaaaaaaaaaaaaaaaaaaaaaaaaaaaaaaaaaaaaaaaaaaatgcatcccccccccccccccccccccccccccccccaaaggctcttttcagagccaccagaatt

SEQ ID NO: 2220 - RNA, 1345 nt, synthetic construct
  misc_feature 1..1345: note = mRNA i-3 (A64-N5-C30-hSL-N5) (opt4) from Homo sapiens__NP_000448.3__HNF4A(1-375)(S142A_S143A)
  source 1..1345: mol_type = other RNA
aggagaaagcttaccatgagactgagcaagaccctggtggacatggacatggccgactacagcgccgccctggaccccgcctacaccaccctggagttcgagaacgtgcaggtgctgaccatgggcaacgacaccagccccagcgagggcaccaacctgaacgcccccaacagcctgggcgtgagcgccctgtgcgccatctgcggcgacagagccaccggcaagcactacggcgccagcagctgcgacggctgcaagggcttcttcagaagaagcgtgagaaagaaccacatgtacagctgcagattcagcagacagtgcgtggtggacaaggacaagagaaaccagtgcagatactgcagactgaagaagtgcttcagagccggcatgaagaaggaggccgtgcagaacgagagagacagaatcagcaccagaagagccgcctacgaggacagcagcctgcccagcatcaacgccctgctgcaggccgaggtgctgagcagacagatcaccagccccgtgagcggcatcaacggcgacatcagagccaagaagatcgccagcatcgccgacgtgtgcgagagcatgaaggagcagctgctggtgctggtggagtgggccaagtacatccccgccttctgcgagctgcccctggacgaccaggtggccctgctgagagcccacgccggcgagcacctgctgctgggcgccaccaagagaagcatggtgttcaaggacgtgctgctgctgggcaacgactacatcgtgcccagacactgccccgagctggccgagatgagcagagtgagcatcagaatcctggacgagctggtgctgcccttccaggagctgcagatcgacgacaacgagtacgcctacctgaaggccatcatcttcttcgaccccgacgccaagggcctgagcgaccccggcaagatcaagagactgagaagccaggtgcaggtgagcctggaggactacatcaacgacagacagtacgacagcagaggcagattcggcgagctgctgctgctgctgcccaccctgcagagcatcacctggcagatgatcgagcagatccagttcatcaagctgttcggcatggccaagatcgacaacctgctgcaggagatgctgctgtgaggactagttataagactgactagcccgatgggcctcccaacgggccctcctcccctccttgcaccgagattaataaaaaaaaaaaaaaaaaaaaaaaaaaaaaaaaaaaaaaaaaaaaaaaaaaaaaaaaaaaaaaaatgcatcccccccccccccccccccccccccccccccaaaggctcttttcagagccaccagaatt

SEQ ID NO: 2221 - RNA, 1345 nt, synthetic construct
  misc_feature 1..1345: note = mRNA i-3 (A64-N5-C30-hSL-N5) (opt4) from Homo sapiens__NP_000448.3__HNF4A(1-375)(S142E_S143E)
  source 1..1345: mol_type = other RNA
aggagaaagcttaccatgagactgagcaagaccctggtggacatggacatggccgactacagcgccgccctggaccccgcctacaccaccctggagttcgagaacgtgcaggtgctgaccatgggcaacgacaccagccccagcgagggcaccaacctgaacgcccccaacagcctgggcgtgagcgccctgtgcgccatctgcggcgacagagccaccggcaagcactacggcgccagcagctgcgacggctgcaagggcttcttcagaagaagcgtgagaaagaaccacatgtacagctgcagattcagcagacagtgcgtggtggacaaggacaagagaaaccagtgcagatactgcagactgaagaagtgcttcagagccggcatgaagaaggaggccgtgcagaacgagagagacagaatcagcaccagaagagaggagtacgaggacagcagcctgcccagcatcaacgccctgctgcaggccgaggtgctgagcagacagatcaccagccccgtgagcggcatcaacggcgacatcagagccaagaagatcgccagcatcgccgacgtgtgcgagagcatgaaggagcagctgctggtgctggtggagtgggccaagtacatccccgccttctgcgagctgcccctggacgaccaggtggccctgctgagagcccacgccggcgagcacctgctgctgggcgccaccaagagaagcatggtgttcaaggacgtgctgctgctgggcaacgactacatcgtgcccagacactgccccgagctggccgagatgagcagagtgagcatcagaatcctggacgagctggtgctgcccttccaggagctgcagatcgacgacaacgagtacgcctacctgaaggccatcatcttcttcgaccccgacgccaagggcctgagcgaccccggcaagatcaagagactgagaagccaggtgcaggtgagcctggaggactacatcaacgacagacagtacgacagcagaggcagattcggcgagctgctgctgctgctgcccaccctgcagagcatcacctggcagatgatcgagcagatccagttcatcaagctgttcggcatggccaagatcgacaacctgctgcaggagatgctgctgtgaggactagttataagactgactagcccgatgggcctcccaacgggccctcctcccctccttgcaccgagattaataaaaaaaaaaaaaaaaaaaaaaaaaaaaaaaaaaaaaaaaaaaaaaaaaaaaaaaaaaaaaaaatgcatcccccccccccccccccccccccccccccccaaaggctcttttcagagccaccagaatt

SEQ ID NO: 2222 - RNA, 1345 nt, synthetic construct
  misc_feature 1..1345: note = mRNA i-3 (A64-N5-C30-hSL-N5) (opt4) from Homo sapiens__NP_000448.3__HNF4A(1-375)(S143A)
  source 1..1345: mol_type = other RNA
aggagaaagcttaccatgagactgagcaagaccctggtggacatggacatggccgactacagcgccgccctggaccccgcctacaccaccctggagttcgagaacgtgcaggtgctgaccatgggcaacgacaccagccccagcgagggcaccaacctgaacgcccccaacagcctgggcgtgagcgccctgtgcgccatctgcggcgacagagccaccggcaagcactacggcgccagcagctgcgacggctgcaagggcttcttcagaagaagcgtgagaaagaaccacatgtacagctgcagattcagcagacagtgcgtggtggacaaggacaagagaaaccagtgcagatactgcagactgaagaagtgcttcagagccggcatgaagaaggaggccgtgcagaacgagagagacagaatcagcaccagaagaagcgcctacgaggacagcagcctgcccagcatcaacgccctgctgcaggccgaggtgctgagcagacagatcaccagccccgtgagcggcatcaacggcgacatcagagccaagaagatcgccagcatcgccgacgtgtgcgagagcatgaaggagcagctgctggtgctggtggagtgggccaagtacatccccgccttctgcgagctgcccctggacgaccaggtggccctgctgagagcccacgccggcgagcacctgctgctgggcgccaccaagagaagcatggtgttcaaggacgtgctgctgctgggcaacgactacatcgtgcccagacactgccccgagctggccgagatgagcagagtgagcatcagaatcctggacgagctggtgctgcccttccaggagctgcagatcgacgacaacgagtacgcctacctgaaggccatcatcttcttcgaccccgacgccaagggcctgagcgaccccggcaagatcaagagactgagaagccaggtgcaggtgagcctggaggactacatcaacgacagacagtacgacagcagaggcagattcggcgagctgctgctgctgctgcccaccctgcagagcatcacctggcagatgatcgagcagatccagttcatcaagctgttcggcatggccaagatcgacaacctgctgcaggagatgctgctgtgaggactagttataagactgactagcccgatgggcctcccaacgggccctcctcccctccttgcaccgagattaataaaaaaaaaaaaaaaaaaaaaaaaaaaaaaaaaaaaaaaaaaaaaaaaaaaaaaaaaaaaaaaatgcatcccccccccccccccccccccccccccccccaaaggctcttttcagagccaccagaatt

SEQ ID NO: 2223 - RNA, 1345 nt, synthetic construct
  misc_feature 1..1345: note = mRNA i-3 (A64-N5-C30-hSL-N5) (opt4) from Homo sapiens__NP_000448.3__HNF4A(1-375)(T166A)
  source 1..1345: mol_type = other RNA
aggagaaagcttaccatgagactgagcaagaccctggtggacatggacatggccgactacagcgccgccctggaccccgcctacaccaccctggagttcgagaacgtgcaggtgctgaccatgggcaacgacaccagccccagcgagggcaccaacctgaacgcccccaacagcctgggcgtgagcgccctgtgcgccatctgcggcgacagagccaccggcaagcactacggcgccagcagctgcgacggctgcaagggcttcttcagaagaagcgtgagaaagaaccacatgtacagctgcagattcagcagacagtgcgtggtggacaaggacaagagaaaccagtgcagatactgcagactgaagaagtgcttcagagccggcatgaagaaggaggccgtgcagaacgagagagacagaatcagcaccagaagaagcagctacgaggacagcagcctgcccagcatcaacgccctgctgcaggccgaggtgctgagcagacagatcgccagccccgtgagcggcatcaacggcgacatcagagccaagaagatcgccagcatcgccgacgtgtgcgagagcatgaaggagcagctgctggtgctggtggagtgggccaagtacatccccgccttctgcgagctgcccctggacgaccaggtggccctgctgagagcccacgccggcgagcacctgctgctgggcgccaccaagagaagcatggtgttcaaggacgtgctgctgctgggcaacgactacatcgtgcccagacactgccccgagctggccgagatgagcagagtgagcatcagaatcctggacgagctggtgctgcccttccaggagctgcagatcgacgacaacgagtacgcctacctgaaggccatcatcttcttcgaccccgacgccaagggcctgagcgaccccggcaagatcaagagactgagaagccaggtgcaggtgagcctggaggactacatcaacgacagacagtacgacagcagaggcagattcggcgagctgctgctgctgctgcccaccctgcagagcatcacctggcagatgatcgagcagatccagttcatcaagctgttcggcatggccaagatcgacaacctgctgcaggagatgctgctgtgaggactagttataagactgactagcccgatgggcctcccaacgggccctcctcccctccttgcaccgagattaataaaaaaaaaaaaaaaaaaaaaaaaaaaaaaaaaaaaaaaaaaaaaaaaaaaaaaaaaaaaaaaatgcatcccccccccccccccccccccccccccccccaaaggctcttttcagagccaccagaatt

SEQ ID NO: 2224 - RNA, 1345 nt, synthetic construct
  misc_feature 1..1345: note = mRNA i-3 (A64-N5-C30-hSL-N5) (opt4) from Homo sapiens__NP_000448.3__HNF4A(1-375)(S167E)
  source 1..1345: mol_type = other RNA
aggagaaagcttaccatgagactgagcaagaccctggtggacatggacatggccgactacagcgccgccctggaccccgcctacaccaccctggagttcgagaacgtgcaggtgctgaccatgggcaacgacaccagccccagcgagggcaccaacctgaacgcccccaacagcctgggcgtgagcgccctgtgcgccatctgcggcgacagagccaccggcaagcactacggcgccagcagctgcgacggctgcaagggcttcttcagaagaagcgtgagaaagaaccacatgtacagctgcagattcagcagacagtgcgtggtggacaaggacaagagaaaccagtgcagatactgcagactgaagaagtgcttcagagccggcatgaagaaggaggccgtgcagaacgagagagacagaatcagcaccagaagaagcagctacgaggacagcagcctgcccagcatcaacgccctgctgcaggccgaggtgctgagcagacagatcaccgagcccgtgagcggcatcaacggcgacatcagagccaagaagatcgccagcatcgccgacgtgtgcgagagcatgaaggagcagctgctggtgctggtggagtgggccaagtacatccccgccttctgcgagctgcccctggacgaccaggtggccctgctgagagcccacgccggcgagcacctgctgctgggcgccaccaagagaagcatggtgttcaaggacgtgctgctgctgggcaacgactacatcgtgcccagacactgccccgagctggccgagatgagcagagtgagcatcagaatcctggacgagctggtgctgcccttccaggagctgcagatcgacgacaacgagtacgcctacctgaaggccatcatcttcttcgaccccgacgccaagggcctgagcgaccccggcaagatcaagagactgagaagccaggtgcaggtgagcctggaggactacatcaacgacagacagtacgacagcagaggcagattcggcgagctgctgctgctgctgcccaccctgcagagcatcacctggcagatgatcgagcagatccagttcatcaagctgttcggcatggccaagatcgacaacctgctgcaggagatgctgctgtgaggactagttataagactgactagcccgatgggcctcccaacgggccctcctcccctccttgcaccgagattaataaaaaaaaaaaaaaaaaaaaaaaaaaaaaaaaaaaaaaaaaaaaaaaaaaaaaaaaaaaaaaaatgcatcccccccccccccccccccccccccccccccaaaggctcttttcagagccaccagaatt

SEQ ID NO: 2225 - RNA, 1345 nt, synthetic construct
  misc_feature 1..1345: note = mRNA i-3 (A64-N5-C30-hSL-N5) (opt4) from Homo sapiens__NP_000448.3__HNF4A(1-375)(S167A)
  source 1..1345: mol_type = other RNA
aggagaaagcttaccatgagactgagcaagaccctggtggacatggacatggccgactacagcgccgccctggaccccgcctacaccaccctggagttcgagaacgtgcaggtgctgaccatgggcaacgacaccagccccagcgagggcaccaacctgaacgcccccaacagcctgggcgtgagcgccctgtgcgccatctgcggcgacagagccaccggcaagcactacggcgccagcagctgcgacggctgcaagggcttcttcagaagaagcgtgagaaagaaccacatgtacagctgcagattcagcagacagtgcgtggtggacaaggacaagagaaaccagtgcagatactgcagactgaagaagtgcttcagagccggcatgaagaaggaggccgtgcagaacgagagagacagaatcagcaccagaagaagcagctacgaggacagcagcctgcccagcatcaacgccctgctgcaggccgaggtgctgagcagacagatcaccgcccccgtgagcggcatcaacggcgacatcagagccaagaagatcgccagcatcgccgacgtgtgcgagagcatgaaggagcagctgctggtgctggtggagtgggccaagtacatccccgccttctgcgagctgcccctggacgaccaggtggccctgctgagagcccacgccggcgagcacctgctgctgggcgccaccaagagaagcatggtgttcaaggacgtgctgctgctgggcaacgactacatcgtgcccagacactgccccgagctggccgagatgagcagagtgagcatcagaatcctggacgagctggtgctgcccttccaggagctgcagatcgacgacaacgagtacgcctacctgaaggccatcatcttcttcgaccccgacgccaagggcctgagcgaccccggcaagatcaagagactgagaagccaggtgcaggtgagcctggaggactacatcaacgacagacagtacgacagcagaggcagattcggcgagctgctgctgctgctgcccaccctgcagagcatcacctggcagatgatcgagcagatccagttcatcaagctgttcggcatggccaagatcgacaacctgctgcaggagatgctgctgtgaggactagttataagactgactagcccgatgggcctcccaacgggccctcctcccctccttgcaccgagattaataaaaaaaaaaaaaaaaaaaaaaaaaaaaaaaaaaaaaaaaaaaaaaaaaaaaaaaaaaaaaaaatgcatcccccccccccccccccccccccccccccccaaaggctcttttcagagccaccagaatt

SEQ ID NO: 2226 - RNA, 1345 nt, synthetic construct; identical to SEQ ID NO: 2225
  misc_feature 1..1345: note = mRNA i-3 (A64-N5-C30-hSL-N5) (opt4) from Homo sapiens__NP_000448.3__HNF4A(1-375)(S167A_S378A_T429A_T432A_ S436A)
  source 1..1345: mol_type = other RNA

SEQ ID NO: 2227 - RNA, 1345 nt, synthetic construct; identical to SEQ ID NO: 2224
  misc_feature 1..1345: note = mRNA i-3 (A64-N5-C30-hSL-N5) (opt4) from Homo sapiens__NP_000448.3__HNF4A(1-375)(S167E_S378E_T429E_T432E_ S436E)
  source 1..1345: mol_type = other RNA

SEQ ID NO: 2228 - RNA, 1345 nt, synthetic construct
  misc_feature 1..1345: note = mRNA i-3 (A64-N5-C30-hSL-N5) (opt4) from Homo sapiens__NP_000448.3__HNF4A(1-375)(S87A)
  source 1..1345: mol_type = other RNA
aggagaaagcttaccatgagactgagcaagaccctggtggacatggacatggccgactacagcgccgccctggaccccgcctacaccaccctggagttcgagaacgtgcaggtgctgaccatgggcaacgacaccagccccagcgagggcaccaacctgaacgcccccaacagcctgggcgtgagcgccctgtgcgccatctgcggcgacagagccaccggcaagcactacggcgccagcagctgcgacggctgcaagggcttcttcagaagagccgtgagaaagaaccacatgtacagctgcagattcagcagacagtgcgtggtggacaaggacaagagaaaccagtgcagatactgcagactgaagaagtgcttcagagccggcatgaagaaggaggccgtgcagaacgagagagacagaatcagcaccagaagaagcagctacgaggacagcagcctgcccagcatcaacgccctgctgcaggccgaggtgctgagcagacagatcaccagccccgtgagcggcatcaacggcgacatcagagccaagaagatcgccagcatcgccgacgtgtgcgagagcatgaaggagcagctgctggtgctggtggagtgggccaagtacatccccgccttctgcgagctgcccctggacgaccaggtggccctgctgagagcccacgccggcgagcacctgctgctgggcgccaccaagagaagcatggtgttcaaggacgtgctgctgctgggcaacgactacatcgtgcccagacactgccccgagctggccgagatgagcagagtgagcatcagaatcctggacgagctggtgctgcccttccaggagctgcagatcgacgacaacgagtacgcctacctgaaggccatcatcttcttcgaccccgacgccaagggcctgagcgaccccggcaagatcaagagactgagaagccaggtgcaggtgagcctggaggactacatcaacgacagacagtacgacagcagaggcagattcggcgagctgctgctgctgctgcccaccctgcagagcatcacctggcagatgatcgagcagatccagttcatcaagctgttcggcatggccaagatcgacaacctgctgcaggagatgctgctgtgaggactagttataagactgactagcccgatgggcctcccaacgggccctcctcccctccttgcaccgagattaataaaaaaaaaaaaaaaaaaaaaaaaaaaaaaaaaaaaaaaaaaaaaaaaaaaaaaaaaaaaaaaatgcatcccccccccccccccccccccccccccccccaaaggctcttttcagagccaccagaatt

SEQ ID NO: 2229 - RNA, 1345 nt, synthetic construct
  misc_feature 1..1345: note = mRNA i-3 (A64-N5-C30-hSL-N5) (opt4) from Homo sapiens__NP_000448.3__HNF4A(1-375)(S87E)
  source 1..1345: mol_type = other RNA
aggagaaagcttaccatgagactgagcaagaccctggtggacatggacatggccgactacagcgccgccctggaccccgcctacaccaccctggagttcgagaacgtgcaggtgctgaccatgggcaacgacaccagccccagcgagggcaccaacctgaacgcccccaacagcctgggcgtgagcgccctgtgcgccatctgcggcgacagagccaccggcaagcactacggcgccagcagctgcgacggctgcaagggcttcttcagaagagaggtgagaaagaaccacatgtacagctgcagattcagcagacagtgcgtggtggacaaggacaagagaaaccagtgcagatactgcagactgaagaagtgcttcagagccggcatgaagaaggaggccgtgcagaacgagagagacagaatcagcaccagaagaagcagctacgaggacagcagcctgcccagcatcaacgccctgctgcaggccgaggtgctgagcagacagatcaccagccccgtgagcggcatcaacggcgacatcagagccaagaagatcgccagcatcgccgacgtgtgcgagagcatgaaggagcagctgctggtgctggtggagtgggccaagtacatccccgccttctgcgagctgcccctggacgaccaggtggccctgctgagagcccacgccggcgagcacctgctgctgggcgccaccaagagaagcatggtgttcaaggacgtgctgctgctgggcaacgactacatcgtgcccagacactgccccgagctggccgagatgagcagagtgagcatcagaatcctggacgagctggtgctgcccttccaggagctgcagatcgacgacaacgagtacgcctacctgaaggccatcatcttcttcgaccccgacgccaagggcctgagcgaccccggcaagatcaagagactgagaagccaggtgcaggtgagcctggaggactacatcaacgacagacagtacgacagcagaggcagattcggcgagctgctgctgctgctgcccaccctgcagagcatcacctggcagatgatcgagcagatccagttcatcaagctgttcggcatggccaagatcgacaacctgctgcaggagatgctgctgtgaggactagttataagactgactagcccgatgggcctcccaacgggccctcctcccctccttgcaccgagattaataaaaaaaaaaaaaaaaaaaaaaaaaaaaaaaaaaaaaaaaaaaaaaaaaaaaaaaaaaaaaaaatgcatcccccccccccccccccccccccccccccccaaaggctcttttcagagccaccagaatt

SEQ ID NO: 2230 - RNA, 1345 nt, synthetic construct
  misc_feature 1..1345: note = mRNA i-3 (A64-N5-C30-hSL-N5) (opt4) from Homo sapiens__NP_000448.3__HNF4A(1-375)(R2V)
  source 1..1345: mol_type = other RNA
aggagaaagcttaccatggtgctgagcaagaccctggtggacatggacatggccgactacagcgccgccctggaccccgcctacaccaccctggagttcgagaacgtgcaggtgctgaccatgggcaacgacaccagccccagcgagggcaccaacctgaacgcccccaacagcctgggcgtgagcgccctgtgcgccatctgcggcgacagagccaccggcaagcactacggcgccagcagctgcgacggctgcaagggcttcttcagaagaagcgtgagaaagaaccacatgtacagctgcagattcagcagacagtgcgtggtggacaaggacaagagaaaccagtgcagatactgcagactgaagaagtgcttcagagccggcatgaagaaggaggccgtgcagaacgagagagacagaatcagcaccagaagaagcagctacgaggacagcagcctgcccagcatcaacgccctgctgcaggccgaggtgctgagcagacagatcaccagccccgtgagcggcatcaacggcgacatcagagccaagaagatcgccagcatcgccgacgtgtgcgagagcatgaaggagcagctgctggtgctggtggagtgggccaagtacatccccgccttctgcgagctgcccctggacgaccaggtggccctgctgagagcccacgccggcgagcacctgctgctgggcgccaccaagagaagcatggtgttcaaggacgtgctgctgctgggcaacgactacatcgtgcccagacactgccccgagctggccgagatgagcagagtgagcatcagaatcctggacgagctggtgctgcccttccaggagctgcagatcgacgacaacgagtacgcctacctgaaggccatcatcttcttcgaccccgacgccaagggcctgagcgaccccggcaagatcaagagactgagaagccaggtgcaggtgagcctggaggactacatcaacgacagacagtacgacagcagaggcagattcggcgagctgctgctgctgctgcccaccctgcagagcatcacctggcagatgatcgagcagatccagttcatcaagctgttcggcatggccaagatcgacaacctgctgcaggagatgctgctgtgaggactagttataagactgactagcccgatgggcctcccaacgggccctcctcccctccttgcaccgagattaataaaaaaaaaaaaaaaaaaaaaaaaaaaaaaaaaaaaaaaaaaaaaaaaaaaaaaaaaaaaaaaatgcatcccccccccccccccccccccccccccccccaaaggctcttttcagagccaccagaatt

SEQ ID NO: 2231 - RNA, 1345 nt, synthetic construct
  misc_feature 1..1345: note = mRNA i-3 (A64-N5-C30-hSL-N5) (opt4) from Homo sapiens__NP_000448.3__HNF4A(1-375)(R2V_K5V)
  source 1..1345: mol_type = other RNA
aggagaaagcttaccatggtgctgagcgtgaccctggtggacatggacatggccgactacagcgccgccctggaccccgcctacaccaccctggagttcgagaacgtgcaggtgctgaccatgggcaacgacaccagccccagcgagggcaccaacctgaacgcccccaacagcctgggcgtgagcgccctgtgcgccatctgcggcgacagagccaccggcaagcactacggcgccagcagctgcgacggctgcaagggcttcttcagaagaagcgtgagaaagaaccacatgtacagctgcagattcagcagacagtgcgtggtggacaaggacaagagaaaccagtgcagatactgcagactgaagaagtgcttcagagccggcatgaagaaggaggccgtgcagaacgagagagacagaatcagcaccagaagaagcagctacgaggacagcagcctgcccagcatcaacgccctgctgcaggccgaggtgctgagcagacagatcaccagccccgtgagcggcatcaacggcgacatcagagccaagaagatcgccagcatcgccgacgtgtgcgagagcatgaaggagcagctgctggtgctggtggagtgggccaagtacatccccgccttctgcgagctgcccctggacgaccaggtggccctgctgagagcccacgccggcgagcacctgctgctgggcgccaccaagagaagcatggtgttcaaggacgtgctgctgctgggcaacgactacatcgtgcccagacactgccccgagctggccgagatgagcagagtgagcatcagaatcctggacgagctggtgctgcccttccaggagctgcagatcgacgacaacgagtacgcctacctgaaggccatcatcttcttcgaccccgacgccaagggcctgagcgaccccggcaagatcaagagactgagaagccaggtgcaggtgagcctggaggactacatcaacgacagacagtacgacagcagaggcagattcggcgagctgctgctgctgctgcccaccctgcagagcatcacctggcagatgatcgagcagatccagttcatcaagctgttcggcatggccaagatcgacaacctgctgcaggagatgctgctgtgaggactagttataagactgactagcccgatgggcctcccaacgggccctcctcccctccttgcaccgagattaataaaaaaaaaaaaaaaaaaaaaaaaaaaaaaaaaaaaaaaaaaaaaaaaaaaaaaaaaaaaaaaatgcatcccccccccccccccccccccccccccccccaaaggctcttttcagagccaccagaatt

SEQ ID NO: 2232 - RNA, 1345 nt, synthetic construct
  misc_feature 1..1345: note = mRNA i-3 (A64-N5-C30-hSL-N5) (opt4) from Homo sapiens__NP_000448.3__HNF4A(1-375)(K179R_K180R)
  source 1..1345: mol_type = other RNA
aggagaaagcttaccatgagactgagcaagaccctggtggacatggacatggccgactacagcgccgccctggaccccgcctacaccaccctggagttcgagaacgtgcaggtgctgaccatgggcaacgacaccagccccagcgagggcaccaacctgaacgcccccaacagcctgggcgtgagcgccctgtgcgccatctgcggcgacagagccaccggcaagcactacggcgccagcagctgcgacggctgcaagggcttcttcagaagaagcgtgagaaagaaccacatgtacagctgcagattcagcagacagtgcgtggtggacaaggacaagagaaaccagtgcagatactgcagactgaagaagtgcttcagagccggcatgaagaaggaggccgtgcagaacgagagagacagaatcagcaccagaagaagcagctacgaggacagcagcctgcccagcatcaacgccctgctgcaggccgaggtgctgagcagacagatcaccagccccgtgagcggcatcaacggcgacatcagagccagaagaatcgccagcatcgccgacgtgtgcgagagcatgaaggagcagctgctggtgctggtggagtgggccaagtacatccccgccttctgcgagctgcccctggacgaccaggtggccctgctgagagcccacgccggcgagcacctgctgctgggcgccaccaagagaagcatggtgttcaaggacgtgctgctgctgggcaacgactacatcgtgcccagacactgccccgagctggccgagatgagcagagtgagcatcagaatcctggacgagctggtgctgcccttccaggagctgcagatcgacgacaacgagtacgcctacctgaaggccatcatcttcttcgaccccgacgccaagggcctgagcgaccccggcaagatcaagagactgagaagccaggtgcaggtgagcctggaggactacatcaacgacagacagtacgacagcagaggcagattcggcgagctgctgctgctgctgcccaccctgcagagcatcacctggcagatgatcgagcagatccagttcatcaagctgttcggcatggccaagatcgacaacctgctgcaggagatgctgctgtgaggactagttataagactgactagcccgatgggcctcccaacgggccctcctcccctccttgcaccgagattaataaaaaaaaaaaaaaaaaaaaaaaaaaaaaaaaaaaaaaaaaaaaaaaaaaaaaaaaaaaaaaaatgcatcccccccccccccccccccccccccccccccaaaggctcttttcagagccaccagaatt

SEQ ID NO: 2233 - RNA, 1345 nt, synthetic construct
  misc_feature 1..1345: note = mRNA i-3 (A64-N5-C30-hSL-N5) (opt4) from Homo sapiens__NP_000448.3__HNF4A(1-375)(K234R)
  source 1..1345: mol_type = other RNA
aggagaaagcttaccatgagactgagcaagaccctggtggacatggacatggccgactacagcgccgccctggaccccgcctacaccaccctggagttcgagaacgtgcaggtgctgaccatgggcaacgacaccagccccagcgagggcaccaacctgaacgcccccaacagcctgggcgtgagcgccctgtgcgccatctgcggcgacagagccaccggcaagcactacggcgccagcagctgcgacggctgcaagggcttcttcagaagaagcgtgagaaagaaccacatgtacagctgcagattcagcagacagtgcgtggtggacaaggacaagagaaaccagtgcagatactgcagactgaagaagtgcttcagagccggcatgaagaaggaggccgtgcagaacgagagagacagaatcagcaccagaagaagcagctacgaggacagcagcctgcccagcatcaacgccctgctgcaggccgaggtgctgagcagacagatcaccagccccgtgagcggcatcaacggcgacatcagagccaagaagatcgccagcatcgccgacgtgtgcgagagcatgaaggagcagctgctggtgctggtggagtgggccaagtacatccccgccttctgcgagctgcccctggacgaccaggtggccctgctgagagcccacgccggcgagcacctgctgctgggcgccaccagaagaagcatggtgttcaaggacgtgctgctgctgggcaacgactacatcgtgcccagacactgccccgagctggccgagatgagcagagtgagcatcagaatcctggacgagctggtgctgcccttccaggagctgcagatcgacgacaacgagtacgcctacctgaaggccatcatcttcttcgaccccgacgccaagggcctgagcgaccccggcaagatcaagagactgagaagccaggtgcaggtgagcctggaggactacatcaacgacagacagtacgacagcagaggcagattcggcgagctgctgctgctgctgcccaccctgcagagcatcacctggcagatgatcgagcagatccagttcatcaagctgttcggcatggccaagatcgacaacctgctgcaggagatgctgctgtgaggactagttataagactgactagcccgatgggcctcccaacgggccctcctcccctccttgcaccgagattaataaaaaaaaaaaaaaaaaaaaaaaaaaaaaaaaaaaaaaaaaaaaaaaaaaaaaaaaaaaaaaaatgcatcccccccccccccccccccccccccccccccaaaggctcttttcagagccaccagaatt

SEQ ID NO: 2234 - RNA, 1345 nt, synthetic construct
  misc_feature 1..1345: note = mRNA i-3 (A64-N5-C30-hSL-N5) (opt4) from Homo sapiens__NP_000448.3__HNF4A(1-375)(K300R)
  source 1..1345: mol_type = other RNA
aggagaaagcttaccatgagactgagcaagaccctggtggacatggacatggccgactacagcgccgccctggaccccgcctacaccaccctggagttcgagaacgtgcaggtgctgaccatgggcaacgacaccagccccagcgagggcaccaacctgaacgcccccaacagcctgggcgtgagcgccctgtgcgccatctgcggcgacagagccaccggcaagcactacggcgccagcagctgcgacggctgcaagggcttcttcagaagaagcgtgagaaagaaccacatgtacagctgcagattcagcagacagtgcgtggtggacaaggacaagagaaaccagtgcagatactgcagactgaagaagtgcttcagagccggcatgaagaaggaggccgtgcagaacgagagagacagaatcagcaccagaagaagcagctacgaggacagcagcctgcccagcatcaacgccctgctgcaggccgaggtgctgagcagacagatcaccagccccgtgagcggcatcaacggcgacatcagagccaagaagatcgccagcatcgccgacgtgtgcgagagcatgaaggagcagctgctggtgctggtggagtgggccaagtacatccccgccttctgcgagctgcccctggacgaccaggtggccctgctgagagcccacgccggcgagcacctgctgctgggcgccaccaagagaagcatggtgttcaaggacgtgctgctgctgggcaacgactacatcgtgcccagacactgccccgagctggccgagatgagcagagtgagcatcagaatcctggacgagctggtgctgcccttccaggagctgcagatcgacgacaacgagtacgcctacctgaaggccatcatcttcttcgaccccgacgccagaggcctgagcgaccccggcaagatcaagagactgagaagccaggtgcaggtgagcctggaggactacatcaacgacagacagtacgacagcagaggcagattcggcgagctgctgctgctgctgcccaccctgcagagcatcacctggcagatgatcgagcagatccagttcatcaagctgttcggcatggccaagatcgacaacctgctgcaggagatgctgctgtgaggactagttataagactgactagcccgatgggcctcccaacgggccctcctcccctccttgcaccgagattaataaaaaaaaaaaaaaaaaaaaaaaaaaaaaaaaaaaaaaaaaaaaaaaaaaaaaaaaaaaaaaaatgcatcccccccccccccccccccccccccccccccaaaggctcttttcagagccaccagaatt

SEQ ID NO: 2235 - RNA, 1345 nt, synthetic construct
  misc_feature 1..1345: note = mRNA i-3 (A64-N5-C30-hSL-N5) (opt4) from Homo sapiens__NP_000448.3__HNF4A(1-375)(K300R_K307R_K309R)
  source 1..1345: mol_type = other RNA
aggagaaagcttaccatgagactgagcaagaccctggtggacatggacatggccgactacagcgccgccctggaccccgcctacaccaccctggagttcgagaacgtgcaggtgctgaccatgggcaacgacaccagccccagcgagggcaccaacctgaacgcccccaacagcctgggcgtgagcgccctgtgcgccatctgcggcgacagagccaccggcaagcactacggcgccagcagctgcgacggctgcaagggcttcttcagaagaagcgtgagaaagaaccacatgtacagctgcagattcagcagacagtgcgtggtggacaaggacaagagaaaccagtgcagatactgcagactgaagaagtgcttcagagccggcatgaagaaggaggccgtgcagaacgagagagacagaatcagcaccagaagaagcagctacgaggacagcagcctgcccagcatcaacgccctgctgcaggccgaggtgctgagcagacagatcaccagccccgtgagcggcatcaacggcgacatcagagccaagaagatcgccagcatcgccgacgtgtgcgagagcatgaaggagcagctgctggtgctggtggagtgggccaagtacatccccgccttctgcgagctgcccctggacgaccaggtggccctgctgagagcccacgccggcgagcacctgctgctgggcgccaccaagagaagcatggtgttcaaggacgtgctgctgctgggcaacgactacatcgtgcccagacactgccccgagctggccgagatgagcagagtgagcatcagaatcctggacgagctggtgctgcccttccaggagctgcagatcgacgacaacgagtacgcctacctgaaggccatcatcttcttcgaccccgacgccagaggcctgagcgaccccggcagaatcagaagactgagaagccaggtgcaggtgagcctggaggactacatcaacgacagacagtacgacagcagaggcagattcggcgagctgctgctgctgctgcccaccctgcagagcatcacctggcagatgatcgagcagatccagttcatcaagctgttcggcatggccaagatcgacaacctgctgcaggagatgctgctgtgaggactagttataagactgactagcccgatgggcctcccaacgggccctcctcccctccttgcaccgagattaataaaaaaaaaaaaaaaaaaaaaaaaaaaaaaaaaaaaaaaaaaaaaaaaaaaaaaaaaaaaaaaatgcatcccccccccccccccccccccccccccccccaaaggctcttttcagagccaccagaatt

SEQ ID NO: 2236 - RNA, 1345 nt, synthetic construct; identical to SEQ ID NO: 2217
  misc_feature 1..1345: note = mRNA i-3 (A64-N5-C30-hSL-N5) (opt4) from Homo sapiens__NP_000448.3__HNF4A(1-375)(K447R_K470R)
  source 1..1345: mol_type = other RNA

SEQ ID NO: 2237 - RNA, 1345 nt, synthetic construct; identical to SEQ ID NO: 2217
  misc_feature 1..1345: note = mRNA i-3 (A64-N5-C30-hSL-N5) (opt4) from Homo sapiens__NP_000448.3__HNF4A(1-375)(K458R)
  source 1..1345: mol_type = other RNA

SEQ ID NO: 2238 - RNA, 1345 nt, synthetic construct
  misc_feature 1..1345: note = mRNA i-3 (A64-N5-C30-hSL-N5) (opt4) from Homo sapiens__NP_000448.3__HNF4A(1-375)(K106R_K108R_K126R_K127R)
  source 1..1345: mol_type = other RNA
aggagaaagcttaccatgagactgagcaagaccctggtggacatggacatggccgactacagcgccgccctggaccccgcctacaccaccctggagttcgagaacgtgcaggtgctgaccatgggcaacgacaccagccccagcgagggcaccaacctgaacgcccccaacagcctgggcgtgagcgccctgtgcgccatctgcggcgacagagccaccggcaagcactacggcgccagcagctgcgacggctgcaagggcttcttcagaagaagcgtgagaaagaaccacatgtacagctgcagattcagcagacagtgcgtggtggacagagacagaagaaaccagtgcagatactgcagactgaagaagtgcttcagagccggcatgagaagagaggccgtgcagaacgagagagacagaatcagcaccagaagaagcagctacgaggacagcagcctgcccagcatcaacgccctgctgcaggccgaggtgctgagcagacagatcaccagccccgtgagcggcatcaacggcgacatcagagccaagaagatcgccagcatcgccgacgtgtgcgagagcatgaaggagcagctgctggtgctggtggagtgggccaagtacatccccgccttctgcgagctgcccctggacgaccaggtggccctgctgagagcccacgccggcgagcacctgctgctgggcgccaccaagagaagcatggtgttcaaggacgtgctgctgctgggcaacgactacatcgtgcccagacactgccccgagctggccgagatgagcagagtgagcatcagaatcctggacgagctggtgctgcccttccaggagctgcagatcgacgacaacgagtacgcctacctgaaggccatcatcttcttcgaccccgacgccaagggcctgagcgaccccggcaagatcaagagactgagaagccaggtgcaggtgagcctggaggactacatcaacgacagacagtacgacagcagaggcagattcggcgagctgctgctgctgctgcccaccctgcagagcatcacctggcagatgatcgagcagatccagttcatcaagctgttcggcatggccaagatcgacaacctgctgcaggagatgctgctgtgaggactagttataagactgactagcccgatgggcctcccaacgggccctcctcccctccttgcaccgagattaataaaaaaaaaaaaaaaaaaaaaaaaaaaaaaaaaaaaaaaaaaaaaaaaaaaaaaaaaaaaaaaatgcatcccccccccccccccccccccccccccccccaaaggctcttttcagagccaccagaatt

SEQ ID NO: 2239 - RNA, 1345 nt, synthetic construct
  misc_feature 1..1345: note = mRNA i-3 (A64-N5-C30-hSL-N5) (opt4) from Homo sapiens__NP_000448.3__HNF4A(1-375)(E285Q)
  source 1..1345: mol_type = other RNA
aggagaaagcttaccatgagactgagcaagaccctggtggacatggacatggccgactacagcgccgccctggaccccgcctacaccaccctggagttcgagaacgtgcaggtgctgaccatgggcaacgacaccagccccagcgagggcaccaacctgaacgcccccaacagcctgggcgtgagcgccctgtgcgccatctgcggcgacagagccaccggcaagcactacggcgccagcagctgcgacggctgcaagggcttcttcagaagaagcgtgagaaagaaccacatgtacagctgcagattcagcagacagtgcgtggtggacaaggacaagagaaaccagtgcagatactgcagactgaagaagtgcttcagagccggcatgaagaaggaggccgtgcagaacgagagagacagaatcagcaccagaagaagcagctacgaggacagcagcctgcccagcatcaacgccctgctgcaggccgaggtgctgagcagacagatcaccagccccgtgagcggcatcaacggcgacatcagagccaagaagatcgccagcatcgccgacgtgtgcgagagcatgaaggagcagctgctggtgctggtggagtgggccaagtacatccccgccttctgcgagctgcccctggacgaccaggtggccctgctgagagcccacgccggcgagcacctgctgctgggcgccaccaagagaagcatggtgttcaaggacgtgctgctgctgggcaacgactacatcgtgcccagacactgccccgagctggccgagatgagcagagtgagcatcagaatcctggacgagctggtgctgcccttccaggagctgcagatcgacgacaaccagtacgcctacctgaaggccatcatcttcttcgaccccgacgccaagggcctgagcgaccccggcaagatcaagagactgagaagccaggtgcaggtgagcctggaggactacatcaacgacagacagtacgacagcagaggcagattcggcgagctgctgctgctgctgcccaccctgcagagcatcacctggcagatgatcgagcagatccagttcatcaagctgttcggcatggccaagatcgacaacctgctgcaggagatgctgctgtgaggactagttataagactgactagcccgatgggcctcccaacgggccctcctcccctccttgcaccgagattaataaaaaaaaaaaaaaaaaaaaaaaaaaaaaaaaaaaaaaaaaaaaaaaaaaaaaaaaaaaaaaaatgcatcccccccccccccccccccccccccccccccaaaggctcttttcagagccaccagaatt

SEQ ID NO: 2240 - RNA, 1345 nt, synthetic construct
  misc_feature 1..1345: note = mRNA i-3 (A64-N5-C30-hSL-N5) (opt4) from Homo sapiens__NP_000448.3__HNF4A(1-375)(T166E)
  source 1..1345: mol_type = other RNA
aggagaaagcttaccatgagactgagcaagaccctggtggacatggacatggccgactacagcgccgccctggaccccgcctacaccaccctggagttcgagaacgtgcaggtgctgaccatgggcaacgacaccagccccagcgagggcaccaacctgaacgcccccaacagcctgggcgtgagcgccctgtgcgccatctgcggcgacagagccaccggcaagcactacggcgccagcagctgcgacggctgcaagggcttcttcagaagaagcgtgagaaagaaccacatgtacagctgcagattcagcagacagtgcgtggtggacaaggacaagagaaaccagtgcagatactgcagactgaagaagtgcttcagagccggcatgaagaaggaggccgtgcagaacgagagagacagaatcagcaccagaagaagcagctacgaggacagcagcctgcccagcatcaacgccctgctgcaggccgaggtgctgagcagacagatcgagagccccgtgagcggcatcaacggcgacatcagagccaagaagatcgccagcatcgccgacgtgtgcgagagcatgaaggagcagctgctggtgctggtggagtgggccaagtacatccccgccttctgcgagctgcccctggacgaccaggtggccctgctgagagcccacgccggcgagcacctgctgctgggcgccaccaagagaagcatggtgttcaaggacgtgctgctgctgggcaacgactacatcgtgcccagacactgccccgagctggccgagatgagcagagtgagcatcagaatcctggacgagctggtgctgcccttccaggagctgcagatcgacgacaacgagtacgcctacctgaaggccatcatcttcttcgaccccgacgccaagggcctgagcgaccccggcaagatcaagagactgagaagccaggtgcaggtgagcctggaggactacatcaacgacagacagtacgacagcagaggcagattcggcgagctgctgctgctgctgcccaccctgcagagcatcacctggcagatgatcgagcagatccagttcatcaagctgttcggcatggccaagatcgacaacctgctgcaggagatgctgctgtgaggactagttataagactgactagcccgatgggcctcccaacgggccctcctcccctccttgcaccgagattaataaaaaaaaaaaaaaaaaaaaaaaaaaaaaaaaaaaaaaaaaaaaaaaaaaaaaaaaaaaaaaaatgcatcccccccccccccccccccccccccccccccaaaggctcttttcagagccaccagaatt

SEQ ID NO: 2241 - RNA, 1345 nt, synthetic construct
  misc_feature 1..1345: note = mRNA i-3 (A64-N5-C30-hSL-N5) (opt4) from Homo sapiens__NP_000448.3__HNF4A(1-375)(S148A)
  source 1..1345: mol_type = other RNA
aggagaaagcttaccatgagactgagcaagaccctggtggacatggacatggccgactacagcgccgccctggaccccgcctacaccaccctggagttcgagaacgtgcaggtgctgaccatgggcaacgacaccagccccagcgagggcaccaacctgaacgcccccaacagcctgggcgtgagcgccctgtgcgccatctgcggcgacagagccaccggcaagcactacggcgccagcagctgcgacggctgcaagggcttcttcagaagaagcgtgagaaagaaccacatgtacagctgcagattcagcagacagtgcgtggtggacaaggacaagagaaaccagtgcagatactgcagactgaagaagtgcttcagagccggcatgaagaaggaggccgtgcagaacgagagagacagaatcagcaccagaagaagcagctacgaggacagcgccctgcccagcatcaacgccctgctgcaggccgaggtgctgagcagacagatcaccagccccgtgagcggcatcaacggcgacatcagagccaagaagatcgccagcatcgccgacgtgtgcgagagcatgaaggagcagctgctggtgctggtggagtgggccaagtacatccccgccttctgcgagctgcccctggacgaccaggtggccctgctgagagcccacgccggcgagcacctgctgctgggcgccaccaagagaagcatggtgttcaaggacgtgctgctgctgggcaacgactacatcgtgcccagacactgccccgagctggccgagatgagcagagtgagcatcagaatcctggacgagctggtgctgcccttccaggagctgcagatcgacgacaacgagtacgcctacctgaaggccatcatcttcttcgaccccgacgccaagggcctgagcgaccccggcaagatcaagagactgagaagccaggtgcaggtgagcctggaggactacatcaacgacagacagtacgacagcagaggcagattcggcgagctgctgctgctgctgcccaccctgcagagcatcacctggcagatgatcgagcagatccagttcatcaagctgttcggcatggccaagatcgacaacctgctgcaggagatgctgctgtgaggactagttataagactgactagcccgatgggcctcccaacgggccctcctcccctccttgcaccgagattaataaaaaaaaaaaaaaaaaaaaaaaaaaaaaaaaaaaaaaaaaaaaaaaaaaaaaaaaaaaaaaaatgcatcccccccccccccccccccccccccccccccaaaggctcttttcagagccaccagaatt

SEQ ID NO: 2242 - RNA, 1345 nt, synthetic construct
  misc_feature 1..1345: note = mRNA i-3 (A64-N5-C30-hSL-N5) (opt4) from Homo sapiens__NP_000448.3__HNF4A(1-375)(S148E)
  source 1..1345: mol_type = other RNA
aggagaaagcttaccatgagactgagcaagaccctggtggacatggacatggccgactacagcgccgccctggaccccgcctacaccaccctggagttcgagaacgtgcaggtgctgaccatgggcaacgacaccagccccagcgagggcaccaacctgaacgcccccaacagcctgggcgtgagcgccctgtgcgccatctgcggcgacagagccaccggcaagcactacggcgccagcagctgcgacggctgcaagggcttcttcagaagaagcgtgagaaagaaccacatgtacagctgcagattcagcagacagtgcgtggtggacaaggacaagagaaaccagtgcagatactgcagactgaagaagtgcttcagagccggcatgaagaaggaggccgtgcagaacgagagagacagaatcagcaccagaagaagcagctacgaggacagcgagctgcccagcatcaacgccctgctgcaggccgaggtgctgagcagacagatcaccagccccgtgagcggcatcaacggcgacatcagagccaagaagatcgccagcatcgccgacgtgtgcgagagcatgaaggagcagctgctggtgctggtggagtgggccaagtacatccccgccttctgcgagctgcccctggacgaccaggtggccctgctgagagcccacgccggcgagcacctgctgctgggcgccaccaagagaagcatggtgttcaaggacgtgctgctgctgggcaacgactacatcgtgcccagacactgccccgagctggccgagatgagcagagtgagcatcagaatcctggacgagctggtgctgcccttccaggagctgcagatcgacgacaacgagtacgcctacctgaaggccatcatcttcttcgaccccgacgccaagggcctgagcgaccccggcaagatcaagagactgagaagccaggtgcaggtgagcctggaggactacatcaacgacagacagtacgacagcagaggcagattcggcgagctgctgctgctgctgcccaccctgcagagcatcacctggcagatgatcgagcagatccagttcatcaagctgttcggcatggccaagatcgacaacctgctgcaggagatgctgctgtgaggactagttataagactgactagcccgatgggcctcccaacgggccctcctcccctccttgcaccgagattaataaaaaaaaaaaaaaaaaaaaaaaaaaaaaaaaaaaaaaaaaaaaaaaaaaaaaaaaaaaaaaaatgcatcccccccccccccccccccccccccccccccaaaggctcttttcagagccaccagaatt

SEQ ID NO: 2243 - RNA, 1345 nt, synthetic construct
  misc_feature 1..1345: note = mRNA i-3 (A64-N5-C30-hSL-N5) (opt4) from Homo sapiens__NP_000448.3__HNF4A(1-375)(S183A)
  source 1..1345: mol_type = other RNA
aggagaaagcttaccatgagactgagcaagaccctggtggacatggacatggccgactacagcgccgccctggaccccgcctacaccaccctggagttcgagaacgtgcaggtgctgaccatgggcaacgacaccagccccagcgagggcaccaacctgaacgcccccaacagcctgggcgtgagcgccctgtgcgccatctgcggcgacagagccaccggcaagcactacggcgccagcagctgcgacggctgcaagggcttcttcagaagaagcgtgagaaagaaccacatgtacagctgcagattcagcagacagtgcgtggtggacaaggacaagagaaaccagtgcagatactgcagactgaagaagtgcttcagagccggcatgaagaaggaggccgtgcagaacgagagagacagaatcagcaccagaagaagcagctacgaggacagcagcctgcccagcatcaacgccctgctgcaggccgaggtgctgagcagacagatcaccagccccgtgagcggcatcaacggcgacatcagagccaagaagatcgccgccatcgccgacgtgtgcgagagcatgaaggagcagctgctggtgctggtggagtgggccaagtacatccccgccttctgcgagctgcccctggacgaccaggtggccctgctgagagcccacgccggcgagcacctgctgctgggcgccaccaagagaagcatggtgttcaaggacgtgctgctgctgggcaacgactacatcgtgcccagacactgccccgagctggccgagatgagcagagtgagcatcagaatcctggacgagctggtgctgcccttccaggagctgcagatcgacgacaacgagtacgcctacctgaaggccatcatcttcttcgaccccgacgccaagggcctgagcgaccccggcaagatcaagagactgagaagccaggtgcaggtgagcctggaggactacatcaacgacagacagtacgacagcagaggcagattcggcgagctgctgctgctgctgcccaccctgcagagcatcacctggcagatgatcgagcagatccagttcatcaagctgttcggcatggccaagatcgacaacctgctgcaggagatgctgctgtgaggactagttataagactgactagcccgatgggcctcccaacgggccctcctcccctccttgcaccgagattaataaaaaaaaaaaaaaaaaaaaaaaaaaaaaaaaaaaaaaaaaaaaaaaaaaaaaaaaaaaaaaaatgcatcccccccccccccccccccccccccccccccaaaggctcttttcagagccaccagaatt

SEQ ID NO: 2244 - RNA, 1345 nt, synthetic construct
  misc_feature 1..1345: note = mRNA i-3 (A64-N5-C30-hSL-N5) (opt4) from Homo sapiens__NP_000448.3__HNF4A(1-375)(S183E)
  source 1..1345: mol_type = other RNA
aggagaaagcttaccatgagactgagcaagaccctggtggacatggacatggccgactacagcgccgccctggaccccgcctacaccaccctggagttcgagaacgtgcaggtgctgaccatgggcaacgacaccagccccagcgagggcaccaacctgaacgcccccaacagcctgggcgtgagcgccctgtgcgccatctgcggcgacagagccaccggcaagcactacggcgccagcagctgcgacggctgcaagggcttcttcagaagaagcgtgagaaagaaccacatgtacagctgcagattcagcagacagtgcgtggtggacaaggacaagagaaaccagtgcagatactgcagactgaagaagtgcttcagagccggcatgaagaaggaggccgtgcagaacgagagagacagaatcagcaccagaagaagcagctacgaggacagcagcctgcccagcatcaacgccctgctgcaggccgaggtgctgagcagacagatcaccagccccgtgagcggcatcaacggcgacatcagagccaagaagatcgccgagatcgccgacgtgtgcgagagcatgaaggagcagctgctggtgctggtggagtgggccaagtacatccccgccttctgcgagctgcccctggacgaccaggtggccctgctgagagcccacgccggcgagcacctgctgctgggcgccaccaagagaagcatggtgttcaaggacgtgctgctgctgggcaacgactacatcgtgcccagacactgccccgagctggccgagatgagcagagtgagcatcagaatcctggacgagctggtgctgcccttccaggagctgcagatcgacgacaacgagtacgcctacctgaaggccatcatcttcttcgaccccgacgccaagggcctgagcgaccccggcaagatcaagagactgagaagccaggtgcaggtgagcctggaggactacatcaacgacagacagtacgacagcagaggcagattcggcgagctgctgctgctgctgcccaccctgcagagcatcacctggcagatgatcgagcagatccagttcatcaagctgttcggcatggccaagatcgacaacctgctgcaggagatgctgctgtgaggactagttataagactgactagcccgatgggcctcccaacgggccctcctcccctccttgcaccgagattaataaaaaaaaaaaaaaaaaaaaaaaaaaaaaaaaaaaaaaaaaaaaaaaaaaaaaaaaaaaaaaaatgcatcccccccccccccccccccccccccccccccaaaggctcttttcagagccaccagaatt

SEQ ID NO: 2245 - RNA, 1345 nt, synthetic construct; identical to SEQ ID NO: 2217
  misc_feature 1..1345: note = mRNA i-3 (A64-N5-C30-hSL-N5) (opt4) from Homo sapiens__NP_000448.3__HNF4A(1-375)(S461A)
  source 1..1345: mol_type = other RNA

SEQ ID NO: 2246 - RNA, 1345 nt, synthetic construct; identical to SEQ ID NO: 2217
  misc_feature 1..1345: note = mRNA i-3 (A64-N5-C30-hSL-N5) (opt4) from Homo sapiens__NP_000448.3__HNF4A(1-375)(S461E)
  source 1..1345: mol_type = other RNA

SEQ ID NO: 2247 - RNA, 1345 nt, synthetic construct
  misc_feature 1..1345: note = mRNA i-3 (A64-N5-C30-hSL-N5) (opt4) from Homo sapiens__NP_000448.3__HNF4A(1-375)(S142A_S143A_S313A)
  source 1..1345: mol_type = other RNA
aggagaaagcttaccatgagactgagcaagaccctggtggacatggacatggccgactacagcgccgccctggaccccgcctacaccaccctggagttcgagaacgtgcaggtgctgaccatgggcaacgacaccagccccagcgagggcaccaacctgaacgcccccaacagcctgggcgtgagcgccctgtgcgccatctgcggcgacagagccaccggcaagcactacggcgccagcagctgcgacggctgcaagggcttcttcagaagaagcgtgagaaagaaccacatgtacagctgcagattcagcagacagtgcgtggtggacaaggacaagagaaaccagtgcagatactgcagactgaagaagtgcttcagagccggcatgaagaaggaggccgtgcagaacgagagagacagaatcagcaccagaagagccgcctacgaggacagcagcctgcccagcatcaacgccctgctgcaggccgaggtgctgagcagacagatcaccagccccgtgagcggcatcaacggcgacatcagagccaagaagatcgccagcatcgccgacgtgtgcgagagcatgaaggagcagctgctggtgctggtggagtgggccaagtacatccccgccttctgcgagctgcccctggacgaccaggtggccctgctgagagcccacgccggcgagcacctgctgctgggcgccaccaagagaagcatggtgttcaaggacgtgctgctgctgggcaacgactacatcgtgcccagacactgccccgagctggccgagatgagcagagtgagcatcagaatcctggacgagctggtgctgcccttccaggagctgcagatcgacgacaacgagtacgcctacctgaaggccatcatcttcttcgaccccgacgccaagggcctgagcgaccccggcaagatcaagagactgagagcccaggtgcaggtgagcctggaggactacatcaacgacagacagtacgacagcagaggcagattcggcgagctgctgctgctgctgcccaccctgcagagcatcacctggcagatgatcgagcagatccagttcatcaagctgttcggcatggccaagatcgacaacctgctgcaggagatgctgctgtgaggactagttataagactgactagcccgatgggcctcccaacgggccctcctcccctccttgcaccgagattaataaaaaaaaaaaaaaaaaaaaaaaaaaaaaaaaaaaaaaaaaaaaaaaaaaaaaaaaaaaaaaaatgcatcccccccccccccccccccccccccccccccaaaggctcttttcagagccaccagaatt

SEQ ID NO: 2248 - RNA, 1345 nt, synthetic construct; identical to SEQ ID NO: 2247
  misc_feature 1..1345: note = mRNA i-3 (A64-N5-C30-hSL-N5) (opt4) from Homo sapiens__NP_000448.3__HNF4A(1-375)(S142A_S143A_S313A_K458R)
  source 1..1345: mol_type = other RNA

SEQ ID NO: 2249 - RNA, 1345 nt, synthetic construct
  misc_feature 1..1345: note = mRNA i-3 (A64-N5-C30-hSL-N5) (opt4) from Homo sapiens__NP_000448.3__HNF4A(1-375)(S142A_S143A_S167A_S313A_ S378A_T429A_T432A_S436A_K458R)
  source 1..1345: mol_type = other RNA
aggagaaagcttaccatgagactgagcaagaccctggtggacatggacatggccgactacagcgccgccctggaccccgcctacaccaccctggagttcgagaacgtgcaggtgctgaccatgggcaacgacaccagccccagcgagggcaccaacctgaacgcccccaacagcctgggcgtgagcgccctgtgcgccatctgcggcgacagagccaccggcaagcactacggcgccagcagctgcgacggctgcaagggcttcttcagaagaagcgtgagaaagaaccacatgtacagctgcagattcagcagacagtgcgtggtggacaaggacaagagaaaccagtgcagatactgcagactgaagaagtgcttcagagccggcatgaagaaggaggccgtgcagaacgagagagacagaatcagcaccagaagagccgcctacgaggacagcagcctgcccagcatcaacgccctgctgcaggccgaggtgctgagcagacagatcaccgcccccgtgagcggcatcaacggcgacatcagagccaagaagatcgccagcatcgccgacgtgtgcgagagcatgaaggagcagctgctggtgctggtggagtgggccaagtacatccccgccttctgcgagctgcccctggacgaccaggtggccctgctgagagcccacgccggcgagcacctgctgctgggcgccaccaagagaagcatggtgttcaaggacgtgctgctgctgggcaacgactacatcgtgcccagacactgccccgagctggccgagatgagcagagtgagcatcagaatcctggacgagctggtgctgcccttccaggagctgcagatcgacgacaacgagtacgcctacctgaaggccatcatcttcttcgaccccgacgccaagggcctgagcgaccccggcaagatcaagagactgagagcccaggtgcaggtgagcctggaggactacatcaacgacagacagtacgacagcagaggcagattcggcgagctgctgctgctgctgcccaccctgcagagcatcacctggcagatgatcgagcagatccagttcatcaagctgttcggcatggccaagatcgacaacctgctgcaggagatgctgctgtgaggactagttataagactgactagcccgatgggcctcccaacgggccctcctcccctccttgcaccgagattaataaaaaaaaaaaaaaaaaaaaaaaaaaaaaaaaaaaaaaaaaaaaaaaaaaaaaaaaaaaaaaaatgcatcccccccccccccccccccccccccccccccaaaggctcttttcagagccaccagaatt

SEQ ID NO: 2250 - RNA, 1345 nt, synthetic construct
  misc_feature 1..1345: note = mRNA i-3 (A64-N5-C30-hSL-N5) (opt4) from Homo sapiens__NP_000448.3__HNF4A(1-375)(S142A_S143A_S148A_S167A_ S313A_S378A_T429A_T432A_S436A_K458R)
  source 1..1345: mol_type = other RNA
aggagaaagcttaccatgagactgagcaagaccctggtggacatggacatggccgactacagcgccgccctggaccccgcctacaccaccctggagttcgagaacgtgcaggtgctgaccatgggcaacgacaccagccccagcgagggcaccaacctgaacgcccccaacagcctgggcgtgagcgccctgtgcgccatctgcggcgacagagccaccggcaagcactacggcgccagcagctgcgacggctgcaagggcttcttcagaagaagcgtgagaaagaaccacatgtacagctgcagattcagcagacagtgcgtggtggacaaggacaagagaaaccagtgcagatactgcagactgaagaagtgcttcagagccggcatgaagaaggaggccgtgcagaacgagagagacagaatcagcaccagaagagccgcctacgaggacagcgccctgcccagcatcaacgccctgctgcaggccgaggtgctgagcagacagatcaccgcccccgtgagcggcatcaacggcgacatcagagccaagaagatcgccagcatcgccgacgtgtgcgagagcatgaaggagcagctgctggtgctggtggagtgggccaagtacatccccgccttctgcgagctgcccctggacgaccaggtggccctgctgagagcccacgccggcgagcacctgctgctgggcgccaccaagagaagcatggtgttcaaggacgtgctgctgctgggcaacgactacatcgtgcccagacactgccccgagctggccgagatgagcagagtgagcatcagaatcctggacgagctggtgctgcccttccaggagctgcagatcgacgacaacgagtacgcctacctgaaggccatcatcttcttcgaccccgacgccaagggcctgagcgaccccggcaagatcaagagactgagagcccaggtgcaggtgagcctggaggactacatcaacgacagacagtacgacagcagaggcagattcggcgagctgctgctgctgctgcccaccctgcagagcatcacctggcagatgatcgagcagatccagttcatcaagctgttcggcatggccaagatcgacaacctgctgcaggagatgctgctgtgaggactagttataagactgactagcccgatgggcctcccaacgggccctcctcccctccttgcaccgagattaataaaaaaaaaaaaaaaaaaaaaaaaaaaaaaaaaaaaaaaaaaaaaaaaaaaaaaaaaaaaaaaatgcatcccccccccccccccccccccccccccccccaaaggctcttttcagagccaccagaatt

SEQ ID NO: 2251 - RNA, 1345 nt, synthetic construct
  misc_feature 1..1345: note = mRNA i-3 (A64-N5-C30-hSL-N5) (opt4) from Homo sapiens__NP_000448.3__HNF4A(1-375)(K106R_K108R_K126R_K127R_ S142A_S143A_S148A_S167A_S313A_S378A_T429A_T432A_S436A_K458R )
  source 1..1345: mol_type = other RNA
aggagaaagcttaccatgagactgagcaagaccctggtggacatggacatggccgactacagcgccgccctggaccccgcctacaccaccctggagttcgagaacgtgcaggtgctgaccatgggcaacgacaccagccccagcgagggcaccaacctgaacgcccccaacagcctgggcgtgagcgccctgtgcgccatctgcggcgacagagccaccggcaagcactacggcgccagcagctgcgacggctgcaagggcttcttcagaagaagcgtgagaaagaaccacatgtacagctgcagattcagcagacagtgcgtggtggacagagacagaagaaaccagtgcagatactgcagactgaagaagtgcttcagagccggcatgagaagagaggccgtgcagaacgagagagacagaatcagcaccagaagagccgcctacgaggacagcgccctgcccagcatcaacgccctgctgcaggccgaggtgctgagcagacagatcaccgcccccgtgagcggcatcaacggcgacatcagagccaagaagatcgccagcatcgccgacgtgtgcgagagcatgaaggagcagctgctggtgctggtggagtgggccaagtacatccccgccttctgcgagctgcccctggacgaccaggtggccctgctgagagcccacgccggcgagcacctgctgctgggcgccaccaagagaagcatggtgttcaaggacgtgctgctgctgggcaacgactacatcgtgcccagacactgccccgagctggccgagatgagcagagtgagcatcagaatcctggacgagctggtgctgcccttccaggagctgcagatcgacgacaacgagtacgcctacctgaaggccatcatcttcttcgaccccgacgccaagggcctgagcgaccccggcaagatcaagagactgagagcccaggtgcaggtgagcctggaggactacatcaacgacagacagtacgacagcagaggcagattcggcgagctgctgctgctgctgcccaccctgcagagcatcacctggcagatgatcgagcagatccagttcatcaagctgttcggcatggccaagatcgacaacctgctgcaggagatgctgctgtgaggactagttataagactgactagcccgatgggcctcccaacgggccctcctcccctccttgcaccgagattaataaaaaaaaaaaaaaaaaaaaaaaaaaaaaaaaaaaaaaaaaaaaaaaaaaaaaaaaaaaaaaaatgcatcccccccccccccccccccccccccccccccaaaggctcttttcagagccaccagaatt

SEQ ID NO: 2252 - RNA, 1345 nt, synthetic construct
  misc_feature 1..1345: note = mRNA i-3 (A64-N5-C30-hSL-N5) (opt4) from Homo sapiens__NP_000448.3__HNF4A(1-375)(S142A_S143A_S148A_T166A_ S167A_S313A_S378A_T429A_T432A_S436A_K458R)
  source 1..1345: mol_type = other RNA
aggagaaagcttaccatgagactgagcaagaccctggtggacatggacatggccgactacagcgccgccctggaccccgcctacaccaccctggagttcgagaacgtgcaggtgctgaccatgggcaacgacaccagccccagcgagggcaccaacctgaacgcccccaacagcctgggcgtgagcgccctgtgcgccatctgcggcgacagagccaccggcaagcactacggcgccagcagctgcgacggctgcaagggcttcttcagaagaagcgtgagaaagaaccacatgtacagctgcagattcagcagacagtgcgtggtggacaaggacaagagaaaccagtgcagatactgcagactgaagaagtgcttcagagccggcatgaagaaggaggccgtgcagaacgagagagacagaatcagcaccagaagagccgcctacgaggacagcgccctgcccagcatcaacgccctgctgcaggccgaggtgctgagcagacagatcgccgcccccgtgagcggcatcaacggcgacatcagagccaagaagatcgccagcatcgccgacgtgtgcgagagcatgaaggagcagctgctggtgctggtggagtgggccaagtacatccccgccttctgcgagctgcccctggacgaccaggtggccctgctgagagcccacgccggcgagcacctgctgctgggcgccaccaagagaagcatggtgttcaaggacgtgctgctgctgggcaacgactacatcgtgcccagacactgccccgagctggccgagatgagcagagtgagcatcagaatcctggacgagctggtgctgcccttccaggagctgcagatcgacgacaacgagtacgcctacctgaaggccatcatcttcttcgaccccgacgccaagggcctgagcgaccccggcaagatcaagagactgagagcccaggtgcaggtgagcctggaggactacatcaacgacagacagtacgacagcagaggcagattcggcgagctgctgctgctgctgcccaccctgcagagcatcacctggcagatgatcgagcagatccagttcatcaagctgttcggcatggccaagatcgacaacctgctgcaggagatgctgctgtgaggactagttataagactgactagcccgatgggcctcccaacgggccctcctcccctccttgcaccgagattaataaaaaaaaaaaaaaaaaaaaaaaaaaaaaaaaaaaaaaaaaaaaaaaaaaaaaaaaaaaaaaaatgcatcccccccccccccccccccccccccccccccaaaggctcttttcagagccaccagaatt

SEQ ID NO: 2253 - RNA, 1345 nt, synthetic construct
  misc_feature 1..1345: note = mRNA i-3 (A64-N5-C30-hSL-N5) (opt4) from Homo sapiens__NP_000448.3__HNF4A(1-375)(S87A_S142A_S143A_S148A_T 166A_S167A_S313A_S378A_T429A_T432A_S436A_K458R)
  source 1..1345: mol_type = other RNA
aggagaaagcttaccatgagactgagcaagaccctggtggacatggacatggccgactacagcgccgccctggaccccgcctacaccaccctggagttcgagaacgtgcaggtgctgaccatgggcaacgacaccagccccagcgagggcaccaacctgaacgcccccaacagcctgggcgtgagcgccctgtgcgccatctgcggcgacagagccaccggcaagcactacggcgccagcagctgcgacggctgcaagggcttcttcagaagagccgtgagaaagaaccacatgtacagctgcagattcagcagacagtgcgtggtggacaaggacaagagaaaccagtgcagatactgcagactgaagaagtgcttcagagccggcatgaagaaggaggccgtgcagaacgagagagacagaatcagcaccagaagagccgcctacgaggacagcgccctgcccagcatcaacgccctgctgcaggccgaggtgctgagcagacagatcgccgcccccgtgagcggcatcaacggcgacatcagagccaagaagatcgccagcatcgccgacgtgtgcgagagcatgaaggagcagctgctggtgctggtggagtgggccaagtacatccccgccttctgcgagctgcccctggacgaccaggtggccctgctgagagcccacgccggcgagcacctgctgctgggcgccaccaagagaagcatggtgttcaaggacgtgctgctgctgggcaacgactacatcgtgcccagacactgccccgagctggccgagatgagcagagtgagcatcagaatcctggacgagctggtgctgcccttccaggagctgcagatcgacgacaacgagtacgcctacctgaaggccatcatcttcttcgaccccgacgccaagggcctgagcgaccccggcaagatcaagagactgagagcccaggtgcaggtgagcctggaggactacatcaacgacagacagtacgacagcagaggcagattcggcgagctgctgctgctgctgcccaccctgcagagcatcacctggcagatgatcgagcagatccagttcatcaagctgttcggcatggccaagatcgacaacctgctgcaggagatgctgctgtgaggactagttataagactgactagcccgatgggcctcccaacgggccctcctcccctccttgcaccgagattaataaaaaaaaaaaaaaaaaaaaaaaaaaaaaaaaaaaaaaaaaaaaaaaaaaaaaaaaaaaaaaaatgcatcccccccccccccccccccccccccccccccaaaggctcttttcagagccaccagaatt

SEQ ID NO: 2254 - RNA, 1345 nt, synthetic construct
  misc_feature 1..1345: note = mRNA i-3 (A64-N5-C30-hSL-N5) (opt4) from Homo sapiens__NP_000448.3__HNF4A(1-375)(S87A_K106R_K108R_K126R_K 127R_S142A_S143A_S148A_T166A_S167A_S313A_S378A_T429A_T432A_ S436A_K458R)
  source 1..1345: mol_type = other RNA
aggagaaagcttaccatgagactgagcaagaccctggtggacatggacatggccgactacagcgccgccctggaccccgcctacaccaccctggagttcgagaacgtgcaggtgctgaccatgggcaacgacaccagccccagcgagggcaccaacctgaacgcccccaacagcctgggcgtgagcgccctgtgcgccatctgcggcgacagagccaccggcaagcactacggcgccagcagctgcgacggctgcaagggcttcttcagaagagccgtgagaaagaaccacatgtacagctgcagattcagcagacagtgcgtggtggacagagacagaagaaaccagtgcagatactgcagactgaagaagtgcttcagagccggcatgagaagagaggccgtgcagaacgagagagacagaatcagcaccagaagagccgcctacgaggacagcgccctgcccagcatcaacgccctgctgcaggccgaggtgctgagcagacagatcgccgcccccgtgagcggcatcaacggcgacatcagagccaagaagatcgccagcatcgccgacgtgtgcgagagcatgaaggagcagctgctggtgctggtggagtgggccaagtacatccccgccttctgcgagctgcccctggacgaccaggtggccctgctgagagcccacgccggcgagcacctgctgctgggcgccaccaagagaagcatggtgttcaaggacgtgctgctgctgggcaacgactacatcgtgcccagacactgccccgagctggccgagatgagcagagtgagcatcagaatcctggacgagctggtgctgcccttccaggagctgcagatcgacgacaacgagtacgcctacctgaaggccatcatcttcttcgaccccgacgccaagggcctgagcgaccccggcaagatcaagagactgagagcccaggtgcaggtgagcctggaggactacatcaacgacagacagtacgacagcagaggcagattcggcgagctgctgctgctgctgcccaccctgcagagcatcacctggcagatgatcgagcagatccagttcatcaagctgttcggcatggccaagatcgacaacctgctgcaggagatgctgctgtgaggactagttataagactgactagcccgatgggcctcccaacgggccctcctcccctccttgcaccgagattaataaaaaaaaaaaaaaaaaaaaaaaaaaaaaaaaaaaaaaaaaaaaaaaaaaaaaaaaaaaaaaaatgcatcccccccccccccccccccccccccccccccaaaggctcttttcagagccaccagaatt

SEQ ID NO: 2255 - RNA, 1345 nt, synthetic construct
  misc_feature 1..1345: note = mRNA i-3 (A64-N5-C30-hSL-N5) (opt4) from Homo sapiens__NP_000448.3__HNF4A(1-375)(S87A_K106R_K108R_K126R_K 127R)
  source 1..1345: mol_type = other RNA
aggagaaagcttaccatgagactgagcaagaccctggtggacatggacatggccgactacagcgccgccctggaccccgcctacaccaccctggagttcgagaacgtgcaggtgctgaccatgggcaacgacaccagccccagcgagggcaccaacctgaacgcccccaacagcctgggcgtgagcgccctgtgcgccatctgcggcgacagagccaccggcaagcactacggcgccagcagctgcgacggctgcaagggcttcttcagaagagccgtgagaaagaaccacatgtacagctgcagattcagcagacagtgcgtggtggacagagacagaagaaaccagtgcagatactgcagactgaagaagtgcttcagagccggcatgagaagagaggccgtgcagaacgagagagacagaatcagcaccagaagaagcagctacgaggacagcagcctgcccagcatcaacgccctgctgcaggccgaggtgctgagcagacagatcaccagccccgtgagcggcatcaacggcgacatcagagccaagaagatcgccagcatcgccgacgtgtgcgagagcatgaaggagcagctgctggtgctggtggagtgggccaagtacatccccgccttctgcgagctgcccctggacgaccaggtggccctgctgagagcccacgccggcgagcacctgctgctgggcgccaccaagagaagcatggtgttcaaggacgtgctgctgctgggcaacgactacatcgtgcccagacactgccccgagctggccgagatgagcagagtgagcatcagaatcctggacgagctggtgctgcccttccaggagctgcagatcgacgacaacgagtacgcctacctgaaggccatcatcttcttcgaccccgacgccaagggcctgagcgaccccggcaagatcaagagactgagaagccaggtgcaggtgagcctggaggactacatcaacgacagacagtacgacagcagaggcagattcggcgagctgctgctgctgctgcccaccctgcagagcatcacctggcagatgatcgagcagatccagttcatcaagctgttcggcatggccaagatcgacaacctgctgcaggagatgctgctgtgaggactagttataagactgactagcccgatgggcctcccaacgggccctcctcccctccttgcaccgagattaataaaaaaaaaaaaaaaaaaaaaaaaaaaaaaaaaaaaaaaaaaaaaaaaaaaaaaaaaaaaaaaatgcatcccccccccccccccccccccccccccccccaaaggctcttttcagagccaccagaatt

SEQ ID NO: 2256 - RNA, 1345 nt, synthetic construct; identical to SEQ ID NO: 2254
  misc_feature 1..1345: note = mRNA i-3 (A64-N5-C30-hSL-N5) (opt4) from Homo sapiens__NP_000448.3__HNF4A(1-375)(S87A_K106R_K108R_K126R_K 127R_S142A_S143A_S148A_T166A_S167A_S313A_S378A_T429A_T432A_ S436A_K458R_S461A)
  source 1..1345: mol_type = other RNA

SEQ ID NO: 2257 - RNA, 1345 nt, synthetic construct; identical to SEQ ID NO: 2254
  misc_feature 1..1345: note = mRNA i-3 (A64-N5-C30-hSL-N5) (opt4) from Homo sapiens__NP_000448.3__HNF4A(1-375)(S87A_K106R_K108R_K126R_K 127R_S142A_S143A_S148A_T166A_S167A_S313A_S378A_T429A_T432A_ S436A_K458R_S461E)
  source 1..1345: mol_type = other RNA

SEQ ID NO: 2258 - RNA, 1345 nt, synthetic construct
  misc_feature 1..1345: note = mRNA i-3 (A64-N5-C30-hSL-N5) (opt4) from Homo sapiens__NP_000448.3__HNF4A(1-375)(S87A_K106R_K108R_K126R_K 127R_S142A_S143A_S148E_T166A_S167E_S313A_S378E_T429E_T432E_ S436E_K458R_S461E)
  source 1..1345: mol_type = other RNA
aggagaaagcttaccatgagactgagcaagaccctggtggacatggacatggccgactacagcgccgccctggaccccgcctacaccaccctggagttcgagaacgtgcaggtgctgaccatgggcaacgacaccagccccagcgagggcaccaacctgaacgcccccaacagcctgggcgtgagcgccctgtgcgccatctgcggcgacagagccaccggcaagcactacggcgccagcagctgcgacggctgcaagggcttcttcagaagagccgtgagaaagaaccacatgtacagctgcagattcagcagacagtgcgtggtggacagagacagaagaaaccagtgcagatactgcagactgaagaagtgcttcagagccggcatgagaagagaggccgtgcagaacgagagagacagaatcagcaccagaagagccgcctacgaggacagcgagctgcccagcatcaacgccctgctgcaggccgaggtgctgagcagacagatcgccgagcccgtgagcggcatcaacggcgacatcagagccaagaagatcgccagcatcgccgacgtgtgcgagagcatgaaggagcagctgctggtgctggtggagtgggccaagtacatccccgccttctgcgagctgcccctggacgaccaggtggccctgctgagagcccacgccggcgagcacctgctgctgggcgccaccaagagaagcatggtgttcaaggacgtgctgctgctgggcaacgactacatcgtgcccagacactgccccgagctggccgagatgagcagagtgagcatcagaatcctggacgagctggtgctgcccttccaggagctgcagatcgacgacaacgagtacgcctacctgaaggccatcatcttcttcgaccccgacgccaagggcctgagcgaccccggcaagatcaagagactgagagcccaggtgcaggtgagcctggaggactacatcaacgacagacagtacgacagcagaggcagattcggcgagctgctgctgctgctgcccaccctgcagagcatcacctggcagatgatcgagcagatccagttcatcaagctgttcggcatggccaagatcgacaacctgctgcaggagatgctgctgtgaggactagttataagactgactagcccgatgggcctcccaacgggccctcctcccctccttgcaccgagattaataaaaaaaaaaaaaaaaaaaaaaaaaaaaaaaaaaaaaaaaaaaaaaaaaaaaaaaaaaaaaaaatgcatcccccccccccccccccccccccccccccccaaaggctcttttcagagccaccagaatt

SEQ ID NO: 2259 - RNA, 1345 nt, synthetic construct
  misc_feature 1..1345: note = mRNA i-3 (A64-N5-C30-hSL-N5) (opt4) from Homo sapiens__NP_000448.3__HNF4A(1-375)(S87A_K106R_K108R_K126R_K 127R_S142A_S143A_S148A_T166A_S167A_K179R_K180R_S313A_S378A_ T429A_T432A_S436A_K458R_S461E)
  source 1..1345: mol_type = other RNA
aggagaaagcttaccatgagactgagcaagaccctggtggacatggacatggccgactacagcgccgccctggaccccgcctacaccaccctggagttcgagaacgtgcaggtgctgaccatgggcaacgacaccagccccagcgagggcaccaacctgaacgcccccaacagcctgggcgtgagcgccctgtgcgccatctgcggcgacagagccaccggcaagcactacggcgccagcagctgcgacggctgcaagggcttcttcagaagagccgtgagaaagaaccacatgtacagctgcagattcagcagacagtgcgtggtggacagagacagaagaaaccagtgcagatactgcagactgaagaagtgcttcagagccggcatgagaagagaggccgtgcagaacgagagagacagaatcagcaccagaagagccgcctacgaggacagcgccctgcccagcatcaacgccctgctgcaggccgaggtgctgagcagacagatcgccgcccccgtgagcggcatcaacggcgacatcagagccagaagaatcgccagcatcgccgacgtgtgcgagagcatgaaggagcagctgctggtgctggtggagtgggccaagtacatccccgccttctgcgagctgcccctggacgaccaggtggccctgctgagagcccacgccggcgagcacctgctgctgggcgccaccaagagaagcatggtgttcaaggacgtgctgctgctgggcaacgactacatcgtgcccagacactgccccgagctggccgagatgagcagagtgagcatcagaatcctggacgagctggtgctgcccttccaggagctgcagatcgacgacaacgagtacgcctacctgaaggccatcatcttcttcgaccccgacgccaagggcctgagcgaccccggcaagatcaagagactgagagcccaggtgcaggtgagcctggaggactacatcaacgacagacagtacgacagcagaggcagattcggcgagctgctgctgctgctgcccaccctgcagagcatcacctggcagatgatcgagcagatccagttcatcaagctgttcggcatggccaagatcgacaacctgctgcaggagatgctgctgtgaggactagttataagactgactagcccgatgggcctcccaacgggccctcctcccctccttgcaccgagattaataaaaaaaaaaaaaaaaaaaaaaaaaaaaaaaaaaaaaaaaaaaaaaaaaaaaaaaaaaaaaaaatgcatcccccccccccccccccccccccccccccccaaaggctcttttcagagccaccagaatt

SEQ ID NO: 2260 - RNA, 1345 nt, synthetic construct
  misc_feature 1..1345: note = mRNA i-3 (A64-N5-C30-hSL-N5) (opt4) from Homo sapiens__NP_000448.3__HNF4A(1-375)(S87A_K106R_K108R_K126R_K 127R_S142A_S143A_S148A_T166A_S167A_K300R_K307R_K309R_S313A_ S378A_T429A_T432A_S436A_K458R_S461E)
  source 1..1345: mol_type = other RNA
aggagaaagcttaccatgagactgagcaagaccctggtggacatggacatggccgactacagcgccgccctggaccccgcctacaccaccctggagttcgagaacgtgcaggtgctgaccatgggcaacgacaccagccccagcgagggcaccaacctgaacgcccccaacagcctgggcgtgagcgccctgtgcgccatctgcggcgacagagccaccggcaagcactacggcgccagcagctgcgacggctgcaagggcttcttcagaagagccgtgagaaagaaccacatgtacagctgcagattcagcagacagtgcgtggtggacagagacagaagaaaccagtgcagatactgcagactgaagaagtgcttcagagccggcatgagaagagaggccgtgcagaacgagagagacagaatcagcaccagaagagccgcctacgaggacagcgccctgcccagcatcaacgccctgctgcaggccgaggtgctgagcagacagatcgccgcccccgtgagcggcatcaacggcgacatcagagccaagaagatcgccagcatcgccgacgtgtgcgagagcatgaaggagcagctgctggtgctggtggagtgggccaagtacatccccgccttctgcgagctgcccctggacgaccaggtggccctgctgagagcccacgccggcgagcacctgctgctgggcgccaccaagagaagcatggtgttcaaggacgtgctgctgctgggcaacgactacatcgtgcccagacactgccccgagctggccgagatgagcagagtgagcatcagaatcctggacgagctggtgctgcccttccaggagctgcagatcgacgacaacgagtacgcctacctgaaggccatcatcttcttcgaccccgacgccagaggcctgagcgaccccggcagaatcagaagactgagagcccaggtgcaggtgagcctggaggactacatcaacgacagacagtacgacagcagaggcagattcggcgagctgctgctgctgctgcccaccctgcagagcatcacctggcagatgatcgagcagatccagttcatcaagctgttcggcatggccaagatcgacaacctgctgcaggagatgctgctgtgaggactagttataagactgactagcccgatgggcctcccaacgggccctcctcccctccttgcaccgagattaataaaaaaaaaaaaaaaaaaaaaaaaaaaaaaaaaaaaaaaaaaaaaaaaaaaaaaaaaaaaaaaatgcatcccccccccccccccccccccccccccccccaaaggctcttttcagagccaccagaatt

SEQ ID NO: 2261 - RNA, 1345 nt, synthetic construct; identical to SEQ ID NO: 2254
  misc_feature 1..1345: note = mRNA i-3 (A64-N5-C30-hSL-N5) (opt4) from Homo sapiens__NP_000448.3__HNF4A(1-375)(S87A_K106R_K108R_K126R_K 127R_S142A_S143A_S148A_T166A_S167A_S313A_S378A_T429A_T432A_ S436A_K447R_K458R_S461E_K470R)
  source 1..1345: mol_type = other RNA

SEQ ID NO: 2262 - RNA, 1345 nt, synthetic construct
  misc_feature 1..1345: note = mRNA i-3 (A64-N5-C30-hSL-N5) (opt4) from Homo sapiens__NP_000448.3__HNF4A(1-375)(S87A_K106R_K108R_K126R_K 127R_S142A_S143A_S148A_T166A_S167A_K179R_K180R_K234R_K300R_ K307R_K309R_S313A_S378A_T429A_T432A_S436A_K447R_K458R_S461E _K470R)
  source 1..1345: mol_type = other RNA
aggagaaagcttaccatgagactgagcaagaccctggtggacatggacatggccgactacagcgccgccctggaccccgcctacaccaccctggagttcgagaacgtgcaggtgctgaccatgggcaacgacaccagccccagcgagggcaccaacctgaacgcccccaacagcctgggcgtgagcgccctgtgcgccatctgcggcgacagagccaccggcaagcactacggcgccagcagctgcgacggctgcaagggcttcttcagaagagccgtgagaaagaaccacatgtacagctgcagattcagcagacagtgcgtggtggacagagacagaagaaaccagtgcagatactgcagactgaagaagtgcttcagagccggcatgagaagagaggccgtgcagaacgagagagacagaatcagcaccagaagagccgcctacgaggacagcgccctgcccagcatcaacgccctgctgcaggccgaggtgctgagcagacagatcgccgcccccgtgagcggcatcaacggcgacatcagagccagaagaatcgccagcatcgccgacgtgtgcgagagcatgaaggagcagctgctggtgctggtggagtgggccaagtacatccccgccttctgcgagctgcccctggacgaccaggtggccctgctgagagcccacgccggcgagcacctgctgctgggcgccaccagaagaagcatggtgttcaaggacgtgctgctgctgggcaacgactacatcgtgcccagacactgccccgagctggccgagatgagcagagtgagcatcagaatcctggacgagctggtgctgcccttccaggagctgcagatcgacgacaacgagtacgcctacctgaaggccatcatcttcttcgaccccgacgccagaggcctgagcgaccccggcagaatcagaagactgagagcccaggtgcaggtgagcctggaggactacatcaacgacagacagtacgacagcagaggcagattcggcgagctgctgctgctgctgcccaccctgcagagcatcacctggcagatgatcgagcagatccagttcatcaagctgttcggcatggccaagatcgacaacctgctgcaggagatgctgctgtgaggactagttataagactgactagcccgatgggcctcccaacgggccctcctcccctccttgcaccgagattaataaaaaaaaaaaaaaaaaaaaaaaaaaaaaaaaaaaaaaaaaaaaaaaaaaaaaaaaaaaaaaaatgcatcccccccccccccccccccccccccccccccaaaggctcttttcagagccaccagaatt

SEQ ID NO: 2263 - RNA, 1345 nt, synthetic construct
  misc_feature 1..1345: note = mRNA i-3 (A64-N5-C30-hSL-N5) (opt4) from Homo sapiens__NP_000448.3__HNF4A(1-375)(S87A_S95A_S99A_K106R_K10 8R_K126R_K127R_S142A_S143A_S148A_T166A_S167A_S313A_S378A_T4 29A_T432A_S436A_K458R_S461E)
  source 1..1345: mol_type = other RNA
aggagaaagcttaccatgagactgagcaagaccctggtggacatggacatggccgactacagcgccgccctggaccccgcctacaccaccctggagttcgagaacgtgcaggtgctgaccatgggcaacgacaccagccccagcgagggcaccaacctgaacgcccccaacagcctgggcgtgagcgccctgtgcgccatctgcggcgacagagccaccggcaagcactacggcgccagcagctgcgacggctgcaagggcttcttcagaagagccgtgagaaagaaccacatgtacgcctgcagattcgccagacagtgcgtggtggacagagacagaagaaaccagtgcagatactgcagactgaagaagtgcttcagagccggcatgagaagagaggccgtgcagaacgagagagacagaatcagcaccagaagagccgcctacgaggacagcgccctgcccagcatcaacgccctgctgcaggccgaggtgctgagcagacagatcgccgcccccgtgagcggcatcaacggcgacatcagagccaagaagatcgccagcatcgccgacgtgtgcgagagcatgaaggagcagctgctggtgctggtggagtgggccaagtacatccccgccttctgcgagctgcccctggacgaccaggtggccctgctgagagcccacgccggcgagcacctgctgctgggcgccaccaagagaagcatggtgttcaaggacgtgctgctgctgggcaacgactacatcgtgcccagacactgccccgagctggccgagatgagcagagtgagcatcagaatcctggacgagctggtgctgcccttccaggagctgcagatcgacgacaacgagtacgcctacctgaaggccatcatcttcttcgaccccgacgccaagggcctgagcgaccccggcaagatcaagagactgagagcccaggtgcaggtgagcctggaggactacatcaacgacagacagtacgacagcagaggcagattcggcgagctgctgctgctgctgcccaccctgcagagcatcacctggcagatgatcgagcagatccagttcatcaagctgttcggcatggccaagatcgacaacctgctgcaggagatgctgctgtgaggactagttataagactgactagcccgatgggcctcccaacgggccctcctcccctccttgcaccgagattaataaaaaaaaaaaaaaaaaaaaaaaaaaaaaaaaaaaaaaaaaaaaaaaaaaaaaaaaaaaaaaaatgcatcccccccccccccccccccccccccccccccaaaggctcttttcagagccaccagaatt

SEQ ID NO: 2264 - RNA, 1345 nt, synthetic construct
  misc_feature 1..1345: note = mRNA i-3 (A64-N5-C30-hSL-N5) (opt4) from Homo sapiens__NP_000448.3__HNF4A(1-375)(S87A_K106R_K108R_K126R_K 127R_S138A_T139A_S142A_S143A_S148A_T166A_S167A_S313A_S378A_ T429A_T432A_S436A_K458R_S461E)
  source 1..1345: mol_type = other RNA
aggagaaagcttaccatgagactgagcaagaccctggtggacatggacatggccgactacagcgccgccctggaccccgcctacaccaccctggagttcgagaacgtgcaggtgctgaccatgggcaacgacaccagccccagcgagggcaccaacctgaacgcccccaacagcctgggcgtgagcgccctgtgcgccatctgcggcgacagagccaccggcaagcactacggcgccagcagctgcgacggctgcaagggcttcttcagaagagccgtgagaaagaaccacatgtacagctgcagattcagcagacagtgcgtggtggacagagacagaagaaaccagtgcagatactgcagactgaagaagtgcttcagagccggcatgagaagagaggccgtgcagaacgagagagacagaatcgccgccagaagagccgcctacgaggacagcgccctgcccagcatcaacgccctgctgcaggccgaggtgctgagcagacagatcgccgcccccgtgagcggcatcaacggcgacatcagagccaagaagatcgccagcatcgccgacgtgtgcgagagcatgaaggagcagctgctggtgctggtggagtgggccaagtacatccccgccttctgcgagctgcccctggacgaccaggtggccctgctgagagcccacgccggcgagcacctgctgctgggcgccaccaagagaagcatggtgttcaaggacgtgctgctgctgggcaacgactacatcgtgcccagacactgccccgagctggccgagatgagcagagtgagcatcagaatcctggacgagctggtgctgcccttccaggagctgcagatcgacgacaacgagtacgcctacctgaaggccatcatcttcttcgaccccgacgccaagggcctgagcgaccccggcaagatcaagagactgagagcccaggtgcaggtgagcctggaggactacatcaacgacagacagtacgacagcagaggcagattcggcgagctgctgctgctgctgcccaccctgcagagcatcacctggcagatgatcgagcagatccagttcatcaagctgttcggcatggccaagatcgacaacctgctgcaggagatgctgctgtgaggactagttataagactgactagcccgatgggcctcccaacgggccctcctcccctccttgcaccgagattaataaaaaaaaaaaaaaaaaaaaaaaaaaaaaaaaaaaaaaaaaaaaaaaaaaaaaaaaaaaaaaaatgcatcccccccccccccccccccccccccccccccaaaggctcttttcagagccaccagaatt

SEQ ID NO: 2265 - RNA, 1345 nt, synthetic construct
  misc_feature 1..1345: note = mRNA i-3 (A64-N5-C30-hSL-N5) (opt4) from Homo sapiens__NP_000448.3__HNF4A(1-375)(S87A_S95A_S99A_K106R_K10 8R_K126R_K127R_S138A_T139A_S142A_S143A_S148A_T166A_S167A_S3 13A_S378A_T429A_T432A_S436A_K458R_S461E)
  source 1..1345: mol_type = other RNA
aggagaaagcttaccatgagactgagcaagaccctggtggacatggacatggccgactacagcgccgccctggaccccgcctacaccaccctggagttcgagaacgtgcaggtgctgaccatgggcaacgacaccagccccagcgagggcaccaacctgaacgcccccaacagcctgggcgtgagcgccctgtgcgccatctgcggcgacagagccaccggcaagcactacggcgccagcagctgcgacggctgcaagggcttcttcagaagagccgtgagaaagaaccacatgtacgcctgcagattcgccagacagtgcgtggtggacagagacagaagaaaccagtgcagatactgcagactgaagaagtgcttcagagccggcatgagaagagaggccgtgcagaacgagagagacagaatcgccgccagaagagccgcctacgaggacagcgccctgcccagcatcaacgccctgctgcaggccgaggtgctgagcagacagatcgccgcccccgtgagcggcatcaacggcgacatcagagccaagaagatcgccagcatcgccgacgtgtgcgagagcatgaaggagcagctgctggtgctggtggagtgggccaagtacatccccgccttctgcgagctgcccctggacgaccaggtggccctgctgagagcccacgccggcgagcacctgctgctgggcgccaccaagagaagcatggtgttcaaggacgtgctgctgctgggcaacgactacatcgtgcccagacactgccccgagctggccgagatgagcagagtgagcatcagaatcctggacgagctggtgctgcccttccaggagctgcagatcgacgacaacgagtacgcctacctgaaggccatcatcttcttcgaccccgacgccaagggcctgagcgaccccggcaagatcaagagactgagagcccaggtgcaggtgagcctggaggactacatcaacgacagacagtacgacagcagaggcagattcggcgagctgctgctgctgctgcccaccctgcagagcatcacctggcagatgatcgagcagatccagttcatcaagctgttcggcatggccaagatcgacaacctgctgcaggagatgctgctgtgaggactagttataagactgactagcccgatgggcctcccaacgggccctcctcccctccttgcaccgagattaataaaaaaaaaaaaaaaaaaaaaaaaaaaaaaaaaaaaaaaaaaaaaaaaaaaaaaaaaaaaaaaatgcatcccccccccccccccccccccccccccccccaaaggctcttttcagagccaccagaatt

SEQ ID NO: 2266 - RNA, 1345 nt, synthetic construct
  misc_feature 1..1345: note = mRNA i-3 (A64-N5-C30-hSL-N5) (opt5) from Homo sapiens__NP_000448.3__HNF4A(1-375)
  source 1..1345: mol_type = other RNA
aggagaaagcttaccatgagactgagcaagaccctcgtggacatggatatggccgactactccgctgccctggatcccgcgtatacaacgcttgagttcgaaaacgtccaggttctgaccatgggcaatgacacatctcctagcgaggggaccaacctcaatgctccgaactccctgggagtgtctgccctttgcgccatctgtggcgatcgggctacagggaaacactacggagccagctcctgcgacggctgtaaggggtttttccgcagatctgtgcggaaaaatcatatgtatagctgccgcttttccagacaatgtgtcgtggataaggacaaacggaaccagtgccgctactgtagactgaagaagtgcttccgggctggaatgaaaaaggaagccgttcagaatgagcgcgatagaattagcacccggcgcagctcctatgaagacagctctctcccctccatcaacgcgctgctgcaggccgaggtgctcagcagacaaattacatctcctgtctccggcatcaatggcgatattcgggctaaaaagatcgccagcatcgctgacgtgtgtgagtccatgaaagaacagctgcttgttctggtggagtgggccaagtacattcccgcgttttgcgaactccctctggatgaccaggtcgcccttctgcgcgctcacgccggggagcatctcctgctgggagctaccaagagatctatggtgttcaaagacgtgctcctgcttggcaacgattatatcgtcccccggcactgtcctgagctggccgaaatgagcagagtttccattcgcatcctcgacgagctggtgcttccgtttcaggaactgcaaattgatgacaatgagtacgcctacctcaaggctatcattttctttgatcccgacgcgaaagggctgagcgatcctggaaagatcaaacggctgagatctcaggtgcaggtctccctcgaagactatatcaacgatcgccagtacgacagccggggcagattcggggagctgcttctgctcctgcccacgcttcaatctattacctggcagatgatcgagcagattcaatttatcaagctgttcggaatggccaaaattgataatctcctgcaggaaatgctgctctgaggactagttataagactgactagcccgatgggcctcccaacgggccctcctcccctccttgcaccgagattaataaaaaaaaaaaaaaaaaaaaaaaaaaaaaaaaaaaaaaaaaaaaaaaaaaaaaaaaaaaaaaaatgcatcccccccccccccccccccccccccccccccaaaggctcttttcagagccaccagaatt

SEQ ID NO: 2267 - RNA, 1345 nt, synthetic construct
  misc_feature 1..1345: note = mRNA i-3 (A64-N5-C30-hSL-N5) (opt5) from Homo sapiens__NP_000448.3__HNF4A(1-375)(S313A)
  source 1..1345: mol_type = other RNA
aggagaaagcttaccatgagactgagcaagaccctcgtggacatggatatggccgactactccgctgccctggatcccgcgtatacaacgcttgagttcgaaaacgtccaggttctgaccatgggcaatgacacatctcctagcgaggggaccaacctcaatgctccgaactccctgggagtgtctgccctttgcgccatctgtggcgatcgggctacagggaaacactacggagccagctcctgcgacggctgtaaggggtttttccgcagatctgtgcggaaaaatcatatgtatagctgccgcttttccagacaatgtgtcgtggataaggacaaacggaaccagtgccgctactgtagactgaagaagtgcttccgggctggaatgaaaaaggaagccgttcagaatgagcgcgatagaattagcacccggagatcttcctatgaagacagctctctcccctccatcaacgcgctgctgcaggccgaggtgctcagccgccaaattacatctcctgtctccggcatcaatggcgatattcgggctaaaaagatcgccagcatcgctgacgtgtgtgagtccatgaaagaacagctgcttgttctggtggagtgggccaagtacattcccgcgttttgcgaactccctctggatgaccaggtcgcccttctgcgcgctcacgccggggagcatctcctgctgggagctaccaagagatctatggtgttcaaagacgtgctcctgcttggcaacgattatatcgtcccccggcactgtcctgagctggccgaaatgagcagagtttccattcgcatcctcgacgagctggtgcttccgtttcaggaactgcaaattgatgacaatgagtacgcctacctcaaggctatcattttctttgatcccgacgcgaaagggctgagcgatcctggaaagatcaaacggctgagagcccaggtgcaggtctctctcgaagactatatcaacgatcgccagtacgactcccggggcagattcggggagctgcttctgctcctgcccacgcttcaaagcattacctggcagatgatcgagcagattcaatttatcaagctgttcggaatggctaaaattgataatctcctgcaggaaatgctgctctgaggactagttataagactgactagcccgatgggcctcccaacgggccctcctcccctccttgcaccgagattaataaaaaaaaaaaaaaaaaaaaaaaaaaaaaaaaaaaaaaaaaaaaaaaaaaaaaaaaaaaaaaaatgcatcccccccccccccccccccccccccccccccaaaggctcttttcagagccaccagaatt

SEQ ID NO: 2268 - RNA, 1345 nt, synthetic construct
  misc_feature 1..1345: note = mRNA i-3 (A64-N5-C30-hSL-N5) (opt5) from Homo sapiens__NP_000448.3__HNF4A(1-375)(S313E)
  source 1..1345: mol_type = other RNA
aggagaaagcttaccatgagactgagcaagaccctcgtggacatggatatggccgactactccgctgccctggatcccgcgtatacaacgcttgagttcgaaaacgtccaggttctgaccatgggcaatgacacatctcctagcgaggggaccaacctcaatgctccgaactccctgggagtgtctgccctttgcgccatctgtggcgatcgggctacagggaaacactacggagccagctcctgcgacggctgtaaggggtttttccgcagatctgtgcggaaaaatcatatgtatagctgccgcttttccagacaatgtgtcgtggataaggacaaacggaaccagtgccgctactgtagactgaagaagtgcttccgggctggaatgaaaaaggaagccgttcagaatgagcgcgatagaattagcacccggagatcttcctatgaagacagctctctcccctccatcaacgcgctgctgcaggccgaggtgctcagccgccaaattacatctcctgtctccggcatcaatggcgatattcgggctaaaaagatcgccagcatcgctgacgtgtgtgagtccatgaaagaacagctgcttgttctggtggagtgggccaagtacattcccgcgttttgcgaactccctctggatgaccaggtcgcccttctgcgcgctcacgccggggagcatctcctgctgggagctaccaagagatctatggtgttcaaagacgtgctcctgcttggcaacgattatatcgtcccccggcactgtcctgagctggccgaaatgagcagagtttccattcgcatcctcgacgagctggtgcttccgtttcaggaactgcaaattgatgacaatgagtacgcctacctcaaggctatcattttctttgatcccgacgcgaaagggctgagcgatcctggaaagatcaaacggctgagagaacaggtgcaggtctctctcgaggactatatcaacgatcgccagtacgactcccggggcagattcggggagctgcttctgctcctgcccacgcttcaaagcattacctggcagatgatcgaacagattcaatttatcaagctgttcggaatggccaaaattgataatctcctgcaggagatgctgctctgaggactagttataagactgactagcccgatgggcctcccaacgggccctcctcccctccttgcaccgagattaataaaaaaaaaaaaaaaaaaaaaaaaaaaaaaaaaaaaaaaaaaaaaaaaaaaaaaaaaaaaaaaatgcatcccccccccccccccccccccccccccccccaaaggctcttttcagagccaccagaatt

SEQ ID NO: 2269 - RNA, 1345 nt, synthetic construct
  misc_feature 1..1345: note = mRNA i-3 (A64-N5-C30-hSL-N5) (opt5) from Homo sapiens__NP_000448.3__HNF4A(1-375)(S142A_S143A)
  source 1..1345: mol_type = other RNA
aggagaaagcttaccatgagactgagcaagaccctcgtggacatggatatggccgactactccgctgccctggatcccgcgtatacaacgcttgagttcgaaaacgtccaggttctgaccatgggcaatgacacatctcctagcgaggggaccaacctcaatgctccgaactccctgggagtgtctgccctttgcgccatctgtggcgatcgggctacagggaaacactacggagccagctcctgcgacggctgtaaggggtttttccgcagatctgtgcggaaaaatcatatgtatagctgccgcttttccagacaatgtgtcgtggataaggacaaacggaaccagtgccgctactgtagactgaagaagtgcttccgggctggaatgaaaaaggaagccgttcagaatgagcgcgatagaattagcacccggcgcgcggcctatgaagactcttccctccccagcatcaacgctctgctgcaggccgaggtgctctctagacaaattacatcccctgtcagcggcatcaatggcgatattcgggctaaaaagatcgcctctatcgcggacgtgtgtgagtccatgaaagaacagctgcttgttctggtggagtgggccaagtacattcccgctttttgcgaactccctctggatgaccaggtcgcccttctgcgcgctcacgccggggagcatctcctgctgggagccaccaagagaagcatggtgttcaaagacgtgctcctgcttggcaacgattatatcgtcccccggcactgtcctgagctggctgaaatgtccagagtttctattcgcatcctcgacgagctggtgcttccgtttcaggaactgcaaattgatgacaatgagtacgcgtacctcaaggccatcattttctttgatcccgacgctaaagggctgagcgatcctggaaagatcaaacggctgagatcccaggtgcaggtcagcctcgaagactatatcaacgatcgccagtacgactctcggggcagattcggggagctgcttctgctcctgcccacgcttcaatccattacctggcagatgatcgagcagattcaatttatcaagctgttcggaatggccaaaattgataatctcctgcaggaaatgctgctctgaggactagttataagactgactagcccgatgggcctcccaacgggccctcctcccctccttgcaccgagattaataaaaaaaaaaaaaaaaaaaaaaaaaaaaaaaaaaaaaaaaaaaaaaaaaaaaaaaaaaaaaaaatgcatcccccccccccccccccccccccccccccccaaaggctcttttcagagccaccagaatt

SEQ ID NO: 2270 - RNA, 1345 nt, synthetic construct
  misc_feature 1..1345: note = mRNA i-3 (A64-N5-C30-hSL-N5) (opt5) from Homo sapiens__NP_000448.3__HNF4A(1-375)(S142E_S143E)
  source 1..1345: mol_type = other RNA
aggagaaagcttaccatgagactgagcaagaccctcgtggacatggatatggccgactactccgctgccctggatcccgcgtatacaacgcttgagttcgaaaacgtccaggttctgaccatgggcaatgacacatctcctagcgaggggaccaacctcaatgctccgaactccctgggagtgtctgccctttgcgccatctgtggcgatcgggctacagggaaacactacggagccagctcctgcgacggctgtaaggggtttttccgcagatctgtgcggaaaaatcatatgtatagctgccgcttttccagacaatgtgtcgtggataaggacaaacggaaccagtgccgctactgtagactgaagaagtgcttccgggctggaatgaaaaaggaagccgttcagaatgagcgcgatagaattagcacccggcgcgaagagtatgaggactcttccctccccagcatcaacgcgctgctgcaggccgaagtgctctctagacaaattacatcccctgtcagcggcatcaatggcgatattcgggctaaaaagatcgcctctatcgctgacgtgtgtgagtccatgaaagaacagctgcttgttctggtggagtgggccaagtacattcccgcgttttgcgagctccctctggatgaccaggtcgcccttctgcgcgctcacgccggggaacatctcctgctgggagctaccaagagaagcatggtgttcaaagacgtgctcctgcttggcaacgattatatcgtcccccggcactgtcctgagctggccgaaatgtccagagtttctattcgcatcctcgacgagctggtgcttccgtttcaggaactgcaaattgatgacaatgagtacgcctacctcaaggctatcattttctttgatcccgacgcgaaagggctgagcgatcctggaaagatcaaacggctgagatcccaggtgcaggtcagcctcgaggactatatcaacgatcgccagtacgactctcggggcagattcggggaactgcttctgctcctgcccacgcttcaatccattacctggcagatgatcgagcagattcaatttatcaagctgttcggaatggccaaaattgataatctcctgcaggaaatgctgctctgaggactagttataagactgactagcccgatgggcctcccaacgggccctcctcccctccttgcaccgagattaataaaaaaaaaaaaaaaaaaaaaaaaaaaaaaaaaaaaaaaaaaaaaaaaaaaaaaaaaaaaaaaatgcatcccccccccccccccccccccccccccccccaaaggctcttttcagagccaccagaatt

SEQ ID NO: 2271 - RNA, 1345 nt, synthetic construct
  misc_feature 1..1345: note = mRNA i-3 (A64-N5-C30-hSL-N5) (opt5) from Homo sapiens__NP_000448.3__HNF4A(1-375)(S143A)
  source 1..1345: mol_type = other RNA
aggagaaagcttaccatgagactgagcaagaccctcgtggacatggatatggccgactactccgctgccctggatcccgcgtatacaacgcttgagttcgaaaacgtccaggttctgaccatgggcaatgacacatctcctagcgaggggaccaacctcaatgctccgaactccctgggagtgtctgccctttgcgccatctgtggcgatcgggctacagggaaacactacggagccagctcctgcgacggctgtaaggggtttttccgcagatctgtgcggaaaaatcatatgtatagctgccgcttttccagacaatgtgtcgtggataaggacaaacggaaccagtgccgctactgtagactgaagaagtgcttccgggctggaatgaaaaaggaagccgttcagaatgagcgcgatagaattagcacccggcgctctgcgtatgaagactccagcctcccctctatcaacgccctgctgcaggctgaggtgctctccagacaaattacaagccctgtctctggcatcaatggcgatattcgggccaaaaagatcgcttccatcgccgacgtgtgtgagagcatgaaagaacagctgcttgttctggtggagtgggcgaagtacattcccgccttttgcgaactccctctggatgaccaggtcgcccttctgcgcgcccacgctggggagcatctcctgctgggagccaccaagagatccatggtgttcaaagacgtgctcctgcttggcaacgattatatcgtcccccggcactgtcctgagctggccgaaatgtctagagttagcattcgcatcctcgacgagctggtgcttccgtttcaggaactgcaaattgatgacaatgagtacgcttacctcaaggcgatcattttctttgatcccgacgccaaagggctgtccgatcctggaaagatcaaacggctgagaagccaggtgcaggtctctctcgaagactatatcaacgatcgccagtacgactcccggggcagattcggggagctgcttctgctcctgcccacgcttcaaagcattacctggcagatgatcgagcagattcaatttatcaagctgttcggaatggctaaaattgataatctcctgcaggaaatgctgctctgaggactagttataagactgactagcccgatgggcctcccaacgggccctcctcccctccttgcaccgagattaataaaaaaaaaaaaaaaaaaaaaaaaaaaaaaaaaaaaaaaaaaaaaaaaaaaaaaaaaaaaaaaatgcatcccccccccccccccccccccccccccccccaaaggctcttttcagagccaccagaatt

SEQ ID NO: 2272 - RNA, 1345 nt, synthetic construct
  misc_feature 1..1345: note = mRNA i-3 (A64-N5-C30-hSL-N5) (opt5) from Homo sapiens__NP_000448.3__HNF4A(1-375)(T166A)
  source 1..1345: mol_type = other RNA
aggagaaagcttaccatgagactgagcaagaccctcgtggacatggatatggccgactactccgctgccctggatcccgcgtatacaacgcttgagttcgaaaacgtccaggttctgaccatgggcaatgacacatctcctagcgaggggaccaacctcaatgctccgaactccctgggagtgtctgccctttgcgccatctgtggcgatcgggctacagggaaacactacggagccagctcctgcgacggctgtaaggggtttttccgcagatctgtgcggaaaaatcatatgtatagctgccgcttttccagacaatgtgtcgtggataaggacaaacggaaccagtgccgctactgtagactgaagaagtgcttccgggctggaatgaaaaaggaagccgttcagaatgagcgcgatagaattagcacccggcgcagctcctatgaagacagctctctcccctccatcaacgcgctgctgcaggccgaggtgctcagcagacaaattgcttctcctgtctccggcatcaatggcgatattcgggccaaaaagatcgctagcatcgccgacgtgtgtgagtccatgaaagaacagctgcttgttctggtggagtgggcgaagtacattcccgccttttgcgaactccctctggatgaccaggtcgcccttctgcgcgcccacgctggggagcatctcctgctgggagccacaaagagatctatggtgttcaaagacgtgctcctgcttggcaacgattatatcgtcccccggcactgtcctgagctggccgaaatgagcagagtttccattcgcatcctcgacgagctggtgcttccgtttcaggaactgcaaattgatgacaatgagtacgcttacctcaaggcgatcattttctttgatcccgacgccaaagggctgagcgatcctggaaagatcaaacggctgagatctcaggtgcaggtctccctcgaagactatatcaacgatcgccagtacgacagccggggcagattcggggagctgcttctgctcctgcccacccttcaatctattacgtggcagatgatcgagcagattcaatttatcaagctgttcggaatggctaaaattgataatctcctgcaggaaatgctgctctgaggactagttataagactgactagcccgatgggcctcccaacgggccctcctcccctccttgcaccgagattaataaaaaaaaaaaaaaaaaaaaaaaaaaaaaaaaaaaaaaaaaaaaaaaaaaaaaaaaaaaaaaaatgcatcccccccccccccccccccccccccccccccaaaggctcttttcagagccaccagaatt

SEQ ID NO: 2273 - RNA, 1345 nt, synthetic construct
  misc_feature 1..1345: note = mRNA i-3 (A64-N5-C30-hSL-N5) (opt5) from Homo sapiens__NP_000448.3__HNF4A(1-375)(S167E)
  source 1..1345: mol_type = other RNA
aggagaaagcttaccatgagactgagcaagaccctcgtggacatggatatggccgactactccgctgccctggatcccgcgtatacaacgcttgagttcgaaaacgtccaggttctgaccatgggcaatgacacatctcctagcgaggggaccaacctcaatgctccgaactccctgggagtgtctgccctttgcgccatctgtggcgatcgggctacagggaaacactacggagccagctcctgcgacggctgtaaggggtttttccgcagatctgtgcggaaaaatcatatgtatagctgccgcttttccagacaatgtgtcgtggataaggacaaacggaaccagtgccgctactgtagactgaagaagtgcttccgggctggaatgaaaaaggaagccgttcagaatgagcgcgatagaattagcacccggagatcttcctatgaagacagctctctcccctccatcaacgcgctgctgcaggccgaggtgctcagccgccaaattacagagcctgtctctggcatcaatggcgatattcgggctaaaaagatcgcctccatcgctgacgtgtgtgaaagcatgaaagagcagctgcttgttctggtggaatgggccaagtacattcccgcgttttgcgagctccctctggatgaccaggtcgcccttctgcgcgctcacgccggggagcatctcctgctgggagctaccaagagatccatggtgttcaaagacgtgctcctgcttggcaacgattatatcgtcccccggcactgtcctgaactggccgagatgtctagagttagcattcgcatcctcgacgaactggtgcttccgtttcaggagctgcaaattgatgacaatgaatacgcctacctcaaggctatcattttctttgatcccgacgcgaaagggctgtccgatcctggaaagatcaaacggctgagaagccaggtgcaggtctctctcgaggactatatcaacgatcgccagtacgactcccggggcagattcggggagctgcttctgctcctgcccacgcttcaaagcattacctggcagatgatcgaacagattcaatttatcaagctgttcggaatggccaaaattgataatctcctgcaggagatgctgctctgaggactagttataagactgactagcccgatgggcctcccaacgggccctcctcccctccttgcaccgagattaataaaaaaaaaaaaaaaaaaaaaaaaaaaaaaaaaaaaaaaaaaaaaaaaaaaaaaaaaaaaaaaatgcatcccccccccccccccccccccccccccccccaaaggctcttttcagagccaccagaatt

SEQ ID NO: 2274 - RNA, 1345 nt, synthetic construct
  misc_feature 1..1345: note = mRNA i-3 (A64-N5-C30-hSL-N5) (opt5) from Homo sapiens__NP_000448.3__HNF4A(1-375)(S167A)
  source 1..1345: mol_type = other RNA
aggagaaagcttaccatgagactgagcaagaccctcgtggacatggatatggccgactactccgctgccctggatcccgcgtatacaacgcttgagttcgaaaacgtccaggttctgaccatgggcaatgacacatctcctagcgaggggaccaacctcaatgctccgaactccctgggagtgtctgccctttgcgccatctgtggcgatcgggctacagggaaacactacggagccagctcctgcgacggctgtaaggggtttttccgcagatctgtgcggaaaaatcatatgtatagctgccgcttttccagacaatgtgtcgtggataaggacaaacggaaccagtgccgctactgtagactgaagaagtgcttccgggctggaatgaaaaaggaagccgttcagaatgagcgcgatagaattagcacccggagatcttcctatgaagacagctctctcccctccatcaacgcgctgctgcaggccgaggtgctcagccgccaaattacagctcctgtctctggcatcaatggcgatattcgggccaaaaagatcgcttccatcgccgacgtgtgtgagagcatgaaagaacagctgcttgttctggtggagtgggcgaagtacattcccgccttttgcgaactccctctggatgaccaggtcgcccttctgcgcgcccacgctggggagcatctcctgctgggagccaccaagagatccatggtgttcaaagacgtgctcctgcttggcaacgattatatcgtcccccggcactgtcctgagctggccgaaatgtctagagttagcattcgcatcctcgacgagctggtgcttccgtttcaggaactgcaaattgatgacaatgagtacgcttacctcaaggcgatcattttctttgatcccgacgccaaagggctgtccgatcctggaaagatcaaacggctgagaagccaggtgcaggtctctctcgaagactatatcaacgatcgccagtacgactcccggggcagattcggggagctgcttctgctcctgcccacgcttcaaagcattacctggcagatgatcgagcagattcaatttatcaagctgttcggaatggctaaaattgataatctcctgcaggaaatgctgctctgaggactagttataagactgactagcccgatgggcctcccaacgggccctcctcccctccttgcaccgagattaataaaaaaaaaaaaaaaaaaaaaaaaaaaaaaaaaaaaaaaaaaaaaaaaaaaaaaaaaaaaaaaatgcatcccccccccccccccccccccccccccccccaaaggctcttttcagagccaccagaatt

SEQ ID NO: 2275 - RNA, 1345 nt, synthetic construct; identical to SEQ ID NO: 2274
  misc_feature 1..1345: note = mRNA i-3 (A64-N5-C30-hSL-N5) (opt5) from Homo sapiens__NP_000448.3__HNF4A(1-375)(S167A_S378A_T429A_T432A_ S436A)
  source 1..1345: mol_type = other RNA

SEQ ID NO: 2276 - RNA, 1345 nt, synthetic construct; identical to SEQ ID NO: 2273
  misc_feature 1..1345: note = mRNA i-3 (A64-N5-C30-hSL-N5) (opt5) from Homo sapiens__NP_000448.3__HNF4A(1-375)(S167E_S378E_T429E_T432E_ S436E)
  source 1..1345: mol_type = other RNA

SEQ ID NO: 2277 - RNA, 1345 nt, synthetic construct
  misc_feature 1..1345: note = mRNA i-3 (A64-N5-C30-hSL-N5) (opt5) from Homo sapiens__NP_000448.3__HNF4A(1-375)(S87A)
  source 1..1345: mol_type = other RNA
aggagaaagcttaccatgagactgagcaagaccctcgtggacatggatatggccgactactccgctgccctggatcccgcgtatacaacgcttgagttcgaaaacgtccaggttctgaccatgggcaatgacacatctcctagcgaggggaccaacctcaatgctccgaactccctgggagtgtctgccctttgcgccatctgtggcgatcgggctacagggaaacactacggagccagctcctgcgacggctgtaaggggtttttccgcagagctgtgcggaaaaatcatatgtattcttgccgctttagcagacaatgtgtcgtggataaggacaaacggaaccagtgccgctactgtagactgaagaagtgcttccgggccggaatgaaaaaggaagcggttcagaatgagcgcgatagaatttccacccggcgcagctcttatgaagactccagcctcccctctatcaacgccctgctgcaggctgaggtgctctccagacaaattacaagccctgtctctggcatcaatggcgatattcgggccaaaaagatcgcttccatcgccgacgtgtgtgagagcatgaaagaacagctgcttgttctggtggagtgggcgaagtacattcccgccttttgcgaactccctctggatgaccaggtcgcccttctgcgcgcccacgctggggagcatctcctgctgggagccaccaagagatccatggtgttcaaagacgtgctcctgcttggcaacgattatatcgtcccccggcactgtcctgagctggccgaaatgtctagagttagcattcgcatcctcgacgagctggtgcttccgtttcaggaactgcaaattgatgacaatgagtacgcttacctcaaggcgatcattttctttgatcccgacgccaaagggctgtccgatcctggaaagatcaaacggctgagaagccaggtgcaggtctctctcgaagactatatcaacgatcgccagtacgactcccggggcagattcggggagctgcttctgctcctgcccacgcttcaaagcattacctggcagatgatcgagcagattcaatttatcaagctgttcggaatggctaaaattgataatctcctgcaggaaatgctgctctgaggactagttataagactgactagcccgatgggcctcccaacgggccctcctcccctccttgcaccgagattaataaaaaaaaaaaaaaaaaaaaaaaaaaaaaaaaaaaaaaaaaaaaaaaaaaaaaaaaaaaaaaaatgcatcccccccccccccccccccccccccccccccaaaggctcttttcagagccaccagaatt

SEQ ID NO: 2278 - RNA, 1345 nt, synthetic construct
  misc_feature 1..1345: note = mRNA i-3 (A64-N5-C30-hSL-N5) (opt5) from Homo sapiens__NP_000448.3__HNF4A(1-375)(S87E)
  source 1..1345: mol_type = other RNA
aggagaaagcttaccatgagactgagcaagaccctcgtggacatggatatggccgactactccgctgccctggatcccgcgtatacaacgcttgagttcgaaaacgtccaggttctgaccatgggcaatgacacatctcctagcgaggggaccaacctcaatgctccgaactccctgggagtgtctgccctttgcgccatctgtggcgatcgggctacagggaaacactacggagccagctcctgcgacggctgtaaggggtttttccgcagagaagtgcggaaaaatcatatgtattcttgccgctttagcagacaatgtgtcgtggataaggacaaacggaaccagtgccgctactgtagactgaagaagtgcttccgggctggaatgaaaaaggaggccgttcagaatgaacgcgatagaatttccacccggcgcagctcttatgaggactccagcctcccctctatcaacgcgctgctgcaggccgaggtgctctccagacaaattacaagccctgtctctggcatcaatggcgatattcgggctaaaaagatcgcctccatcgctgacgtgtgtgaaagcatgaaagagcagctgcttgttctggtggaatgggccaagtacattcccgcgttttgcgagctccctctggatgaccaggtcgcccttctgcgcgctcacgccggggagcatctcctgctgggagctaccaagagatccatggtgttcaaagacgtgctcctgcttggcaacgattatatcgtcccccggcactgtcctgaactggccgagatgtctagagttagcattcgcatcctcgacgaactggtgcttccgtttcaggagctgcaaattgatgacaatgaatacgcctacctcaaggctatcattttctttgatcccgacgcgaaagggctgtccgatcctggaaagatcaaacggctgagaagccaggtgcaggtctctctcgaggactatatcaacgatcgccagtacgactcccggggcagattcggggagctgcttctgctcctgcccacgcttcaaagcattacctggcagatgatcgaacagattcaatttatcaagctgttcggaatggccaaaattgataatctcctgcaggagatgctgctctgaggactagttataagactgactagcccgatgggcctcccaacgggccctcctcccctccttgcaccgagattaataaaaaaaaaaaaaaaaaaaaaaaaaaaaaaaaaaaaaaaaaaaaaaaaaaaaaaaaaaaaaaaatgcatcccccccccccccccccccccccccccccccaaaggctcttttcagagccaccagaatt

SEQ ID NO: 2279 - RNA, 1345 nt, synthetic construct
  misc_feature 1..1345: note = mRNA i-3 (A64-N5-C30-hSL-N5) (opt5) from Homo sapiens__NP_000448.3__HNF4A(1-375)(R2V)
  source 1..1345: mol_type = other RNA
aggagaaagcttaccatggtgctgagcaagaccctcgtcgacatggatatggccgactactccgctgccctggatcccgcgtatacaacgcttgagttcgaaaacgttcaggtgctgaccatgggcaatgacacatctcctagcgaggggaccaacctcaatgctccgaactccctgggagtgtctgccctttgcgccatctgtggcgatagagctacagggaaacactacggagccagctcctgcgacggctgtaaggggtttttccggcgctctgtccggaaaaatcatatgtatagctgcagattttcccgccaatgtgtggttgataaggacaaaagaaaccagtgccggtactgtcgcctgaagaagtgcttcagagctggaatgaaaaaggaagccgtgcagaatgagcgggatcgcattagcaccagacggtcttcctatgaagacagctctctcccctccatcaacgcgctgctgcaggccgaggtcctcagccgccaaattacatctcctgtgtccggcatcaatggcgatattagagctaaaaagatcgccagcatcgctgacgtttgtgagtccatgaaagaacagctgcttgtgctggtcgagtgggccaagtacattcccgcgttttgcgaactccctctggatgaccaggtggcccttctgcgggctcacgccggggagcatctcctgctgggagctaccaagcgctctatggtgttcaaagacgtcctcctgcttggcaacgattatatcgttcccagacactgtcctgagctggccgaaatgagccgggtgtccattagaatcctcgacgagctggtgcttccgtttcaggaactgcaaattgatgacaatgagtacgcctacctcaaggctatcattttctttgatcccgacgcgaaagggctgagcgatcctggaaagatcaaacgcctgcggtctcaggtccaggtgtccctcgaagactatatcaacgatagacagtacgacagccgcggccggttcggggagctgcttctgctcctgcccacgcttcaatctattacctggcagatgatcgagcagattcaatttatcaagctgttcggaatggccaaaattgataatctcctgcaggaaatgctgctctgaggactagttataagactgactagcccgatgggcctcccaacgggccctcctcccctccttgcaccgagattaataaaaaaaaaaaaaaaaaaaaaaaaaaaaaaaaaaaaaaaaaaaaaaaaaaaaaaaaaaaaaaaatgcatcccccccccccccccccccccccccccccccaaaggctcttttcagagccaccagaatt

SEQ ID NO: 2280 - RNA, 1345 nt, synthetic construct
  misc_feature 1..1345: note = mRNA i-3 (A64-N5-C30-hSL-N5) (opt5) from Homo sapiens__NP_000448.3__HNF4A(1-375)(R2V_K5V)
  source 1..1345: mol_type = other RNA
aggagaaagcttaccatggtgctgagcgtcaccctcgttgacatggatatggccgactactccgctgccctggatcccgcgtatacaacgcttgagttcgaaaacgtccaggtgctgaccatgggcaatgacacatctcctagcgaggggaccaacctcaatgctccgaactccctgggagtgtctgccctttgcgccatctgtggcgatagagctacagggaagcactacggagccagctcctgcgacggctgtaaagggtttttccggcgctctgtgagaaagaatcatatgtatagctgccggttttcccgccaatgtgttgtggataaagacaagagaaaccagtgccggtactgtcgcctgaaaaagtgcttcagagctggaatgaagaaagaagccgtccagaatgagcgggatcgcattagcaccagacggtcttcctatgaagacagctctctcccctccatcaacgcgctgctgcaggccgaggtgctcagccgccaaattacatctcctgtttccggcatcaatggcgatattagagctaagaaaatcgccagcatcgctgacgtgtgtgagtccatgaaggaacagctgcttgtcctggtggagtgggccaaatacattcccgcgttttgcgaactccctctggatgaccaggtggcccttctgcgggctcacgccggggagcatctcctgctgggagctaccaagcgctctatggtcttcaaggacgttctcctgcttggcaacgattatatcgtgcccagacactgtcctgagctggccgaaatgagccgggtgtccattagaatcctcgacgagctggtccttccgtttcaggaactgcaaattgatgacaatgagtacgcctacctcaaagctatcattttctttgatcccgacgcgaaggggctgagcgatcctggaaaaatcaagcgcctgcggtctcaggtgcaggtttccctcgaagactatatcaacgatagacagtacgacagccgcggccggttcggggagctgcttctgctcctgcccacgcttcaatctattacctggcagatgatcgagcagattcaatttatcaaactgttcggaatggccaagattgataatctcctgcaggaaatgctgctctgaggactagttataagactgactagcccgatgggcctcccaacgggccctcctcccctccttgcaccgagattaataaaaaaaaaaaaaaaaaaaaaaaaaaaaaaaaaaaaaaaaaaaaaaaaaaaaaaaaaaaaaaaatgcatcccccccccccccccccccccccccccccccaaaggctcttttcagagccaccagaatt

SEQ ID NO: 2281 - RNA, 1345 nt, synthetic construct
  misc_feature 1..1345: note = mRNA i-3 (A64-N5-C30-hSL-N5) (opt5) from Homo sapiens__NP_000448.3__HNF4A(1-375)(K179R_K180R)
  source 1..1345: mol_type = other RNA
aggagaaagcttaccatgagactgagcaagaccctcgtggacatggatatggccgactactccgctgccctggatcccgcgtatacaacgcttgagttcgaaaacgtccaggttctgaccatgggcaatgacacatctcctagcgaggggaccaacctcaatgctccgaactccctgggagtgtctgccctttgcgccatctgtggcgatcgggctacagggaaacactacggagccagctcctgcgacggctgtaaggggtttttccgcagatctgtgcggaaaaatcatatgtatagctgccgcttttccagacaatgtgtcgtggataaggacaaacggaaccagtgccgctactgtagactgaagaagtgcttccgggctggaatgaaaaaggaagccgttcagaatgagcgcgatagaattagcacccggcgcagctcctatgaagacagctctctcccctccatcaacgcgctgctgcaggccgaggtgctcagcagacaaattacatctcctgtctccggcatcaatggcgatattcgggctcgcagaatcgccagcatcgctgacgtgtgtgagtccatgaaagaacagctgcttgttctggtggagtgggccaagtacattcccgcgttttgcgaactccctctggatgaccaggtcgcccttctgcgggctcacgccggggagcatctcctgctgggagctaccaaaagatctatggtgttcaaggacgtgctcctgcttggcaacgattatatcgtcccccgccactgtcctgagctggccgaaatgagccgggtttccattagaatcctcgacgagctggtgcttccgtttcaggaactgcaaattgatgacaatgagtacgcctacctcaaggctatcattttctttgatcccgacgcgaaagggctgagcgatcctggaaagatcaaacgcctgcggtctcaggtgcaggtctccctcgaagactatatcaacgatagacagtacgacagccgcggccggttcggggagctgcttctgctcctgcccacgcttcaatctattacctggcagatgatcgagcagattcaatttatcaagctgttcggaatggccaaaattgataatctcctgcaggaaatgctgctctgaggactagttataagactgactagcccgatgggcctcccaacgggccctcctcccctccttgcaccgagattaataaaaaaaaaaaaaaaaaaaaaaaaaaaaaaaaaaaaaaaaaaaaaaaaaaaaaaaaaaaaaaaatgcatcccccccccccccccccccccccccccccccaaaggctcttttcagagccaccagaatt

SEQ ID NO: 2282 - RNA, 1345 nt, synthetic construct
  misc_feature 1..1345: note = mRNA i-3 (A64-N5-C30-hSL-N5) (opt5) from Homo sapiens__NP_000448.3__HNF4A(1-375)(K234R)
  source 1..1345: mol_type = other RNA
aggagaaagcttaccatgagactgagcaagaccctcgtggacatggatatggccgactactccgctgccctggatcccgcgtatacaacgcttgagttcgaaaacgtccaggttctgaccatgggcaatgacacatctcctagcgaggggaccaacctcaatgctccgaactccctgggagtgtctgccctttgcgccatctgtggcgatcgggctacagggaaacactacggagccagctcctgcgacggctgtaaggggtttttccgcagatctgtgcggaaaaatcatatgtatagctgccgcttttccagacaatgtgtcgtggataaggacaaacggaaccagtgccgctactgtagactgaagaagtgcttccgggctggaatgaaaaaggaagccgttcagaatgagcgcgatagaattagcacccggcgcagctcctatgaagacagctctctcccctccatcaacgcgctgctgcaggccgaggtgctcagcagacaaattacatctcctgtctccggcatcaatggcgatattcgggctaaaaagatcgccagcatcgctgacgtgtgtgagtccatgaaagaacagctgcttgttctggtggagtgggccaagtacattcccgcgttttgcgaactccctctggatgaccaggtcgcccttctgcgcgctcacgccggggagcatctcctgctgggagctaccagacggtctatggtgttcaaggacgtgctcctgcttggcaacgattatatcgtccccagacactgtcctgagctggccgaaatgagccgcgtttccattcggatcctcgacgagctggtgcttccgtttcaggaactgcaaattgatgacaatgagtacgcctacctcaaagctatcattttctttgatcccgacgcgaaggggctgagcgatcctggaaaaatcaagagactgcgctctcaggtgcaggtctccctcgaagactatatcaacgatcggcagtacgacagcagaggccgcttcggggagctgcttctgctcctgcccacgcttcaatctattacctggcagatgatcgagcagattcaatttatcaaactgttcggaatggccaagattgataatctcctgcaggaaatgctgctctgaggactagttataagactgactagcccgatgggcctcccaacgggccctcctcccctccttgcaccgagattaataaaaaaaaaaaaaaaaaaaaaaaaaaaaaaaaaaaaaaaaaaaaaaaaaaaaaaaaaaaaaaaatgcatcccccccccccccccccccccccccccccccaaaggctcttttcagagccaccagaatt

SEQ ID NO: 2283 - RNA, 1345 nt, synthetic construct
  misc_feature 1..1345: note = mRNA i-3 (A64-N5-C30-hSL-N5) (opt5) from Homo sapiens__NP_000448.3__HNF4A(1-375)(K300R)
  source 1..1345: mol_type = other RNA
aggagaaagcttaccatgagactgagcaagaccctcgtggacatggatatggccgactactccgctgccctggatcccgcgtatacaacgcttgagttcgaaaacgtccaggttctgaccatgggcaatgacacatctcctagcgaggggaccaacctcaatgctccgaactccctgggagtgtctgccctttgcgccatctgtggcgatcgggctacagggaaacactacggagccagctcctgcgacggctgtaaggggtttttccgcagatctgtgcggaaaaatcatatgtatagctgccgcttttccagacaatgtgtcgtggataaggacaaacggaaccagtgccgctactgtagactgaagaagtgcttccgggctggaatgaaaaaggaagccgttcagaatgagcgcgatagaattagcacccggcgcagctcctatgaagacagctctctcccctccatcaacgcgctgctgcaggccgaggtgctcagcagacaaattacatctcctgtctccggcatcaatggcgatattcgggctaaaaagatcgccagcatcgctgacgtgtgtgagtccatgaaagaacagctgcttgttctggtggagtgggccaagtacattcccgcgttttgcgaactccctctggatgaccaggtcgcccttctgcgcgctcacgccggggagcatctcctgctgggagctaccaagagatctatggtgttcaaagacgtgctcctgcttggcaacgattatatcgtcccccggcactgtcctgagctggccgaaatgagcagagtttccattcgcatcctcgacgagctggtgcttccgtttcaggaactgcaaattgatgacaatgagtacgcctacctcaaggctatcattttctttgatcccgacgcgcgggggctgagcgatcctggaaaaatcaagagactgcgctctcaggtgcaggtctccctcgaagactatatcaacgatcggcagtacgacagcagaggccgcttcggggagctgcttctgctcctgcccacgcttcaatctattacctggcagatgatcgagcagattcaatttatcaaactgttcggaatggccaagattgataatctcctgcaggaaatgctgctctgaggactagttataagactgactagcccgatgggcctcccaacgggccctcctcccctccttgcaccgagattaataaaaaaaaaaaaaaaaaaaaaaaaaaaaaaaaaaaaaaaaaaaaaaaaaaaaaaaaaaaaaaaatgcatcccccccccccccccccccccccccccccccaaaggctcttttcagagccaccagaatt

SEQ ID NO: 2284 - RNA, 1345 nt, synthetic construct
  misc_feature 1..1345: note = mRNA i-3 (A64-N5-C30-hSL-N5) (opt5) from Homo sapiens__NP_000448.3__HNF4A(1-375)(K300R_K307R_K309R)
  source 1..1345: mol_type = other RNA
aggagaaagcttaccatgagactgagcaagaccctcgtggacatggatatggccgactactccgctgccctggatcccgcgtatacaacgcttgagttcgaaaacgtccaggttctgaccatgggcaatgacacatctcctagcgaggggaccaacctcaatgctccgaactccctgggagtgtctgccctttgcgccatctgtggcgatcgggctacagggaaacactacggagccagctcctgcgacggctgtaaggggtttttccgcagatctgtgcggaaaaatcatatgtatagctgccgcttttccagacaatgtgtcgtggataaggacaaacggaaccagtgccgctactgtagactgaagaagtgcttccgggctggaatgaaaaaggaagccgttcagaatgagcgcgatagaattagcacccggcgcagctcctatgaagacagctctctcccctccatcaacgcgctgctgcaggccgaggtgctcagcagacaaattacatctcctgtctccggcatcaatggcgatattcgggctaaaaagatcgccagcatcgctgacgtgtgtgagtccatgaaagaacagctgcttgttctggtggagtgggccaagtacattcccgcgttttgcgaactccctctggatgaccaggtcgcccttctgcgcgctcacgccggggagcatctcctgctgggagctaccaagagatctatggtgttcaaagacgtgctcctgcttggcaacgattatatcgtcccccggcactgtcctgagctggccgaaatgagcagagtttccattcgcatcctcgacgagctggtgcttccgtttcaggaactgcaaattgatgacaatgagtacgcctacctcaaggctatcattttctttgatcccgacgcgcgggggctgagcgatcctggaagaatccgccggctgagatctcaggtgcaggtctccctcgaagactatatcaacgatcgccagtacgacagccggggcagattcggggagctgcttctgctcctgcccacgcttcaatctattacctggcagatgatcgagcagattcaatttatcaaactgttcggaatggccaagattgataatctcctgcaggaaatgctgctctgaggactagttataagactgactagcccgatgggcctcccaacgggccctcctcccctccttgcaccgagattaataaaaaaaaaaaaaaaaaaaaaaaaaaaaaaaaaaaaaaaaaaaaaaaaaaaaaaaaaaaaaaaatgcatcccccccccccccccccccccccccccccccaaaggctcttttcagagccaccagaatt

SEQ ID NO: 2285 - RNA, 1345 nt, synthetic construct; identical to SEQ ID NO: 2266
  misc_feature 1..1345: note = mRNA i-3 (A64-N5-C30-hSL-N5) (opt5) from Homo sapiens__NP_000448.3__HNF4A(1-375)(K447R_K470R)
  source 1..1345: mol_type = other RNA

SEQ ID NO: 2286 - RNA, 1345 nt, synthetic construct; identical to SEQ ID NO: 2266
  misc_feature 1..1345: note = mRNA i-3 (A64-N5-C30-hSL-N5) (opt5) from Homo sapiens__NP_000448.3__HNF4A(1-375)(K458R)
  source 1..1345: mol_type = other RNA

SEQ ID NO: 2287 - RNA, 1345 nt, synthetic construct
  misc_feature 1..1345: note = mRNA i-3 (A64-N5-C30-hSL-N5) (opt5) from Homo sapiens__NP_000448.3__HNF4A(1-375)(K106R_K108R_K126R_K127R)
  source 1..1345: mol_type = other RNA
aggagaaagcttaccatgagactgagcaagaccctcgtggacatggatatggccgactactccgctgccctggatcccgcgtatacaacgcttgagttcgaaaacgtccaggttctgaccatgggcaatgacacatctcctagcgaggggaccaacctcaatgctccgaactccctgggagtgtctgccctttgcgccatctgtggcgatcgggctacagggaaacactacggagccagctcctgcgacggctgtaaggggtttttccgcagatctgtgcggaaaaatcatatgtatagctgccgcttttccagacaatgtgtcgtggatcgggaccgcagaaaccagtgccggtactgtcgcctgaagaaatgcttcagagctggaatgcggcgcgaagccgttcagaatgagagagatcggattagcacccgcagatcttcctatgaagacagctctctcccctccatcaacgcgctgctgcaggccgaggtgctcagccggcaaattacatctcctgtctccggcatcaatggcgatattagagctaagaagatcgccagcatcgctgacgtgtgtgagtccatgaaagaacagctgcttgttctggtggagtgggccaagtacattcccgcgttttgcgaactccctctggatgaccaggtcgcccttctgcgcgctcacgccggggagcatctcctgctgggagctaccaaacggtctatggtgttcaaggacgtgctcctgcttggcaacgattatatcgtccccagacactgtcctgagctggccgaaatgagccgcgtttccattcggatcctcgacgagctggtgcttccgtttcaggaactgcaaattgatgacaatgagtacgcctacctcaaagctatcattttctttgatcccgacgcgaaggggctgagcgatcctggaaagatcaaaagactgcgctctcaggtgcaggtctccctcgaagactatatcaacgatcggcagtacgacagcagaggccgcttcggggagctgcttctgctcctgcccacgcttcaatctattacctggcagatgatcgagcagattcaatttatcaagctgttcggaatggccaaaattgataatctcctgcaggaaatgctgctctgaggactagttataagactgactagcccgatgggcctcccaacgggccctcctcccctccttgcaccgagattaataaaaaaaaaaaaaaaaaaaaaaaaaaaaaaaaaaaaaaaaaaaaaaaaaaaaaaaaaaaaaaaatgcatcccccccccccccccccccccccccccccccaaaggctcttttcagagccaccagaatt

SEQ ID NO: 2288 - RNA, 1345 nt, synthetic construct
  misc_feature 1..1345: note = mRNA i-3 (A64-N5-C30-hSL-N5) (opt5) from Homo sapiens__NP_000448.3__HNF4A(1-375)(E285Q)
  source 1..1345: mol_type = other RNA
aggagaaagcttaccatgagactgagcaagaccctcgtggacatggatatggccgactactccgctgccctggatcccgcgtatacaacgcttgagttcgaaaacgtccaggttctgaccatgggcaatgacacatctcctagcgaggggaccaacctcaatgctccgaactccctgggagtgtctgccctttgcgccatctgtggcgatcgggctacagggaaacactacggagccagctcctgcgacggctgtaaggggtttttccgcagatctgtgcggaaaaatcatatgtatagctgccgcttttccagacaatgtgtcgtggataaggacaaacggaaccagtgccgctactgtagactgaagaagtgcttccgggctggaatgaaaaaggaagccgttcagaatgagcgcgatagaattagcacccggcgcagctcctatgaagacagctctctcccctccatcaacgcgctgctgcaggccgaggtgctcagcagacaaattacatctcctgtctccggcatcaatggcgatattcgggctaaaaagatcgccagcatcgctgacgtgtgtgagtccatgaaagaacagctgcttgttctggtggagtgggccaagtacattcccgcgttttgcgaactccctctggatgaccaggtcgcccttctgcgcgctcacgccggggagcatctcctgctgggagctaccaagagatctatggtgttcaaagacgtgctcctgcttggcaacgattatatcgtcccccggcactgtcctgagctggccgaaatgagcagagtttccattcgcatcctcgacgagctggtgcttccgtttcaggaactgcaaattgatgacaatcagtacgcctacctcaaggctatcattttctttgatcccgacgcgaaagggctgagcgatcctggaaagatcaaacggctgagatctcaggtgcaggtctccctcgaggactatatcaacgatcgccaatacgacagccggggcagattcggggaactgcttctgctcctgcccacgcttcagtctattacctggcagatgatcgagcaaattcagtttatcaagctgttcggaatggccaaaattgataatctcctgcaggagatgctgctctgaggactagttataagactgactagcccgatgggcctcccaacgggccctcctcccctccttgcaccgagattaataaaaaaaaaaaaaaaaaaaaaaaaaaaaaaaaaaaaaaaaaaaaaaaaaaaaaaaaaaaaaaaatgcatcccccccccccccccccccccccccccccccaaaggctcttttcagagccaccagaatt

SEQ ID NO: 2289 - RNA, 1345 nt, synthetic construct
  misc_feature 1..1345: note = mRNA i-3 (A64-N5-C30-hSL-N5) (opt5) from Homo sapiens__NP_000448.3__HNF4A(1-375)(T166E)
  source 1..1345: mol_type = other RNA
aggagaaagcttaccatgagactgagcaagaccctcgtggacatggatatggccgactactccgctgccctggatcccgcgtatacaacgcttgagttcgaaaacgtccaggttctgaccatgggcaatgacacatctcctagcgaggggaccaacctcaatgctccgaactccctgggagtgtctgccctttgcgccatctgtggcgatcgggctacagggaaacactacggagccagctcctgcgacggctgtaaggggtttttccgcagatctgtgcggaaaaatcatatgtatagctgccgcttttccagacaatgtgtcgtggataaggacaaacggaaccagtgccgctactgtagactgaagaagtgcttccgggctggaatgaaaaaggaagccgttcagaatgagcgcgatagaattagcacccggcgcagctcctatgaagacagctctctcccctccatcaacgcgctgctgcaggccgaggtgctcagcagacaaattgagtctcctgtctccggcatcaatggcgatattcgggctaaaaagatcgccagcatcgctgacgtgtgtgaatccatgaaagagcagctgcttgttctggtggaatgggccaagtacattcccgcgttttgcgagctccctctggatgaccaggtcgcccttctgcgcgctcacgccggggagcatctcctgctgggagctacaaagagatctatggtgttcaaagacgtgctcctgcttggcaacgattatatcgtcccccggcactgtcctgaactggccgagatgagcagagtttccattcgcatcctcgacgaactggtgcttccgtttcaggagctgcaaattgatgacaatgaatacgcctacctcaaggctatcattttctttgatcccgacgcgaaagggctgagcgatcctggaaagatcaaacggctgagatctcaggtgcaggtctccctcgaggactatatcaacgatcgccagtacgacagccggggcagattcggggagctgcttctgctcctgcccacccttcaatctattacgtggcagatgatcgaacagattcaatttatcaagctgttcggaatggccaaaattgataatctcctgcaggagatgctgctctgaggactagttataagactgactagcccgatgggcctcccaacgggccctcctcccctccttgcaccgagattaataaaaaaaaaaaaaaaaaaaaaaaaaaaaaaaaaaaaaaaaaaaaaaaaaaaaaaaaaaaaaaaatgcatcccccccccccccccccccccccccccccccaaaggctcttttcagagccaccagaatt

SEQ ID NO: 2290 - RNA, 1345 nt, synthetic construct
  misc_feature 1..1345: note = mRNA i-3 (A64-N5-C30-hSL-N5) (opt5) from Homo sapiens__NP_000448.3__HNF4A(1-375)(S148A)
  source 1..1345: mol_type = other RNA
aggagaaagcttaccatgagactgagcaagaccctcgtggacatggatatggccgactactccgctgccctggatcccgcgtatacaacgcttgagttcgaaaacgtccaggttctgaccatgggcaatgacacatctcctagcgaggggaccaacctcaatgctccgaactccctgggagtgtctgccctttgcgccatctgtggcgatcgggctacagggaaacactacggagccagctcctgcgacggctgtaaggggtttttccgcagatctgtgcggaaaaatcatatgtatagctgccgcttttccagacaatgtgtcgtggataaggacaaacggaaccagtgccgctactgtagactgaagaagtgcttccgggctggaatgaaaaaggaagccgttcagaatgagcgcgatagaattagcacccggagatcttcctatgaagacagcgcgctcccctctatcaacgccctgctgcaggctgaggtgctctcccgccaaattacaagccctgtctctggcatcaatggcgatattcgggccaaaaagatcgcttccatcgccgacgtgtgtgagagcatgaaagaacagctgcttgttctggtggagtgggcgaagtacattcccgccttttgcgaactccctctggatgaccaggtcgcccttctgcgcgcccacgctggggagcatctcctgctgggagccaccaagagatccatggtgttcaaagacgtgctcctgcttggcaacgattatatcgtcccccggcactgtcctgagctggccgaaatgtctagagttagcattcgcatcctcgacgagctggtgcttccgtttcaggaactgcaaattgatgacaatgagtacgcttacctcaaggcgatcattttctttgatcccgacgccaaagggctgtccgatcctggaaagatcaaacggctgagaagccaggtgcaggtctctctcgaagactatatcaacgatcgccagtacgactcccggggcagattcggggagctgcttctgctcctgcccacgcttcaaagcattacctggcagatgatcgagcagattcaatttatcaagctgttcggaatggctaaaattgataatctcctgcaggaaatgctgctctgaggactagttataagactgactagcccgatgggcctcccaacgggccctcctcccctccttgcaccgagattaataaaaaaaaaaaaaaaaaaaaaaaaaaaaaaaaaaaaaaaaaaaaaaaaaaaaaaaaaaaaaaaatgcatcccccccccccccccccccccccccccccccaaaggctcttttcagagccaccagaatt

SEQ ID NO: 2291 - RNA, 1345 nt, synthetic construct
  misc_feature 1..1345: note = mRNA i-3 (A64-N5-C30-hSL-N5) (opt5) from Homo sapiens__NP_000448.3__HNF4A(1-375)(S148E)
  source 1..1345: mol_type = other RNA
aggagaaagcttaccatgagactgagcaagaccctcgtggacatggatatggccgactactccgctgccctggatcccgcgtatacaacgcttgagttcgaaaacgtccaggttctgaccatgggcaatgacacatctcctagcgaggggaccaacctcaatgctccgaactccctgggagtgtctgccctttgcgccatctgtggcgatcgggctacagggaaacactacggagccagctcctgcgacggctgtaaggggtttttccgcagatctgtgcggaaaaatcatatgtatagctgccgcttttccagacaatgtgtcgtggataaggacaaacggaaccagtgccgctactgtagactgaagaagtgcttccgggctggaatgaaaaaggaagccgttcagaatgagcgcgatagaattagcacccggagatcttcctatgaagacagcgagctcccctctatcaacgcgctgctgcaggccgaggtgctctcccgccaaattacaagccctgtctctggcatcaatggcgatattcgggctaaaaagatcgcctccatcgctgacgtgtgtgaaagcatgaaagagcagctgcttgttctggtggaatgggccaagtacattcccgcgttttgcgagctccctctggatgaccaggtcgcccttctgcgcgctcacgccggggagcatctcctgctgggagctaccaagagatccatggtgttcaaagacgtgctcctgcttggcaacgattatatcgtcccccggcactgtcctgaactggccgagatgtctagagttagcattcgcatcctcgacgaactggtgcttccgtttcaggagctgcaaattgatgacaatgaatacgcctacctcaaggctatcattttctttgatcccgacgcgaaagggctgtccgatcctggaaagatcaaacggctgagaagccaggtgcaggtctctctcgaggactatatcaacgatcgccagtacgactcccggggcagattcggggagctgcttctgctcctgcccacgcttcaaagcattacctggcagatgatcgaacagattcaatttatcaagctgttcggaatggccaaaattgataatctcctgcaggagatgctgctctgaggactagttataagactgactagcccgatgggcctcccaacgggccctcctcccctccttgcaccgagattaataaaaaaaaaaaaaaaaaaaaaaaaaaaaaaaaaaaaaaaaaaaaaaaaaaaaaaaaaaaaaaaatgcatcccccccccccccccccccccccccccccccaaaggctcttttcagagccaccagaatt

SEQ ID NO: 2292 - RNA, 1345 nt, synthetic construct
  misc_feature 1..1345: note = mRNA i-3 (A64-N5-C30-hSL-N5) (opt5) from Homo sapiens__NP_000448.3__HNF4A(1-375)(S183A)
  source 1..1345: mol_type = other RNA
aggagaaagcttaccatgagactgagcaagaccctcgtggacatggatatggccgactactccgctgccctggatcccgcgtatacaacgcttgagttcgaaaacgtccaggttctgaccatgggcaatgacacatctcctagcgaggggaccaacctcaatgctccgaactccctgggagtgtctgccctttgcgccatctgtggcgatcgggctacagggaaacactacggagccagctcctgcgacggctgtaaggggtttttccgcagatctgtgcggaaaaatcatatgtatagctgccgcttttccagacaatgtgtcgtggataaggacaaacggaaccagtgccgctactgtagactgaagaagtgcttccgggctggaatgaaaaaggaagccgttcagaatgagcgcgatagaattagcacccggagatcttcctatgaagacagctctctcccctccatcaacgcgctgctgcaggccgaggtgctcagccgccaaattacatctcctgtctccggcatcaatggcgatattcgggctaaaaagatcgccgctatcgccgacgtgtgtgagagcatgaaagaacagctgcttgttctggtggagtgggcgaagtacattcccgccttttgcgaactccctctggatgaccaggtcgcccttctgcgcgcccacgctggggagcatctcctgctgggagccaccaagagatccatggtgttcaaagacgtgctcctgcttggcaacgattatatcgtcccccggcactgtcctgagctggccgaaatgtctagagttagcattcgcatcctcgacgagctggtgcttccgtttcaggaactgcaaattgatgacaatgagtacgcttacctcaaggcgatcattttctttgatcccgacgccaaagggctgtccgatcctggaaagatcaaacggctgagaagccaggtgcaggtctctctcgaagactatatcaacgatcgccagtacgactcccggggcagattcggggagctgcttctgctcctgcccacgcttcaaagcattacctggcagatgatcgagcagattcaatttatcaagctgttcggaatggctaaaattgataatctcctgcaggaaatgctgctctgaggactagttataagactgactagcccgatgggcctcccaacgggccctcctcccctccttgcaccgagattaataaaaaaaaaaaaaaaaaaaaaaaaaaaaaaaaaaaaaaaaaaaaaaaaaaaaaaaaaaaaaaaatgcatcccccccccccccccccccccccccccccccaaaggctcttttcagagccaccagaatt

SEQ ID NO: 2293 - RNA, 1345 nt, synthetic construct
  misc_feature 1..1345: note = mRNA i-3 (A64-N5-C30-hSL-N5) (opt5) from Homo sapiens__NP_000448.3__HNF4A(1-375)(S183E)
  source 1..1345: mol_type = other RNA
aggagaaagcttaccatgagactgagcaagaccctcgtggacatggatatggccgactactccgctgccctggatcccgcgtatacaacgcttgagttcgaaaacgtccaggttctgaccatgggcaatgacacatctcctagcgaggggaccaacctcaatgctccgaactccctgggagtgtctgccctttgcgccatctgtggcgatcgggctacagggaaacactacggagccagctcctgcgacggctgtaaggggtttttccgcagatctgtgcggaaaaatcatatgtatagctgccgcttttccagacaatgtgtcgtggataaggacaaacggaaccagtgccgctactgtagactgaagaagtgcttccgggctggaatgaaaaaggaagccgttcagaatgagcgcgatagaattagcacccggagatcttcctatgaagacagctctctcccctccatcaacgcgctgctgcaggccgaggtgctcagccgccaaattacatctcctgtctccggcatcaatggcgatattcgggctaaaaagatcgccgagatcgctgacgtgtgtgaaagcatgaaagagcagctgcttgttctggtggaatgggccaagtacattcccgcgttttgcgagctccctctggatgaccaggtcgcccttctgcgcgctcacgccggggagcatctcctgctgggagctaccaagagatccatggtgttcaaagacgtgctcctgcttggcaacgattatatcgtcccccggcactgtcctgaactggccgagatgtctagagttagcattcgcatcctcgacgaactggtgcttccgtttcaggagctgcaaattgatgacaatgaatacgcctacctcaaggctatcattttctttgatcccgacgcgaaagggctgtccgatcctggaaagatcaaacggctgagaagccaggtgcaggtctctctcgaggactatatcaacgatcgccagtacgactcccggggcagattcggggagctgcttctgctcctgcccacgcttcaaagcattacctggcagatgatcgaacagattcaatttatcaagctgttcggaatggccaaaattgataatctcctgcaggagatgctgctctgaggactagttataagactgactagcccgatgggcctcccaacgggccctcctcccctccttgcaccgagattaataaaaaaaaaaaaaaaaaaaaaaaaaaaaaaaaaaaaaaaaaaaaaaaaaaaaaaaaaaaaaaaatgcatcccccccccccccccccccccccccccccccaaaggctcttttcagagccaccagaatt

SEQ ID NO: 2294 - RNA, 1345 nt, synthetic construct; identical to SEQ ID NO: 2266
  misc_feature 1..1345: note = mRNA i-3 (A64-N5-C30-hSL-N5) (opt5) from Homo sapiens__NP_000448.3__HNF4A(1-375)(S461A)
  source 1..1345: mol_type = other RNA

SEQ ID NO: 2295 - RNA, 1345 nt, synthetic construct; identical to SEQ ID NO: 2266
  misc_feature 1..1345: note = mRNA i-3 (A64-N5-C30-hSL-N5) (opt5) from Homo sapiens__NP_000448.3__HNF4A(1-375)(S461E)
  source 1..1345: mol_type = other RNA

SEQ ID NO: 2296 - RNA, 1345 nt, synthetic construct
  misc_feature 1..1345: note = mRNA i-3 (A64-N5-C30-hSL-N5) (opt5) from Homo sapiens__NP_000448.3__HNF4A(1-375)(S142A_S143A_S313A)
  source 1..1345: mol_type = other RNA
aggagaaagcttaccatgagactgagcaagaccctcgtggacatggatatggccgactactccgctgccctggatcccgcgtatacaacgcttgagttcgaaaacgtccaggttctgaccatgggcaatgacacatctcctagcgaggggaccaacctcaatgctccgaactccctgggagtgtctgccctttgcgccatctgtggcgatcgggctacagggaaacactacggagccagctcctgcgacggctgtaaggggtttttccgcagatctgtgcggaaaaatcatatgtatagctgccgcttttccagacaatgtgtcgtggataaggacaaacggaaccagtgccgctactgtagactgaagaagtgcttccgggctggaatgaaaaaggaagccgttcagaatgagcgcgatagaattagcacccggcgcgcggcctatgaagactcttccctccccagcatcaacgctctgctgcaggccgaggtgctctctagacaaattacatcccctgtcagcggcatcaatggcgatattcgggctaaaaagatcgcctctatcgcggacgtgtgtgagtccatgaaagaacagctgcttgttctggtggagtgggccaagtacattcccgctttttgcgaactccctctggatgaccaggtcgcccttctgcgcgctcacgccggggagcatctcctgctgggagccaccaagagaagcatggtgttcaaagacgtgctcctgcttggcaacgattatatcgtcccccggcactgtcctgagctggctgaaatgtccagagtttctattcgcatcctcgacgagctggtgcttccgtttcaggaactgcaaattgatgacaatgagtacgcgtacctcaaggccatcattttctttgatcccgacgctaaagggctgagcgatcctggaaagatcaaacggctgagagcccaggtgcaggtctccctcgaagactatatcaacgatcgccagtacgacagccggggcagattcggggagctgcttctgctcctgcccacgcttcaatctattacctggcagatgatcgagcagattcaatttatcaagctgttcggaatggccaaaattgataatctcctgcaggaaatgctgctctgaggactagttataagactgactagcccgatgggcctcccaacgggccctcctcccctccttgcaccgagattaataaaaaaaaaaaaaaaaaaaaaaaaaaaaaaaaaaaaaaaaaaaaaaaaaaaaaaaaaaaaaaaatgcatcccccccccccccccccccccccccccccccaaaggctcttttcagagccaccagaatt

SEQ ID NO: 2297 - RNA, 1345 nt, synthetic construct; identical to SEQ ID NO: 2296
  misc_feature 1..1345: note = mRNA i-3 (A64-N5-C30-hSL-N5) (opt5) from Homo sapiens__NP_000448.3__HNF4A(1-375)(S142A_S143A_S313A_K458R)
  source 1..1345: mol_type = other RNA

SEQ ID NO: 2298 - RNA, 1345 nt, synthetic construct
  misc_feature 1..1345: note = mRNA i-3 (A64-N5-C30-hSL-N5) (opt5) from Homo sapiens__NP_000448.3__HNF4A(1-375)(S142A_S143A_S167A_S313A_ S378A_T429A_T432A_S436A_K458R)
  source 1..1345: mol_type = other RNA
aggagaaagcttaccatgagactgagcaagaccctcgtggacatggatatggccgactactccgctgccctggatcccgcgtatacaacgcttgagttcgaaaacgtccaggttctgaccatgggcaatgacacatctcctagcgaggggaccaacctcaatgctccgaactccctgggagtgtctgccctttgcgccatctgtggcgatcgggctacagggaaacactacggagccagctcctgcgacggctgtaaggggtttttccgcagatctgtgcggaaaaatcatatgtatagctgccgcttttccagacaatgtgtcgtggataaggacaaacggaaccagtgccgctactgtagactgaagaagtgcttccgggctggaatgaaaaaggaagccgttcagaatgagcgcgatagaattagcacccggcgcgcggcctatgaagactcttccctccccagcatcaacgctctgctgcaggccgaggtgctctctagacaaattacagctcctgtctccggcatcaatggcgatattcgggccaaaaagatcgcgagcatcgccgacgtgtgtgagtctatgaaagaacagctgcttgttctggtggagtgggctaagtacattcccgccttttgcgaactccctctggatgaccaggtcgcccttctgcgcgcccacgccggggagcatctcctgctgggagctaccaagagatccatggtgttcaaagacgtgctcctgcttggcaacgattatatcgtcccccggcactgtcctgagctggcggaaatgagcagagtttccattcgcatcctcgacgagctggtgcttccgtttcaggaactgcaaattgatgacaatgagtacgcctacctcaaggctatcattttctttgatcccgacgccaaagggctgtctgatcctggaaagatcaaacggctgagagcccaggtgcaggtcagcctcgaagactatatcaacgatcgccagtacgactcccggggcagattcggggagctgcttctgctcctgcccacgcttcaaagcattacctggcagatgatcgagcagattcaatttatcaagctgttcggaatggctaaaattgataatctcctgcaggaaatgctgctctgaggactagttataagactgactagcccgatgggcctcccaacgggccctcctcccctccttgcaccgagattaataaaaaaaaaaaaaaaaaaaaaaaaaaaaaaaaaaaaaaaaaaaaaaaaaaaaaaaaaaaaaaaatgcatcccccccccccccccccccccccccccccccaaaggctcttttcagagccaccagaatt

SEQ ID NO: 2299 - RNA, 1345 nt, synthetic construct
  misc_feature 1..1345: note = mRNA i-3 (A64-N5-C30-hSL-N5) (opt5) from Homo sapiens__NP_000448.3__HNF4A(1-375)(S142A_S143A_S148A_S167A_ S313A_S378A_T429A_T432A_S436A_K458R)
  source 1..1345: mol_type = other RNA
aggagaaagcttaccatgagactgagcaagaccctcgtggacatggatatggccgactactccgctgccctggatcccgcgtatacaacgcttgagttcgaaaacgtccaggttctgaccatgggcaatgacacatctcctagcgaggggaccaacctcaatgctccgaactccctgggagtgtctgccctttgcgccatctgtggcgatcgggctacagggaaacactacggagccagctcctgcgacggctgtaaggggtttttccgcagatctgtgcggaaaaatcatatgtatagctgccgcttttccagacaatgtgtcgtggataaggacaaacggaaccagtgccgctactgtagactgaagaagtgcttccgggctggaatgaaaaaggaagccgttcagaatgagcgcgatagaattagcacccggcgcgcggcctatgaagactctgctctcccctccatcaacgccctgctgcaggctgaggtgctcagcagacaaattacagcccctgtctctggcatcaatggcgatattcgggcgaaaaagatcgcctccatcgctgacgtgtgtgagagcatgaaagaacagctgcttgttctggtggagtgggccaagtacattcccgctttttgcgaactccctctggatgaccaggtcgcccttctgcgcgcccacgctggggagcatctcctgctgggagcgaccaagagatctatggtgttcaaagacgtgctcctgcttggcaacgattatatcgtcccccggcactgtcctgagctggccgaaatgtccagagttagcattcgcatcctcgacgagctggtgcttccgtttcaggaactgcaaattgatgacaatgagtacgcttacctcaaggccatcattttctttgatcccgacgccaaagggctgtccgatcctggaaagatcaaacggctgagagctcaggtgcaggtctctctcgaagactatatcaacgatcgccagtacgacagccggggcagattcggggagctgcttctgctcctgcccacgcttcaatccattacctggcagatgatcgagcagattcaatttatcaagctgttcggaatggccaaaattgataatctcctgcaggaaatgctgctctgaggactagttataagactgactagcccgatgggcctcccaacgggccctcctcccctccttgcaccgagattaataaaaaaaaaaaaaaaaaaaaaaaaaaaaaaaaaaaaaaaaaaaaaaaaaaaaaaaaaaaaaaaatgcatcccccccccccccccccccccccccccccccaaaggctcttttcagagccaccagaatt

SEQ ID NO: 2300 - RNA, 1345 nt, synthetic construct
  misc_feature 1..1345: note = mRNA i-3 (A64-N5-C30-hSL-N5) (opt5) from Homo sapiens__NP_000448.3__HNF4A(1-375)(K106R_K108R_K126R_K127R_ S142A_S143A_S148A_S167A_S313A_S378A_T429A_T432A_S436A_K458R )
  source 1..1345: mol_type = other RNA
aggagaaagcttaccatgagactgagcaagaccctcgtggacatggatatggccgactactccgctgccctggatcccgcgtatacaacgcttgagttcgaaaacgtccaggttctgaccatgggcaatgacacatctcctagcgaggggaccaacctcaatgctccgaactccctgggagtgtctgccctttgcgccatctgtggcgatcgggctacagggaaacactacggagccagctcctgcgacggctgtaaggggtttttccgcagatctgtgcggaaaaatcatatgtatagctgccgcttttccagacaatgtgtcgtggatcgggaccgcagaaaccagtgccggtactgtcgcctgaagaaatgcttcagagctggaatgcggcgcgaagccgttcagaatgagagagatcggattagcacccgcagagcggcctatgaagactctgctctcccctccatcaacgccctgctgcaggctgaggtgctcagccggcaaattacagcccctgtctctggcatcaatggcgatattagagcgaagaagatcgcctccatcgctgacgtgtgtgagagcatgaaagaacagctgcttgttctggtggagtgggccaagtacattcccgctttttgcgaactccctctggatgaccaggtcgcccttctgcgcgcccacgctggggagcatctcctgctgggagcgaccaaacggtctatggtgttcaaggacgtgctcctgcttggcaacgattatatcgtccccagacactgtcctgagctggccgaaatgtcccgcgttagcattcggatcctcgacgagctggtgcttccgtttcaggaactgcaaattgatgacaatgagtacgcttacctcaaagccatcattttctttgatcccgacgccaaggggctgtccgatcctggaaagatcaaaagactgcgcgctcaggtgcaggtctctctcgaagactatatcaacgatcggcagtacgacagcagaggccgcttcggggagctgcttctgctcctgcccacgcttcaatccattacctggcagatgatcgagcagattcaatttatcaagctgttcggaatggccaaaattgataatctcctgcaggaaatgctgctctgaggactagttataagactgactagcccgatgggcctcccaacgggccctcctcccctccttgcaccgagattaataaaaaaaaaaaaaaaaaaaaaaaaaaaaaaaaaaaaaaaaaaaaaaaaaaaaaaaaaaaaaaaatgcatcccccccccccccccccccccccccccccccaaaggctcttttcagagccaccagaatt

SEQ ID NO: 2301 - RNA, 1345 nt, synthetic construct
  misc_feature 1..1345: note = mRNA i-3 (A64-N5-C30-hSL-N5) (opt5) from Homo sapiens__NP_000448.3__HNF4A(1-375)(S142A_S143A_S148A_T166A_ S167A_S313A_S378A_T429A_T432A_S436A_K458R)
  source 1..1345: mol_type = other RNA
aggagaaagcttaccatgagactgagcaagaccctcgtggacatggatatggccgactactccgctgccctggatcccgcgtatacaacgcttgagttcgaaaacgtccaggttctgaccatgggcaatgacacatctcctagcgaggggaccaacctcaatgctccgaactccctgggagtgtctgccctttgcgccatctgtggcgatcgggctacagggaaacactacggagccagctcctgcgacggctgtaaggggtttttccgcagatctgtgcggaaaaatcatatgtatagctgccgcttttccagacaatgtgtcgtggataaggacaaacggaaccagtgccgctactgtagactgaagaagtgcttccgggctggaatgaaaaaggaagccgttcagaatgagcgcgatagaattagcacccggcgcgcggcctatgaagactctgctctcccctccatcaacgccctgctgcaggctgaggtgctcagcagacaaattgccgcgcctgtctctggcatcaatggcgatattcgggccaaaaagatcgcttccatcgccgacgtgtgtgagagcatgaaagaacagctgcttgttctggtggagtgggctaagtacattcccgccttttgcgaactccctctggatgaccaggtcgcccttctgcgcgctcacgcgggggagcatctcctgctgggagccacaaagagatctatggtgttcaaagacgtgctcctgcttggcaacgattatatcgtcccccggcactgtcctgagctggctgaaatgtccagagttagcattcgcatcctcgacgagctggtgcttccgtttcaggaactgcaaattgatgacaatgagtacgcctacctcaaggccatcattttctttgatcccgacgctaaagggctgtccgatcctggaaagatcaaacggctgagagcccaggtgcaggtctctctcgaagactatatcaacgatcgccagtacgacagccggggcagattcggggagctgcttctgctcctgcccacccttcaatccattacgtggcagatgatcgagcagattcaatttatcaagctgttcggaatggcgaaaattgataatctcctgcaggaaatgctgctctgaggactagttataagactgactagcccgatgggcctcccaacgggccctcctcccctccttgcaccgagattaataaaaaaaaaaaaaaaaaaaaaaaaaaaaaaaaaaaaaaaaaaaaaaaaaaaaaaaaaaaaaaaatgcatcccccccccccccccccccccccccccccccaaaggctcttttcagagccaccagaatt

SEQ ID NO: 2302 - RNA, 1345 nt, synthetic construct
  misc_feature 1..1345: note = mRNA i-3 (A64-N5-C30-hSL-N5) (opt5) from Homo sapiens__NP_000448.3__HNF4A(1-375)(S87A_S142A_S143A_S148A_T 166A_S167A_S313A_S378A_T429A_T432A_S436A_K458R)
  source 1..1345: mol_type = other RNA
aggagaaagcttaccatgagactgagcaagaccctcgtggacatggatatggccgactactccgctgccctggatcccgcgtatacaacgcttgagttcgaaaacgtccaggttctgaccatgggcaatgacacatctcctagcgaggggaccaacctcaatgctccgaactccctgggagtgtctgccctttgcgccatctgtggcgatcgggctacagggaaacactacggagccagctcctgcgacggctgtaaggggtttttccgcagagctgtgcggaaaaatcatatgtattcttgccgctttagcagacaatgtgtcgtggataaggacaaacggaaccagtgccgctactgtagactgaagaagtgcttccgggccggaatgaaaaaggaagcggttcagaatgagcgcgatagaatttccacccggcgcgccgcttatgaagacagcgccctcccctctatcaacgctctgctgcaggccgaggtgctctccagacaaattgcggcccctgtcagcggcatcaatggcgatattcgggctaaaaagatcgcctctatcgctgacgtgtgtgagtccatgaaagaacagctgcttgttctggtggagtgggccaagtacattcccgccttttgcgaactccctctggatgaccaggtcgcccttctgcgcgcgcacgccggggagcatctcctgctgggagctacaaagagaagcatggtgttcaaagacgtgctcctgcttggcaacgattatatcgtcccccggcactgtcctgagctggccgaaatgtctagagtttccattcgcatcctcgacgagctggtgcttccgtttcaggaactgcaaattgatgacaatgagtacgcctacctcaaggctatcattttctttgatcccgacgccaaagggctgagcgatcctggaaagatcaaacggctgagagctcaggtgcaggtctccctcgaagactatatcaacgatcgccagtacgactctcggggcagattcggggagctgcttctgctcctgcccacccttcaaagcattacgtggcagatgatcgagcagattcaatttatcaagctgttcggaatggcgaaaattgataatctcctgcaggaaatgctgctctgaggactagttataagactgactagcccgatgggcctcccaacgggccctcctcccctccttgcaccgagattaataaaaaaaaaaaaaaaaaaaaaaaaaaaaaaaaaaaaaaaaaaaaaaaaaaaaaaaaaaaaaaaatgcatcccccccccccccccccccccccccccccccaaaggctcttttcagagccaccagaatt

SEQ ID NO: 2303 - RNA, 1345 nt, synthetic construct
  misc_feature 1..1345: note = mRNA i-3 (A64-N5-C30-hSL-N5) (opt5) from Homo sapiens__NP_000448.3__HNF4A(1-375)(S87A_K106R_K108R_K126R_K 127R_S142A_S143A_S148A_T166A_S167A_S313A_S378A_T429A_T432A_ S436A_K458R)
  source 1..1345: mol_type = other RNA
aggagaaagcttaccatgagactgagcaagaccctcgtggacatggatatggccgactactccgctgccctggatcccgcgtatacaacgcttgagttcgaaaacgtccaggttctgaccatgggcaatgacacatctcctagcgaggggaccaacctcaatgctccgaactccctgggagtgtctgccctttgcgccatctgtggcgatcgggctacagggaaacactacggagccagctcctgcgacggctgtaaggggtttttccgcagagctgtgcggaaaaatcatatgtattcttgccgctttagcagacaatgtgtcgtggatcgggaccgcagaaaccagtgccggtactgtcgcctgaagaaatgcttcagagccggaatgcggcgcgaagcggttcagaatgagagagatcggatttccacccgcagagccgcttatgaagacagcgccctcccctctatcaacgctctgctgcaggccgaggtgctctcccggcaaattgcggcccctgtcagcggcatcaatggcgatattagagctaagaagatcgcctctatcgctgacgtgtgtgagtccatgaaagaacagctgcttgttctggtggagtgggccaagtacattcccgccttttgcgaactccctctggatgaccaggtcgcccttctgcgcgcgcacgccggggagcatctcctgctgggagctacaaaacggagcatggtgttcaaggacgtgctcctgcttggcaacgattatatcgtccccagacactgtcctgagctggccgaaatgtctcgcgtttccattcggatcctcgacgagctggtgcttccgtttcaggaactgcaaattgatgacaatgagtacgcctacctcaaagctatcattttctttgatcccgacgccaaggggctgagcgatcctggaaagatcaaaagactgcgcgctcaggtgcaggtctccctcgaagactatatcaacgatcggcagtacgactctagaggccgcttcggggagctgcttctgctcctgcccacccttcaaagcattacgtggcagatgatcgagcagattcaatttatcaagctgttcggaatggcgaaaattgataatctcctgcaggaaatgctgctctgaggactagttataagactgactagcccgatgggcctcccaacgggccctcctcccctccttgcaccgagattaataaaaaaaaaaaaaaaaaaaaaaaaaaaaaaaaaaaaaaaaaaaaaaaaaaaaaaaaaaaaaaaatgcatcccccccccccccccccccccccccccccccaaaggctcttttcagagccaccagaatt

SEQ ID NO: 2304 - RNA, 1345 nt, synthetic construct
  misc_feature 1..1345: note = mRNA i-3 (A64-N5-C30-hSL-N5) (opt5) from Homo sapiens__NP_000448.3__HNF4A(1-375)(S87A_K106R_K108R_K126R_K 127R)
  source 1..1345: mol_type = other RNA
aggagaaagcttaccatgagactgagcaagaccctcgtggacatggatatggccgactactccgctgccctggatcccgcgtatacaacgcttgagttcgaaaacgtccaggttctgaccatgggcaatgacacatctcctagcgaggggaccaacctcaatgctccgaactccctgggagtgtctgccctttgcgccatctgtggcgatcgggctacagggaaacactacggagccagctcctgcgacggctgtaaggggtttttccgcagagctgtgcggaaaaatcatatgtattcttgccgctttagcagacaatgtgtcgtggatcgggaccgcagaaaccagtgccggtactgtcgcctgaagaaatgcttcagagccggaatgcggcgcgaagcggttcagaatgagagagatcggatttccacccgcagaagctcttatgaagactccagcctcccctctatcaacgccctgctgcaggctgaggtgctctcccggcaaattacaagccctgtctctggcatcaatggcgatattagagccaagaagatcgcttccatcgccgacgtgtgtgagagcatgaaagaacagctgcttgttctggtggagtgggcgaagtacattcccgccttttgcgaactccctctggatgaccaggtcgcccttctgcgcgcccacgctggggagcatctcctgctgggagccaccaaacggtccatggtgttcaaggacgtgctcctgcttggcaacgattatatcgtccccagacactgtcctgagctggccgaaatgtctcgcgttagcattcggatcctcgacgagctggtgcttccgtttcaggaactgcaaattgatgacaatgagtacgcttacctcaaagcgatcattttctttgatcccgacgccaaggggctgtccgatcctggaaagatcaaaagactgcgcagccaggtgcaggtctctctcgaagactatatcaacgatcggcagtacgactccagaggccgcttcggggagctgcttctgctcctgcccacgcttcaaagcattacctggcagatgatcgagcagattcaatttatcaagctgttcggaatggctaaaattgataatctcctgcaggaaatgctgctctgaggactagttataagactgactagcccgatgggcctcccaacgggccctcctcccctccttgcaccgagattaataaaaaaaaaaaaaaaaaaaaaaaaaaaaaaaaaaaaaaaaaaaaaaaaaaaaaaaaaaaaaaaatgcatcccccccccccccccccccccccccccccccaaaggctcttttcagagccaccagaatt

SEQ ID NO: 2305 - RNA, 1345 nt, synthetic construct; identical to SEQ ID NO: 2303
  misc_feature 1..1345: note = mRNA i-3 (A64-N5-C30-hSL-N5) (opt5) from Homo sapiens__NP_000448.3__HNF4A(1-375)(S87A_K106R_K108R_K126R_K 127R_S142A_S143A_S148A_T166A_S167A_S313A_S378A_T429A_T432A_ S436A_K458R_S461A)
  source 1..1345: mol_type = other RNA

SEQ ID NO: 2306 - RNA, 1345 nt, synthetic construct; identical to SEQ ID NO: 2303
  misc_feature 1..1345: note = mRNA i-3 (A64-N5-C30-hSL-N5) (opt5) from Homo sapiens__NP_000448.3__HNF4A(1-375)(S87A_K106R_K108R_K126R_K 127R_S142A_S143A_S148A_T166A_S167A_S313A_S378A_T429A_T432A_ S436A_K458R_S461E)
  source 1..1345: mol_type = other RNA

SEQ ID NO: 2307 - RNA, 1345 nt, synthetic construct
  misc_feature 1..1345: note = mRNA i-3 (A64-N5-C30-hSL-N5) (opt5) from Homo sapiens__NP_000448.3__HNF4A(1-375)(S87A_K106R_K108R_K126R_K 127R_S142A_S143A_S148E_T166A_S167E_S313A_S378E_T429E_T432E_ S436E_K458R_S461E)
  source 1..1345: mol_type = other RNA
aggagaaagcttaccatgagactgagcaagaccctcgtggacatggatatggccgactactccgctgccctggatcccgcgtatacaacgcttgagttcgaaaacgtccaggttctgaccatgggcaatgacacatctcctagcgaggggaccaacctcaatgctccgaactccctgggagtgtctgccctttgcgccatctgtggcgatcgggctacagggaaacactacggagccagctcctgcgacggctgtaaggggtttttccgcagagctgtgcggaaaaatcatatgtattcttgccgctttagcagacaatgtgtcgtggatcgggaccgcagaaaccagtgccggtactgtcgcctgaagaaatgcttcagagccggaatgcggcgcgaagcggttcagaatgagagagatcggatttccacccgcagagccgcttatgaagacagcgagctcccctctatcaacgccctgctgcaggctgaggtgctctcccggcaaattgccgaacctgtcagcggcatcaatggcgatattagagcgaagaagatcgcctctatcgctgacgtgtgtgagtccatgaaagaacagctgcttgttctggtggagtgggccaagtacattcccgctttttgcgagctccctctggatgaccaggtcgcccttctgcgcgcccacgctggggaacatctcctgctgggagcgacaaaacggagcatggtgttcaaggacgtgctcctgcttggcaacgattatatcgtccccagacactgtcctgagctggccgaaatgtctcgcgtttccattcggatcctcgacgagctggtgcttccgtttcaggaactgcaaattgatgacaatgagtacgcttacctcaaagccatcattttctttgatcccgacgccaaggggctgagcgatcctggaaagatcaaaagactgcgcgctcaggtgcaggtctccctcgaggactatatcaacgatcggcagtacgactctagaggccgcttcggggaactgcttctgctcctgcccacccttcaaagcattacgtggcagatgatcgagcagattcaatttatcaagctgttcggaatggccaaaattgataatctcctgcaggaaatgctgctctgaggactagttataagactgactagcccgatgggcctcccaacgggccctcctcccctccttgcaccgagattaataaaaaaaaaaaaaaaaaaaaaaaaaaaaaaaaaaaaaaaaaaaaaaaaaaaaaaaaaaaaaaaatgcatcccccccccccccccccccccccccccccccaaaggctcttttcagagccaccagaatt

SEQ ID NO: 2308 - RNA, 1345 nt, synthetic construct
  misc_feature 1..1345: note = mRNA i-3 (A64-N5-C30-hSL-N5) (opt5) from Homo sapiens__NP_000448.3__HNF4A(1-375)(S87A_K106R_K108R_K126R_K 127R_S142A_S143A_S148A_T166A_S167A_K179R_K180R_S313A_S378A_ T429A_T432A_S436A_K458R_S461E)
  source 1..1345: mol_type = other RNA
aggagaaagcttaccatgagactgagcaagaccctcgtggacatggatatggccgactactccgctgccctggatcccgcgtatacaacgcttgagttcgaaaacgtccaggttctgaccatgggcaatgacacatctcctagcgaggggaccaacctcaatgctccgaactccctgggagtgtctgccctttgcgccatctgtggcgatcgggctacagggaaacactacggagccagctcctgcgacggctgtaaggggtttttccgcagagctgtgcggaaaaatcatatgtattcttgccgctttagcagacaatgtgtcgtggatcgggaccgcagaaaccagtgccggtactgtcgcctgaagaaatgcttcagagccggaatgcggcgcgaagcggttcagaatgagagagatcggatttccacccgcagagccgcttatgaagacagcgccctcccctctatcaacgctctgctgcaggccgaggtgctctcccggcaaattgcggcccctgtcagcggcatcaatggcgatattagagctcgccggatcgcctctatcgctgacgtgtgtgagtccatgaaggaacagctgcttgttctggtggagtgggccaagtacattcccgccttttgcgaactccctctggatgaccaggtcgcccttctgagagcgcacgccggggagcatctcctgctgggagctacaaaacgcagcatggtgttcaaggacgtgctcctgcttggcaacgattatatcgtcccccggcactgtcctgagctggccgaaatgtctagagtttccattcgcatcctcgacgagctggtgcttccgtttcaggaactgcaaattgatgacaatgagtacgcctacctcaaagctatcattttctttgatcccgacgccaaggggctgagcgatcctggaaaaatcaagcggctgagagctcaggtgcaggtctccctcgaagactatatcaacgatcgccagtacgactctcggggcagattcggggagctgcttctgctcctgcccacccttcaaagcattacgtggcagatgatcgagcagattcaatttatcaagctgttcggaatggcgaaaattgataatctcctgcaggaaatgctgctctgaggactagttataagactgactagcccgatgggcctcccaacgggccctcctcccctccttgcaccgagattaataaaaaaaaaaaaaaaaaaaaaaaaaaaaaaaaaaaaaaaaaaaaaaaaaaaaaaaaaaaaaaaatgcatcccccccccccccccccccccccccccccccaaaggctcttttcagagccaccagaatt

SEQ ID NO: 2309 - RNA, 1345 nt, synthetic construct
  misc_feature 1..1345: note = mRNA i-3 (A64-N5-C30-hSL-N5) (opt5) from Homo sapiens__NP_000448.3__HNF4A(1-375)(S87A_K106R_K108R_K126R_K 127R_S142A_S143A_S148A_T166A_S167A_K300R_K307R_K309R_S313A_ S378A_T429A_T432A_S436A_K458R_S461E)
  source 1..1345: mol_type = other RNA
aggagaaagcttaccatgagactgagcaagaccctcgtggacatggatatggccgactactccgctgccctggatcccgcgtatacaacgcttgagttcgaaaacgtccaggttctgaccatgggcaatgacacatctcctagcgaggggaccaacctcaatgctccgaactccctgggagtgtctgccctttgcgccatctgtggcgatcgggctacagggaaacactacggagccagctcctgcgacggctgtaaggggtttttccgcagagctgtgcggaaaaatcatatgtattcttgccgctttagcagacaatgtgtcgtggatcgggaccgcagaaaccagtgccggtactgtcgcctgaagaaatgcttcagagccggaatgcggcgcgaagcggttcagaatgagagagatcggatttccacccgcagagccgcttatgaagacagcgccctcccctctatcaacgctctgctgcaggccgaggtgctctcccggcaaattgcggcccctgtcagcggcatcaatggcgatattagagctaagaagatcgcctctatcgctgacgtgtgtgagtccatgaaagaacagctgcttgttctggtggagtgggccaagtacattcccgccttttgcgaactccctctggatgaccaggtcgcccttctgcgcgcgcacgccggggagcatctcctgctgggagctacaaaacggagcatggtgttcaaggacgtgctcctgcttggcaacgattatatcgtccccagacactgtcctgagctggccgaaatgtctcgcgtttccattcggatcctcgacgagctggtgcttccgtttcaggaactgcaaattgatgacaatgagtacgcctacctcaaagctatcattttctttgatcccgacgccagagggctgagcgatcctggacgcatccggagactgcgcgctcaggtgcaggtctccctcgaagactatatcaacgatcggcagtacgactctagaggccgcttcggggagctgcttctgctcctgcccacccttcaaagcattacgtggcagatgatcgagcagattcaatttatcaagctgttcggaatggcgaagattgataatctcctgcaggaaatgctgctctgaggactagttataagactgactagcccgatgggcctcccaacgggccctcctcccctccttgcaccgagattaataaaaaaaaaaaaaaaaaaaaaaaaaaaaaaaaaaaaaaaaaaaaaaaaaaaaaaaaaaaaaaaatgcatcccccccccccccccccccccccccccccccaaaggctcttttcagagccaccagaatt

SEQ ID NO: 2310 - RNA, 1345 nt, synthetic construct; identical to SEQ ID NO: 2303
  misc_feature 1..1345: note = mRNA i-3 (A64-N5-C30-hSL-N5) (opt5) from Homo sapiens__NP_000448.3__HNF4A(1-375)(S87A_K106R_K108R_K126R_K 127R_S142A_S143A_S148A_T166A_S167A_S313A_S378A_T429A_T432A_ S436A_K447R_K458R_S461E_K470R)
  source 1..1345: mol_type = other RNA

SEQ ID NO: 2311 - RNA, 1345 nt, synthetic construct
  misc_feature 1..1345: note = mRNA i-3 (A64-N5-C30-hSL-N5) (opt5) from Homo sapiens__NP_000448.3__HNF4A(1-375)(S87A_K106R_K108R_K126R_K 127R_S142A_S143A_S148A_T166A_S167A_K179R_K180R_K234R_K300R_ K307R_K309R_S313A_S378A_T429A_T432A_S436A_K447R_K458R_S461E _K470R)
  source 1..1345: mol_type = other RNA
aggagaaagcttaccatgagactgagcaagaccctcgtggacatggatatggccgactactccgctgccctggatcccgcgtatacaacgcttgagttcgaaaacgtccaggttctgaccatgggcaatgacacatctcctagcgaggggaccaacctcaatgctccgaactccctgggagtgtctgccctttgcgccatctgtggcgatcgggctacagggaaacactacggagccagctcctgcgacggctgtaaggggtttttccgcagagctgtgcggaaaaatcatatgtattcttgccgctttagcagacaatgtgtcgtggatcgggaccgcagaaaccagtgccggtactgtcgcctgaagaaatgcttcagagccggaatgcggcgcgaagcggttcagaatgagagagatcggatttccacccgcagagccgcttatgaagacagcgccctcccctctatcaacgctctgctgcaggccgaggtgctctcccggcaaattgcggcccctgtcagcggcatcaatggcgatattagagctcgccggatcgcctctatcgctgacgtgtgtgagtccatgaaggaacagctgcttgttctggtggagtgggccaagtacattcccgccttttgcgaactccctctggatgaccaggtcgcccttctgagagcgcacgccggggagcatctcctgctgggagctacacgccggagcatggtgttcaaagacgtgctcctgcttggcaacgattatatcgtccccagacactgtcctgagctggccgaaatgtctcgcgtttccattcggatcctcgacgagctggtgcttccgtttcaggaactgcaaattgatgacaatgagtacgcctacctcaaggctatcattttctttgatcccgacgccagagggctgagcgatcctggacgcatccggagactgcgcgctcaggtgcaggtctccctcgaagactatatcaacgatcggcagtacgactctagaggccggttcggggagctgcttctgctcctgcccacccttcaaagcattacgtggcagatgatcgagcagattcaatttatcaaactgttcggaatggcgaagattgataatctcctgcaggaaatgctgctctgaggactagttataagactgactagcccgatgggcctcccaacgggccctcctcccctccttgcaccgagattaataaaaaaaaaaaaaaaaaaaaaaaaaaaaaaaaaaaaaaaaaaaaaaaaaaaaaaaaaaaaaaaatgcatcccccccccccccccccccccccccccccccaaaggctcttttcagagccaccagaatt

SEQ ID NO: 2312 - RNA, 1345 nt, synthetic construct
  misc_feature 1..1345: note = mRNA i-3 (A64-N5-C30-hSL-N5) (opt5) from Homo sapiens__NP_000448.3__HNF4A(1-375)(S87A_S95A_S99A_K106R_K10 8R_K126R_K127R_S142A_S143A_S148A_T166A_S167A_S313A_S378A_T4 29A_T432A_S436A_K458R_S461E)
  source 1..1345: mol_type = other RNA
aggagaaagcttaccatgagactgagcaagaccctcgtggacatggatatggccgactactccgctgccctggatcccgcgtatacaacgcttgagttcgaaaacgtccaggttctgaccatgggcaatgacacatctcctagcgaggggaccaacctcaatgctccgaactccctgggagtgtctgccctttgcgccatctgtggcgatcgggctacagggaaacactacggagccagctcctgcgacggctgtaaggggtttttccgcagagctgtgcggaaaaatcatatgtatgcctgccgctttgcgagacaatgtgtcgtggatcgggaccgcagaaaccagtgccggtactgtcgcctgaagaaatgcttcagagccggaatgcggcgcgaagctgttcagaatgagagagatcggatttctacccgcagagccgcttatgaagacagcgccctcccctccatcaacgcgctgctgcaggccgaggtgctcagccggcaaattgctgcccctgtctctggcatcaatggcgatattagagctaagaagatcgcctccatcgccgacgtgtgtgagagcatgaaagaacagctgcttgttctggtggagtgggctaagtacattcccgcgttttgcgaactccctctggatgaccaggtcgcccttctgcgcgctcacgccggggagcatctcctgctgggagccacaaaacggtctatggtgttcaaggacgtgctcctgcttggcaacgattatatcgtccccagacactgtcctgagctggctgaaatgtcccgcgttagcattcggatcctcgacgagctggtgcttccgtttcaggaactgcaaattgatgacaatgagtacgcctacctcaaagcgatcattttctttgatcccgacgctaaggggctgtctgatcctggaaagatcaaaagactgcgcgcccaggtgcaggtctccctcgaagactatatcaacgatcggcagtacgacagcagaggccgcttcggggagctgcttctgctcctgcccacccttcaatccattacgtggcagatgatcgagcagattcaatttatcaagctgttcggaatggccaaaattgataatctcctgcaggaaatgctgctctgaggactagttataagactgactagcccgatgggcctcccaacgggccctcctcccctccttgcaccgagattaataaaaaaaaaaaaaaaaaaaaaaaaaaaaaaaaaaaaaaaaaaaaaaaaaaaaaaaaaaaaaaaatgcatcccccccccccccccccccccccccccccccaaaggctcttttcagagccaccagaatt

SEQ ID NO: 2313 - RNA, 1345 nt, synthetic construct
  misc_feature 1..1345: note = mRNA i-3 (A64-N5-C30-hSL-N5) (opt5) from Homo sapiens__NP_000448.3__HNF4A(1-375)(S87A_K106R_K108R_K126R_K 127R_S138A_T139A_S142A_S143A_S148A_T166A_S167A_S313A_S378A_ T429A_T432A_S436A_K458R_S461E)
  source 1..1345: mol_type = other RNA
aggagaaagcttaccatgagactgagcaagaccctcgtggacatggatatggccgactactccgctgccctggatcccgcgtatacaacgcttgagttcgaaaacgtccaggttctgaccatgggcaatgacacatctcctagcgaggggaccaacctcaatgctccgaactccctgggagtgtctgccctttgcgccatctgtggcgatcgggctacagggaaacactacggagccagctcctgcgacggctgtaaggggtttttccgcagagctgtgcggaaaaatcatatgtattcttgccgctttagcagacaatgtgtcgtggatcgggaccgcagaaaccagtgccggtactgtcgcctgaagaaatgcttcagagccggaatgcggcgcgaagcggttcagaatgagagagatcggattgccgctcgcagagccgcttatgaagactccgccctccccagcatcaacgcgctgctgcaggccgaggtgctctctcggcaaattgctgcccctgtctccggcatcaatggcgatattagagctaagaagatcgccagcatcgccgacgtgtgtgagtctatgaaagaacagctgcttgttctggtggagtgggctaagtacattcccgcgttttgcgaactccctctggatgaccaggtcgcccttctgcgcgctcacgccggggagcatctcctgctgggagccaccaaacggtccatggtgttcaaggacgtgctcctgcttggcaacgattatatcgtccccagacactgtcctgagctggctgaaatgagccgcgtttctattcggatcctcgacgagctggtgcttccgtttcaggaactgcaaattgatgacaatgagtacgcctacctcaaagcgatcattttctttgatcccgacgctaaggggctgtccgatcctggaaagatcaaaagactgcgcgcccaggtgcaggtcagcctcgaagactatatcaacgatcggcagtacgactccagaggccgcttcggggagctgcttctgctcctgcccacacttcaatctattacctggcagatgatcgagcagattcaatttatcaagctgttcggaatggccaaaattgataatctcctgcaggaaatgctgctctgaggactagttataagactgactagcccgatgggcctcccaacgggccctcctcccctccttgcaccgagattaataaaaaaaaaaaaaaaaaaaaaaaaaaaaaaaaaaaaaaaaaaaaaaaaaaaaaaaaaaaaaaaatgcatcccccccccccccccccccccccccccccccaaaggctcttttcagagccaccagaatt

SEQ ID NO: 2314 - RNA, 1345 nt, synthetic construct
  misc_feature 1..1345: note = mRNA i-3 (A64-N5-C30-hSL-N5) (opt5) from Homo sapiens__NP_000448.3__HNF4A(1-375)(S87A_S95A_S99A_K106R_K10 8R_K126R_K127R_S138A_T139A_S142A_S143A_S148A_T166A_S167A_S3 13A_S378A_T429A_T432A_S436A_K458R_S461E)
  source 1..1345: mol_type = other RNA
aggagaaagcttaccatgagactgagcaagaccctcgtggacatggatatggccgactactccgctgccctggatcccgcgtatacaacgcttgagttcgaaaacgtccaggttctgaccatgggcaatgacacatctcctagcgaggggaccaacctcaatgctccgaactccctgggagtgtctgccctttgcgccatctgtggcgatcgggctacagggaaacactacggagccagctcctgcgacggctgtaaggggtttttccgcagagctgtgcggaaaaatcatatgtatgcctgccgctttgcgagacaatgtgtcgtggatcgggaccgcagaaaccagtgccggtactgtcgcctgaagaaatgcttcagagccggaatgcggcgcgaagctgttcagaatgagagagatcggattgccgctcgcagagccgcgtatgaagactctgccctccccagcatcaacgctctgctgcaggccgaggtgctctcccggcaaattgctgcccctgtcagcggcatcaatggcgatattagagccaagaagatcgcttctatcgcggacgtgtgtgagtccatgaaagaacagctgcttgttctggtggagtgggccaagtacattcccgctttttgcgaactccctctggatgaccaggtcgcccttctgcgcgcccacgctggggagcatctcctgctgggagccaccaaacggagcatggtgttcaaggacgtgctcctgcttggcaacgattatatcgtccccagacactgtcctgagctggcggaaatgtctcgcgtttccattcggatcctcgacgagctggtgcttccgtttcaggaactgcaaattgatgacaatgagtacgcttacctcaaagccatcattttctttgatcccgacgccaaggggctgagcgatcctggaaagatcaaaagactgcgcgctcaggtgcaggtctctctcgaagactatatcaacgatcggcagtacgactccagaggccgcttcggggagctgcttctgctcctgcccacacttcaaagcattacctggcagatgatcgagcagattcaatttatcaagctgttcggaatggccaaaattgataatctcctgcaggaaatgctgctctgaggactagttataagactgactagcccgatgggcctcccaacgggccctcctcccctccttgcaccgagattaataaaaaaaaaaaaaaaaaaaaaaaaaaaaaaaaaaaaaaaaaaaaaaaaaaaaaaaaaaaaaaaatgcatcccccccccccccccccccccccccccccccaaaggctcttttcagagccaccagaatt

SEQ ID NO: 2315 - RNA, 1345 nt, synthetic construct
  misc_feature 1..1345: note = mRNA i-3 (A64-N5-C30-hSL-N5) (opt11) from Homo sapiens__NP_000448.3__HNF4A(1-375)
  source 1..1345: mol_type = other RNA
aggagaaagcttaccatgcgtctttccaaaacactcgtagacatggacatggcagactacagcgccgccctcgacccagcctacaccaccctcgaatttgaaaacgtccaagtcctaactatgggaaacgacacatcaccctcagaaggtacaaacctcaacgcccccaactcgctaggcgtctccgcactatgcgcaatctgcggcgaccgtgccaccggcaaacactacggagcctcatcctgcgacggttgtaaaggcttcttccgacgcagcgtcagaaaaaaccacatgtactcctgccgcttctcccgtcaatgcgtcgtcgacaaagacaaacgcaaccaatgccggtactgccgcctaaaaaaatgcttccgcgcaggcatgaaaaaagaagcagtccaaaacgaacgcgaccgcatatcaacccgtcgatcatcatacgaagactcctccctccccagcatcaacgccctcctccaagcagaagtactaagccggcaaataacatccccagtcagcggcatcaacggagacatacgagccaaaaaaatagcttcaatcgccgacgtctgcgaatccatgaaagagcaactactggtcctcgtcgaatgggctaaatacatcccggccttctgcgaactccccctcgacgatcaagtcgcccttctaagagcccacgccggcgaacacctcctcttaggcgcaaccaaacgcagcatggtattcaaagacgtactgctcctcggcaacgattacatcgtcccacgacattgccccgagctcgcagaaatgtcccgagtctccatccgcatactcgacgaactcgtactccccttccaagaactccaaatagacgacaatgaatacgcatacctcaaagcaatcatcttcttcgaccccgacgccaaaggactcagcgacccaggcaaaatcaaacgcctacgatcacaagtacaagtttcacttgaagactacatcaacgacagacaatacgactcaagaggtcgtttcggagaactactcctactactaccaaccctccaaagcataacctggcaaatgatagaacaaatacaatttataaaactcttcggcatggccaaaatcgacaatctcctacaagaaatgctcctctgaggactagttataagactgactagcccgatgggcctcccaacgggccctcctcccctccttgcaccgagattaataaaaaaaaaaaaaaaaaaaaaaaaaaaaaaaaaaaaaaaaaaaaaaaaaaaaaaaaaaaaaaaatgcatcccccccccccccccccccccccccccccccaaaggctcttttcagagccaccagaatt

SEQ ID NO: 2316 - RNA, 1345 nt, synthetic construct
  misc_feature 1..1345: note = mRNA i-3 (A64-N5-C30-hSL-N5) (opt11) from Homo sapiens__NP_000448.3__HNF4A(1-375)(S313A)
  source 1..1345: mol_type = other RNA
aggagaaagcttaccatgcgtctctcaaaaaccctagtcgacatggacatggccgactattctgcagccctagacccagcctacaccaccctcgaattcgaaaacgtacaagtactcaccatgggcaacgatacctccccatctgaaggcaccaacctcaacgcacccaactctctcggagtctccgccctatgcgcaatctgcggcgaccgagccactggaaaacactacggcgcctcctcttgcgacggatgcaaaggcttcttccgaagatcagtccgaaaaaaccacatgtactcatgccgcttctcgcgccaatgcgtcgtcgacaaagacaaacgtaaccaatgcagatactgccgactcaaaaaatgcttccgcgccggcatgaaaaaagaagccgtccagaacgaacgcgaccgcatctcaaccagacgctcgagctacgaagactcctccctaccctccatcaacgccctactccaagcagaagtactatcccgccaaataacctcccccgtcagcggcatcaacggcgacatcagagccaaaaaaatcgcctcaatcgccgacgtatgcgagagcatgaaagaacagctccttgtcctagtagaatgggccaaatacatcccagccttctgcgaactccccctcgacgaccaagtcgccctactcagagcccacgccggcgaacacctcctcctcggcgctaccaagcgatctatggtattcaaggatgtacttctactcggaaacgactacatcgtaccacgccactgcccagaactagccgaaatgtcccgcgtatccatccgaatcctcgatgaactcgtactccccttccaagaactacaaattgacgacaatgaatacgcctacttaaaagccatcatattcttcgaccccgacgccaaaggtctgtccgacccaggcaaaatcaaacgactacgggcccaagtccaagtatcactcgaagactacatcaacgaccgccaatacgactcacgcggccgcttcggcgagctcctcctccttctcccaaccctacaatccataacctggcaaatgatcgaacaaatccaattcataaaactcttcggcatggcaaaaattgacaaccttctccaagaaatgctcctgtgaggactagttataagactgactagcccgatgggcctcccaacgggccctcctcccctccttgcaccgagattaataaaaaaaaaaaaaaaaaaaaaaaaaaaaaaaaaaaaaaaaaaaaaaaaaaaaaaaaaaaaaaaatgcatcccccccccccccccccccccccccccccccaaaggctcttttcagagccaccagaatt

SEQ ID NO: 2317 - RNA, 1345 nt, synthetic construct
  misc_feature 1..1345: note = mRNA i-3 (A64-N5-C30-hSL-N5) (opt11) from Homo sapiens__NP_000448.3__HNF4A(1-375)(S313E)
  source 1..1345: mol_type = other RNA
aggagaaagcttaccatgcgcctgtccaaaaccctcgtcgacatggacatggctgactactccgccgccctcgaccccgcatacaccacactcgaattcgaaaacgtccaggtcctcaccatgggaaacgacacctccccctcagaaggaaccaacctaaacgctcccaactcccttggcgtctccgccctctgcgcaatatgcggagaccgcgccaccggaaaacactacggcgcctcatcctgcgacggttgcaaaggcttcttccgccgatccgtccgcaaaaaccacatgtattcctgccgcttctcgcgacagtgcgtagtcgacaaagataaacgaaaccaatgccgatactgccgccttaaaaaatgcttccgcgccggaatgaaaaaagaagcagtccaaaacgaacgagaccgcatcagcacccgtaggagctcatacgaggactcgagcctcccctcgatcaacgccttactccaagccgaagtactgtcccgccagatcacctcacccgtctccggcatcaacggagacatcagagccaaaaaaatagcatcgatcgccgacgtatgcgagtccatgaaagaacaactcctagtactagtcgaatgggccaaatacatcccagcattctgcgaactacccctagatgatcaagtagccctactacgagcccacgccggcgaacacctcctcctcggggccaccaaacgatcaatggtcttcaaagacgtcctcctcctcggcaacgactacatcgtaccccgccactgcccagaactcgcagaaatgtcacgcgtctcaatccgcatcctggacgaacttgtactcccattccaagaactacaaatagacgacaacgaatacgcatacctgaaagcaatcatctttttcgaccccgacgccaaaggcctatctgaccccggtaaaataaaacgcctccgcgaacaagtacaagtctctctcgaagactacatcaacgaccgccagtacgacagccggggacgcttcggcgaacttctcctcctcctccccactctacaaagcatcacctggcaaatgatcgaacaaatacaattcatcaaactcttcggaatggcaaaaatcgacaacctcctccaagaaatgctcctctgaggactagttataagactgactagcccgatgggcctcccaacgggccctcctcccctccttgcaccgagattaataaaaaaaaaaaaaaaaaaaaaaaaaaaaaaaaaaaaaaaaaaaaaaaaaaaaaaaaaaaaaaaatgcatcccccccccccccccccccccccccccccccaaaggctcttttcagagccaccagaatt

SEQ ID NO: 2318 - RNA, 1345 nt, synthetic construct
  misc_feature 1..1345: note = mRNA i-3 (A64-N5-C30-hSL-N5) (opt11) from Homo sapiens__NP_000448.3__HNF4A(1-375)(S142A_S143A)
  source 1..1345: mol_type = other RNA
aggagaaagcttaccatgcgcctatcaaaaacactggtcgacatggacatggcagactattctgccgccctggaccccgcctacactacactcgagttcgaaaacgtccaagtactcaccatgggaaacgacacctccccctccgaaggcaccaacttaaacgcccccaactcccttggggtctccgctctctgcgcaatctgcggagacagagccaccggtaaacactacggagcctcctcctgcgacggatgcaaaggcttcttccgccgctcagtacgcaaaaaccacatgtatagttgccgcttctctcgccagtgcgtggtcgacaaagacaaacgcaaccaatgccgatactgccgcctcaaaaagtgcttccgcgccggaatgaagaaagaagctgtccaaaacgaacgcgaccgcatctcaacccgcagagcggcatacgaagacagctcgctaccctccataaacgccctccttcaagccgaagtcctatcccgacagatcacctcccccgtctctggaataaacggcgacatccgcgcaaagaaaatcgcctccatcgccgacgtatgcgaatccatgaaagaacaactcctagtgctagtagaatgggccaaatacatacccgccttctgcgagctccccctagacgaccaagtagccctactccgcgcacacgcaggcgaacacctcctcctcggcgccaccaaacgatcaatggtcttcaaagacgtactactcctcggcaatgactacatcgtcccacgacactgccccgaattagcagaaatgtcgcgagtctccatacgcatcctagacgaactcgtactccctttccaagaactacaaatcgatgacaacgaatacgcatacctcaaagccatcatcttcttcgacccagacgccaaaggcctttccgatcccggcaaaatcaaaagactacgctcacaagtacaagtctccctcgaagattacatcaacgaccgccaatacgactcacgcggccgcttcggagaactcctactactcctcccaaccctacaatccatcacctggcaaatgatcgaacaaatccagttcattaaactcttcggaatggccaaaatcgataacctcctacaagaaatgctcctatgaggactagttataagactgactagcccgatgggcctcccaacgggccctcctcccctccttgcaccgagattaataaaaaaaaaaaaaaaaaaaaaaaaaaaaaaaaaaaaaaaaaaaaaaaaaaaaaaaaaaaaaaaatgcatcccccccccccccccccccccccccccccccaaaggctcttttcagagccaccagaatt

SEQ ID NO: 2319 - RNA, 1345 nt, synthetic construct
  misc_feature 1..1345: note = mRNA i-3 (A64-N5-C30-hSL-N5) (opt11) from Homo sapiens__NP_000448.3__HNF4A(1-375)(S142E_S143E)
  source 1..1345: mol_type = other RNA
aggagaaagcttaccatgcgcctatccaaaaccctagtcgacatggacatggcagactactccgccgccctcgacccagcatacaccacactcgaattcgaaaacgtccaagtgctaaccatgggcaacgacaccagcccgtccgaaggcacaaacctcaacgcccccaactcccttggtgtctcagccctctgcgcaatctgcggcgaccgtgccaccggtaaacactatggcgcctcatcctgcgacggctgcaaaggcttcttcagacgatcggtacgcaaaaaccacatgtactcatgtcgcttctcccgacaatgtgtagtggacaaagacaaaagaaaccaatgccgctactgccgcctcaaaaaatgcttccgcgcaggcatgaaaaaagaagccgtccagaatgaacgagaccgcataagcacccgccgagaagaatatgaagactcctcacttccctcaatcaacgccctactccaagccgaagtactatcacggcaaatcacaagccccgtctcaggaataaacggagacatccgcgccaaaaaaattgcctccatcgcggacgtatgcgaaagcatgaaagaacaactactcgtactcgtcgaatgggcaaaatacatccccgcattctgcgaactccccctcgacgaccaagtagccctgctcagagcacacgccggagaacaccttctcctcggcgccaccaaacgctccatggtcttcaaagacgtcctcctcctagggaacgactacatagtaccacgacactgcccagaactagccgaaatgtccagagtatcaatccgaatcctcgacgaactcgtcctccccttccaagaactacaaatcgacgacaacgaatacgcctacctaaaagccatcatattcttcgatcccgacgcaaaaggcctctccgaccccggcaaaatcaagcgactacgatcacaagtacaagtctccctggaagactacatcaacgaccgccaatacgacagccgcggaagattcggcgaactcctgctactactccccaccctacaatccatcacctggcaaatgatagaacaaatacaattcatcaaactcttcggcatggctaaaatcgacaacctcctacaagaaatgctactatgaggactagttataagactgactagcccgatgggcctcccaacgggccctcctcccctccttgcaccgagattaataaaaaaaaaaaaaaaaaaaaaaaaaaaaaaaaaaaaaaaaaaaaaaaaaaaaaaaaaaaaaaaatgcatcccccccccccccccccccccccccccccccaaaggctcttttcagagccaccagaatt

SEQ ID NO: 2320 - RNA, 1345 nt, synthetic construct
  misc_feature 1..1345: note = mRNA i-3 (A64-N5-C30-hSL-N5) (opt11) from Homo sapiens__NP_000448.3__HNF4A(1-375)(S143A)
  source 1..1345: mol_type = other RNA
aggagaaagcttaccatgcgactctccaagaccctcgtagacatggatatggcagactacagcgccgccctagatccagcttacaccaccctcgaattcgaaaacgttcaagtcctaacgatgggcaacgacacctcaccatcagaaggcaccaacctcaacgcccccaactccctcggagtctcagccctctgcgcaatctgcggcgaccgcgccaccggcaaacactacggagcctcgtcctgcgacggatgcaaaggattcttcaggcgctccgtacggaaaaaccacatgtactcttgtcgtttctcccgccaatgcgtagtcgacaaagacaaacgcaaccaatgccgctactgtcgcctcaaaaaatgcttccgcgccggcatgaagaaagaagccgtccaaaacgaacgcgaccgcatctccacccgcaggtccgcctacgaagactccagcctaccctccatcaacgcactactccaagccgaagtcctctcccgccaaatcacgtctcccgtctcaggaatcaacggcgacatccgcgctaagaaaatagcatctatcgccgacgtctgtgaatccatgaaagaacaactactcgtactggtagaatgggccaaatacatccccgccttctgcgaacttcccctcgacgaccaagttgcactcctccgagcccacgccggggaacacctactcctcggagccaccaaacgctcaatggtcttcaaagacgtactcctcctcggcaacgactacatcgtgccacgccactgccccgaactagccgaaatgtcccgggtctccattcgaatcctcgacgaactcgtcctccccttccaagaactccaaatagacgacaacgaatacgcttacctcaaagcaataatcttcttcgacccagatgccaaaggcctcagcgacccgggcaagattaaacgcctccgctctcaagtccaagtctcccttgaagactacatcaacgaccgccaatacgactcccgcggtcgattcggggaactactcctactcctcccaacactacaatccatcacctggcaaatgatcgaacaaatccaattcatcaaactcttcggcatggccaaaatcgacaacctcctacaggaaatgctcctatgaggactagttataagactgactagcccgatgggcctcccaacgggccctcctcccctccttgcaccgagattaataaaaaaaaaaaaaaaaaaaaaaaaaaaaaaaaaaaaaaaaaaaaaaaaaaaaaaaaaaaaaaaatgcatcccccccccccccccccccccccccccccccaaaggctcttttcagagccaccagaatt

SEQ ID NO: 2321 - RNA, 1345 nt, synthetic construct
  misc_feature 1..1345: note = mRNA i-3 (A64-N5-C30-hSL-N5) (opt11) from Homo sapiens__NP_000448.3__HNF4A(1-375)(T166A)
  source 1..1345: mol_type = other RNA
aggagaaagcttaccatgaggctcagcaaaactctagtcgacatggacatggccgactactcagccgcactcgaccccgcatataccacactagagttcgaaaacgtccaagttctcaccatgggaaacgacacttccccctcagaaggcacaaacctcaacgcacccaactccctaggagtctccgccctatgcgcgatctgtggcgaccgagcaaccggcaagcattacggcgcatcctcctgcgacggatgcaaaggcttcttccgccgatccgtccgaaagaaccacatgtactcctgccgattctcccgccaatgcgtagttgacaaagacaaacgcaatcaatgccgatactgccgcctcaagaaatgcttccgagcaggaatgaagaaagaagccgtccaaaacgaacgcgatcgcatatccacccgccgctcctcctacgaagactcctccctcccctccatcaacgcactcctccaagcggaagtactctcacgccaaatcgcgtccccagtctccggcataaacggagacatccgcgccaagaaaatagcctcaatcgctgacgtctgcgaatctatgaaagaacagctcctcgtcctagtcgaatgggccaaatacatccccgccttctgcgaactcccactagacgaccaagtggcactcctccgcgcccacgccggcgaacacctactactcggagccaccaaacgctccatggtgttcaaagacgtactactcctcggaaatgactacatcgtcccccgacactgccccgaactcgccgaaatgtccagggtctccatccgcatcctcgacgaactggtcctcccattccaagaactccaaatcgacgacaacgaatacgcctacctaaaagccatcatcttcttcgaccccgacgccaaaggcctatccgacccgggcaaaatcaaacgactccgctcccaagtccaagtctcactcgaagactacatcaacgatagacagtacgactcacgcggtagattcggagaactcctactcctactccccacactccaatccataacctggcaaatgatagaacaaatacaattcatcaaactcttcggcatggccaaaatcgacaacctactccaggaaatgctcttatgaggactagttataagactgactagcccgatgggcctcccaacgggccctcctcccctccttgcaccgagattaataaaaaaaaaaaaaaaaaaaaaaaaaaaaaaaaaaaaaaaaaaaaaaaaaaaaaaaaaaaaaaaatgcatcccccccccccccccccccccccccccccccaaaggctcttttcagagccaccagaatt

SEQ ID NO: 2322 - RNA, 1345 nt, synthetic construct
  misc_feature 1..1345: note = mRNA i-3 (A64-N5-C30-hSL-N5) (opt11) from Homo sapiens__NP_000448.3__HNF4A(1-375)(S167E)
  source 1..1345: mol_type = other RNA
aggagaaagcttaccatgcgcctctccaaaaccctcgtcgacatggacatggcagactactctgcagctctcgaccccgcctataccacgctcgaattcgaaaacgtacaagtcctcaccatgggaaacgacacctccccctctgaaggcaccaacctcaacgcacccaacagccttggcgtcagcgccttatgcgccatttgcggagaccgcgccaccggcaaacactacggagcatcctcatgcgacggctgcaaaggcttcttccgccgatcagtccgaaaaaaccacatgtactcctgccgcttctctcgccagtgcgtagtcgataaagataaaagaaatcaatgccgctactgccgcctcaaaaaatgcttccgcgccggcatgaaaaaagaagcagttcaaaacgaacgcgaccgaatctccacccgccgctcatcctacgaagactcttccctcccctctataaacgccctcctccaagccgaagtactctcacgccaaatcaccgaacctgtctccggcattaacggagacatacgcgccaagaaaatagccagcatcgccgacgtctgcgaatcaatgaaagaacaactcctcgtcctagtcgaatgggccaaatacatccccgcattctgcgaacttcccctcgacgaccaagtcgccctcctccgtgcccatgcaggcgaacacctcctcctcggcgccaccaaacgctccatggtctttaaagacgtcctcctcctgggcaacgactacatcgtcccccgacactgcccagaactcgccgagatgagccgcgtgtccatacgcatactcgacgaactcgtcctccccttccaagaactccagatagacgataacgaatacgcatacctaaaagccataatattcttcgaccccgacgctaaaggtctctcagacccaggaaaaatcaaacgtctcagaagccaagtccaagtctcactcgaagactacatcaacgaccgccaatacgactctcgcggccgcttcggcgaactcctcttattactcccaacactccaatcaatcacctggcaaatgatcgaacaaatacaatttatcaaactcttcggcatggctaaaatcgacaatctcctccaagaaatgctcctctgaggactagttataagactgactagcccgatgggcctcccaacgggccctcctcccctccttgcaccgagattaataaaaaaaaaaaaaaaaaaaaaaaaaaaaaaaaaaaaaaaaaaaaaaaaaaaaaaaaaaaaaaaatgcatcccccccccccccccccccccccccccccccaaaggctcttttcagagccaccagaatt

SEQ ID NO: 2323 - RNA, 1345 nt, synthetic construct
  misc_feature 1..1345: note = mRNA i-3 (A64-N5-C30-hSL-N5) (opt11) from Homo sapiens__NP_000448.3__HNF4A(1-375)(S167A)
  source 1..1345: mol_type = other RNA
aggagaaagcttaccatgcggctctcaaaaaccctagtcgacatggacatggccgactactcagctgccctagaccccgcatacaccacactagaattcgaaaatgtccaagtactaaccatgggcaacgacacctcaccctccgaaggtaccaacctcaacgcgcccaactccctcggcgtctcagccctctgcgccatctgcggcgaccgcgcgaccggcaaacactacggtgcctcctcatgcgacggatgcaaaggcttcttccgacgctcagtccgcaaaaaccacatgtactcctgccgcttctcacgacaatgcgtcgttgacaaagacaaacgcaaccaatgccgctactgccgcctcaaaaaatgcttccgcgcaggaatgaaaaaagaagcagttcaaaacgaacgcgaccgcatctcaacccgcagatcatcatacgaagactcatccctaccatcaataaacgccctcctacaagccgaagtcctctccagacaaatcaccgcccccgtctcaggcataaacggcgacatccgtgcaaaaaaaatcgcctccatcgctgacgtctgcgaatccatgaaagaacaactccttgtcctcgtcgaatgggccaaatacattcctgccttctgcgaactccccctcgacgaccaagtcgcactactcagagcccacgcaggcgaacacctcctcctcggagcaacaaaacgctccatggtcttcaaagacgtcctcctactcggaaatgactacatcgtccccagacactgccccgaactcgctgaaatgtcaagagtctccatacgaatactagacgaactagtcctacccttccaagaactgcaaatagacgacaacgaatacgcctacctcaaagccatcatattcttcgaccccgacgccaagggactctcagaccccggcaaaatcaaacgcctacgctcccaagtgcaagtcagcctcgaagactacataaacgatcgccagtacgactcacgaggacgattcggagaactcctcctcctcctcccaacactccagtccatcacctggcaaatgatcgaacaaatccaatttatcaaactcttcggcatggccaaaatcgacaacctactacaagaaatgctcctctgaggactagttataagactgactagcccgatgggcctcccaacgggccctcctcccctccttgcaccgagattaataaaaaaaaaaaaaaaaaaaaaaaaaaaaaaaaaaaaaaaaaaaaaaaaaaaaaaaaaaaaaaaatgcatcccccccccccccccccccccccccccccccaaaggctcttttcagagccaccagaatt

SEQ ID NO: 2324 - RNA, 1345 nt, synthetic construct
  misc_feature 1..1345: note = mRNA i-3 (A64-N5-C30-hSL-N5) (opt11) from Homo sapiens__NP_000448.3__HNF4A(1-375)(S167A_S378A_T429A_T432A_ S436A)
  source 1..1345: mol_type = other RNA
aggagaaagcttaccatgcgcctctccaaaaccctcgttgacatggatatggcggactactccgccgcactcgacccagcctacaccaccctagaatttgaaaacgtccaagtactaaccatgggcaacgacacaagcccctccgaaggcacaaatctcaacgcccccaactcactaggcgtctcagccctatgtgctatctgcggcgaccgcgccaccggcaaacactacggcgcatcatcatgtgacggatgcaaaggattcttccgacgctccgtccgaaagaaccacatgtactcctgccgattcagcagacaatgtgttgtcgacaaagacaaacgcaaccaatgtcgctactgccgcctcaaaaaatgctttagagccggaatgaaaaaagaagccgtccaaaacgaacgcgaccgcatctccacacgccgaagctcatacgaagactcatctctcccctccatcaacgcactcctccaagccgaagtcctatctcgccaaatcaccgcacccgtctccggcatcaacggcgacatacgcgccaaaaaaatagcctccatagcagacgtatgcgaatccatgaaagagcaactcctcgtgctagtcgaatgggccaaatacatccccgccttctgcgagctcccactagacgaccaagtcgccctcctccgcgcccacgccggcgaacacctgctcctaggcgccaccaaaagaagcatggtattcaaagacgtcctactcctcggcaacgactatatagtccctcgccactgtccagaactcgcagaaatgtccagagtcagcatccgaatcctcgacgaactcgtcctacccttccaagaactacaaatcgacgacaacgaatacgcctaccttaaagccatcatcttcttcgaccccgacgccaaaggcctatccgaccccggcaaaatcaaacgcttacgatcccaagtccaggtcagcctcgaagactacataaacgaccgccaatacgactcacgcggccgcttcggcgaactactcctcctcctcccaaccctccaaagcatcacctggcaaatgatagaacaaatacaattcatcaaacttttcggcatggccaaaatcgacaaccttttacaagaaatgctactctgaggactagttataagactgactagcccgatgggcctcccaacgggccctcctcccctccttgcaccgagattaataaaaaaaaaaaaaaaaaaaaaaaaaaaaaaaaaaaaaaaaaaaaaaaaaaaaaaaaaaaaaaaatgcatcccccccccccccccccccccccccccccccaaaggctcttttcagagccaccagaatt

SEQ ID NO: 2325 - RNA, 1345 nt, synthetic construct
  misc_feature 1..1345: note = mRNA i-3 (A64-N5-C30-hSL-N5) (opt11) from Homo sapiens__NP_000448.3__HNF4A(1-375)(S167E_S378E_T429E_T432E_ S436E)
  source 1..1345: mol_type = other RNA
aggagaaagcttaccatgcgactatctaaaactctcgtagacatggacatggccgactactcggccgccctcgaccccgcatacaccacgctcgagttcgaaaacgttcaagtcctcacaatgggcaacgacacctccccctcagaaggcaccaacctcaacgctccaaactccctaggggtctccgcactctgcgcaatctgcggcgaccgtgccaccggcaaacattacggcgcctcatcctgcgacggctgcaaaggattcttccggcgatccgtccgaaagaaccacatgtacagctgcagattcagccgacaatgcgtcgtggacaaagataaacgcaaccaatgccgctactgccgactcaagaaatgcttccgcgcaggcatgaagaaagaagcagtacaaaacgaacgcgaccgcatctcaacaagacgtagctcctacgaagactcaagcctcccatccatcaacgccctcctccaagccgaagtactctcacgtcaaatcaccgaacccgtgtcaggaatcaacggcgacatccgcgccaagaaaatcgcctccatcgcagacgtctgcgaatccatgaaagaacaactcctcgtcctggtcgaatgggctaaatacatccccgcattctgcgaactccccctagatgaccaagtcgccctactgcgcgcccacgcaggcgaacatctattactcggcgccaccaaacgcagcatggtattcaaagacgtcctcctcctcggcaacgactacatagtcccacgccactgcccagaactggccgaaatgagccgagtctctatccgcatactcgacgagctagtcctccccttccaagaactccaaattgacgacaacgaatacgcctacctcaaagccatcatattcttcgaccccgacgcgaaaggcctatccgaccccggtaaaatcaaaagactacgctcacaagtccaagtctcccttgaagactacatcaacgaccgccagtacgacagccgcggccgcttcggcgaactacttctcctcctccccaccctccaatccatcacctggcaaatgatcgaacaaatccaattcataaaactattcggaatggccaaaatcgacaacctcctgcaagaaatgctcctctgaggactagttataagactgactagcccgatgggcctcccaacgggccctcctcccctccttgcaccgagattaataaaaaaaaaaaaaaaaaaaaaaaaaaaaaaaaaaaaaaaaaaaaaaaaaaaaaaaaaaaaaaaatgcatcccccccccccccccccccccccccccccccaaaggctcttttcagagccaccagaatt

SEQ ID NO: 2326 - RNA, 1345 nt, synthetic construct
  misc_feature 1..1345: note = mRNA i-3 (A64-N5-C30-hSL-N5) (opt11) from Homo sapiens__NP_000448.3__HNF4A(1-375)(S87A)
  source 1..1345: mol_type = other RNA
aggagaaagcttaccatgcgcctaagcaaaacattagtcgacatggacatggccgactactccgccgcactcgacccagcatacaccacattagagttcgaaaacgtccaagtcctcacaatgggcaacgacacctcaccctcagagggcaccaatctcaacgccccaaactcactcggagtaagtgcactatgcgcgatctgcggcgaccgcgccaccggcaaacactacggcgcatcctcctgcgacggctgcaaaggattcttccgacgcgccgtccgcaaaaaccacatgtactcatgccgcttctcacgccagtgcgtcgtagacaaagacaaacgcaatcaatgccgctactgccgactcaagaaatgcttccgcgccggaatgaagaaagaagcagtacaaaacgaacgcgaccgaatctccacccgccgctcctcctacgaagattcctccctcccctccatcaacgccctactccaagccgaagtactctcccgccaaatcacctctccagtttccggcataaacggcgacatacgagcaaagaaaattgcatctatcgccgacgtctgcgaatcgatgaaagagcaactcctagtactcgtagaatgggccaaatacatccccgcattctgcgaactcccacttgacgaccaagtcgcccttctccgagcacacgccggcgaacatctcctgctcggcgctacaaaaagaagcatggtcttcaaagacgtcctcctactcggcaacgactacatcgtcccccgccactgccccgaactagccgaaatgagccgagtctccatcagaatcctcgacgaactcgtactccccttccaagaactccaaatagacgacaacgaatatgcatacctcaaagcaatcatattcttcgaccccgacgccaaaggactttccgaccccggcaaaataaaacgcctccgatcccaagtacaggtctccctcgaagactacatcaacgacagacaatacgacagccgtggacgattcggagagttactcctactacttcccacccttcagtcaatcacctggcaaatgatagaacaaatccaattcatcaaactgttcggaatggctaaaatcgacaacctgctacaagaaatgctcctctgaggactagttataagactgactagcccgatgggcctcccaacgggccctcctcccctccttgcaccgagattaataaaaaaaaaaaaaaaaaaaaaaaaaaaaaaaaaaaaaaaaaaaaaaaaaaaaaaaaaaaaaaaatgcatcccccccccccccccccccccccccccccccaaaggctcttttcagagccaccagaatt

SEQ ID NO: 2327 - RNA, 1345 nt, synthetic construct
  misc_feature 1..1345: note = mRNA i-3 (A64-N5-C30-hSL-N5) (opt11) from Homo sapiens__NP_000448.3__HNF4A(1-375)(S87E)
  source 1..1345: mol_type = other RNA
aggagaaagcttaccatgcgcctatccaaaaccctagtcgacatggacatggcagactattcagccgcactagatcccgcctatacaacactcgaattcgaaaacgtgcaggtcctcaccatgggcaacgacacctccccctccgaaggaaccaacctaaacgcaccaaattccctcggcgtctccgccctttgcgccatatgtggggaccgcgcaacaggaaaacactacggcgcctcctcctgcgacggatgcaaaggattcttccgacgcgaagtcagaaaaaaccacatgtactcatgtcgattctcccgccagtgcgtcgtcgacaaagacaaaagaaaccaatgcagatactgtcgcctaaaaaaatgcttccgcgccggaatgaaaaaggaagcagtacagaacgaacgcgaccgcatctccaccagacgctcctcctacgaagactcatccctgccctcgatcaacgcacttctccaagccgaggtcctatcaagacaaatcacttctccagtatccggcatcaatggcgacatccgcgccaaaaaaatcgcctcaatcgccgacgtctgcgagtccatgaaagaacaactactagtccttgtagaatgggctaaatatattcccgccttctgcgaacttcccctagacgaccaagtagcactcctccgcgctcacgccggcgagcacctactactcggcgcaaccaaaagatcaatggtcttcaaagacgtcctcctcctgggcaacgactacatcgtcccccgacactgccccgaactcgcggaaatgtcccgcgtcagcatccgcatcctcgacgaactcgtactccccttccaagaactacaaatcgacgacaacgaatacgcctacctcaaagcgataatcttcttcgacccagacgccaaaggtctatccgacccaggaaaaatcaaacgtctccgctctcaagtacaagtctctctcgaagactacataaacgaccgccaatacgactccagaggccggttcggcgaactcctcctcctactccccacactccaaagcatcacctggcaaatgatcgaacaaatccaattcataaaactattcggcatggccaaaatagacaacctgctacaagaaatgctcctctgaggactagttataagactgactagcccgatgggcctcccaacgggccctcctcccctccttgcaccgagattaataaaaaaaaaaaaaaaaaaaaaaaaaaaaaaaaaaaaaaaaaaaaaaaaaaaaaaaaaaaaaaaatgcatcccccccccccccccccccccccccccccccaaaggctcttttcagagccaccagaatt

SEQ ID NO: 2328 - RNA, 1345 nt, synthetic construct
  misc_feature 1..1345: note = mRNA i-3 (A64-N5-C30-hSL-N5) (opt11) from Homo sapiens__NP_000448.3__HNF4A(1-375)(R2V)
  source 1..1345: mol_type = other RNA
aggagaaagcttaccatggtactctccaagaccctagtcgacatggacatggccgactactccgccgccctagacccagcctacaccactctagagttcgaaaacgtccaagtcctcacaatgggaaacgacacctccccctccgaaggcacaaacctcaacgcccccaactccctcggcgtctccgccctatgcgccatatgcggagaccgagccaccggcaagcactacggcgcttcctcctgcgacggatgcaaaggcttcttccggagaagcgtccggaaaaaccacatgtattcctgccgattctcacgccaatgcgtagtcgacaaagacaaacgcaaccaatgccgctactgccgccttaagaaatgtttcagagccggaatgaagaaagaagccgtccaaaacgaacgcgaccgcataagcacccgccgctcctcatacgaagacagcagcctcccctccatcaacgccctcctccaagcagaagtgctctcccgacaaatcaccagccccgtaagcggaatcaacggcgacatacgcgccaagaaaatcgcctccatcgccgacgtctgcgaatcaatgaaagaacaactactcgtccttgtagaatgggccaaatacatccccgccttctgcgagctcccactcgacgaccaagtcgccctcctccgcgcacacgccggtgaacatctcctactaggagcaaccaaacgatcaatggtattcaaagacgtcctcctcctcggtaacgactacatagtcccaagacactgccccgaactagccgaaatgtcacgcgtctccatccgcatcctagacgaactcgtccttccctttcaagaactacaaatcgacgacaacgaatacgcctacctcaaagccatcatcttcttcgacccagacgcaaaaggactctcagaccccggcaaaatcaaacgcctccgctcccaagtccaagtcagcctcgaagactacatcaacgacagacaatacgactcacgaggccgcttcggagaactactactcttgctccccacactacaatcgataacctggcaaatgatcgaacaaatccaatttatcaaactattcggaatggcaaaaatagacaaccttctgcaagaaatgctcctttgaggactagttataagactgactagcccgatgggcctcccaacgggccctcctcccctccttgcaccgagattaataaaaaaaaaaaaaaaaaaaaaaaaaaaaaaaaaaaaaaaaaaaaaaaaaaaaaaaaaaaaaaaatgcatcccccccccccccccccccccccccccccccaaaggctcttttcagagccaccagaatt

SEQ ID NO: 2329 - RNA, 1345 nt, synthetic construct
  misc_feature 1..1345: note = mRNA i-3 (A64-N5-C30-hSL-N5) (opt11) from Homo sapiens__NP_000448.3__HNF4A(1-375)(R2V_K5V)
  source 1..1345: mol_type = other RNA
aggagaaagcttaccatggtcctcagcgtcaccctcgtcgacatggacatggccgactactccgcagccctcgaccccgcctacaccacactagaatttgaaaacgtccaagtcctgaccatgggcaacgacacctccccctcagaaggtaccaacctcaacgcacccaactcgctcggcgtatcagccctttgtgccatctgcggtgatcgcgcaaccggaaaacactacggcgcatcctcatgcgacggctgcaaaggcttcttccgccgatccgtccgtaaaaaccatatgtactcctgtcgattctcccgccaatgtgtcgtagataaagacaaacgcaaccaatgcagatactgccgcctaaaaaaatgcttccgggcaggtatgaagaaagaagcagtccaaaacgaacgcgaccgcatcagcacccgccgctcctcctacgaagactcgtccctcccatccatcaacgccctactccaagccgaagtcttatcccgacaaatcacttcccccgtctccggcataaacggcgacatccgcgcaaaaaaaatcgcctccatagccgacgtctgcgaatcaatgaaagaacaactcctagtccttgtcgaatgggccaaatacatccccgcattctgcgaactcccactcgatgaccaggtagccctcctccgcgcccacgcgggtgaacacctcctcctcggggccaccaaacgctccatggtattcaaagacgtcctcctcctcggaaacgactacatcgtcccacgccattgccccgagctagccgaaatgtctagagtctccatacgcatcctcgacgaactcgtactccccttccaagaactccaaattgatgacaacgaatacgcctacctcaaagcaatcatcttcttcgaccccgacgccaaagggctctccgacccaggaaaaatcaaacgcctcagatcccaagtccaggtatcactcgaagactacatcaacgaccgacaatacgactcccgaggccgtttcggcgaactcctactcctcttaccaaccctacaatccatcacatggcaaatgatcgaacaaattcaattcatcaaactcttcggaatggccaaaatcgacaatctcctacaagaaatgctcctctgaggactagttataagactgactagcccgatgggcctcccaacgggccctcctcccctccttgcaccgagattaataaaaaaaaaaaaaaaaaaaaaaaaaaaaaaaaaaaaaaaaaaaaaaaaaaaaaaaaaaaaaaaatgcatcccccccccccccccccccccccccccccccaaaggctcttttcagagccaccagaatt

SEQ ID NO: 2330 - RNA, 1345 nt, synthetic construct
  misc_feature 1..1345: note = mRNA i-3 (A64-N5-C30-hSL-N5) (opt11) from Homo sapiens__NP_000448.3__HNF4A(1-375)(K179R_K180R)
  source 1..1345: mol_type = other RNA
aggagaaagcttaccatgcgcctctccaaaacacttgtcgacatggacatggccgactactccgccgcactcgaccccgcctacaccacccttgaattcgaaaacgtccaagtcctcaccatgggaaacgacacctccccctccgaaggaaccaacctaaacgcccccaactccctaggcgtctccgccctctgcgcaatatgcggagaccgcgcaaccggcaaacattacggcgcttcctcctgtgacggttgcaaaggatttttccgccgatccgtccgtaaaaaccacatgtactcctgccgcttcagccgacaatgcgtggtagataaagacaaacgcaaccaatgccgttactgccgactcaaaaaatgcttccgagccggaatgaaaaaagaagcagtccaaaacgaacgcgaccgcatctctacacgcagatcttcatatgaagatagcagcctccccagcatcaacgccctcctccaagccgaagtcctctcccgacaaatcacctccccagtaagcggcataaatggcgacatccgtgcccggcgcatcgcatcaatcgccgacgtatgcgaatcaatgaaagaacaactactagtcctcgtcgaatgggcaaaatacatacccgcattctgcgaactccccctcgacgaccaagtagccctcctacgcgcccacgccggagaacacctactcctcggggccacgaaacgatccatggtcttcaaagacgtcctactcctcggaaatgactacatagtccccaggcactgccccgaactcgccgaaatgtcccgcgtctcaattcgaatcctagacgaactcgtcctacccttccaagaactccaaatagacgacaacgaatacgcttacctcaaagccattatcttcttcgacccagacgccaaaggactctccgacccgggaaaaataaaacgactacgcagccaagtccaagtctccttagaagactacatcaacgaccgccagtacgactcccgcggccgattcggagagcttctcctactcctccccaccctccaatccatcacatggcaaatgatcgaacaaatccaattcataaaactcttcggcatggccaaaatcgataatctactccaagaaatgctcctctgaggactagttataagactgactagcccgatgggcctcccaacgggccctcctcccctccttgcaccgagattaataaaaaaaaaaaaaaaaaaaaaaaaaaaaaaaaaaaaaaaaaaaaaaaaaaaaaaaaaaaaaaaatgcatcccccccccccccccccccccccccccccccaaaggctcttttcagagccaccagaatt

SEQ ID NO: 2331 - RNA, 1345 nt, synthetic construct
  misc_feature 1..1345: note = mRNA i-3 (A64-N5-C30-hSL-N5) (opt11) from Homo sapiens__NP_000448.3__HNF4A(1-375)(K234R)
  source 1..1345: mol_type = other RNA
aggagaaagcttaccatgcgcctatctaaaacacttgtagacatggacatggccgactactcagccgcactcgaccccgcctacaccaccttagagttcgagaacgtccaagtcctcacgatgggcaatgacacctccccatccgaaggcaccaaccttaacgcacccaactccctcggagtatccgccctctgcgccatctgcggcgaccgcgccacaggcaaacactacggagcctcatcctgcgacggctgcaaaggcttcttccgacgctccgtcagaaaaaaccacatgtactcctgccgattctcccgtcaatgcgtagtcgacaaagacaaacgcaaccaatgccgatactgccgcctcaaaaagtgcttccgagccggcatgaaaaaagaagccgtccagaacgagcgcgaccgaatctccacaagaagatcatcatacgaagactcctccctcccctccatcaacgccctactccaagccgaagtcctctccagacaaatcacaagccccgtatccggtatcaacggcgacataagagccaaaaaaatcgcctccatagccgacgtctgcgaatccatgaaagaacaactcctcgtgctcgtagaatgggccaaatacattcccgccttctgcgaactccctctcgacgaccaggtcgctctactcagggctcacgccggcgaacacctcctcctcggcgcaacccgccgctccatggtattcaaagacgtcctactactcggaaacgactacatcgttccccgccactgcccagagctcgctgaaatgtctcgcgtctccatccgcatcctcgacgaactcgtcctcccattccaagaactccaaatcgacgacaacgaatacgcctacctaaaagccataatcttcttcgaccccgacgcaaaaggactctccgacccagggaaaattaaacgactccgctcccaagtacaggtaagcctcgaagactacatcaacgaccgccaatacgattcccgaggccgcttcggcgaacttctcctactactacccaccctacagtccatcacctggcaaatgatcgaacaaatccaattcatcaaacttttcggaatggccaaaatcgacaacctcctccaagaaatgctcctctgaggactagttataagactgactagcccgatgggcctcccaacgggccctcctcccctccttgcaccgagattaataaaaaaaaaaaaaaaaaaaaaaaaaaaaaaaaaaaaaaaaaaaaaaaaaaaaaaaaaaaaaaaatgcatcccccccccccccccccccccccccccccccaaaggctcttttcagagccaccagaatt

SEQ ID NO: 2332 - RNA, 1345 nt, synthetic construct
  misc_feature 1..1345: note = mRNA i-3 (A64-N5-C30-hSL-N5) (opt11) from Homo sapiens__NP_000448.3__HNF4A(1-375)(K300R)
  source 1..1345: mol_type = other RNA
aggagaaagcttaccatgcgcctctcaaaaaccctagtagacatggacatggcagactactccgccgccctcgaccccgcatacaccaccctcgagttcgaaaacgtacaagtcctcactatgggaaacgacacctccccctcggaaggcaccaacctcaacgcccccaactcccttggggtcagtgcactatgcgccatctgcggcgatagagccaccggaaagcactacggcgcctcctcatgcgacggctgcaaaggcttcttccgccgatccgtccgcaaaaaccacatgtactcatgcagattcagcagacaatgcgtcgtcgacaaagacaagagaaaccagtgccgatactgccgcctcaagaaatgtttccgcgccggcatgaagaaagaagcagtccaaaacgaacgcgaccgcatctccacccgccgctcatcctacgaagactccagcctaccctccataaatgccctactccaagcagaagtcctctcccgccaaataacctccccagtatccggaatcaacggcgacatccgcgccaagaaaatcgcctcaatagcagacgtctgcgaatccatgaaagaacaactacttgtcttagtagaatgggccaaatacatccccgccttttgcgaactaccccttgacgaccaagtcgccctcctccgcgcacacgccggcgaacacctattactaggcgccactaaacgctccatggtcttcaaagacgtactcctcctcggcaacgactatatcgtcccccgacactgccccgaactcgccgaaatgtcccgcgtctcaatacgaatcctcgacgaactcgtcctccccttccaagaactacagatcgacgacaacgaatacgcctacctcaaagcaatcatcttcttcgaccccgacgcccgcggcctatccgaccctggcaaaatcaaacgcctgcgctcccaagtacaagtgtccctcgaagactacatcaacgaccgacagtacgattcccgaggccgattcggcgaactcctcctcctactcccaacactccaatccatcacctggcaaatgatcgaacaaatccaattcattaaactcttcggcatggcaaaaatcgacaacctcctacaagaaatgctcctctgaggactagttataagactgactagcccgatgggcctcccaacgggccctcctcccctccttgcaccgagattaataaaaaaaaaaaaaaaaaaaaaaaaaaaaaaaaaaaaaaaaaaaaaaaaaaaaaaaaaaaaaaaatgcatcccccccccccccccccccccccccccccccaaaggctcttttcagagccaccagaatt

SEQ ID NO: 2333 - RNA, 1345 nt, synthetic construct
  misc_feature 1..1345: note = mRNA i-3 (A64-N5-C30-hSL-N5) (opt11) from Homo sapiens__NP_000448.3__HNF4A(1-375)(K300R_K307R_K309R)
  source 1..1345: mol_type = other RNA
aggagaaagcttaccatgcgcctcagcaaaacactcgttgacatggatatggccgactactccgccgcactagatcccgcctataccacactcgaattcgaaaacgttcaagtactcaccatgggcaacgacacctccccatccgaaggcaccaacctcaacgccccaaactccctcggtgtatccgcactctgcgcaatctgcggcgaccgcgctacaggcaaacactacggcgcatcctcctgcgacggatgcaagggcttcttccgccgctcagtccggaaaaaccacatgtactcttgccgcttctcacgtcagtgcgtggtcgacaaagacaaacgcaaccaatgccgctactgccgactcaaaaaatgcttccgcgccggaatgaaaaaagaagcagtacaaaacgaacgagaccgcatcagcacccgtcgctccagctacgaagactcttcacttccctccatcaacgccctcctccaagccgaagtcctctcacgccaaatcacgtcccccgtctccggcataaacggcgacatccgagcaaaaaaaatcgcctccatcgcagacgtatgcgaatccatgaaagaacagctcctagtcctcgtcgaatgggccaaatacatcccagcattctgcgaacttcccctagacgaccaagtcgcccttctcagagcacacgctggggaacacctcctactaggcgcaacaaaacgctccatggtcttcaaagacgtactactcctcggcaacgactacatagtccctcgccactgccccgaactcgcagaaatgtcccgagtctcaatacgaatactagacgaactagtcctccctttccaagaactacaaatcgacgacaacgaatacgcttacctaaaagccatcattttcttcgacccagacgcccgcgggctctccgaccccggccgcatacgacgccttcgctcccaagtccaagtatcattagaagactacatcaacgaccgccaatacgactcccgcggccgcttcggagaactcctactcctcctacccacactccagtccatcacctggcaaatgatcgaacaaatccaattcattaaactattcggcatggccaaaatcgacaacctactccaagaaatgctcctctgaggactagttataagactgactagcccgatgggcctcccaacgggccctcctcccctccttgcaccgagattaataaaaaaaaaaaaaaaaaaaaaaaaaaaaaaaaaaaaaaaaaaaaaaaaaaaaaaaaaaaaaaaatgcatcccccccccccccccccccccccccccccccaaaggctcttttcagagccaccagaatt

SEQ ID NO: 2334 - RNA, 1345 nt, synthetic construct
  misc_feature 1..1345: note = mRNA i-3 (A64-N5-C30-hSL-N5) (opt11) from Homo sapiens__NP_000448.3__HNF4A(1-375)(K447R_K470R)
  source 1..1345: mol_type = other RNA
aggagaaagcttaccatgcgcctctccaaaaccctcgtcgatatggacatggccgactactccgccgcccttgaccccgcctacaccaccctagaattcgaaaacgtacaagtactcacaatgggcaacgacacctccccatccgaaggaacaaacctcaacgctcccaacagcttaggtgtctccgccctctgcgccatctgcggagatcgcgccaccggcaaacactacggcgcctcatcatgcgacggctgcaaaggcttcttccgacgctcagtccgcaaaaaccacatgtactcctgcagattctcaagacaatgtgtcgttgacaaagacaaacgaaaccaatgccgatactgccgccttaaaaaatgcttccgcgcaggaatgaaaaaagaagcagtccagaacgaacgcgaccgcatatccacccgccgttccagctacgaagacagctcactcccttcaatcaacgccctactacaagccgaagtcctctcccgacaaataacctcacccgtatccggcatcaacggagacatacgcgccaaaaaaatagcctcaatcgccgacgtctgcgaatccatgaaagaacaactcctagtcctagtcgaatgggccaaatacatacccgcattctgcgaactccccctagacgaccaggtagccctcctccgagcccacgccggcgagcacctcttacttggcgcaaccaaacgctccatggtattcaaggacgtcctactcctaggcaatgactacatcgtcccccgccactgccccgaactcgctgaaatgtcccgagtctcaatcagaattctagatgaactagtcctacccttccaagaactccaaatagacgacaacgaatacgcatacctcaaagccatcatattcttcgaccccgatgccaaaggtctaagcgaccccggaaaaataaagcgactacggtcgcaagtacaagtctccctggaagactacataaacgaccgccaatacgacagccgcggacgattcggagaactactcctactcctccccactctccaatccataacatggcaaatgatcgaacaaatccaattcatcaaactattcggcatggccaaaatcgacaatcttttacaggaaatgctactttgaggactagttataagactgactagcccgatgggcctcccaacgggccctcctcccctccttgcaccgagattaataaaaaaaaaaaaaaaaaaaaaaaaaaaaaaaaaaaaaaaaaaaaaaaaaaaaaaaaaaaaaaaatgcatcccccccccccccccccccccccccccccccaaaggctcttttcagagccaccagaatt

SEQ ID NO: 2335 - RNA, 1345 nt, synthetic construct
  misc_feature 1..1345: note = mRNA i-3 (A64-N5-C30-hSL-N5) (opt11) from Homo sapiens__NP_000448.3__HNF4A(1-375)(K458R)
  source 1..1345: mol_type = other RNA
aggagaaagcttaccatgcgactttccaaaaccctagtcgacatggacatggccgactactctgccgccctcgacccagcttacacaacattagagttcgaaaacgtccaagtcctgaccatgggaaacgacacaagcccatctgaaggaactaacctcaacgcccccaactccctaggagtatccgctctctgcgccatctgcggagaccgcgccaccgggaaacactacggcgcctcctcatgcgacggatgcaaaggcttcttccgccgctcagtccgcaaaaaccacatgtactcctgtcgattctcccgacaatgcgtcgtcgacaaagacaaacgcaaccaatgccgatactgccgcctcaagaaatgcttcagagccggcatgaagaaagaagccgtacaaaacgaacgagaccgcatctccacacgccgtagctcctacgaagactcaagcctcccctcaatcaacgccctacttcaggccgaagtcctctcccgacaaattaccagcccagtctccggcatcaacggcgacatccgagccaagaaaatcgcatcaatagccgatgtctgcgaaagcatgaaagaacaactccttgtcctcgtagaatgggccaaatacatccccgccttctgcgaactacccctcgatgaccaagtagccctactcagagcccacgccggcgaacacctcctcctcggcgccaccaaacgcagcatggtcttcaaagatgtactcctcctcggcaacgactacatcgtcccccgacactgccccgaacttgcagaaatgagcagagtctcaatccgcatcctcgacgaactcgtactaccattccaagaactccagatcgacgacaacgaatacgcctacctgaaagcaattatcttcttcgaccccgacgccaaaggcctctcagaccccggcaaaattaaacgcctcagaagtcaagtccaagtatccctcgaagactatatcaatgaccgccaatacgactcccgcgggcgcttcggcgaactcctcctccttctcccaaccctccaatcaatcacctggcaaatgatcgaacaaatccaattcataaaattattcggaatggccaaaatcgacaacctactccaggaaatgctcctctgaggactagttataagactgactagcccgatgggcctcccaacgggccctcctcccctccttgcaccgagattaataaaaaaaaaaaaaaaaaaaaaaaaaaaaaaaaaaaaaaaaaaaaaaaaaaaaaaaaaaaaaaaatgcatcccccccccccccccccccccccccccccccaaaggctcttttcagagccaccagaatt

SEQ ID NO: 2336 - RNA, 1345 nt, synthetic construct
  misc_feature 1..1345: note = mRNA i-3 (A64-N5-C30-hSL-N5) (opt11) from Homo sapiens__NP_000448.3__HNF4A(1-375)(K106R_K108R_K126R_K127R)
  source 1..1345: mol_type = other RNA
aggagaaagcttaccatgcgactgtccaaaaccttagtcgacatggacatggcagactactcagccgccctcgacccagcatatacaacactagagttcgaaaacgtccaggtccttaccatgggcaacgacacctcaccctccgaaggcaccaacctcaacgctcccaactccctaggcgtctcagccctctgcgcgatatgcggagaccgagccaccggtaaacactacggcgcttcgagctgcgacggctgcaaaggcttcttccgtcgctcagtccgcaaaaaccacatgtactcatgccgattctcacgccaatgcgtagtagaccgcgaccgccgcaaccagtgccgatactgccgtcttaagaaatgcttccgcgccggcatgcgcagagaagcagtccaaaacgaacgcgaccgcatctcaacccggcgcagctcttacgaagactcaagccttccctcaatcaacgccctactacaagccgaagtcctaagccgccaaatcacttcacccgtatccggaataaacggcgacatccgagccaagaaaatagcctccatcgccgacgtctgcgaaagcatgaaagaacaactcctcgtcttagtcgaatgggccaaatacatccccgcattctgcgaactcccactggacgaccaagtagccctgctccgagcccacgccggcgaacacctcctcctcggcgccacgaaacgaagcatggtcttcaaagacgtccttctccttggcaacgactacatcgtcccacgccactgcccagagctagccgaaatgtcacgagtctcaatccgcatactcgacgagctagtactcccattccaagaactacaaatagacgacaacgaatacgcctatctcaaagcgatcatattcttcgaccccgacgccaaaggcctctccgacccaggcaaaatcaaacgcctccgctcccaagtccaggtgtcccttgaagactacataaacgatcgccaatacgactcacgaggaagattcggcgaactccttcttcttctccccacactccagtcaatcacatggcaaatgatcgaacagatacaattcatcaaacttttcggcatggccaaaatagacaacctcctacaggaaatgctactatgaggactagttataagactgactagcccgatgggcctcccaacgggccctcctcccctccttgcaccgagattaataaaaaaaaaaaaaaaaaaaaaaaaaaaaaaaaaaaaaaaaaaaaaaaaaaaaaaaaaaaaaaaatgcatcccccccccccccccccccccccccccccccaaaggctcttttcagagccaccagaatt

SEQ ID NO: 2337 - RNA, 1345 nt, synthetic construct
  misc_feature 1..1345: note = mRNA i-3 (A64-N5-C30-hSL-N5) (opt11) from Homo sapiens__NP_000448.3__HNF4A(1-375)(E285Q)
  source 1..1345: mol_type = other RNA
aggagaaagcttaccatgcgactctccaaaacacttgtcgacatggacatggccgactactccgccgccctcgatcccgcatacaccaccctcgagttcgaaaacgtccaagtcctcaccatgggaaatgacacctcgccatccgaaggcacgaacctaaatgcccccaactcccttggcgtctccgcactctgcgccatctgcggcgaccgcgcaaccgggaaacactacggcgcctcatcctgcgacggctgcaaaggattcttccgtcgatctgtacgcaaaaaccacatgtactcttgccgattcagccgacaatgcgtcgttgacaaagacaaacgcaaccaatgccgctactgccgactcaaaaagtgcttccgcgcaggtatgaaaaaggaagcagtacaaaacgaacgagaccgcatttccacccgacgatcatcctatgaagactcctccctcccctcaatcaacgccctacttcaagccgaagtcctctcccgacaaataacctcccccgtcagcggcatcaacggcgacatcagagccaagaaaatcgcaagcatcgcagacgtatgcgagtcaatgaaagaacaactcctcgtcctagtcgaatgggcaaaatacatccccgccttctgcgaactcccactagacgaccaagtagccctcctccgcgcccacgccggagaacacctcctcctaggcgccactaaacgctccatggtcttcaaagacgtcctcctcctaggcaatgattacatcgttccccgacattgccccgaactagccgaaatgtcccgagtatccatccgcatcctcgacgaactcgtcctaccattccaagaactacaaatcgacgacaaccaatatgcatacctaaaagcaatcatcttcttcgaccccgacgccaaaggccttagcgacccaggcaaaatcaagcgactacgcagccaagtacaagtatccctagaagattacatcaacgatcgccaatacgactcccgcggccggttcggcgaactcctcctcctcctccccactctacaatccataacctggcaaatgatagaacaaatccaattcatcaagttattcggcatggccaaaatagacaacctcctccaagaaatgctactctgaggactagttataagactgactagcccgatgggcctcccaacgggccctcctcccctccttgcaccgagattaataaaaaaaaaaaaaaaaaaaaaaaaaaaaaaaaaaaaaaaaaaaaaaaaaaaaaaaaaaaaaaaatgcatcccccccccccccccccccccccccccccccaaaggctcttttcagagccaccagaatt

SEQ ID NO: 2338 - RNA, 1345 nt, synthetic construct
  misc_feature 1..1345: note = mRNA i-3 (A64-N5-C30-hSL-N5) (opt11) from Homo sapiens__NP_000448.3__HNF4A(1-375)(T166E)
  source 1..1345: mol_type = other RNA
aggagaaagcttaccatgcgcctatccaaaaccctcgtcgacatggacatggccgactactcagccgcactcgaccccgcatataccactctcgagttcgaaaacgtacaagtcctcaccatggggaacgacactagcccctccgaaggcaccaacctcaacgcaccaaactccttaggggtttcagccctatgcgccatatgcggcgatagagcaacaggaaaacactacggcgcctcatcatgcgatggctgcaaaggcttcttccgccgatccgtccgaaagaaccacatgtactcatgccgcttctcacgacaatgcgtcgtcgacaaagacaagcgaaaccaatgccgctactgccgcctaaagaaatgcttccgcgccggcatgaagaaagaagcagtacaaaacgaacgcgatcgcatctccacccgcagatcgtcctacgaagacagcagcctccccagcatcaacgccctcctccaagctgaagtcctctcccgccaaatcgaatcacccgtctcaggcatcaacggtgatatccgcgcaaagaaaatagcctccatcgccgacgtctgcgaatccatgaaagaacaactcctagtcctagtagaatgggccaaatacatcccagcattctgcgagctccccctggacgatcaagtcgctctcctccgcgcccacgccggcgaacacctcctactcggagcaaccaaacgcagtatggtattcaaagacgtcctactactcggtaacgactacatagtaccccgccactgcccagaactcgccgaaatgtcccgtgtctccatacgcatcctagacgaactcgtcctccccttccaagaactacaaatcgacgacaacgaatacgcctacctaaaagccatcatcttcttcgaccccgacgctaaaggcctctccgatccaggcaaaatcaaacgcctacgaagccaagtccaagtttccctcgaagactacatcaacgacagacaatacgactcccgcggccgcttcggcgaactactcctcctacttccaacactccaaagcataacgtggcaaatgatagaacaaatccaattcatcaaactcttcggcatggctaaaatagacaacctcctccaggaaatgctcctttgaggactagttataagactgactagcccgatgggcctcccaacgggccctcctcccctccttgcaccgagattaataaaaaaaaaaaaaaaaaaaaaaaaaaaaaaaaaaaaaaaaaaaaaaaaaaaaaaaaaaaaaaaatgcatcccccccccccccccccccccccccccccccaaaggctcttttcagagccaccagaatt

SEQ ID NO: 2339 - RNA, 1345 nt, synthetic construct
  misc_feature 1..1345: note = mRNA i-3 (A64-N5-C30-hSL-N5) (opt11) from Homo sapiens__NP_000448.3__HNF4A(1-375)(S148A)
  source 1..1345: mol_type = other RNA
aggagaaagcttaccatgcgactatctaaaacactcgtcgacatggacatggccgactactccgcggccctggaccccgcctacaccacgctagaattcgaaaacgtccaagtattaacaatgggaaacgacacctctccctccgaaggcaccaacctcaacgcacccaactccctcggagtctccgccctctgcgccatctgtggcgaccgagcaaccgggaaacattacggcgcatcctcctgcgacggctgcaaaggcttcttccgccgatccgtcagaaaaaaccacatgtactcgtgccgattctcacgccaatgcgtagttgacaaagacaaacgcaaccaatgccgctactgccgccttaaaaaatgcttccgcgccggaatgaaaaaagaggccgtacaaaatgaacgcgaccgaatcagcacacgccgctcttcatacgaagactccgcactcccatccatcaacgccctactacaagccgaagtcctcagccggcaaatcacatccccagtgtccggtattaacggagacatacgcgccaagaaaatagcctccatagcagacgtctgcgagtcaatgaaagaacaactcctcgtactcgtagaatgggcaaaatacatccccgccttctgcgaacttcccctcgacgaccaagtcgcactcctccgcgcccacgccggcgaacatctcctactaggagccaccaaacgttcaatggtcttcaaagacgtcctgctactcggcaacgactatatcgtccccagacactgccccgaactagcagaaatgtccagagtctcaatacgaatcctagacgaactcgtcctcccattccaagaactacaaatcgacgacaacgaatacgcctacctcaaagccatcatcttctttgaccccgacgccaaagggctctccgaccccggaaaaatcaaacgcctgcgctcacaagtccaagtatccctcgaagactacatcaacgaccgccagtacgacagccgaggacgtttcggcgaactcctactcctcctcccaacactccagtccatcacctggcaaatgatcgaacaaatccaattcataaaactcttcggcatggccaaaatcgacaacctactccaagaaatgctcctctgaggactagttataagactgactagcccgatgggcctcccaacgggccctcctcccctccttgcaccgagattaataaaaaaaaaaaaaaaaaaaaaaaaaaaaaaaaaaaaaaaaaaaaaaaaaaaaaaaaaaaaaaaatgcatcccccccccccccccccccccccccccccccaaaggctcttttcagagccaccagaatt

SEQ ID NO: 2340 - RNA, 1345 nt, synthetic construct
  misc_feature 1..1345: note = mRNA i-3 (A64-N5-C30-hSL-N5) (opt11) from Homo sapiens__NP_000448.3__HNF4A(1-375)(S148E)
  source 1..1345: mol_type = other RNA
aggagaaagcttaccatgcgcctctccaaaaccctcgtcgacatggacatggccgactactcagcagccctagacccagcctacacaacactcgagttcgaaaacgtacaagtactaaccatgggcaacgacacctcaccctctgaaggaaccaacctcaacgcacccaactccctcggcgtatccgccctgtgcgccatctgcggtgatcgcgccaccggcaaacactacggggcctcaagctgcgacggctgcaaaggcttcttccgccgctctgtcaggaaaaaccacatgtacagctgccgattctcccgccaatgcgtagtcgataaagacaaacggaaccaatgccgatactgtcgcctcaagaaatgcttccgagcaggcatgaaaaaggaagcagtccaaaacgaacgggaccgaatctccactcgccgctcatcctacgaagacagcgaactaccctccattaatgccctcctccaagcagaagtactttcacgacaaataacctcccccgtctcaggcatcaacggcgacatcagagccaagaaaatcgcctccatcgccgacgtatgcgaatccatgaaagaacaactcctggtgctagtcgaatgggcaaaatatatccccgctttctgcgaactccccctagacgaccaagtcgcactcctccgagcccacgccggagagcacctcttactaggcgccaccaaacgaagcatggtcttcaaagacgtcctcctcctcggaaatgactacatcgtccccagacactgccccgaactcgccgaaatgtcacgagtctccatcagaatcctcgacgaactggtcctaccatttcaagaactacaaatcgatgacaacgaatacgcatacctcaaagcgatcatcttcttcgaccccgacgccaaagggctctccgacccaggcaaaatcaaacgcctcagaagccaggtccaagtctccctagaagactacataaacgaccgccagtatgactcccgcggcagattcggcgaactcctccttctacttccgaccctccaatccatcacctggcaaatgatcgaacaaatccaattcatcaaactcttcggcatggccaaaattgacaacctcctacaagaaatgctcctatgaggactagttataagactgactagcccgatgggcctcccaacgggccctcctcccctccttgcaccgagattaataaaaaaaaaaaaaaaaaaaaaaaaaaaaaaaaaaaaaaaaaaaaaaaaaaaaaaaaaaaaaaaatgcatcccccccccccccccccccccccccccccccaaaggctcttttcagagccaccagaatt

SEQ ID NO: 2341 - RNA, 1345 nt, synthetic construct
  misc_feature 1..1345: note = mRNA i-3 (A64-N5-C30-hSL-N5) (opt11) from Homo sapiens__NP_000448.3__HNF4A(1-375)(S183A)
  source 1..1345: mol_type = other RNA
aggagaaagcttaccatgcgactcagcaaaacactagttgacatggacatggccgactacagcgcagccctggatccagcctacaccaccctcgaattcgaaaacgtacaagtcctcaccatgggtaacgacacctccccctcggagggaacaaacctcaacgcccccaactcactcggcgtcagcgcactctgcgccatatgcggcgaccgcgccaccggaaaacactacggagcctcaagctgcgacggctgcaaaggattcttcagacgcagcgtccggaaaaaccacatgtactcctgccgcttctcccgacaatgcgtcgtcgacaaagacaaacgaaaccaatgccgatactgccgcctaaaaaaatgcttccgcgctggaatgaaaaaagaagcagtacaaaacgaacgcgaccgcatatccaccagaagatcctcctacgaagactccagcctaccctcaatcaacgctctcctccaagcagaagtcctcagccgccaaatcacctcacccgtcagcggcatcaacggggacatccgcgccaaaaaaatcgccgcgattgccgacgtgtgcgaatccatgaaagagcaactcctcgtcctcgtagaatgggccaaatacatccccgccttctgcgaactacccctagacgaccaagtagcccttctacgcgcccacgccggggaacacctcctactcggcgcaaccaaaaggtcaatggtcttcaaagacgtcctcctactcggaaacgactacatcgtgcccaggcactgtccggaactcgccgaaatgtccagagtctcaatccggatactagacgaactcgtactccccttccaagaactacaaatcgacgacaacgaatacgcatacctaaaagccatcatcttcttcgacccagacgctaaaggactaagcgacccaggcaagatcaaacgactacgttcccaagtacaagtatccctggaagactacatcaacgaccgccaatacgactcacgaggtcgcttcggcgaactgctcctactcctacccaccctccaatccatcacatggcaaatgatcgaacaaatccaattcatcaaactcttcggtatggctaaaatcgacaacctactccaagaaatgcttctctgaggactagttataagactgactagcccgatgggcctcccaacgggccctcctcccctccttgcaccgagattaataaaaaaaaaaaaaaaaaaaaaaaaaaaaaaaaaaaaaaaaaaaaaaaaaaaaaaaaaaaaaaaatgcatcccccccccccccccccccccccccccccccaaaggctcttttcagagccaccagaatt

SEQ ID NO: 2342 - RNA, 1345 nt, synthetic construct
  misc_feature 1..1345: note = mRNA i-3 (A64-N5-C30-hSL-N5) (opt11) from Homo sapiens__NP_000448.3__HNF4A(1-375)(S183E)
  source 1..1345: mol_type = other RNA
aggagaaagcttaccatgcgcctctccaaaaccctcgtcgacatggacatggccgactactccgccgccctcgacccagcctacacaacactagagttcgaaaacgtccaagtcctaaccatgggaaacgatacctccccctcggaagggaccaacctcaacgccccaaattcacttggagtctccgccctatgcgccatatgtggagaccgcgctaccggaaaacactatggcgcgtcatcctgcgacggatgcaaaggcttcttcagacgctcggtccgcaaaaaccacatgtactcctgccgattctcccgccaatgcgtcgtcgacaaagacaaaagaaaccaatgcaggtactgccgtctgaagaaatgcttccgcgccggaatgaagaaagaagccgtccaaaacgaacgcgaccgaatcagcaccagacgcagctcctacgaagactcctcactcccatcaatcaacgccctactccaagccgaagtcctctcccgccaaatcacctccccagtaagcggaatcaacggcgacatccgcgccaagaaaatagccgaaatagccgacgtctgcgaatcaatgaaagaacagctactcgtcctcgtcgaatgggccaaatacatacccgccttctgcgaactccctctcgacgaccaagtcgcactactcagagcccacgccggagaacacctactcctcggagccacgaaacgatccatggtattcaaagacgtactcctccttggtaacgattacatcgtcccaagacactgcccagaactcgccgaaatgtccagagtatcaatccgaatcctcgacgagctagtactcccctttcaggaactacaaatagatgacaacgaatacgcatacctaaaagccatcatcttctttgaccccgacgccaaaggcctctccgacccaggcaaaatcaaacgcctacgctcccaagttcaagtatccctcgaagactacatcaatgaccgccaatacgacagccgaggacgcttcggcgaactactcctgctactccccaccctacaatccatcacttggcaaatgatcgaacaaatccaattcatcaaactcttcggcatggccaaaatcgacaaccttctccaggaaatgctcctctgaggactagttataagactgactagcccgatgggcctcccaacgggccctcctcccctccttgcaccgagattaataaaaaaaaaaaaaaaaaaaaaaaaaaaaaaaaaaaaaaaaaaaaaaaaaaaaaaaaaaaaaaaatgcatcccccccccccccccccccccccccccccccaaaggctcttttcagagccaccagaatt

SEQ ID NO: 2343 - RNA, 1345 nt, synthetic construct
  misc_feature 1..1345: note = mRNA i-3 (A64-N5-C30-hSL-N5) (opt11) from Homo sapiens__NP_000448.3__HNF4A(1-375)(S461A)
  source 1..1345: mol_type = other RNA
aggagaaagcttaccatgcgactctccaaaaccctcgtcgacatggacatggcagattactccgctgccctcgacccggcctacaccacactagagttcgaaaacgttcaagtattaaccatgggcaacgacacatcccccagcgaaggcaccaatctaaacgcacccaactccctcggggtctcagcactatgcgccatctgcggagatcgcgctactggcaaacactacggagcctcctcctgcgacggctgcaaaggcttcttccgaagatcagtccgcaaaaaccacatgtactcatgccgcttctctcgccaatgcgtcgtcgacaaagacaaacgaaaccagtgccgctactgccgcctaaagaaatgctttcgcgccggcatgaagaaagaagcagtacaaaacgaacgcgaccgcatctccacccgccggtcaagctacgaggactcatcactcccatcaatcaacgctctcctccaagcagaagtccttagccgacaaatcacatcccccgtttccggaatcaacggcgacatccgagcaaagaaaatcgcctctatcgcagacgtatgcgaatccatgaaagaacaactcctagtcctagtcgaatgggcaaaatatatacccgccttctgcgaactgcccctagacgatcaagtcgcactactccgagcccacgccggcgagcacctcctgctcggcgccacaaaacgatccatggtattcaaagacgtactactcctcgggaacgactacatcgtaccccgccactgccccgagctcgccgaaatgtcacgtgtctcaattcgcatactagacgagctagtcctccccttccaagaactacaaatagacgacaacgaatacgcatacctaaaagccatcatcttcttcgaccccgatgccaaaggactatccgaccccggcaaaatcaaacgccttcgttcacaagtgcaagtctcgctcgaagactacatcaacgaccgccaatacgactccagaggccgattcggagaactcctactcctcctccccaccctccaatccatcacatggcaaatgatagaacaaatccaattcataaaactcttcggcatggccaaaatcgacaacctgctccaagaaatgctcctctgaggactagttataagactgactagcccgatgggcctcccaacgggccctcctcccctccttgcaccgagattaataaaaaaaaaaaaaaaaaaaaaaaaaaaaaaaaaaaaaaaaaaaaaaaaaaaaaaaaaaaaaaaatgcatcccccccccccccccccccccccccccccccaaaggctcttttcagagccaccagaatt

SEQ ID NO: 2344 - RNA, 1345 nt, synthetic construct
  misc_feature 1..1345: note = mRNA i-3 (A64-N5-C30-hSL-N5) (opt11) from Homo sapiens__NP_000448.3__HNF4A(1-375)(S461E)
  source 1..1345: mol_type = other RNA
aggagaaagcttaccatgcgactgtccaaaaccctagtcgacatggacatggcagactacagcgcagcactcgatcccgcctacaccaccctagagttcgaaaacgtacaagtactaacaatgggaaacgacacctctccatccgaaggcacaaacctcaacgcacccaactccctcggcgtctccgcactttgcgcaatctgcggcgaccgagccaccggcaaacattacggagcctccagctgcgacggctgcaagggattcttccgccgcagcgtccgcaaaaaccacatgtactcgtgccgcttctcacgacagtgcgtagtcgacaaagacaaacgcaaccaatgcagatactgcagacttaaaaagtgcttccgcgcgggaatgaagaaagaagccgtccaaaacgaacgagatcgcatctccacccgccggagctcatacgaagactcatcactaccatcaataaacgccctcctacaagccgaagtcctatcccgccaaataacctcccccgtctctggcatcaacggagacatccgcgccaagaaaatcgcaagcatcgccgacgtctgcgaatcaatgaaagagcaactactcgtcctagtagaatgggcaaaatacataccagccttctgcgaactccccctagacgaccaagtcgcgctactccgagcccacgcaggagaacaccttctcctaggcgcaaccaaacgctccatggtatttaaagacgtcctactcctgggcaacgactacatagtcccccgccattgcccagaactcgccgaaatgtcacgcgtatcgatacgcatcctcgacgagctagtcctccccttccaagaactacaaatagacgacaacgaatacgcctacttgaaagccataatcttcttcgacccagacgccaaaggcctctccgacccaggcaaaataaaacgcctacgcagccaggtacaggtcagcctcgaagactatatcaacgaccgtcaatacgactcccgaggccgattcggagaactcctcctactcctaccaaccctccaatcaatcacctggcaaatgatcgaacaaatacaattcatcaaactgttcggcatggcaaaaatagacaacctacttcaagaaatgctcttatgaggactagttataagactgactagcccgatgggcctcccaacgggccctcctcccctccttgcaccgagattaataaaaaaaaaaaaaaaaaaaaaaaaaaaaaaaaaaaaaaaaaaaaaaaaaaaaaaaaaaaaaaaatgcatcccccccccccccccccccccccccccccccaaaggctcttttcagagccaccagaatt

SEQ ID NO: 2345 - RNA, 1345 nt, synthetic construct
  misc_feature 1..1345: note = mRNA i-3 (A64-N5-C30-hSL-N5) (opt11) from Homo sapiens__NP_000448.3__HNF4A(1-375)(S142A_S143A_S313A)
  source 1..1345: mol_type = other RNA
aggagaaagcttaccatgcgcctctccaaaacccttgtcgacatggacatggcagactactccgccgcacttgacccggcttacacaaccctagaattcgaaaacgtccaagtactcaccatgggaaatgacacctcaccctctgaagggaccaacctaaacgcaccaaactcactcggagtcagcgccctatgcgccatctgcggcgaccgcgcaaccggaaaacactacggcgcctcctcttgcgacggctgcaaaggcttcttccgaagatccgtcagaaaaaaccatatgtacagctgccgcttctcacgacaatgcgtcgtcgacaaagacaaaagaaaccaatgcagatattgccgactcaaaaaatgctttcgagccggcatgaaaaaggaagcagtccaaaacgaacgcgaccgcatttccacccgcagagccgcctacgaagacagctccctccccagcatcaacgcactactccaagctgaagtattatcccgccaaatcacctccccagtctccggcatcaacggcgacatacgggccaaaaaaatcgcctcaatcgccgacgtctgcgaatccatgaaagaacaactcctagtcctagtcgaatgggccaaatacatacccgcattctgcgaactacctttagacgaccaagtcgccctcttacgagcccacgccggcgaacatctactgcttggcgccaccaaacgatccatggttttcaaagacgtactactcctcggaaacgactacatcgtcccacgtcactgcccagaactagccgaaatgtcccgcgtctcaatccgcatcctcgacgaactcgtactcccctttcaagaactacaaatcgacgacaacgagtacgcctacctcaaagccatcatcttcttcgaccccgacgcaaaaggcctctccgaccccggcaaaattaaacgacttagagcacaagtacaagtcagcctagaagactacataaatgaccgccaatacgacagcagaggccgcttcggcgagctcctactcctcctccccaccctacaatcaattacctggcagatgatcgaacaaatacaattcataaaacttttcggaatggccaaaatcgacaacctactccaagaaatgctcctctgaggactagttataagactgactagcccgatgggcctcccaacgggccctcctcccctccttgcaccgagattaataaaaaaaaaaaaaaaaaaaaaaaaaaaaaaaaaaaaaaaaaaaaaaaaaaaaaaaaaaaaaaaatgcatcccccccccccccccccccccccccccccccaaaggctcttttcagagccaccagaatt

SEQ ID NO: 2346 - RNA, 1345 nt, synthetic construct
  misc_feature 1..1345: note = mRNA i-3 (A64-N5-C30-hSL-N5) (opt11) from Homo sapiens__NP_000448.3__HNF4A(1-375)(S142A_S143A_S313A_K458R)
  source 1..1345: mol_type = other RNA
aggagaaagcttaccatgcgcctcagcaaaacactagtagacatggacatggcagactactccgccgccctagacccagcctacacaaccctcgaattcgaaaacgtccaagtcctaacgatgggcaacgacacatccccctccgagggcaccaacctcaacgcccccaactctctcggcgtctctgccctctgcgccatctgcggcgaccgcgccaccggaaaacactacggagccagctcatgcgacggctgcaaaggattctttcgacgctccgttagaaaaaaccacatgtactcatgccgtttctctcgccaatgcgtcgtcgacaaagacaaacgtaaccagtgccgctactgccgcctaaaaaaatgcttccgcgcaggcatgaaaaaagaagccgtccaaaacgagagagaccgcatatccacccgccgagccgcctacgaagactcttcactaccgtccataaacgccctcctacaagccgaagtcctatcacgacaaataacctcccccgtcagcggcatcaacggcgacatcagagccaagaaaatagcctctatagcagacgtatgcgaatcaatgaaagaacaactcctagtactagtcgaatgggccaaatacattcccgccttctgcgaactgccactcgacgaccaagtggccctactccgtgcccacgccggcgaacatttactcctcggcgccaccaaacgatcaatggtattcaaagacgtactactcctcggcaacgactacatagtcccccgccactgccccgaactcgccgaaatgtcacgtgtctctatccggatcctagacgaactcgtcctccccttccaagaactccaaatcgacgacaacgaatacgcctacctaaaagccatcatattcttcgatcccgacgccaagggtctctccgacccaggaaaaatcaaacgcctacgcgcacaagtacaagtatccctcgaagactacatcaacgaccgacaatacgacagccgcggccgattcggcgaactactccttctcctccccacactacaatcaataacctggcaaatgatcgaacaaatccagttcataaaactctttggcatggccaaaatagacaacctcctccaggaaatgctcctctgaggactagttataagactgactagcccgatgggcctcccaacgggccctcctcccctccttgcaccgagattaataaaaaaaaaaaaaaaaaaaaaaaaaaaaaaaaaaaaaaaaaaaaaaaaaaaaaaaaaaaaaaaatgcatcccccccccccccccccccccccccccccccaaaggctcttttcagagccaccagaatt

SEQ ID NO: 2347 - RNA, 1345 nt, synthetic construct
  misc_feature 1..1345: note = mRNA i-3 (A64-N5-C30-hSL-N5) (opt11) from Homo sapiens__NP_000448.3__HNF4A(1-375)(S142A_S143A_S167A_S313A_ S378A_T429A_T432A_S436A_K458R)
  source 1..1345: mol_type = other RNA
aggagaaagcttaccatgcgcctaagcaaaaccctagtcgacatggacatggcagactactccgccgccctcgaccccgcctacaccaccctagaattcgaaaacgttcaggtcctcaccatggggaacgacacatcgccaagcgaaggaaccaaccttaacgccccaaactccctgggcgtctccgccctttgcgccatctgcggagaccgcgccacaggcaaacactatggcgcctccagctgcgacggctgcaaaggcttcttccgacgctcagtacggaaaaaccacatgtactcatgccgcttctcacgccaatgcgtcgtcgacaaagacaaacgcaaccaatgccgctactgccgactcaaaaaatgcttccgcgcaggcatgaaaaaggaagccgtccaaaacgaacgcgaccgtatctcaacccgacgtgctgcatacgaagactcatccctcccctccatcaacgccctactccaggccgaagtcctgagtcgacaaatcacagcccccgtctcaggcatcaacggcgacatccgagcaaagaaaatcgcctctatagccgacgtctgcgaatcaatgaaagaacaactcctcgtcctcgtagaatgggccaaatacatccccgcattctgcgaactacccctcgacgaccaagtcgccctactaagagcccacgccggcgaacaccttctgcttggcgccacaaaacgcagcatggtattcaaagacgtactactcctcggcaacgactacatcgtaccccgacactgccccgaactcgccgaaatgtcccgcgtctccatacgcatcctagacgaactggtcctccccttccaggaactccaaatcgacgacaacgaatacgcctacctcaaagccatcatattcttcgacccagacgcaaaaggcctcagcgaccccggcaaaatcaaaagactccgcgcccaagtacaagtcagcctagaagattacataaacgaccgccaatacgatagcagaggccgattcggcgaactcctcctactcctacccacactacaatcaatcacctggcaaatgatagaacaaatccaattcatcaagctattcggcatggcaaaaattgacaacctactacaagaaatgctcctctgaggactagttataagactgactagcccgatgggcctcccaacgggccctcctcccctccttgcaccgagattaataaaaaaaaaaaaaaaaaaaaaaaaaaaaaaaaaaaaaaaaaaaaaaaaaaaaaaaaaaaaaaaatgcatcccccccccccccccccccccccccccccccaaaggctcttttcagagccaccagaatt

SEQ ID NO: 2348 - RNA, 1345 nt, synthetic construct
  misc_feature 1..1345: note = mRNA i-3 (A64-N5-C30-hSL-N5) (opt11) from Homo sapiens__NP_000448.3__HNF4A(1-375)(S142A_S143A_S148A_S167A_ S313A_S378A_T429A_T432A_S436A_K458R)
  source 1..1345: mol_type = other RNA
aggagaaagcttaccatgcgcctttccaaaaccctagtcgacatggacatggccgactactcagccgcactagaccccgcctatactaccctagagttcgaaaacgtccaagtcctcaccatgggcaatgacacctccccatccgaaggcaccaacctcaacgcccccaactcactaggagtctccgccctttgcgccatctgcggcgaccgcgccacaggaaaacactacggcgcgtcaagctgcgatggatgcaaaggtttcttccgtcgttccgtccgcaaaaaccacatgtattcctgccgattctcgcgccaatgcgtcgtcgacaaagacaaacgaaaccaatgccgatactgccgcctcaaaaagtgcttccgcgccggcatgaagaaagaagccgtccaaaacgaacgcgacagaatatcaacccgacgagccgcctacgaagactcagccctcccctcaataaatgccctcctccaagcagaggtcctttccagacagatcaccgcccccgtctccggcatcaacggcgacatcagagccaagaaaatcgcctccatcgccgacgtctgcgaatccatgaaagaacaacttctagttctcgtcgaatgggccaaatacatccccgccttctgcgaactaccccttgacgaccaagtcgctctcctgcgcgcccacgccggcgaacacctccttctcggagcaactaaacgctccatggtgttcaaagacgtcctcctcctcggcaacgactacatcgtcccccgacactgccccgaactagctgaaatgtcacgcgtcagcatcagaatcctcgacgaactcgtcctccccttccaagaactccaaatcgatgacaacgagtacgcctatcttaaagccatcatattcttcgacccagacgcaaaaggtctctccgaccccggcaaaataaaacgactccgcgcccaagtccaagtttccctcgaagactacatcaacgaccgacaatacgattcccgcggccgattcggcgaactcctcctactccttcccaccctccagtccataacatggcaaatgatcgaacaaatccaattcataaaactcttcggcatggccaaaatagacaacctcctccaagagatgctactctgaggactagttataagactgactagcccgatgggcctcccaacgggccctcctcccctccttgcaccgagattaataaaaaaaaaaaaaaaaaaaaaaaaaaaaaaaaaaaaaaaaaaaaaaaaaaaaaaaaaaaaaaaatgcatcccccccccccccccccccccccccccccccaaaggctcttttcagagccaccagaatt

SEQ ID NO: 2349 - RNA, 1345 nt, synthetic construct
  misc_feature 1..1345: note = mRNA i-3 (A64-N5-C30-hSL-N5) (opt11) from Homo sapiens__NP_000448.3__HNF4A(1-375)(K106R_K108R_K126R_K127R_ S142A_S143A_S148A_S167A_S313A_S378A_T429A_T432A_S436A_K458R )
  source 1..1345: mol_type = other RNA
aggagaaagcttaccatgcgcctctccaagaccctcgtcgacatggacatggcagactacagcgcagccctagaccccgcctacaccacccttgagttcgaaaacgtccaagtcctaacaatgggaaacgacacctcaccatccgaaggcacaaacctaaacgcccccaactcacttggcgtttcggccctctgcgccatatgcggagaccgcgccaccggcaaacactacggagcatcctcctgcgacggctgtaaaggcttcttcagacgatccgtacgcaaaaaccacatgtactcctgccgcttcagcagacaatgcgtcgtcgaccgcgaccgccgcaaccaatgccgctactgccgcctaaagaaatgcttccgcgcaggcatgcgccgagaagcagtccaaaacgaacgagaccgaataagcacccgcagagccgcgtacgaagactccgccctcccatcaatcaacgcacttctacaagccgaagtactctcccgccaaataaccgccccagtatccggaatcaacggcgacatccgcgccaagaaaatcgcttccatagcagacgtctgtgaatccatgaaagagcaactcctcgtcctcgtcgagtgggccaaatacatccccgccttctgcgagctacccctcgacgaccaagtcgccctcctccgagcccacgctggcgaacacctcctactcggcgccaccaaaagatccatggttttcaaagacgtactccttctgggaaacgactacatcgtacccaggcactgccccgagctagccgaaatgtccagagtctcaatccgcatactcgacgagctcgtccttccctttcaagaacttcaaatagacgacaacgaatacgcatacctgaaagccatcatcttcttcgaccccgacgccaaaggactatccgacccaggcaaaatcaaacgcctacgagcacaagtacaagtctccctagaagactacataaacgaccgccaatacgactcgagaggccgcttcggcgaactactccttctcctccctaccctacaaagcatcacctggcaaatgatcgaacaaatccaattcataaaactcttcggaatggccaaaatcgacaatttactccaggaaatgttactctgaggactagttataagactgactagcccgatgggcctcccaacgggccctcctcccctccttgcaccgagattaataaaaaaaaaaaaaaaaaaaaaaaaaaaaaaaaaaaaaaaaaaaaaaaaaaaaaaaaaaaaaaaatgcatcccccccccccccccccccccccccccccccaaaggctcttttcagagccaccagaatt

SEQ ID NO: 2350 - RNA, 1345 nt, synthetic construct
  misc_feature 1..1345: note = mRNA i-3 (A64-N5-C30-hSL-N5) (opt11) from Homo sapiens__NP_000448.3__HNF4A(1-375)(S142A_S143A_S148A_T166A_ S167A_S313A_S378A_T429A_T432A_S436A_K458R)
  source 1..1345: mol_type = other RNA
aggagaaagcttaccatgcgcctctccaaaacactcgtcgatatggacatggccgactacagcgctgcccttgaccccgcgtacaccaccctagaattcgaaaacgtccaagttctcaccatgggcaacgacacctccccctcagaaggaaccaacctaaatgcccccaactctctcggcgtctccgctctctgcgccatctgcggcgaccgagccaccggaaaacactacggagcctcctcctgcgacgggtgcaaaggcttcttcagaagatccgtccgcaaaaaccacatgtactcatgccggttctcccgacaatgcgtagtcgacaaagacaaacgcaaccaatgccgctactgccgcctcaaaaaatgctttcgcgccggcatgaagaaagaagcagtacaaaacgaaagagacagaatctcaactcgcagagccgcctacgaagactcggcgctcccctctatcaacgccctgcttcaagccgaagtcctctcacgccaaatcgccgcacccgtatccggaatcaacggcgatatccgcgcaaaaaaaatcgcatccatcgccgacgtctgcgaatccatgaaggaacaactgctagtcctcgtagaatgggccaaatacatccctgccttctgtgaactccccctagacgatcaagtcgccctcctacgcgcccacgccggcgagcacctactacttggagccaccaaacgttctatggtcttcaaagacgtactcttactcggcaacgactacatagtcccccgccactgcccagaactggccgaaatgagccgcgtctcaatacgaatcctagacgaactcgtgctaccattccaagaactacaaatcgacgacaacgaatacgcatacctaaaagctattatcttcttcgaccccgacgccaaaggcctatccgaccccggcaaaataaaacgcctgcgagcccaagtacaagtaagcctcgaagactacatcaacgaccgacagtacgactcccgaggccgcttcggcgaactcctacttctcctccccaccctacaatccatcacctggcaaatgatagaacaaatccaattcatcaaactcttcggaatggcaaaaatcgataacctgctccaagaaatgctcctctgaggactagttataagactgactagcccgatgggcctcccaacgggccctcctcccctccttgcaccgagattaataaaaaaaaaaaaaaaaaaaaaaaaaaaaaaaaaaaaaaaaaaaaaaaaaaaaaaaaaaaaaaaatgcatcccccccccccccccccccccccccccccccaaaggctcttttcagagccaccagaatt

SEQ ID NO: 2351 - RNA, 1345 nt, synthetic construct
  misc_feature 1..1345: note = mRNA i-3 (A64-N5-C30-hSL-N5) (opt11) from Homo sapiens__NP_000448.3__HNF4A(1-375)(S87A_S142A_S143A_S148A_T 166A_S167A_S313A_S378A_T429A_T432A_S436A_K458R)
  source 1..1345: mol_type = other RNA
aggagaaagcttaccatgcgcctctccaaaaccctcgtcgacatggacatggcagactactctgccgccctcgaccccgcctacacaaccctcgagttcgaaaacgtacaagtcttaaccatgggaaacgacacctcaccatcagaaggtacaaacctcaacgcccctaactcactcggcgtatctgcactatgcgcaatatgcggagaccgtgccactggcaaacactacggagcctcatcatgtgacggctgcaaaggcttcttccgacgtgcagtccgcaaaaaccatatgtactcctgccgattctcccgacaatgcgtcgtagacaaagacaaacgaaaccaatgccggtactgccgcctaaagaaatgcttccgcgccgggatgaagaaagaagccgtacaaaacgaacgagatcgcatctccacacgccgagccgcctacgaagactccgccctcccctccatcaacgccctactccaggccgaagtactgtcgcgccaaatcgccgcgccagtttccggaataaacggcgacatccgcgccaagaaaatcgcctcaatcgcagacgtatgcgaatccatgaaagaacaactcctcgtcctcgtagaatgggccaaatacatccccgcattctgcgaactacccctagatgaccaagtagcactattacgcgctcacgccggagaacacctcctcctcggagccactaaacgctccatggtcttcaaagacgtcctcctcctcggcaacgactacatcgtaccccgccactgccccgaactcgcagaaatgtcaagggtctccataagaatcctagacgagctagtcctaccgttccaagaactccaaatcgacgacaatgaatacgcatacctcaaagccataatcttcttcgacccagacgccaaaggcctctcagaccccggcaaaatcaaacgactacgcgcccaggtccaagtctccctagaagactacatcaacgacagacaatacgacagccgagggagattcggcgaactcctcctactcctccccaccctccaatcaataacatggcaaatgatcgaacaaatccagttcatcaaactcttcggcatggccaaaatcgacaacctactccaagaaatgctcctctgaggactagttataagactgactagcccgatgggcctcccaacgggccctcctcccctccttgcaccgagattaataaaaaaaaaaaaaaaaaaaaaaaaaaaaaaaaaaaaaaaaaaaaaaaaaaaaaaaaaaaaaaaatgcatcccccccccccccccccccccccccccccccaaaggctcttttcagagccaccagaatt

SEQ ID NO: 2352 - RNA, 1345 nt, synthetic construct
  misc_feature 1..1345: note = mRNA i-3 (A64-N5-C30-hSL-N5) (opt11) from Homo sapiens__NP_000448.3__HNF4A(1-375)(S87A_K106R_K108R_K126R_K 127R_S142A_S143A_S148A_T166A_S167A_S313A_S378A_T429A_T432A_ S436A_K458R)
  source 1..1345: mol_type = other RNA
aggagaaagcttaccatgcgcctcagcaagacactcgtagacatggacatggccgactactccgccgcacttgaccccgcctataccaccctcgaattcgaaaacgtacaagtactcacaatgggaaacgacacctccccatccgaaggtaccaacttaaacgcccccaactccttaggcgtctccgccctctgcgcaatctgcggcgaccgagctacaggtaaacactacggcgcatcaagctgtgacggctgcaaaggcttcttccgacgagccgtccgcaaaaaccacatgtactcatgcagattctcccgacaatgcgtcgtggacagagaccgacgaaaccaatgccgctactgccgcctcaaaaaatgcttccgcgccggcatgcgacgtgaagcagtccaaaacgaacgtgatcgcataagcactagacgcgccgcctacgaagactccgccctgccctccatcaacgccctactacaagccgaagtccttagcagacaaatagccgccccagtctccggaataaacggagacatacgtgccaaaaaaatagcatccatcgccgacgtatgcgaaagcatgaaagaacaactccttgtcctagtagaatgggctaaatacatccccgcattctgcgaactccccctagacgaccaagtagccctcctccgagcacacgccggcgaacacctcctactcggcgccacaaaaagaagcatggtcttcaaagacgtcctacttctaggaaacgactacatcgtccctcgccactgccccgaactcgccgagatgagtagagtctctatcagaatcctcgacgaactcgtactcccattccaagaactacaaatagacgacaacgaatacgcctacctcaaagcgatcatcttcttcgaccccgacgccaaaggcctatcagaccccggcaaaatcaaaagactccgcgcccaagtacaagtctccctagaagactacatcaacgaccgccagtacgacagccgaggccgattcggcgaactacttctactcctcccaacactacaatcaatcacctggcagatgatcgaacaaatccaattcatcaaactattcggcatggccaaaatagacaaccttctacaagaaatgctcctatgaggactagttataagactgactagcccgatgggcctcccaacgggccctcctcccctccttgcaccgagattaataaaaaaaaaaaaaaaaaaaaaaaaaaaaaaaaaaaaaaaaaaaaaaaaaaaaaaaaaaaaaaaatgcatcccccccccccccccccccccccccccccccaaaggctcttttcagagccaccagaatt

SEQ ID NO: 2353 - RNA, 1345 nt, synthetic construct
  misc_feature 1..1345: note = mRNA i-3 (A64-N5-C30-hSL-N5) (opt11) from Homo sapiens__NP_000448.3__HNF4A(1-375)(S87A_K106R_K108R_K126R_K 127R)
  source 1..1345: mol_type = other RNA
aggagaaagcttaccatgcgcctctccaaaacactcgtcgacatggacatggccgactactcagcagccctagaccccgcttacaccaccctcgagttcgaaaacgtacaagtcctcaccatgggcaacgacaccagcccatctgaaggtaccaacctcaacgcaccaaactccctcggcgtttcagctctatgcgccatatgcggagaccgcgccaccggcaaacactacggagcctcctcttgcgacggctgcaaaggcttcttccgcagagccgtacgcaaaaaccacatgtacagctgtagattttcccgccaatgcgtcgtcgaccgcgaccgccgcaaccagtgcagatattgccgactcaagaaatgcttccgcgcaggaatgcgccgcgaagccgtacaaaacgaacgcgaccgcatctccacacgccgctcatcttacgaagactcctccctaccaagcatcaacgcactacttcaagcagaagtcctatcccgacaaatcacctcccccgtctcaggcataaacggcgacataagggcaaagaaaatcgcctccatagccgacgtatgcgaatcaatgaaagaacaactcctagtcctcgtcgaatgggccaaatacatccccgccttctgcgaactgcccctcgacgaccaagtagcacttctccgcgcccacgccggcgaacacctcctactcggcgccaccaaacgttccatggtcttcaaagacgtcctcctacttggtaacgactacatcgtaccccgccactgccctgaactcgcagaaatgtcccgcgtctcaataagaatcctcgacgagctagttctccccttccaagaactacaaatcgacgacaacgaatacgcctacctcaaagccatcatatttttcgaccccgacgccaaaggcctttccgaccccggcaaaataaaacgcctccgctctcaagtccaggtcagcctcgaagactacatcaacgaccgccaatacgactctcgtggccgcttcggagaactactactactcctccccacactacaatccatcacctggcaaatgatcgaacaaatccaattcatcaaactcttcggcatggccaaaattgacaacctactccaagaaatgctcctatgaggactagttataagactgactagcccgatgggcctcccaacgggccctcctcccctccttgcaccgagattaataaaaaaaaaaaaaaaaaaaaaaaaaaaaaaaaaaaaaaaaaaaaaaaaaaaaaaaaaaaaaaaatgcatcccccccccccccccccccccccccccccccaaaggctcttttcagagccaccagaatt

SEQ ID NO: 2354 - RNA, 1345 nt, synthetic construct
  misc_feature 1..1345: note = mRNA i-3 (A64-N5-C30-hSL-N5) (opt11) from Homo sapiens__NP_000448.3__HNF4A(1-375)(S87A_K106R_K108R_K126R_K 127R_S142A_S143A_S148A_T166A_S167A_S313A_S378A_T429A_T432A_ S436A_K458R_S461A)
  source 1..1345: mol_type = other RNA
aggagaaagcttaccatgcgcctaagcaaaaccctagtagacatggacatggcagactactcagcagcactagaccccgcctacaccaccctcgaatttgaaaacgttcaagtcctaacaatgggcaacgacacctctcccagcgaaggcacaaacctcaacgcccccaactcactcggggtctccgccctctgcgccatatgcggtgaccgtgcaaccggcaaacactacggcgcctcatcctgcgacggctgcaaaggattcttccgacgcgccgtacgcaaaaaccacatgtactcctgcagattctcacgccaatgcgtcgtggaccgagaccgccgcaaccaatgccgttactgccgcctcaagaaatgcttccgagccggaatgcgaagagaagccgtacaaaacgaacgcgaccgcatctccacacgacgagcagcctacgaagactccgccctaccctccataaacgcactcctccaagccgaagtactctcccgacaaatagccgcaccagtctccggcataaacggagacatccgagcaaagaaaatagcctcaatcgccgacgtatgcgaatcaatgaaagaacaacttctcgtcctcgtcgaatgggccaaatatatacccgccttctgcgaactccccctagacgaccaagtggcccttcttcgcgcccacgccggcgaacacctcctactcggagccaccaaacgctccatggtcttcaaagacgtactactcctcggtaacgactacatcgtcccacgacactgccccgaactagccgaaatgtcacgcgtctccatccgcatcctagacgaactcgtactcccattccaagaactccaaatcgacgacaacgaatacgcatacctcaaagccatcatcttcttcgacccagacgccaaaggcctatccgacccaggaaaaataaaacgcttacgcgcacaagtccaagtctccctcgaagactacatcaacgaccgtcagtacgacagccgggggagattcggcgaactgctactactacttcccaccctccaatccatcacctggcaaatgatagaacaaatacaattcatcaaactattcggcatggccaaaatcgacaacctcctacaagaaatgctactctgaggactagttataagactgactagcccgatgggcctcccaacgggccctcctcccctccttgcaccgagattaataaaaaaaaaaaaaaaaaaaaaaaaaaaaaaaaaaaaaaaaaaaaaaaaaaaaaaaaaaaaaaaatgcatcccccccccccccccccccccccccccccccaaaggctcttttcagagccaccagaatt

SEQ ID NO: 2355 - RNA, 1345 nt, synthetic construct
  misc_feature 1..1345: note = mRNA i-3 (A64-N5-C30-hSL-N5) (opt11) from Homo sapiens__NP_000448.3__HNF4A(1-375)(S87A_K106R_K108R_K126R_K 127R_S142A_S143A_S148A_T166A_S167A_S313A_S378A_T429A_T432A_ S436A_K458R_S461E)
  source 1..1345: mol_type = other RNA
aggagaaagcttaccatgcgcctctccaaaaccctcgtcgacatggacatggcagactacagcgccgccctcgaccccgcatacaccaccctagagttcgaaaacgtccaagtcctaacgatgggaaacgacacctcaccatccgaaggcacaaacctcaacgccccgaactccctaggagtctcagccctctgcgccatatgcggcgaccgagccacaggcaaacactacggcgcctcatcgtgcgacggatgcaaaggattcttccgacgagctgtccgcaaaaaccacatgtactcctgccgcttctcccgccaatgcgtcgttgaccgcgaccggcgcaaccaatgcagatactgccgactcaagaaatgcttccgcgcaggcatgcgacgagaagccgtccaaaacgaacgcgaccgcatctcaaccagacgcgccgcctacgaagactctgcactccccagcatcaacgccctcctgcaagccgaagtattatcccgacagatcgccgcccccgtatccggcatcaacggcgacatccgcgccaagaaaatcgcctccatcgcagatgtctgcgaaagcatgaaagaacaattactcgtactcgtcgaatgggcaaaatacatccccgcattctgcgaactccccctcgacgaccaagtcgccctattacgcgcccacgcaggagaacaccttctcttaggcgcaacgaaacgcagcatggtcttcaaagacgtcctactcctcggcaacgactacatcgtcccccgtcactgccccgaactcgccgaaatgtcccgcgtatccatccgcatcctcgacgaactcgtcctaccattccaagaactccaaatcgacgacaacgaatacgcctacctcaaagcaatcatcttcttcgaccccgacgcaaaaggactatccgaccccggcaaaatcaaacgcctccgcgcacaagtccaagtctccctcgaagactacataaacgacagacaatacgacagccgaggcagattcggagaacttctcctcctcctccccacactacaatccatcacatggcaaatgatcgaacaaatacaattcatcaaactcttcggcatggcaaaaatcgacaacctgctccaagaaatgctactttgaggactagttataagactgactagcccgatgggcctcccaacgggccctcctcccctccttgcaccgagattaataaaaaaaaaaaaaaaaaaaaaaaaaaaaaaaaaaaaaaaaaaaaaaaaaaaaaaaaaaaaaaaatgcatcccccccccccccccccccccccccccccccaaaggctcttttcagagccaccagaatt

SEQ ID NO: 2356 - RNA, 1345 nt, synthetic construct
  misc_feature 1..1345: note = mRNA i-3 (A64-N5-C30-hSL-N5) (opt11) from Homo sapiens__NP_000448.3__HNF4A(1-375)(S87A_K106R_K108R_K126R_K 127R_S142A_S143A_S148E_T166A_S167E_S313A_S378E_T429E_T432E_ S436E_K458R_S461E)
  source 1..1345: mol_type = other RNA
aggagaaagcttaccatgcgactaagcaagaccctagtagacatggacatggccgactactccgccgccctggatcccgcctacaccacactagaatttgaaaacgtacaagtcctcaccatgggcaacgacacaagccccagcgaagggaccaacctcaacgcgccaaacagcctaggcgtctcagccctatgtgccatctgcggagacagagccaccggcaaacactacggagcctcatcctgcgacggatgcaaaggcttcttccgacgcgccgtccgcaaaaaccacatgtactcctgccgtttctcccgacaatgcgtcgtagaccgcgaccgccgcaaccaatgccgctattgccgcctaaagaaatgcttccgcgccggcatgcgacgcgaagccgtccagaacgagcgcgaccgaatctccacacgtcgcgctgcctacgaagactctgaactcccctcgataaacgcactgctccaagccgaagttctatcacgccaaatagccgaacccgtcagcggcatcaacggcgacatccgcgccaagaaaatcgcatcaatcgcagatgtatgcgaatccatgaaagaacagctcctcgtcctcgtagaatgggctaaatacatccccgccttctgtgagctccccctcgacgaccaggtagccctgctaagagcccatgccggcgaacacctcctccttggcgccactaaacgatcaatggtattcaaagacgtcctcctactaggaaacgactacatagtccccagacactgccccgaacttgcagaaatgagccgagtctccatccgcatcttagacgaactcgtcctcccattccaagaactccagatcgacgacaacgaatacgcataccttaaagcaataatcttcttcgaccccgacgccaaaggactatcagaccccgggaaaattaaaagactccgagcacaagtccaagtctcactcgaagactacatcaacgatcgccaatacgactcacgcggacgatttggcgaactcctcctgttactccccaccctacaaagcatcacctggcaaatgatcgaacaaatccagttcataaaactcttcggaatggccaaaatcgacaacctgctccaagaaatgctcctctgaggactagttataagactgactagcccgatgggcctcccaacgggccctcctcccctccttgcaccgagattaataaaaaaaaaaaaaaaaaaaaaaaaaaaaaaaaaaaaaaaaaaaaaaaaaaaaaaaaaaaaaaaatgcatcccccccccccccccccccccccccccccccaaaggctcttttcagagccaccagaatt

SEQ ID NO: 2357 - RNA, 1345 nt, synthetic construct
  misc_feature 1..1345: note = mRNA i-3 (A64-N5-C30-hSL-N5) (opt11) from Homo sapiens__NP_000448.3__HNF4A(1-375)(S87A_K106R_K108R_K126R_K 127R_S142A_S143A_S148A_T166A_S167A_K179R_K180R_S313A_S378A_ T429A_T432A_S436A_K458R_S461E)
  source 1..1345: mol_type = other RNA
aggagaaagcttaccatgcggctctccaaaactctcgtcgacatggacatggcagactacagcgccgccctcgacccagcctacacaaccctcgaattcgaaaacgttcaagtcctcaccatgggtaacgacacatccccctcagaaggaaccaacctcaacgcacccaactccctcggagtttccgccctatgcgcaatctgcggcgatcgagccaccggcaaacactacggcgcctcgtcttgcgacggctgcaaaggcttcttccgccgcgccgtcagaaaaaaccacatgtactcatgccggttctccagacaatgcgtcgtcgaccgagaccgccgaaaccaatgcaggtactgccgcctgaaaaaatgcttccgcgcaggcatgcgccgcgaagccgtccaaaacgagcgagaccgaatctcaacgcgacgcgccgcctacgaagactcagccctcccatccatcaacgcactactacaagccgaagtactatcccgacaaatagccgcaccagtctcaggaatcaacggagacatacgcgccagacgaatagcctccattgccgacgtatgcgaaagcatgaaagaacaactactcgttctcgtcgagtgggccaaatacattcccgctttctgcgaattacccctagacgaccaagtcgccctcctcagagcccacgcaggcgaacacctcctactcggagccaccaaacgatccatggtcttcaaagacgtcttactcctcggcaacgactacatcgtccccagacactgtcccgaactcgccgaaatgtcccgcgtctccatccgaatcctcgacgaactcgtactccccttccaggaactccaaatcgacgacaacgaatacgcctacctaaaagccatcatttttttcgaccctgatgccaaaggcctctctgaccccggcaaaatcaaacgactacgcgcccaagtccaagtctcactcgaagactacatcaacgatcgccagtacgactcccgaggccgcttcggtgaactcctcctcctcctgcccaccctacaatcaataacttggcaaatgatcgaacaaatacaattcatcaaactcttcggcatggccaaaattgacaacctcctacaagaaatgcttctctgaggactagttataagactgactagcccgatgggcctcccaacgggccctcctcccctccttgcaccgagattaataaaaaaaaaaaaaaaaaaaaaaaaaaaaaaaaaaaaaaaaaaaaaaaaaaaaaaaaaaaaaaaatgcatcccccccccccccccccccccccccccccccaaaggctcttttcagagccaccagaatt

SEQ ID NO: 2358 - RNA, 1345 nt, synthetic construct
  misc_feature 1..1345: note = mRNA i-3 (A64-N5-C30-hSL-N5) (opt11) from Homo sapiens__NP_000448.3__HNF4A(1-375)(S87A_K106R_K108R_K126R_K 127R_S142A_S143A_S148A_T166A_S167A_K300R_K307R_K309R_S313A_ S378A_T429A_T432A_S436A_K458R_S461E)
  source 1..1345: mol_type = other RNA
aggagaaagcttaccatgcgcctatccaaaacactcgttgacatggacatggcagactactccgcagccctcgaccccgcctacaccaccctcgaattcgaaaacgtccaagtcctaacaatgggaaacgacacatccccatcagaagggaccaacctaaacgcccccaactccctcggcgtctccgcactctgcgcaatctgcggcgacagagccaccggaaaacactacggcgcctcctcatgcgacggatgcaaaggattcttccgaagagccgtccgaaaaaaccacatgtactcatgccgattctcgcgccaatgcgtcgtcgatcgcgacagacgcaaccaatgccgatactgcagacttaaaaaatgcttccgtgctggcatgcgacgcgaagctgtccaaaatgagcgcgaccgcatatctacccgaagagccgcctacgaagactcagcactaccctcaatcaacgccctactccaggccgaagtcctatcccgacaaatcgcagcccccgtgtccggcataaacggtgacatccgcgccaaaaaaatcgcctcaatagccgacgtctgtgaaagcatgaaagaacaactactagttctcgtcgaatgggcaaaatacatacccgcattctgcgaactcccactagacgaccaagtggccctcctccgagcccatgcaggagaacacctcctcctcggggccacaaaacgctccatggtgttcaaagacgtactactcctaggaaacgactacatcgtaccccgccactgccccgaactagctgaaatgtcacgcgtctcgatccgcatcctcgacgaactcgtcctaccattccaagaactgcaaatcgacgacaacgagtacgcgtacctaaaagcaataatattcttcgaccccgacgcccgcggcctctccgaccccggaagaatcaggcgactccgcgcccaagtccaagtaagcctcgaagactacatcaacgaccgccaatacgactcacgaggcagattcggcgaactactcctcctcctcccaacacttcaatcaatcacctggcaaatgatcgaacaaatccaattcatcaagctattcggcatggccaaaatcgacaacctcctacaagaaatgctactgtgaggactagttataagactgactagcccgatgggcctcccaacgggccctcctcccctccttgcaccgagattaataaaaaaaaaaaaaaaaaaaaaaaaaaaaaaaaaaaaaaaaaaaaaaaaaaaaaaaaaaaaaaaatgcatcccccccccccccccccccccccccccccccaaaggctcttttcagagccaccagaatt

SEQ ID NO: 2359 - RNA, 1345 nt, synthetic construct
  misc_feature 1..1345: note = mRNA i-3 (A64-N5-C30-hSL-N5) (opt11) from Homo sapiens__NP_000448.3__HNF4A(1-375)(S87A_K106R_K108R_K126R_K 127R_S142A_S143A_S148A_T166A_S167A_S313A_S378A_T429A_T432A_ S436A_K447R_K458R_S461E_K470R)
  source 1..1345: mol_type = other RNA
aggagaaagcttaccatgagactatcaaaaaccctggtggacatggacatggccgactacagcgctgccctcgaccccgcctataccacactagagttcgaaaacgtccaagtcctaaccatgggcaacgacacatccccctccgaaggaacaaacctaaacgcccccaactccctcggtgtgtccgccttatgcgccatctgcggagaccgcgccacaggcaaacactacggcgcatcaagctgcgacggctgtaaaggattcttccgccgcgccgtgcgcaaaaaccacatgtactcatgccgcttctcccgccagtgcgtcgtcgaccgcgaccgccgcaaccaatgccgatactgccgcctcaagaaatgcttccgagccggcatgcgacgagaagcagtccaaaacgaacgcgatcgcatctccacaagacgcgcagcatatgaagactcggccctcccatcaatcaacgccctcctacaagccgaagtactatcccgccaaatcgccgcccccgtctccggcatcaacggcgacatacgcgctaagaaaatcgcctcaatagcagacgtctgcgaatcaatgaaagaacaactgctcgtactcgtggaatgggccaaatacatcccagcgttctgcgaactccccctcgacgaccaagtagcattactacgcgcccacgccggcgaacaccttctactaggagcaaccaaacgatccatggtcttcaaagacgtcctgctcctaggaaatgactacatcgtcccccgccattgccctgaactagcagaaatgtcgcgcgtctcaatccgaatcctcgacgaactcgttctaccattccaagaactacaaatcgacgacaacgaatacgcctaccttaaagcaataatcttcttcgacccagatgcaaaaggcctctccgaccccggcaaaatcaaacgcctacgagcacaagtccaagtctctctcgaagactacatcaacgaccgccaatacgactcacgtggccgcttcggcgaactcctcctcctcctacccacccttcaatcaatcacatggcaaatgatcgaacaaatacaattcataaaactattcggcatggccaaaatcgacaacctcctccaagaaatgctactctgaggactagttataagactgactagcccgatgggcctcccaacgggccctcctcccctccttgcaccgagattaataaaaaaaaaaaaaaaaaaaaaaaaaaaaaaaaaaaaaaaaaaaaaaaaaaaaaaaaaaaaaaaatgcatcccccccccccccccccccccccccccccccaaaggctcttttcagagccaccagaatt

SEQ ID NO: 2360 - RNA, 1345 nt, synthetic construct
  misc_feature 1..1345: note = mRNA i-3 (A64-N5-C30-hSL-N5) (opt11) from Homo sapiens__NP_000448.3__HNF4A(1-375)(S87A_K106R_K108R_K126R_K 127R_S142A_S143A_S148A_T166A_S167A_K179R_K180R_K234R_K300R_ K307R_K309R_S313A_S378A_T429A_T432A_S436A_K447R_K458R_S461E _K470R)
  source 1..1345: mol_type = other RNA
aggagaaagcttaccatgcgcctttccaaaaccctagtcgacatggacatggccgactactccgcagccctagacccagcgtacaccaccctcgagttcgaaaacgtccaagtactcacaatgggcaacgacacctccccctcggaaggcaccaacctcaacgcccctaactcactcggcgtttccgctctctgcgccatctgcggagaccgagcgacaggaaaacactacggagcctcctcatgcgatggctgcaaaggcttcttccgccgcgcagtacgcaaaaaccacatgtactcatgcagattctcaagacaatgcgtcgtcgaccgcgaccgacgcaaccaatgccgatactgccgcctcaagaaatgcttccgcgccggcatgcgccgagaagcagtccaaaacgaacgcgacagaataagtactcgccgagccgcatacgaagacagcgccctaccatccatcaacgcactcctccaagccgaagtcctatcacgacaaatcgcagctcccgtttccggcatcaacggcgatatccgcgcaagacgaatagcaagcattgcagacgtctgcgaatcaatgaaagaacaactcctcgtcctcgtcgaatgggccaaatacatccccgcattctgcgaactccccctcgacgaccaagtcgccctactaagagcccacgccggcgaacacctcctcctaggcgctacccgacgctccatggtattcaaagacgtcctactcctaggtaacgactacatcgtaccccgccactgccccgaactcgcagaaatgagcagagtttcaatccgcatcctagacgagctagttctccccttccaagaacttcaaatcgacgataacgaatacgcctacctaaaagccatcatcttcttcgacccagacgcccgaggcctctccgacccaggacgaataagaagactacgcgcccaagtacaagtttccctcgaagattacatcaacgacagacagtacgactccagaggccgattcggtgaactcctcctgctactccccaccctccaaagcataacatggcaaatgatcgaacaaatccaattcatcaaactcttcggcatggccaaaatcgacaacctcctacaagaaatgctactgtgaggactagttataagactgactagcccgatgggcctcccaacgggccctcctcccctccttgcaccgagattaataaaaaaaaaaaaaaaaaaaaaaaaaaaaaaaaaaaaaaaaaaaaaaaaaaaaaaaaaaaaaaaatgcatcccccccccccccccccccccccccccccccaaaggctcttttcagagccaccagaatt

SEQ ID NO: 2361 - RNA, 1345 nt, synthetic construct
  misc_feature 1..1345: note = mRNA i-3 (A64-N5-C30-hSL-N5) (opt11) from Homo sapiens__NP_000448.3__HNF4A(1-375)(S87A_S95A_S99A_K106R_K10 8R_K126R_K127R_S142A_S143A_S148A_T166A_S167A_S313A_S378A_T4 29A_T432A_S436A_K458R_S461E)
  source 1..1345: mol_type = other RNA
aggagaaagcttaccatgagactaagcaaaaccctcgtcgacatggacatggccgactacagcgccgccctcgaccccgcatacaccaccctcgaatttgaaaacgtacaagtcctcaccatgggtaacgatacctccccatccgaaggaaccaacctcaacgccccaaactcactaggcgtctccgccctctgcgccatctgcggcgaccgcgccaccggcaaacactacggcgcctcttcctgtgacggatgcaaaggctttttccggcgcgcagtccgcaaaaaccacatgtacgcctgccgtttcgcccgacagtgcgtagtcgaccgcgaccgtcgaaaccaatgcagatactgccgactaaagaaatgcttccgcgccggcatgcgcagagaagcagtacaaaacgaacgagaccgcatctcaacccgccgtgcggcatatgaagactcggccctaccatccatcaacgccctgctccaagccgaagtattatcccgccaaatcgcagcccccgttagtggaatcaacggcgacatccgagccaagaaaatcgcctccatagccgacgtctgcgagagcatgaaagaacaactcctcgtactcgtagaatgggcaaaatacatacccgccttctgcgaactccccctagacgaccaagtagccctactccgagcccacgccggtgaacatctactcctcggagccaccaaaagatccatggtattcaaagacgtcctcctcctaggcaacgactacatcgtcccccgccactgccccgaactcgccgaaatgtcccgcgtctcaatccgcatactggacgagctcgtactccccttccaagaactacaaatcgacgacaacgaatacgcttacctaaaagcaatcatcttcttcgacccagacgcgaaaggcctatcagatcccggcaaaatcaaacgcctacgcgcacaagtacaagtatcccttgaagactacataaacgaccgacaatacgacagccggggccgtttcggagaacttctcctcctcctacccacactccaatccattacctggcaaatgatagaacaaatccaattcatcaaactcttcggaatggccaagatcgacaacctcctccaagaaatgctactctgaggactagttataagactgactagcccgatgggcctcccaacgggccctcctcccctccttgcaccgagattaataaaaaaaaaaaaaaaaaaaaaaaaaaaaaaaaaaaaaaaaaaaaaaaaaaaaaaaaaaaaaaaatgcatcccccccccccccccccccccccccccccccaaaggctcttttcagagccaccagaatt

SEQ ID NO: 2362 - RNA, 1345 nt, synthetic construct
  misc_feature 1..1345: note = mRNA i-3 (A64-N5-C30-hSL-N5) (opt11) from Homo sapiens__NP_000448.3__HNF4A(1-375)(S87A_K106R_K108R_K126R_K 127R_S138A_T139A_S142A_S143A_S148A_T166A_S167A_S313A_S378A_ T429A_T432A_S436A_K458R_S461E)
  source 1..1345: mol_type = other RNA
aggagaaagcttaccatgcgcctctccaaaaccctagtagatatggacatggcagactatagcgcagcactcgaccccgcctacactacccttgaattcgaaaacgtccaagtcctcacaatgggaaacgacacctctccttccgaaggcaccaacctcaacgccccaaactccctcggcgtctccgccttgtgcgccatctgcggcgaccgagccacaggaaaacactacggagcctcctcctgcgatggctgcaaaggcttcttccgccgcgcagtaagaaaaaaccacatgtactcatgccgcttctcccgccagtgcgtcgtagaccgcgaccgccgcaaccaatgccgctactgccgcctcaaaaaatgcttccgagccggaatgcgaagagaagccgtccaaaacgaacgcgaccgcatcgccgcccgacgggccgcatacgaggatagcgccctcccaagcatcaatgctcttctccaagccgaggtcctttcccgtcaaatcgcagcccccgtatccggaatcaacggagacatacgcgccaaaaaaatcgcaagcatcgccgacgtctgcgaaagcatgaaagaacaactcctcgtactcgtcgaatgggccaaatacataccagccttctgcgaactacccctcgacgatcaagtagccctcctacgagcccacgccggagaacacctcctacttggcgccacaaaacgaagcatggttttcaaggacgtcctcctcctcggcaacgactacatagtaccccgccactgccccgaactagcagaaatgtcccgggtatcgatccgcatactagacgaactagtcctcccctttcaagaactccaaatcgatgacaacgaatacgcttacctgaaagcaataatcttcttcgaccctgacgccaaaggcctctccgacccaggaaaaataaaacgcctccgcgcccaagtacaagtctccctagaagactacataaacgaccgacaatacgactcccgaggacgattcggcgaactactattattactacctacactacaatccatcacctggcaaatgatcgaacaaatccaattcatcaaactattcggcatggccaaaatcgacaacctactccaagaaatgctcctatgaggactagttataagactgactagcccgatgggcctcccaacgggccctcctcccctccttgcaccgagattaataaaaaaaaaaaaaaaaaaaaaaaaaaaaaaaaaaaaaaaaaaaaaaaaaaaaaaaaaaaaaaaatgcatcccccccccccccccccccccccccccccccaaaggctcttttcagagccaccagaatt

SEQ ID NO: 2363 - RNA, 1345 nt, synthetic construct
  misc_feature 1..1345: note = mRNA i-3 (A64-N5-C30-hSL-N5) (opt11) from Homo sapiens__NP_000448.3__HNF4A(1-375)(S87A_S95A_S99A_K106R_K10 8R_K126R_K127R_S138A_T139A_S142A_S143A_S148A_T166A_S167A_S3 13A_S378A_T429A_T432A_S436A_K458R_S461E)
  source 1..1345: mol_type = other RNA
aggagaaagcttaccatgcgactaagcaaaaccctagtcgacatggacatggcagactatagcgccgcactcgacccagcctacacaacgctcgagttcgaaaacgttcaagtccttaccatgggcaacgacacctcccccagcgaaggcaccaacctaaacgcccctaactcactcggagtgtccgcactatgcgcaatctgcggggaccgcgccaccggcaaacactacggcgcctccagctgcgacggctgcaaaggcttcttccgccgagccgtccgcaagaaccacatgtacgcctgccgcttcgctcgccaatgcgtcgtagaccgagaccgcagaaaccaatgcagatactgcagactcaagaaatgcttccgcgccggcatgcgacgcgaagccgtacaaaacgaacgcgaccgcatcgccgctcgtcgagcagcctatgaagactcagcccttccctcaataaacgcactactccaagccgaagtcctcagccgacaaatcgccgccccagtctcaggcatcaacggcgacatccgcgccaagaaaatagcctccatcgcggacgtctgcgagtccatgaaagaacaactcctagttctggtcgaatgggctaaatacatccccgcattctgcgaactcccactcgacgaccaagtagccctactccgagcccacgcaggagaacacctactcctaggagccacaaaacgttccatggtatttaaagacgtcctcctactaggcaacgactacatcgtcccccgccactgccccgaactcgccgaaatgtcccgcgtctccatccgcatcctagacgagctcgtactcccattccaagaactccaaatagacgacaacgaatacgcctacctaaaagccatcatcttcttcgatccagacgcaaaaggcctctcagacccaggcaaaatcaaaagacttagagcccaagtccaagtatcactcgaagactacatcaacgaccgacaatacgactcccgcggaaggttcggcgaactcctcctcctcctccccacactacaatccatcacctggcaaatgatagaacaaattcaattcataaaactattcggcatggccaagatagacaacctcctccaagaaatgctcctctgaggactagttataagactgactagcccgatgggcctcccaacgggccctcctcccctccttgcaccgagattaataaaaaaaaaaaaaaaaaaaaaaaaaaaaaaaaaaaaaaaaaaaaaaaaaaaaaaaaaaaaaaaatgcatcccccccccccccccccccccccccccccccaaaggctcttttcagagccaccagaatt

SEQ ID NO: 2364 - RNA, 1345 nt, synthetic construct
  misc_feature 1..1345: note = mRNA i-3 (A64-N5-C30-hSL-N5) (opt28) from Homo sapiens__NP_000448.3__HNF4A(1-375)
  source 1..1345: mol_type = other RNA
aggagaaagcttaccatgcggctgagcaagaccctggtggacatggatatggcagactactccgccgctctggatccagcatatacaactctggagttcgaaaacgtccaggtgctgaccatgggaaatgacacatctcccagtgagggcactaacctgaatgcccctaactcactgggggtgagcgctctgtgcgcaatctgcggagacagggccaccggcaaacactacggggcttcctcttgtgatggatgcaagggctttttcagacgcagcgtccggaaaaatcatatgtacagttgccgattttcaaggcagtgcgtggtggacaaggacaagagaaaccagtgccgctattgtcggctgaaaaagtgcttcagggcaggaatgaaaaaggaagccgtccagaatgagagagatcgaatttccacacggcgcagctcttacgaagacagctccctgccaagtatcaacgctctgctgcaggcagaggtgctgtcaaggcagatcactagccccgtgtctgggattaacggcgatatcagagccaagaaaattgcttccatcgcagacgtctgcgaaagcatgaaggagcagctgctggtgctggtggagtgggccaaatacatccctgcattttgcgaactgccactggacgatcaggtcgctctgctgcgggcccacgcaggagagcatctgctgctgggcgctaccaagcgaagtatggtgttcaaggacgtgctgctgctggggaatgactatattgtccccaggcactgccctgaactggccgagatgtcaagagtgtctatccgcatcctggatgaactggtgctgccattccaggagctgcagattgacgataacgaatacgcatacctgaaagctatcatctttttcgaccccgacgccaagggactgtccgatcctggcaaaattaagcggctgaggagccaggtccaggtgagtctggaggactatatcaatgacagacagtacgatagccgagggcggtttggagaactgctgctgctgctgccaacactgcagtccattacctggcagatgatcgagcagatccagttcattaaactgttcggcatggcaaagatcgacaacctgctgcaggagatgctgctgtgaggactagttataagactgactagcccgatgggcctcccaacgggccctcctcccctccttgcaccgagattaataaaaaaaaaaaaaaaaaaaaaaaaaaaaaaaaaaaaaaaaaaaaaaaaaaaaaaaaaaaaaaaatgcatcccccccccccccccccccccccccccccccaaaggctcttttcagagccaccagaatt

SEQ ID NO: 2365 - RNA, 1345 nt, synthetic construct
  misc_feature 1..1345: note = mRNA i-3 (A64-N5-C30-hSL-N5) (opt28) from Homo sapiens__NP_000448.3__HNF4A(1-375)(S313A)
  source 1..1345: mol_type = other RNA
aggagaaagcttaccatgcggctgagcaagaccctggtggacatggatatggcagactactccgccgctctggatccagcatatacaactctggagttcgaaaacgtccaggtgctgaccatgggaaatgacacatctccctcagagggcactaacctgaatgcccctaacagtctgggggtgagcgctctgtgcgcaatctgcggagacagggccaccggcaaacactacggggcttcctcttgtgatggatgcaagggctttttcagacgcagcgtccggaaaaatcatatgtactcatgccgatttagtaggcagtgcgtggtggacaaggacaagagaaaccagtgccgctattgtcggctgaaaaagtgcttcagggcaggaatgaaaaaggaagccgtccagaatgagagagatcgaatttccacacggcgcagctcttacgaagacagctccctgccatcaatcaacgctctgctgcaggcagaggtgctgagtaggcagatcactagccccgtgtctgggattaacggcgatatcagagccaagaaaattgcatccatcgctgacgtctgcgaaagcatgaaggagcagctgctggtgctggtggagtgggccaaatacatccctgcattttgcgaactgccactggacgatcaggtcgctctgctgcgggcccacgcaggagagcatctgctgctgggcgctaccaagcgatcaatggtgttcaaggacgtgctgctgctggggaatgactatattgtccccaggcactgccctgaactggccgagatgagtagagtgtctatccgcatcctggatgaactggtgctgccattccaggagctgcagattgacgataacgaatacgcatacctgaaagctatcatctttttcgaccccgacgccaagggactgtccgatcctggcaaaattaagcggctgagggcacaggtccaggtgagcctggaggactatatcaatgacagacagtacgatagccgagggcggtttggagaactgctgctgctgctgccaacactgcagtccattacctggcagatgatcgagcagatccagttcattaaactgttcggcatggccaagatcgacaacctgctgcaggagatgctgctgtgaggactagttataagactgactagcccgatgggcctcccaacgggccctcctcccctccttgcaccgagattaataaaaaaaaaaaaaaaaaaaaaaaaaaaaaaaaaaaaaaaaaaaaaaaaaaaaaaaaaaaaaaaatgcatcccccccccccccccccccccccccccccccaaaggctcttttcagagccaccagaatt

SEQ ID NO: 2366 - RNA, 1345 nt, synthetic construct
  misc_feature 1..1345: note = mRNA i-3 (A64-N5-C30-hSL-N5) (opt28) from Homo sapiens__NP_000448.3__HNF4A(1-375)(S313E)
  source 1..1345: mol_type = other RNA
aggagaaagcttaccatgcggctgagcaagaccctggtggacatggatatggcagactactccgccgctctggatccagcatatacaactctggagttcgaaaacgtccaggtgctgaccatgggaaatgacacatctccctcagagggcactaacctgaatgcccctaacagtctgggggtgagcgctctgtgcgcaatctgcggagacagggccaccggcaaacactacggggcttcctcttgtgatggatgcaagggctttttcagacgcagcgtccggaaaaatcatatgtactcatgccgatttagtaggcagtgcgtggtggacaaggacaagagaaaccagtgccgctattgtcggctgaaaaagtgcttcagggcaggaatgaaaaaggaagccgtccagaatgagagagatcgaatttccacacggcgcagctcttacgaagacagctccctgccatcaatcaacgctctgctgcaggcagaggtgctgagtaggcagatcactagccccgtgtctgggattaacggcgatatcagagccaagaaaattgcatccatcgctgacgtctgcgaaagcatgaaggagcagctgctggtgctggtggagtgggccaaatacatccctgcattttgcgaactgccactggacgatcaggtcgctctgctgcgggcccacgcaggagagcatctgctgctgggcgctaccaagcgatcaatggtgttcaaggacgtgctgctgctggggaatgactatattgtccccaggcactgccctgaactggccgagatgagtagagtgtctatccgcatcctggatgaactggtgctgccattccaggagctgcagattgacgataacgaatacgcatacctgaaagctatcatctttttcgaccccgacgccaagggactgtccgatcctggcaaaattaagcggctgagggagcaggtccaggtgagcctggaagactatatcaatgacagacagtacgatagccgagggcggtttggagagctgctgctgctgctgccaacactgcagtccattacctggcagatgatcgagcagatccagttcattaaactgttcggcatggcaaagatcgacaacctgctgcaggaaatgctgctgtgaggactagttataagactgactagcccgatgggcctcccaacgggccctcctcccctccttgcaccgagattaataaaaaaaaaaaaaaaaaaaaaaaaaaaaaaaaaaaaaaaaaaaaaaaaaaaaaaaaaaaaaaaatgcatcccccccccccccccccccccccccccccccaaaggctcttttcagagccaccagaatt

SEQ ID NO: 2367 - RNA, 1345 nt, synthetic construct
  misc_feature 1..1345: note = mRNA i-3 (A64-N5-C30-hSL-N5) (opt28) from Homo sapiens__NP_000448.3__HNF4A(1-375)(S142A_S143A)
  source 1..1345: mol_type = other RNA
aggagaaagcttaccatgcggctgagcaagaccctggtggacatggatatggcagactactccgccgctctggatccagcatatacaactctggagttcgaaaacgtccaggtgctgaccatgggaaatgacacatctccctcagagggcactaacctgaatgcccctaacagtctgggggtgagcgctctgtgcgcaatctgcggagacagggccaccggcaaacactacggggcttcctcttgtgatggatgcaagggctttttcagacgcagcgtccggaaaaatcatatgtactcatgccgatttagtaggcagtgcgtggtggacaaggacaagagaaaccagtgccgctattgtcggctgaaaaagtgcttcagggcaggaatgaaaaaggaagccgtccagaatgagagagatcgaatttccacacggcgcgctgcatacgaagacagctctctgccaagcatcaacgccctgctgcaggcagaggtgctgtccaggcagatcacttcacccgtgagtgggattaacggcgatatcagagctaagaaaattgccagcatcgcagacgtctgcgaatctatgaaggagcagctgctggtgctggtggagtgggctaaatacatccctgccttttgcgaactgccactggacgatcaggtcgcactgctgcgggctcacgccggagagcatctgctgctgggcgcaaccaagcgatccatggtgttcaaggacgtgctgctgctggggaatgactatattgtccccaggcactgccctgaactggctgagatgagcagagtgtcaatccgcatcctggatgaactggtgctgccattccaggagctgcagattgacgataacgaatacgcctacctgaaagcaatcatctttttcgaccccgacgccaagggactgagtgatcctggcaaaattaagcggctgaggtctcaggtccaggtgtccctggaggactatatcaatgacagacagtacgatagccgagggcggtttggagaactgctgctgctgctgccaacactgcagagcattacctggcagatgatcgagcagatccagttcattaaactgttcggcatggctaagatcgacaacctgctgcaggagatgctgctgtgaggactagttataagactgactagcccgatgggcctcccaacgggccctcctcccctccttgcaccgagattaataaaaaaaaaaaaaaaaaaaaaaaaaaaaaaaaaaaaaaaaaaaaaaaaaaaaaaaaaaaaaaaatgcatcccccccccccccccccccccccccccccccaaaggctcttttcagagccaccagaatt

SEQ ID NO: 2368 - RNA, 1345 nt, synthetic construct
  misc_feature 1..1345: note = mRNA i-3 (A64-N5-C30-hSL-N5) (opt28) from Homo sapiens__NP_000448.3__HNF4A(1-375)(S142E_S143E)
  source 1..1345: mol_type = other RNA
aggagaaagcttaccatgcggctgagcaagaccctggtggacatggatatggcagactactccgccgctctggatccagcatatacaactctggagttcgaaaacgtccaggtgctgaccatgggaaatgacacatctccctcagagggcactaacctgaatgcccctaacagtctgggggtgagcgctctgtgcgcaatctgcggagacagggccaccggcaaacactacggggcttcctcttgtgatggatgcaagggctttttcagacgcagcgtccggaaaaatcatatgtactcatgccgatttagtaggcagtgcgtggtggacaaggacaagagaaaccagtgccgctattgtcggctgaaaaagtgcttcagggcaggaatgaaaaaggaagccgtccagaatgagagagatcgaatttccacacggcgcgaagagtacgaagacagctctctgccaagcatcaacgctctgctgcaggcagaggtgctgtccaggcagatcacttcacccgtgagtgggattaacggcgatatcagagccaagaaaattgcaagcatcgctgacgtctgcgagtctatgaaggaacagctgctggtgctggtggagtgggccaaatacatccctgcattttgcgaactgccactggacgatcaggtcgctctgctgcgggcccacgcaggagagcatctgctgctgggcgctaccaagcgatccatggtgttcaaggacgtgctgctgctggggaatgactatattgtccccaggcactgccctgaactggccgagatgagcagagtgtcaatccgcatcctggatgaactggtgctgccattccaggagctgcagattgacgataacgaatacgcatacctgaaagctatcatctttttcgaccccgacgccaagggactgagtgatcctggcaaaattaagcggctgaggtctcaggtccaggtgtccctggaggactatatcaatgacagacagtacgatagccgagggcggtttggagagctgctgctgctgctgccaacactgcagagcattacctggcagatgatcgaacagatccagttcattaaactgttcggcatggcaaagatcgacaacctgctgcaggagatgctgctgtgaggactagttataagactgactagcccgatgggcctcccaacgggccctcctcccctccttgcaccgagattaataaaaaaaaaaaaaaaaaaaaaaaaaaaaaaaaaaaaaaaaaaaaaaaaaaaaaaaaaaaaaaaatgcatcccccccccccccccccccccccccccccccaaaggctcttttcagagccaccagaatt

SEQ ID NO: 2369 - RNA, 1345 nt, synthetic construct
  misc_feature 1..1345: note = mRNA i-3 (A64-N5-C30-hSL-N5) (opt28) from Homo sapiens__NP_000448.3__HNF4A(1-375)(S143A)
  source 1..1345: mol_type = other RNA
aggagaaagcttaccatgcggctgagcaagaccctggtggacatggatatggcagactactccgccgctctggatccagcatatacaactctggagttcgaaaacgtccaggtgctgaccatgggaaatgacacatctccctcagagggcactaacctgaatgcccctaacagtctgggggtgagcgctctgtgcgcaatctgcggagacagggccaccggcaaacactacggggcttcctcttgtgatggatgcaagggctttttcagacgcagcgtccggaaaaatcatatgtactcatgccgatttagtaggcagtgcgtggtggacaaggacaagagaaaccagtgccgctattgtcggctgaaaaagtgcttcagggcaggaatgaaaaaggaagccgtccagaatgagagagatcgaatttccacacggcgcagcgcttacgaagactctagcctgccatccatcaacgcactgctgcaggccgaggtgctgtcaaggcagatcaccagtcccgtgagcgggattaacggcgatatcagagcaaagaaaattgcttctatcgccgacgtctgcgaatccatgaaggagcagctgctggtgctggtggagtgggcaaaatacatccctgctttttgcgaactgccactggacgatcaggtcgccctgctgcgggcacacgctggagagcatctgctgctgggcgccactaagcgaagcatggtgttcaaggacgtgctgctgctggggaatgactatattgtccccaggcactgccctgaactggcagagatgtcaagagtgagtatccgcatcctggatgaactggtgctgccattccaggagctgcagattgacgataacgaatacgcttacctgaaagccatcatctttttcgaccccgacgcaaagggactgtctgatcctggcaaaattaagcggctgaggtcccaggtccaggtgagcctggaggactatatcaatgacagacagtacgatagccgagggcggtttggagaactgctgctgctgctgccaacactgcagtccattacctggcagatgatcgagcagatccagttcattaaactgttcggcatggccaagatcgacaacctgctgcaggagatgctgctgtgaggactagttataagactgactagcccgatgggcctcccaacgggccctcctcccctccttgcaccgagattaataaaaaaaaaaaaaaaaaaaaaaaaaaaaaaaaaaaaaaaaaaaaaaaaaaaaaaaaaaaaaaaatgcatcccccccccccccccccccccccccccccccaaaggctcttttcagagccaccagaatt

SEQ ID NO: 2370 - RNA, 1345 nt, synthetic construct
  misc_feature 1..1345: note = mRNA i-3 (A64-N5-C30-hSL-N5) (opt28) from Homo sapiens__NP_000448.3__HNF4A(1-375)(T166A)
  source 1..1345: mol_type = other RNA
aggagaaagcttaccatgcggctgagcaagaccctggtggacatggatatggcagactactccgccgctctggatccagcatatacaactctggagttcgaaaacgtccaggtgctgaccatgggaaatgacacatctccctcagagggcactaacctgaatgcccctaacagtctgggggtgagcgctctgtgcgcaatctgcggagacagggccaccggcaaacactacggggcttcctcttgtgatggatgcaagggctttttcagacgcagcgtccggaaaaatcatatgtactcatgccgatttagtaggcagtgcgtggtggacaaggacaagagaaaccagtgccgctattgtcggctgaaaaagtgcttcagggcaggaatgaaaaaggaagccgtccagaatgagagagatcgaatttccacacggcgcagctcttacgaagacagctccctgccatcaatcaacgctctgctgcaggcagaggtgctgagtaggcagatcgccagccccgtgtctgggattaacggcgatatcagagcaaagaaaattgcttccatcgccgacgtctgcgaaagcatgaaggagcagctgctggtgctggtggagtgggcaaaatacatccctgctttttgcgaactgccactggacgatcaggtcgccctgctgcgggcacacgctggagagcatctgctgctgggcgccactaagcgatcaatggtgttcaaggacgtgctgctgctggggaatgactatattgtccccaggcactgccctgaactggcagagatgagtagagtgtctatccgcatcctggatgaactggtgctgccattccaggagctgcagattgacgataacgaatacgcttacctgaaagccatcatctttttcgaccccgacgcaaagggactgtccgatcctggcaaaattaagcggctgaggagccaggtccaggtgagcctggaggactatatcaatgacagacagtacgattcccgagggcggtttggagaactgctgctgctgctgccaaccctgcagtcaattacatggcagatgatcgagcagatccagttcattaaactgttcggcatggccaagatcgacaacctgctgcaggagatgctgctgtgaggactagttataagactgactagcccgatgggcctcccaacgggccctcctcccctccttgcaccgagattaataaaaaaaaaaaaaaaaaaaaaaaaaaaaaaaaaaaaaaaaaaaaaaaaaaaaaaaaaaaaaaaatgcatcccccccccccccccccccccccccccccccaaaggctcttttcagagccaccagaatt

SEQ ID NO: 2371 - RNA, 1345 nt, synthetic construct
  misc_feature 1..1345: note = mRNA i-3 (A64-N5-C30-hSL-N5) (opt28) from Homo sapiens__NP_000448.3__HNF4A(1-375)(S167E)
  source 1..1345: mol_type = other RNA
aggagaaagcttaccatgcggctgagcaagaccctggtggacatggatatggcagactactccgccgctctggatccagcatatacaactctggagttcgaaaacgtccaggtgctgaccatgggaaatgacacatctccctcagagggcactaacctgaatgcccctaacagtctgggggtgagcgctctgtgcgcaatctgcggagacagggccaccggcaaacactacggggcttcctcttgtgatggatgcaagggctttttcagacgcagcgtccggaaaaatcatatgtactcatgccgatttagtaggcagtgcgtggtggacaaggacaagagaaaccagtgccgctattgtcggctgaaaaagtgcttcagggcaggaatgaaaaaggaagccgtccagaatgagagagatcgaatttccacacggcgcagctcttacgaagacagctccctgccatcaatcaacgctctgctgcaggcagaggtgctgagtaggcagatcactgaacccgtgagcgggattaacggcgatatcagagccaagaaaattgcatctatcgctgacgtctgcgagtccatgaaggagcagctgctggtgctggtggaatgggccaaatacatccctgcattttgcgagctgccactggacgatcaggtcgctctgctgcgggcccacgcaggagaacatctgctgctgggcgctaccaagcgaagcatggtgttcaaggacgtgctgctgctggggaatgactatattgtccccaggcactgccctgagctggccgaaatgtcaagagtgagtatccgcatcctggatgagctggtgctgccattccaggaactgcagattgacgataacgagtacgcatacctgaaagctatcatctttttcgaccccgacgccaagggactgtctgatcctggcaaaattaagcggctgaggtcccaggtccaggtgagcctggaagactatatcaatgacagacagtacgatagccgagggcggtttggagagctgctgctgctgctgccaacactgcagtccattacctggcagatgatcgagcagatccagttcattaaactgttcggcatggcaaagatcgacaacctgctgcaggaaatgctgctgtgaggactagttataagactgactagcccgatgggcctcccaacgggccctcctcccctccttgcaccgagattaataaaaaaaaaaaaaaaaaaaaaaaaaaaaaaaaaaaaaaaaaaaaaaaaaaaaaaaaaaaaaaaatgcatcccccccccccccccccccccccccccccccaaaggctcttttcagagccaccagaatt

SEQ ID NO: 2372 - RNA, 1345 nt, synthetic construct
  misc_feature 1..1345: note = mRNA i-3 (A64-N5-C30-hSL-N5) (opt28) from Homo sapiens__NP_000448.3__HNF4A(1-375)(S167A)
  source 1..1345: mol_type = other RNA
aggagaaagcttaccatgcggctgagcaagaccctggtggacatggatatggcagactactccgccgctctggatccagcatatacaactctggagttcgaaaacgtccaggtgctgaccatgggaaatgacacatctccctcagagggcactaacctgaatgcccctaacagtctgggggtgagcgctctgtgcgcaatctgcggagacagggccaccggcaaacactacggggcttcctcttgtgatggatgcaagggctttttcagacgcagcgtccggaaaaatcatatgtactcatgccgatttagtaggcagtgcgtggtggacaaggacaagagaaaccagtgccgctattgtcggctgaaaaagtgcttcagggcaggaatgaaaaaggaagccgtccagaatgagagagatcgaatttccacacggcgcagctcttacgaagacagctccctgccatcaatcaacgctctgctgcaggcagaggtgctgagtaggcagatcactgcccccgtgagcgggattaacggcgatatcagagcaaagaaaattgcttctatcgccgacgtctgcgaatccatgaaggagcagctgctggtgctggtggagtgggcaaaatacatccctgctttttgcgaactgccactggacgatcaggtcgccctgctgcgggcacacgctggagagcatctgctgctgggcgccaccaagcgaagcatggtgttcaaggacgtgctgctgctggggaatgactatattgtccccaggcactgccctgaactggcagagatgtcaagagtgagtatccgcatcctggatgaactggtgctgccattccaggagctgcagattgacgataacgaatacgcttacctgaaagccatcatctttttcgaccccgacgcaaagggactgtctgatcctggcaaaattaagcggctgaggtcccaggtccaggtgagcctggaggactatatcaatgacagacagtacgatagccgagggcggtttggagaactgctgctgctgctgccaacactgcagtccattacctggcagatgatcgagcagatccagttcattaaactgttcggcatggccaagatcgacaacctgctgcaggagatgctgctgtgaggactagttataagactgactagcccgatgggcctcccaacgggccctcctcccctccttgcaccgagattaataaaaaaaaaaaaaaaaaaaaaaaaaaaaaaaaaaaaaaaaaaaaaaaaaaaaaaaaaaaaaaaatgcatcccccccccccccccccccccccccccccccaaaggctcttttcagagccaccagaatt

SEQ ID NO: 2373 - RNA, 1345 nt, synthetic construct; identical to SEQ ID NO: 2372
  misc_feature 1..1345: note = mRNA i-3 (A64-N5-C30-hSL-N5) (opt28) from Homo sapiens__NP_000448.3__HNF4A(1-375)(S167A_S378A_T429A_T432A_ S436A)
  source 1..1345: mol_type = other RNA

SEQ ID NO: 2374 - RNA, 1345 nt, synthetic construct; identical to SEQ ID NO: 2371
  misc_feature 1..1345: note = mRNA i-3 (A64-N5-C30-hSL-N5) (opt28) from Homo sapiens__NP_000448.3__HNF4A(1-375)(S167E_S378E_T429E_T432E_ S436E)
  source 1..1345: mol_type = other RNA

SEQ ID NO: 2375 - RNA, 1345 nt, synthetic construct
  misc_feature 1..1345: note = mRNA i-3 (A64-N5-C30-hSL-N5) (opt28) from Homo sapiens__NP_000448.3__HNF4A(1-375)(S87A)
  source 1..1345: mol_type = other RNA
aggagaaagcttaccatgcggctgagcaagaccctggtggacatggatatggcagactactccgccgctctggatccagcatatacaactctggagttcgaaaacgtccaggtgctgaccatgggaaatgacacatctccctcagagggcactaacctgaatgcccctaacagtctgggggtgagcgctctgtgcgcaatctgcggagacagggccaccggcaaacactacggggcttcctcttgtgatggatgcaagggctttttcagacgcgcagtccggaaaaatcatatgtacagctgccgattttcaaggcagtgcgtggtggacaaggacaagagaaaccagtgccgctattgtcggctgaaaaagtgcttcagggccggaatgaaaaaggaagctgtccagaatgagagagatcgaattagtacacggcgctccagctacgaagactctagcctgccatccatcaacgcactgctgcaggccgaggtgctgtcaaggcagatcaccagtcccgtgagcgggattaacggcgatatcagagcaaagaaaattgcttctatcgccgacgtctgcgaatccatgaaggagcagctgctggtgctggtggagtgggcaaaatacatccctgctttttgcgaactgccactggacgatcaggtcgccctgctgcgggcacacgctggagagcatctgctgctgggcgccactaagcgaagcatggtgttcaaggacgtgctgctgctggggaatgactatattgtccccaggcactgccctgaactggcagagatgtcaagagtgagtatccgcatcctggatgaactggtgctgccattccaggagctgcagattgacgataacgaatacgcttacctgaaagccatcatctttttcgaccccgacgcaaagggactgtctgatcctggcaaaattaagcggctgaggtcccaggtccaggtgagcctggaggactatatcaatgacagacagtacgatagccgagggcggtttggagaactgctgctgctgctgccaacactgcagtccattacctggcagatgatcgagcagatccagttcattaaactgttcggcatggccaagatcgacaacctgctgcaggagatgctgctgtgaggactagttataagactgactagcccgatgggcctcccaacgggccctcctcccctccttgcaccgagattaataaaaaaaaaaaaaaaaaaaaaaaaaaaaaaaaaaaaaaaaaaaaaaaaaaaaaaaaaaaaaaaatgcatcccccccccccccccccccccccccccccccaaaggctcttttcagagccaccagaatt

SEQ ID NO: 2376 - RNA, 1345 nt, synthetic construct
  misc_feature 1..1345: note = mRNA i-3 (A64-N5-C30-hSL-N5) (opt28) from Homo sapiens__NP_000448.3__HNF4A(1-375)(S87E)
  source 1..1345: mol_type = other RNA
aggagaaagcttaccatgcggctgagcaagaccctggtggacatggatatggcagactactccgccgctctggatccagcatatacaactctggagttcgaaaacgtccaggtgctgaccatgggaaatgacacatctccctcagagggcactaacctgaatgcccctaacagtctgggggtgagcgctctgtgcgcaatctgcggagacagggccaccggcaaacactacggggcttcctcttgtgatggatgcaagggctttttcagacgcgaagtccggaaaaatcatatgtacagctgccgattttcaaggcagtgcgtggtggacaaggacaagagaaaccagtgccgctattgtcggctgaaaaagtgcttcagggcaggaatgaaaaaggaggccgtccagaatgaaagagatcgaattagtacacggcgctccagctacgaggactctagcctgccatccatcaacgctctgctgcaggcagaagtgctgtcaaggcagatcaccagtcccgtgagcgggattaacggcgatatcagagccaagaaaattgcatctatcgctgacgtctgcgagtccatgaaggagcagctgctggtgctggtggaatgggccaaatacatccctgcattttgcgagctgccactggacgatcaggtcgctctgctgcgggcccacgcaggagaacatctgctgctgggcgctactaagcgaagcatggtgttcaaggacgtgctgctgctggggaatgactatattgtccccaggcactgccctgagctggccgaaatgtcaagagtgagtatccgcatcctggatgagctggtgctgccattccaggaactgcagattgacgataacgagtacgcatacctgaaagctatcatctttttcgaccccgacgccaagggactgtctgatcctggcaaaattaagcggctgaggtcccaggtccaggtgagcctggaagactatatcaatgacagacagtacgatagccgagggcggtttggagagctgctgctgctgctgccaacactgcagtccattacctggcagatgatcgagcagatccagttcattaaactgttcggcatggcaaagatcgacaacctgctgcaggaaatgctgctgtgaggactagttataagactgactagcccgatgggcctcccaacgggccctcctcccctccttgcaccgagattaataaaaaaaaaaaaaaaaaaaaaaaaaaaaaaaaaaaaaaaaaaaaaaaaaaaaaaaaaaaaaaaatgcatcccccccccccccccccccccccccccccccaaaggctcttttcagagccaccagaatt

SEQ ID NO: 2377 - RNA, 1345 nt, synthetic construct
  misc_feature 1..1345: note = mRNA i-3 (A64-N5-C30-hSL-N5) (opt28) from Homo sapiens__NP_000448.3__HNF4A(1-375)(R2V)
  source 1..1345: mol_type = other RNA
aggagaaagcttaccatggtgctgagcaagaccctggtcgacatggatatggcagactactccgccgctctggatccagcatatacaactctggagttcgaaaacgtccaggtgctgaccatgggaaatgacacatctccctcagagggcactaacctgaatgcccctaacagtctgggggtgagcgctctgtgcgcaatctgcggagaccgggccaccggcaaacactacggggcttcctcttgtgatggatgcaagggctttttcaggagaagcgtgcgcaaaaatcatatgtactcatgccgatttagtcggcagtgcgtggtcgacaaggacaagaggaaccagtgcagatattgtcgcctgaaaaagtgcttccgggcaggaatgaaaaaggaagccgtgcagaatgagagggatagaatttccacacgacggagctcttacgaagacagctccctgccatcaatcaacgctctgctgcaggcagaggtgctgagtcgccagatcactagccccgtctctgggattaacggcgatatcagggccaagaaaattgcatccatcgctgacgtgtgcgaaagcatgaaggagcagctgctggtgctggtcgagtgggccaaatacatccctgcattttgcgaactgccactggacgatcaggtggctctgctgagagcccacgcaggagagcatctgctgctgggcgctaccaagcggtcaatggtgttcaaggacgtcctgctgctggggaatgactatattgtgccccgacactgccctgaactggccgagatgagtagggtgtctatcagaatcctggatgaactggtcctgccattccaggagctgcagattgacgataacgaatacgcatacctgaaagctatcatctttttcgaccccgacgccaagggactgtccgatcctggcaaaattaagcgcctgcggagccaggtccaggtgagcctggaggactatatcaatgacaggcagtacgattccagagggcgatttggagaactgctgctgctgctgccaacactgcagtcaattacctggcagatgatcgagcagatccagttcattaaactgttcggcatggcaaagatcgacaacctgctgcaggagatgctgctgtgaggactagttataagactgactagcccgatgggcctcccaacgggccctcctcccctccttgcaccgagattaataaaaaaaaaaaaaaaaaaaaaaaaaaaaaaaaaaaaaaaaaaaaaaaaaaaaaaaaaaaaaaaatgcatcccccccccccccccccccccccccccccccaaaggctcttttcagagccaccagaatt

SEQ ID NO: 2378 - RNA, 1345 nt, synthetic construct
  misc_feature 1..1345: note = mRNA i-3 (A64-N5-C30-hSL-N5) (opt28) from Homo sapiens__NP_000448.3__HNF4A(1-375)(R2V_K5V)
  source 1..1345: mol_type = other RNA
aggagaaagcttaccatggtgctgagcgtcaccctggtggacatggatatggcagactactccgccgctctggatccagcatatacaactctggagttcgaaaacgtgcaggtcctgaccatgggaaatgacacatctccctcagagggcactaacctgaatgcccctaacagtctgggggtgagcgctctgtgcgcaatctgcggagaccgggccaccggcaagcactacggggcttcctcttgtgatggatgcaaaggctttttcaggagaagcgtgcgcaagaatcatatgtactcatgccgatttagtcggcagtgcgtcgtggacaaagacaagaggaaccagtgcagatattgtcgcctgaagaaatgcttccgggcaggaatgaagaaagaagccgtgcagaatgagagggatagaatttccacacgacggagctcttacgaagacagctccctgccatcaatcaacgctctgctgcaggcagaggtcctgagtcgccagatcactagccccgtgtctgggattaacggcgatatcagggccaagaagattgcatccatcgctgacgtgtgcgaaagcatgaaagagcagctgctggtcctggtggagtgggccaagtacatccctgcattttgcgaactgccactggacgatcaggtggctctgctgagagcccacgcaggagagcatctgctgctgggcgctaccaaacggtcaatggtcttcaaggacgtgctgctgctggggaatgactatattgtgccccgacactgccctgaactggccgagatgagtagggtctctatcagaatcctggatgaactggtgctgccattccaggagctgcagattgacgataacgaatacgcatacctgaaggctatcatctttttcgaccccgacgccaaaggactgtccgatcctggcaagattaaacgcctgcggagccaggtgcaggtcagcctggaggactatatcaatgacaggcagtacgattccagagggcgatttggagaactgctgctgctgctgccaacactgcagtcaattacctggcagatgatcgagcagatccagttcattaagctgttcggcatggcaaaaatcgacaacctgctgcaggagatgctgctgtgaggactagttataagactgactagcccgatgggcctcccaacgggccctcctcccctccttgcaccgagattaataaaaaaaaaaaaaaaaaaaaaaaaaaaaaaaaaaaaaaaaaaaaaaaaaaaaaaaaaaaaaaaatgcatcccccccccccccccccccccccccccccccaaaggctcttttcagagccaccagaatt

SEQ ID NO: 2379 - RNA, 1345 nt, synthetic construct
  misc_feature 1..1345: note = mRNA i-3 (A64-N5-C30-hSL-N5) (opt28) from Homo sapiens__NP_000448.3__HNF4A(1-375)(K179R_K180R)
  source 1..1345: mol_type = other RNA
aggagaaagcttaccatgcggctgagcaagaccctggtggacatggatatggcagactactccgccgctctggatccagcatatacaactctggagttcgaaaacgtccaggtgctgaccatgggaaatgacacatctccctcagagggcactaacctgaatgcccctaacagtctgggggtgagcgctctgtgcgcaatctgcggagacagggccaccggcaaacactacggggcttcctcttgtgatggatgcaagggctttttcagacgcagcgtccggaaaaatcatatgtactcatgccgatttagtaggcagtgcgtggtggacaaggacaagagaaaccagtgccgctattgtcggctgaaaaagtgcttcagggcaggaatgaaaaaggaagccgtccagaatgagagagatcgaatttccacacggcgcagctcttacgaagacagctccctgccatcaatcaacgctctgctgcaggcagaggtgctgagtaggcagatcactagccccgtgtctgggattaacggcgatatcagagcccggcgaattgcatccatcgctgacgtctgcgaaagcatgaaggagcagctgctggtgctggtggagtgggccaaatacatccctgcattttgcgaactgccactggacgatcaggtcgctctgctgagggcccacgcaggagagcatctgctgctgggcgctaccaagagatcaatggtgttcaaagacgtgctgctgctggggaatgactatattgtcccccgccactgccctgaactggccgagatgagtcgggtgtctatcaggatcctggatgaactggtgctgccattccaggagctgcagattgacgataacgaatacgcatacctgaaggctatcatctttttcgaccccgacgccaagggactgtccgatcctggcaaaattaagagactgcgaagccaggtccaggtgagcctggaggactatatcaatgaccggcagtacgattcccgcgggaggtttggagaactgctgctgctgctgccaacactgcagtcaattacctggcagatgatcgagcagatccagttcattaaactgttcggcatggcaaagatcgacaacctgctgcaggagatgctgctgtgaggactagttataagactgactagcccgatgggcctcccaacgggccctcctcccctccttgcaccgagattaataaaaaaaaaaaaaaaaaaaaaaaaaaaaaaaaaaaaaaaaaaaaaaaaaaaaaaaaaaaaaaaatgcatcccccccccccccccccccccccccccccccaaaggctcttttcagagccaccagaatt

SEQ ID NO: 2380 - RNA, 1345 nt, synthetic construct
  misc_feature 1..1345: note = mRNA i-3 (A64-N5-C30-hSL-N5) (opt28) from Homo sapiens__NP_000448.3__HNF4A(1-375)(K234R)
  source 1..1345: mol_type = other RNA
aggagaaagcttaccatgcggctgagcaagaccctggtggacatggatatggcagactactccgccgctctggatccagcatatacaactctggagttcgaaaacgtccaggtgctgaccatgggaaatgacacatctccctcagagggcactaacctgaatgcccctaacagtctgggggtgagcgctctgtgcgcaatctgcggagacagggccaccggcaaacactacggggcttcctcttgtgatggatgcaagggctttttcagacgcagcgtccggaaaaatcatatgtactcatgccgatttagtaggcagtgcgtggtggacaaggacaagagaaaccagtgccgctattgtcggctgaaaaagtgcttcagggcaggaatgaaaaaggaagccgtccagaatgagagagatcgaatttccacacggcgcagctcttacgaagacagctccctgccatcaatcaacgctctgctgcaggcagaggtgctgagtaggcagatcactagccccgtgtctgggattaacggcgatatcagagccaagaaaattgcatccatcgctgacgtctgcgaaagcatgaaggagcagctgctggtgctggtggagtgggccaaatacatccctgcattttgcgaactgccactggacgatcaggtcgctctgctgcgggcccacgcaggagagcatctgctgctgggcgctacccgaaggtcaatggtgttcaaggacgtgctgctgctggggaatgactatattgtccccagacactgccctgaactggccgagatgagtcgcgtgtctatccggatcctggatgaactggtgctgccattccaggagctgcagattgacgataacgaatacgcatacctgaaggctatcatctttttcgaccccgacgccaaaggactgtccgatcctggcaagattaaaaggctgagaagccaggtccaggtgagcctggaggactatatcaatgaccgacagtacgattcccgggggcgctttggagaactgctgctgctgctgccaacactgcagtcaattacctggcagatgatcgagcagatccagttcattaagctgttcggcatggcaaaaatcgacaacctgctgcaggagatgctgctgtgaggactagttataagactgactagcccgatgggcctcccaacgggccctcctcccctccttgcaccgagattaataaaaaaaaaaaaaaaaaaaaaaaaaaaaaaaaaaaaaaaaaaaaaaaaaaaaaaaaaaaaaaaatgcatcccccccccccccccccccccccccccccccaaaggctcttttcagagccaccagaatt

SEQ ID NO: 2381 - RNA, 1345 nt, synthetic construct
  misc_feature 1..1345: note = mRNA i-3 (A64-N5-C30-hSL-N5) (opt28) from Homo sapiens__NP_000448.3__HNF4A(1-375)(K300R)
  source 1..1345: mol_type = other RNA
aggagaaagcttaccatgcggctgagcaagaccctggtggacatggatatggcagactactccgccgctctggatccagcatatacaactctggagttcgaaaacgtccaggtgctgaccatgggaaatgacacatctccctcagagggcactaacctgaatgcccctaacagtctgggggtgagcgctctgtgcgcaatctgcggagacagggccaccggcaaacactacggggcttcctcttgtgatggatgcaagggctttttcagacgcagcgtccggaaaaatcatatgtactcatgccgatttagtaggcagtgcgtggtggacaaggacaagagaaaccagtgccgctattgtcggctgaaaaagtgcttcagggcaggaatgaaaaaggaagccgtccagaatgagagagatcgaatttccacacggcgcagctcttacgaagacagctccctgccatcaatcaacgctctgctgcaggcagaggtgctgagtaggcagatcactagccccgtgtctgggattaacggcgatatcagagccaagaaaattgcatccatcgctgacgtctgcgaaagcatgaaggagcagctgctggtgctggtggagtgggccaaatacatccctgcattttgcgaactgccactggacgatcaggtcgctctgctgcgggcccacgcaggagagcatctgctgctgggcgctaccaagcgatcaatggtgttcaaggacgtgctgctgctggggaatgactatattgtccccaggcactgccctgaactggccgagatgagtagagtgtctatccgcatcctggatgaactggtgctgccattccaggagctgcagattgacgataacgaatacgcatacctgaaagctatcatctttttcgaccccgacgcccggggactgtccgatcctggcaagattaaaaggctgagaagccaggtccaggtgagcctggaggactatatcaatgaccgacagtacgattcccgggggcgctttggagaactgctgctgctgctgccaacactgcagtcaattacctggcagatgatcgagcagatccagttcattaagctgttcggcatggcaaaaatcgacaacctgctgcaggagatgctgctgtgaggactagttataagactgactagcccgatgggcctcccaacgggccctcctcccctccttgcaccgagattaataaaaaaaaaaaaaaaaaaaaaaaaaaaaaaaaaaaaaaaaaaaaaaaaaaaaaaaaaaaaaaaatgcatcccccccccccccccccccccccccccccccaaaggctcttttcagagccaccagaatt

SEQ ID NO: 2382 - RNA, 1345 nt, synthetic construct
  misc_feature 1..1345: note = mRNA i-3 (A64-N5-C30-hSL-N5) (opt28) from Homo sapiens__NP_000448.3__HNF4A(1-375)(K300R_K307R_K309R)
  source 1..1345: mol_type = other RNA
aggagaaagcttaccatgcggctgagcaagaccctggtggacatggatatggcagactactccgccgctctggatccagcatatacaactctggagttcgaaaacgtccaggtgctgaccatgggaaatgacacatctccctcagagggcactaacctgaatgcccctaacagtctgggggtgagcgctctgtgcgcaatctgcggagacagggccaccggcaaacactacggggcttcctcttgtgatggatgcaagggctttttcagacgcagcgtccggaaaaatcatatgtactcatgccgatttagtaggcagtgcgtggtggacaaggacaagagaaaccagtgccgctattgtcggctgaaaaagtgcttcagggcaggaatgaaaaaggaagccgtccagaatgagagagatcgaatttccacacggcgcagctcttacgaagacagctccctgccatcaatcaacgctctgctgcaggcagaggtgctgagtaggcagatcactagccccgtgtctgggattaacggcgatatcagagccaagaaaattgcatccatcgctgacgtctgcgaaagcatgaaggagcagctgctggtgctggtggagtgggccaaatacatccctgcattttgcgaactgccactggacgatcaggtcgctctgctgcgggcccacgcaggagagcatctgctgctgggcgctaccaagcgatcaatggtgttcaaggacgtgctgctgctggggaatgactatattgtccccaggcactgccctgaactggccgagatgagtagagtgtctatccgcatcctggatgaactggtgctgccattccaggagctgcagattgacgataacgaatacgcatacctgaaagctatcatctttttcgaccccgacgcccggggactgtccgatcctggcaggattagacgactgcggagccaggtccaggtgagcctggaggactatatcaatgaccgccagtacgattccagggggagatttggagaactgctgctgctgctgccaacactgcagtcaattacctggcagatgatcgagcagatccagttcattaagctgttcggcatggcaaaaatcgacaacctgctgcaggagatgctgctgtgaggactagttataagactgactagcccgatgggcctcccaacgggccctcctcccctccttgcaccgagattaataaaaaaaaaaaaaaaaaaaaaaaaaaaaaaaaaaaaaaaaaaaaaaaaaaaaaaaaaaaaaaaatgcatcccccccccccccccccccccccccccccccaaaggctcttttcagagccaccagaatt

SEQ ID NO: 2383 - RNA, 1345 nt, synthetic construct
  misc_feature 1..1345: note = mRNA i-3 (A64-N5-C30-hSL-N5) (opt28) from Homo sapiens__NP_000448.3__HNF4A(1-375)(K447R_K470R)
  source 1..1345: mol_type = other RNA
aggagaaagcttaccatgcggctgagcaagaccctggtggacatggatatggcagactactccgccgctctggatccagcatatacaactctggagttcgaaaacgtccaggtgctgaccatgggaaatgacacatctccctcagagggcactaacctgaatgcccctaacagtctgggggtgagcgctctgtgcgcaatctgcggagacagggccaccggcaaacactacggggcttcctcttgtgatggatgcaagggctttttcagacgcagcgtccggaaaaatcatatgtactcatgccgatttagtaggcagtgcgtggtggacaaggacaagagaaaccagtgccgctattgtcggctgaaaaagtgcttcagggcaggaatgaaaaaggaagccgtccagaatgagagagatcgaatttccacacggcgcagctcttacgaagacagctccctgccatcaatcaacgctctgctgcaggcagaggtgctgagtaggcagatcactagccccgtgtctgggattaacggcgatatcagagccaagaaaattgcatccatcgctgacgtctgcgaaagcatgaaggagcagctgctggtgctggtggagtgggccaaatacatccctgcattttgcgaactgccactggacgatcaggtcgctctgctgcgggcccacgcaggagagcatctgctgctgggcgctaccaagcgatcaatggtgttcaaggacgtgctgctgctggggaatgactatattgtccccaggcactgccctgaactggccgagatgagtagagtgtctatccgcatcctggatgaactggtgctgccattccaggagctgcagattgacgataacgaatacgcatacctgaaagctatcatctttttcgaccccgacgccaagggactgtccgatcctggcaaaattaagcggctgaggagccaggtccaggtgagcctggaggactatatcaatgacagacagtacgattcccgagggcggtttggagaactgctgctgctgctgccaacactgcagtcaattacctggcagatgatcgagcagatccagttcattaaactgttcggcatggcaaagatcgacaacctgctgcaggagatgctgctgtgaggactagttataagactgactagcccgatgggcctcccaacgggccctcctcccctccttgcaccgagattaataaaaaaaaaaaaaaaaaaaaaaaaaaaaaaaaaaaaaaaaaaaaaaaaaaaaaaaaaaaaaaaatgcatcccccccccccccccccccccccccccccccaaaggctcttttcagagccaccagaatt

SEQ ID NO: 2384 - RNA, 1345 nt, synthetic construct; identical to SEQ ID NO: 2383
  misc_feature 1..1345: note = mRNA i-3 (A64-N5-C30-hSL-N5) (opt28) from Homo sapiens__NP_000448.3__HNF4A(1-375)(K458R)
  source 1..1345: mol_type = other RNA

SEQ ID NO: 2385 - RNA, 1345 nt, synthetic construct
  misc_feature 1..1345: note = mRNA i-3 (A64-N5-C30-hSL-N5) (opt28) from Homo sapiens__NP_000448.3__HNF4A(1-375)(K106R_K108R_K126R_K127R)
  source 1..1345: mol_type = other RNA
aggagaaagcttaccatgcggctgagcaagaccctggtggacatggatatggcagactactccgccgctctggatccagcatatacaactctggagttcgaaaacgtccaggtgctgaccatgggaaatgacacatctccctcagagggcactaacctgaatgcccctaacagtctgggggtgagcgctctgtgcgcaatctgcggagacagggccaccggcaaacactacggggcttcctcttgtgatggatgcaagggctttttcagacgcagcgtccggaaaaatcatatgtactcatgccgatttagtaggcagtgcgtggtggacagagaccgccggaaccagtgcaggtattgtagactgaagaagtgcttccgagcaggaatgcggcgcgaagccgtccagaatgagagggatagaatttccacacggcgaagctcttacgaagacagctccctgccatcaatcaacgctctgctgcaggcagaggtgctgagtaggcagatcactagccccgtgtctgggattaacggcgatatcagagccaaaaagattgcatccatcgctgacgtctgcgaaagcatgaaagagcagctgctggtgctggtggagtgggccaagtacatccctgcattttgcgaactgccactggacgatcaggtcgctctgctgcgcgcccacgcaggagagcatctgctgctgggcgctaccaagcggtcaatggtgttcaaagacgtgctgctgctggggaatgactatattgtccccaggcactgccctgaactggccgagatgagtagagtgtctatccgaatcctggatgaactggtgctgccattccaggagctgcagattgacgataacgaatacgcatacctgaaggctatcatctttttcgaccccgacgccaaaggactgtccgatcctggcaagattaagcggctgcgcagccaggtccaggtgagcctggaggactatatcaatgacaggcagtacgattccagagggcggtttggagaactgctgctgctgctgccaacactgcagtcaattacctggcagatgatcgagcagatccagttcattaaactgttcggcatggcaaagatcgacaacctgctgcaggagatgctgctgtgaggactagttataagactgactagcccgatgggcctcccaacgggccctcctcccctccttgcaccgagattaataaaaaaaaaaaaaaaaaaaaaaaaaaaaaaaaaaaaaaaaaaaaaaaaaaaaaaaaaaaaaaaatgcatcccccccccccccccccccccccccccccccaaaggctcttttcagagccaccagaatt

SEQ ID NO: 2386 - RNA, 1345 nt, synthetic construct
  misc_feature 1..1345: note = mRNA i-3 (A64-N5-C30-hSL-N5) (opt28) from Homo sapiens__NP_000448.3__HNF4A(1-375)(E285Q)
  source 1..1345: mol_type = other RNA
aggagaaagcttaccatgcggctgagcaagaccctggtggacatggatatggcagactactccgccgctctggatccagcatatacaactctggagttcgaaaacgtccaggtgctgaccatgggaaatgacacatctccctcagagggcactaacctgaatgcccctaacagtctgggggtgagcgctctgtgcgcaatctgcggagacagggccaccggcaaacactacggggcttcctcttgtgatggatgcaagggctttttcagacgcagcgtccggaaaaatcatatgtactcatgccgatttagtaggcagtgcgtggtggacaaggacaagagaaaccagtgccgctattgtcggctgaaaaagtgcttcagggcaggaatgaaaaaggaagccgtccagaatgagagagatcgaatttccacacggcgcagctcttacgaagacagctccctgccatcaatcaacgctctgctgcaggcagaggtgctgagtaggcagatcactagccccgtgtctgggattaacggcgatatcagagccaagaaaattgcatccatcgctgacgtctgcgaaagcatgaaggagcagctgctggtgctggtggagtgggccaaatacatccctgcattttgcgaactgccactggacgatcaggtcgctctgctgcgggcccacgcaggagagcatctgctgctgggcgctaccaagcgatcaatggtgttcaaggacgtgctgctgctggggaatgactatattgtccccaggcactgccctgaactggccgagatgagtagagtgtctatccgcatcctggatgaactggtgctgccattccaggagctgcagattgacgataaccagtacgcatacctgaaagctatcatctttttcgaccccgacgccaagggactgtccgatcctggcaaaattaagcggctgaggagccaggtccaggtgagcctggaagactatatcaatgacagacagtacgattcccgagggcggtttggagagctgctgctgctgctgccaacactgcagtcaattacctggcagatgatcgaacagatccagttcattaaactgttcggcatggcaaagatcgacaacctgctgcaggagatgctgctgtgaggactagttataagactgactagcccgatgggcctcccaacgggccctcctcccctccttgcaccgagattaataaaaaaaaaaaaaaaaaaaaaaaaaaaaaaaaaaaaaaaaaaaaaaaaaaaaaaaaaaaaaaaatgcatcccccccccccccccccccccccccccccccaaaggctcttttcagagccaccagaatt

SEQ ID NO: 2387 - RNA, 1345 nt, synthetic construct
  misc_feature 1..1345: note = mRNA i-3 (A64-N5-C30-hSL-N5) (opt28) from Homo sapiens__NP_000448.3__HNF4A(1-375)(T166E)
  source 1..1345: mol_type = other RNA
aggagaaagcttaccatgcggctgagcaagaccctggtggacatggatatggcagactactccgccgctctggatccagcatatacaactctggagttcgaaaacgtccaggtgctgaccatgggaaatgacacatctccctcagagggcactaacctgaatgcccctaacagtctgggggtgagcgctctgtgcgcaatctgcggagacagggccaccggcaaacactacggggcttcctcttgtgatggatgcaagggctttttcagacgcagcgtccggaaaaatcatatgtactcatgccgatttagtaggcagtgcgtggtggacaaggacaagagaaaccagtgccgctattgtcggctgaaaaagtgcttcagggcaggaatgaaaaaggaagccgtccagaatgagagagatcgaatttccacacggcgcagctcttacgaagacagctccctgccatcaatcaacgctctgctgcaggcagaggtgctgagtaggcagatcgaaagccccgtgtctgggattaacggcgatatcagagccaagaaaattgcatccatcgctgacgtctgcgagagcatgaaggagcagctgctggtgctggtggaatgggccaaatacatccctgcattttgcgagctgccactggacgatcaggtcgctctgctgcgggcccacgcaggagaacatctgctgctgggcgctactaagcgatcaatggtgttcaaggacgtgctgctgctggggaatgactatattgtccccaggcactgccctgagctggccgaaatgagtagagtgtctatccgcatcctggatgagctggtgctgccattccaggaactgcagattgacgataacgagtacgcatacctgaaagctatcatctttttcgaccccgacgccaagggactgtccgatcctggcaaaattaagcggctgaggagccaggtccaggtgagcctggaagactatatcaatgacagacagtacgattcccgagggcggtttggagagctgctgctgctgctgccaaccctgcagtcaattacatggcagatgatcgagcagatccagttcattaaactgttcggcatggcaaagatcgacaacctgctgcaggaaatgctgctgtgaggactagttataagactgactagcccgatgggcctcccaacgggccctcctcccctccttgcaccgagattaataaaaaaaaaaaaaaaaaaaaaaaaaaaaaaaaaaaaaaaaaaaaaaaaaaaaaaaaaaaaaaaatgcatcccccccccccccccccccccccccccccccaaaggctcttttcagagccaccagaatt

SEQ ID NO: 2388 - RNA, 1345 nt, synthetic construct
  misc_feature 1..1345: note = mRNA i-3 (A64-N5-C30-hSL-N5) (opt28) from Homo sapiens__NP_000448.3__HNF4A(1-375)(S148A)
  source 1..1345: mol_type = other RNA
aggagaaagcttaccatgcggctgagcaagaccctggtggacatggatatggcagactactccgccgctctggatccagcatatacaactctggagttcgaaaacgtccaggtgctgaccatgggaaatgacacatctccctcagagggcactaacctgaatgcccctaacagtctgggggtgagcgctctgtgcgcaatctgcggagacagggccaccggcaaacactacggggcttcctcttgtgatggatgcaagggctttttcagacgcagcgtccggaaaaatcatatgtactcatgccgatttagtaggcagtgcgtggtggacaaggacaagagaaaccagtgccgctattgtcggctgaaaaagtgcttcagggcaggaatgaaaaaggaagccgtccagaatgagagagatcgaatttccacacggcgcagctcttacgaagacagcgctctgccatccatcaacgcactgctgcaggccgaggtgctgtcaaggcagatcaccagtcccgtgagcgggattaacggcgatatcagagcaaagaaaattgcttctatcgccgacgtctgcgaatccatgaaggagcagctgctggtgctggtggagtgggcaaaatacatccctgctttttgcgaactgccactggacgatcaggtcgccctgctgcgggcacacgctggagagcatctgctgctgggcgccactaagcgaagcatggtgttcaaggacgtgctgctgctggggaatgactatattgtccccaggcactgccctgaactggcagagatgtcaagagtgagtatccgcatcctggatgaactggtgctgccattccaggagctgcagattgacgataacgaatacgcttacctgaaagccatcatctttttcgaccccgacgcaaagggactgtctgatcctggcaaaattaagcggctgaggtcccaggtccaggtgagcctggaggactatatcaatgacagacagtacgatagccgagggcggtttggagaactgctgctgctgctgccaacactgcagtccattacctggcagatgatcgagcagatccagttcattaaactgttcggcatggccaagatcgacaacctgctgcaggagatgctgctgtgaggactagttataagactgactagcccgatgggcctcccaacgggccctcctcccctccttgcaccgagattaataaaaaaaaaaaaaaaaaaaaaaaaaaaaaaaaaaaaaaaaaaaaaaaaaaaaaaaaaaaaaaaatgcatcccccccccccccccccccccccccccccccaaaggctcttttcagagccaccagaatt

SEQ ID NO: 2389 - RNA, 1345 nt, synthetic construct
  misc_feature 1..1345: note = mRNA i-3 (A64-N5-C30-hSL-N5) (opt28) from Homo sapiens__NP_000448.3__HNF4A(1-375)(S148E)
  source 1..1345: mol_type = other RNA
aggagaaagcttaccatgcggctgagcaagaccctggtggacatggatatggcagactactccgccgctctggatccagcatatacaactctggagttcgaaaacgtccaggtgctgaccatgggaaatgacacatctccctcagagggcactaacctgaatgcccctaacagtctgggggtgagcgctctgtgcgcaatctgcggagacagggccaccggcaaacactacggggcttcctcttgtgatggatgcaagggctttttcagacgcagcgtccggaaaaatcatatgtactcatgccgatttagtaggcagtgcgtggtggacaaggacaagagaaaccagtgccgctattgtcggctgaaaaagtgcttcagggcaggaatgaaaaaggaagccgtccagaatgagagagatcgaatttccacacggcgcagctcttacgaagacagcgagctgccatccatcaacgctctgctgcaggcagaagtgctgtcaaggcagatcaccagtcccgtgagcgggattaacggcgatatcagagccaagaaaattgcatctatcgctgacgtctgcgagtccatgaaggagcagctgctggtgctggtggaatgggccaaatacatccctgcattttgcgagctgccactggacgatcaggtcgctctgctgcgggcccacgcaggagaacatctgctgctgggcgctactaagcgaagcatggtgttcaaggacgtgctgctgctggggaatgactatattgtccccaggcactgccctgagctggccgaaatgtcaagagtgagtatccgcatcctggatgagctggtgctgccattccaggaactgcagattgacgataacgagtacgcatacctgaaagctatcatctttttcgaccccgacgccaagggactgtctgatcctggcaaaattaagcggctgaggtcccaggtccaggtgagcctggaagactatatcaatgacagacagtacgatagccgagggcggtttggagagctgctgctgctgctgccaacactgcagtccattacctggcagatgatcgagcagatccagttcattaaactgttcggcatggcaaagatcgacaacctgctgcaggaaatgctgctgtgaggactagttataagactgactagcccgatgggcctcccaacgggccctcctcccctccttgcaccgagattaataaaaaaaaaaaaaaaaaaaaaaaaaaaaaaaaaaaaaaaaaaaaaaaaaaaaaaaaaaaaaaaatgcatcccccccccccccccccccccccccccccccaaaggctcttttcagagccaccagaatt

SEQ ID NO: 2390 - RNA, 1345 nt, synthetic construct
  misc_feature 1..1345: note = mRNA i-3 (A64-N5-C30-hSL-N5) (opt28) from Homo sapiens__NP_000448.3__HNF4A(1-375)(S183A)
  source 1..1345: mol_type = other RNA
aggagaaagcttaccatgcggctgagcaagaccctggtggacatggatatggcagactactccgccgctctggatccagcatatacaactctggagttcgaaaacgtccaggtgctgaccatgggaaatgacacatctccctcagagggcactaacctgaatgcccctaacagtctgggggtgagcgctctgtgcgcaatctgcggagacagggccaccggcaaacactacggggcttcctcttgtgatggatgcaagggctttttcagacgcagcgtccggaaaaatcatatgtactcatgccgatttagtaggcagtgcgtggtggacaaggacaagagaaaccagtgccgctattgtcggctgaaaaagtgcttcagggcaggaatgaaaaaggaagccgtccagaatgagagagatcgaatttccacacggcgcagctcttacgaagacagctccctgccatcaatcaacgctctgctgcaggcagaggtgctgagtaggcagatcactagccccgtgtctgggattaacggcgatatcagagccaagaaaattgcagctatcgccgacgtctgcgaatccatgaaggagcagctgctggtgctggtggagtgggcaaaatacatccctgctttttgcgaactgccactggacgatcaggtcgccctgctgcgggcacacgctggagagcatctgctgctgggcgccaccaagcgaagcatggtgttcaaggacgtgctgctgctggggaatgactatattgtccccaggcactgccctgaactggcagagatgtcaagagtgagtatccgcatcctggatgaactggtgctgccattccaggagctgcagattgacgataacgaatacgcttacctgaaagccatcatctttttcgaccccgacgcaaagggactgtctgatcctggcaaaattaagcggctgaggtcccaggtccaggtgagcctggaggactatatcaatgacagacagtacgatagccgagggcggtttggagaactgctgctgctgctgccaacactgcagtccattacctggcagatgatcgagcagatccagttcattaaactgttcggcatggccaagatcgacaacctgctgcaggagatgctgctgtgaggactagttataagactgactagcccgatgggcctcccaacgggccctcctcccctccttgcaccgagattaataaaaaaaaaaaaaaaaaaaaaaaaaaaaaaaaaaaaaaaaaaaaaaaaaaaaaaaaaaaaaaaatgcatcccccccccccccccccccccccccccccccaaaggctcttttcagagccaccagaatt

SEQ ID NO: 2391 - RNA, 1345 nt, synthetic construct
  misc_feature 1..1345: note = mRNA i-3 (A64-N5-C30-hSL-N5) (opt28) from Homo sapiens__NP_000448.3__HNF4A(1-375)(S183E)
  source 1..1345: mol_type = other RNA
aggagaaagcttaccatgcggctgagcaagaccctggtggacatggatatggcagactactccgccgctctggatccagcatatacaactctggagttcgaaaacgtccaggtgctgaccatgggaaatgacacatctccctcagagggcactaacctgaatgcccctaacagtctgggggtgagcgctctgtgcgcaatctgcggagacagggccaccggcaaacactacggggcttcctcttgtgatggatgcaagggctttttcagacgcagcgtccggaaaaatcatatgtactcatgccgatttagtaggcagtgcgtggtggacaaggacaagagaaaccagtgccgctattgtcggctgaaaaagtgcttcagggcaggaatgaaaaaggaagccgtccagaatgagagagatcgaatttccacacggcgcagctcttacgaagacagctccctgccatcaatcaacgctctgctgcaggcagaggtgctgagtaggcagatcactagccccgtgtctgggattaacggcgatatcagagccaagaaaattgcagaaatcgctgacgtctgcgagtccatgaaggagcagctgctggtgctggtggaatgggccaaatacatccctgcattttgcgagctgccactggacgatcaggtcgctctgctgcgggcccacgcaggagaacatctgctgctgggcgctaccaagcgaagcatggtgttcaaggacgtgctgctgctggggaatgactatattgtccccaggcactgccctgagctggccgaaatgtcaagagtgagtatccgcatcctggatgagctggtgctgccattccaggaactgcagattgacgataacgagtacgcatacctgaaagctatcatctttttcgaccccgacgccaagggactgtctgatcctggcaaaattaagcggctgaggtcccaggtccaggtgagcctggaagactatatcaatgacagacagtacgatagccgagggcggtttggagagctgctgctgctgctgccaacactgcagtccattacctggcagatgatcgagcagatccagttcattaaactgttcggcatggcaaagatcgacaacctgctgcaggaaatgctgctgtgaggactagttataagactgactagcccgatgggcctcccaacgggccctcctcccctccttgcaccgagattaataaaaaaaaaaaaaaaaaaaaaaaaaaaaaaaaaaaaaaaaaaaaaaaaaaaaaaaaaaaaaaaatgcatcccccccccccccccccccccccccccccccaaaggctcttttcagagccaccagaatt

SEQ ID NO: 2392 - RNA, 1345 nt, synthetic construct; identical to SEQ ID NO: 2383
  misc_feature 1..1345: note = mRNA i-3 (A64-N5-C30-hSL-N5) (opt28) from Homo sapiens__NP_000448.3__HNF4A(1-375)(S461A)
  source 1..1345: mol_type = other RNA

SEQ ID NO: 2393 - RNA, 1345 nt, synthetic construct; identical to SEQ ID NO: 2383
  misc_feature 1..1345: note = mRNA i-3 (A64-N5-C30-hSL-N5) (opt28) from Homo sapiens__NP_000448.3__HNF4A(1-375)(S461E)
  source 1..1345: mol_type = other RNA

SEQ ID NO: 2394 - RNA, 1345 nt, synthetic construct
  misc_feature 1..1345: note = mRNA i-3 (A64-N5-C30-hSL-N5) (opt28) from Homo sapiens__NP_000448.3__HNF4A(1-375)(S142A_S143A_S313A)
  source 1..1345: mol_type = other RNA
aggagaaagcttaccatgcggctgagcaagaccctggtggacatggatatggcagactactccgccgctctggatccagcatatacaactctggagttcgaaaacgtccaggtgctgaccatgggaaatgacacatctccctcagagggcactaacctgaatgcccctaacagtctgggggtgagcgctctgtgcgcaatctgcggagacagggccaccggcaaacactacggggcttcctcttgtgatggatgcaagggctttttcagacgcagcgtccggaaaaatcatatgtactcatgccgatttagtaggcagtgcgtggtggacaaggacaagagaaaccagtgccgctattgtcggctgaaaaagtgcttcagggcaggaatgaaaaaggaagccgtccagaatgagagagatcgaatttccacacggcgcgctgcatacgaagacagctctctgccaagcatcaacgccctgctgcaggcagaggtgctgtccaggcagatcacttcacccgtgagtgggattaacggcgatatcagagctaagaaaattgccagcatcgcagacgtctgcgaatctatgaaggagcagctgctggtgctggtggagtgggctaaatacatccctgccttttgcgaactgccactggacgatcaggtcgcactgctgcgggctcacgccggagagcatctgctgctgggcgcaaccaagcgatccatggtgttcaaggacgtgctgctgctggggaatgactatattgtccccaggcactgccctgaactggctgagatgagcagagtgtcaatccgcatcctggatgaactggtgctgccattccaggagctgcagattgacgataacgaatacgcctacctgaaagcaatcatctttttcgaccccgacgccaagggactgagtgatcctggcaaaattaagcggctgagggctcaggtccaggtgtctctggaggactatatcaatgacagacagtacgattcccgagggcggtttggagaactgctgctgctgctgccaacactgcagagcattacctggcagatgatcgagcagatccagttcattaaactgttcggcatggcaaagatcgacaacctgctgcaggagatgctgctgtgaggactagttataagactgactagcccgatgggcctcccaacgggccctcctcccctccttgcaccgagattaataaaaaaaaaaaaaaaaaaaaaaaaaaaaaaaaaaaaaaaaaaaaaaaaaaaaaaaaaaaaaaaatgcatcccccccccccccccccccccccccccccccaaaggctcttttcagagccaccagaatt

SEQ ID NO: 2395 - RNA, 1345 nt, synthetic construct; identical to SEQ ID NO: 2394
  misc_feature 1..1345: note = mRNA i-3 (A64-N5-C30-hSL-N5) (opt28) from Homo sapiens__NP_000448.3__HNF4A(1-375)(S142A_S143A_S313A_K458R)
  source 1..1345: mol_type = other RNA

SEQ ID NO: 2396 - RNA, 1345 nt, synthetic construct
  misc_feature 1..1345: note = mRNA i-3 (A64-N5-C30-hSL-N5) (opt28) from Homo sapiens__NP_000448.3__HNF4A(1-375)(S142A_S143A_S167A_S313A_ S378A_T429A_T432A_S436A_K458R)
  source 1..1345: mol_type = other RNA
aggagaaagcttaccatgcggctgagcaagaccctggtggacatggatatggcagactactccgccgctctggatccagcatatacaactctggagttcgaaaacgtccaggtgctgaccatgggaaatgacacatctccctcagagggcactaacctgaatgcccctaacagtctgggggtgagcgctctgtgcgcaatctgcggagacagggccaccggcaaacactacggggcttcctcttgtgatggatgcaagggctttttcagacgcagcgtccggaaaaatcatatgtactcatgccgatttagtaggcagtgcgtggtggacaaggacaagagaaaccagtgccgctattgtcggctgaaaaagtgcttcagggcaggaatgaaaaaggaagccgtccagaatgagagagatcgaatttccacacggcgcgctgcatacgaagacagctctctgccaagcatcaacgccctgctgcaggcagaggtgctgtccaggcagatcactgctcccgtgtcagggattaacggcgatatcagagccaagaaaattgcaagtatcgctgacgtctgcgaaagcatgaaggagcagctgctggtgctggtggagtgggccaaatacatccctgcattttgcgaactgccactggacgatcaggtcgctctgctgcgggcccacgcaggagagcatctgctgctgggcgctaccaagcgatctatggtgttcaaggacgtgctgctgctggggaatgactatattgtccccaggcactgccctgaactggccgagatgtccagagtgagcatccgcatcctggatgaactggtgctgccattccaggagctgcagattgacgataacgaatacgcatacctgaaagccatcatctttttcgaccccgacgctaagggactgtcagatcctggcaaaattaagcggctgagggcacaggtccaggtgagtctggaggactatatcaatgacagacagtacgattctcgagggcggtttggagaactgctgctgctgctgccaacactgcagtccattacctggcagatgatcgagcagatccagttcattaaactgttcggcatggccaagatcgacaacctgctgcaggagatgctgctgtgaggactagttataagactgactagcccgatgggcctcccaacgggccctcctcccctccttgcaccgagattaataaaaaaaaaaaaaaaaaaaaaaaaaaaaaaaaaaaaaaaaaaaaaaaaaaaaaaaaaaaaaaaatgcatcccccccccccccccccccccccccccccccaaaggctcttttcagagccaccagaatt

SEQ ID NO: 2397 - RNA, 1345 nt, synthetic construct
  misc_feature 1..1345: note = mRNA i-3 (A64-N5-C30-hSL-N5) (opt28) from Homo sapiens__NP_000448.3__HNF4A(1-375)(S142A_S143A_S148A_S167A_ S313A_S378A_T429A_T432A_S436A_K458R)
  source 1..1345: mol_type = other RNA
aggagaaagcttaccatgcggctgagcaagaccctggtggacatggatatggcagactactccgccgctctggatccagcatatacaactctggagttcgaaaacgtccaggtgctgaccatgggaaatgacacatctccctcagagggcactaacctgaatgcccctaacagtctgggggtgagcgctctgtgcgcaatctgcggagacagggccaccggcaaacactacggggcttcctcttgtgatggatgcaagggctttttcagacgcagcgtccggaaaaatcatatgtactcatgccgatttagtaggcagtgcgtggtggacaaggacaagagaaaccagtgccgctattgtcggctgaaaaagtgcttcagggcaggaatgaaaaaggaagccgtccagaatgagagagatcgaatttccacacggcgcgctgcatacgaagacagcgccctgccatctatcaacgcactgctgcaggctgaggtgctgagcaggcagatcactgcccccgtgtccgggattaacggcgatatcagagcaaagaaaattgcttcaatcgccgacgtctgcgaaagtatgaaggagcagctgctggtgctggtggagtgggcaaaatacatccctgctttttgcgaactgccactggacgatcaggtcgccctgctgcgggcacacgctggagagcatctgctgctgggcgccaccaagcgaagcatggtgttcaaggacgtgctgctgctggggaatgactatattgtccccaggcactgccctgaactggcagagatgtctagagtgtccatccgcatcctggatgaactggtgctgccattccaggagctgcagattgacgataacgaatacgcctacctgaaagctatcatctttttcgaccccgacgcaaagggactgagcgatcctggcaaaattaagcggctgagggcccaggtccaggtgtcactggaggactatatcaatgacagacagtacgatagtcgagggcggtttggagaactgctgctgctgctgccaacactgcagtctattacctggcagatgatcgagcagatccagttcattaaactgttcggcatggcaaagatcgacaacctgctgcaggagatgctgctgtgaggactagttataagactgactagcccgatgggcctcccaacgggccctcctcccctccttgcaccgagattaataaaaaaaaaaaaaaaaaaaaaaaaaaaaaaaaaaaaaaaaaaaaaaaaaaaaaaaaaaaaaaaatgcatcccccccccccccccccccccccccccccccaaaggctcttttcagagccaccagaatt

SEQ ID NO: 2398 - RNA, 1345 nt, synthetic construct
  misc_feature 1..1345: note = mRNA i-3 (A64-N5-C30-hSL-N5) (opt28) from Homo sapiens__NP_000448.3__HNF4A(1-375)(K106R_K108R_K126R_K127R_ S142A_S143A_S148A_S167A_S313A_S378A_T429A_T432A_S436A_K458R )
  source 1..1345: mol_type = other RNA
aggagaaagcttaccatgcggctgagcaagaccctggtggacatggatatggcagactactccgccgctctggatccagcatatacaactctggagttcgaaaacgtccaggtgctgaccatgggaaatgacacatctccctcagagggcactaacctgaatgcccctaacagtctgggggtgagcgctctgtgcgcaatctgcggagacagggccaccggcaaacactacggggcttcctcttgtgatggatgcaagggctttttcagacgcagcgtccggaaaaatcatatgtactcatgccgatttagtaggcagtgcgtggtggacagagaccgccggaaccagtgcaggtattgtagactgaagaagtgcttccgagcaggaatgcggcgcgaagccgtccagaatgagagggatagaatttccacacggcgagctgcatacgaagacagcgccctgccatctatcaacgcactgctgcaggctgaggtgctgagcaggcagatcactgcccccgtgtccgggattaacggcgatatcagagctaaaaagattgcatcaatcgccgacgtctgcgaaagtatgaaagagcagctgctggtgctggtggagtgggcaaagtacatccctgctttttgcgaactgccactggacgatcaggtcgccctgctgcgcgcacacgctggagagcatctgctgctgggcgccaccaagcggagcatggtgttcaaagacgtgctgctgctggggaatgactatattgtccccaggcactgccctgaactggcagagatgtctagagtgtccatccgaatcctggatgaactggtgctgccattccaggagctgcagattgacgataacgaatacgcctacctgaaggctatcatctttttcgaccccgacgcaaaaggactgagcgatcctggcaagattaagcggctgcgcgcccaggtccaggtgtcactggaggactatatcaatgacaggcagtacgatagtagagggcggtttggagaactgctgctgctgctgccaacactgcagtctattacctggcagatgatcgagcagatccagttcattaaactgttcggcatggcaaagatcgacaacctgctgcaggagatgctgctgtgaggactagttataagactgactagcccgatgggcctcccaacgggccctcctcccctccttgcaccgagattaataaaaaaaaaaaaaaaaaaaaaaaaaaaaaaaaaaaaaaaaaaaaaaaaaaaaaaaaaaaaaaaatgcatcccccccccccccccccccccccccccccccaaaggctcttttcagagccaccagaatt

SEQ ID NO: 2399 - RNA, 1345 nt, synthetic construct
  misc_feature 1..1345: note = mRNA i-3 (A64-N5-C30-hSL-N5) (opt28) from Homo sapiens__NP_000448.3__HNF4A(1-375)(S142A_S143A_S148A_T166A_ S167A_S313A_S378A_T429A_T432A_S436A_K458R)
  source 1..1345: mol_type = other RNA
aggagaaagcttaccatgcggctgagcaagaccctggtggacatggatatggcagactactccgccgctctggatccagcatatacaactctggagttcgaaaacgtccaggtgctgaccatgggaaatgacacatctccctcagagggcactaacctgaatgcccctaacagtctgggggtgagcgctctgtgcgcaatctgcggagacagggccaccggcaaacactacggggcttcctcttgtgatggatgcaagggctttttcagacgcagcgtccggaaaaatcatatgtactcatgccgatttagtaggcagtgcgtggtggacaaggacaagagaaaccagtgccgctattgtcggctgaaaaagtgcttcagggcaggaatgaaaaaggaagccgtccagaatgagagagatcgaatttccacacggcgcgctgcatacgaagacagcgccctgccatctatcaacgcactgctgcaggctgaggtgctgagcaggcagatcgccgcacccgtgtccgggattaacggcgatatcagagctaagaaaattgcctcaatcgcagacgtctgcgaaagtatgaaggagcagctgctggtgctggtggagtgggctaaatacatccctgccttttgcgaactgccactggacgatcaggtcgcactgctgcgggctcacgccggagagcatctgctgctgggcgcaactaagcgaagcatggtgttcaaggacgtgctgctgctggggaatgactatattgtccccaggcactgccctgaactggccgagatgtctagagtgtccatccgcatcctggatgaactggtgctgccattccaggagctgcagattgacgataacgaatacgcttacctgaaagcaatcatctttttcgaccccgacgccaagggactgagcgatcctggcaaaattaagcggctgagggcacaggtccaggtgtcactggaggactatatcaatgacagacagtacgatagtcgagggcggtttggagaactgctgctgctgctgccaaccctgcagtctattacatggcagatgatcgagcagatccagttcattaaactgttcggcatggctaagatcgacaacctgctgcaggagatgctgctgtgaggactagttataagactgactagcccgatgggcctcccaacgggccctcctcccctccttgcaccgagattaataaaaaaaaaaaaaaaaaaaaaaaaaaaaaaaaaaaaaaaaaaaaaaaaaaaaaaaaaaaaaaaatgcatcccccccccccccccccccccccccccccccaaaggctcttttcagagccaccagaatt

SEQ ID NO: 2400 - RNA, 1345 nt, synthetic construct
  misc_feature 1..1345: note = mRNA i-3 (A64-N5-C30-hSL-N5) (opt28) from Homo sapiens__NP_000448.3__HNF4A(1-375)(S87A_S142A_S143A_S148A_T 166A_S167A_S313A_S378A_T429A_T432A_S436A_K458R)
  source 1..1345: mol_type = other RNA
aggagaaagcttaccatgcggctgagcaagaccctggtggacatggatatggcagactactccgccgctctggatccagcatatacaactctggagttcgaaaacgtccaggtgctgaccatgggaaatgacacatctccctcagagggcactaacctgaatgcccctaacagtctgggggtgagcgctctgtgcgcaatctgcggagacagggccaccggcaaacactacggggcttcctcttgtgatggatgcaagggctttttcagacgcgcagtccggaaaaatcatatgtacagctgccgattttcaaggcagtgcgtggtggacaaggacaagagaaaccagtgccgctattgtcggctgaaaaagtgcttcagggccggaatgaaaaaggaagctgtccagaatgagagagatcgaattagtacacggcgcgcagcctacgaagactccgcactgccaagcatcaacgctctgctgcaggccgaggtgctgtctaggcagatcgcagctcccgtgagcgggattaacggcgatatcagagccaagaaaattgcatccatcgctgacgtctgcgaatcaatgaaggagcagctgctggtgctggtggagtgggccaaatacatccctgcattttgcgaactgccactggacgatcaggtcgctctgctgcgggcccacgcaggagagcatctgctgctgggcgccactaagcgaagtatggtgttcaaggacgtgctgctgctggggaatgactatattgtccccaggcactgccctgaactggctgagatgagcagagtgtctatccgcatcctggatgaactggtgctgccattccaggagctgcagattgacgataacgaatacgcatacctgaaagccatcatctttttcgaccccgacgcaaagggactgtccgatcctggcaaaattaagcggctgagggctcaggtccaggtgagcctggaggactatatcaatgacagacagtacgattcacgagggcggtttggagaactgctgctgctgctgccaaccctgcagagtattacatggcagatgatcgagcagatccagttcattaaactgttcggcatggcaaagatcgacaacctgctgcaggagatgctgctgtgaggactagttataagactgactagcccgatgggcctcccaacgggccctcctcccctccttgcaccgagattaataaaaaaaaaaaaaaaaaaaaaaaaaaaaaaaaaaaaaaaaaaaaaaaaaaaaaaaaaaaaaaaatgcatcccccccccccccccccccccccccccccccaaaggctcttttcagagccaccagaatt

SEQ ID NO: 2401 - RNA, 1345 nt, synthetic construct
  misc_feature 1..1345: note = mRNA i-3 (A64-N5-C30-hSL-N5) (opt28) from Homo sapiens__NP_000448.3__HNF4A(1-375)(S87A_K106R_K108R_K126R_K 127R_S142A_S143A_S148A_T166A_S167A_S313A_S378A_T429A_T432A_ S436A_K458R)
  source 1..1345: mol_type = other RNA
aggagaaagcttaccatgcggctgagcaagaccctggtggacatggatatggcagactactccgccgctctggatccagcatatacaactctggagttcgaaaacgtccaggtgctgaccatgggaaatgacacatctccctcagagggcactaacctgaatgcccctaacagtctgggggtgagcgctctgtgcgcaatctgcggagacagggccaccggcaaacactacggggcttcctcttgtgatggatgcaagggctttttcagacgcgcagtccggaaaaatcatatgtacagctgccgattttcaaggcagtgcgtggtggacagagaccgccggaaccagtgcaggtattgtagactgaagaagtgcttccgagccggaatgcggcgcgaagctgtccagaatgagagggatagaattagtacacggcgagcagcctacgaagactccgcactgccaagcatcaacgctctgctgcaggccgaggtgctgtctaggcagatcgcagctcccgtgagcgggattaacggcgatatcagagccaaaaagattgcatccatcgctgacgtctgcgaatcaatgaaagagcagctgctggtgctggtggagtgggccaagtacatccctgcattttgcgaactgccactggacgatcaggtcgctctgctgcgcgcccacgcaggagagcatctgctgctgggcgccactaagcggagtatggtgttcaaagacgtgctgctgctggggaatgactatattgtccccaggcactgccctgaactggctgagatgagcagagtgtctatccgaatcctggatgaactggtgctgccattccaggagctgcagattgacgataacgaatacgcatacctgaaggccatcatctttttcgaccccgacgcaaaaggactgtccgatcctggcaagattaagcggctgcgcgctcaggtccaggtgagcctggaggactatatcaatgacaggcagtacgattcaagagggcggtttggagaactgctgctgctgctgccaaccctgcagagtattacatggcagatgatcgagcagatccagttcattaaactgttcggcatggcaaagatcgacaacctgctgcaggagatgctgctgtgaggactagttataagactgactagcccgatgggcctcccaacgggccctcctcccctccttgcaccgagattaataaaaaaaaaaaaaaaaaaaaaaaaaaaaaaaaaaaaaaaaaaaaaaaaaaaaaaaaaaaaaaaatgcatcccccccccccccccccccccccccccccccaaaggctcttttcagagccaccagaatt

SEQ ID NO: 2402 - RNA, 1345 nt, synthetic construct
  misc_feature 1..1345: note = mRNA i-3 (A64-N5-C30-hSL-N5) (opt28) from Homo sapiens__NP_000448.3__HNF4A(1-375)(S87A_K106R_K108R_K126R_K 127R)
  source 1..1345: mol_type = other RNA
aggagaaagcttaccatgcggctgagcaagaccctggtggacatggatatggcagactactccgccgctctggatccagcatatacaactctggagttcgaaaacgtccaggtgctgaccatgggaaatgacacatctccctcagagggcactaacctgaatgcccctaacagtctgggggtgagcgctctgtgcgcaatctgcggagacagggccaccggcaaacactacggggcttcctcttgtgatggatgcaagggctttttcagacgcgcagtccggaaaaatcatatgtacagctgccgattttcaaggcagtgcgtggtggacagagaccgccggaaccagtgcaggtattgtagactgaagaagtgcttccgagccggaatgcggcgcgaagctgtccagaatgagagggatagaattagtacacggcgatccagctacgaagactctagcctgccatccatcaacgcactgctgcaggccgaggtgctgtcaaggcagatcaccagtcccgtgagcgggattaacggcgatatcagagctaaaaagattgcatctatcgccgacgtctgcgaatccatgaaagagcagctgctggtgctggtggagtgggcaaagtacatccctgctttttgcgaactgccactggacgatcaggtcgccctgctgcgcgcacacgctggagagcatctgctgctgggcgccactaagcggagcatggtgttcaaagacgtgctgctgctggggaatgactatattgtccccaggcactgccctgaactggcagagatgtcaagagtgagtatccgaatcctggatgaactggtgctgccattccaggagctgcagattgacgataacgaatacgcttacctgaaggccatcatctttttcgaccccgacgcaaaaggactgtctgatcctggcaagattaagcggctgcgctcccaggtccaggtgagcctggaggactatatcaatgacaggcagtacgatagcagagggcggtttggagaactgctgctgctgctgccaacactgcagtccattacctggcagatgatcgagcagatccagttcattaaactgttcggcatggccaagatcgacaacctgctgcaggagatgctgctgtgaggactagttataagactgactagcccgatgggcctcccaacgggccctcctcccctccttgcaccgagattaataaaaaaaaaaaaaaaaaaaaaaaaaaaaaaaaaaaaaaaaaaaaaaaaaaaaaaaaaaaaaaaatgcatcccccccccccccccccccccccccccccccaaaggctcttttcagagccaccagaatt

SEQ ID NO: 2403 - RNA, 1345 nt, synthetic construct; identical to SEQ ID NO: 2401
  misc_feature 1..1345: note = mRNA i-3 (A64-N5-C30-hSL-N5) (opt28) from Homo sapiens__NP_000448.3__HNF4A(1-375)(S87A_K106R_K108R_K126R_K 127R_S142A_S143A_S148A_T166A_S167A_S313A_S378A_T429A_T432A_ S436A_K458R_S461A)
  source 1..1345: mol_type = other RNA

SEQ ID NO: 2404 - RNA, 1345 nt, synthetic construct; identical to SEQ ID NO: 2401
  misc_feature 1..1345: note = mRNA i-3 (A64-N5-C30-hSL-N5) (opt28) from Homo sapiens__NP_000448.3__HNF4A(1-375)(S87A_K106R_K108R_K126R_K 127R_S142A_S143A_S148A_T166A_S167A_S313A_S378A_T429A_T432A_ S436A_K458R_S461E)
  source 1..1345: mol_type = other RNA

SEQ ID NO: 2405 - RNA, 1345 nt, synthetic construct
  misc_feature 1..1345: note = mRNA i-3 (A64-N5-C30-hSL-N5) (opt28) from Homo sapiens__NP_000448.3__HNF4A(1-375)(S87A_K106R_K108R_K126R_K 127R_S142A_S143A_S148E_T166A_S167E_S313A_S378E_T429E_T432E_ S436E_K458R_S461E)
  source 1..1345: mol_type = other RNA
aggagaaagcttaccatgcggctgagcaagaccctggtggacatggatatggcagactactccgccgctctggatccagcatatacaactctggagttcgaaaacgtccaggtgctgaccatgggaaatgacacatctccctcagagggcactaacctgaatgcccctaacagtctgggggtgagcgctctgtgcgcaatctgcggagacagggccaccggcaaacactacggggcttcctcttgtgatggatgcaagggctttttcagacgcgcagtccggaaaaatcatatgtacagctgccgattttcaaggcagtgcgtggtggacagagaccgccggaaccagtgcaggtattgtagactgaagaagtgcttccgagccggaatgcggcgcgaagctgtccagaatgagagggatagaattagtacacggcgagcagcctacgaagactccgagctgccaagcatcaacgcactgctgcaggctgaagtgctgtctaggcagatcgccgagcccgtgagcgggattaacggcgatatcagagctaaaaagattgcatccatcgccgacgtctgcgagtcaatgaaagaacagctgctggtgctggtggagtgggcaaagtacatccctgctttttgcgaactgccactggacgatcaggtcgccctgctgcgcgcacacgctggagagcatctgctgctgggcgccactaagcggagtatggtgttcaaagacgtgctgctgctggggaatgactatattgtccccaggcactgccctgaactggcagagatgagcagagtgtctatccgaatcctggatgaactggtgctgccattccaggagctgcagattgacgataacgaatacgcctacctgaaggctatcatctttttcgaccccgacgcaaaaggactgtccgatcctggcaagattaagcggctgcgcgcccaggtccaggtgagcctggaggactatatcaatgacaggcagtacgattcaagagggcggtttggagagctgctgctgctgctgccaaccctgcagagtattacatggcagatgatcgaacagatccagttcattaaactgttcggcatggcaaagatcgacaacctgctgcaggagatgctgctgtgaggactagttataagactgactagcccgatgggcctcccaacgggccctcctcccctccttgcaccgagattaataaaaaaaaaaaaaaaaaaaaaaaaaaaaaaaaaaaaaaaaaaaaaaaaaaaaaaaaaaaaaaaatgcatcccccccccccccccccccccccccccccccaaaggctcttttcagagccaccagaatt

SEQ ID NO: 2406 - RNA, 1345 nt, synthetic construct
  misc_feature 1..1345: note = mRNA i-3 (A64-N5-C30-hSL-N5) (opt28) from Homo sapiens__NP_000448.3__HNF4A(1-375)(S87A_K106R_K108R_K126R_K 127R_S142A_S143A_S148A_T166A_S167A_K179R_K180R_S313A_S378A_ T429A_T432A_S436A_K458R_S461E)
  source 1..1345: mol_type = other RNA
aggagaaagcttaccatgcggctgagcaagaccctggtggacatggatatggcagactactccgccgctctggatccagcatatacaactctggagttcgaaaacgtccaggtgctgaccatgggaaatgacacatctccctcagagggcactaacctgaatgcccctaacagtctgggggtgagcgctctgtgcgcaatctgcggagacagggccaccggcaaacactacggggcttcctcttgtgatggatgcaagggctttttcagacgcgcagtccggaaaaatcatatgtacagctgccgattttcaaggcagtgcgtggtggacagagaccgccggaaccagtgcaggtattgtagactgaagaagtgcttccgagccggaatgcggcgcgaagctgtccagaatgagagggatagaattagtacacggcgagcagcctacgaagactccgcactgccaagcatcaacgctctgctgcaggccgaggtgctgtctaggcagatcgcagctcccgtgagcgggattaacggcgatatcagagcccgccggattgcatccatcgctgacgtctgcgaatcaatgaaagagcagctgctggtgctggtggagtgggccaagtacatccctgcattttgcgaactgccactggacgatcaggtcgctctgctgagggcccacgcaggagagcatctgctgctgggcgccactaaaagaagtatggtgttcaaggacgtgctgctgctggggaatgactatattgtcccccgacactgccctgaactggctgagatgagccgggtgtctatccgcatcctggatgaactggtgctgccattccaggagctgcagattgacgataacgaatacgcatacctgaaggccatcatctttttcgaccccgacgcaaaaggactgtccgatcctggcaagattaaaaggctgagagctcaggtccaggtgagcctggaggactatatcaatgaccggcagtacgattcacgcgggaggtttggagaactgctgctgctgctgccaaccctgcagagtattacatggcagatgatcgagcagatccagttcattaagctgttcggcatggcaaagatcgacaacctgctgcaggagatgctgctgtgaggactagttataagactgactagcccgatgggcctcccaacgggccctcctcccctccttgcaccgagattaataaaaaaaaaaaaaaaaaaaaaaaaaaaaaaaaaaaaaaaaaaaaaaaaaaaaaaaaaaaaaaaatgcatcccccccccccccccccccccccccccccccaaaggctcttttcagagccaccagaatt

SEQ ID NO: 2407 - RNA, 1345 nt, synthetic construct
  misc_feature 1..1345: note = mRNA i-3 (A64-N5-C30-hSL-N5) (opt28) from Homo sapiens__NP_000448.3__HNF4A(1-375)(S87A_K106R_K108R_K126R_K 127R_S142A_S143A_S148A_T166A_S167A_K300R_K307R_K309R_S313A_ S378A_T429A_T432A_S436A_K458R_S461E)
  source 1..1345: mol_type = other RNA
aggagaaagcttaccatgcggctgagcaagaccctggtggacatggatatggcagactactccgccgctctggatccagcatatacaactctggagttcgaaaacgtccaggtgctgaccatgggaaatgacacatctccctcagagggcactaacctgaatgcccctaacagtctgggggtgagcgctctgtgcgcaatctgcggagacagggccaccggcaaacactacggggcttcctcttgtgatggatgcaagggctttttcagacgcgcagtccggaaaaatcatatgtacagctgccgattttcaaggcagtgcgtggtggacagagaccgccggaaccagtgcaggtattgtagactgaagaagtgcttccgagccggaatgcggcgcgaagctgtccagaatgagagggatagaattagtacacggcgagcagcctacgaagactccgcactgccaagcatcaacgctctgctgcaggccgaggtgctgtctaggcagatcgcagctcccgtgagcgggattaacggcgatatcagagccaaaaagattgcatccatcgctgacgtctgcgaatcaatgaaagagcagctgctggtgctggtggagtgggccaagtacatccctgcattttgcgaactgccactggacgatcaggtcgctctgctgcgcgcccacgcaggagagcatctgctgctgggcgccactaagcggagtatggtgttcaaagacgtgctgctgctggggaatgactatattgtccccaggcactgccctgaactggctgagatgagcagagtgtctatccgaatcctggatgaactggtgctgccattccaggagctgcagattgacgataacgaatacgcatacctgaaggccatcatctttttcgaccccgacgcacggggactgtccgatcctggccgcattaggagactgcgggctcaggtccaggtgagcctggaggactatatcaatgaccgccagtacgattcaagggggagatttggagaactgctgctgctgctgccaaccctgcagagtattacatggcagatgatcgagcagatccagttcattaaactgttcggcatggcaaagatcgacaacctgctgcaggagatgctgctgtgaggactagttataagactgactagcccgatgggcctcccaacgggccctcctcccctccttgcaccgagattaataaaaaaaaaaaaaaaaaaaaaaaaaaaaaaaaaaaaaaaaaaaaaaaaaaaaaaaaaaaaaaaatgcatcccccccccccccccccccccccccccccccaaaggctcttttcagagccaccagaatt

SEQ ID NO: 2408 - RNA, 1345 nt, synthetic construct; identical to SEQ ID NO: 2401
  misc_feature 1..1345: note = mRNA i-3 (A64-N5-C30-hSL-N5) (opt28) from Homo sapiens__NP_000448.3__HNF4A(1-375)(S87A_K106R_K108R_K126R_K 127R_S142A_S143A_S148A_T166A_S167A_S313A_S378A_T429A_T432A_ S436A_K447R_K458R_S461E_K470R)
  source 1..1345: mol_type = other RNA

SEQ ID NO: 2409 - RNA, 1345 nt, synthetic construct
  misc_feature 1..1345: note = mRNA i-3 (A64-N5-C30-hSL-N5) (opt28) from Homo sapiens__NP_000448.3__HNF4A(1-375)(S87A_K106R_K108R_K126R_K 127R_S142A_S143A_S148A_T166A_S167A_K179R_K180R_K234R_K300R_ K307R_K309R_S313A_S378A_T429A_T432A_S436A_K447R_K458R_S461E _K470R)
  source 1..1345: mol_type = other RNA
aggagaaagcttaccatgcggctgagcaagaccctggtggacatggatatggcagactactccgccgctctggatccagcatatacaactctggagttcgaaaacgtccaggtgctgaccatgggaaatgacacatctccctcagagggcactaacctgaatgcccctaacagtctgggggtgagcgctctgtgcgcaatctgcggagacagggccaccggcaaacactacggggcttcctcttgtgatggatgcaagggctttttcagacgcgcagtccggaaaaatcatatgtacagctgccgattttcaaggcagtgcgtggtggacagagaccgccggaaccagtgcaggtattgtagactgaagaagtgcttccgagccggaatgcggcgcgaagctgtccagaatgagagggatagaattagtacacggcgagcagcctacgaagactccgcactgccaagcatcaacgctctgctgcaggccgaggtgctgtctaggcagatcgcagctcccgtgagcgggattaacggcgatatcagagcccgccggattgcatccatcgctgacgtctgcgaatcaatgaaagagcagctgctggtgctggtggagtgggccaagtacatccctgcattttgcgaactgccactggacgatcaggtcgctctgctgagggcccacgcaggagagcatctgctgctgggcgccactagacgaagtatggtgttcaaagacgtgctgctgctggggaatgactatattgtcccccggcactgccctgaactggctgagatgagccgcgtgtctatcaggatcctggatgaactggtgctgccattccaggagctgcagattgacgataacgaatacgcatacctgaaggccatcatctttttcgaccccgacgcaagaggactgtccgatcctggccggattcgcaggctgagagctcaggtccaggtgagcctggaggactatatcaatgaccgacagtacgattcacgggggaggtttggagaactgctgctgctgctgccaaccctgcagagtattacatggcagatgatcgagcagatccagttcattaagctgttcggcatggcaaaaatcgacaacctgctgcaggagatgctgctgtgaggactagttataagactgactagcccgatgggcctcccaacgggccctcctcccctccttgcaccgagattaataaaaaaaaaaaaaaaaaaaaaaaaaaaaaaaaaaaaaaaaaaaaaaaaaaaaaaaaaaaaaaaatgcatcccccccccccccccccccccccccccccccaaaggctcttttcagagccaccagaatt

SEQ ID NO: 2410 - RNA, 1345 nt, synthetic construct
  misc_feature 1..1345: note = mRNA i-3 (A64-N5-C30-hSL-N5) (opt28) from Homo sapiens__NP_000448.3__HNF4A(1-375)(S87A_S95A_S99A_K106R_K10 8R_K126R_K127R_S142A_S143A_S148A_T166A_S167A_S313A_S378A_T4 29A_T432A_S436A_K458R_S461E)
  source 1..1345: mol_type = other RNA
aggagaaagcttaccatgcggctgagcaagaccctggtggacatggatatggcagactactccgccgctctggatccagcatatacaactctggagttcgaaaacgtccaggtgctgaccatgggaaatgacacatctccctcagagggcactaacctgaatgcccctaacagtctgggggtgagcgctctgtgcgcaatctgcggagacagggccaccggcaaacactacggggcttcctcttgtgatggatgcaagggctttttcagacgcgcagtccggaaaaatcatatgtacgcctgccgatttgctaggcagtgcgtggtggacagagaccgccggaaccagtgcaggtattgtagactgaagaagtgcttccgagcaggaatgcggcgcgaagccgtccagaatgagagggatagaattagcacacggcgagcagcttacgaagactcagccctgccaagtatcaacgcactgctgcaggctgaggtgctgtccaggcagatcgccgcacccgtgagcgggattaacggcgatatcagagctaaaaagattgcctctatcgcagacgtctgcgaaagcatgaaagagcagctgctggtgctggtggagtgggctaagtacatccctgccttttgcgaactgccactggacgatcaggtcgcactgctgcgcgcccacgctggagagcatctgctgctgggcgcaactaagcggtccatggtgttcaaagacgtgctgctgctggggaatgactatattgtccccaggcactgccctgaactggccgagatgtcaagagtgagtatccgaatcctggatgaactggtgctgccattccaggagctgcagattgacgataacgaatacgcatacctgaaggctatcatctttttcgaccccgacgcaaaaggactgagcgatcctggcaagattaagcggctgcgcgcccaggtccaggtgtctctggaggactatatcaatgacaggcagtacgattccagagggcggtttggagaactgctgctgctgctgccaaccctgcagagcattacatggcagatgatcgagcagatccagttcattaaactgttcggcatggctaagatcgacaacctgctgcaggagatgctgctgtgaggactagttataagactgactagcccgatgggcctcccaacgggccctcctcccctccttgcaccgagattaataaaaaaaaaaaaaaaaaaaaaaaaaaaaaaaaaaaaaaaaaaaaaaaaaaaaaaaaaaaaaaaatgcatcccccccccccccccccccccccccccccccaaaggctcttttcagagccaccagaatt

SEQ ID NO: 2411 - RNA, 1345 nt, synthetic construct
  misc_feature 1..1345: note = mRNA i-3 (A64-N5-C30-hSL-N5) (opt28) from Homo sapiens__NP_000448.3__HNF4A(1-375)(S87A_K106R_K108R_K126R_K 127R_S138A_T139A_S142A_S143A_S148A_T166A_S167A_S313A_S378A_ T429A_T432A_S436A_K458R_S461E)
  source 1..1345: mol_type = other RNA
aggagaaagcttaccatgcggctgagcaagaccctggtggacatggatatggcagactactccgccgctctggatccagcatatacaactctggagttcgaaaacgtccaggtgctgaccatgggaaatgacacatctccctcagagggcactaacctgaatgcccctaacagtctgggggtgagcgctctgtgcgcaatctgcggagacagggccaccggcaaacactacggggcttcctcttgtgatggatgcaagggctttttcagacgcgcagtccggaaaaatcatatgtacagctgccgattttcaaggcagtgcgtggtggacagagaccgccggaaccagtgcaggtattgtagactgaagaagtgcttccgagccggaatgcggcgcgaagctgtccagaatgagagggatagaattgcagcccggcgagcagcttacgaagacagtgccctgccatccatcaacgcactgctgcaggctgaggtgctgagcaggcagatcgccgcacccgtgtctgggattaacggcgatatcagagctaaaaagattgccagcatcgcagacgtctgcgaatccatgaaagagcagctgctggtgctggtggagtgggctaagtacatccctgccttttgcgaactgccactggacgatcaggtcgcactgctgcgcgcccacgctggagagcatctgctgctgggcgcaacaaagcggtcaatggtgttcaaagacgtgctgctgctggggaatgactatattgtccccaggcactgccctgaactggccgagatgagtagagtgagcatccgaatcctggatgaactggtgctgccattccaggagctgcagattgacgataacgaatacgcatacctgaaggctatcatctttttcgaccccgacgcaaaaggactgtctgatcctggcaagattaagcggctgcgcgcccaggtccaggtgtccctggaggactatatcaatgacaggcagtacgatagcagagggcggtttggagaactgctgctgctgctgccaactctgcagtcaattacctggcagatgatcgagcagatccagttcattaaactgttcggcatggctaagatcgacaacctgctgcaggagatgctgctgtgaggactagttataagactgactagcccgatgggcctcccaacgggccctcctcccctccttgcaccgagattaataaaaaaaaaaaaaaaaaaaaaaaaaaaaaaaaaaaaaaaaaaaaaaaaaaaaaaaaaaaaaaaatgcatcccccccccccccccccccccccccccccccaaaggctcttttcagagccaccagaatt

SEQ ID NO: 2412 - RNA, 1345 nt, synthetic construct
  misc_feature 1..1345: note = mRNA i-3 (A64-N5-C30-hSL-N5) (opt28) from Homo sapiens__NP_000448.3__HNF4A(1-375)(S87A_S95A_S99A_K106R_K10 8R_K126R_K127R_S138A_T139A_S142A_S143A_S148A_T166A_S167A_S3 13A_S378A_T429A_T432A_S436A_K458R_S461E)
  source 1..1345: mol_type = other RNA
aggagaaagcttaccatgcggctgagcaagaccctggtggacatggatatggcagactactccgccgctctggatccagcatatacaactctggagttcgaaaacgtccaggtgctgaccatgggaaatgacacatctccctcagagggcactaacctgaatgcccctaacagtctgggggtgagcgctctgtgcgcaatctgcggagacagggccaccggcaaacactacggggcttcctcttgtgatggatgcaagggctttttcagacgcgcagtccggaaaaatcatatgtacgcctgccgatttgctaggcagtgcgtggtggacagagaccgccggaaccagtgcaggtattgtagactgaagaagtgcttccgagcaggaatgcggcgcgaagccgtccagaatgagagggatagaattgcagctcggcgagccgcatacgaagacagcgctctgccatcaatcaacgccctgctgcaggcagaggtgctgagtaggcagatcgctgcccccgtgtccgggattaacggcgatatcagagctaaaaagattgcaagcatcgccgacgtctgcgaatctatgaaagagcagctgctggtgctggtggagtgggcaaagtacatccctgccttttgcgaactgccactggacgatcaggtcgctctgctgcgcgcacacgccggagagcatctgctgctgggcgcaacaaagcggagcatggtgttcaaagacgtgctgctgctggggaatgactatattgtccccaggcactgccctgaactggctgagatgtccagagtgtcaatccgaatcctggatgaactggtgctgccattccaggagctgcagattgacgataacgaatacgcatacctgaaggccatcatctttttcgaccccgacgctaaaggactgagtgatcctggcaagattaagcggctgcgcgcacaggtccaggtgagcctggaggactatatcaatgacaggcagtacgattctagagggcggtttggagaactgctgctgctgctgccaactctgcagtccattacctggcagatgatcgagcagatccagttcattaaactgttcggcatggccaagatcgacaacctgctgcaggagatgctgctgtgaggactagttataagactgactagcccgatgggcctcccaacgggccctcctcccctccttgcaccgagattaataaaaaaaaaaaaaaaaaaaaaaaaaaaaaaaaaaaaaaaaaaaaaaaaaaaaaaaaaaaaaaaatgcatcccccccccccccccccccccccccccccccaaaggctcttttcagagccaccagaatt

SEQ ID NO: 2413 - RNA, 1345 nt, synthetic construct
  misc_feature 1..1345: note = mRNA i-3 (A64-N5-C30-hSL-N5) (opt29) from Homo sapiens__NP_000448.3__HNF4A(1-375)
  source 1..1345: mol_type = other RNA
aggagaaagcttaccatgagactgagcaagaccctggtggacatggacatggccgactactctgccgccctggaccctgcctacaccaccctggagttcgaaaacgtgcaagtgctgaccatgggcaacgacaccagccctagcgagggcaccaacctgaacgcccctaatagcctgggagtgtccgccctgtgtgccatctgtggcgatagagccaccggcaagcactacggcgccagctcttgtgatggctgcaagggcttcttccggcggagcgtgcggaagaaccacatgtacagctgccggttcagccggcagtgcgtggtggacaaggataagcggaaccagtgccggtactgcagactgaagaagtgcttcagagccggcatgaagaaagaagccgtgcagaacgagcgggaccggatcagcaccagaagaagcagctacgaggacagcagcctgcccagcatcaacgccctgctgcaggccgaggtgctgagcagacagatcaccagcccagtgtccggcatcaacggcgacatccgggccaagaagatcgccagcattgccgacgtgtgcgagagcatgaaggaacagctgctggtgctggtggaatgggccaagtacatccccgccttttgcgagctgcccctggacgatcaggtggccctgctgagagcacacgccggcgaacatctgctgctgggagccaccaagcggagcatggtgttcaaggacgtgctgctgctgggcaacgactacatcgtgcccagacactgccctgagctggccgagatgagccgggtgtccatcagaatcctggacgaactggtgctgccgtttcaggaactgcagatcgacgacaacgagtacgcctacctgaaggccatcatctttttcgaccccgacgccaagggcctgagcgaccctggcaagatcaagcggctgagaagccaggtgcaagtgtccctggaagattacatcaacgaccggcagtacgacagccggggcagatttggcgaactgctcctgctgctgcccaccctgcagagcatcacctggcagatgatcgagcagatccagttcatcaagctgttcggcatggccaagatcgacaatctgctgcaggaaatgctgctctgaggactagttataagactgactagcccgatgggcctcccaacgggccctcctcccctccttgcaccgagattaataaaaaaaaaaaaaaaaaaaaaaaaaaaaaaaaaaaaaaaaaaaaaaaaaaaaaaaaaaaaaaaatgcatcccccccccccccccccccccccccccccccaaaggctcttttcagagccaccagaatt

SEQ ID NO: 2414 - RNA, 1345 nt, synthetic construct
  misc_feature 1..1345: note = mRNA i-3 (A64-N5-C30-hSL-N5) (opt29) from Homo sapiens__NP_000448.3__HNF4A(1-375)(S313A)
  source 1..1345: mol_type = other RNA
aggagaaagcttaccatgagactgagcaagaccctggtggacatggacatggccgactactctgccgccctggaccctgcctacaccaccctggagttcgaaaacgtgcaagtgctgaccatgggcaacgacaccagccctagcgagggcaccaacctgaacgcccctaatagcctgggagtgtccgccctgtgtgccatctgtggcgatagagccaccggcaagcactacggcgccagctcttgtgatggctgcaagggcttcttccggcggagcgtgcggaagaaccacatgtacagctgccggttcagccggcagtgcgtggtggacaaggataagcggaaccagtgccggtactgcagactgaagaagtgcttcagagccggcatgaagaaagaagccgtgcagaacgagcgggaccggatcagcaccagaagaagcagctacgaggacagcagcctgcccagcatcaacgccctgctgcaggccgaggtgctgagcagacagatcaccagcccagtgtccggcatcaacggcgacatccgggccaagaagatcgccagcattgccgacgtgtgcgagagcatgaaggaacagctgctggtgctggtggaatgggccaagtacatccccgccttttgcgagctgcccctggacgatcaggtggccctgctgagagcacacgccggcgaacatctgctgctgggagccaccaagcggagcatggtgttcaaggacgtgctgctgctgggcaacgactacatcgtgcccagacactgccctgagctggccgagatgagccgggtgtccatcagaatcctggacgaactggtgctgccgtttcaggaactgcagatcgacgacaacgagtacgcctacctgaaggccatcatctttttcgaccccgacgccaagggcctgagcgaccctggcaagatcaagcggctgagagcccaggtgcaagtgtccctggaagattacatcaacgaccggcagtacgacagccggggcagatttggcgaactgctcctgctgctgcccaccctgcagagcatcacctggcagatgatcgagcagatccagttcatcaagctgttcggcatggccaagatcgacaatctgctgcaggaaatgctgctctgaggactagttataagactgactagcccgatgggcctcccaacgggccctcctcccctccttgcaccgagattaataaaaaaaaaaaaaaaaaaaaaaaaaaaaaaaaaaaaaaaaaaaaaaaaaaaaaaaaaaaaaaaatgcatcccccccccccccccccccccccccccccccaaaggctcttttcagagccaccagaatt

SEQ ID NO: 2415 - RNA, 1345 nt, synthetic construct
  misc_feature 1..1345: note = mRNA i-3 (A64-N5-C30-hSL-N5) (opt29) from Homo sapiens__NP_000448.3__HNF4A(1-375)(S313E)
  source 1..1345: mol_type = other RNA
aggagaaagcttaccatgagactgagcaagaccctggtggacatggacatggccgactactctgccgccctggaccctgcctacaccaccctggagttcgaaaacgtgcaagtgctgaccatgggcaacgacaccagccctagcgagggcaccaacctgaacgcccctaatagcctgggagtgtccgccctgtgtgccatctgtggcgatagagccaccggcaagcactacggcgccagctcttgtgatggctgcaagggcttcttccggcggagcgtgcggaagaaccacatgtacagctgccggttcagccggcagtgcgtggtggacaaggataagcggaaccagtgccggtactgcagactgaagaagtgcttcagagccggcatgaagaaagaagccgtgcagaacgagcgggaccggatcagcaccagaagaagcagctacgaggacagcagcctgcccagcatcaacgccctgctgcaggccgaggtgctgagcagacagatcaccagcccagtgtccggcatcaacggcgacatccgggccaagaagatcgccagcattgccgacgtgtgcgagagcatgaaggaacagctgctggtgctggtggaatgggccaagtacatccccgccttttgcgagctgcccctggacgatcaggtggccctgctgagagcacacgccggcgaacatctgctgctgggagccaccaagcggagcatggtgttcaaggacgtgctgctgctgggcaacgactacatcgtgcccagacactgccctgagctggccgagatgagccgggtgtccatcagaatcctggacgaactggtgctgccgtttcaggaactgcagatcgacgacaacgagtacgcctacctgaaggccatcatctttttcgaccccgacgccaagggcctgagcgaccctggcaagatcaagcggctgagagaacaggtgcaagtgtccctggaagattacatcaacgaccggcagtacgacagccggggcagatttggcgaactgctcctgctgctgcccaccctgcagagcatcacctggcagatgatcgagcagatccagttcatcaagctgttcggcatggccaagatcgacaatctgctgcaggaaatgctgctctgaggactagttataagactgactagcccgatgggcctcccaacgggccctcctcccctccttgcaccgagattaataaaaaaaaaaaaaaaaaaaaaaaaaaaaaaaaaaaaaaaaaaaaaaaaaaaaaaaaaaaaaaaatgcatcccccccccccccccccccccccccccccccaaaggctcttttcagagccaccagaatt

SEQ ID NO: 2416 - RNA, 1345 nt, synthetic construct
  misc_feature 1..1345: note = mRNA i-3 (A64-N5-C30-hSL-N5) (opt29) from Homo sapiens__NP_000448.3__HNF4A(1-375)(S142A_S143A)
  source 1..1345: mol_type = other RNA
aggagaaagcttaccatgagactgagcaagaccctggtggacatggacatggccgactactctgccgccctggaccctgcctacaccaccctggagttcgaaaacgtgcaagtgctgaccatgggcaacgacaccagccctagcgagggcaccaacctgaacgcccctaatagcctgggagtgtccgccctgtgtgccatctgtggcgatagagccaccggcaagcactacggcgccagctcttgtgatggctgcaagggcttcttccggcggagcgtgcggaagaaccacatgtacagctgccggttcagccggcagtgcgtggtggacaaggataagcggaaccagtgccggtactgcagactgaagaagtgcttcagagccggcatgaagaaagaagccgtgcagaacgagcgggaccggatcagcaccagaagagccgcctacgaggacagcagcctgcccagcatcaacgccctgctgcaggccgaggtgctgagcagacagatcaccagcccagtgtccggcatcaacggcgacatccgggccaagaagatcgccagcattgccgacgtgtgcgagagcatgaaggaacagctgctggtgctggtggaatgggccaagtacatccccgccttttgcgagctgcccctggacgatcaggtggccctgctgagagcacacgccggcgaacatctgctgctgggagccaccaagcggagcatggtgttcaaggacgtgctgctgctgggcaacgactacatcgtgcccagacactgccctgagctggccgagatgagccgggtgtccatcagaatcctggacgaactggtgctgccgtttcaggaactgcagatcgacgacaacgagtacgcctacctgaaggccatcatctttttcgaccccgacgccaagggcctgagcgaccctggcaagatcaagcggctgagaagccaggtgcaagtgtccctggaagattacatcaacgaccggcagtacgacagccggggcagatttggcgaactgctcctgctgctgcccaccctgcagagcatcacctggcagatgatcgagcagatccagttcatcaagctgttcggcatggccaagatcgacaatctgctgcaggaaatgctgctctgaggactagttataagactgactagcccgatgggcctcccaacgggccctcctcccctccttgcaccgagattaataaaaaaaaaaaaaaaaaaaaaaaaaaaaaaaaaaaaaaaaaaaaaaaaaaaaaaaaaaaaaaaatgcatcccccccccccccccccccccccccccccccaaaggctcttttcagagccaccagaatt

SEQ ID NO: 2417 - RNA, 1345 nt, synthetic construct
  misc_feature 1..1345: note = mRNA i-3 (A64-N5-C30-hSL-N5) (opt29) from Homo sapiens__NP_000448.3__HNF4A(1-375)(S142E_S143E)
  source 1..1345: mol_type = other RNA
aggagaaagcttaccatgagactgagcaagaccctggtggacatggacatggccgactactctgccgccctggaccctgcctacaccaccctggagttcgaaaacgtgcaagtgctgaccatgggcaacgacaccagccctagcgagggcaccaacctgaacgcccctaatagcctgggagtgtccgccctgtgtgccatctgtggcgatagagccaccggcaagcactacggcgccagctcttgtgatggctgcaagggcttcttccggcggagcgtgcggaagaaccacatgtacagctgccggttcagccggcagtgcgtggtggacaaggataagcggaaccagtgccggtactgcagactgaagaagtgcttcagagccggcatgaagaaagaagccgtgcagaacgagcgggaccggatcagcaccagaagagaagagtacgaggacagcagcctgcccagcatcaacgccctgctgcaggccgaggtgctgagcagacagatcaccagcccagtgtccggcatcaacggcgacatccgggccaagaagatcgccagcattgccgacgtgtgcgagagcatgaaggaacagctgctggtgctggtggaatgggccaagtacatccccgccttttgcgagctgcccctggacgatcaggtggccctgctgagagcacacgccggcgaacatctgctgctgggagccaccaagcggagcatggtgttcaaggacgtgctgctgctgggcaacgactacatcgtgcccagacactgccctgagctggccgagatgagccgggtgtccatcagaatcctggacgaactggtgctgccgtttcaggaactgcagatcgacgacaacgagtacgcctacctgaaggccatcatctttttcgaccccgacgccaagggcctgagcgaccctggcaagatcaagcggctgagaagccaggtgcaagtgtccctggaagattacatcaacgaccggcagtacgacagccggggcagatttggcgaactgctcctgctgctgcccaccctgcagagcatcacctggcagatgatcgagcagatccagttcatcaagctgttcggcatggccaagatcgacaatctgctgcaggaaatgctgctctgaggactagttataagactgactagcccgatgggcctcccaacgggccctcctcccctccttgcaccgagattaataaaaaaaaaaaaaaaaaaaaaaaaaaaaaaaaaaaaaaaaaaaaaaaaaaaaaaaaaaaaaaaatgcatcccccccccccccccccccccccccccccccaaaggctcttttcagagccaccagaatt

SEQ ID NO: 2418 - RNA, 1345 nt, synthetic construct
  misc_feature 1..1345: note = mRNA i-3 (A64-N5-C30-hSL-N5) (opt29) from Homo sapiens__NP_000448.3__HNF4A(1-375)(S143A)
  source 1..1345: mol_type = other RNA
aggagaaagcttaccatgagactgagcaagaccctggtggacatggacatggccgactactctgccgccctggaccctgcctacaccaccctggagttcgaaaacgtgcaagtgctgaccatgggcaacgacaccagccctagcgagggcaccaacctgaacgcccctaatagcctgggagtgtccgccctgtgtgccatctgtggcgatagagccaccggcaagcactacggcgccagctcttgtgatggctgcaagggcttcttccggcggagcgtgcggaagaaccacatgtacagctgccggttcagccggcagtgcgtggtggacaaggataagcggaaccagtgccggtactgcagactgaagaagtgcttcagagccggcatgaagaaagaagccgtgcagaacgagcgggaccggatcagcaccagaagaagcgcctacgaggacagcagcctgcccagcatcaacgccctgctgcaggccgaggtgctgagcagacagatcaccagcccagtgtccggcatcaacggcgacatccgggccaagaagatcgccagcattgccgacgtgtgcgagagcatgaaggaacagctgctggtgctggtggaatgggccaagtacatccccgccttttgcgagctgcccctggacgatcaggtggccctgctgagagcacacgccggcgaacatctgctgctgggagccaccaagcggagcatggtgttcaaggacgtgctgctgctgggcaacgactacatcgtgcccagacactgccctgagctggccgagatgagccgggtgtccatcagaatcctggacgaactggtgctgccgtttcaggaactgcagatcgacgacaacgagtacgcctacctgaaggccatcatctttttcgaccccgacgccaagggcctgagcgaccctggcaagatcaagcggctgagaagccaggtgcaagtgtccctggaagattacatcaacgaccggcagtacgacagccggggcagatttggcgaactgctcctgctgctgcccaccctgcagagcatcacctggcagatgatcgagcagatccagttcatcaagctgttcggcatggccaagatcgacaatctgctgcaggaaatgctgctctgaggactagttataagactgactagcccgatgggcctcccaacgggccctcctcccctccttgcaccgagattaataaaaaaaaaaaaaaaaaaaaaaaaaaaaaaaaaaaaaaaaaaaaaaaaaaaaaaaaaaaaaaaatgcatcccccccccccccccccccccccccccccccaaaggctcttttcagagccaccagaatt

SEQ ID NO: 2419 - RNA, 1345 nt, synthetic construct
  misc_feature 1..1345: note = mRNA i-3 (A64-N5-C30-hSL-N5) (opt29) from Homo sapiens__NP_000448.3__HNF4A(1-375)(T166A)
  source 1..1345: mol_type = other RNA
aggagaaagcttaccatgagactgagcaagaccctggtggacatggacatggccgactactctgccgccctggaccctgcctacaccaccctggagttcgaaaacgtgcaagtgctgaccatgggcaacgacaccagccctagcgagggcaccaacctgaacgcccctaatagcctgggagtgtccgccctgtgtgccatctgtggcgatagagccaccggcaagcactacggcgccagctcttgtgatggctgcaagggcttcttccggcggagcgtgcggaagaaccacatgtacagctgccggttcagccggcagtgcgtggtggacaaggataagcggaaccagtgccggtactgcagactgaagaagtgcttcagagccggcatgaagaaagaagccgtgcagaacgagcgggaccggatcagcaccagaagaagcagctacgaggacagcagcctgcccagcatcaacgccctgctgcaggccgaggtgctgagcagacagatcgccagcccagtgtccggcatcaacggcgacatccgggccaagaagatcgccagcattgccgacgtgtgcgagagcatgaaggaacagctgctggtgctggtggaatgggccaagtacatccccgccttttgcgagctgcccctggacgatcaggtggccctgctgagagcacacgccggcgaacatctgctgctgggagccaccaagcggagcatggtgttcaaggacgtgctgctgctgggcaacgactacatcgtgcccagacactgccctgagctggccgagatgagccgggtgtccatcagaatcctggacgaactggtgctgccgtttcaggaactgcagatcgacgacaacgagtacgcctacctgaaggccatcatctttttcgaccccgacgccaagggcctgagcgaccctggcaagatcaagcggctgagaagccaggtgcaagtgtccctggaagattacatcaacgaccggcagtacgacagccggggcagatttggcgaactgctcctgctgctgcccaccctgcagagcatcacctggcagatgatcgagcagatccagttcatcaagctgttcggcatggccaagatcgacaatctgctgcaggaaatgctgctctgaggactagttataagactgactagcccgatgggcctcccaacgggccctcctcccctccttgcaccgagattaataaaaaaaaaaaaaaaaaaaaaaaaaaaaaaaaaaaaaaaaaaaaaaaaaaaaaaaaaaaaaaaatgcatcccccccccccccccccccccccccccccccaaaggctcttttcagagccaccagaatt

SEQ ID NO: 2420 - RNA, 1345 nt, synthetic construct
  misc_feature 1..1345: note = mRNA i-3 (A64-N5-C30-hSL-N5) (opt29) from Homo sapiens__NP_000448.3__HNF4A(1-375)(S167E)
  source 1..1345: mol_type = other RNA
aggagaaagcttaccatgagactgagcaagaccctggtggacatggacatggccgactactctgccgccctggaccctgcctacaccaccctggagttcgaaaacgtgcaagtgctgaccatgggcaacgacaccagccctagcgagggcaccaacctgaacgcccctaatagcctgggagtgtccgccctgtgtgccatctgtggcgatagagccaccggcaagcactacggcgccagctcttgtgatggctgcaagggcttcttccggcggagcgtgcggaagaaccacatgtacagctgccggttcagccggcagtgcgtggtggacaaggataagcggaaccagtgccggtactgcagactgaagaagtgcttcagagccggcatgaagaaagaagccgtgcagaacgagcgggaccggatcagcaccagaagaagcagctacgaggacagcagcctgcccagcatcaacgccctgctgcaggccgaggtgctgagcagacagatcaccgaaccagtgtccggcatcaacggcgacatccgggccaagaagatcgccagcattgccgacgtgtgcgagagcatgaaggaacagctgctggtgctggtggaatgggccaagtacatccccgccttttgcgagctgcccctggacgatcaggtggccctgctgagagcacacgccggcgaacatctgctgctgggagccaccaagcggagcatggtgttcaaggacgtgctgctgctgggcaacgactacatcgtgcccagacactgccctgagctggccgagatgagccgggtgtccatcagaatcctggacgaactggtgctgccgtttcaggaactgcagatcgacgacaacgagtacgcctacctgaaggccatcatctttttcgaccccgacgccaagggcctgagcgaccctggcaagatcaagcggctgagaagccaggtgcaagtgtccctggaagattacatcaacgaccggcagtacgacagccggggcagatttggcgaactgctcctgctgctgcccaccctgcagagcatcacctggcagatgatcgagcagatccagttcatcaagctgttcggcatggccaagatcgacaatctgctgcaggaaatgctgctctgaggactagttataagactgactagcccgatgggcctcccaacgggccctcctcccctccttgcaccgagattaataaaaaaaaaaaaaaaaaaaaaaaaaaaaaaaaaaaaaaaaaaaaaaaaaaaaaaaaaaaaaaaatgcatcccccccccccccccccccccccccccccccaaaggctcttttcagagccaccagaatt

SEQ ID NO: 2421 - RNA, 1345 nt, synthetic construct
  misc_feature 1..1345: note = mRNA i-3 (A64-N5-C30-hSL-N5) (opt29) from Homo sapiens__NP_000448.3__HNF4A(1-375)(S167A)
  source 1..1345: mol_type = other RNA
aggagaaagcttaccatgagactgagcaagaccctggtggacatggacatggccgactactctgccgccctggaccctgcctacaccaccctggagttcgaaaacgtgcaagtgctgaccatgggcaacgacaccagccctagcgagggcaccaacctgaacgcccctaatagcctgggagtgtccgccctgtgtgccatctgtggcgatagagccaccggcaagcactacggcgccagctcttgtgatggctgcaagggcttcttccggcggagcgtgcggaagaaccacatgtacagctgccggttcagccggcagtgcgtggtggacaaggataagcggaaccagtgccggtactgcagactgaagaagtgcttcagagccggcatgaagaaagaagccgtgcagaacgagcgggaccggatcagcaccagaagaagcagctacgaggacagcagcctgcccagcatcaacgccctgctgcaggccgaggtgctgagcagacagatcaccgccccagtgtccggcatcaacggcgacatccgggccaagaagatcgccagcattgccgacgtgtgcgagagcatgaaggaacagctgctggtgctggtggaatgggccaagtacatccccgccttttgcgagctgcccctggacgatcaggtggccctgctgagagcacacgccggcgaacatctgctgctgggagccaccaagcggagcatggtgttcaaggacgtgctgctgctgggcaacgactacatcgtgcccagacactgccctgagctggccgagatgagccgggtgtccatcagaatcctggacgaactggtgctgccgtttcaggaactgcagatcgacgacaacgagtacgcctacctgaaggccatcatctttttcgaccccgacgccaagggcctgagcgaccctggcaagatcaagcggctgagaagccaggtgcaagtgtccctggaagattacatcaacgaccggcagtacgacagccggggcagatttggcgaactgctcctgctgctgcccaccctgcagagcatcacctggcagatgatcgagcagatccagttcatcaagctgttcggcatggccaagatcgacaatctgctgcaggaaatgctgctctgaggactagttataagactgactagcccgatgggcctcccaacgggccctcctcccctccttgcaccgagattaataaaaaaaaaaaaaaaaaaaaaaaaaaaaaaaaaaaaaaaaaaaaaaaaaaaaaaaaaaaaaaaatgcatcccccccccccccccccccccccccccccccaaaggctcttttcagagccaccagaatt

SEQ ID NO: 2422 - RNA, 1345 nt, synthetic construct; identical to SEQ ID NO: 2421
  misc_feature 1..1345: note = mRNA i-3 (A64-N5-C30-hSL-N5) (opt29) from Homo sapiens__NP_000448.3__HNF4A(1-375)(S167A_S378A_T429A_T432A_ S436A)
  source 1..1345: mol_type = other RNA

SEQ ID NO: 2423 - RNA, 1345 nt, synthetic construct; identical to SEQ ID NO: 2420
  misc_feature 1..1345: note = mRNA i-3 (A64-N5-C30-hSL-N5) (opt29) from Homo sapiens__NP_000448.3__HNF4A(1-375)(S167E_S378E_T429E_T432E_ S436E)
  source 1..1345: mol_type = other RNA

SEQ ID NO: 2424 - RNA, 1345 nt, synthetic construct
  misc_feature 1..1345: note = mRNA i-3 (A64-N5-C30-hSL-N5) (opt29) from Homo sapiens__NP_000448.3__HNF4A(1-375)(S87A)
  source 1..1345: mol_type = other RNA
aggagaaagcttaccatgagactgagcaagaccctggtggacatggacatggccgactactctgccgccctggaccctgcctacaccaccctggagttcgaaaacgtgcaagtgctgaccatgggcaacgacaccagccctagcgagggcaccaacctgaacgcccctaatagcctgggagtgtccgccctgtgtgccatctgtggcgatagagccaccggcaagcactacggcgccagctcttgtgatggctgcaagggcttcttccggcgggccgtgcggaagaaccacatgtacagctgccggttcagccggcagtgcgtggtggacaaggataagcggaaccagtgccggtactgcagactgaagaagtgcttcagagccggcatgaagaaagaagccgtgcagaacgagcgggaccggatcagcaccagaagaagcagctacgaggacagcagcctgcccagcatcaacgccctgctgcaggccgaggtgctgagcagacagatcaccagcccagtgtccggcatcaacggcgacatccgggccaagaagatcgccagcattgccgacgtgtgcgagagcatgaaggaacagctgctggtgctggtggaatgggccaagtacatccccgccttttgcgagctgcccctggacgatcaggtggccctgctgagagcacacgccggcgaacatctgctgctgggagccaccaagcggagcatggtgttcaaggacgtgctgctgctgggcaacgactacatcgtgcccagacactgccctgagctggccgagatgagccgggtgtccatcagaatcctggacgaactggtgctgccgtttcaggaactgcagatcgacgacaacgagtacgcctacctgaaggccatcatctttttcgaccccgacgccaagggcctgagcgaccctggcaagatcaagcggctgagaagccaggtgcaagtgtccctggaagattacatcaacgaccggcagtacgacagccggggcagatttggcgaactgctcctgctgctgcccaccctgcagagcatcacctggcagatgatcgagcagatccagttcatcaagctgttcggcatggccaagatcgacaatctgctgcaggaaatgctgctctgaggactagttataagactgactagcccgatgggcctcccaacgggccctcctcccctccttgcaccgagattaataaaaaaaaaaaaaaaaaaaaaaaaaaaaaaaaaaaaaaaaaaaaaaaaaaaaaaaaaaaaaaaatgcatcccccccccccccccccccccccccccccccaaaggctcttttcagagccaccagaatt

SEQ ID NO: 2425 - RNA, 1345 nt, synthetic construct
  misc_feature 1..1345: note = mRNA i-3 (A64-N5-C30-hSL-N5) (opt29) from Homo sapiens__NP_000448.3__HNF4A(1-375)(S87E)
  source 1..1345: mol_type = other RNA
aggagaaagcttaccatgagactgagcaagaccctggtggacatggacatggccgactactctgccgccctggaccctgcctacaccaccctggagttcgaaaacgtgcaagtgctgaccatgggcaacgacaccagccctagcgagggcaccaacctgaacgcccctaatagcctgggagtgtccgccctgtgtgccatctgtggcgatagagccaccggcaagcactacggcgccagctcttgtgatggctgcaagggcttcttccggcgggaggtgcggaagaaccacatgtacagctgccggttcagccggcagtgcgtggtggacaaggataagcggaaccagtgccggtactgcagactgaagaagtgcttcagagccggcatgaagaaagaagccgtgcagaacgagcgggaccggatcagcaccagaagaagcagctacgaggacagcagcctgcccagcatcaacgccctgctgcaggccgaggtgctgagcagacagatcaccagcccagtgtccggcatcaacggcgacatccgggccaagaagatcgccagcattgccgacgtgtgcgagagcatgaaggaacagctgctggtgctggtggaatgggccaagtacatccccgccttttgcgagctgcccctggacgatcaggtggccctgctgagagcacacgccggcgaacatctgctgctgggagccaccaagcggagcatggtgttcaaggacgtgctgctgctgggcaacgactacatcgtgcccagacactgccctgagctggccgagatgagccgggtgtccatcagaatcctggacgaactggtgctgccgtttcaggaactgcagatcgacgacaacgagtacgcctacctgaaggccatcatctttttcgaccccgacgccaagggcctgagcgaccctggcaagatcaagcggctgagaagccaggtgcaagtgtccctggaagattacatcaacgaccggcagtacgacagccggggcagatttggcgaactgctcctgctgctgcccaccctgcagagcatcacctggcagatgatcgagcagatccagttcatcaagctgttcggcatggccaagatcgacaatctgctgcaggaaatgctgctctgaggactagttataagactgactagcccgatgggcctcccaacgggccctcctcccctccttgcaccgagattaataaaaaaaaaaaaaaaaaaaaaaaaaaaaaaaaaaaaaaaaaaaaaaaaaaaaaaaaaaaaaaaatgcatcccccccccccccccccccccccccccccccaaaggctcttttcagagccaccagaatt

SEQ ID NO: 2426 - RNA, 1345 nt, synthetic construct
  misc_feature 1..1345: note = mRNA i-3 (A64-N5-C30-hSL-N5) (opt29) from Homo sapiens__NP_000448.3__HNF4A(1-375)(R2V)
  source 1..1345: mol_type = other RNA
aggagaaagcttaccatggtgctgagcaagaccctggtggacatggacatggccgactactctgccgccctggaccctgcctacaccaccctggagttcgaaaacgtgcaagtgctgaccatgggcaacgacaccagccctagcgagggcaccaacctgaacgcccctaatagcctgggagtgtccgccctgtgtgccatctgtggcgatagagccaccggcaagcactacggcgccagctcttgtgatggctgcaagggcttcttccggcggagcgtgcggaagaaccacatgtacagctgccggttcagccggcagtgcgtggtggacaaggataagcggaaccagtgccggtactgcagactgaagaagtgcttcagagccggcatgaagaaagaagccgtgcagaacgagcgggaccggatcagcaccagaagaagcagctacgaggacagcagcctgcccagcatcaacgccctgctgcaggccgaggtgctgagcagacagatcaccagcccagtgtccggcatcaacggcgacatccgggccaagaagatcgccagcattgccgacgtgtgcgagagcatgaaggaacagctgctggtgctggtggaatgggccaagtacatccccgccttttgcgagctgcccctggacgatcaggtggccctgctgagagcacacgccggcgaacatctgctgctgggagccaccaagcggagcatggtgttcaaggacgtgctgctgctgggcaacgactacatcgtgcccagacactgccctgagctggccgagatgagccgggtgtccatcagaatcctggacgaactggtgctgccgtttcaggaactgcagatcgacgacaacgagtacgcctacctgaaggccatcatctttttcgaccccgacgccaagggcctgagcgaccctggcaagatcaagcggctgagaagccaggtgcaagtgtccctggaagattacatcaacgaccggcagtacgacagccggggcagatttggcgaactgctcctgctgctgcccaccctgcagagcatcacctggcagatgatcgagcagatccagttcatcaagctgttcggcatggccaagatcgacaatctgctgcaggaaatgctgctctgaggactagttataagactgactagcccgatgggcctcccaacgggccctcctcccctccttgcaccgagattaataaaaaaaaaaaaaaaaaaaaaaaaaaaaaaaaaaaaaaaaaaaaaaaaaaaaaaaaaaaaaaaatgcatcccccccccccccccccccccccccccccccaaaggctcttttcagagccaccagaatt

SEQ ID NO: 2427 - RNA, 1345 nt, synthetic construct
  misc_feature 1..1345: note = mRNA i-3 (A64-N5-C30-hSL-N5) (opt29) from Homo sapiens__NP_000448.3__HNF4A(1-375)(R2V_K5V)
  source 1..1345: mol_type = other RNA
aggagaaagcttaccatggtgctgagcgtgaccctggtggacatggacatggccgactactctgccgccctggaccctgcctacaccaccctggagttcgaaaacgtgcaagtgctgaccatgggcaacgacaccagccctagcgagggcaccaacctgaacgcccctaatagcctgggagtgtccgccctgtgtgccatctgtggcgatagagccaccggcaagcactacggcgccagctcttgtgatggctgcaagggcttcttccggcggagcgtgcggaagaaccacatgtacagctgccggttcagccggcagtgcgtggtggacaaggataagcggaaccagtgccggtactgcagactgaagaagtgcttcagagccggcatgaagaaagaagccgtgcagaacgagcgggaccggatcagcaccagaagaagcagctacgaggacagcagcctgcccagcatcaacgccctgctgcaggccgaggtgctgagcagacagatcaccagcccagtgtccggcatcaacggcgacatccgggccaagaagatcgccagcattgccgacgtgtgcgagagcatgaaggaacagctgctggtgctggtggaatgggccaagtacatccccgccttttgcgagctgcccctggacgatcaggtggccctgctgagagcacacgccggcgaacatctgctgctgggagccaccaagcggagcatggtgttcaaggacgtgctgctgctgggcaacgactacatcgtgcccagacactgccctgagctggccgagatgagccgggtgtccatcagaatcctggacgaactggtgctgccgtttcaggaactgcagatcgacgacaacgagtacgcctacctgaaggccatcatctttttcgaccccgacgccaagggcctgagcgaccctggcaagatcaagcggctgagaagccaggtgcaagtgtccctggaagattacatcaacgaccggcagtacgacagccggggcagatttggcgaactgctcctgctgctgcccaccctgcagagcatcacctggcagatgatcgagcagatccagttcatcaagctgttcggcatggccaagatcgacaatctgctgcaggaaatgctgctctgaggactagttataagactgactagcccgatgggcctcccaacgggccctcctcccctccttgcaccgagattaataaaaaaaaaaaaaaaaaaaaaaaaaaaaaaaaaaaaaaaaaaaaaaaaaaaaaaaaaaaaaaaatgcatcccccccccccccccccccccccccccccccaaaggctcttttcagagccaccagaatt

SEQ ID NO: 2428 - RNA, 1345 nt, synthetic construct
  misc_feature 1..1345: note = mRNA i-3 (A64-N5-C30-hSL-N5) (opt29) from Homo sapiens__NP_000448.3__HNF4A(1-375)(K179R_K180R)
  source 1..1345: mol_type = other RNA
aggagaaagcttaccatgagactgagcaagaccctggtggacatggacatggccgactactctgccgccctggaccctgcctacaccaccctggagttcgaaaacgtgcaagtgctgaccatgggcaacgacaccagccctagcgagggcaccaacctgaacgcccctaatagcctgggagtgtccgccctgtgtgccatctgtggcgatagagccaccggcaagcactacggcgccagctcttgtgatggctgcaagggcttcttccggcggagcgtgcggaagaaccacatgtacagctgccggttcagccggcagtgcgtggtggacaaggataagcggaaccagtgccggtactgcagactgaagaagtgcttcagagccggcatgaagaaagaagccgtgcagaacgagcgggaccggatcagcaccagaagaagcagctacgaggacagcagcctgcccagcatcaacgccctgctgcaggccgaggtgctgagcagacagatcaccagcccagtgtccggcatcaacggcgacatccgggcccggagaatcgccagcattgccgacgtgtgcgagagcatgaaggaacagctgctggtgctggtggaatgggccaagtacatccccgccttttgcgagctgcccctggacgatcaggtggccctgctgagagcacacgccggcgaacatctgctgctgggagccaccaagcggagcatggtgttcaaggacgtgctgctgctgggcaacgactacatcgtgcccagacactgccctgagctggccgagatgagccgggtgtccatcagaatcctggacgaactggtgctgccgtttcaggaactgcagatcgacgacaacgagtacgcctacctgaaggccatcatctttttcgaccccgacgccaagggcctgagcgaccctggcaagatcaagcggctgagaagccaggtgcaagtgtccctggaagattacatcaacgaccggcagtacgacagccggggcagatttggcgaactgctcctgctgctgcccaccctgcagagcatcacctggcagatgatcgagcagatccagttcatcaagctgttcggcatggccaagatcgacaatctgctgcaggaaatgctgctctgaggactagttataagactgactagcccgatgggcctcccaacgggccctcctcccctccttgcaccgagattaataaaaaaaaaaaaaaaaaaaaaaaaaaaaaaaaaaaaaaaaaaaaaaaaaaaaaaaaaaaaaaaatgcatcccccccccccccccccccccccccccccccaaaggctcttttcagagccaccagaatt

SEQ ID NO: 2429 - RNA, 1345 nt, synthetic construct
  misc_feature 1..1345: note = mRNA i-3 (A64-N5-C30-hSL-N5) (opt29) from Homo sapiens__NP_000448.3__HNF4A(1-375)(K234R)
  source 1..1345: mol_type = other RNA
aggagaaagcttaccatgagactgagcaagaccctggtggacatggacatggccgactactctgccgccctggaccctgcctacaccaccctggagttcgaaaacgtgcaagtgctgaccatgggcaacgacaccagccctagcgagggcaccaacctgaacgcccctaatagcctgggagtgtccgccctgtgtgccatctgtggcgatagagccaccggcaagcactacggcgccagctcttgtgatggctgcaagggcttcttccggcggagcgtgcggaagaaccacatgtacagctgccggttcagccggcagtgcgtggtggacaaggataagcggaaccagtgccggtactgcagactgaagaagtgcttcagagccggcatgaagaaagaagccgtgcagaacgagcgggaccggatcagcaccagaagaagcagctacgaggacagcagcctgcccagcatcaacgccctgctgcaggccgaggtgctgagcagacagatcaccagcccagtgtccggcatcaacggcgacatccgggccaagaagatcgccagcattgccgacgtgtgcgagagcatgaaggaacagctgctggtgctggtggaatgggccaagtacatccccgccttttgcgagctgcccctggacgatcaggtggccctgctgagagcacacgccggcgaacatctgctgctgggagccacccggcggagcatggtgttcaaggacgtgctgctgctgggcaacgactacatcgtgcccagacactgccctgagctggccgagatgagccgggtgtccatcagaatcctggacgaactggtgctgccgtttcaggaactgcagatcgacgacaacgagtacgcctacctgaaggccatcatctttttcgaccccgacgccaagggcctgagcgaccctggcaagatcaagcggctgagaagccaggtgcaagtgtccctggaagattacatcaacgaccggcagtacgacagccggggcagatttggcgaactgctcctgctgctgcccaccctgcagagcatcacctggcagatgatcgagcagatccagttcatcaagctgttcggcatggccaagatcgacaatctgctgcaggaaatgctgctctgaggactagttataagactgactagcccgatgggcctcccaacgggccctcctcccctccttgcaccgagattaataaaaaaaaaaaaaaaaaaaaaaaaaaaaaaaaaaaaaaaaaaaaaaaaaaaaaaaaaaaaaaaatgcatcccccccccccccccccccccccccccccccaaaggctcttttcagagccaccagaatt

SEQ ID NO: 2430 - RNA, 1345 nt, synthetic construct
  misc_feature 1..1345: note = mRNA i-3 (A64-N5-C30-hSL-N5) (opt29) from Homo sapiens__NP_000448.3__HNF4A(1-375)(K300R)
  source 1..1345: mol_type = other RNA
aggagaaagcttaccatgagactgagcaagaccctggtggacatggacatggccgactactctgccgccctggaccctgcctacaccaccctggagttcgaaaacgtgcaagtgctgaccatgggcaacgacaccagccctagcgagggcaccaacctgaacgcccctaatagcctgggagtgtccgccctgtgtgccatctgtggcgatagagccaccggcaagcactacggcgccagctcttgtgatggctgcaagggcttcttccggcggagcgtgcggaagaaccacatgtacagctgccggttcagccggcagtgcgtggtggacaaggataagcggaaccagtgccggtactgcagactgaagaagtgcttcagagccggcatgaagaaagaagccgtgcagaacgagcgggaccggatcagcaccagaagaagcagctacgaggacagcagcctgcccagcatcaacgccctgctgcaggccgaggtgctgagcagacagatcaccagcccagtgtccggcatcaacggcgacatccgggccaagaagatcgccagcattgccgacgtgtgcgagagcatgaaggaacagctgctggtgctggtggaatgggccaagtacatccccgccttttgcgagctgcccctggacgatcaggtggccctgctgagagcacacgccggcgaacatctgctgctgggagccaccaagcggagcatggtgttcaaggacgtgctgctgctgggcaacgactacatcgtgcccagacactgccctgagctggccgagatgagccgggtgtccatcagaatcctggacgaactggtgctgccgtttcaggaactgcagatcgacgacaacgagtacgcctacctgaaggccatcatctttttcgaccccgacgccagaggcctgagcgaccctggcaagatcaagcggctgagaagccaggtgcaagtgtccctggaagattacatcaacgaccggcagtacgacagccggggcagatttggcgaactgctcctgctgctgcccaccctgcagagcatcacctggcagatgatcgagcagatccagttcatcaagctgttcggcatggccaagatcgacaatctgctgcaggaaatgctgctctgaggactagttataagactgactagcccgatgggcctcccaacgggccctcctcccctccttgcaccgagattaataaaaaaaaaaaaaaaaaaaaaaaaaaaaaaaaaaaaaaaaaaaaaaaaaaaaaaaaaaaaaaaatgcatcccccccccccccccccccccccccccccccaaaggctcttttcagagccaccagaatt

SEQ ID NO: 2431 - RNA, 1345 nt, synthetic construct
  misc_feature 1..1345: note = mRNA i-3 (A64-N5-C30-hSL-N5) (opt29) from Homo sapiens__NP_000448.3__HNF4A(1-375)(K300R_K307R_K309R)
  source 1..1345: mol_type = other RNA
aggagaaagcttaccatgagactgagcaagaccctggtggacatggacatggccgactactctgccgccctggaccctgcctacaccaccctggagttcgaaaacgtgcaagtgctgaccatgggcaacgacaccagccctagcgagggcaccaacctgaacgcccctaatagcctgggagtgtccgccctgtgtgccatctgtggcgatagagccaccggcaagcactacggcgccagctcttgtgatggctgcaagggcttcttccggcggagcgtgcggaagaaccacatgtacagctgccggttcagccggcagtgcgtggtggacaaggataagcggaaccagtgccggtactgcagactgaagaagtgcttcagagccggcatgaagaaagaagccgtgcagaacgagcgggaccggatcagcaccagaagaagcagctacgaggacagcagcctgcccagcatcaacgccctgctgcaggccgaggtgctgagcagacagatcaccagcccagtgtccggcatcaacggcgacatccgggccaagaagatcgccagcattgccgacgtgtgcgagagcatgaaggaacagctgctggtgctggtggaatgggccaagtacatccccgccttttgcgagctgcccctggacgatcaggtggccctgctgagagcacacgccggcgaacatctgctgctgggagccaccaagcggagcatggtgttcaaggacgtgctgctgctgggcaacgactacatcgtgcccagacactgccctgagctggccgagatgagccgggtgtccatcagaatcctggacgaactggtgctgccgtttcaggaactgcagatcgacgacaacgagtacgcctacctgaaggccatcatctttttcgaccccgacgccagaggcctgagcgaccctggccggatcagacggctgagaagccaggtgcaagtgtccctggaagattacatcaacgaccggcagtacgacagccggggcagatttggcgaactgctcctgctgctgcccaccctgcagagcatcacctggcagatgatcgagcagatccagttcatcaagctgttcggcatggccaagatcgacaatctgctgcaggaaatgctgctctgaggactagttataagactgactagcccgatgggcctcccaacgggccctcctcccctccttgcaccgagattaataaaaaaaaaaaaaaaaaaaaaaaaaaaaaaaaaaaaaaaaaaaaaaaaaaaaaaaaaaaaaaaatgcatcccccccccccccccccccccccccccccccaaaggctcttttcagagccaccagaatt

SEQ ID NO: 2432 - RNA, 1345 nt, synthetic construct; identical to SEQ ID NO: 2413
  misc_feature 1..1345: note = mRNA i-3 (A64-N5-C30-hSL-N5) (opt29) from Homo sapiens__NP_000448.3__HNF4A(1-375)(K447R_K470R)
  source 1..1345: mol_type = other RNA

SEQ ID NO: 2433 - RNA, 1345 nt, synthetic construct; identical to SEQ ID NO: 2413
  misc_feature 1..1345: note = mRNA i-3 (A64-N5-C30-hSL-N5) (opt29) from Homo sapiens__NP_000448.3__HNF4A(1-375)(K458R)
  source 1..1345: mol_type = other RNA

SEQ ID NO: 2434 - RNA, 1345 nt, synthetic construct
  misc_feature 1..1345: note = mRNA i-3 (A64-N5-C30-hSL-N5) (opt29) from Homo sapiens__NP_000448.3__HNF4A(1-375)(K106R_K108R_K126R_K127R)
  source 1..1345: mol_type = other RNA
aggagaaagcttaccatgagactgagcaagaccctggtggacatggacatggccgactactctgccgccctggaccctgcctacaccaccctggagttcgaaaacgtgcaagtgctgaccatgggcaacgacaccagccctagcgagggcaccaacctgaacgcccctaatagcctgggagtgtccgccctgtgtgccatctgtggcgatagagccaccggcaagcactacggcgccagctcttgtgatggctgcaagggcttcttccggcggagcgtgcggaagaaccacatgtacagctgccggttcagccggcagtgcgtggtggaccgggatagacggaaccagtgccggtactgcagactgaagaagtgcttcagagccggcatgcggagagaagccgtgcagaacgagcgggaccggatcagcaccagaagaagcagctacgaggacagcagcctgcccagcatcaacgccctgctgcaggccgaggtgctgagcagacagatcaccagcccagtgtccggcatcaacggcgacatccgggccaagaagatcgccagcattgccgacgtgtgcgagagcatgaaggaacagctgctggtgctggtggaatgggccaagtacatccccgccttttgcgagctgcccctggacgatcaggtggccctgctgagagcacacgccggcgaacatctgctgctgggagccaccaagcggagcatggtgttcaaggacgtgctgctgctgggcaacgactacatcgtgcccagacactgccctgagctggccgagatgagccgggtgtccatcagaatcctggacgaactggtgctgccgtttcaggaactgcagatcgacgacaacgagtacgcctacctgaaggccatcatctttttcgaccccgacgccaagggcctgagcgaccctggcaagatcaagcggctgagaagccaggtgcaagtgtccctggaagattacatcaacgaccggcagtacgacagccggggcagatttggcgaactgctcctgctgctgcccaccctgcagagcatcacctggcagatgatcgagcagatccagttcatcaagctgttcggcatggccaagatcgacaatctgctgcaggaaatgctgctctgaggactagttataagactgactagcccgatgggcctcccaacgggccctcctcccctccttgcaccgagattaataaaaaaaaaaaaaaaaaaaaaaaaaaaaaaaaaaaaaaaaaaaaaaaaaaaaaaaaaaaaaaaatgcatcccccccccccccccccccccccccccccccaaaggctcttttcagagccaccagaatt

SEQ ID NO: 2435 - RNA, 1345 nt, synthetic construct
  misc_feature 1..1345: note = mRNA i-3 (A64-N5-C30-hSL-N5) (opt29) from Homo sapiens__NP_000448.3__HNF4A(1-375)(E285Q)
  source 1..1345: mol_type = other RNA
aggagaaagcttaccatgagactgagcaagaccctggtggacatggacatggccgactactctgccgccctggaccctgcctacaccaccctggagttcgaaaacgtgcaagtgctgaccatgggcaacgacaccagccctagcgagggcaccaacctgaacgcccctaatagcctgggagtgtccgccctgtgtgccatctgtggcgatagagccaccggcaagcactacggcgccagctcttgtgatggctgcaagggcttcttccggcggagcgtgcggaagaaccacatgtacagctgccggttcagccggcagtgcgtggtggacaaggataagcggaaccagtgccggtactgcagactgaagaagtgcttcagagccggcatgaagaaagaagccgtgcagaacgagcgggaccggatcagcaccagaagaagcagctacgaggacagcagcctgcccagcatcaacgccctgctgcaggccgaggtgctgagcagacagatcaccagcccagtgtccggcatcaacggcgacatccgggccaagaagatcgccagcattgccgacgtgtgcgagagcatgaaggaacagctgctggtgctggtggaatgggccaagtacatccccgccttttgcgagctgcccctggacgatcaggtggccctgctgagagcacacgccggcgaacatctgctgctgggagccaccaagcggagcatggtgttcaaggacgtgctgctgctgggcaacgactacatcgtgcccagacactgccctgagctggccgagatgagccgggtgtccatcagaatcctggacgaactggtgctgccgtttcaggaactgcagatcgacgacaaccagtacgcctacctgaaggccatcatctttttcgaccccgacgccaagggcctgagcgaccctggcaagatcaagcggctgagaagccaggtgcaagtgtccctggaagattacatcaacgaccggcagtacgacagccggggcagatttggcgaactgctcctgctgctgcccaccctgcagagcatcacctggcagatgatcgagcagatccagttcatcaagctgttcggcatggccaagatcgacaatctgctgcaggaaatgctgctctgaggactagttataagactgactagcccgatgggcctcccaacgggccctcctcccctccttgcaccgagattaataaaaaaaaaaaaaaaaaaaaaaaaaaaaaaaaaaaaaaaaaaaaaaaaaaaaaaaaaaaaaaaatgcatcccccccccccccccccccccccccccccccaaaggctcttttcagagccaccagaatt

SEQ ID NO: 2436 - RNA, 1345 nt, synthetic construct
  misc_feature 1..1345: note = mRNA i-3 (A64-N5-C30-hSL-N5) (opt29) from Homo sapiens__NP_000448.3__HNF4A(1-375)(T166E)
  source 1..1345: mol_type = other RNA
aggagaaagcttaccatgagactgagcaagaccctggtggacatggacatggccgactactctgccgccctggaccctgcctacaccaccctggagttcgaaaacgtgcaagtgctgaccatgggcaacgacaccagccctagcgagggcaccaacctgaacgcccctaatagcctgggagtgtccgccctgtgtgccatctgtggcgatagagccaccggcaagcactacggcgccagctcttgtgatggctgcaagggcttcttccggcggagcgtgcggaagaaccacatgtacagctgccggttcagccggcagtgcgtggtggacaaggataagcggaaccagtgccggtactgcagactgaagaagtgcttcagagccggcatgaagaaagaagccgtgcagaacgagcgggaccggatcagcaccagaagaagcagctacgaggacagcagcctgcccagcatcaacgccctgctgcaggccgaggtgctgagcagacagatcgagagcccagtgtccggcatcaacggcgacatccgggccaagaagatcgccagcattgccgacgtgtgcgagagcatgaaggaacagctgctggtgctggtggaatgggccaagtacatccccgccttttgcgagctgcccctggacgatcaggtggccctgctgagagcacacgccggcgaacatctgctgctgggagccaccaagcggagcatggtgttcaaggacgtgctgctgctgggcaacgactacatcgtgcccagacactgccctgagctggccgagatgagccgggtgtccatcagaatcctggacgaactggtgctgccgtttcaggaactgcagatcgacgacaacgagtacgcctacctgaaggccatcatctttttcgaccccgacgccaagggcctgagcgaccctggcaagatcaagcggctgagaagccaggtgcaagtgtccctggaagattacatcaacgaccggcagtacgacagccggggcagatttggcgaactgctcctgctgctgcccaccctgcagagcatcacctggcagatgatcgagcagatccagttcatcaagctgttcggcatggccaagatcgacaatctgctgcaggaaatgctgctctgaggactagttataagactgactagcccgatgggcctcccaacgggccctcctcccctccttgcaccgagattaataaaaaaaaaaaaaaaaaaaaaaaaaaaaaaaaaaaaaaaaaaaaaaaaaaaaaaaaaaaaaaaatgcatcccccccccccccccccccccccccccccccaaaggctcttttcagagccaccagaatt

SEQ ID NO: 2437 - RNA, 1345 nt, synthetic construct
  misc_feature 1..1345: note = mRNA i-3 (A64-N5-C30-hSL-N5) (opt29) from Homo sapiens__NP_000448.3__HNF4A(1-375)(S148A)
  source 1..1345: mol_type = other RNA
aggagaaagcttaccatgagactgagcaagaccctggtggacatggacatggccgactactctgccgccctggaccctgcctacaccaccctggagttcgaaaacgtgcaagtgctgaccatgggcaacgacaccagccctagcgagggcaccaacctgaacgcccctaatagcctgggagtgtccgccctgtgtgccatctgtggcgatagagccaccggcaagcactacggcgccagctcttgtgatggctgcaagggcttcttccggcggagcgtgcggaagaaccacatgtacagctgccggttcagccggcagtgcgtggtggacaaggataagcggaaccagtgccggtactgcagactgaagaagtgcttcagagccggcatgaagaaagaagccgtgcagaacgagcgggaccggatcagcaccagaagaagcagctacgaggacagcgccctgcccagcatcaacgccctgctgcaggccgaggtgctgagcagacagatcaccagcccagtgtccggcatcaacggcgacatccgggccaagaagatcgccagcattgccgacgtgtgcgagagcatgaaggaacagctgctggtgctggtggaatgggccaagtacatccccgccttttgcgagctgcccctggacgatcaggtggccctgctgagagcacacgccggcgaacatctgctgctgggagccaccaagcggagcatggtgttcaaggacgtgctgctgctgggcaacgactacatcgtgcccagacactgccctgagctggccgagatgagccgggtgtccatcagaatcctggacgaactggtgctgccgtttcaggaactgcagatcgacgacaacgagtacgcctacctgaaggccatcatctttttcgaccccgacgccaagggcctgagcgaccctggcaagatcaagcggctgagaagccaggtgcaagtgtccctggaagattacatcaacgaccggcagtacgacagccggggcagatttggcgaactgctcctgctgctgcccaccctgcagagcatcacctggcagatgatcgagcagatccagttcatcaagctgttcggcatggccaagatcgacaatctgctgcaggaaatgctgctctgaggactagttataagactgactagcccgatgggcctcccaacgggccctcctcccctccttgcaccgagattaataaaaaaaaaaaaaaaaaaaaaaaaaaaaaaaaaaaaaaaaaaaaaaaaaaaaaaaaaaaaaaaatgcatcccccccccccccccccccccccccccccccaaaggctcttttcagagccaccagaatt

SEQ ID NO: 2438 - RNA, 1345 nt, synthetic construct
  misc_feature 1..1345: note = mRNA i-3 (A64-N5-C30-hSL-N5) (opt29) from Homo sapiens__NP_000448.3__HNF4A(1-375)(S148E)
  source 1..1345: mol_type = other RNA
aggagaaagcttaccatgagactgagcaagaccctggtggacatggacatggccgactactctgccgccctggaccctgcctacaccaccctggagttcgaaaacgtgcaagtgctgaccatgggcaacgacaccagccctagcgagggcaccaacctgaacgcccctaatagcctgggagtgtccgccctgtgtgccatctgtggcgatagagccaccggcaagcactacggcgccagctcttgtgatggctgcaagggcttcttccggcggagcgtgcggaagaaccacatgtacagctgccggttcagccggcagtgcgtggtggacaaggataagcggaaccagtgccggtactgcagactgaagaagtgcttcagagccggcatgaagaaagaagccgtgcagaacgagcgggaccggatcagcaccagaagaagcagctacgaggacagcgaactgcccagcatcaacgccctgctgcaggccgaggtgctgagcagacagatcaccagcccagtgtccggcatcaacggcgacatccgggccaagaagatcgccagcattgccgacgtgtgcgagagcatgaaggaacagctgctggtgctggtggaatgggccaagtacatccccgccttttgcgagctgcccctggacgatcaggtggccctgctgagagcacacgccggcgaacatctgctgctgggagccaccaagcggagcatggtgttcaaggacgtgctgctgctgggcaacgactacatcgtgcccagacactgccctgagctggccgagatgagccgggtgtccatcagaatcctggacgaactggtgctgccgtttcaggaactgcagatcgacgacaacgagtacgcctacctgaaggccatcatctttttcgaccccgacgccaagggcctgagcgaccctggcaagatcaagcggctgagaagccaggtgcaagtgtccctggaagattacatcaacgaccggcagtacgacagccggggcagatttggcgaactgctcctgctgctgcccaccctgcagagcatcacctggcagatgatcgagcagatccagttcatcaagctgttcggcatggccaagatcgacaatctgctgcaggaaatgctgctctgaggactagttataagactgactagcccgatgggcctcccaacgggccctcctcccctccttgcaccgagattaataaaaaaaaaaaaaaaaaaaaaaaaaaaaaaaaaaaaaaaaaaaaaaaaaaaaaaaaaaaaaaaatgcatcccccccccccccccccccccccccccccccaaaggctcttttcagagccaccagaatt

SEQ ID NO: 2439 - RNA, 1345 nt, synthetic construct
  misc_feature 1..1345: note = mRNA i-3 (A64-N5-C30-hSL-N5) (opt29) from Homo sapiens__NP_000448.3__HNF4A(1-375)(S183A)
  source 1..1345: mol_type = other RNA
aggagaaagcttaccatgagactgagcaagaccctggtggacatggacatggccgactactctgccgccctggaccctgcctacaccaccctggagttcgaaaacgtgcaagtgctgaccatgggcaacgacaccagccctagcgagggcaccaacctgaacgcccctaatagcctgggagtgtccgccctgtgtgccatctgtggcgatagagccaccggcaagcactacggcgccagctcttgtgatggctgcaagggcttcttccggcggagcgtgcggaagaaccacatgtacagctgccggttcagccggcagtgcgtggtggacaaggataagcggaaccagtgccggtactgcagactgaagaagtgcttcagagccggcatgaagaaagaagccgtgcagaacgagcgggaccggatcagcaccagaagaagcagctacgaggacagcagcctgcccagcatcaacgccctgctgcaggccgaggtgctgagcagacagatcaccagcccagtgtccggcatcaacggcgacatccgggccaagaagatcgccgccattgccgacgtgtgcgagagcatgaaggaacagctgctggtgctggtggaatgggccaagtacatccccgccttttgcgagctgcccctggacgatcaggtggccctgctgagagcacacgccggcgaacatctgctgctgggagccaccaagcggagcatggtgttcaaggacgtgctgctgctgggcaacgactacatcgtgcccagacactgccctgagctggccgagatgagccgggtgtccatcagaatcctggacgaactggtgctgccgtttcaggaactgcagatcgacgacaacgagtacgcctacctgaaggccatcatctttttcgaccccgacgccaagggcctgagcgaccctggcaagatcaagcggctgagaagccaggtgcaagtgtccctggaagattacatcaacgaccggcagtacgacagccggggcagatttggcgaactgctcctgctgctgcccaccctgcagagcatcacctggcagatgatcgagcagatccagttcatcaagctgttcggcatggccaagatcgacaatctgctgcaggaaatgctgctctgaggactagttataagactgactagcccgatgggcctcccaacgggccctcctcccctccttgcaccgagattaataaaaaaaaaaaaaaaaaaaaaaaaaaaaaaaaaaaaaaaaaaaaaaaaaaaaaaaaaaaaaaaatgcatcccccccccccccccccccccccccccccccaaaggctcttttcagagccaccagaatt

SEQ ID NO: 2440 - RNA, 1345 nt, synthetic construct
  misc_feature 1..1345: note = mRNA i-3 (A64-N5-C30-hSL-N5) (opt29) from Homo sapiens__NP_000448.3__HNF4A(1-375)(S183E)
  source 1..1345: mol_type = other RNA
aggagaaagcttaccatgagactgagcaagaccctggtggacatggacatggccgactactctgccgccctggaccctgcctacaccaccctggagttcgaaaacgtgcaagtgctgaccatgggcaacgacaccagccctagcgagggcaccaacctgaacgcccctaatagcctgggagtgtccgccctgtgtgccatctgtggcgatagagccaccggcaagcactacggcgccagctcttgtgatggctgcaagggcttcttccggcggagcgtgcggaagaaccacatgtacagctgccggttcagccggcagtgcgtggtggacaaggataagcggaaccagtgccggtactgcagactgaagaagtgcttcagagccggcatgaagaaagaagccgtgcagaacgagcgggaccggatcagcaccagaagaagcagctacgaggacagcagcctgcccagcatcaacgccctgctgcaggccgaggtgctgagcagacagatcaccagcccagtgtccggcatcaacggcgacatccgggccaagaagatcgccgagattgccgacgtgtgcgagagcatgaaggaacagctgctggtgctggtggaatgggccaagtacatccccgccttttgcgagctgcccctggacgatcaggtggccctgctgagagcacacgccggcgaacatctgctgctgggagccaccaagcggagcatggtgttcaaggacgtgctgctgctgggcaacgactacatcgtgcccagacactgccctgagctggccgagatgagccgggtgtccatcagaatcctggacgaactggtgctgccgtttcaggaactgcagatcgacgacaacgagtacgcctacctgaaggccatcatctttttcgaccccgacgccaagggcctgagcgaccctggcaagatcaagcggctgagaagccaggtgcaagtgtccctggaagattacatcaacgaccggcagtacgacagccggggcagatttggcgaactgctcctgctgctgcccaccctgcagagcatcacctggcagatgatcgagcagatccagttcatcaagctgttcggcatggccaagatcgacaatctgctgcaggaaatgctgctctgaggactagttataagactgactagcccgatgggcctcccaacgggccctcctcccctccttgcaccgagattaataaaaaaaaaaaaaaaaaaaaaaaaaaaaaaaaaaaaaaaaaaaaaaaaaaaaaaaaaaaaaaaatgcatcccccccccccccccccccccccccccccccaaaggctcttttcagagccaccagaatt

SEQ ID NO: 2441 - RNA, 1345 nt, synthetic construct; identical to SEQ ID NO: 2413
  misc_feature 1..1345: note = mRNA i-3 (A64-N5-C30-hSL-N5) (opt29) from Homo sapiens__NP_000448.3__HNF4A(1-375)(S461A)
  source 1..1345: mol_type = other RNA

SEQ ID NO: 2442 - RNA, 1345 nt, synthetic construct; identical to SEQ ID NO: 2413
  misc_feature 1..1345: note = mRNA i-3 (A64-N5-C30-hSL-N5) (opt29) from Homo sapiens__NP_000448.3__HNF4A(1-375)(S461E)
  source 1..1345: mol_type = other RNA

SEQ ID NO: 2443 - RNA, 1345 nt, synthetic construct
  misc_feature 1..1345: note = mRNA i-3 (A64-N5-C30-hSL-N5) (opt29) from Homo sapiens__NP_000448.3__HNF4A(1-375)(S142A_S143A_S313A)
  source 1..1345: mol_type = other RNA
aggagaaagcttaccatgagactgagcaagaccctggtggacatggacatggccgactactctgccgccctggaccctgcctacaccaccctggagttcgaaaacgtgcaagtgctgaccatgggcaacgacaccagccctagcgagggcaccaacctgaacgcccctaatagcctgggagtgtccgccctgtgtgccatctgtggcgatagagccaccggcaagcactacggcgccagctcttgtgatggctgcaagggcttcttccggcggagcgtgcggaagaaccacatgtacagctgccggttcagccggcagtgcgtggtggacaaggataagcggaaccagtgccggtactgcagactgaagaagtgcttcagagccggcatgaagaaagaagccgtgcagaacgagcgggaccggatcagcaccagaagagccgcctacgaggacagcagcctgcccagcatcaacgccctgctgcaggccgaggtgctgagcagacagatcaccagcccagtgtccggcatcaacggcgacatccgggccaagaagatcgccagcattgccgacgtgtgcgagagcatgaaggaacagctgctggtgctggtggaatgggccaagtacatccccgccttttgcgagctgcccctggacgatcaggtggccctgctgagagcacacgccggcgaacatctgctgctgggagccaccaagcggagcatggtgttcaaggacgtgctgctgctgggcaacgactacatcgtgcccagacactgccctgagctggccgagatgagccgggtgtccatcagaatcctggacgaactggtgctgccgtttcaggaactgcagatcgacgacaacgagtacgcctacctgaaggccatcatctttttcgaccccgacgccaagggcctgagcgaccctggcaagatcaagcggctgagagcccaggtgcaagtgtccctggaagattacatcaacgaccggcagtacgacagccggggcagatttggcgaactgctcctgctgctgcccaccctgcagagcatcacctggcagatgatcgagcagatccagttcatcaagctgttcggcatggccaagatcgacaatctgctgcaggaaatgctgctctgaggactagttataagactgactagcccgatgggcctcccaacgggccctcctcccctccttgcaccgagattaataaaaaaaaaaaaaaaaaaaaaaaaaaaaaaaaaaaaaaaaaaaaaaaaaaaaaaaaaaaaaaaatgcatcccccccccccccccccccccccccccccccaaaggctcttttcagagccaccagaatt

SEQ ID NO: 2444 - RNA, 1345 nt, synthetic construct; identical to SEQ ID NO: 2443
  misc_feature 1..1345: note = mRNA i-3 (A64-N5-C30-hSL-N5) (opt29) from Homo sapiens__NP_000448.3__HNF4A(1-375)(S142A_S143A_S313A_K458R)
  source 1..1345: mol_type = other RNA

SEQ ID NO: 2445 - RNA, 1345 nt, synthetic construct
  misc_feature 1..1345: note = mRNA i-3 (A64-N5-C30-hSL-N5) (opt29) from Homo sapiens__NP_000448.3__HNF4A(1-375)(S142A_S143A_S167A_S313A_ S378A_T429A_T432A_S436A_K458R)
  source 1..1345: mol_type = other RNA
aggagaaagcttaccatgagactgagcaagaccctggtggacatggacatggccgactactctgccgccctggaccctgcctacaccaccctggagttcgaaaacgtgcaagtgctgaccatgggcaacgacaccagccctagcgagggcaccaacctgaacgcccctaatagcctgggagtgtccgccctgtgtgccatctgtggcgatagagccaccggcaagcactacggcgccagctcttgtgatggctgcaagggcttcttccggcggagcgtgcggaagaaccacatgtacagctgccggttcagccggcagtgcgtggtggacaaggataagcggaaccagtgccggtactgcagactgaagaagtgcttcagagccggcatgaagaaagaagccgtgcagaacgagcgggaccggatcagcaccagaagagccgcctacgaggacagcagcctgcccagcatcaacgccctgctgcaggccgaggtgctgagcagacagatcaccgccccagtgtccggcatcaacggcgacatccgggccaagaagatcgccagcattgccgacgtgtgcgagagcatgaaggaacagctgctggtgctggtggaatgggccaagtacatccccgccttttgcgagctgcccctggacgatcaggtggccctgctgagagcacacgccggcgaacatctgctgctgggagccaccaagcggagcatggtgttcaaggacgtgctgctgctgggcaacgactacatcgtgcccagacactgccctgagctggccgagatgagccgggtgtccatcagaatcctggacgaactggtgctgccgtttcaggaactgcagatcgacgacaacgagtacgcctacctgaaggccatcatctttttcgaccccgacgccaagggcctgagcgaccctggcaagatcaagcggctgagagcccaggtgcaagtgtccctggaagattacatcaacgaccggcagtacgacagccggggcagatttggcgaactgctcctgctgctgcccaccctgcagagcatcacctggcagatgatcgagcagatccagttcatcaagctgttcggcatggccaagatcgacaatctgctgcaggaaatgctgctctgaggactagttataagactgactagcccgatgggcctcccaacgggccctcctcccctccttgcaccgagattaataaaaaaaaaaaaaaaaaaaaaaaaaaaaaaaaaaaaaaaaaaaaaaaaaaaaaaaaaaaaaaaatgcatcccccccccccccccccccccccccccccccaaaggctcttttcagagccaccagaatt

SEQ ID NO: 2446 - RNA, 1345 nt, synthetic construct
  misc_feature 1..1345: note = mRNA i-3 (A64-N5-C30-hSL-N5) (opt29) from Homo sapiens__NP_000448.3__HNF4A(1-375)(S142A_S143A_S148A_S167A_ S313A_S378A_T429A_T432A_S436A_K458R)
  source 1..1345: mol_type = other RNA
aggagaaagcttaccatgagactgagcaagaccctggtggacatggacatggccgactactctgccgccctggaccctgcctacaccaccctggagttcgaaaacgtgcaagtgctgaccatgggcaacgacaccagccctagcgagggcaccaacctgaacgcccctaatagcctgggagtgtccgccctgtgtgccatctgtggcgatagagccaccggcaagcactacggcgccagctcttgtgatggctgcaagggcttcttccggcggagcgtgcggaagaaccacatgtacagctgccggttcagccggcagtgcgtggtggacaaggataagcggaaccagtgccggtactgcagactgaagaagtgcttcagagccggcatgaagaaagaagccgtgcagaacgagcgggaccggatcagcaccagaagagccgcctacgaggacagcgccctgcccagcatcaacgccctgctgcaggccgaggtgctgagcagacagatcaccgccccagtgtccggcatcaacggcgacatccgggccaagaagatcgccagcattgccgacgtgtgcgagagcatgaaggaacagctgctggtgctggtggaatgggccaagtacatccccgccttttgcgagctgcccctggacgatcaggtggccctgctgagagcacacgccggcgaacatctgctgctgggagccaccaagcggagcatggtgttcaaggacgtgctgctgctgggcaacgactacatcgtgcccagacactgccctgagctggccgagatgagccgggtgtccatcagaatcctggacgaactggtgctgccgtttcaggaactgcagatcgacgacaacgagtacgcctacctgaaggccatcatctttttcgaccccgacgccaagggcctgagcgaccctggcaagatcaagcggctgagagcccaggtgcaagtgtccctggaagattacatcaacgaccggcagtacgacagccggggcagatttggcgaactgctcctgctgctgcccaccctgcagagcatcacctggcagatgatcgagcagatccagttcatcaagctgttcggcatggccaagatcgacaatctgctgcaggaaatgctgctctgaggactagttataagactgactagcccgatgggcctcccaacgggccctcctcccctccttgcaccgagattaataaaaaaaaaaaaaaaaaaaaaaaaaaaaaaaaaaaaaaaaaaaaaaaaaaaaaaaaaaaaaaaatgcatcccccccccccccccccccccccccccccccaaaggctcttttcagagccaccagaatt

SEQ ID NO: 2447 - RNA, 1345 nt, synthetic construct
  misc_feature 1..1345: note = mRNA i-3 (A64-N5-C30-hSL-N5) (opt29) from Homo sapiens__NP_000448.3__HNF4A(1-375)(K106R_K108R_K126R_K127R_ S142A_S143A_S148A_S167A_S313A_S378A_T429A_T432A_S436A_K458R )
  source 1..1345: mol_type = other RNA
aggagaaagcttaccatgagactgagcaagaccctggtggacatggacatggccgactactctgccgccctggaccctgcctacaccaccctggagttcgaaaacgtgcaagtgctgaccatgggcaacgacaccagccctagcgagggcaccaacctgaacgcccctaatagcctgggagtgtccgccctgtgtgccatctgtggcgatagagccaccggcaagcactacggcgccagctcttgtgatggctgcaagggcttcttccggcggagcgtgcggaagaaccacatgtacagctgccggttcagccggcagtgcgtggtggaccgggatagacggaaccagtgccggtactgcagactgaagaagtgcttcagagccggcatgcggagagaagccgtgcagaacgagcgggaccggatcagcaccagaagagccgcctacgaggacagcgccctgcccagcatcaacgccctgctgcaggccgaggtgctgagcagacagatcaccgccccagtgtccggcatcaacggcgacatccgggccaagaagatcgccagcattgccgacgtgtgcgagagcatgaaggaacagctgctggtgctggtggaatgggccaagtacatccccgccttttgcgagctgcccctggacgatcaggtggccctgctgagagcacacgccggcgaacatctgctgctgggagccaccaagcggagcatggtgttcaaggacgtgctgctgctgggcaacgactacatcgtgcccagacactgccctgagctggccgagatgagccgggtgtccatcagaatcctggacgaactggtgctgccgtttcaggaactgcagatcgacgacaacgagtacgcctacctgaaggccatcatctttttcgaccccgacgccaagggcctgagcgaccctggcaagatcaagcggctgagagcccaggtgcaagtgtccctggaagattacatcaacgaccggcagtacgacagccggggcagatttggcgaactgctcctgctgctgcccaccctgcagagcatcacctggcagatgatcgagcagatccagttcatcaagctgttcggcatggccaagatcgacaatctgctgcaggaaatgctgctctgaggactagttataagactgactagcccgatgggcctcccaacgggccctcctcccctccttgcaccgagattaataaaaaaaaaaaaaaaaaaaaaaaaaaaaaaaaaaaaaaaaaaaaaaaaaaaaaaaaaaaaaaaatgcatcccccccccccccccccccccccccccccccaaaggctcttttcagagccaccagaatt

SEQ ID NO: 2448 - RNA, 1345 nt, synthetic construct
  misc_feature 1..1345: note = mRNA i-3 (A64-N5-C30-hSL-N5) (opt29) from Homo sapiens__NP_000448.3__HNF4A(1-375)(S142A_S143A_S148A_T166A_ S167A_S313A_S378A_T429A_T432A_S436A_K458R)
  source 1..1345: mol_type = other RNA
aggagaaagcttaccatgagactgagcaagaccctggtggacatggacatggccgactactctgccgccctggaccctgcctacaccaccctggagttcgaaaacgtgcaagtgctgaccatgggcaacgacaccagccctagcgagggcaccaacctgaacgcccctaatagcctgggagtgtccgccctgtgtgccatctgtggcgatagagccaccggcaagcactacggcgccagctcttgtgatggctgcaagggcttcttccggcggagcgtgcggaagaaccacatgtacagctgccggttcagccggcagtgcgtggtggacaaggataagcggaaccagtgccggtactgcagactgaagaagtgcttcagagccggcatgaagaaagaagccgtgcagaacgagcgggaccggatcagcaccagaagagccgcctacgaggacagcgccctgcccagcatcaacgccctgctgcaggccgaggtgctgagcagacagatcgccgccccagtgtccggcatcaacggcgacatccgggccaagaagatcgccagcattgccgacgtgtgcgagagcatgaaggaacagctgctggtgctggtggaatgggccaagtacatccccgccttttgcgagctgcccctggacgatcaggtggccctgctgagagcacacgccggcgaacatctgctgctgggagccaccaagcggagcatggtgttcaaggacgtgctgctgctgggcaacgactacatcgtgcccagacactgccctgagctggccgagatgagccgggtgtccatcagaatcctggacgaactggtgctgccgtttcaggaactgcagatcgacgacaacgagtacgcctacctgaaggccatcatctttttcgaccccgacgccaagggcctgagcgaccctggcaagatcaagcggctgagagcccaggtgcaagtgtccctggaagattacatcaacgaccggcagtacgacagccggggcagatttggcgaactgctcctgctgctgcccaccctgcagagcatcacctggcagatgatcgagcagatccagttcatcaagctgttcggcatggccaagatcgacaatctgctgcaggaaatgctgctctgaggactagttataagactgactagcccgatgggcctcccaacgggccctcctcccctccttgcaccgagattaataaaaaaaaaaaaaaaaaaaaaaaaaaaaaaaaaaaaaaaaaaaaaaaaaaaaaaaaaaaaaaaatgcatcccccccccccccccccccccccccccccccaaaggctcttttcagagccaccagaatt

SEQ ID NO: 2449 - RNA, 1345 nt, synthetic construct
  misc_feature 1..1345: note = mRNA i-3 (A64-N5-C30-hSL-N5) (opt29) from Homo sapiens__NP_000448.3__HNF4A(1-375)(S87A_S142A_S143A_S148A_T 166A_S167A_S313A_S378A_T429A_T432A_S436A_K458R)
  source 1..1345: mol_type = other RNA
aggagaaagcttaccatgagactgagcaagaccctggtggacatggacatggccgactactctgccgccctggaccctgcctacaccaccctggagttcgaaaacgtgcaagtgctgaccatgggcaacgacaccagccctagcgagggcaccaacctgaacgcccctaatagcctgggagtgtccgccctgtgtgccatctgtggcgatagagccaccggcaagcactacggcgccagctcttgtgatggctgcaagggcttcttccggcgggccgtgcggaagaaccacatgtacagctgccggttcagccggcagtgcgtggtggacaaggataagcggaaccagtgccggtactgcagactgaagaagtgcttcagagccggcatgaagaaagaagccgtgcagaacgagcgggaccggatcagcaccagaagagccgcctacgaggacagcgccctgcccagcatcaacgccctgctgcaggccgaggtgctgagcagacagatcgccgccccagtgtccggcatcaacggcgacatccgggccaagaagatcgccagcattgccgacgtgtgcgagagcatgaaggaacagctgctggtgctggtggaatgggccaagtacatccccgccttttgcgagctgcccctggacgatcaggtggccctgctgagagcacacgccggcgaacatctgctgctgggagccaccaagcggagcatggtgttcaaggacgtgctgctgctgggcaacgactacatcgtgcccagacactgccctgagctggccgagatgagccgggtgtccatcagaatcctggacgaactggtgctgccgtttcaggaactgcagatcgacgacaacgagtacgcctacctgaaggccatcatctttttcgaccccgacgccaagggcctgagcgaccctggcaagatcaagcggctgagagcccaggtgcaagtgtccctggaagattacatcaacgaccggcagtacgacagccggggcagatttggcgaactgctcctgctgctgcccaccctgcagagcatcacctggcagatgatcgagcagatccagttcatcaagctgttcggcatggccaagatcgacaatctgctgcaggaaatgctgctctgaggactagttataagactgactagcccgatgggcctcccaacgggccctcctcccctccttgcaccgagattaataaaaaaaaaaaaaaaaaaaaaaaaaaaaaaaaaaaaaaaaaaaaaaaaaaaaaaaaaaaaaaaatgcatcccccccccccccccccccccccccccccccaaaggctcttttcagagccaccagaatt

SEQ ID NO: 2450 - RNA, 1345 nt, synthetic construct
  misc_feature 1..1345: note = mRNA i-3 (A64-N5-C30-hSL-N5) (opt29) from Homo sapiens__NP_000448.3__HNF4A(1-375)(S87A_K106R_K108R_K126R_K 127R_S142A_S143A_S148A_T166A_S167A_S313A_S378A_T429A_T432A_ S436A_K458R)
  source 1..1345: mol_type = other RNA
aggagaaagcttaccatgagactgagcaagaccctggtggacatggacatggccgactactctgccgccctggaccctgcctacaccaccctggagttcgaaaacgtgcaagtgctgaccatgggcaacgacaccagccctagcgagggcaccaacctgaacgcccctaatagcctgggagtgtccgccctgtgtgccatctgtggcgatagagccaccggcaagcactacggcgccagctcttgtgatggctgcaagggcttcttccggcgggccgtgcggaagaaccacatgtacagctgccggttcagccggcagtgcgtggtggaccgggatagacggaaccagtgccggtactgcagactgaagaagtgcttcagagccggcatgcggagagaagccgtgcagaacgagcgggaccggatcagcaccagaagagccgcctacgaggacagcgccctgcccagcatcaacgccctgctgcaggccgaggtgctgagcagacagatcgccgccccagtgtccggcatcaacggcgacatccgggccaagaagatcgccagcattgccgacgtgtgcgagagcatgaaggaacagctgctggtgctggtggaatgggccaagtacatccccgccttttgcgagctgcccctggacgatcaggtggccctgctgagagcacacgccggcgaacatctgctgctgggagccaccaagcggagcatggtgttcaaggacgtgctgctgctgggcaacgactacatcgtgcccagacactgccctgagctggccgagatgagccgggtgtccatcagaatcctggacgaactggtgctgccgtttcaggaactgcagatcgacgacaacgagtacgcctacctgaaggccatcatctttttcgaccccgacgccaagggcctgagcgaccctggcaagatcaagcggctgagagcccaggtgcaagtgtccctggaagattacatcaacgaccggcagtacgacagccggggcagatttggcgaactgctcctgctgctgcccaccctgcagagcatcacctggcagatgatcgagcagatccagttcatcaagctgttcggcatggccaagatcgacaatctgctgcaggaaatgctgctctgaggactagttataagactgactagcccgatgggcctcccaacgggccctcctcccctccttgcaccgagattaataaaaaaaaaaaaaaaaaaaaaaaaaaaaaaaaaaaaaaaaaaaaaaaaaaaaaaaaaaaaaaaatgcatcccccccccccccccccccccccccccccccaaaggctcttttcagagccaccagaatt

SEQ ID NO: 2451 - RNA, 1345 nt, synthetic construct
  misc_feature 1..1345: note = mRNA i-3 (A64-N5-C30-hSL-N5) (opt29) from Homo sapiens__NP_000448.3__HNF4A(1-375)(S87A_K106R_K108R_K126R_K 127R)
  source 1..1345: mol_type = other RNA
aggagaaagcttaccatgagactgagcaagaccctggtggacatggacatggccgactactctgccgccctggaccctgcctacaccaccctggagttcgaaaacgtgcaagtgctgaccatgggcaacgacaccagccctagcgagggcaccaacctgaacgcccctaatagcctgggagtgtccgccctgtgtgccatctgtggcgatagagccaccggcaagcactacggcgccagctcttgtgatggctgcaagggcttcttccggcgggccgtgcggaagaaccacatgtacagctgccggttcagccggcagtgcgtggtggaccgggatagacggaaccagtgccggtactgcagactgaagaagtgcttcagagccggcatgcggagagaagccgtgcagaacgagcgggaccggatcagcaccagaagaagcagctacgaggacagcagcctgcccagcatcaacgccctgctgcaggccgaggtgctgagcagacagatcaccagcccagtgtccggcatcaacggcgacatccgggccaagaagatcgccagcattgccgacgtgtgcgagagcatgaaggaacagctgctggtgctggtggaatgggccaagtacatccccgccttttgcgagctgcccctggacgatcaggtggccctgctgagagcacacgccggcgaacatctgctgctgggagccaccaagcggagcatggtgttcaaggacgtgctgctgctgggcaacgactacatcgtgcccagacactgccctgagctggccgagatgagccgggtgtccatcagaatcctggacgaactggtgctgccgtttcaggaactgcagatcgacgacaacgagtacgcctacctgaaggccatcatctttttcgaccccgacgccaagggcctgagcgaccctggcaagatcaagcggctgagaagccaggtgcaagtgtccctggaagattacatcaacgaccggcagtacgacagccggggcagatttggcgaactgctcctgctgctgcccaccctgcagagcatcacctggcagatgatcgagcagatccagttcatcaagctgttcggcatggccaagatcgacaatctgctgcaggaaatgctgctctgaggactagttataagactgactagcccgatgggcctcccaacgggccctcctcccctccttgcaccgagattaataaaaaaaaaaaaaaaaaaaaaaaaaaaaaaaaaaaaaaaaaaaaaaaaaaaaaaaaaaaaaaaatgcatcccccccccccccccccccccccccccccccaaaggctcttttcagagccaccagaatt

SEQ ID NO: 2452 - RNA, 1345 nt, synthetic construct; identical to SEQ ID NO: 2450
  misc_feature 1..1345: note = mRNA i-3 (A64-N5-C30-hSL-N5) (opt29) from Homo sapiens__NP_000448.3__HNF4A(1-375)(S87A_K106R_K108R_K126R_K 127R_S142A_S143A_S148A_T166A_S167A_S313A_S378A_T429A_T432A_ S436A_K458R_S461A)
  source 1..1345: mol_type = other RNA

SEQ ID NO: 2453 - RNA, 1345 nt, synthetic construct; identical to SEQ ID NO: 2450
  misc_feature 1..1345: note = mRNA i-3 (A64-N5-C30-hSL-N5) (opt29) from Homo sapiens__NP_000448.3__HNF4A(1-375)(S87A_K106R_K108R_K126R_K 127R_S142A_S143A_S148A_T166A_S167A_S313A_S378A_T429A_T432A_ S436A_K458R_S461E)
  source 1..1345: mol_type = other RNA

SEQ ID NO: 2454 - RNA, 1345 nt, synthetic construct
  misc_feature 1..1345: note = mRNA i-3 (A64-N5-C30-hSL-N5) (opt29) from Homo sapiens__NP_000448.3__HNF4A(1-375)(S87A_K106R_K108R_K126R_K 127R_S142A_S143A_S148E_T166A_S167E_S313A_S378E_T429E_T432E_ S436E_K458R_S461E)
  source 1..1345: mol_type = other RNA
aggagaaagcttaccatgagactgagcaagaccctggtggacatggacatggccgactactctgccgccctggaccctgcctacaccaccctggagttcgaaaacgtgcaagtgctgaccatgggcaacgacaccagccctagcgagggcaccaacctgaacgcccctaatagcctgggagtgtccgccctgtgtgccatctgtggcgatagagccaccggcaagcactacggcgccagctcttgtgatggctgcaagggcttcttccggcgggccgtgcggaagaaccacatgtacagctgccggttcagccggcagtgcgtggtggaccgggatagacggaaccagtgccggtactgcagactgaagaagtgcttcagagccggcatgcggagagaagccgtgcagaacgagcgggaccggatcagcaccagaagagccgcctacgaggacagcgaactgcccagcatcaacgccctgctgcaggccgaggtgctgagcagacagatcgccgaaccagtgtccggcatcaacggcgacatccgggccaagaagatcgccagcattgccgacgtgtgcgagagcatgaaggaacagctgctggtgctggtggaatgggccaagtacatccccgccttttgcgagctgcccctggacgatcaggtggccctgctgagagcacacgccggcgaacatctgctgctgggagccaccaagcggagcatggtgttcaaggacgtgctgctgctgggcaacgactacatcgtgcccagacactgccctgagctggccgagatgagccgggtgtccatcagaatcctggacgaactggtgctgccgtttcaggaactgcagatcgacgacaacgagtacgcctacctgaaggccatcatctttttcgaccccgacgccaagggcctgagcgaccctggcaagatcaagcggctgagagcccaggtgcaagtgtccctggaagattacatcaacgaccggcagtacgacagccggggcagatttggcgaactgctcctgctgctgcccaccctgcagagcatcacctggcagatgatcgagcagatccagttcatcaagctgttcggcatggccaagatcgacaatctgctgcaggaaatgctgctctgaggactagttataagactgactagcccgatgggcctcccaacgggccctcctcccctccttgcaccgagattaataaaaaaaaaaaaaaaaaaaaaaaaaaaaaaaaaaaaaaaaaaaaaaaaaaaaaaaaaaaaaaaatgcatcccccccccccccccccccccccccccccccaaaggctcttttcagagccaccagaatt

SEQ ID NO: 2455 - RNA, 1345 nt, synthetic construct
  misc_feature 1..1345: note = mRNA i-3 (A64-N5-C30-hSL-N5) (opt29) from Homo sapiens__NP_000448.3__HNF4A(1-375)(S87A_K106R_K108R_K126R_K 127R_S142A_S143A_S148A_T166A_S167A_K179R_K180R_S313A_S378A_ T429A_T432A_S436A_K458R_S461E)
  source 1..1345: mol_type = other RNA
aggagaaagcttaccatgagactgagcaagaccctggtggacatggacatggccgactactctgccgccctggaccctgcctacaccaccctggagttcgaaaacgtgcaagtgctgaccatgggcaacgacaccagccctagcgagggcaccaacctgaacgcccctaatagcctgggagtgtccgccctgtgtgccatctgtggcgatagagccaccggcaagcactacggcgccagctcttgtgatggctgcaagggcttcttccggcgggccgtgcggaagaaccacatgtacagctgccggttcagccggcagtgcgtggtggaccgggatagacggaaccagtgccggtactgcagactgaagaagtgcttcagagccggcatgcggagagaagccgtgcagaacgagcgggaccggatcagcaccagaagagccgcctacgaggacagcgccctgcccagcatcaacgccctgctgcaggccgaggtgctgagcagacagatcgccgccccagtgtccggcatcaacggcgacatccgggcccggagaatcgccagcattgccgacgtgtgcgagagcatgaaggaacagctgctggtgctggtggaatgggccaagtacatccccgccttttgcgagctgcccctggacgatcaggtggccctgctgagagcacacgccggcgaacatctgctgctgggagccaccaagcggagcatggtgttcaaggacgtgctgctgctgggcaacgactacatcgtgcccagacactgccctgagctggccgagatgagccgggtgtccatcagaatcctggacgaactggtgctgccgtttcaggaactgcagatcgacgacaacgagtacgcctacctgaaggccatcatctttttcgaccccgacgccaagggcctgagcgaccctggcaagatcaagcggctgagagcccaggtgcaagtgtccctggaagattacatcaacgaccggcagtacgacagccggggcagatttggcgaactgctcctgctgctgcccaccctgcagagcatcacctggcagatgatcgagcagatccagttcatcaagctgttcggcatggccaagatcgacaatctgctgcaggaaatgctgctctgaggactagttataagactgactagcccgatgggcctcccaacgggccctcctcccctccttgcaccgagattaataaaaaaaaaaaaaaaaaaaaaaaaaaaaaaaaaaaaaaaaaaaaaaaaaaaaaaaaaaaaaaaatgcatcccccccccccccccccccccccccccccccaaaggctcttttcagagccaccagaatt

SEQ ID NO: 2456 - RNA, 1345 nt, synthetic construct
  misc_feature 1..1345: note = mRNA i-3 (A64-N5-C30-hSL-N5) (opt29) from Homo sapiens__NP_000448.3__HNF4A(1-375)(S87A_K106R_K108R_K126R_K 127R_S142A_S143A_S148A_T166A_S167A_K300R_K307R_K309R_S313A_ S378A_T429A_T432A_S436A_K458R_S461E)
  source 1..1345: mol_type = other RNA
aggagaaagcttaccatgagactgagcaagaccctggtggacatggacatggccgactactctgccgccctggaccctgcctacaccaccctggagttcgaaaacgtgcaagtgctgaccatgggcaacgacaccagccctagcgagggcaccaacctgaacgcccctaatagcctgggagtgtccgccctgtgtgccatctgtggcgatagagccaccggcaagcactacggcgccagctcttgtgatggctgcaagggcttcttccggcgggccgtgcggaagaaccacatgtacagctgccggttcagccggcagtgcgtggtggaccgggatagacggaaccagtgccggtactgcagactgaagaagtgcttcagagccggcatgcggagagaagccgtgcagaacgagcgggaccggatcagcaccagaagagccgcctacgaggacagcgccctgcccagcatcaacgccctgctgcaggccgaggtgctgagcagacagatcgccgccccagtgtccggcatcaacggcgacatccgggccaagaagatcgccagcattgccgacgtgtgcgagagcatgaaggaacagctgctggtgctggtggaatgggccaagtacatccccgccttttgcgagctgcccctggacgatcaggtggccctgctgagagcacacgccggcgaacatctgctgctgggagccaccaagcggagcatggtgttcaaggacgtgctgctgctgggcaacgactacatcgtgcccagacactgccctgagctggccgagatgagccgggtgtccatcagaatcctggacgaactggtgctgccgtttcaggaactgcagatcgacgacaacgagtacgcctacctgaaggccatcatctttttcgaccccgacgccagaggcctgagcgaccctggccggatcagacggctgagagcccaggtgcaagtgtccctggaagattacatcaacgaccggcagtacgacagccggggcagatttggcgaactgctcctgctgctgcccaccctgcagagcatcacctggcagatgatcgagcagatccagttcatcaagctgttcggcatggccaagatcgacaatctgctgcaggaaatgctgctctgaggactagttataagactgactagcccgatgggcctcccaacgggccctcctcccctccttgcaccgagattaataaaaaaaaaaaaaaaaaaaaaaaaaaaaaaaaaaaaaaaaaaaaaaaaaaaaaaaaaaaaaaaatgcatcccccccccccccccccccccccccccccccaaaggctcttttcagagccaccagaatt

SEQ ID NO: 2457 - RNA, 1345 nt, synthetic construct; identical to SEQ ID NO: 2450
  misc_feature 1..1345: note = mRNA i-3 (A64-N5-C30-hSL-N5) (opt29) from Homo sapiens__NP_000448.3__HNF4A(1-375)(S87A_K106R_K108R_K126R_K 127R_S142A_S143A_S148A_T166A_S167A_S313A_S378A_T429A_T432A_ S436A_K447R_K458R_S461E_K470R)
  source 1..1345: mol_type = other RNA

SEQ ID NO: 2458 - RNA, 1345 nt, synthetic construct
  misc_feature 1..1345: note = mRNA i-3 (A64-N5-C30-hSL-N5) (opt29) from Homo sapiens__NP_000448.3__HNF4A(1-375)(S87A_K106R_K108R_K126R_K 127R_S142A_S143A_S148A_T166A_S167A_K179R_K180R_K234R_K300R_ K307R_K309R_S313A_S378A_T429A_T432A_S436A_K447R_K458R_S461E _K470R)
  source 1..1345: mol_type = other RNA
aggagaaagcttaccatgagactgagcaagaccctggtggacatggacatggccgactactctgccgccctggaccctgcctacaccaccctggagttcgaaaacgtgcaagtgctgaccatgggcaacgacaccagccctagcgagggcaccaacctgaacgcccctaatagcctgggagtgtccgccctgtgtgccatctgtggcgatagagccaccggcaagcactacggcgccagctcttgtgatggctgcaagggcttcttccggcgggccgtgcggaagaaccacatgtacagctgccggttcagccggcagtgcgtggtggaccgggatagacggaaccagtgccggtactgcagactgaagaagtgcttcagagccggcatgcggagagaagccgtgcagaacgagcgggaccggatcagcaccagaagagccgcctacgaggacagcgccctgcccagcatcaacgccctgctgcaggccgaggtgctgagcagacagatcgccgccccagtgtccggcatcaacggcgacatccgggcccggagaatcgccagcattgccgacgtgtgcgagagcatgaaggaacagctgctggtgctggtggaatgggccaagtacatccccgccttttgcgagctgcccctggacgatcaggtggccctgctgagagcacacgccggcgaacatctgctgctgggagccacccggcggagcatggtgttcaaggacgtgctgctgctgggcaacgactacatcgtgcccagacactgccctgagctggccgagatgagccgggtgtccatcagaatcctggacgaactggtgctgccgtttcaggaactgcagatcgacgacaacgagtacgcctacctgaaggccatcatctttttcgaccccgacgccagaggcctgagcgaccctggccggatcagacggctgagagcccaggtgcaagtgtccctggaagattacatcaacgaccggcagtacgacagccggggcagatttggcgaactgctcctgctgctgcccaccctgcagagcatcacctggcagatgatcgagcagatccagttcatcaagctgttcggcatggccaagatcgacaatctgctgcaggaaatgctgctctgaggactagttataagactgactagcccgatgggcctcccaacgggccctcctcccctccttgcaccgagattaataaaaaaaaaaaaaaaaaaaaaaaaaaaaaaaaaaaaaaaaaaaaaaaaaaaaaaaaaaaaaaaatgcatcccccccccccccccccccccccccccccccaaaggctcttttcagagccaccagaatt

SEQ ID NO: 2459 - RNA, 1345 nt, synthetic construct
  misc_feature 1..1345: note = mRNA i-3 (A64-N5-C30-hSL-N5) (opt29) from Homo sapiens__NP_000448.3__HNF4A(1-375)(S87A_S95A_S99A_K106R_K10 8R_K126R_K127R_S142A_S143A_S148A_T166A_S167A_S313A_S378A_T4 29A_T432A_S436A_K458R_S461E)
  source 1..1345: mol_type = other RNA
aggagaaagcttaccatgagactgagcaagaccctggtggacatggacatggccgactactctgccgccctggaccctgcctacaccaccctggagttcgaaaacgtgcaagtgctgaccatgggcaacgacaccagccctagcgagggcaccaacctgaacgcccctaatagcctgggagtgtccgccctgtgtgccatctgtggcgatagagccaccggcaagcactacggcgccagctcttgtgatggctgcaagggcttcttccggcgggccgtgcggaagaaccacatgtacgcctgccggttcgcccggcagtgcgtggtggaccgggatagacggaaccagtgccggtactgcagactgaagaagtgcttcagagccggcatgcggagagaagccgtgcagaacgagcgggaccggatcagcaccagaagagccgcctacgaggacagcgccctgcccagcatcaacgccctgctgcaggccgaggtgctgagcagacagatcgccgccccagtgtccggcatcaacggcgacatccgggccaagaagatcgccagcattgccgacgtgtgcgagagcatgaaggaacagctgctggtgctggtggaatgggccaagtacatccccgccttttgcgagctgcccctggacgatcaggtggccctgctgagagcacacgccggcgaacatctgctgctgggagccaccaagcggagcatggtgttcaaggacgtgctgctgctgggcaacgactacatcgtgcccagacactgccctgagctggccgagatgagccgggtgtccatcagaatcctggacgaactggtgctgccgtttcaggaactgcagatcgacgacaacgagtacgcctacctgaaggccatcatctttttcgaccccgacgccaagggcctgagcgaccctggcaagatcaagcggctgagagcccaggtgcaagtgtccctggaagattacatcaacgaccggcagtacgacagccggggcagatttggcgaactgctcctgctgctgcccaccctgcagagcatcacctggcagatgatcgagcagatccagttcatcaagctgttcggcatggccaagatcgacaatctgctgcaggaaatgctgctctgaggactagttataagactgactagcccgatgggcctcccaacgggccctcctcccctccttgcaccgagattaataaaaaaaaaaaaaaaaaaaaaaaaaaaaaaaaaaaaaaaaaaaaaaaaaaaaaaaaaaaaaaaatgcatcccccccccccccccccccccccccccccccaaaggctcttttcagagccaccagaatt

SEQ ID NO: 2460 - RNA, 1345 nt, synthetic construct
  misc_feature 1..1345: note = mRNA i-3 (A64-N5-C30-hSL-N5) (opt29) from Homo sapiens__NP_000448.3__HNF4A(1-375)(S87A_K106R_K108R_K126R_K 127R_S138A_T139A_S142A_S143A_S148A_T166A_S167A_S313A_S378A_ T429A_T432A_S436A_K458R_S461E)
  source 1..1345: mol_type = other RNA
aggagaaagcttaccatgagactgagcaagaccctggtggacatggacatggccgactactctgccgccctggaccctgcctacaccaccctggagttcgaaaacgtgcaagtgctgaccatgggcaacgacaccagccctagcgagggcaccaacctgaacgcccctaatagcctgggagtgtccgccctgtgtgccatctgtggcgatagagccaccggcaagcactacggcgccagctcttgtgatggctgcaagggcttcttccggcgggccgtgcggaagaaccacatgtacagctgccggttcagccggcagtgcgtggtggaccgggatagacggaaccagtgccggtactgcagactgaagaagtgcttcagagccggcatgcggagagaagccgtgcagaacgagcgggaccggatcgccgccagaagagccgcctacgaggacagcgccctgcccagcatcaacgccctgctgcaggccgaggtgctgagcagacagatcgccgccccagtgtccggcatcaacggcgacatccgggccaagaagatcgccagcattgccgacgtgtgcgagagcatgaaggaacagctgctggtgctggtggaatgggccaagtacatccccgccttttgcgagctgcccctggacgatcaggtggccctgctgagagcacacgccggcgaacatctgctgctgggagccaccaagcggagcatggtgttcaaggacgtgctgctgctgggcaacgactacatcgtgcccagacactgccctgagctggccgagatgagccgggtgtccatcagaatcctggacgaactggtgctgccgtttcaggaactgcagatcgacgacaacgagtacgcctacctgaaggccatcatctttttcgaccccgacgccaagggcctgagcgaccctggcaagatcaagcggctgagagcccaggtgcaagtgtccctggaagattacatcaacgaccggcagtacgacagccggggcagatttggcgaactgctcctgctgctgcccaccctgcagagcatcacctggcagatgatcgagcagatccagttcatcaagctgttcggcatggccaagatcgacaatctgctgcaggaaatgctgctctgaggactagttataagactgactagcccgatgggcctcccaacgggccctcctcccctccttgcaccgagattaataaaaaaaaaaaaaaaaaaaaaaaaaaaaaaaaaaaaaaaaaaaaaaaaaaaaaaaaaaaaaaaatgcatcccccccccccccccccccccccccccccccaaaggctcttttcagagccaccagaatt

SEQ ID NO: 2461 - RNA, 1345 nt, synthetic construct
  misc_feature 1..1345: note = mRNA i-3 (A64-N5-C30-hSL-N5) (opt29) from Homo sapiens__NP_000448.3__HNF4A(1-375)(S87A_S95A_S99A_K106R_K10 8R_K126R_K127R_S138A_T139A_S142A_S143A_S148A_T166A_S167A_S3 13A_S378A_T429A_T432A_S436A_K458R_S461E)
  source 1..1345: mol_type = other RNA
aggagaaagcttaccatgagactgagcaagaccctggtggacatggacatggccgactactctgccgccctggaccctgcctacaccaccctggagttcgaaaacgtgcaagtgctgaccatgggcaacgacaccagccctagcgagggcaccaacctgaacgcccctaatagcctgggagtgtccgccctgtgtgccatctgtggcgatagagccaccggcaagcactacggcgccagctcttgtgatggctgcaagggcttcttccggcgggccgtgcggaagaaccacatgtacgcctgccggttcgcccggcagtgcgtggtggaccgggatagacggaaccagtgccggtactgcagactgaagaagtgcttcagagccggcatgcggagagaagccgtgcagaacgagcgggaccggatcgccgccagaagagccgcctacgaggacagcgccctgcccagcatcaacgccctgctgcaggccgaggtgctgagcagacagatcgccgccccagtgtccggcatcaacggcgacatccgggccaagaagatcgccagcattgccgacgtgtgcgagagcatgaaggaacagctgctggtgctggtggaatgggccaagtacatccccgccttttgcgagctgcccctggacgatcaggtggccctgctgagagcacacgccggcgaacatctgctgctgggagccaccaagcggagcatggtgttcaaggacgtgctgctgctgggcaacgactacatcgtgcccagacactgccctgagctggccgagatgagccgggtgtccatcagaatcctggacgaactggtgctgccgtttcaggaactgcagatcgacgacaacgagtacgcctacctgaaggccatcatctttttcgaccccgacgccaagggcctgagcgaccctggcaagatcaagcggctgagagcccaggtgcaagtgtccctggaagattacatcaacgaccggcagtacgacagccggggcagatttggcgaactgctcctgctgctgcccaccctgcagagcatcacctggcagatgatcgagcagatccagttcatcaagctgttcggcatggccaagatcgacaatctgctgcaggaaatgctgctctgaggactagttataagactgactagcccgatgggcctcccaacgggccctcctcccctccttgcaccgagattaataaaaaaaaaaaaaaaaaaaaaaaaaaaaaaaaaaaaaaaaaaaaaaaaaaaaaaaaaaaaaaaatgcatcccccccccccccccccccccccccccccccaaaggctcttttcagagccaccagaatt

SEQ ID NO: 2462 - RNA, 1531 nt, synthetic construct
  misc_feature 1..1531: note = mRNA i-3 (A64-N5-C30-hSL-N5) (wt) from Homo sapiens__NP_000448.3__HNF4A(39-474)
  source 1..1531: mol_type = other RNA
aggagaaagcttaccatggacacgtccccatcagaaggcaccaacctcaacgcgcccaacagcctgggtgtcagcgccctgtgtgccatctgcggggaccgggccacgggcaaacactacggtgcctcgagctgtgacggctgcaagggcttcttccggaggagcgtgcggaagaaccacatgtactcctgcagatttagccggcagtgcgtggtggacaaagacaagaggaaccagtgccgctactgcaggctcaagaaatgcttccgggctggcatgaagaaggaagccgtccagaatgagcgggaccggatcagcactcgaaggtcaagctatgaggacagcagcctgccctccatcaatgcgctcctgcaggcggaggtcctgtcccgacagatcacctcccccgtctccgggatcaacggcgacattcgggcgaagaagattgccagcatcgcagatgtgtgtgagtccatgaaggagcagctgctggttctcgttgagtgggccaagtacatcccagctttctgcgagctccccctggacgaccaggtggccctgctcagagcccatgctggcgagcacctgctgctcggagccaccaagagatccatggtgttcaaggacgtgctgctcctaggcaatgactacattgtccctcggcactgcccggagctggcggagatgagccgggtgtccatacgcatccttgacgagctggtgctgcccttccaggagctgcagatcgatgacaatgagtatgcctacctcaaagccatcatcttctttgacccagatgccaaggggctgagcgatccagggaagatcaagcggctgcgttcccaggtgcaggtgagcttggaggactacatcaacgaccgccagtatgactcgcgtggccgctttggagagctgctgctgctgctgcccaccttgcagagcatcacctggcagatgatcgagcagatccagttcatcaagctcttcggcatggccaagattgacaacctgttgcaggagatgctgctgggagggtcccccagcgatgcaccccatgcccaccaccccctgcaccctcacctgatgcaggaacatatgggaaccaacgtcatcgttgccaacacaatgcccactcacctcagcaacggacagatgtgtgagtggccccgacccaggggacaggcagccacccctgagaccccacagccctcaccgccaggtggctcagggtctgagccctataagctcctgccgggagccgtcgccacaatcgtcaagcccctctctgccatcccccagccgaccatcaccaagcaggaagttatctagggactagttataagactgactagcccgatgggcctcccaacgggccctcctcccctccttgcaccgagattaataaaaaaaaaaaaaaaaaaaaaaaaaaaaaaaaaaaaaaaaaaaaaaaaaaaaaaaaaaaaaaaatgcatcccccccccccccccccccccccccccccccaaaggctcttttcagagccaccagaatt

SEQ ID NO: 2463 - RNA, 1531 nt, synthetic construct
  misc_feature 1..1531: note = mRNA i-3 (A64-N5-C30-hSL-N5) (wt mod) from Homo sapiens__NP_000448.3__HNF4A(39-474)
  source 1..1531: mol_type = other RNA
aggagaaagcttaccatggacacgtccccatcagaaggcaccaacctcaacgcgcccaacagcctgggtgtgagcgccctgtgtgccatctgcggggaccgggccacgggcaaacactacggtgcctcgagctgtgacggctgcaagggcttcttccggaggagcgtgcggaagaaccacatgtactcctgcagatttagccggcagtgcgtggtggacaaagacaagaggaaccagtgccgctactgcaggctcaagaaatgcttccgggctggcatgaagaaggaagccgtccagaatgagcgggaccggatcagcactcgaaggtcaagctatgaggacagcagcctgccctccatcaatgcgctcctgcaggcggaggtcctgtcccgacagatcacctcccccgtctccgggatcaacggcgacattcgggcgaagaagattgccagcatcgcagatgtgtgtgagtccatgaaggagcagctgctggttctcgttgagtgggccaagtacatcccagctttctgcgagctccccctggacgaccaggtggccctgctcagagcccatgctggcgagcacctcctgctcggagccaccaagagatccatggtgttcaaggacgtgctgctcctaggcaatgactacattgtccctcggcactgcccggagctggcggagatgagccgggtgtccatacgcatccttgacgagctggtgctgcccttccaggagctgcagatcgatgacaatgagtatgcctacctcaaagccatcatcttctttgacccagatgccaaggggctgagcgatccagggaagatcaagcggctgcgttcccaggtccaggtgagcttggaggactacatcaacgaccgccagtatgactcgcgtggccgctttggagagctgctgctgctgctgcccaccttgcagagcatcacctggcagatgatcgagcagatccagttcatcaagctgttcggcatggccaagattgacaacctgttgcaggagatgctgctgggagggtcccccagcgatgcaccccatgcccaccaccccctgcaccctcacctgatgcaggaacatatgggaaccaacgtgatcgttgccaacacaatgcccactcacctcagcaacggacagatgtgtgagtggccccgacccaggggacaggcagccacccctgagaccccacagccctcaccgccaggtggctcagggtctgagccctataagctcctgccgggagccgtcgccacaatcgtcaagcccctctctgccatcccccagccgaccatcaccaagcaggaagttatctgaggactagttataagactgactagcccgatgggcctcccaacgggccctcctcccctccttgcaccgagattaataaaaaaaaaaaaaaaaaaaaaaaaaaaaaaaaaaaaaaaaaaaaaaaaaaaaaaaaaaaaaaaatgcatcccccccccccccccccccccccccccccccaaaggctcttttcagagccaccagaatt

SEQ ID NO: 2464 - RNA, 1531 nt, synthetic construct
  misc_feature 1..1531: note = mRNA i-3 (A64-N5-C30-hSL-N5) (opt1) from Homo sapiens__NP_000448.3__HNF4A(39-474)
  source 1..1531: mol_type = other RNA
aggagaaagcttaccatggacaccagcccgtccgaggggaccaacctgaacgcccccaacagcctgggcgtgtccgccctctgcgccatctgcggggaccgggcgacgggcaagcactacggggccagctcctgcgacggctgcaagggcttcttccgccggagcgtccgcaagaaccacatgtactcctgccggttcagccgccagtgcgtggtggacaaggacaagcggaaccagtgccgctactgccggctgaagaagtgcttccgcgccgggatgaagaaggaggccgtccagaacgagcgggaccgcatctccacccggcgcagctcctacgaggacagctccctgcccagcatcaacgcgctcctgcaggccgaggtgctgtcccggcagatcaccagccccgtgtccggcatcaacggggacatccgcgccaagaagatcgccagcatcgccgacgtctgcgagagcatgaaggagcagctcctggtgctggtggagtgggcgaagtacatcccggccttctgcgagctccccctggacgaccaggtcgccctgctccgggcccacgccggcgagcacctcctgctgggggcgaccaagcgctccatggtgttcaaggacgtgctgctgctcggcaacgactacatcgtcccccggcactgccccgagctggccgagatgagccgcgtgtccatccggatcctggacgagctcgtgctgccgttccaggagctgcagatcgacgacaacgagtacgcctacctcaaggccatcatcttcttcgaccccgacgccaagggcctgagcgaccccgggaagatcaagcgcctgcgctcccaggtccaggtgagcctcgaggactacatcaacgaccggcagtacgactcccgcggccggttcggggagctgctgctcctgctgcccacgctccagagcatcacctggcagatgatcgagcagatccagttcatcaagctgttcggcatggcgaagatcgacaacctgctccaggagatgctgctgggcgggtccccgagcgacgcgccccacgcccaccaccccctccacccccacctgatgcaggagcacatgggcaccaacgtgatcgtcgccaacaccatgccgacgcacctgtccaacgggcagatgtgcgagtggccccgcccccggggccaggccgccacccccgagaccccgcagcccagcccgcccgggggctccggcagcgagccctacaagctgctccccggggccgtggccaccatcgtgaagcccctgtccgccatcccccagccgacgatcaccaagcaggaggtcatctgaggactagttataagactgactagcccgatgggcctcccaacgggccctcctcccctccttgcaccgagattaataaaaaaaaaaaaaaaaaaaaaaaaaaaaaaaaaaaaaaaaaaaaaaaaaaaaaaaaaaaaaaaatgcatcccccccccccccccccccccccccccccccaaaggctcttttcagagccaccagaatt

SEQ ID NO: 2465 - RNA, 1531 nt, synthetic construct
  misc_feature 1..1531: note = mRNA i-3 (A64-N5-C30-hSL-N5) (opt1) from Homo sapiens__NP_000448.3__HNF4A(39-474)(S313A)
  source 1..1531: mol_type = other RNA
aggagaaagcttaccatggacaccagcccgtccgaggggaccaacctgaacgcccccaacagcctgggcgtgtccgccctctgcgccatctgcggggaccgggcgacgggcaagcactacggggccagctcctgcgacggctgcaagggcttcttccgccggagcgtccgcaagaaccacatgtactcctgccggttcagccgccagtgcgtggtggacaaggacaagcggaaccagtgccgctactgccggctgaagaagtgcttccgcgccgggatgaagaaggaggccgtccagaacgagcgggaccgcatctccacccggcgcagctcctacgaggacagctccctgcccagcatcaacgcgctcctgcaggccgaggtgctgtcccggcagatcaccagccccgtgtccggcatcaacggggacatccgcgccaagaagatcgccagcatcgccgacgtctgcgagagcatgaaggagcagctcctggtgctggtggagtgggcgaagtacatcccggccttctgcgagctccccctggacgaccaggtcgccctgctccgggcccacgccggcgagcacctcctgctgggggcgaccaagcgctccatggtgttcaaggacgtgctgctgctcggcaacgactacatcgtcccccggcactgccccgagctggccgagatgagccgcgtgtccatccggatcctggacgagctcgtgctgccgttccaggagctgcagatcgacgacaacgagtacgcctacctcaaggccatcatcttcttcgaccccgacgccaagggcctgagcgaccccgggaagatcaagcgcctgcgcgcgcaggtccaggtgagcctcgaggactacatcaacgaccggcagtacgactcccgcggccggttcggggagctgctgctcctgctgcccacgctccagagcatcacctggcagatgatcgagcagatccagttcatcaagctgttcggcatggcgaagatcgacaacctgctccaggagatgctgctgggcgggtccccgagcgacgcgccccacgcccaccaccccctccacccccacctgatgcaggagcacatgggcaccaacgtgatcgtcgccaacaccatgccgacgcacctgtccaacgggcagatgtgcgagtggccccgcccccggggccaggccgccacccccgagaccccgcagcccagcccgcccgggggctccggcagcgagccctacaagctgctccccggggccgtggccaccatcgtgaagcccctgtccgccatcccccagccgacgatcaccaagcaggaggtcatctgaggactagttataagactgactagcccgatgggcctcccaacgggccctcctcccctccttgcaccgagattaataaaaaaaaaaaaaaaaaaaaaaaaaaaaaaaaaaaaaaaaaaaaaaaaaaaaaaaaaaaaaaaatgcatcccccccccccccccccccccccccccccccaaaggctcttttcagagccaccagaatt

SEQ ID NO: 2466 - RNA, 1531 nt, synthetic construct
  misc_feature 1..1531: note = mRNA i-3 (A64-N5-C30-hSL-N5) (opt1) from Homo sapiens__NP_000448.3__HNF4A(39-474)(S313E)
  source 1..1531: mol_type = other RNA
aggagaaagcttaccatggacaccagcccgtccgaggggaccaacctgaacgcccccaacagcctgggcgtgtccgccctctgcgccatctgcggggaccgggcgacgggcaagcactacggggccagctcctgcgacggctgcaagggcttcttccgccggagcgtccgcaagaaccacatgtactcctgccggttcagccgccagtgcgtggtggacaaggacaagcggaaccagtgccgctactgccggctgaagaagtgcttccgcgccgggatgaagaaggaggccgtccagaacgagcgggaccgcatctccacccggcgcagctcctacgaggacagctccctgcccagcatcaacgcgctcctgcaggccgaggtgctgtcccggcagatcaccagccccgtgtccggcatcaacggggacatccgcgccaagaagatcgccagcatcgccgacgtctgcgagagcatgaaggagcagctcctggtgctggtggagtgggcgaagtacatcccggccttctgcgagctccccctggacgaccaggtcgccctgctccgggcccacgccggcgagcacctcctgctgggggcgaccaagcgctccatggtgttcaaggacgtgctgctgctcggcaacgactacatcgtcccccggcactgccccgagctggccgagatgagccgcgtgtccatccggatcctggacgagctcgtgctgccgttccaggagctgcagatcgacgacaacgagtacgcctacctcaaggccatcatcttcttcgaccccgacgccaagggcctgagcgaccccgggaagatcaagcgcctgcgcgagcaggtccaggtgagcctcgaggactacatcaacgaccggcagtacgactcccgcggccggttcggggagctgctgctcctgctgcccacgctccagagcatcacctggcagatgatcgagcagatccagttcatcaagctgttcggcatggcgaagatcgacaacctgctccaggagatgctgctgggcgggtccccgagcgacgcgccccacgcccaccaccccctccacccccacctgatgcaggagcacatgggcaccaacgtgatcgtcgccaacaccatgccgacgcacctgtccaacgggcagatgtgcgagtggccccgcccccggggccaggccgccacccccgagaccccgcagcccagcccgcccgggggctccggcagcgagccctacaagctgctccccggggccgtggccaccatcgtgaagcccctgtccgccatcccccagccgacgatcaccaagcaggaggtcatctgaggactagttataagactgactagcccgatgggcctcccaacgggccctcctcccctccttgcaccgagattaataaaaaaaaaaaaaaaaaaaaaaaaaaaaaaaaaaaaaaaaaaaaaaaaaaaaaaaaaaaaaaaatgcatcccccccccccccccccccccccccccccccaaaggctcttttcagagccaccagaatt

SEQ ID NO: 2467 - RNA, 1531 nt, synthetic construct
  misc_feature 1..1531: note = mRNA i-3 (A64-N5-C30-hSL-N5) (opt1) from Homo sapiens__NP_000448.3__HNF4A(39-474)(S142A_S143A)
  source 1..1531: mol_type = other RNA
aggagaaagcttaccatggacaccagcccgtccgaggggaccaacctgaacgcccccaacagcctgggcgtgtccgccctctgcgccatctgcggggaccgggcgacgggcaagcactacggggccagctcctgcgacggctgcaagggcttcttccgccggagcgtccgcaagaaccacatgtactcctgccggttcagccgccagtgcgtggtggacaaggacaagcggaaccagtgccgctactgccggctgaagaagtgcttccgcgccgggatgaagaaggaggccgtccagaacgagcgggaccgcatctccacccggcgcgcggcctacgaggacagctccctgcccagcatcaacgcgctcctgcaggccgaggtgctgtcccggcagatcaccagccccgtgtccggcatcaacggggacatccgcgccaagaagatcgccagcatcgccgacgtctgcgagagcatgaaggagcagctcctggtgctggtggagtgggcgaagtacatcccggccttctgcgagctccccctggacgaccaggtcgccctgctccgggcccacgccggcgagcacctcctgctgggggcgaccaagcgctccatggtgttcaaggacgtgctgctgctcggcaacgactacatcgtcccccggcactgccccgagctggccgagatgagccgcgtgtccatccggatcctggacgagctcgtgctgccgttccaggagctgcagatcgacgacaacgagtacgcctacctcaaggccatcatcttcttcgaccccgacgccaagggcctgagcgaccccgggaagatcaagcgcctgcgctcccaggtccaggtgagcctcgaggactacatcaacgaccggcagtacgactcccgcggccggttcggggagctgctgctcctgctgcccacgctccagagcatcacctggcagatgatcgagcagatccagttcatcaagctgttcggcatggcgaagatcgacaacctgctccaggagatgctgctgggcgggtccccgagcgacgcgccccacgcccaccaccccctccacccccacctgatgcaggagcacatgggcaccaacgtgatcgtcgccaacaccatgccgacgcacctgtccaacgggcagatgtgcgagtggccccgcccccggggccaggccgccacccccgagaccccgcagcccagcccgcccgggggctccggcagcgagccctacaagctgctccccggggccgtggccaccatcgtgaagcccctgtccgccatcccccagccgacgatcaccaagcaggaggtcatctgaggactagttataagactgactagcccgatgggcctcccaacgggccctcctcccctccttgcaccgagattaataaaaaaaaaaaaaaaaaaaaaaaaaaaaaaaaaaaaaaaaaaaaaaaaaaaaaaaaaaaaaaaatgcatcccccccccccccccccccccccccccccccaaaggctcttttcagagccaccagaatt

SEQ ID NO: 2468 - RNA, 1531 nt, synthetic construct
  misc_feature 1..1531: note = mRNA i-3 (A64-N5-C30-hSL-N5) (opt1) from Homo sapiens__NP_000448.3__HNF4A(39-474)(S142E_S143E)
  source 1..1531: mol_type = other RNA
aggagaaagcttaccatggacaccagcccgtccgaggggaccaacctgaacgcccccaacagcctgggcgtgtccgccctctgcgccatctgcggggaccgggcgacgggcaagcactacggggccagctcctgcgacggctgcaagggcttcttccgccggagcgtccgcaagaaccacatgtactcctgccggttcagccgccagtgcgtggtggacaaggacaagcggaaccagtgccgctactgccggctgaagaagtgcttccgcgccgggatgaagaaggaggccgtccagaacgagcgggaccgcatctccacccggcgcgaggagtacgaggacagctccctgcccagcatcaacgcgctcctgcaggccgaggtgctgtcccggcagatcaccagccccgtgtccggcatcaacggggacatccgcgccaagaagatcgccagcatcgccgacgtctgcgagagcatgaaggagcagctcctggtgctggtggagtgggcgaagtacatcccggccttctgcgagctccccctggacgaccaggtcgccctgctccgggcccacgccggcgagcacctcctgctgggggcgaccaagcgctccatggtgttcaaggacgtgctgctgctcggcaacgactacatcgtcccccggcactgccccgagctggccgagatgagccgcgtgtccatccggatcctggacgagctcgtgctgccgttccaggagctgcagatcgacgacaacgagtacgcctacctcaaggccatcatcttcttcgaccccgacgccaagggcctgagcgaccccgggaagatcaagcgcctgcgctcccaggtccaggtgagcctcgaggactacatcaacgaccggcagtacgactcccgcggccggttcggggagctgctgctcctgctgcccacgctccagagcatcacctggcagatgatcgagcagatccagttcatcaagctgttcggcatggcgaagatcgacaacctgctccaggagatgctgctgggcgggtccccgagcgacgcgccccacgcccaccaccccctccacccccacctgatgcaggagcacatgggcaccaacgtgatcgtcgccaacaccatgccgacgcacctgtccaacgggcagatgtgcgagtggccccgcccccggggccaggccgccacccccgagaccccgcagcccagcccgcccgggggctccggcagcgagccctacaagctgctccccggggccgtggccaccatcgtgaagcccctgtccgccatcccccagccgacgatcaccaagcaggaggtcatctgaggactagttataagactgactagcccgatgggcctcccaacgggccctcctcccctccttgcaccgagattaataaaaaaaaaaaaaaaaaaaaaaaaaaaaaaaaaaaaaaaaaaaaaaaaaaaaaaaaaaaaaaaatgcatcccccccccccccccccccccccccccccccaaaggctcttttcagagccaccagaatt

SEQ ID NO: 2469 - RNA, 1531 nt, synthetic construct
  misc_feature 1..1531: note = mRNA i-3 (A64-N5-C30-hSL-N5) (opt1) from Homo sapiens__NP_000448.3__HNF4A(39-474)(S143A)
  source 1..1531: mol_type = other RNA
aggagaaagcttaccatggacaccagcccgtccgaggggaccaacctgaacgcccccaacagcctgggcgtgtccgccctctgcgccatctgcggggaccgggcgacgggcaagcactacggggccagctcctgcgacggctgcaagggcttcttccgccggagcgtccgcaagaaccacatgtactcctgccggttcagccgccagtgcgtggtggacaaggacaagcggaaccagtgccgctactgccggctgaagaagtgcttccgcgccgggatgaagaaggaggccgtccagaacgagcgggaccgcatctccacccggcgcagcgcgtacgaggacagctccctgcccagcatcaacgcgctcctgcaggccgaggtgctgtcccggcagatcaccagccccgtgtccggcatcaacggggacatccgcgccaagaagatcgccagcatcgccgacgtctgcgagagcatgaaggagcagctcctggtgctggtggagtgggcgaagtacatcccggccttctgcgagctccccctggacgaccaggtcgccctgctccgggcccacgccggcgagcacctcctgctgggggcgaccaagcgctccatggtgttcaaggacgtgctgctgctcggcaacgactacatcgtcccccggcactgccccgagctggccgagatgagccgcgtgtccatccggatcctggacgagctcgtgctgccgttccaggagctgcagatcgacgacaacgagtacgcctacctcaaggccatcatcttcttcgaccccgacgccaagggcctgagcgaccccgggaagatcaagcgcctgcgctcccaggtccaggtgagcctcgaggactacatcaacgaccggcagtacgactcccgcggccggttcggggagctgctgctcctgctgcccacgctccagagcatcacctggcagatgatcgagcagatccagttcatcaagctgttcggcatggcgaagatcgacaacctgctccaggagatgctgctgggcgggtccccgagcgacgcgccccacgcccaccaccccctccacccccacctgatgcaggagcacatgggcaccaacgtgatcgtcgccaacaccatgccgacgcacctgtccaacgggcagatgtgcgagtggccccgcccccggggccaggccgccacccccgagaccccgcagcccagcccgcccgggggctccggcagcgagccctacaagctgctccccggggccgtggccaccatcgtgaagcccctgtccgccatcccccagccgacgatcaccaagcaggaggtcatctgaggactagttataagactgactagcccgatgggcctcccaacgggccctcctcccctccttgcaccgagattaataaaaaaaaaaaaaaaaaaaaaaaaaaaaaaaaaaaaaaaaaaaaaaaaaaaaaaaaaaaaaaaatgcatcccccccccccccccccccccccccccccccaaaggctcttttcagagccaccagaatt

SEQ ID NO: 2470 - RNA, 1531 nt, synthetic construct
  misc_feature 1..1531: note = mRNA i-3 (A64-N5-C30-hSL-N5) (opt1) from Homo sapiens__NP_000448.3__HNF4A(39-474)(T166A)
  source 1..1531: mol_type = other RNA
aggagaaagcttaccatggacaccagcccgtccgaggggaccaacctgaacgcccccaacagcctgggcgtgtccgccctctgcgccatctgcggggaccgggcgacgggcaagcactacggggccagctcctgcgacggctgcaagggcttcttccgccggagcgtccgcaagaaccacatgtactcctgccggttcagccgccagtgcgtggtggacaaggacaagcggaaccagtgccgctactgccggctgaagaagtgcttccgcgccgggatgaagaaggaggccgtccagaacgagcgggaccgcatctccacccggcgcagctcctacgaggacagctccctgcccagcatcaacgcgctcctgcaggccgaggtgctgtcccggcagatcgcgagccccgtgtccggcatcaacggggacatccgcgccaagaagatcgccagcatcgccgacgtctgcgagagcatgaaggagcagctcctggtgctggtggagtgggcgaagtacatcccggccttctgcgagctccccctggacgaccaggtcgccctgctccgggcccacgccggcgagcacctcctgctgggggcgaccaagcgctccatggtgttcaaggacgtgctgctgctcggcaacgactacatcgtcccccggcactgccccgagctggccgagatgagccgcgtgtccatccggatcctggacgagctcgtgctgccgttccaggagctgcagatcgacgacaacgagtacgcctacctcaaggccatcatcttcttcgaccccgacgccaagggcctgagcgaccccgggaagatcaagcgcctgcgctcccaggtccaggtgagcctcgaggactacatcaacgaccggcagtacgactcccgcggccggttcggggagctgctgctcctgctgcccacgctccagagcatcacctggcagatgatcgagcagatccagttcatcaagctgttcggcatggcgaagatcgacaacctgctccaggagatgctgctgggcgggtccccgagcgacgcgccccacgcccaccaccccctccacccccacctgatgcaggagcacatgggcaccaacgtgatcgtcgccaacaccatgccgacgcacctgtccaacgggcagatgtgcgagtggccccgcccccggggccaggccgccacccccgagaccccgcagcccagcccgcccgggggctccggcagcgagccctacaagctgctccccggggccgtggccaccatcgtgaagcccctgtccgccatcccccagccgacgatcaccaagcaggaggtcatctgaggactagttataagactgactagcccgatgggcctcccaacgggccctcctcccctccttgcaccgagattaataaaaaaaaaaaaaaaaaaaaaaaaaaaaaaaaaaaaaaaaaaaaaaaaaaaaaaaaaaaaaaaatgcatcccccccccccccccccccccccccccccccaaaggctcttttcagagccaccagaatt

SEQ ID NO: 2471 - RNA, 1531 nt, synthetic construct
  misc_feature 1..1531: note = mRNA i-3 (A64-N5-C30-hSL-N5) (opt1) from Homo sapiens__NP_000448.3__HNF4A(39-474)(S167E)
  source 1..1531: mol_type = other RNA
aggagaaagcttaccatggacaccagcccgtccgaggggaccaacctgaacgcccccaacagcctgggcgtgtccgccctctgcgccatctgcggggaccgggcgacgggcaagcactacggggccagctcctgcgacggctgcaagggcttcttccgccggagcgtccgcaagaaccacatgtactcctgccggttcagccgccagtgcgtggtggacaaggacaagcggaaccagtgccgctactgccggctgaagaagtgcttccgcgccgggatgaagaaggaggccgtccagaacgagcgggaccgcatctccacccggcgcagctcctacgaggacagctccctgcccagcatcaacgcgctcctgcaggccgaggtgctgtcccggcagatcaccgagcccgtgtccggcatcaacggggacatccgcgccaagaagatcgccagcatcgccgacgtctgcgagagcatgaaggagcagctcctggtgctggtggagtgggcgaagtacatcccggccttctgcgagctccccctggacgaccaggtcgccctgctccgggcccacgccggcgagcacctcctgctgggggcgaccaagcgctccatggtgttcaaggacgtgctgctgctcggcaacgactacatcgtcccccggcactgccccgagctggccgagatgagccgcgtgtccatccggatcctggacgagctcgtgctgccgttccaggagctgcagatcgacgacaacgagtacgcctacctcaaggccatcatcttcttcgaccccgacgccaagggcctgagcgaccccgggaagatcaagcgcctgcgctcccaggtccaggtgagcctcgaggactacatcaacgaccggcagtacgactcccgcggccggttcggggagctgctgctcctgctgcccacgctccagagcatcacctggcagatgatcgagcagatccagttcatcaagctgttcggcatggcgaagatcgacaacctgctccaggagatgctgctgggcgggtccccgagcgacgcgccccacgcccaccaccccctccacccccacctgatgcaggagcacatgggcaccaacgtgatcgtcgccaacaccatgccgacgcacctgtccaacgggcagatgtgcgagtggccccgcccccggggccaggccgccacccccgagaccccgcagcccagcccgcccgggggctccggcagcgagccctacaagctgctccccggggccgtggccaccatcgtgaagcccctgtccgccatcccccagccgacgatcaccaagcaggaggtcatctgaggactagttataagactgactagcccgatgggcctcccaacgggccctcctcccctccttgcaccgagattaataaaaaaaaaaaaaaaaaaaaaaaaaaaaaaaaaaaaaaaaaaaaaaaaaaaaaaaaaaaaaaaatgcatcccccccccccccccccccccccccccccccaaaggctcttttcagagccaccagaatt

SEQ ID NO: 2472 - RNA, 1531 nt, synthetic construct
  misc_feature 1..1531: note = mRNA i-3 (A64-N5-C30-hSL-N5) (opt1) from Homo sapiens__NP_000448.3__HNF4A(39-474)(S167A)
  source 1..1531: mol_type = other RNA
aggagaaagcttaccatggacaccagcccgtccgaggggaccaacctgaacgcccccaacagcctgggcgtgtccgccctctgcgccatctgcggggaccgggcgacgggcaagcactacggggccagctcctgcgacggctgcaagggcttcttccgccggagcgtccgcaagaaccacatgtactcctgccggttcagccgccagtgcgtggtggacaaggacaagcggaaccagtgccgctactgccggctgaagaagtgcttccgcgccgggatgaagaaggaggccgtccagaacgagcgggaccgcatctccacccggcgcagctcctacgaggacagctccctgcccagcatcaacgcgctcctgcaggccgaggtgctgtcccggcagatcaccgcgcccgtgtccggcatcaacggggacatccgcgccaagaagatcgccagcatcgccgacgtctgcgagagcatgaaggagcagctcctggtgctggtggagtgggcgaagtacatcccggccttctgcgagctccccctggacgaccaggtcgccctgctccgggcccacgccggcgagcacctcctgctgggggcgaccaagcgctccatggtgttcaaggacgtgctgctgctcggcaacgactacatcgtcccccggcactgccccgagctggccgagatgagccgcgtgtccatccggatcctggacgagctcgtgctgccgttccaggagctgcagatcgacgacaacgagtacgcctacctcaaggccatcatcttcttcgaccccgacgccaagggcctgagcgaccccgggaagatcaagcgcctgcgctcccaggtccaggtgagcctcgaggactacatcaacgaccggcagtacgactcccgcggccggttcggggagctgctgctcctgctgcccacgctccagagcatcacctggcagatgatcgagcagatccagttcatcaagctgttcggcatggcgaagatcgacaacctgctccaggagatgctgctgggcgggtccccgagcgacgcgccccacgcccaccaccccctccacccccacctgatgcaggagcacatgggcaccaacgtgatcgtcgccaacaccatgccgacgcacctgtccaacgggcagatgtgcgagtggccccgcccccggggccaggccgccacccccgagaccccgcagcccagcccgcccgggggctccggcagcgagccctacaagctgctccccggggccgtggccaccatcgtgaagcccctgtccgccatcccccagccgacgatcaccaagcaggaggtcatctgaggactagttataagactgactagcccgatgggcctcccaacgggccctcctcccctccttgcaccgagattaataaaaaaaaaaaaaaaaaaaaaaaaaaaaaaaaaaaaaaaaaaaaaaaaaaaaaaaaaaaaaaaatgcatcccccccccccccccccccccccccccccccaaaggctcttttcagagccaccagaatt

SEQ ID NO: 2473 - RNA, 1531 nt, synthetic construct
  misc_feature 1..1531: note = mRNA i-3 (A64-N5-C30-hSL-N5) (opt1) from Homo sapiens__NP_000448.3__HNF4A(39-474)(S167A_S378A_T429A_T432A _S436A)
  source 1..1531: mol_type = other RNA
aggagaaagcttaccatggacaccagcccgtccgaggggaccaacctgaacgcccccaacagcctgggcgtgtccgccctctgcgccatctgcggggaccgggcgacgggcaagcactacggggccagctcctgcgacggctgcaagggcttcttccgccggagcgtccgcaagaaccacatgtactcctgccggttcagccgccagtgcgtggtggacaaggacaagcggaaccagtgccgctactgccggctgaagaagtgcttccgcgccgggatgaagaaggaggccgtccagaacgagcgggaccgcatctccacccggcgcagctcctacgaggacagctccctgcccagcatcaacgcgctcctgcaggccgaggtgctgtcccggcagatcaccgcgcccgtgtccggcatcaacggggacatccgcgccaagaagatcgccagcatcgccgacgtctgcgagagcatgaaggagcagctcctggtgctggtggagtgggcgaagtacatcccggccttctgcgagctccccctggacgaccaggtcgccctgctccgggcccacgccggcgagcacctcctgctgggggcgaccaagcgctccatggtgttcaaggacgtgctgctgctcggcaacgactacatcgtcccccggcactgccccgagctggccgagatgagccgcgtgtccatccggatcctggacgagctcgtgctgccgttccaggagctgcagatcgacgacaacgagtacgcctacctcaaggccatcatcttcttcgaccccgacgccaagggcctgagcgaccccgggaagatcaagcgcctgcgctcccaggtccaggtgagcctcgaggactacatcaacgaccggcagtacgactcccgcggccggttcggggagctgctgctcctgctgcccacgctccagagcatcacctggcagatgatcgagcagatccagttcatcaagctgttcggcatggcgaagatcgacaacctgctccaggagatgctgctgggcggggcgccgagcgacgcgccccacgcccaccaccccctccacccccacctgatgcaggagcacatgggcaccaacgtgatcgtcgccaacaccatgccgacgcacctgtccaacgggcagatgtgcgagtggccccgcccccggggccaggccgccgcgcccgaggcgccgcagcccgcgccgcccgggggctccggcagcgagccctacaagctgctccccggggccgtggccaccatcgtgaagcccctgtccgccatcccccagccgacgatcaccaagcaggaggtcatctgaggactagttataagactgactagcccgatgggcctcccaacgggccctcctcccctccttgcaccgagattaataaaaaaaaaaaaaaaaaaaaaaaaaaaaaaaaaaaaaaaaaaaaaaaaaaaaaaaaaaaaaaaatgcatcccccccccccccccccccccccccccccccaaaggctcttttcagagccaccagaatt

SEQ ID NO: 2474 - RNA, 1531 nt, synthetic construct
  misc_feature 1..1531: note = mRNA i-3 (A64-N5-C30-hSL-N5) (opt1) from Homo sapiens__NP_000448.3__HNF4A(39-474)(S167E_S378E_T429E_T432E _S436E)
  source 1..1531: mol_type = other RNA
aggagaaagcttaccatggacaccagcccgtccgaggggaccaacctgaacgcccccaacagcctgggcgtgtccgccctctgcgccatctgcggggaccgggcgacgggcaagcactacggggccagctcctgcgacggctgcaagggcttcttccgccggagcgtccgcaagaaccacatgtactcctgccggttcagccgccagtgcgtggtggacaaggacaagcggaaccagtgccgctactgccggctgaagaagtgcttccgcgccgggatgaagaaggaggccgtccagaacgagcgggaccgcatctccacccggcgcagctcctacgaggacagctccctgcccagcatcaacgcgctcctgcaggccgaggtgctgtcccggcagatcaccgagcccgtgtccggcatcaacggggacatccgcgccaagaagatcgccagcatcgccgacgtctgcgagagcatgaaggagcagctcctggtgctggtggagtgggcgaagtacatcccggccttctgcgagctccccctggacgaccaggtcgccctgctccgggcccacgccggcgagcacctcctgctgggggcgaccaagcgctccatggtgttcaaggacgtgctgctgctcggcaacgactacatcgtcccccggcactgccccgagctggccgagatgagccgcgtgtccatccggatcctggacgagctcgtgctgccgttccaggagctgcagatcgacgacaacgagtacgcctacctcaaggccatcatcttcttcgaccccgacgccaagggcctgagcgaccccgggaagatcaagcgcctgcgctcccaggtccaggtgagcctcgaggactacatcaacgaccggcagtacgactcccgcggccggttcggggagctgctgctcctgctgcccacgctccagagcatcacctggcagatgatcgagcagatccagttcatcaagctgttcggcatggcgaagatcgacaacctgctccaggagatgctgctgggcggggagccgagcgacgcgccccacgcccaccaccccctccacccccacctgatgcaggagcacatgggcaccaacgtgatcgtcgccaacaccatgccgacgcacctgtccaacgggcagatgtgcgagtggccccgcccccggggccaggccgccgagcccgaggagccgcagcccgagccgcccgggggctccggcagcgagccctacaagctgctccccggggccgtggccaccatcgtgaagcccctgtccgccatcccccagccgacgatcaccaagcaggaggtcatctgaggactagttataagactgactagcccgatgggcctcccaacgggccctcctcccctccttgcaccgagattaataaaaaaaaaaaaaaaaaaaaaaaaaaaaaaaaaaaaaaaaaaaaaaaaaaaaaaaaaaaaaaaatgcatcccccccccccccccccccccccccccccccaaaggctcttttcagagccaccagaatt

SEQ ID NO: 2475 - RNA, 1531 nt, synthetic construct
  misc_feature 1..1531: note = mRNA i-3 (A64-N5-C30-hSL-N5) (opt1) from Homo sapiens__NP_000448.3__HNF4A(39-474)(S87A)
  source 1..1531: mol_type = other RNA
aggagaaagcttaccatggacaccagcccgtccgaggggaccaacctgaacgcccccaacagcctgggcgtgtccgccctctgcgccatctgcggggaccgggcgacgggcaagcactacggggccagctcctgcgacggctgcaagggcttcttccgccgggcggtccgcaagaaccacatgtactcctgccggttcagccgccagtgcgtggtggacaaggacaagcggaaccagtgccgctactgccggctgaagaagtgcttccgcgccgggatgaagaaggaggccgtccagaacgagcgggaccgcatctccacccggcgcagctcctacgaggacagctccctgcccagcatcaacgcgctcctgcaggccgaggtgctgtcccggcagatcaccagccccgtgtccggcatcaacggggacatccgcgccaagaagatcgccagcatcgccgacgtctgcgagagcatgaaggagcagctcctggtgctggtggagtgggcgaagtacatcccggccttctgcgagctccccctggacgaccaggtcgccctgctccgggcccacgccggcgagcacctcctgctgggggcgaccaagcgctccatggtgttcaaggacgtgctgctgctcggcaacgactacatcgtcccccggcactgccccgagctggccgagatgagccgcgtgtccatccggatcctggacgagctcgtgctgccgttccaggagctgcagatcgacgacaacgagtacgcctacctcaaggccatcatcttcttcgaccccgacgccaagggcctgagcgaccccgggaagatcaagcgcctgcgctcccaggtccaggtgagcctcgaggactacatcaacgaccggcagtacgactcccgcggccggttcggggagctgctgctcctgctgcccacgctccagagcatcacctggcagatgatcgagcagatccagttcatcaagctgttcggcatggcgaagatcgacaacctgctccaggagatgctgctgggcgggtccccgagcgacgcgccccacgcccaccaccccctccacccccacctgatgcaggagcacatgggcaccaacgtgatcgtcgccaacaccatgccgacgcacctgtccaacgggcagatgtgcgagtggccccgcccccggggccaggccgccacccccgagaccccgcagcccagcccgcccgggggctccggcagcgagccctacaagctgctccccggggccgtggccaccatcgtgaagcccctgtccgccatcccccagccgacgatcaccaagcaggaggtcatctgaggactagttataagactgactagcccgatgggcctcccaacgggccctcctcccctccttgcaccgagattaataaaaaaaaaaaaaaaaaaaaaaaaaaaaaaaaaaaaaaaaaaaaaaaaaaaaaaaaaaaaaaaatgcatcccccccccccccccccccccccccccccccaaaggctcttttcagagccaccagaatt

SEQ ID NO: 2476 - RNA, 1531 nt, synthetic construct
  misc_feature 1..1531: note = mRNA i-3 (A64-N5-C30-hSL-N5) (opt1) from Homo sapiens__NP_000448.3__HNF4A(39-474)(S87E)
  source 1..1531: mol_type = other RNA
aggagaaagcttaccatggacaccagcccgtccgaggggaccaacctgaacgcccccaacagcctgggcgtgtccgccctctgcgccatctgcggggaccgggcgacgggcaagcactacggggccagctcctgcgacggctgcaagggcttcttccgccgggaggtccgcaagaaccacatgtactcctgccggttcagccgccagtgcgtggtggacaaggacaagcggaaccagtgccgctactgccggctgaagaagtgcttccgcgccgggatgaagaaggaggccgtccagaacgagcgggaccgcatctccacccggcgcagctcctacgaggacagctccctgcccagcatcaacgcgctcctgcaggccgaggtgctgtcccggcagatcaccagccccgtgtccggcatcaacggggacatccgcgccaagaagatcgccagcatcgccgacgtctgcgagagcatgaaggagcagctcctggtgctggtggagtgggcgaagtacatcccggccttctgcgagctccccctggacgaccaggtcgccctgctccgggcccacgccggcgagcacctcctgctgggggcgaccaagcgctccatggtgttcaaggacgtgctgctgctcggcaacgactacatcgtcccccggcactgccccgagctggccgagatgagccgcgtgtccatccggatcctggacgagctcgtgctgccgttccaggagctgcagatcgacgacaacgagtacgcctacctcaaggccatcatcttcttcgaccccgacgccaagggcctgagcgaccccgggaagatcaagcgcctgcgctcccaggtccaggtgagcctcgaggactacatcaacgaccggcagtacgactcccgcggccggttcggggagctgctgctcctgctgcccacgctccagagcatcacctggcagatgatcgagcagatccagttcatcaagctgttcggcatggcgaagatcgacaacctgctccaggagatgctgctgggcgggtccccgagcgacgcgccccacgcccaccaccccctccacccccacctgatgcaggagcacatgggcaccaacgtgatcgtcgccaacaccatgccgacgcacctgtccaacgggcagatgtgcgagtggccccgcccccggggccaggccgccacccccgagaccccgcagcccagcccgcccgggggctccggcagcgagccctacaagctgctccccggggccgtggccaccatcgtgaagcccctgtccgccatcccccagccgacgatcaccaagcaggaggtcatctgaggactagttataagactgactagcccgatgggcctcccaacgggccctcctcccctccttgcaccgagattaataaaaaaaaaaaaaaaaaaaaaaaaaaaaaaaaaaaaaaaaaaaaaaaaaaaaaaaaaaaaaaaatgcatcccccccccccccccccccccccccccccccaaaggctcttttcagagccaccagaatt

SEQ ID NO: 2477 - RNA, 1531 nt, synthetic construct; identical to SEQ ID NO: 2464
  misc_feature 1..1531: note = mRNA i-3 (A64-N5-C30-hSL-N5) (opt1) from Homo sapiens__NP_000448.3__HNF4A(39-474)(R2V)
  source 1..1531: mol_type = other RNA

SEQ ID NO: 2478 - RNA, 1531 nt, synthetic construct; identical to SEQ ID NO: 2464
  misc_feature 1..1531: note = mRNA i-3 (A64-N5-C30-hSL-N5) (opt1) from Homo sapiens__NP_000448.3__HNF4A(39-474)(R2V_K5V)
  source 1..1531: mol_type = other RNA

SEQ ID NO: 2479 - RNA, 1531 nt, synthetic construct
  misc_feature 1..1531: note = mRNA i-3 (A64-N5-C30-hSL-N5) (opt1) from Homo sapiens__NP_000448.3__HNF4A(39-474)(K179R_K180R)
  source 1..1531: mol_type = other RNA
aggagaaagcttaccatggacaccagcccgtccgaggggaccaacctgaacgcccccaacagcctgggcgtgtccgccctctgcgccatctgcggggaccgggcgacgggcaagcactacggggccagctcctgcgacggctgcaagggcttcttccgccggagcgtccgcaagaaccacatgtactcctgccggttcagccgccagtgcgtggtggacaaggacaagcggaaccagtgccgctactgccggctgaagaagtgcttccgcgccgggatgaagaaggaggccgtccagaacgagcgggaccgcatctccacccggcgcagctcctacgaggacagctccctgcccagcatcaacgcgctcctgcaggccgaggtgctgtcccggcagatcaccagccccgtgtccggcatcaacggggacatccgcgcccggcgcatcgccagcatcgccgacgtctgcgagagcatgaaggagcagctcctggtgctggtggagtgggcgaagtacatcccggccttctgcgagctccccctggacgaccaggtcgccctgctccgggcccacgccggcgagcacctcctgctgggggcgaccaagcgctccatggtgttcaaggacgtgctgctgctcggcaacgactacatcgtcccccggcactgccccgagctggccgagatgagccgcgtgtccatccggatcctggacgagctcgtgctgccgttccaggagctgcagatcgacgacaacgagtacgcctacctcaaggccatcatcttcttcgaccccgacgccaagggcctgagcgaccccgggaagatcaagcgcctgcgctcccaggtccaggtgagcctcgaggactacatcaacgaccggcagtacgactcccgcggccggttcggggagctgctgctcctgctgcccacgctccagagcatcacctggcagatgatcgagcagatccagttcatcaagctgttcggcatggcgaagatcgacaacctgctccaggagatgctgctgggcgggtccccgagcgacgcgccccacgcccaccaccccctccacccccacctgatgcaggagcacatgggcaccaacgtgatcgtcgccaacaccatgccgacgcacctgtccaacgggcagatgtgcgagtggccccgcccccggggccaggccgccacccccgagaccccgcagcccagcccgcccgggggctccggcagcgagccctacaagctgctccccggggccgtggccaccatcgtgaagcccctgtccgccatcccccagccgacgatcaccaagcaggaggtcatctgaggactagttataagactgactagcccgatgggcctcccaacgggccctcctcccctccttgcaccgagattaataaaaaaaaaaaaaaaaaaaaaaaaaaaaaaaaaaaaaaaaaaaaaaaaaaaaaaaaaaaaaaaatgcatcccccccccccccccccccccccccccccccaaaggctcttttcagagccaccagaatt

SEQ ID NO: 2480 - RNA, 1531 nt, synthetic construct
  misc_feature 1..1531: note = mRNA i-3 (A64-N5-C30-hSL-N5) (opt1) from Homo sapiens__NP_000448.3__HNF4A(39-474)(K234R)
  source 1..1531: mol_type = other RNA
aggagaaagcttaccatggacaccagcccgtccgaggggaccaacctgaacgcccccaacagcctgggcgtgtccgccctctgcgccatctgcggggaccgggcgacgggcaagcactacggggccagctcctgcgacggctgcaagggcttcttccgccggagcgtccgcaagaaccacatgtactcctgccggttcagccgccagtgcgtggtggacaaggacaagcggaaccagtgccgctactgccggctgaagaagtgcttccgcgccgggatgaagaaggaggccgtccagaacgagcgggaccgcatctccacccggcgcagctcctacgaggacagctccctgcccagcatcaacgcgctcctgcaggccgaggtgctgtcccggcagatcaccagccccgtgtccggcatcaacggggacatccgcgccaagaagatcgccagcatcgccgacgtctgcgagagcatgaaggagcagctcctggtgctggtggagtgggcgaagtacatcccggccttctgcgagctccccctggacgaccaggtcgccctgctccgggcccacgccggcgagcacctcctgctgggggcgacccgccgctccatggtgttcaaggacgtgctgctgctcggcaacgactacatcgtcccccggcactgccccgagctggccgagatgagccgcgtgtccatccggatcctggacgagctcgtgctgccgttccaggagctgcagatcgacgacaacgagtacgcctacctcaaggccatcatcttcttcgaccccgacgccaagggcctgagcgaccccgggaagatcaagcgcctgcgctcccaggtccaggtgagcctcgaggactacatcaacgaccggcagtacgactcccgcggccggttcggggagctgctgctcctgctgcccacgctccagagcatcacctggcagatgatcgagcagatccagttcatcaagctgttcggcatggcgaagatcgacaacctgctccaggagatgctgctgggcgggtccccgagcgacgcgccccacgcccaccaccccctccacccccacctgatgcaggagcacatgggcaccaacgtgatcgtcgccaacaccatgccgacgcacctgtccaacgggcagatgtgcgagtggccccgcccccggggccaggccgccacccccgagaccccgcagcccagcccgcccgggggctccggcagcgagccctacaagctgctccccggggccgtggccaccatcgtgaagcccctgtccgccatcccccagccgacgatcaccaagcaggaggtcatctgaggactagttataagactgactagcccgatgggcctcccaacgggccctcctcccctccttgcaccgagattaataaaaaaaaaaaaaaaaaaaaaaaaaaaaaaaaaaaaaaaaaaaaaaaaaaaaaaaaaaaaaaaatgcatcccccccccccccccccccccccccccccccaaaggctcttttcagagccaccagaatt

SEQ ID NO: 2481 - RNA, 1531 nt, synthetic construct
  misc_feature 1..1531: note = mRNA i-3 (A64-N5-C30-hSL-N5) (opt1) from Homo sapiens__NP_000448.3__HNF4A(39-474)(K300R)
  source 1..1531: mol_type = other RNA
aggagaaagcttaccatggacaccagcccgtccgaggggaccaacctgaacgcccccaacagcctgggcgtgtccgccctctgcgccatctgcggggaccgggcgacgggcaagcactacggggccagctcctgcgacggctgcaagggcttcttccgccggagcgtccgcaagaaccacatgtactcctgccggttcagccgccagtgcgtggtggacaaggacaagcggaaccagtgccgctactgccggctgaagaagtgcttccgcgccgggatgaagaaggaggccgtccagaacgagcgggaccgcatctccacccggcgcagctcctacgaggacagctccctgcccagcatcaacgcgctcctgcaggccgaggtgctgtcccggcagatcaccagccccgtgtccggcatcaacggggacatccgcgccaagaagatcgccagcatcgccgacgtctgcgagagcatgaaggagcagctcctggtgctggtggagtgggcgaagtacatcccggccttctgcgagctccccctggacgaccaggtcgccctgctccgggcccacgccggcgagcacctcctgctgggggcgaccaagcgctccatggtgttcaaggacgtgctgctgctcggcaacgactacatcgtcccccggcactgccccgagctggccgagatgagccgcgtgtccatccggatcctggacgagctcgtgctgccgttccaggagctgcagatcgacgacaacgagtacgcctacctcaaggccatcatcttcttcgaccccgacgcccgcggcctgagcgaccccgggaagatcaagcgcctgcgctcccaggtccaggtgagcctcgaggactacatcaacgaccggcagtacgactcccgcggccggttcggggagctgctgctcctgctgcccacgctccagagcatcacctggcagatgatcgagcagatccagttcatcaagctgttcggcatggcgaagatcgacaacctgctccaggagatgctgctgggcgggtccccgagcgacgcgccccacgcccaccaccccctccacccccacctgatgcaggagcacatgggcaccaacgtgatcgtcgccaacaccatgccgacgcacctgtccaacgggcagatgtgcgagtggccccgcccccggggccaggccgccacccccgagaccccgcagcccagcccgcccgggggctccggcagcgagccctacaagctgctccccggggccgtggccaccatcgtgaagcccctgtccgccatcccccagccgacgatcaccaagcaggaggtcatctgaggactagttataagactgactagcccgatgggcctcccaacgggccctcctcccctccttgcaccgagattaataaaaaaaaaaaaaaaaaaaaaaaaaaaaaaaaaaaaaaaaaaaaaaaaaaaaaaaaaaaaaaaatgcatcccccccccccccccccccccccccccccccaaaggctcttttcagagccaccagaatt

SEQ ID NO: 2482 - RNA, 1531 nt, synthetic construct
  misc_feature 1..1531: note = mRNA i-3 (A64-N5-C30-hSL-N5) (opt1) from Homo sapiens__NP_000448.3__HNF4A(39-474)(K300R_K307R_K309R)
  source 1..1531: mol_type = other RNA
aggagaaagcttaccatggacaccagcccgtccgaggggaccaacctgaacgcccccaacagcctgggcgtgtccgccctctgcgccatctgcggggaccgggcgacgggcaagcactacggggccagctcctgcgacggctgcaagggcttcttccgccggagcgtccgcaagaaccacatgtactcctgccggttcagccgccagtgcgtggtggacaaggacaagcggaaccagtgccgctactgccggctgaagaagtgcttccgcgccgggatgaagaaggaggccgtccagaacgagcgggaccgcatctccacccggcgcagctcctacgaggacagctccctgcccagcatcaacgcgctcctgcaggccgaggtgctgtcccggcagatcaccagccccgtgtccggcatcaacggggacatccgcgccaagaagatcgccagcatcgccgacgtctgcgagagcatgaaggagcagctcctggtgctggtggagtgggcgaagtacatcccggccttctgcgagctccccctggacgaccaggtcgccctgctccgggcccacgccggcgagcacctcctgctgggggcgaccaagcgctccatggtgttcaaggacgtgctgctgctcggcaacgactacatcgtcccccggcactgccccgagctggccgagatgagccgcgtgtccatccggatcctggacgagctcgtgctgccgttccaggagctgcagatcgacgacaacgagtacgcctacctcaaggccatcatcttcttcgaccccgacgcccgcggcctgagcgaccccgggcgcatccggcgcctgcgctcccaggtccaggtgagcctcgaggactacatcaacgaccggcagtacgactcccgcggccggttcggggagctgctgctcctgctgcccacgctccagagcatcacctggcagatgatcgagcagatccagttcatcaagctgttcggcatggcgaagatcgacaacctgctccaggagatgctgctgggcgggtccccgagcgacgcgccccacgcccaccaccccctccacccccacctgatgcaggagcacatgggcaccaacgtgatcgtcgccaacaccatgccgacgcacctgtccaacgggcagatgtgcgagtggccccgcccccggggccaggccgccacccccgagaccccgcagcccagcccgcccgggggctccggcagcgagccctacaagctgctccccggggccgtggccaccatcgtgaagcccctgtccgccatcccccagccgacgatcaccaagcaggaggtcatctgaggactagttataagactgactagcccgatgggcctcccaacgggccctcctcccctccttgcaccgagattaataaaaaaaaaaaaaaaaaaaaaaaaaaaaaaaaaaaaaaaaaaaaaaaaaaaaaaaaaaaaaaaatgcatcccccccccccccccccccccccccccccccaaaggctcttttcagagccaccagaatt

SEQ ID NO: 2483 - RNA, 1531 nt, synthetic construct
  misc_feature 1..1531: note = mRNA i-3 (A64-N5-C30-hSL-N5) (opt1) from Homo sapiens__NP_000448.3__HNF4A(39-474)(K447R_K470R)
  source 1..1531: mol_type = other RNA
aggagaaagcttaccatggacaccagcccgtccgaggggaccaacctgaacgcccccaacagcctgggcgtgtccgccctctgcgccatctgcggggaccgggcgacgggcaagcactacggggccagctcctgcgacggctgcaagggcttcttccgccggagcgtccgcaagaaccacatgtactcctgccggttcagccgccagtgcgtggtggacaaggacaagcggaaccagtgccgctactgccggctgaagaagtgcttccgcgccgggatgaagaaggaggccgtccagaacgagcgggaccgcatctccacccggcgcagctcctacgaggacagctccctgcccagcatcaacgcgctcctgcaggccgaggtgctgtcccggcagatcaccagccccgtgtccggcatcaacggggacatccgcgccaagaagatcgccagcatcgccgacgtctgcgagagcatgaaggagcagctcctggtgctggtggagtgggcgaagtacatcccggccttctgcgagctccccctggacgaccaggtcgccctgctccgggcccacgccggcgagcacctcctgctgggggcgaccaagcgctccatggtgttcaaggacgtgctgctgctcggcaacgactacatcgtcccccggcactgccccgagctggccgagatgagccgcgtgtccatccggatcctggacgagctcgtgctgccgttccaggagctgcagatcgacgacaacgagtacgcctacctcaaggccatcatcttcttcgaccccgacgccaagggcctgagcgaccccgggaagatcaagcgcctgcgctcccaggtccaggtgagcctcgaggactacatcaacgaccggcagtacgactcccgcggccggttcggggagctgctgctcctgctgcccacgctccagagcatcacctggcagatgatcgagcagatccagttcatcaagctgttcggcatggcgaagatcgacaacctgctccaggagatgctgctgggcgggtccccgagcgacgcgccccacgcccaccaccccctccacccccacctgatgcaggagcacatgggcaccaacgtgatcgtcgccaacaccatgccgacgcacctgtccaacgggcagatgtgcgagtggccccgcccccggggccaggccgccacccccgagaccccgcagcccagcccgcccgggggctccggcagcgagccctaccggctgctccccggggccgtggccaccatcgtgaagcccctgtccgccatcccccagccgacgatcacccggcaggaggtcatctgaggactagttataagactgactagcccgatgggcctcccaacgggccctcctcccctccttgcaccgagattaataaaaaaaaaaaaaaaaaaaaaaaaaaaaaaaaaaaaaaaaaaaaaaaaaaaaaaaaaaaaaaaatgcatcccccccccccccccccccccccccccccccaaaggctcttttcagagccaccagaatt

SEQ ID NO: 2484 - RNA, 1531 nt, synthetic construct
  misc_feature 1..1531: note = mRNA i-3 (A64-N5-C30-hSL-N5) (opt1) from Homo sapiens__NP_000448.3__HNF4A(39-474)(K458R)
  source 1..1531: mol_type = other RNA
aggagaaagcttaccatggacaccagcccgtccgaggggaccaacctgaacgcccccaacagcctgggcgtgtccgccctctgcgccatctgcggggaccgggcgacgggcaagcactacggggccagctcctgcgacggctgcaagggcttcttccgccggagcgtccgcaagaaccacatgtactcctgccggttcagccgccagtgcgtggtggacaaggacaagcggaaccagtgccgctactgccggctgaagaagtgcttccgcgccgggatgaagaaggaggccgtccagaacgagcgggaccgcatctccacccggcgcagctcctacgaggacagctccctgcccagcatcaacgcgctcctgcaggccgaggtgctgtcccggcagatcaccagccccgtgtccggcatcaacggggacatccgcgccaagaagatcgccagcatcgccgacgtctgcgagagcatgaaggagcagctcctggtgctggtggagtgggcgaagtacatcccggccttctgcgagctccccctggacgaccaggtcgccctgctccgggcccacgccggcgagcacctcctgctgggggcgaccaagcgctccatggtgttcaaggacgtgctgctgctcggcaacgactacatcgtcccccggcactgccccgagctggccgagatgagccgcgtgtccatccggatcctggacgagctcgtgctgccgttccaggagctgcagatcgacgacaacgagtacgcctacctcaaggccatcatcttcttcgaccccgacgccaagggcctgagcgaccccgggaagatcaagcgcctgcgctcccaggtccaggtgagcctcgaggactacatcaacgaccggcagtacgactcccgcggccggttcggggagctgctgctcctgctgcccacgctccagagcatcacctggcagatgatcgagcagatccagttcatcaagctgttcggcatggcgaagatcgacaacctgctccaggagatgctgctgggcgggtccccgagcgacgcgccccacgcccaccaccccctccacccccacctgatgcaggagcacatgggcaccaacgtgatcgtcgccaacaccatgccgacgcacctgtccaacgggcagatgtgcgagtggccccgcccccggggccaggccgccacccccgagaccccgcagcccagcccgcccgggggctccggcagcgagccctacaagctgctccccggggccgtggccaccatcgtgcggcccctgtccgccatcccccagccgacgatcaccaagcaggaggtcatctgaggactagttataagactgactagcccgatgggcctcccaacgggccctcctcccctccttgcaccgagattaataaaaaaaaaaaaaaaaaaaaaaaaaaaaaaaaaaaaaaaaaaaaaaaaaaaaaaaaaaaaaaaatgcatcccccccccccccccccccccccccccccccaaaggctcttttcagagccaccagaatt

SEQ ID NO: 2485 - RNA, 1531 nt, synthetic construct
  misc_feature 1..1531: note = mRNA i-3 (A64-N5-C30-hSL-N5) (opt1) from Homo sapiens__NP_000448.3__HNF4A(39-474)(K106R_K108R_K126R_K127R )
  source 1..1531: mol_type = other RNA
aggagaaagcttaccatggacaccagcccgtccgaggggaccaacctgaacgcccccaacagcctgggcgtgtccgccctctgcgccatctgcggggaccgggcgacgggcaagcactacggggccagctcctgcgacggctgcaagggcttcttccgccggagcgtccgcaagaaccacatgtactcctgccggttcagccgccagtgcgtggtggaccgcgaccggcggaaccagtgccgctactgccggctgaagaagtgcttccgcgccgggatgcgccgcgaggccgtccagaacgagcgggaccgcatctccacccggcgcagctcctacgaggacagctccctgcccagcatcaacgcgctcctgcaggccgaggtgctgtcccggcagatcaccagccccgtgtccggcatcaacggggacatccgcgccaagaagatcgccagcatcgccgacgtctgcgagagcatgaaggagcagctcctggtgctggtggagtgggcgaagtacatcccggccttctgcgagctccccctggacgaccaggtcgccctgctccgggcccacgccggcgagcacctcctgctgggggcgaccaagcgctccatggtgttcaaggacgtgctgctgctcggcaacgactacatcgtcccccggcactgccccgagctggccgagatgagccgcgtgtccatccggatcctggacgagctcgtgctgccgttccaggagctgcagatcgacgacaacgagtacgcctacctcaaggccatcatcttcttcgaccccgacgccaagggcctgagcgaccccgggaagatcaagcgcctgcgctcccaggtccaggtgagcctcgaggactacatcaacgaccggcagtacgactcccgcggccggttcggggagctgctgctcctgctgcccacgctccagagcatcacctggcagatgatcgagcagatccagttcatcaagctgttcggcatggcgaagatcgacaacctgctccaggagatgctgctgggcgggtccccgagcgacgcgccccacgcccaccaccccctccacccccacctgatgcaggagcacatgggcaccaacgtgatcgtcgccaacaccatgccgacgcacctgtccaacgggcagatgtgcgagtggccccgcccccggggccaggccgccacccccgagaccccgcagcccagcccgcccgggggctccggcagcgagccctacaagctgctccccggggccgtggccaccatcgtgaagcccctgtccgccatcccccagccgacgatcaccaagcaggaggtcatctgaggactagttataagactgactagcccgatgggcctcccaacgggccctcctcccctccttgcaccgagattaataaaaaaaaaaaaaaaaaaaaaaaaaaaaaaaaaaaaaaaaaaaaaaaaaaaaaaaaaaaaaaaatgcatcccccccccccccccccccccccccccccccaaaggctcttttcagagccaccagaatt

SEQ ID NO: 2486 - RNA, 1531 nt, synthetic construct
  misc_feature 1..1531: note = mRNA i-3 (A64-N5-C30-hSL-N5) (opt1) from Homo sapiens__NP_000448.3__HNF4A(39-474)(E285Q)
  source 1..1531: mol_type = other RNA
aggagaaagcttaccatggacaccagcccgtccgaggggaccaacctgaacgcccccaacagcctgggcgtgtccgccctctgcgccatctgcggggaccgggcgacgggcaagcactacggggccagctcctgcgacggctgcaagggcttcttccgccggagcgtccgcaagaaccacatgtactcctgccggttcagccgccagtgcgtggtggacaaggacaagcggaaccagtgccgctactgccggctgaagaagtgcttccgcgccgggatgaagaaggaggccgtccagaacgagcgggaccgcatctccacccggcgcagctcctacgaggacagctccctgcccagcatcaacgcgctcctgcaggccgaggtgctgtcccggcagatcaccagccccgtgtccggcatcaacggggacatccgcgccaagaagatcgccagcatcgccgacgtctgcgagagcatgaaggagcagctcctggtgctggtggagtgggcgaagtacatcccggccttctgcgagctccccctggacgaccaggtcgccctgctccgggcccacgccggcgagcacctcctgctgggggcgaccaagcgctccatggtgttcaaggacgtgctgctgctcggcaacgactacatcgtcccccggcactgccccgagctggccgagatgagccgcgtgtccatccggatcctggacgagctcgtgctgccgttccaggagctgcagatcgacgacaaccagtacgcctacctcaaggccatcatcttcttcgaccccgacgccaagggcctgagcgaccccgggaagatcaagcgcctgcgctcccaggtccaggtgagcctcgaggactacatcaacgaccggcagtacgactcccgcggccggttcggggagctgctgctcctgctgcccacgctccagagcatcacctggcagatgatcgagcagatccagttcatcaagctgttcggcatggcgaagatcgacaacctgctccaggagatgctgctgggcgggtccccgagcgacgcgccccacgcccaccaccccctccacccccacctgatgcaggagcacatgggcaccaacgtgatcgtcgccaacaccatgccgacgcacctgtccaacgggcagatgtgcgagtggccccgcccccggggccaggccgccacccccgagaccccgcagcccagcccgcccgggggctccggcagcgagccctacaagctgctccccggggccgtggccaccatcgtgaagcccctgtccgccatcccccagccgacgatcaccaagcaggaggtcatctgaggactagttataagactgactagcccgatgggcctcccaacgggccctcctcccctccttgcaccgagattaataaaaaaaaaaaaaaaaaaaaaaaaaaaaaaaaaaaaaaaaaaaaaaaaaaaaaaaaaaaaaaaatgcatcccccccccccccccccccccccccccccccaaaggctcttttcagagccaccagaatt

SEQ ID NO: 2487 - RNA, 1531 nt, synthetic construct
  misc_feature 1..1531: note = mRNA i-3 (A64-N5-C30-hSL-N5) (opt1) from Homo sapiens__NP_000448.3__HNF4A(39-474)(T166E)
  source 1..1531: mol_type = other RNA
aggagaaagcttaccatggacaccagcccgtccgaggggaccaacctgaacgcccccaacagcctgggcgtgtccgccctctgcgccatctgcggggaccgggcgacgggcaagcactacggggccagctcctgcgacggctgcaagggcttcttccgccggagcgtccgcaagaaccacatgtactcctgccggttcagccgccagtgcgtggtggacaaggacaagcggaaccagtgccgctactgccggctgaagaagtgcttccgcgccgggatgaagaaggaggccgtccagaacgagcgggaccgcatctccacccggcgcagctcctacgaggacagctccctgcccagcatcaacgcgctcctgcaggccgaggtgctgtcccggcagatcgagagccccgtgtccggcatcaacggggacatccgcgccaagaagatcgccagcatcgccgacgtctgcgagagcatgaaggagcagctcctggtgctggtggagtgggcgaagtacatcccggccttctgcgagctccccctggacgaccaggtcgccctgctccgggcccacgccggcgagcacctcctgctgggggcgaccaagcgctccatggtgttcaaggacgtgctgctgctcggcaacgactacatcgtcccccggcactgccccgagctggccgagatgagccgcgtgtccatccggatcctggacgagctcgtgctgccgttccaggagctgcagatcgacgacaacgagtacgcctacctcaaggccatcatcttcttcgaccccgacgccaagggcctgagcgaccccgggaagatcaagcgcctgcgctcccaggtccaggtgagcctcgaggactacatcaacgaccggcagtacgactcccgcggccggttcggggagctgctgctcctgctgcccacgctccagagcatcacctggcagatgatcgagcagatccagttcatcaagctgttcggcatggcgaagatcgacaacctgctccaggagatgctgctgggcgggtccccgagcgacgcgccccacgcccaccaccccctccacccccacctgatgcaggagcacatgggcaccaacgtgatcgtcgccaacaccatgccgacgcacctgtccaacgggcagatgtgcgagtggccccgcccccggggccaggccgccacccccgagaccccgcagcccagcccgcccgggggctccggcagcgagccctacaagctgctccccggggccgtggccaccatcgtgaagcccctgtccgccatcccccagccgacgatcaccaagcaggaggtcatctgaggactagttataagactgactagcccgatgggcctcccaacgggccctcctcccctccttgcaccgagattaataaaaaaaaaaaaaaaaaaaaaaaaaaaaaaaaaaaaaaaaaaaaaaaaaaaaaaaaaaaaaaaatgcatcccccccccccccccccccccccccccccccaaaggctcttttcagagccaccagaatt

SEQ ID NO: 2488 - RNA, 1531 nt, synthetic construct
  misc_feature 1..1531: note = mRNA i-3 (A64-N5-C30-hSL-N5) (opt1) from Homo sapiens__NP_000448.3__HNF4A(39-474)(S148A)
  source 1..1531: mol_type = other RNA
aggagaaagcttaccatggacaccagcccgtccgaggggaccaacctgaacgcccccaacagcctgggcgtgtccgccctctgcgccatctgcggggaccgggcgacgggcaagcactacggggccagctcctgcgacggctgcaagggcttcttccgccggagcgtccgcaagaaccacatgtactcctgccggttcagccgccagtgcgtggtggacaaggacaagcggaaccagtgccgctactgccggctgaagaagtgcttccgcgccgggatgaagaaggaggccgtccagaacgagcgggaccgcatctccacccggcgcagctcctacgaggacagcgcgctgcccagcatcaacgcgctcctgcaggccgaggtgctgtcccggcagatcaccagccccgtgtccggcatcaacggggacatccgcgccaagaagatcgccagcatcgccgacgtctgcgagagcatgaaggagcagctcctggtgctggtggagtgggcgaagtacatcccggccttctgcgagctccccctggacgaccaggtcgccctgctccgggcccacgccggcgagcacctcctgctgggggcgaccaagcgctccatggtgttcaaggacgtgctgctgctcggcaacgactacatcgtcccccggcactgccccgagctggccgagatgagccgcgtgtccatccggatcctggacgagctcgtgctgccgttccaggagctgcagatcgacgacaacgagtacgcctacctcaaggccatcatcttcttcgaccccgacgccaagggcctgagcgaccccgggaagatcaagcgcctgcgctcccaggtccaggtgagcctcgaggactacatcaacgaccggcagtacgactcccgcggccggttcggggagctgctgctcctgctgcccacgctccagagcatcacctggcagatgatcgagcagatccagttcatcaagctgttcggcatggcgaagatcgacaacctgctccaggagatgctgctgggcgggtccccgagcgacgcgccccacgcccaccaccccctccacccccacctgatgcaggagcacatgggcaccaacgtgatcgtcgccaacaccatgccgacgcacctgtccaacgggcagatgtgcgagtggccccgcccccggggccaggccgccacccccgagaccccgcagcccagcccgcccgggggctccggcagcgagccctacaagctgctccccggggccgtggccaccatcgtgaagcccctgtccgccatcccccagccgacgatcaccaagcaggaggtcatctgaggactagttataagactgactagcccgatgggcctcccaacgggccctcctcccctccttgcaccgagattaataaaaaaaaaaaaaaaaaaaaaaaaaaaaaaaaaaaaaaaaaaaaaaaaaaaaaaaaaaaaaaaatgcatcccccccccccccccccccccccccccccccaaaggctcttttcagagccaccagaatt

SEQ ID NO: 2489 - RNA, 1531 nt, synthetic construct
  misc_feature 1..1531: note = mRNA i-3 (A64-N5-C30-hSL-N5) (opt1) from Homo sapiens__NP_000448.3__HNF4A(39-474)(S148E)
  source 1..1531: mol_type = other RNA
aggagaaagcttaccatggacaccagcccgtccgaggggaccaacctgaacgcccccaacagcctgggcgtgtccgccctctgcgccatctgcggggaccgggcgacgggcaagcactacggggccagctcctgcgacggctgcaagggcttcttccgccggagcgtccgcaagaaccacatgtactcctgccggttcagccgccagtgcgtggtggacaaggacaagcggaaccagtgccgctactgccggctgaagaagtgcttccgcgccgggatgaagaaggaggccgtccagaacgagcgggaccgcatctccacccggcgcagctcctacgaggacagcgagctgcccagcatcaacgcgctcctgcaggccgaggtgctgtcccggcagatcaccagccccgtgtccggcatcaacggggacatccgcgccaagaagatcgccagcatcgccgacgtctgcgagagcatgaaggagcagctcctggtgctggtggagtgggcgaagtacatcccggccttctgcgagctccccctggacgaccaggtcgccctgctccgggcccacgccggcgagcacctcctgctgggggcgaccaagcgctccatggtgttcaaggacgtgctgctgctcggcaacgactacatcgtcccccggcactgccccgagctggccgagatgagccgcgtgtccatccggatcctggacgagctcgtgctgccgttccaggagctgcagatcgacgacaacgagtacgcctacctcaaggccatcatcttcttcgaccccgacgccaagggcctgagcgaccccgggaagatcaagcgcctgcgctcccaggtccaggtgagcctcgaggactacatcaacgaccggcagtacgactcccgcggccggttcggggagctgctgctcctgctgcccacgctccagagcatcacctggcagatgatcgagcagatccagttcatcaagctgttcggcatggcgaagatcgacaacctgctccaggagatgctgctgggcgggtccccgagcgacgcgccccacgcccaccaccccctccacccccacctgatgcaggagcacatgggcaccaacgtgatcgtcgccaacaccatgccgacgcacctgtccaacgggcagatgtgcgagtggccccgcccccggggccaggccgccacccccgagaccccgcagcccagcccgcccgggggctccggcagcgagccctacaagctgctccccggggccgtggccaccatcgtgaagcccctgtccgccatcccccagccgacgatcaccaagcaggaggtcatctgaggactagttataagactgactagcccgatgggcctcccaacgggccctcctcccctccttgcaccgagattaataaaaaaaaaaaaaaaaaaaaaaaaaaaaaaaaaaaaaaaaaaaaaaaaaaaaaaaaaaaaaaaatgcatcccccccccccccccccccccccccccccccaaaggctcttttcagagccaccagaatt

SEQ ID NO: 2490 - RNA, 1531 nt, synthetic construct
  misc_feature 1..1531: note = mRNA i-3 (A64-N5-C30-hSL-N5) (opt1) from Homo sapiens__NP_000448.3__HNF4A(39-474)(S183A)
  source 1..1531: mol_type = other RNA
aggagaaagcttaccatggacaccagcccgtccgaggggaccaacctgaacgcccccaacagcctgggcgtgtccgccctctgcgccatctgcggggaccgggcgacgggcaagcactacggggccagctcctgcgacggctgcaagggcttcttccgccggagcgtccgcaagaaccacatgtactcctgccggttcagccgccagtgcgtggtggacaaggacaagcggaaccagtgccgctactgccggctgaagaagtgcttccgcgccgggatgaagaaggaggccgtccagaacgagcgggaccgcatctccacccggcgcagctcctacgaggacagctccctgcccagcatcaacgcgctcctgcaggccgaggtgctgtcccggcagatcaccagccccgtgtccggcatcaacggggacatccgcgccaagaagatcgccgcgatcgccgacgtctgcgagagcatgaaggagcagctcctggtgctggtggagtgggcgaagtacatcccggccttctgcgagctccccctggacgaccaggtcgccctgctccgggcccacgccggcgagcacctcctgctgggggcgaccaagcgctccatggtgttcaaggacgtgctgctgctcggcaacgactacatcgtcccccggcactgccccgagctggccgagatgagccgcgtgtccatccggatcctggacgagctcgtgctgccgttccaggagctgcagatcgacgacaacgagtacgcctacctcaaggccatcatcttcttcgaccccgacgccaagggcctgagcgaccccgggaagatcaagcgcctgcgctcccaggtccaggtgagcctcgaggactacatcaacgaccggcagtacgactcccgcggccggttcggggagctgctgctcctgctgcccacgctccagagcatcacctggcagatgatcgagcagatccagttcatcaagctgttcggcatggcgaagatcgacaacctgctccaggagatgctgctgggcgggtccccgagcgacgcgccccacgcccaccaccccctccacccccacctgatgcaggagcacatgggcaccaacgtgatcgtcgccaacaccatgccgacgcacctgtccaacgggcagatgtgcgagtggccccgcccccggggccaggccgccacccccgagaccccgcagcccagcccgcccgggggctccggcagcgagccctacaagctgctccccggggccgtggccaccatcgtgaagcccctgtccgccatcccccagccgacgatcaccaagcaggaggtcatctgaggactagttataagactgactagcccgatgggcctcccaacgggccctcctcccctccttgcaccgagattaataaaaaaaaaaaaaaaaaaaaaaaaaaaaaaaaaaaaaaaaaaaaaaaaaaaaaaaaaaaaaaaatgcatcccccccccccccccccccccccccccccccaaaggctcttttcagagccaccagaatt

SEQ ID NO: 2491 - RNA, 1531 nt, synthetic construct
  misc_feature 1..1531: note = mRNA i-3 (A64-N5-C30-hSL-N5) (opt1) from Homo sapiens__NP_000448.3__HNF4A(39-474)(S183E)
  source 1..1531: mol_type = other RNA
aggagaaagcttaccatggacaccagcccgtccgaggggaccaacctgaacgcccccaacagcctgggcgtgtccgccctctgcgccatctgcggggaccgggcgacgggcaagcactacggggccagctcctgcgacggctgcaagggcttcttccgccggagcgtccgcaagaaccacatgtactcctgccggttcagccgccagtgcgtggtggacaaggacaagcggaaccagtgccgctactgccggctgaagaagtgcttccgcgccgggatgaagaaggaggccgtccagaacgagcgggaccgcatctccacccggcgcagctcctacgaggacagctccctgcccagcatcaacgcgctcctgcaggccgaggtgctgtcccggcagatcaccagccccgtgtccggcatcaacggggacatccgcgccaagaagatcgccgagatcgccgacgtctgcgagagcatgaaggagcagctcctggtgctggtggagtgggcgaagtacatcccggccttctgcgagctccccctggacgaccaggtcgccctgctccgggcccacgccggcgagcacctcctgctgggggcgaccaagcgctccatggtgttcaaggacgtgctgctgctcggcaacgactacatcgtcccccggcactgccccgagctggccgagatgagccgcgtgtccatccggatcctggacgagctcgtgctgccgttccaggagctgcagatcgacgacaacgagtacgcctacctcaaggccatcatcttcttcgaccccgacgccaagggcctgagcgaccccgggaagatcaagcgcctgcgctcccaggtccaggtgagcctcgaggactacatcaacgaccggcagtacgactcccgcggccggttcggggagctgctgctcctgctgcccacgctccagagcatcacctggcagatgatcgagcagatccagttcatcaagctgttcggcatggcgaagatcgacaacctgctccaggagatgctgctgggcgggtccccgagcgacgcgccccacgcccaccaccccctccacccccacctgatgcaggagcacatgggcaccaacgtgatcgtcgccaacaccatgccgacgcacctgtccaacgggcagatgtgcgagtggccccgcccccggggccaggccgccacccccgagaccccgcagcccagcccgcccgggggctccggcagcgagccctacaagctgctccccggggccgtggccaccatcgtgaagcccctgtccgccatcccccagccgacgatcaccaagcaggaggtcatctgaggactagttataagactgactagcccgatgggcctcccaacgggccctcctcccctccttgcaccgagattaataaaaaaaaaaaaaaaaaaaaaaaaaaaaaaaaaaaaaaaaaaaaaaaaaaaaaaaaaaaaaaaatgcatcccccccccccccccccccccccccccccccaaaggctcttttcagagccaccagaatt

SEQ ID NO: 2492 - RNA, 1531 nt, synthetic construct
  misc_feature 1..1531: note = mRNA i-3 (A64-N5-C30-hSL-N5) (opt1) from Homo sapiens__NP_000448.3__HNF4A(39-474)(S461A)
  source 1..1531: mol_type = other RNA
aggagaaagcttaccatggacaccagcccgtccgaggggaccaacctgaacgcccccaacagcctgggcgtgtccgccctctgcgccatctgcggggaccgggcgacgggcaagcactacggggccagctcctgcgacggctgcaagggcttcttccgccggagcgtccgcaagaaccacatgtactcctgccggttcagccgccagtgcgtggtggacaaggacaagcggaaccagtgccgctactgccggctgaagaagtgcttccgcgccgggatgaagaaggaggccgtccagaacgagcgggaccgcatctccacccggcgcagctcctacgaggacagctccctgcccagcatcaacgcgctcctgcaggccgaggtgctgtcccggcagatcaccagccccgtgtccggcatcaacggggacatccgcgccaagaagatcgccagcatcgccgacgtctgcgagagcatgaaggagcagctcctggtgctggtggagtgggcgaagtacatcccggccttctgcgagctccccctggacgaccaggtcgccctgctccgggcccacgccggcgagcacctcctgctgggggcgaccaagcgctccatggtgttcaaggacgtgctgctgctcggcaacgactacatcgtcccccggcactgccccgagctggccgagatgagccgcgtgtccatccggatcctggacgagctcgtgctgccgttccaggagctgcagatcgacgacaacgagtacgcctacctcaaggccatcatcttcttcgaccccgacgccaagggcctgagcgaccccgggaagatcaagcgcctgcgctcccaggtccaggtgagcctcgaggactacatcaacgaccggcagtacgactcccgcggccggttcggggagctgctgctcctgctgcccacgctccagagcatcacctggcagatgatcgagcagatccagttcatcaagctgttcggcatggcgaagatcgacaacctgctccaggagatgctgctgggcgggtccccgagcgacgcgccccacgcccaccaccccctccacccccacctgatgcaggagcacatgggcaccaacgtgatcgtcgccaacaccatgccgacgcacctgtccaacgggcagatgtgcgagtggccccgcccccggggccaggccgccacccccgagaccccgcagcccagcccgcccgggggctccggcagcgagccctacaagctgctccccggggccgtggccaccatcgtgaagcccctggcggccatcccccagccgacgatcaccaagcaggaggtcatctgaggactagttataagactgactagcccgatgggcctcccaacgggccctcctcccctccttgcaccgagattaataaaaaaaaaaaaaaaaaaaaaaaaaaaaaaaaaaaaaaaaaaaaaaaaaaaaaaaaaaaaaaaatgcatcccccccccccccccccccccccccccccccaaaggctcttttcagagccaccagaatt

SEQ ID NO: 2493 - RNA, 1531 nt, synthetic construct
  misc_feature 1..1531: note = mRNA i-3 (A64-N5-C30-hSL-N5) (opt1) from Homo sapiens__NP_000448.3__HNF4A(39-474)(S461E)
  source 1..1531: mol_type = other RNA
aggagaaagcttaccatggacaccagcccgtccgaggggaccaacctgaacgcccccaacagcctgggcgtgtccgccctctgcgccatctgcggggaccgggcgacgggcaagcactacggggccagctcctgcgacggctgcaagggcttcttccgccggagcgtccgcaagaaccacatgtactcctgccggttcagccgccagtgcgtggtggacaaggacaagcggaaccagtgccgctactgccggctgaagaagtgcttccgcgccgggatgaagaaggaggccgtccagaacgagcgggaccgcatctccacccggcgcagctcctacgaggacagctccctgcccagcatcaacgcgctcctgcaggccgaggtgctgtcccggcagatcaccagccccgtgtccggcatcaacggggacatccgcgccaagaagatcgccagcatcgccgacgtctgcgagagcatgaaggagcagctcctggtgctggtggagtgggcgaagtacatcccggccttctgcgagctccccctggacgaccaggtcgccctgctccgggcccacgccggcgagcacctcctgctgggggcgaccaagcgctccatggtgttcaaggacgtgctgctgctcggcaacgactacatcgtcccccggcactgccccgagctggccgagatgagccgcgtgtccatccggatcctggacgagctcgtgctgccgttccaggagctgcagatcgacgacaacgagtacgcctacctcaaggccatcatcttcttcgaccccgacgccaagggcctgagcgaccccgggaagatcaagcgcctgcgctcccaggtccaggtgagcctcgaggactacatcaacgaccggcagtacgactcccgcggccggttcggggagctgctgctcctgctgcccacgctccagagcatcacctggcagatgatcgagcagatccagttcatcaagctgttcggcatggcgaagatcgacaacctgctccaggagatgctgctgggcgggtccccgagcgacgcgccccacgcccaccaccccctccacccccacctgatgcaggagcacatgggcaccaacgtgatcgtcgccaacaccatgccgacgcacctgtccaacgggcagatgtgcgagtggccccgcccccggggccaggccgccacccccgagaccccgcagcccagcccgcccgggggctccggcagcgagccctacaagctgctccccggggccgtggccaccatcgtgaagcccctggaggccatcccccagccgacgatcaccaagcaggaggtcatctgaggactagttataagactgactagcccgatgggcctcccaacgggccctcctcccctccttgcaccgagattaataaaaaaaaaaaaaaaaaaaaaaaaaaaaaaaaaaaaaaaaaaaaaaaaaaaaaaaaaaaaaaaatgcatcccccccccccccccccccccccccccccccaaaggctcttttcagagccaccagaatt

SEQ ID NO: 2494 - RNA, 1531 nt, synthetic construct
  misc_feature 1..1531: note = mRNA i-3 (A64-N5-C30-hSL-N5) (opt1) from Homo sapiens__NP_000448.3__HNF4A(39-474)(S142A_S143A_S313A)
  source 1..1531: mol_type = other RNA
aggagaaagcttaccatggacaccagcccgtccgaggggaccaacctgaacgcccccaacagcctgggcgtgtccgccctctgcgccatctgcggggaccgggcgacgggcaagcactacggggccagctcctgcgacggctgcaagggcttcttccgccggagcgtccgcaagaaccacatgtactcctgccggttcagccgccagtgcgtggtggacaaggacaagcggaaccagtgccgctactgccggctgaagaagtgcttccgcgccgggatgaagaaggaggccgtccagaacgagcgggaccgcatctccacccggcgcgcggcctacgaggacagctccctgcccagcatcaacgcgctcctgcaggccgaggtgctgtcccggcagatcaccagccccgtgtccggcatcaacggggacatccgcgccaagaagatcgccagcatcgccgacgtctgcgagagcatgaaggagcagctcctggtgctggtggagtgggcgaagtacatcccggccttctgcgagctccccctggacgaccaggtcgccctgctccgggcccacgccggcgagcacctcctgctgggggcgaccaagcgctccatggtgttcaaggacgtgctgctgctcggcaacgactacatcgtcccccggcactgccccgagctggccgagatgagccgcgtgtccatccggatcctggacgagctcgtgctgccgttccaggagctgcagatcgacgacaacgagtacgcctacctcaaggccatcatcttcttcgaccccgacgccaagggcctgagcgaccccgggaagatcaagcgcctgcgcgcgcaggtccaggtgagcctcgaggactacatcaacgaccggcagtacgactcccgcggccggttcggggagctgctgctcctgctgcccacgctccagagcatcacctggcagatgatcgagcagatccagttcatcaagctgttcggcatggcgaagatcgacaacctgctccaggagatgctgctgggcgggtccccgagcgacgcgccccacgcccaccaccccctccacccccacctgatgcaggagcacatgggcaccaacgtgatcgtcgccaacaccatgccgacgcacctgtccaacgggcagatgtgcgagtggccccgcccccggggccaggccgccacccccgagaccccgcagcccagcccgcccgggggctccggcagcgagccctacaagctgctccccggggccgtggccaccatcgtgaagcccctgtccgccatcccccagccgacgatcaccaagcaggaggtcatctgaggactagttataagactgactagcccgatgggcctcccaacgggccctcctcccctccttgcaccgagattaataaaaaaaaaaaaaaaaaaaaaaaaaaaaaaaaaaaaaaaaaaaaaaaaaaaaaaaaaaaaaaaatgcatcccccccccccccccccccccccccccccccaaaggctcttttcagagccaccagaatt

SEQ ID NO: 2495 - RNA, 1531 nt, synthetic construct
  misc_feature 1..1531: note = mRNA i-3 (A64-N5-C30-hSL-N5) (opt1) from Homo sapiens__NP_000448.3__HNF4A(39-474)(S142A_S143A_S313A_K458R )
  source 1..1531: mol_type = other RNA
aggagaaagcttaccatggacaccagcccgtccgaggggaccaacctgaacgcccccaacagcctgggcgtgtccgccctctgcgccatctgcggggaccgggcgacgggcaagcactacggggccagctcctgcgacggctgcaagggcttcttccgccggagcgtccgcaagaaccacatgtactcctgccggttcagccgccagtgcgtggtggacaaggacaagcggaaccagtgccgctactgccggctgaagaagtgcttccgcgccgggatgaagaaggaggccgtccagaacgagcgggaccgcatctccacccggcgcgcggcctacgaggacagctccctgcccagcatcaacgcgctcctgcaggccgaggtgctgtcccggcagatcaccagccccgtgtccggcatcaacggggacatccgcgccaagaagatcgccagcatcgccgacgtctgcgagagcatgaaggagcagctcctggtgctggtggagtgggcgaagtacatcccggccttctgcgagctccccctggacgaccaggtcgccctgctccgggcccacgccggcgagcacctcctgctgggggcgaccaagcgctccatggtgttcaaggacgtgctgctgctcggcaacgactacatcgtcccccggcactgccccgagctggccgagatgagccgcgtgtccatccggatcctggacgagctcgtgctgccgttccaggagctgcagatcgacgacaacgagtacgcctacctcaaggccatcatcttcttcgaccccgacgccaagggcctgagcgaccccgggaagatcaagcgcctgcgcgcgcaggtccaggtgagcctcgaggactacatcaacgaccggcagtacgactcccgcggccggttcggggagctgctgctcctgctgcccacgctccagagcatcacctggcagatgatcgagcagatccagttcatcaagctgttcggcatggcgaagatcgacaacctgctccaggagatgctgctgggcgggtccccgagcgacgcgccccacgcccaccaccccctccacccccacctgatgcaggagcacatgggcaccaacgtgatcgtcgccaacaccatgccgacgcacctgtccaacgggcagatgtgcgagtggccccgcccccggggccaggccgccacccccgagaccccgcagcccagcccgcccgggggctccggcagcgagccctacaagctgctccccggggccgtggccaccatcgtgcggcccctgtccgccatcccccagccgacgatcaccaagcaggaggtcatctgaggactagttataagactgactagcccgatgggcctcccaacgggccctcctcccctccttgcaccgagattaataaaaaaaaaaaaaaaaaaaaaaaaaaaaaaaaaaaaaaaaaaaaaaaaaaaaaaaaaaaaaaaatgcatcccccccccccccccccccccccccccccccaaaggctcttttcagagccaccagaatt

SEQ ID NO: 2496 - RNA, 1531 nt, synthetic construct
  misc_feature 1..1531: note = mRNA i-3 (A64-N5-C30-hSL-N5) (opt1) from Homo sapiens__NP_000448.3__HNF4A(39-474)(S142A_S143A_S167A_S313A _S378A_T429A_T432A_S436A_K458R)
  source 1..1531: mol_type = other RNA
aggagaaagcttaccatggacaccagcccgtccgaggggaccaacctgaacgcccccaacagcctgggcgtgtccgccctctgcgccatctgcggggaccgggcgacgggcaagcactacggggccagctcctgcgacggctgcaagggcttcttccgccggagcgtccgcaagaaccacatgtactcctgccggttcagccgccagtgcgtggtggacaaggacaagcggaaccagtgccgctactgccggctgaagaagtgcttccgcgccgggatgaagaaggaggccgtccagaacgagcgggaccgcatctccacccggcgcgcggcctacgaggacagctccctgcccagcatcaacgcgctcctgcaggccgaggtgctgtcccggcagatcaccgcgcccgtgtccggcatcaacggggacatccgcgccaagaagatcgccagcatcgccgacgtctgcgagagcatgaaggagcagctcctggtgctggtggagtgggcgaagtacatcccggccttctgcgagctccccctggacgaccaggtcgccctgctccgggcccacgccggcgagcacctcctgctgggggcgaccaagcgctccatggtgttcaaggacgtgctgctgctcggcaacgactacatcgtcccccggcactgccccgagctggccgagatgagccgcgtgtccatccggatcctggacgagctcgtgctgccgttccaggagctgcagatcgacgacaacgagtacgcctacctcaaggccatcatcttcttcgaccccgacgccaagggcctgagcgaccccgggaagatcaagcgcctgcgcgcgcaggtccaggtgagcctcgaggactacatcaacgaccggcagtacgactcccgcggccggttcggggagctgctgctcctgctgcccacgctccagagcatcacctggcagatgatcgagcagatccagttcatcaagctgttcggcatggcgaagatcgacaacctgctccaggagatgctgctgggcggggcgccgagcgacgcgccccacgcccaccaccccctccacccccacctgatgcaggagcacatgggcaccaacgtgatcgtcgccaacaccatgccgacgcacctgtccaacgggcagatgtgcgagtggccccgcccccggggccaggccgccgcgcccgaggcgccgcagcccgcgccgcccgggggctccggcagcgagccctacaagctgctccccggggccgtggccaccatcgtgcggcccctgtccgccatcccccagccgacgatcaccaagcaggaggtcatctgaggactagttataagactgactagcccgatgggcctcccaacgggccctcctcccctccttgcaccgagattaataaaaaaaaaaaaaaaaaaaaaaaaaaaaaaaaaaaaaaaaaaaaaaaaaaaaaaaaaaaaaaaatgcatcccccccccccccccccccccccccccccccaaaggctcttttcagagccaccagaatt

SEQ ID NO: 2497 - RNA, 1531 nt, synthetic construct
  misc_feature 1..1531: note = mRNA i-3 (A64-N5-C30-hSL-N5) (opt1) from Homo sapiens__NP_000448.3__HNF4A(39-474)(S142A_S143A_S148A_S167A _S313A_S378A_T429A_T432A_S436A_K458R)
  source 1..1531: mol_type = other RNA
aggagaaagcttaccatggacaccagcccgtccgaggggaccaacctgaacgcccccaacagcctgggcgtgtccgccctctgcgccatctgcggggaccgggcgacgggcaagcactacggggccagctcctgcgacggctgcaagggcttcttccgccggagcgtccgcaagaaccacatgtactcctgccggttcagccgccagtgcgtggtggacaaggacaagcggaaccagtgccgctactgccggctgaagaagtgcttccgcgccgggatgaagaaggaggccgtccagaacgagcgggaccgcatctccacccggcgcgcggcctacgaggacagcgcgctgcccagcatcaacgcgctcctgcaggccgaggtgctgtcccggcagatcaccgcgcccgtgtccggcatcaacggggacatccgcgccaagaagatcgccagcatcgccgacgtctgcgagagcatgaaggagcagctcctggtgctggtggagtgggcgaagtacatcccggccttctgcgagctccccctggacgaccaggtcgccctgctccgggcccacgccggcgagcacctcctgctgggggcgaccaagcgctccatggtgttcaaggacgtgctgctgctcggcaacgactacatcgtcccccggcactgccccgagctggccgagatgagccgcgtgtccatccggatcctggacgagctcgtgctgccgttccaggagctgcagatcgacgacaacgagtacgcctacctcaaggccatcatcttcttcgaccccgacgccaagggcctgagcgaccccgggaagatcaagcgcctgcgcgcgcaggtccaggtgagcctcgaggactacatcaacgaccggcagtacgactcccgcggccggttcggggagctgctgctcctgctgcccacgctccagagcatcacctggcagatgatcgagcagatccagttcatcaagctgttcggcatggcgaagatcgacaacctgctccaggagatgctgctgggcggggcgccgagcgacgcgccccacgcccaccaccccctccacccccacctgatgcaggagcacatgggcaccaacgtgatcgtcgccaacaccatgccgacgcacctgtccaacgggcagatgtgcgagtggccccgcccccggggccaggccgccgcgcccgaggcgccgcagcccgcgccgcccgggggctccggcagcgagccctacaagctgctccccggggccgtggccaccatcgtgcggcccctgtccgccatcccccagccgacgatcaccaagcaggaggtcatctgaggactagttataagactgactagcccgatgggcctcccaacgggccctcctcccctccttgcaccgagattaataaaaaaaaaaaaaaaaaaaaaaaaaaaaaaaaaaaaaaaaaaaaaaaaaaaaaaaaaaaaaaaatgcatcccccccccccccccccccccccccccccccaaaggctcttttcagagccaccagaatt

SEQ ID NO: 2498 - RNA, 1531 nt, synthetic construct
  misc_feature 1..1531: note = mRNA i-3 (A64-N5-C30-hSL-N5) (opt1) from Homo sapiens__NP_000448.3__HNF4A(39-474)(K106R_K108R_K126R_K127R _S142A_S143A_S148A_S167A_S313A_S378A_T429A_T432A_S436A_K458 R)
  source 1..1531: mol_type = other RNA
aggagaaagcttaccatggacaccagcccgtccgaggggaccaacctgaacgcccccaacagcctgggcgtgtccgccctctgcgccatctgcggggaccgggcgacgggcaagcactacggggccagctcctgcgacggctgcaagggcttcttccgccggagcgtccgcaagaaccacatgtactcctgccggttcagccgccagtgcgtggtggaccgcgaccggcggaaccagtgccgctactgccggctgaagaagtgcttccgcgccgggatgcgccgcgaggccgtccagaacgagcgggaccgcatctccacccggcgcgcggcctacgaggacagcgcgctgcccagcatcaacgcgctcctgcaggccgaggtgctgtcccggcagatcaccgcgcccgtgtccggcatcaacggggacatccgcgccaagaagatcgccagcatcgccgacgtctgcgagagcatgaaggagcagctcctggtgctggtggagtgggcgaagtacatcccggccttctgcgagctccccctggacgaccaggtcgccctgctccgggcccacgccggcgagcacctcctgctgggggcgaccaagcgctccatggtgttcaaggacgtgctgctgctcggcaacgactacatcgtcccccggcactgccccgagctggccgagatgagccgcgtgtccatccggatcctggacgagctcgtgctgccgttccaggagctgcagatcgacgacaacgagtacgcctacctcaaggccatcatcttcttcgaccccgacgccaagggcctgagcgaccccgggaagatcaagcgcctgcgcgcgcaggtccaggtgagcctcgaggactacatcaacgaccggcagtacgactcccgcggccggttcggggagctgctgctcctgctgcccacgctccagagcatcacctggcagatgatcgagcagatccagttcatcaagctgttcggcatggcgaagatcgacaacctgctccaggagatgctgctgggcggggcgccgagcgacgcgccccacgcccaccaccccctccacccccacctgatgcaggagcacatgggcaccaacgtgatcgtcgccaacaccatgccgacgcacctgtccaacgggcagatgtgcgagtggccccgcccccggggccaggccgccgcgcccgaggcgccgcagcccgcgccgcccgggggctccggcagcgagccctacaagctgctccccggggccgtggccaccatcgtgcggcccctgtccgccatcccccagccgacgatcaccaagcaggaggtcatctgaggactagttataagactgactagcccgatgggcctcccaacgggccctcctcccctccttgcaccgagattaataaaaaaaaaaaaaaaaaaaaaaaaaaaaaaaaaaaaaaaaaaaaaaaaaaaaaaaaaaaaaaaatgcatcccccccccccccccccccccccccccccccaaaggctcttttcagagccaccagaatt

SEQ ID NO: 2499 - RNA, 1531 nt, synthetic construct
  misc_feature 1..1531: note = mRNA i-3 (A64-N5-C30-hSL-N5) (opt1) from Homo sapiens__NP_000448.3__HNF4A(39-474)(S142A_S143A_S148A_T166A _S167A_S313A_S378A_T429A_T432A_S436A_K458R)
  source 1..1531: mol_type = other RNA
aggagaaagcttaccatggacaccagcccgtccgaggggaccaacctgaacgcccccaacagcctgggcgtgtccgccctctgcgccatctgcggggaccgggcgacgggcaagcactacggggccagctcctgcgacggctgcaagggcttcttccgccggagcgtccgcaagaaccacatgtactcctgccggttcagccgccagtgcgtggtggacaaggacaagcggaaccagtgccgctactgccggctgaagaagtgcttccgcgccgggatgaagaaggaggccgtccagaacgagcgggaccgcatctccacccggcgcgcggcctacgaggacagcgcgctgcccagcatcaacgcgctcctgcaggccgaggtgctgtcccggcagatcgcggcgcccgtgtccggcatcaacggggacatccgcgccaagaagatcgccagcatcgccgacgtctgcgagagcatgaaggagcagctcctggtgctggtggagtgggcgaagtacatcccggccttctgcgagctccccctggacgaccaggtcgccctgctccgggcccacgccggcgagcacctcctgctgggggcgaccaagcgctccatggtgttcaaggacgtgctgctgctcggcaacgactacatcgtcccccggcactgccccgagctggccgagatgagccgcgtgtccatccggatcctggacgagctcgtgctgccgttccaggagctgcagatcgacgacaacgagtacgcctacctcaaggccatcatcttcttcgaccccgacgccaagggcctgagcgaccccgggaagatcaagcgcctgcgcgcgcaggtccaggtgagcctcgaggactacatcaacgaccggcagtacgactcccgcggccggttcggggagctgctgctcctgctgcccacgctccagagcatcacctggcagatgatcgagcagatccagttcatcaagctgttcggcatggcgaagatcgacaacctgctccaggagatgctgctgggcggggcgccgagcgacgcgccccacgcccaccaccccctccacccccacctgatgcaggagcacatgggcaccaacgtgatcgtcgccaacaccatgccgacgcacctgtccaacgggcagatgtgcgagtggccccgcccccggggccaggccgccgcgcccgaggcgccgcagcccgcgccgcccgggggctccggcagcgagccctacaagctgctccccggggccgtggccaccatcgtgcggcccctgtccgccatcccccagccgacgatcaccaagcaggaggtcatctgaggactagttataagactgactagcccgatgggcctcccaacgggccctcctcccctccttgcaccgagattaataaaaaaaaaaaaaaaaaaaaaaaaaaaaaaaaaaaaaaaaaaaaaaaaaaaaaaaaaaaaaaaatgcatcccccccccccccccccccccccccccccccaaaggctcttttcagagccaccagaatt

SEQ ID NO: 2500 - RNA, 1531 nt, synthetic construct
  misc_feature 1..1531: note = mRNA i-3 (A64-N5-C30-hSL-N5) (opt1) from Homo sapiens__NP_000448.3__HNF4A(39-474)(S87A_S142A_S143A_S148A_ T166A_S167A_S313A_S378A_T429A_T432A_S436A_K458R)
  source 1..1531: mol_type = other RNA
aggagaaagcttaccatggacaccagcccgtccgaggggaccaacctgaacgcccccaacagcctgggcgtgtccgccctctgcgccatctgcggggaccgggcgacgggcaagcactacggggccagctcctgcgacggctgcaagggcttcttccgccgggcggtccgcaagaaccacatgtactcctgccggttcagccgccagtgcgtggtggacaaggacaagcggaaccagtgccgctactgccggctgaagaagtgcttccgcgccgggatgaagaaggaggccgtccagaacgagcgggaccgcatctccacccggcgcgcggcctacgaggacagcgcgctgcccagcatcaacgcgctcctgcaggccgaggtgctgtcccggcagatcgcggcgcccgtgtccggcatcaacggggacatccgcgccaagaagatcgccagcatcgccgacgtctgcgagagcatgaaggagcagctcctggtgctggtggagtgggcgaagtacatcccggccttctgcgagctccccctggacgaccaggtcgccctgctccgggcccacgccggcgagcacctcctgctgggggcgaccaagcgctccatggtgttcaaggacgtgctgctgctcggcaacgactacatcgtcccccggcactgccccgagctggccgagatgagccgcgtgtccatccggatcctggacgagctcgtgctgccgttccaggagctgcagatcgacgacaacgagtacgcctacctcaaggccatcatcttcttcgaccccgacgccaagggcctgagcgaccccgggaagatcaagcgcctgcgcgcgcaggtccaggtgagcctcgaggactacatcaacgaccggcagtacgactcccgcggccggttcggggagctgctgctcctgctgcccacgctccagagcatcacctggcagatgatcgagcagatccagttcatcaagctgttcggcatggcgaagatcgacaacctgctccaggagatgctgctgggcggggcgccgagcgacgcgccccacgcccaccaccccctccacccccacctgatgcaggagcacatgggcaccaacgtgatcgtcgccaacaccatgccgacgcacctgtccaacgggcagatgtgcgagtggccccgcccccggggccaggccgccgcgcccgaggcgccgcagcccgcgccgcccgggggctccggcagcgagccctacaagctgctccccggggccgtggccaccatcgtgcggcccctgtccgccatcccccagccgacgatcaccaagcaggaggtcatctgaggactagttataagactgactagcccgatgggcctcccaacgggccctcctcccctccttgcaccgagattaataaaaaaaaaaaaaaaaaaaaaaaaaaaaaaaaaaaaaaaaaaaaaaaaaaaaaaaaaaaaaaaatgcatcccccccccccccccccccccccccccccccaaaggctcttttcagagccaccagaatt

SEQ ID NO: 2501 - RNA, 1531 nt, synthetic construct
  misc_feature 1..1531: note = mRNA i-3 (A64-N5-C30-hSL-N5) (opt1) from Homo sapiens__NP_000448.3__HNF4A(39-474)(S87A_K106R_K108R_K126R_ K127R_S142A_S143A_S148A_T166A_S167A_S313A_S378A_T429A_T432A _S436A_K458R)
  source 1..1531: mol_type = other RNA
aggagaaagcttaccatggacaccagcccgtccgaggggaccaacctgaacgcccccaacagcctgggcgtgtccgccctctgcgccatctgcggggaccgggcgacgggcaagcactacggggccagctcctgcgacggctgcaagggcttcttccgccgggcggtccgcaagaaccacatgtactcctgccggttcagccgccagtgcgtggtggaccgcgaccggcggaaccagtgccgctactgccggctgaagaagtgcttccgcgccgggatgcgccgcgaggccgtccagaacgagcgggaccgcatctccacccggcgcgcggcctacgaggacagcgcgctgcccagcatcaacgcgctcctgcaggccgaggtgctgtcccggcagatcgcggcgcccgtgtccggcatcaacggggacatccgcgccaagaagatcgccagcatcgccgacgtctgcgagagcatgaaggagcagctcctggtgctggtggagtgggcgaagtacatcccggccttctgcgagctccccctggacgaccaggtcgccctgctccgggcccacgccggcgagcacctcctgctgggggcgaccaagcgctccatggtgttcaaggacgtgctgctgctcggcaacgactacatcgtcccccggcactgccccgagctggccgagatgagccgcgtgtccatccggatcctggacgagctcgtgctgccgttccaggagctgcagatcgacgacaacgagtacgcctacctcaaggccatcatcttcttcgaccccgacgccaagggcctgagcgaccccgggaagatcaagcgcctgcgcgcgcaggtccaggtgagcctcgaggactacatcaacgaccggcagtacgactcccgcggccggttcggggagctgctgctcctgctgcccacgctccagagcatcacctggcagatgatcgagcagatccagttcatcaagctgttcggcatggcgaagatcgacaacctgctccaggagatgctgctgggcggggcgccgagcgacgcgccccacgcccaccaccccctccacccccacctgatgcaggagcacatgggcaccaacgtgatcgtcgccaacaccatgccgacgcacctgtccaacgggcagatgtgcgagtggccccgcccccggggccaggccgccgcgcccgaggcgccgcagcccgcgccgcccgggggctccggcagcgagccctacaagctgctccccggggccgtggccaccatcgtgcggcccctgtccgccatcccccagccgacgatcaccaagcaggaggtcatctgaggactagttataagactgactagcccgatgggcctcccaacgggccctcctcccctccttgcaccgagattaataaaaaaaaaaaaaaaaaaaaaaaaaaaaaaaaaaaaaaaaaaaaaaaaaaaaaaaaaaaaaaaatgcatcccccccccccccccccccccccccccccccaaaggctcttttcagagccaccagaatt

SEQ ID NO: 2502 - RNA, 1531 nt, synthetic construct
  misc_feature 1..1531: note = mRNA i-3 (A64-N5-C30-hSL-N5) (opt1) from Homo sapiens__NP_000448.3__HNF4A(39-474)(S87A_K106R_K108R_K126R_ K127R)
  source 1..1531: mol_type = other RNA
aggagaaagcttaccatggacaccagcccgtccgaggggaccaacctgaacgcccccaacagcctgggcgtgtccgccctctgcgccatctgcggggaccgggcgacgggcaagcactacggggccagctcctgcgacggctgcaagggcttcttccgccgggcggtccgcaagaaccacatgtactcctgccggttcagccgccagtgcgtggtggaccgcgaccggcggaaccagtgccgctactgccggctgaagaagtgcttccgcgccgggatgcgccgggaggccgtccagaacgagcgggaccgcatctccacccggcgcagctcctacgaggacagctccctgcccagcatcaacgcgctcctgcaggccgaggtgctgtcccggcagatcaccagccccgtgtccggcatcaacggggacatccgcgccaagaagatcgccagcatcgccgacgtctgcgagagcatgaaggagcagctcctggtgctggtggagtgggcgaagtacatcccggccttctgcgagctccccctggacgaccaggtcgccctgctccgggcccacgccggcgagcacctcctgctgggggcgaccaagcgctccatggtgttcaaggacgtgctgctgctcggcaacgactacatcgtcccccggcactgccccgagctggccgagatgagccgcgtgtccatccggatcctggacgagctcgtgctgccgttccaggagctgcagatcgacgacaacgagtacgcctacctcaaggccatcatcttcttcgaccccgacgccaagggcctgagcgaccccgggaagatcaagcgcctgcgctcccaggtccaggtgagcctcgaggactacatcaacgaccggcagtacgactcccgcggccggttcggggagctgctgctcctgctgcccacgctccagagcatcacctggcagatgatcgagcagatccagttcatcaagctgttcggcatggcgaagatcgacaacctgctccaggagatgctgctgggcgggtccccgagcgacgcgccccacgcccaccaccccctccacccccacctgatgcaggagcacatgggcaccaacgtgatcgtcgccaacaccatgccgacgcacctgtccaacgggcagatgtgcgagtggccccgcccccggggccaggccgccacccccgagaccccgcagcccagcccgcccgggggctccggcagcgagccctacaagctgctccccggggccgtggccaccatcgtgaagcccctgtccgccatcccccagccgacgatcaccaagcaggaggtcatctgaggactagttataagactgactagcccgatgggcctcccaacgggccctcctcccctccttgcaccgagattaataaaaaaaaaaaaaaaaaaaaaaaaaaaaaaaaaaaaaaaaaaaaaaaaaaaaaaaaaaaaaaaatgcatcccccccccccccccccccccccccccccccaaaggctcttttcagagccaccagaatt

SEQ ID NO: 2503 - RNA, 1531 nt, synthetic construct
  misc_feature 1..1531: note = mRNA i-3 (A64-N5-C30-hSL-N5) (opt1) from Homo sapiens__NP_000448.3__HNF4A(39-474)(S87A_K106R_K108R_K126R_ K127R_S142A_S143A_S148A_T166A_S167A_S313A_S378A_T429A_T432A _S436A_K458R_S461A)
  source 1..1531: mol_type = other RNA
aggagaaagcttaccatggacaccagcccgtccgaggggaccaacctgaacgcccccaacagcctgggcgtgtccgccctctgcgccatctgcggggaccgggcgacgggcaagcactacggggccagctcctgcgacggctgcaagggcttcttccgccgggcggtccgcaagaaccacatgtactcctgccggttcagccgccagtgcgtggtggaccgcgaccggcggaaccagtgccgctactgccggctgaagaagtgcttccgcgccgggatgcgccgggaggccgtccagaacgagcgggaccgcatctccacccggcgcgccgcctacgaggacagcgccctgcccagcatcaacgcgctcctgcaggccgaggtgctgtcccggcagatcgccgcgcccgtgtccggcatcaacggggacatccgcgccaagaagatcgccagcatcgccgacgtctgcgagagcatgaaggagcagctcctggtgctggtggagtgggcgaagtacatcccggccttctgcgagctccccctggacgaccaggtcgccctgctccgggcccacgccggcgagcacctcctgctgggggcgaccaagcgctccatggtgttcaaggacgtgctgctgctcggcaacgactacatcgtcccccggcactgccccgagctggccgagatgagccgcgtgtccatccggatcctggacgagctcgtgctgccgttccaggagctgcagatcgacgacaacgagtacgcctacctcaaggccatcatcttcttcgaccccgacgccaagggcctgagcgaccccgggaagatcaagcgcctgcgcgcccaggtccaggtgagcctcgaggactacatcaacgaccggcagtacgactcccgcggccggttcggggagctgctgctcctgctgcccacgctccagagcatcacctggcagatgatcgagcagatccagttcatcaagctgttcggcatggcgaagatcgacaacctgctccaggagatgctgctgggcggggccccgagcgacgcgccccacgcccaccaccccctccacccccacctgatgcaggagcacatgggcaccaacgtgatcgtcgccaacaccatgccgacgcacctgtccaacgggcagatgtgcgagtggccccgcccccggggccaggccgccgcccccgaggccccgcagcccgcgccgcccgggggctccggcagcgagccctacaagctgctccccggggccgtggccaccatcgtgcggcccctggccgccatcccccagccgacgatcaccaagcaggaggtcatctgaggactagttataagactgactagcccgatgggcctcccaacgggccctcctcccctccttgcaccgagattaataaaaaaaaaaaaaaaaaaaaaaaaaaaaaaaaaaaaaaaaaaaaaaaaaaaaaaaaaaaaaaaatgcatcccccccccccccccccccccccccccccccaaaggctcttttcagagccaccagaatt

SEQ ID NO: 2504 - RNA, 1531 nt, synthetic construct
  misc_feature 1..1531: note = mRNA i-3 (A64-N5-C30-hSL-N5) (opt1) from Homo sapiens__NP_000448.3__HNF4A(39-474)(S87A_K106R_K108R_K126R_ K127R_S142A_S143A_S148A_T166A_S167A_S313A_S378A_T429A_T432A _S436A_K458R_S461E)
  source 1..1531: mol_type = other RNA
aggagaaagcttaccatggacaccagcccgtccgaggggaccaacctgaacgcccccaacagcctgggcgtgtccgccctctgcgccatctgcggggaccgggcgacgggcaagcactacggggccagctcctgcgacggctgcaagggcttcttccgccgggcggtccgcaagaaccacatgtactcctgccggttcagccgccagtgcgtggtggaccgcgaccggcggaaccagtgccgctactgccggctgaagaagtgcttccgcgccgggatgcgccgggaggccgtccagaacgagcgggaccgcatctccacccggcgcgccgcctacgaggacagcgccctgcccagcatcaacgcgctcctgcaggccgaggtgctgtcccggcagatcgccgcgcccgtgtccggcatcaacggggacatccgcgccaagaagatcgccagcatcgccgacgtctgcgagagcatgaaggagcagctcctggtgctggtggagtgggcgaagtacatcccggccttctgcgagctccccctggacgaccaggtcgccctgctccgggcccacgccggcgagcacctcctgctgggggcgaccaagcgctccatggtgttcaaggacgtgctgctgctcggcaacgactacatcgtcccccggcactgccccgagctggccgagatgagccgcgtgtccatccggatcctggacgagctcgtgctgccgttccaggagctgcagatcgacgacaacgagtacgcctacctcaaggccatcatcttcttcgaccccgacgccaagggcctgagcgaccccgggaagatcaagcgcctgcgcgcccaggtccaggtgagcctcgaggactacatcaacgaccggcagtacgactcccgcggccggttcggggagctgctgctcctgctgcccacgctccagagcatcacctggcagatgatcgagcagatccagttcatcaagctgttcggcatggcgaagatcgacaacctgctccaggagatgctgctgggcggggccccgagcgacgcgccccacgcccaccaccccctccacccccacctgatgcaggagcacatgggcaccaacgtgatcgtcgccaacaccatgccgacgcacctgtccaacgggcagatgtgcgagtggccccgcccccggggccaggccgccgcccccgaggccccgcagcccgcgccgcccgggggctccggcagcgagccctacaagctgctccccggggccgtggccaccatcgtgcggcccctggaggccatcccccagccgacgatcaccaagcaggaggtcatctgaggactagttataagactgactagcccgatgggcctcccaacgggccctcctcccctccttgcaccgagattaataaaaaaaaaaaaaaaaaaaaaaaaaaaaaaaaaaaaaaaaaaaaaaaaaaaaaaaaaaaaaaaatgcatcccccccccccccccccccccccccccccccaaaggctcttttcagagccaccagaatt

SEQ ID NO: 2505 - RNA, 1531 nt, synthetic construct
  misc_feature 1..1531: note = mRNA i-3 (A64-N5-C30-hSL-N5) (opt1) from Homo sapiens__NP_000448.3__HNF4A(39-474)(S87A_K106R_K108R_K126R_ K127R_S142A_S143A_S148E_T166A_S167E_S313A_S378E_T429E_T432E _S436E_K458R_S461E)
  source 1..1531: mol_type = other RNA
aggagaaagcttaccatggacaccagcccgtccgaggggaccaacctgaacgcccccaacagcctgggcgtgtccgccctctgcgccatctgcggggaccgggcgacgggcaagcactacggggccagctcctgcgacggctgcaagggcttcttccgccgggcggtccgcaagaaccacatgtactcctgccggttcagccgccagtgcgtggtggaccgcgaccggcggaaccagtgccgctactgccggctgaagaagtgcttccgcgccgggatgcgccgggaggccgtccagaacgagcgggaccgcatctccacccggcgcgccgcctacgaggacagcgagctgcccagcatcaacgcgctcctgcaggccgaggtgctgtcccggcagatcgccgagcccgtgtccggcatcaacggggacatccgcgccaagaagatcgccagcatcgccgacgtctgcgagagcatgaaggagcagctcctggtgctggtggagtgggcgaagtacatcccggccttctgcgagctccccctggacgaccaggtcgccctgctccgggcccacgccggcgagcacctcctgctgggggcgaccaagcgctccatggtgttcaaggacgtgctgctgctcggcaacgactacatcgtcccccggcactgccccgagctggccgagatgagccgcgtgtccatccggatcctggacgagctcgtgctgccgttccaggagctgcagatcgacgacaacgagtacgcctacctcaaggccatcatcttcttcgaccccgacgccaagggcctgagcgaccccgggaagatcaagcgcctgcgcgcccaggtccaggtgagcctcgaggactacatcaacgaccggcagtacgactcccgcggccggttcggggagctgctgctcctgctgcccacgctccagagcatcacctggcagatgatcgagcagatccagttcatcaagctgttcggcatggcgaagatcgacaacctgctccaggagatgctgctgggcggggagccgagcgacgcgccccacgcccaccaccccctccacccccacctgatgcaggagcacatgggcaccaacgtgatcgtcgccaacaccatgccgacgcacctgtccaacgggcagatgtgcgagtggccccgcccccggggccaggccgccgagcccgaggagccgcagcccgagccgcccgggggctccggcagcgagccctacaagctgctccccggggccgtggccaccatcgtgcggcccctggaggccatcccccagccgacgatcaccaagcaggaggtcatctgaggactagttataagactgactagcccgatgggcctcccaacgggccctcctcccctccttgcaccgagattaataaaaaaaaaaaaaaaaaaaaaaaaaaaaaaaaaaaaaaaaaaaaaaaaaaaaaaaaaaaaaaaatgcatcccccccccccccccccccccccccccccccaaaggctcttttcagagccaccagaatt

SEQ ID NO: 2506 - RNA, 1531 nt, synthetic construct
  misc_feature 1..1531: note = mRNA i-3 (A64-N5-C30-hSL-N5) (opt1) from Homo sapiens__NP_000448.3__HNF4A(39-474)(S87A_K106R_K108R_K126R_ K127R_S142A_S143A_S148A_T166A_S167A_K179R_K180R_S313A_S378A _T429A_T432A_S436A_K458R_S461E)
  source 1..1531: mol_type = other RNA
aggagaaagcttaccatggacaccagcccgtccgaggggaccaacctgaacgcccccaacagcctgggcgtgtccgccctctgcgccatctgcggggaccgggcgacgggcaagcactacggggccagctcctgcgacggctgcaagggcttcttccgccgggcggtccgcaagaaccacatgtactcctgccggttcagccgccagtgcgtggtggaccgcgaccggcggaaccagtgccgctactgccggctgaagaagtgcttccgcgccgggatgcgccgggaggccgtccagaacgagcgggaccgcatctccacccggcgcgccgcctacgaggacagcgccctgcccagcatcaacgcgctcctgcaggccgaggtgctgtcccggcagatcgccgcgcccgtgtccggcatcaacggggacatccgcgcccgccggatcgccagcatcgccgacgtctgcgagagcatgaaggagcagctcctggtgctggtggagtgggcgaagtacatcccggccttctgcgagctccccctggacgaccaggtcgccctgctccgggcccacgccggcgagcacctcctgctgggggcgaccaagcgctccatggtgttcaaggacgtgctgctgctcggcaacgactacatcgtcccccggcactgccccgagctggccgagatgagccgcgtgtccatccggatcctggacgagctcgtgctgccgttccaggagctgcagatcgacgacaacgagtacgcctacctcaaggccatcatcttcttcgaccccgacgccaagggcctgagcgaccccgggaagatcaagcgcctgcgcgcccaggtccaggtgagcctcgaggactacatcaacgaccggcagtacgactcccgcggccggttcggggagctgctgctcctgctgcccacgctccagagcatcacctggcagatgatcgagcagatccagttcatcaagctgttcggcatggcgaagatcgacaacctgctccaggagatgctgctgggcggggccccgagcgacgcgccccacgcccaccaccccctccacccccacctgatgcaggagcacatgggcaccaacgtgatcgtcgccaacaccatgccgacgcacctgtccaacgggcagatgtgcgagtggccccgcccccggggccaggccgccgcccccgaggccccgcagcccgcgccgcccgggggctccggcagcgagccctacaagctgctccccggggccgtggccaccatcgtgcggcccctggaggccatcccccagccgacgatcaccaagcaggaggtcatctgaggactagttataagactgactagcccgatgggcctcccaacgggccctcctcccctccttgcaccgagattaataaaaaaaaaaaaaaaaaaaaaaaaaaaaaaaaaaaaaaaaaaaaaaaaaaaaaaaaaaaaaaaatgcatcccccccccccccccccccccccccccccccaaaggctcttttcagagccaccagaatt

SEQ ID NO: 2507 - RNA, 1531 nt, synthetic construct
  misc_feature 1..1531: note = mRNA i-3 (A64-N5-C30-hSL-N5) (opt1) from Homo sapiens__NP_000448.3__HNF4A(39-474)(S87A_K106R_K108R_K126R_ K127R_S142A_S143A_S148A_T166A_S167A_K300R_K307R_K309R_S313A _S378A_T429A_T432A_S436A_K458R_S461E)
  source 1..1531: mol_type = other RNA
aggagaaagcttaccatggacaccagcccgtccgaggggaccaacctgaacgcccccaacagcctgggcgtgtccgccctctgcgccatctgcggggaccgggcgacgggcaagcactacggggccagctcctgcgacggctgcaagggcttcttccgccgggcggtccgcaagaaccacatgtactcctgccggttcagccgccagtgcgtggtggaccgcgaccggcggaaccagtgccgctactgccggctgaagaagtgcttccgcgccgggatgcgccgggaggccgtccagaacgagcgggaccgcatctccacccggcgcgccgcctacgaggacagcgccctgcccagcatcaacgcgctcctgcaggccgaggtgctgtcccggcagatcgccgcgcccgtgtccggcatcaacggggacatccgcgccaagaagatcgccagcatcgccgacgtctgcgagagcatgaaggagcagctcctggtgctggtggagtgggcgaagtacatcccggccttctgcgagctccccctggacgaccaggtcgccctgctccgggcccacgccggcgagcacctcctgctgggggcgaccaagcgctccatggtgttcaaggacgtgctgctgctcggcaacgactacatcgtcccccggcactgccccgagctggccgagatgagccgcgtgtccatccggatcctggacgagctcgtgctgccgttccaggagctgcagatcgacgacaacgagtacgcctacctcaaggccatcatcttcttcgaccccgacgcccgcggcctgagcgaccccgggcggatccgccgcctgcgcgcccaggtccaggtgagcctcgaggactacatcaacgaccggcagtacgactcccgcggccggttcggggagctgctgctcctgctgcccacgctccagagcatcacctggcagatgatcgagcagatccagttcatcaagctgttcggcatggcgaagatcgacaacctgctccaggagatgctgctgggcggggccccgagcgacgcgccccacgcccaccaccccctccacccccacctgatgcaggagcacatgggcaccaacgtgatcgtcgccaacaccatgccgacgcacctgtccaacgggcagatgtgcgagtggccccgcccccggggccaggccgccgcccccgaggccccgcagcccgcgccgcccgggggctccggcagcgagccctacaagctgctccccggggccgtggccaccatcgtgcggcccctggaggccatcccccagccgacgatcaccaagcaggaggtcatctgaggactagttataagactgactagcccgatgggcctcccaacgggccctcctcccctccttgcaccgagattaataaaaaaaaaaaaaaaaaaaaaaaaaaaaaaaaaaaaaaaaaaaaaaaaaaaaaaaaaaaaaaaatgcatcccccccccccccccccccccccccccccccaaaggctcttttcagagccaccagaatt

SEQ ID NO: 2508 - RNA, 1531 nt, synthetic construct
  misc_feature 1..1531: note = mRNA i-3 (A64-N5-C30-hSL-N5) (opt1) from Homo sapiens__NP_000448.3__HNF4A(39-474)(S87A_K106R_K108R_K126R_ K127R_S142A_S143A_S148A_T166A_S167A_S313A_S378A_T429A_T432A _S436A_K447R_K458R_S461E_K470R)
  source 1..1531: mol_type = other RNA
aggagaaagcttaccatggacaccagcccgtccgaggggaccaacctgaacgcccccaacagcctgggcgtgtccgccctctgcgccatctgcggggaccgggcgacgggcaagcactacggggccagctcctgcgacggctgcaagggcttcttccgccgggcggtccgcaagaaccacatgtactcctgccggttcagccgccagtgcgtggtggaccgcgaccggcggaaccagtgccgctactgccggctgaagaagtgcttccgcgccgggatgcgccgggaggccgtccagaacgagcgggaccgcatctccacccggcgcgccgcctacgaggacagcgccctgcccagcatcaacgcgctcctgcaggccgaggtgctgtcccggcagatcgccgcgcccgtgtccggcatcaacggggacatccgcgccaagaagatcgccagcatcgccgacgtctgcgagagcatgaaggagcagctcctggtgctggtggagtgggcgaagtacatcccggccttctgcgagctccccctggacgaccaggtcgccctgctccgggcccacgccggcgagcacctcctgctgggggcgaccaagcgctccatggtgttcaaggacgtgctgctgctcggcaacgactacatcgtcccccggcactgccccgagctggccgagatgagccgcgtgtccatccggatcctggacgagctcgtgctgccgttccaggagctgcagatcgacgacaacgagtacgcctacctcaaggccatcatcttcttcgaccccgacgccaagggcctgagcgaccccgggaagatcaagcgcctgcgcgcccaggtccaggtgagcctcgaggactacatcaacgaccggcagtacgactcccgcggccggttcggggagctgctgctcctgctgcccacgctccagagcatcacctggcagatgatcgagcagatccagttcatcaagctgttcggcatggcgaagatcgacaacctgctccaggagatgctgctgggcggggccccgagcgacgcgccccacgcccaccaccccctccacccccacctgatgcaggagcacatgggcaccaacgtgatcgtcgccaacaccatgccgacgcacctgtccaacgggcagatgtgcgagtggccccgcccccggggccaggccgccgcccccgaggccccgcagcccgcgccgcccgggggctccggcagcgagccctaccgcctgctccccggggccgtggccaccatcgtgcggcccctggaggccatcccccagccgacgatcacccggcaggaggtcatctgaggactagttataagactgactagcccgatgggcctcccaacgggccctcctcccctccttgcaccgagattaataaaaaaaaaaaaaaaaaaaaaaaaaaaaaaaaaaaaaaaaaaaaaaaaaaaaaaaaaaaaaaaatgcatcccccccccccccccccccccccccccccccaaaggctcttttcagagccaccagaatt

SEQ ID NO: 2509 - RNA, 1531 nt, synthetic construct
  misc_feature 1..1531: note = mRNA i-3 (A64-N5-C30-hSL-N5) (opt1) from Homo sapiens__NP_000448.3__HNF4A(39-474)(S87A_K106R_K108R_K126R_ K127R_S142A_S143A_S148A_T166A_S167A_K179R_K180R_K234R_K300R _K307R_K309R_S313A_S378A_T429A_T432A_S436A_K447R_K458R_S461 E_K470R)
  source 1..1531: mol_type = other RNA
aggagaaagcttaccatggacaccagcccgtccgaggggaccaacctgaacgcccccaacagcctgggcgtgtccgccctctgcgccatctgcggggaccgggcgacgggcaagcactacggggccagctcctgcgacggctgcaagggcttcttccgccgggcggtccgcaagaaccacatgtactcctgccggttcagccgccagtgcgtggtggaccgcgaccggcggaaccagtgccgctactgccggctgaagaagtgcttccgcgccgggatgcgccgggaggccgtccagaacgagcgggaccgcatctccacccggcgcgccgcctacgaggacagcgccctgcccagcatcaacgcgctcctgcaggccgaggtgctgtcccggcagatcgccgcgcccgtgtccggcatcaacggggacatccgcgcccgccggatcgccagcatcgccgacgtctgcgagagcatgaaggagcagctcctggtgctggtggagtgggcgaagtacatcccggccttctgcgagctccccctggacgaccaggtcgccctgctccgggcccacgccggcgagcacctcctgctgggggcgacccggcgctccatggtgttcaaggacgtgctgctgctcggcaacgactacatcgtcccccggcactgccccgagctggccgagatgagccgcgtgtccatccggatcctggacgagctcgtgctgccgttccaggagctgcagatcgacgacaacgagtacgcctacctcaaggccatcatcttcttcgaccccgacgcccgcggcctgagcgaccccgggcggatccgccgcctgcgcgcccaggtccaggtgagcctcgaggactacatcaacgaccggcagtacgactcccgcggccggttcggggagctgctgctcctgctgcccacgctccagagcatcacctggcagatgatcgagcagatccagttcatcaagctgttcggcatggcgaagatcgacaacctgctccaggagatgctgctgggcggggccccgagcgacgcgccccacgcccaccaccccctccacccccacctgatgcaggagcacatgggcaccaacgtgatcgtcgccaacaccatgccgacgcacctgtccaacgggcagatgtgcgagtggccccgcccccggggccaggccgccgcccccgaggccccgcagcccgcgccgcccgggggctccggcagcgagccctaccgcctgctccccggggccgtggccaccatcgtgcggcccctggaggccatcccccagccgacgatcacccggcaggaggtcatctgaggactagttataagactgactagcccgatgggcctcccaacgggccctcctcccctccttgcaccgagattaataaaaaaaaaaaaaaaaaaaaaaaaaaaaaaaaaaaaaaaaaaaaaaaaaaaaaaaaaaaaaaaatgcatcccccccccccccccccccccccccccccccaaaggctcttttcagagccaccagaatt

SEQ ID NO: 2510 - RNA, 1531 nt, synthetic construct
  misc_feature 1..1531: note = mRNA i-3 (A64-N5-C30-hSL-N5) (opt1) from Homo sapiens__NP_000448.3__HNF4A(39-474)(S87A_S95A_S99A_K106R_K1 08R_K126R_K127R_S142A_S143A_S148A_T166A_S167A_S313A_S378A_T 429A_T432A_S436A_K458R_S461E)
  source 1..1531: mol_type = other RNA
aggagaaagcttaccatggacaccagcccgtccgaggggaccaacctgaacgcccccaacagcctgggcgtgtccgccctctgcgccatctgcggggaccgggcgacgggcaagcactacggggccagctcctgcgacggctgcaagggcttcttccgccgggcggtccgcaagaaccacatgtacgcctgccggttcgcccgccagtgcgtggtggaccgcgaccggcggaaccagtgccgctactgccggctgaagaagtgcttccgcgccgggatgcgccgggaggccgtccagaacgagcgggaccgcatctccacccggcgcgccgcctacgaggacagcgccctgcccagcatcaacgcgctcctgcaggccgaggtgctgtcccggcagatcgccgcgcccgtgtccggcatcaacggggacatccgcgccaagaagatcgccagcatcgccgacgtctgcgagagcatgaaggagcagctcctggtgctggtggagtgggcgaagtacatcccggccttctgcgagctccccctggacgaccaggtcgccctgctccgggcccacgccggcgagcacctcctgctgggggcgaccaagcgctccatggtgttcaaggacgtgctgctgctcggcaacgactacatcgtcccccggcactgccccgagctggccgagatgagccgcgtgtccatccggatcctggacgagctcgtgctgccgttccaggagctgcagatcgacgacaacgagtacgcctacctcaaggccatcatcttcttcgaccccgacgccaagggcctgagcgaccccgggaagatcaagcgcctgcgcgcccaggtccaggtgagcctcgaggactacatcaacgaccggcagtacgactcccgcggccggttcggggagctgctgctcctgctgcccacgctccagagcatcacctggcagatgatcgagcagatccagttcatcaagctgttcggcatggcgaagatcgacaacctgctccaggagatgctgctgggcggggccccgagcgacgcgccccacgcccaccaccccctccacccccacctgatgcaggagcacatgggcaccaacgtgatcgtcgccaacaccatgccgacgcacctgtccaacgggcagatgtgcgagtggccccgcccccggggccaggccgccgcccccgaggccccgcagcccgcgccgcccgggggctccggcagcgagccctacaagctgctccccggggccgtggccaccatcgtgcggcccctggaggccatcccccagccgacgatcaccaagcaggaggtcatctgaggactagttataagactgactagcccgatgggcctcccaacgggccctcctcccctccttgcaccgagattaataaaaaaaaaaaaaaaaaaaaaaaaaaaaaaaaaaaaaaaaaaaaaaaaaaaaaaaaaaaaaaaatgcatcccccccccccccccccccccccccccccccaaaggctcttttcagagccaccagaatt

SEQ ID NO: 2511 - RNA, 1531 nt, synthetic construct
  misc_feature 1..1531: note = mRNA i-3 (A64-N5-C30-hSL-N5) (opt1) from Homo sapiens__NP_000448.3__HNF4A(39-474)(S87A_K106R_K108R_K126R_ K127R_S138A_T139A_S142A_S143A_S148A_T166A_S167A_S313A_S378A _T429A_T432A_S436A_K458R_S461E)
  source 1..1531: mol_type = other RNA
aggagaaagcttaccatggacaccagcccgtccgaggggaccaacctgaacgcccccaacagcctgggcgtgtccgccctctgcgccatctgcggggaccgggcgacgggcaagcactacggggccagctcctgcgacggctgcaagggcttcttccgccgggcggtccgcaagaaccacatgtactcctgccggttcagccgccagtgcgtggtggaccgcgaccggcggaaccagtgccgctactgccggctgaagaagtgcttccgcgccgggatgcgccgggaggccgtccagaacgagcgggaccgcatcgccgcccggcgcgccgcctacgaggacagcgccctgcccagcatcaacgcgctcctgcaggccgaggtgctgtcccggcagatcgccgcgcccgtgtccggcatcaacggggacatccgcgccaagaagatcgccagcatcgccgacgtctgcgagagcatgaaggagcagctcctggtgctggtggagtgggcgaagtacatcccggccttctgcgagctccccctggacgaccaggtcgccctgctccgggcccacgccggcgagcacctcctgctgggggcgaccaagcgctccatggtgttcaaggacgtgctgctgctcggcaacgactacatcgtcccccggcactgccccgagctggccgagatgagccgcgtgtccatccggatcctggacgagctcgtgctgccgttccaggagctgcagatcgacgacaacgagtacgcctacctcaaggccatcatcttcttcgaccccgacgccaagggcctgagcgaccccgggaagatcaagcgcctgcgcgcccaggtccaggtgagcctcgaggactacatcaacgaccggcagtacgactcccgcggccggttcggggagctgctgctcctgctgcccacgctccagagcatcacctggcagatgatcgagcagatccagttcatcaagctgttcggcatggcgaagatcgacaacctgctccaggagatgctgctgggcggggccccgagcgacgcgccccacgcccaccaccccctccacccccacctgatgcaggagcacatgggcaccaacgtgatcgtcgccaacaccatgccgacgcacctgtccaacgggcagatgtgcgagtggccccgcccccggggccaggccgccgcccccgaggccccgcagcccgcgccgcccgggggctccggcagcgagccctacaagctgctccccggggccgtggccaccatcgtgcggcccctggaggccatcccccagccgacgatcaccaagcaggaggtcatctgaggactagttataagactgactagcccgatgggcctcccaacgggccctcctcccctccttgcaccgagattaataaaaaaaaaaaaaaaaaaaaaaaaaaaaaaaaaaaaaaaaaaaaaaaaaaaaaaaaaaaaaaaatgcatcccccccccccccccccccccccccccccccaaaggctcttttcagagccaccagaatt

SEQ ID NO: 2512 - RNA, 1531 nt, synthetic construct
  misc_feature 1..1531: note = mRNA i-3 (A64-N5-C30-hSL-N5) (opt1) from Homo sapiens__NP_000448.3__HNF4A(39-474)(S87A_S95A_S99A_K106R_K1 08R_K126R_K127R_S138A_T139A_S142A_S143A_S148A_T166A_S167A_S 313A_S378A_T429A_T432A_S436A_K458R_S461E)
  source 1..1531: mol_type = other RNA
aggagaaagcttaccatggacaccagcccgtccgaggggaccaacctgaacgcccccaacagcctgggcgtgtccgccctctgcgccatctgcggggaccgggcgacgggcaagcactacggggccagctcctgcgacggctgcaagggcttcttccgccgggcggtccgcaagaaccacatgtacgcctgccggttcgcccgccagtgcgtggtggaccgcgaccggcggaaccagtgccgctactgccggctgaagaagtgcttccgcgccgggatgcgccgggaggccgtccagaacgagcgggaccgcatcgccgcccggcgcgccgcctacgaggacagcgccctgcccagcatcaacgcgctcctgcaggccgaggtgctgtcccggcagatcgccgcgcccgtgtccggcatcaacggggacatccgcgccaagaagatcgccagcatcgccgacgtctgcgagagcatgaaggagcagctcctggtgctggtggagtgggcgaagtacatcccggccttctgcgagctccccctggacgaccaggtcgccctgctccgggcccacgccggcgagcacctcctgctgggggcgaccaagcgctccatggtgttcaaggacgtgctgctgctcggcaacgactacatcgtcccccggcactgccccgagctggccgagatgagccgcgtgtccatccggatcctggacgagctcgtgctgccgttccaggagctgcagatcgacgacaacgagtacgcctacctcaaggccatcatcttcttcgaccccgacgccaagggcctgagcgaccccgggaagatcaagcgcctgcgcgcccaggtccaggtgagcctcgaggactacatcaacgaccggcagtacgactcccgcggccggttcggggagctgctgctcctgctgcccacgctccagagcatcacctggcagatgatcgagcagatccagttcatcaagctgttcggcatggcgaagatcgacaacctgctccaggagatgctgctgggcggggccccgagcgacgcgccccacgcccaccaccccctccacccccacctgatgcaggagcacatgggcaccaacgtgatcgtcgccaacaccatgccgacgcacctgtccaacgggcagatgtgcgagtggccccgcccccggggccaggccgccgcccccgaggccccgcagcccgcgccgcccgggggctccggcagcgagccctacaagctgctccccggggccgtggccaccatcgtgcggcccctggaggccatcccccagccgacgatcaccaagcaggaggtcatctgaggactagttataagactgactagcccgatgggcctcccaacgggccctcctcccctccttgcaccgagattaataaaaaaaaaaaaaaaaaaaaaaaaaaaaaaaaaaaaaaaaaaaaaaaaaaaaaaaaaaaaaaaatgcatcccccccccccccccccccccccccccccccaaaggctcttttcagagccaccagaatt

SEQ ID NO: 2513 - RNA, 1531 nt, synthetic construct
  misc_feature 1..1531: note = mRNA i-3 (A64-N5-C30-hSL-N5) (opt1) from Homo sapiens__NP_000448.3__HNF4A(39-474)
  source 1..1531: mol_type = other RNA
aggagaaagcttaccatggacaccagcccgtccgaggggaccaacctgaacgcccccaacagcctgggcgtgtccgccctctgcgccatctgcggggaccgggcgacgggcaagcactacggggccagctcctgcgacggctgcaagggcttcttccgccggagcgtccgcaagaaccacatgtactcctgccggttcagccgccagtgcgtggtggacaaggacaagcggaaccagtgccgctactgccggctgaagaagtgcttccgcgccgggatgaagaaggaggccgtccagaacgagcgggaccgcatctccacccggcgcagctcctacgaggacagctccctgcccagcatcaacgcgctcctgcaggccgaggtgctgtcccggcagatcaccagccccgtgtccggcatcaacggggacatccgcgccaagaagatcgccagcatcgccgacgtctgcgagagcatgaaggagcagctcctggtgctggtggagtgggcgaagtacatcccggccttctgcgagctccccctggacgaccaggtcgccctgctccgggcccacgccggcgagcacctcctgctgggggcgaccaagcgctccatggtgttcaaggacgtgctgctgctcggcaacgactacatcgtcccccggcactgccccgagctggccgagatgagccgcgtgtccatccggatcctggacgagctcgtgctgccgttccaggagctgcagatcgacgacaacgagtacgcctacctcaaggccatcatcttcttcgaccccgacgccaagggcctgagcgaccccgggaagatcaagcgcctgcgctcccaggtccaggtgagcctcgaggactacatcaacgaccggcagtacgactcccgcggccggttcggggagctgctgctcctgctgcccacgctccagagcatcacctggcagatgatcgagcagatccagttcatcaagctgttcggcatggcgaagatcgacaacctgctccaggagatgctgctgggcgggtccccgagcgacgcgccccacgcccaccaccccctccacccccacctgatgcaggagcacatgggcaccaacgtgatcgtcgccaacaccatgccgacgcacctgtccaacgggcagatgtgcgagtggccccgcccccggggccaggccgccacccccgagaccccgcagcccagcccgcccgggggctccggcagcgagccctacaagctcctgcccggggccgtggccaccatcgtgaagcccctgtccgccatcccccagccgacgatcaccaagcaggaggtcatctgaggactagttataagactgactagcccgatgggcctcccaacgggccctcctcccctccttgcaccgagattaataaaaaaaaaaaaaaaaaaaaaaaaaaaaaaaaaaaaaaaaaaaaaaaaaaaaaaaaaaaaaaaatgcatcccccccccccccccccccccccccccccccaaaggctcttttcagagccaccagaatt

SEQ ID NO: 2514 - RNA, 1531 nt, synthetic construct
  misc_feature 1..1531: note = mRNA i-3 (A64-N5-C30-hSL-N5) (opt1) from Homo sapiens__NP_000448.3__HNF4A(39-474)(S313A)
  source 1..1531: mol_type = other RNA
aggagaaagcttaccatggacaccagcccgtccgaggggaccaacctgaacgcccccaacagcctgggcgtgtccgccctctgcgccatctgcggggaccgggcgacgggcaagcactacggggccagctcctgcgacggctgcaagggcttcttccgccggagcgtccgcaagaaccacatgtactcctgccggttcagccgccagtgcgtggtggacaaggacaagcggaaccagtgccgctactgccggctgaagaagtgcttccgcgccgggatgaagaaggaggccgtccagaacgagcgggaccgcatctccacccggcgcagctcctacgaggacagctccctgcccagcatcaacgcgctcctgcaggccgaggtgctgtcccggcagatcaccagccccgtgtccggcatcaacggggacatccgcgccaagaagatcgccagcatcgccgacgtctgcgagagcatgaaggagcagctcctggtgctggtggagtgggcgaagtacatcccggccttctgcgagctccccctggacgaccaggtcgccctgctccgggcccacgccggcgagcacctcctgctgggggcgaccaagcgctccatggtgttcaaggacgtgctgctgctcggcaacgactacatcgtcccccggcactgccccgagctggccgagatgagccgcgtgtccatccggatcctggacgagctcgtgctgccgttccaggagctgcagatcgacgacaacgagtacgcctacctcaaggccatcatcttcttcgaccccgacgccaagggcctgagcgaccccgggaagatcaagcgcctgcgcgcgcaggtccaggtgtccctcgaggactacatcaacgaccggcagtacgacagccgcggccggttcggggagctgctgctcctgctgcccacgctccagtccatcacctggcagatgatcgagcagatccagttcatcaagctgttcggcatggccaagatcgacaacctgctccaggagatgctgctgggcgggagcccgtccgacgcgccccacgcccaccaccccctccacccccacctgatgcaggagcacatgggcaccaacgtgatcgtcgccaacaccatgccgacgcacctgagcaacgggcagatgtgcgagtggccccgcccccggggccaggccgccacccccgagaccccgcagccctccccgcccgggggcagcggctccgagccctacaagctgctccccggggccgtggccaccatcgtgaagcccctgagcgcgatcccccagccgacgatcaccaagcaggaggtcatctgaggactagttataagactgactagcccgatgggcctcccaacgggccctcctcccctccttgcaccgagattaataaaaaaaaaaaaaaaaaaaaaaaaaaaaaaaaaaaaaaaaaaaaaaaaaaaaaaaaaaaaaaaatgcatcccccccccccccccccccccccccccccccaaaggctcttttcagagccaccagaatt

SEQ ID NO: 2515 - RNA, 1531 nt, synthetic construct
  misc_feature 1..1531: note = mRNA i-3 (A64-N5-C30-hSL-N5) (opt1) from Homo sapiens__NP_000448.3__HNF4A(39-474)(S313E)
  source 1..1531: mol_type = other RNA
aggagaaagcttaccatggacaccagcccgtccgaggggaccaacctgaacgcccccaacagcctgggcgtgtccgccctctgcgccatctgcggggaccgggcgacgggcaagcactacggggccagctcctgcgacggctgcaagggcttcttccgccggagcgtccgcaagaaccacatgtactcctgccggttcagccgccagtgcgtggtggacaaggacaagcggaaccagtgccgctactgccggctgaagaagtgcttccgcgccgggatgaagaaggaggccgtccagaacgagcgggaccgcatctccacccggcgcagctcctacgaggacagctccctgcccagcatcaacgcgctcctgcaggccgaggtgctgtcccggcagatcaccagccccgtgtccggcatcaacggggacatccgcgccaagaagatcgccagcatcgccgacgtctgcgagagcatgaaggagcagctcctggtgctggtggagtgggcgaagtacatcccggccttctgcgagctccccctggacgaccaggtcgccctgctccgggcccacgccggcgagcacctcctgctgggggcgaccaagcgctccatggtgttcaaggacgtgctgctgctcggcaacgactacatcgtcccccggcactgccccgagctggccgagatgagccgcgtgtccatccggatcctggacgagctcgtgctgccgttccaggagctgcagatcgacgacaacgagtacgcctacctcaaggccatcatcttcttcgaccccgacgccaagggcctgagcgaccccgggaagatcaagcgcctgcgcgagcaggtccaggtgtccctcgaggactacatcaacgaccggcagtacgacagccgcggccggttcggggagctgctgctcctgctgcccacgctccagtccatcacctggcagatgatcgagcagatccagttcatcaagctgttcggcatggcgaagatcgacaacctgctccaggagatgctgctgggcgggagcccgtccgacgcgccccacgcccaccaccccctccacccccacctgatgcaggagcacatgggcaccaacgtgatcgtcgccaacaccatgccgacgcacctgagcaacgggcagatgtgcgagtggccccgcccccggggccaggccgccacccccgagaccccgcagccctccccgcccgggggcagcggctccgagccctacaagctgctccccggggccgtggccaccatcgtgaagcccctgagcgccatcccccagccgacgatcaccaagcaggaggtcatctgaggactagttataagactgactagcccgatgggcctcccaacgggccctcctcccctccttgcaccgagattaataaaaaaaaaaaaaaaaaaaaaaaaaaaaaaaaaaaaaaaaaaaaaaaaaaaaaaaaaaaaaaaatgcatcccccccccccccccccccccccccccccccaaaggctcttttcagagccaccagaatt

SEQ ID NO: 2516 - RNA, 1531 nt, synthetic construct
  misc_feature 1..1531: note = mRNA i-3 (A64-N5-C30-hSL-N5) (opt1) from Homo sapiens__NP_000448.3__HNF4A(39-474)(S142A_S143A)
  source 1..1531: mol_type = other RNA
aggagaaagcttaccatggacaccagcccgtccgaggggaccaacctgaacgcccccaacagcctgggcgtgtccgccctctgcgccatctgcggggaccgggcgacgggcaagcactacggggccagctcctgcgacggctgcaagggcttcttccgccggagcgtccgcaagaaccacatgtactcctgccggttcagccgccagtgcgtggtggacaaggacaagcggaaccagtgccgctactgccggctgaagaagtgcttccgcgccgggatgaagaaggaggccgtccagaacgagcgggaccgcatctccacccggcgcgcggcctacgaggacagctccctgcccagcatcaacgccctcctgcaggccgaggtgctgtcccggcagatcaccagccccgtgtccggcatcaacggggacatccgcgccaagaagatcgcgagcatcgccgacgtctgcgagtccatgaaggagcagctcctggtgctggtggagtgggccaagtacatcccggccttctgcgagctccccctggacgaccaggtcgccctgctccgggcgcacgccggcgagcacctcctgctgggggccaccaagcgcagcatggtgttcaaggacgtgctgctgctcggcaacgactacatcgtcccccggcactgccccgagctggccgagatgagccgcgtgtccatccggatcctggacgagctcgtgctgccgttccaggagctgcagatcgacgacaacgagtacgcctacctcaaggcgatcatcttcttcgaccccgacgccaagggcctgagcgaccccgggaagatcaagcgcctgcgctcccaggtccaggtgagcctcgaggactacatcaacgaccggcagtacgactcccgcggccggttcggggagctgctgctcctgctgcccacgctccagagcatcacctggcagatgatcgagcagatccagttcatcaagctgttcggcatggccaagatcgacaacctgctccaggagatgctgctgggcgggtccccgagcgacgcgccccacgcccaccaccccctccacccccacctgatgcaggagcacatgggcaccaacgtgatcgtcgccaacaccatgccgacgcacctgtccaacgggcagatgtgcgagtggccccgcccccggggccaggccgccacccccgagaccccgcagcccagcccgcccgggggctccggcagcgagccctacaagctgctccccggggccgtggcgaccatcgtgaagcccctgtccgccatcccccagccgacgatcaccaagcaggaggtcatctgaggactagttataagactgactagcccgatgggcctcccaacgggccctcctcccctccttgcaccgagattaataaaaaaaaaaaaaaaaaaaaaaaaaaaaaaaaaaaaaaaaaaaaaaaaaaaaaaaaaaaaaaaatgcatcccccccccccccccccccccccccccccccaaaggctcttttcagagccaccagaatt

SEQ ID NO: 2517 - RNA, 1531 nt, synthetic construct
  misc_feature 1..1531: note = mRNA i-3 (A64-N5-C30-hSL-N5) (opt1) from Homo sapiens__NP_000448.3__HNF4A(39-474)(S142E_S143E)
  source 1..1531: mol_type = other RNA
aggagaaagcttaccatggacaccagcccgtccgaggggaccaacctgaacgcccccaacagcctgggcgtgtccgccctctgcgccatctgcggggaccgggcgacgggcaagcactacggggccagctcctgcgacggctgcaagggcttcttccgccggagcgtccgcaagaaccacatgtactcctgccggttcagccgccagtgcgtggtggacaaggacaagcggaaccagtgccgctactgccggctgaagaagtgcttccgcgccgggatgaagaaggaggccgtccagaacgagcgggaccgcatctccacccggcgcgaggagtacgaggacagctccctgcccagcatcaacgcgctcctgcaggccgaggtgctgtcccggcagatcaccagccccgtgtccggcatcaacggggacatccgcgccaagaagatcgccagcatcgccgacgtctgcgagtccatgaaggagcagctcctggtgctggtggagtgggcgaagtacatcccggccttctgcgagctccccctggacgaccaggtcgccctgctccgggcccacgccggcgagcacctcctgctgggggcgaccaagcgcagcatggtgttcaaggacgtgctgctgctcggcaacgactacatcgtcccccggcactgccccgagctggccgagatgagccgcgtgtccatccggatcctggacgagctcgtgctgccgttccaggagctgcagatcgacgacaacgagtacgcctacctcaaggccatcatcttcttcgaccccgacgccaagggcctgagcgaccccgggaagatcaagcgcctgcgctcccaggtccaggtgagcctcgaggactacatcaacgaccggcagtacgactcccgcggccggttcggggagctgctgctcctgctgcccacgctccagagcatcacctggcagatgatcgagcagatccagttcatcaagctgttcggcatggcgaagatcgacaacctgctccaggagatgctgctgggcgggtccccgagcgacgcgccccacgcccaccaccccctccacccccacctgatgcaggagcacatgggcaccaacgtgatcgtcgccaacaccatgccgacgcacctgtccaacgggcagatgtgcgagtggccccgcccccggggccaggccgccacccccgagaccccgcagcccagcccgcccgggggctccggcagcgagccctacaagctgctccccggggccgtggccaccatcgtgaagcccctgtccgccatcccccagccgacgatcaccaagcaggaggtcatctgaggactagttataagactgactagcccgatgggcctcccaacgggccctcctcccctccttgcaccgagattaataaaaaaaaaaaaaaaaaaaaaaaaaaaaaaaaaaaaaaaaaaaaaaaaaaaaaaaaaaaaaaaatgcatcccccccccccccccccccccccccccccccaaaggctcttttcagagccaccagaatt

SEQ ID NO: 2518 - RNA, 1531 nt, synthetic construct
  misc_feature 1..1531: note = mRNA i-3 (A64-N5-C30-hSL-N5) (opt1) from Homo sapiens__NP_000448.3__HNF4A(39-474)(S143A)
  source 1..1531: mol_type = other RNA
aggagaaagcttaccatggacaccagcccgtccgaggggaccaacctgaacgcccccaacagcctgggcgtgtccgccctctgcgccatctgcggggaccgggcgacgggcaagcactacggggccagctcctgcgacggctgcaagggcttcttccgccggagcgtccgcaagaaccacatgtactcctgccggttcagccgccagtgcgtggtggacaaggacaagcggaaccagtgccgctactgccggctgaagaagtgcttccgcgccgggatgaagaaggaggccgtccagaacgagcgggaccgcatctccacccggcgcagcgcgtacgaggactccagcctgccctccatcaacgccctcctgcaggccgaggtgctgagccggcagatcacctcccccgtgagcggcatcaacggggacatccgcgccaagaagatcgcctccatcgcggacgtctgcgagagcatgaaggagcagctcctggtgctggtggagtgggccaagtacatcccggccttctgcgagctccccctggacgaccaggtcgccctgctccgggcccacgcgggcgagcacctcctgctgggggccaccaagcgcagcatggtgttcaaggacgtgctgctgctcggcaacgactacatcgtcccccggcactgccccgagctggccgagatgtcccgcgtgagcatccggatcctggacgagctcgtgctgccgttccaggagctgcagatcgacgacaacgagtacgcctacctcaaggccatcatcttcttcgaccccgacgcgaagggcctgtccgaccccgggaagatcaagcgcctgcgcagccaggtccaggtgtccctcgaggactacatcaacgaccggcagtacgacagccgcggccggttcggggagctgctgctcctgctgcccacgctccagtccatcacctggcagatgatcgagcagatccagttcatcaagctgttcggcatggccaagatcgacaacctgctccaggagatgctgctgggcgggagcccgtccgacgcgccccacgcccaccaccccctccacccccacctgatgcaggagcacatgggcaccaacgtgatcgtcgccaacaccatgccgacgcacctgagcaacgggcagatgtgcgagtggccccgcccccggggccaggccgccacccccgagaccccgcagccctccccgcccgggggcagcggctccgagccctacaagctgctccccggggccgtggccaccatcgtgaagcccctgagcgcgatcccccagccgacgatcaccaagcaggaggtcatctgaggactagttataagactgactagcccgatgggcctcccaacgggccctcctcccctccttgcaccgagattaataaaaaaaaaaaaaaaaaaaaaaaaaaaaaaaaaaaaaaaaaaaaaaaaaaaaaaaaaaaaaaaatgcatcccccccccccccccccccccccccccccccaaaggctcttttcagagccaccagaatt

SEQ ID NO: 2519 - RNA, 1531 nt, synthetic construct
  misc_feature 1..1531: note = mRNA i-3 (A64-N5-C30-hSL-N5) (opt1) from Homo sapiens__NP_000448.3__HNF4A(39-474)(T166A)
  source 1..1531: mol_type = other RNA
aggagaaagcttaccatggacaccagcccgtccgaggggaccaacctgaacgcccccaacagcctgggcgtgtccgccctctgcgccatctgcggggaccgggcgacgggcaagcactacggggccagctcctgcgacggctgcaagggcttcttccgccggagcgtccgcaagaaccacatgtactcctgccggttcagccgccagtgcgtggtggacaaggacaagcggaaccagtgccgctactgccggctgaagaagtgcttccgcgccgggatgaagaaggaggccgtccagaacgagcgggaccgcatctccacccggcgcagctcctacgaggacagctccctgcccagcatcaacgcgctcctgcaggccgaggtgctgtcccggcagatcgccagccccgtgtccggcatcaacggggacatccgcgccaagaagatcgccagcatcgcggacgtctgcgagagcatgaaggagcagctcctggtgctggtggagtgggccaagtacatcccggccttctgcgagctccccctggacgaccaggtcgccctgctccgggcccacgcgggcgagcacctcctgctgggggccaccaagcgctccatggtgttcaaggacgtgctgctgctcggcaacgactacatcgtcccccggcactgccccgagctggccgagatgagccgcgtgtccatccggatcctggacgagctcgtgctgccgttccaggagctgcagatcgacgacaacgagtacgcctacctcaaggccatcatcttcttcgaccccgacgcgaagggcctgagcgaccccgggaagatcaagcgcctgcgctcccaggtccaggtgagcctcgaggactacatcaacgaccggcagtacgactcccgcggccggttcggggagctgctgctcctgctgcccaccctccagagcatcacgtggcagatgatcgagcagatccagttcatcaagctgttcggcatggccaagatcgacaacctgctccaggagatgctgctgggcgggtccccgagcgacgcgccccacgcccaccaccccctccacccccacctgatgcaggagcacatgggcaccaacgtgatcgtcgccaacaccatgccgacccacctgtccaacgggcagatgtgcgagtggccccgcccccggggccaggccgccacgcccgagaccccgcagcccagcccgcccgggggctccggcagcgagccctacaagctgctccccggggccgtggccaccatcgtgaagcccctgtccgcgatcccccagccgaccatcacgaagcaggaggtcatctgaggactagttataagactgactagcccgatgggcctcccaacgggccctcctcccctccttgcaccgagattaataaaaaaaaaaaaaaaaaaaaaaaaaaaaaaaaaaaaaaaaaaaaaaaaaaaaaaaaaaaaaaaatgcatcccccccccccccccccccccccccccccccaaaggctcttttcagagccaccagaatt

SEQ ID NO: 2520 - RNA, 1531 nt, synthetic construct
  misc_feature 1..1531: note = mRNA i-3 (A64-N5-C30-hSL-N5) (opt1) from Homo sapiens__NP_000448.3__HNF4A(39-474)(S167E)
  source 1..1531: mol_type = other RNA
aggagaaagcttaccatggacaccagcccgtccgaggggaccaacctgaacgcccccaacagcctgggcgtgtccgccctctgcgccatctgcggggaccgggcgacgggcaagcactacggggccagctcctgcgacggctgcaagggcttcttccgccggagcgtccgcaagaaccacatgtactcctgccggttcagccgccagtgcgtggtggacaaggacaagcggaaccagtgccgctactgccggctgaagaagtgcttccgcgccgggatgaagaaggaggccgtccagaacgagcgggaccgcatctccacccggcgcagctcctacgaggacagctccctgcccagcatcaacgcgctcctgcaggccgaggtgctgtcccggcagatcaccgagcccgtgagcggcatcaacggggacatccgcgccaagaagatcgcctccatcgccgacgtctgcgagagcatgaaggagcagctcctggtgctggtggagtgggcgaagtacatcccggccttctgcgagctccccctggacgaccaggtcgccctgctccgggcccacgccggcgagcacctcctgctgggggcgaccaagcgcagcatggtgttcaaggacgtgctgctgctcggcaacgactacatcgtcccccggcactgccccgagctggccgagatgtcccgcgtgagcatccggatcctggacgagctcgtgctgccgttccaggagctgcagatcgacgacaacgagtacgcctacctcaaggccatcatcttcttcgaccccgacgccaagggcctgtccgaccccgggaagatcaagcgcctgcgcagccaggtccaggtgtccctcgaggactacatcaacgaccggcagtacgacagccgcggccggttcggggagctgctgctcctgctgcccacgctccagtccatcacctggcagatgatcgagcagatccagttcatcaagctgttcggcatggcgaagatcgacaacctgctccaggagatgctgctgggcgggagcccgtccgacgcgccccacgcccaccaccccctccacccccacctgatgcaggagcacatgggcaccaacgtgatcgtcgccaacaccatgccgacgcacctgagcaacgggcagatgtgcgagtggccccgcccccggggccaggccgccacccccgagaccccgcagccctccccgcccgggggcagcggctccgagccctacaagctgctccccggggccgtggccaccatcgtgaagcccctgagcgccatcccccagccgacgatcaccaagcaggaggtcatctgaggactagttataagactgactagcccgatgggcctcccaacgggccctcctcccctccttgcaccgagattaataaaaaaaaaaaaaaaaaaaaaaaaaaaaaaaaaaaaaaaaaaaaaaaaaaaaaaaaaaaaaaaatgcatcccccccccccccccccccccccccccccccaaaggctcttttcagagccaccagaatt

SEQ ID NO: 2521 - RNA, 1531 nt, synthetic construct
  misc_feature 1..1531: note = mRNA i-3 (A64-N5-C30-hSL-N5) (opt1) from Homo sapiens__NP_000448.3__HNF4A(39-474)(S167A)
  source 1..1531: mol_type = other RNA
aggagaaagcttaccatggacaccagcccgtccgaggggaccaacctgaacgcccccaacagcctgggcgtgtccgccctctgcgccatctgcggggaccgggcgacgggcaagcactacggggccagctcctgcgacggctgcaagggcttcttccgccggagcgtccgcaagaaccacatgtactcctgccggttcagccgccagtgcgtggtggacaaggacaagcggaaccagtgccgctactgccggctgaagaagtgcttccgcgccgggatgaagaaggaggccgtccagaacgagcgggaccgcatctccacccggcgcagctcctacgaggacagctccctgcccagcatcaacgcgctcctgcaggccgaggtgctgtcccggcagatcaccgcccccgtgagcggcatcaacggggacatccgcgccaagaagatcgcctccatcgcggacgtctgcgagagcatgaaggagcagctcctggtgctggtggagtgggccaagtacatcccggccttctgcgagctccccctggacgaccaggtcgccctgctccgggcccacgcgggcgagcacctcctgctgggggccaccaagcgcagcatggtgttcaaggacgtgctgctgctcggcaacgactacatcgtcccccggcactgccccgagctggccgagatgtcccgcgtgagcatccggatcctggacgagctcgtgctgccgttccaggagctgcagatcgacgacaacgagtacgcctacctcaaggccatcatcttcttcgaccccgacgcgaagggcctgtccgaccccgggaagatcaagcgcctgcgcagccaggtccaggtgtccctcgaggactacatcaacgaccggcagtacgacagccgcggccggttcggggagctgctgctcctgctgcccacgctccagtccatcacctggcagatgatcgagcagatccagttcatcaagctgttcggcatggccaagatcgacaacctgctccaggagatgctgctgggcgggagcccgtccgacgcgccccacgcccaccaccccctccacccccacctgatgcaggagcacatgggcaccaacgtgatcgtcgccaacaccatgccgacgcacctgagcaacgggcagatgtgcgagtggccccgcccccggggccaggccgccacccccgagaccccgcagccctccccgcccgggggcagcggctccgagccctacaagctgctccccggggccgtggccaccatcgtgaagcccctgagcgcgatcccccagccgacgatcaccaagcaggaggtcatctgaggactagttataagactgactagcccgatgggcctcccaacgggccctcctcccctccttgcaccgagattaataaaaaaaaaaaaaaaaaaaaaaaaaaaaaaaaaaaaaaaaaaaaaaaaaaaaaaaaaaaaaaaatgcatcccccccccccccccccccccccccccccccaaaggctcttttcagagccaccagaatt

SEQ ID NO: 2522 - RNA, 1531 nt, synthetic construct
  misc_feature 1..1531: note = mRNA i-3 (A64-N5-C30-hSL-N5) (opt1) from Homo sapiens__NP_000448.3__HNF4A(39-474)(S167A_S378A_T429A_T432A _S436A)
  source 1..1531: mol_type = other RNA
aggagaaagcttaccatggacaccagcccgtccgaggggaccaacctgaacgcccccaacagcctgggcgtgtccgccctctgcgccatctgcggggaccgggcgacgggcaagcactacggggccagctcctgcgacggctgcaagggcttcttccgccggagcgtccgcaagaaccacatgtactcctgccggttcagccgccagtgcgtggtggacaaggacaagcggaaccagtgccgctactgccggctgaagaagtgcttccgcgccgggatgaagaaggaggccgtccagaacgagcgggaccgcatctccacccggcgcagctcctacgaggacagctccctgcccagcatcaacgcgctcctgcaggccgaggtgctgtcccggcagatcaccgcccccgtgagcggcatcaacggggacatccgcgccaagaagatcgcctccatcgcggacgtctgcgagagcatgaaggagcagctcctggtgctggtggagtgggccaagtacatcccggccttctgcgagctccccctggacgaccaggtcgccctgctccgggcccacgcgggcgagcacctcctgctgggggccaccaagcgcagcatggtgttcaaggacgtgctgctgctcggcaacgactacatcgtcccccggcactgccccgagctggccgagatgtcccgcgtgagcatccggatcctggacgagctcgtgctgccgttccaggagctgcagatcgacgacaacgagtacgcctacctcaaggccatcatcttcttcgaccccgacgcgaagggcctgtccgaccccgggaagatcaagcgcctgcgcagccaggtccaggtgtccctcgaggactacatcaacgaccggcagtacgacagccgcggccggttcggggagctgctgctcctgctgcccacgctccagtccatcacctggcagatgatcgagcagatccagttcatcaagctgttcggcatggccaagatcgacaacctgctccaggagatgctgctgggcggggccccgagcgacgcgccccacgcccaccaccccctccacccccacctgatgcaggagcacatgggcaccaacgtgatcgtcgccaacaccatgccgacgcacctgtccaacgggcagatgtgcgagtggccccgcccccggggccaggccgccgcccccgaggcgccgcagcccgccccgcccgggggcagcggctccgagccctacaagctgctccccggggccgtggccaccatcgtgaagcccctgagcgccatcccccagccgaccatcaccaagcaggaggtcatctgaggactagttataagactgactagcccgatgggcctcccaacgggccctcctcccctccttgcaccgagattaataaaaaaaaaaaaaaaaaaaaaaaaaaaaaaaaaaaaaaaaaaaaaaaaaaaaaaaaaaaaaaaatgcatcccccccccccccccccccccccccccccccaaaggctcttttcagagccaccagaatt

SEQ ID NO: 2523 - RNA, 1531 nt, synthetic construct
  misc_feature 1..1531: note = mRNA i-3 (A64-N5-C30-hSL-N5) (opt1) from Homo sapiens__NP_000448.3__HNF4A(39-474)(S167E_S378E_T429E_T432E _S436E)
  source 1..1531: mol_type = other RNA
aggagaaagcttaccatggacaccagcccgtccgaggggaccaacctgaacgcccccaacagcctgggcgtgtccgccctctgcgccatctgcggggaccgggcgacgggcaagcactacggggccagctcctgcgacggctgcaagggcttcttccgccggagcgtccgcaagaaccacatgtactcctgccggttcagccgccagtgcgtggtggacaaggacaagcggaaccagtgccgctactgccggctgaagaagtgcttccgcgccgggatgaagaaggaggccgtccagaacgagcgggaccgcatctccacccggcgcagctcctacgaggacagctccctgcccagcatcaacgcgctcctgcaggccgaggtgctgtcccggcagatcaccgagcccgtgagcggcatcaacggggacatccgcgccaagaagatcgcctccatcgccgacgtctgcgagagcatgaaggagcagctcctggtgctggtggagtgggcgaagtacatcccggccttctgcgagctccccctggacgaccaggtcgccctgctccgggcccacgccggcgagcacctcctgctgggggcgaccaagcgcagcatggtgttcaaggacgtgctgctgctcggcaacgactacatcgtcccccggcactgccccgagctggccgagatgtcccgcgtgagcatccggatcctggacgagctcgtgctgccgttccaggagctgcagatcgacgacaacgagtacgcctacctcaaggccatcatcttcttcgaccccgacgccaagggcctgtccgaccccgggaagatcaagcgcctgcgcagccaggtccaggtgtccctcgaggactacatcaacgaccggcagtacgacagccgcggccggttcggggagctgctgctcctgctgcccacgctccagtccatcacctggcagatgatcgagcagatccagttcatcaagctgttcggcatggcgaagatcgacaacctgctccaggagatgctgctgggcggggagccgagcgacgcgccccacgcccaccaccccctccacccccacctgatgcaggagcacatgggcaccaacgtgatcgtcgccaacaccatgccgacgcacctgtccaacgggcagatgtgcgagtggccccgcccccggggccaggccgccgagcccgaggagccgcagcccgagccgcccgggggcagcggctccgagccctacaagctgctccccggggccgtggccaccatcgtgaagcccctgagcgccatcccccagccgaccatcaccaagcaggaggtcatctgaggactagttataagactgactagcccgatgggcctcccaacgggccctcctcccctccttgcaccgagattaataaaaaaaaaaaaaaaaaaaaaaaaaaaaaaaaaaaaaaaaaaaaaaaaaaaaaaaaaaaaaaaatgcatcccccccccccccccccccccccccccccccaaaggctcttttcagagccaccagaatt

SEQ ID NO: 2524 - RNA, 1531 nt, synthetic construct
  misc_feature 1..1531: note = mRNA i-3 (A64-N5-C30-hSL-N5) (opt1) from Homo sapiens__NP_000448.3__HNF4A(39-474)(S87A)
  source 1..1531: mol_type = other RNA
aggagaaagcttaccatggacaccagcccgtccgaggggaccaacctgaacgcccccaacagcctgggcgtgtccgccctctgcgccatctgcggggaccgggcgacgggcaagcactacggggccagctcctgcgacggctgcaagggcttcttccgccgggccgtccgcaagaaccacatgtacagctgccggttctcccgccagtgcgtggtggacaaggacaagcggaaccagtgccgctactgccggctgaagaagtgcttccgcgccgggatgaagaaggaggcggtccagaacgagcgggaccgcatcagcacccggcgctccagctacgaggactccagcctgccctccatcaacgccctcctgcaggccgaggtgctgagccggcagatcacctcccccgtgagcggcatcaacggggacatccgcgccaagaagatcgcctccatcgcggacgtctgcgagagcatgaaggagcagctcctggtgctggtggagtgggccaagtacatcccggccttctgcgagctccccctggacgaccaggtcgccctgctccgggcccacgcgggcgagcacctcctgctgggggccaccaagcgcagcatggtgttcaaggacgtgctgctgctcggcaacgactacatcgtcccccggcactgccccgagctggccgagatgtcccgcgtgagcatccggatcctggacgagctcgtgctgccgttccaggagctgcagatcgacgacaacgagtacgcctacctcaaggccatcatcttcttcgaccccgacgcgaagggcctgtccgaccccgggaagatcaagcgcctgcgcagccaggtccaggtgtccctcgaggactacatcaacgaccggcagtacgacagccgcggccggttcggggagctgctgctcctgctgcccacgctccagtccatcacctggcagatgatcgagcagatccagttcatcaagctgttcggcatggccaagatcgacaacctgctccaggagatgctgctgggcgggagcccgtccgacgcgccccacgcccaccaccccctccacccccacctgatgcaggagcacatgggcaccaacgtgatcgtcgccaacaccatgccgacgcacctgagcaacgggcagatgtgcgagtggccccgcccccggggccaggccgccacccccgagaccccgcagccctccccgcccgggggcagcggctccgagccctacaagctgctccccggggccgtggccaccatcgtgaagcccctgagcgcgatcccccagccgacgatcaccaagcaggaggtcatctgaggactagttataagactgactagcccgatgggcctcccaacgggccctcctcccctccttgcaccgagattaataaaaaaaaaaaaaaaaaaaaaaaaaaaaaaaaaaaaaaaaaaaaaaaaaaaaaaaaaaaaaaaatgcatcccccccccccccccccccccccccccccccaaaggctcttttcagagccaccagaatt

SEQ ID NO: 2525 - RNA, 1531 nt, synthetic construct
  misc_feature 1..1531: note = mRNA i-3 (A64-N5-C30-hSL-N5) (opt1) from Homo sapiens__NP_000448.3__HNF4A(39-474)(S87E)
  source 1..1531: mol_type = other RNA
aggagaaagcttaccatggacaccagcccgtccgaggggaccaacctgaacgcccccaacagcctgggcgtgtccgccctctgcgccatctgcggggaccgggcgacgggcaagcactacggggccagctcctgcgacggctgcaagggcttcttccgccgggaggtccgcaagaaccacatgtacagctgccggttctcccgccagtgcgtggtggacaaggacaagcggaaccagtgccgctactgccggctgaagaagtgcttccgcgccgggatgaagaaggaggccgtccagaacgagcgggaccgcatcagcacccggcgctccagctacgaggactccagcctgccctccatcaacgcgctcctgcaggccgaggtgctgagccggcagatcacctcccccgtgagcggcatcaacggggacatccgcgccaagaagatcgcctccatcgccgacgtctgcgagagcatgaaggagcagctcctggtgctggtggagtgggcgaagtacatcccggccttctgcgagctccccctggacgaccaggtcgccctgctccgggcccacgccggcgagcacctcctgctgggggcgaccaagcgcagcatggtgttcaaggacgtgctgctgctcggcaacgactacatcgtcccccggcactgccccgagctggccgagatgtcccgcgtgagcatccggatcctggacgagctcgtgctgccgttccaggagctgcagatcgacgacaacgagtacgcctacctcaaggccatcatcttcttcgaccccgacgccaagggcctgtccgaccccgggaagatcaagcgcctgcgcagccaggtccaggtgtccctcgaggactacatcaacgaccggcagtacgacagccgcggccggttcggggagctgctgctcctgctgcccacgctccagtccatcacctggcagatgatcgagcagatccagttcatcaagctgttcggcatggcgaagatcgacaacctgctccaggagatgctgctgggcgggagcccgtccgacgcgccccacgcccaccaccccctccacccccacctgatgcaggagcacatgggcaccaacgtgatcgtcgccaacaccatgccgacgcacctgagcaacgggcagatgtgcgagtggccccgcccccggggccaggccgccacccccgagaccccgcagccctccccgcccgggggcagcggctccgagccctacaagctgctccccggggccgtggccaccatcgtgaagcccctgagcgccatcccccagccgacgatcaccaagcaggaggtcatctgaggactagttataagactgactagcccgatgggcctcccaacgggccctcctcccctccttgcaccgagattaataaaaaaaaaaaaaaaaaaaaaaaaaaaaaaaaaaaaaaaaaaaaaaaaaaaaaaaaaaaaaaaatgcatcccccccccccccccccccccccccccccccaaaggctcttttcagagccaccagaatt

SEQ ID NO: 2526 - RNA, 1531 nt, synthetic construct
  misc_feature 1..1531: note = mRNA i-3 (A64-N5-C30-hSL-N5) (opt1) from Homo sapiens__NP_000448.3__HNF4A(39-474)(R2V)
  source 1..1531: mol_type = other RNA
aggagaaagcttaccatggacaccagcccgtccgaggggaccaacctgaacgcccccaacagcctgggcgtgtccgccctctgcgccatctgcggggaccgcgcgacgggcaagcactacggggccagctcctgcgacggctgcaagggcttcttccggcgcagcgtgcggaagaaccacatgtactcctgccgcttcagccggcagtgcgtggtcgacaaggacaagcgcaaccagtgccggtactgccgcctgaagaagtgcttccgggccgggatgaagaaggaggccgtgcagaacgagcgcgaccggatctccacccgccggagctcctacgaggacagctccctgcccagcatcaacgcgctcctgcaggccgaggtgctgtcccgccagatcaccagccccgtctccggcatcaacggggacatccgggccaagaagatcgccagcatcgccgacgtgtgcgagagcatgaaggagcagctcctggtgctggtcgagtgggcgaagtacatcccggccttctgcgagctccccctggacgaccaggtggccctgctccgcgcccacgccggcgagcacctcctgctgggggcgaccaagcggtccatggtgttcaaggacgtcctgctgctcggcaacgactacatcgtgccccgccactgccccgagctggccgagatgagccgggtgtccatccgcatcctggacgagctcgtcctgccgttccaggagctgcagatcgacgacaacgagtacgcctacctcaaggccatcatcttcttcgaccccgacgccaagggcctgagcgaccccgggaagatcaagcggctgcgctcccaggtccaggtgagcctcgaggactacatcaacgaccgccagtacgactcccggggccgcttcggggagctgctgctcctgctgcccacgctccagagcatcacctggcagatgatcgagcagatccagttcatcaagctgttcggcatggcgaagatcgacaacctgctccaggagatgctgctgggcgggtccccgagcgacgcgccccacgcccaccaccccctccacccccacctgatgcaggagcacatgggcaccaacgtgatcgtggccaacaccatgccgacgcacctgtccaacgggcagatgtgcgagtggccccggccccgcggccaggccgccacccccgagaccccgcagcccagcccgcccgggggctccggcagcgagccctacaagctgctccccggggccgtggccaccatcgtcaagcccctgtccgccatcccccagccgacgatcaccaagcaggaggtgatctgaggactagttataagactgactagcccgatgggcctcccaacgggccctcctcccctccttgcaccgagattaataaaaaaaaaaaaaaaaaaaaaaaaaaaaaaaaaaaaaaaaaaaaaaaaaaaaaaaaaaaaaaaatgcatcccccccccccccccccccccccccccccccaaaggctcttttcagagccaccagaatt

SEQ ID NO: 2527 - RNA, 1531 nt, synthetic construct
  misc_feature 1..1531: note = mRNA i-3 (A64-N5-C30-hSL-N5) (opt1) from Homo sapiens__NP_000448.3__HNF4A(39-474)(R2V_K5V)
  source 1..1531: mol_type = other RNA
aggagaaagcttaccatggacaccagcccgtccgaggggaccaacctgaacgcccccaacagcctgggcgtgtccgccctctgcgccatctgcggggaccgcgcgacgggcaagcactacggggccagctcctgcgacggctgcaagggcttcttccggcgcagcgtgcggaagaaccacatgtactcctgccgcttcagccggcagtgcgtcgtggacaaggacaagcgcaaccagtgccggtactgccgcctgaagaagtgcttccgggccgggatgaagaaggaggccgtgcagaacgagcgcgaccggatctccacccgccggagctcctacgaggacagctccctgcccagcatcaacgcgctcctgcaggccgaggtcctgtcccgccagatcaccagccccgtgtccggcatcaacggggacatccgggccaagaagatcgccagcatcgccgacgtgtgcgagagcatgaaggagcagctcctggtcctggtggagtgggcgaagtacatcccggccttctgcgagctccccctggacgaccaggtggccctgctccgcgcccacgccggcgagcacctcctgctgggggcgaccaagcggtccatggtcttcaaggacgtgctgctgctcggcaacgactacatcgtgccccgccactgccccgagctggccgagatgagccgggtctccatccgcatcctggacgagctcgtgctgccgttccaggagctgcagatcgacgacaacgagtacgcctacctcaaggccatcatcttcttcgaccccgacgccaagggcctgagcgaccccgggaagatcaagcggctgcgctcccaggtgcaggtcagcctcgaggactacatcaacgaccgccagtacgactcccggggccgcttcggggagctgctgctcctgctgcccacgctccagagcatcacctggcagatgatcgagcagatccagttcatcaagctgttcggcatggcgaagatcgacaacctgctccaggagatgctgctgggcgggtccccgagcgacgcgccccacgcccaccaccccctccacccccacctgatgcaggagcacatgggcaccaacgtgatcgtggccaacaccatgccgacgcacctgtccaacgggcagatgtgcgagtggccccggccccgcggccaggccgccacccccgagaccccgcagcccagcccgcccgggggctccggcagcgagccctacaagctgctccccggggccgtcgccaccatcgtgaagcccctgtccgccatcccccagccgacgatcaccaagcaggaggtcatctgaggactagttataagactgactagcccgatgggcctcccaacgggccctcctcccctccttgcaccgagattaataaaaaaaaaaaaaaaaaaaaaaaaaaaaaaaaaaaaaaaaaaaaaaaaaaaaaaaaaaaaaaaatgcatcccccccccccccccccccccccccccccccaaaggctcttttcagagccaccagaatt

SEQ ID NO: 2528 - RNA, 1531 nt, synthetic construct
  misc_feature 1..1531: note = mRNA i-3 (A64-N5-C30-hSL-N5) (opt1) from Homo sapiens__NP_000448.3__HNF4A(39-474)(K179R_K180R)
  source 1..1531: mol_type = other RNA
aggagaaagcttaccatggacaccagcccgtccgaggggaccaacctgaacgcccccaacagcctgggcgtgtccgccctctgcgccatctgcggggaccgggcgacgggcaagcactacggggccagctcctgcgacggctgcaagggcttcttccgccggagcgtccgcaagaaccacatgtactcctgccggttcagccgccagtgcgtggtggacaaggacaagcggaaccagtgccgctactgccggctgaagaagtgcttccgcgccgggatgaagaaggaggccgtccagaacgagcgggaccgcatctccacccggcgcagctcctacgaggacagctccctgcccagcatcaacgcgctcctgcaggccgaggtgctgtcccggcagatcaccagccccgtgtccggcatcaacggggacatccgcgcccggcgcatcgccagcatcgccgacgtctgcgagagcatgaaggagcagctcctggtgctggtggagtgggcgaagtacatcccggccttctgcgagctccccctggacgaccaggtcgccctgctccgggcccacgccggcgagcacctcctgctgggggcgaccaagcgctccatggtgttcaaggacgtgctgctgctcggcaacgactacatcgtcccccggcactgccccgagctggccgagatgagccgcgtgtccatccgcatcctggacgagctcgtgctgccgttccaggagctgcagatcgacgacaacgagtacgcctacctcaaggccatcatcttcttcgaccccgacgccaagggcctgagcgaccccgggaagatcaagcggctgcgctcccaggtccaggtgagcctcgaggactacatcaacgaccggcagtacgactcccgcggccggttcggggagctgctgctcctgctgcccacgctccagagcatcacctggcagatgatcgagcagatccagttcatcaagctgttcggcatggcgaagatcgacaacctgctccaggagatgctgctgggcgggtccccgagcgacgcgccccacgcccaccaccccctccacccccacctgatgcaggagcacatgggcaccaacgtgatcgtcgccaacaccatgccgacgcacctgtccaacgggcagatgtgcgagtggccccgcccccggggccaggccgccacccccgagaccccgcagcccagcccgcccgggggctccggcagcgagccctacaagctgctccccggggccgtggccaccatcgtgaagcccctgtccgccatcccccagccgacgatcaccaagcaggaggtcatctgaggactagttataagactgactagcccgatgggcctcccaacgggccctcctcccctccttgcaccgagattaataaaaaaaaaaaaaaaaaaaaaaaaaaaaaaaaaaaaaaaaaaaaaaaaaaaaaaaaaaaaaaaatgcatcccccccccccccccccccccccccccccccaaaggctcttttcagagccaccagaatt

SEQ ID NO: 2529 - RNA, 1531 nt, synthetic construct
  misc_feature 1..1531: note = mRNA i-3 (A64-N5-C30-hSL-N5) (opt1) from Homo sapiens__NP_000448.3__HNF4A(39-474)(K234R)
  source 1..1531: mol_type = other RNA
aggagaaagcttaccatggacaccagcccgtccgaggggaccaacctgaacgcccccaacagcctgggcgtgtccgccctctgcgccatctgcggggaccgggcgacgggcaagcactacggggccagctcctgcgacggctgcaagggcttcttccgccggagcgtccgcaagaaccacatgtactcctgccggttcagccgccagtgcgtggtggacaaggacaagcggaaccagtgccgctactgccggctgaagaagtgcttccgcgccgggatgaagaaggaggccgtccagaacgagcgggaccgcatctccacccggcgcagctcctacgaggacagctccctgcccagcatcaacgcgctcctgcaggccgaggtgctgtcccggcagatcaccagccccgtgtccggcatcaacggggacatccgcgccaagaagatcgccagcatcgccgacgtctgcgagagcatgaaggagcagctcctggtgctggtggagtgggcgaagtacatcccggccttctgcgagctccccctggacgaccaggtcgccctgctccgggcccacgccggcgagcacctcctgctgggggcgacccgccggtccatggtgttcaaggacgtgctgctgctcggcaacgactacatcgtcccccgccactgccccgagctggccgagatgagccgggtgtccatccgcatcctggacgagctcgtgctgccgttccaggagctgcagatcgacgacaacgagtacgcctacctcaaggccatcatcttcttcgaccccgacgccaagggcctgagcgaccccgggaagatcaagcgcctgcggtcccaggtccaggtgagcctcgaggactacatcaacgaccgccagtacgactcccggggccgcttcggggagctgctgctcctgctgcccacgctccagagcatcacctggcagatgatcgagcagatccagttcatcaagctgttcggcatggcgaagatcgacaacctgctccaggagatgctgctgggcgggtccccgagcgacgcgccccacgcccaccaccccctccacccccacctgatgcaggagcacatgggcaccaacgtgatcgtcgccaacaccatgccgacgcacctgtccaacgggcagatgtgcgagtggccccggccccgcggccaggccgccacccccgagaccccgcagcccagcccgcccgggggctccggcagcgagccctacaagctgctccccggggccgtggccaccatcgtgaagcccctgtccgccatcccccagccgacgatcaccaagcaggaggtcatctgaggactagttataagactgactagcccgatgggcctcccaacgggccctcctcccctccttgcaccgagattaataaaaaaaaaaaaaaaaaaaaaaaaaaaaaaaaaaaaaaaaaaaaaaaaaaaaaaaaaaaaaaaatgcatcccccccccccccccccccccccccccccccaaaggctcttttcagagccaccagaatt

SEQ ID NO: 2530 - RNA, 1531 nt, synthetic construct
  misc_feature 1..1531: note = mRNA i-3 (A64-N5-C30-hSL-N5) (opt1) from Homo sapiens__NP_000448.3__HNF4A(39-474)(K300R)
  source 1..1531: mol_type = other RNA
aggagaaagcttaccatggacaccagcccgtccgaggggaccaacctgaacgcccccaacagcctgggcgtgtccgccctctgcgccatctgcggggaccgggcgacgggcaagcactacggggccagctcctgcgacggctgcaagggcttcttccgccggagcgtccgcaagaaccacatgtactcctgccggttcagccgccagtgcgtggtggacaaggacaagcggaaccagtgccgctactgccggctgaagaagtgcttccgcgccgggatgaagaaggaggccgtccagaacgagcgggaccgcatctccacccggcgcagctcctacgaggacagctccctgcccagcatcaacgcgctcctgcaggccgaggtgctgtcccggcagatcaccagccccgtgtccggcatcaacggggacatccgcgccaagaagatcgccagcatcgccgacgtctgcgagagcatgaaggagcagctcctggtgctggtggagtgggcgaagtacatcccggccttctgcgagctccccctggacgaccaggtcgccctgctccgggcccacgccggcgagcacctcctgctgggggcgaccaagcgctccatggtgttcaaggacgtgctgctgctcggcaacgactacatcgtcccccggcactgccccgagctggccgagatgagccgcgtgtccatccggatcctggacgagctcgtgctgccgttccaggagctgcagatcgacgacaacgagtacgcctacctcaaggccatcatcttcttcgaccccgacgcccgcggcctgagcgaccccgggaagatcaagcgcctgcggtcccaggtccaggtgagcctcgaggactacatcaacgaccgccagtacgactcccggggccgcttcggggagctgctgctcctgctgcccacgctccagagcatcacctggcagatgatcgagcagatccagttcatcaagctgttcggcatggcgaagatcgacaacctgctccaggagatgctgctgggcgggtccccgagcgacgcgccccacgcccaccaccccctccacccccacctgatgcaggagcacatgggcaccaacgtgatcgtcgccaacaccatgccgacgcacctgtccaacgggcagatgtgcgagtggccccggccccgcggccaggccgccacccccgagaccccgcagcccagcccgcccgggggctccggcagcgagccctacaagctgctccccggggccgtggccaccatcgtgaagcccctgtccgccatcccccagccgacgatcaccaagcaggaggtcatctgaggactagttataagactgactagcccgatgggcctcccaacgggccctcctcccctccttgcaccgagattaataaaaaaaaaaaaaaaaaaaaaaaaaaaaaaaaaaaaaaaaaaaaaaaaaaaaaaaaaaaaaaaatgcatcccccccccccccccccccccccccccccccaaaggctcttttcagagccaccagaatt

SEQ ID NO: 2531 - RNA, 1531 nt, synthetic construct
  misc_feature 1..1531: note = mRNA i-3 (A64-N5-C30-hSL-N5) (opt1) from Homo sapiens__NP_000448.3__HNF4A(39-474)(K300R_K307R_K309R)
  source 1..1531: mol_type = other RNA
aggagaaagcttaccatggacaccagcccgtccgaggggaccaacctgaacgcccccaacagcctgggcgtgtccgccctctgcgccatctgcggggaccgggcgacgggcaagcactacggggccagctcctgcgacggctgcaagggcttcttccgccggagcgtccgcaagaaccacatgtactcctgccggttcagccgccagtgcgtggtggacaaggacaagcggaaccagtgccgctactgccggctgaagaagtgcttccgcgccgggatgaagaaggaggccgtccagaacgagcgggaccgcatctccacccggcgcagctcctacgaggacagctccctgcccagcatcaacgcgctcctgcaggccgaggtgctgtcccggcagatcaccagccccgtgtccggcatcaacggggacatccgcgccaagaagatcgccagcatcgccgacgtctgcgagagcatgaaggagcagctcctggtgctggtggagtgggcgaagtacatcccggccttctgcgagctccccctggacgaccaggtcgccctgctccgggcccacgccggcgagcacctcctgctgggggcgaccaagcgctccatggtgttcaaggacgtgctgctgctcggcaacgactacatcgtcccccggcactgccccgagctggccgagatgagccgcgtgtccatccggatcctggacgagctcgtgctgccgttccaggagctgcagatcgacgacaacgagtacgcctacctcaaggccatcatcttcttcgaccccgacgcccgcggcctgagcgaccccgggcgcatccggcgcctgcggtcccaggtccaggtgagcctcgaggactacatcaacgaccgccagtacgactcccggggccgcttcggggagctgctgctcctgctgcccacgctccagagcatcacctggcagatgatcgagcagatccagttcatcaagctgttcggcatggcgaagatcgacaacctgctccaggagatgctgctgggcgggtccccgagcgacgcgccccacgcccaccaccccctccacccccacctgatgcaggagcacatgggcaccaacgtgatcgtcgccaacaccatgccgacgcacctgtccaacgggcagatgtgcgagtggccccggccccgcggccaggccgccacccccgagaccccgcagcccagcccgcccgggggctccggcagcgagccctacaagctgctccccggggccgtggccaccatcgtgaagcccctgtccgccatcccccagccgacgatcaccaagcaggaggtcatctgaggactagttataagactgactagcccgatgggcctcccaacgggccctcctcccctccttgcaccgagattaataaaaaaaaaaaaaaaaaaaaaaaaaaaaaaaaaaaaaaaaaaaaaaaaaaaaaaaaaaaaaaaatgcatcccccccccccccccccccccccccccccccaaaggctcttttcagagccaccagaatt

SEQ ID NO: 2532 - RNA, 1531 nt, synthetic construct
  misc_feature 1..1531: note = mRNA i-3 (A64-N5-C30-hSL-N5) (opt1) from Homo sapiens__NP_000448.3__HNF4A(39-474)(K447R_K470R)
  source 1..1531: mol_type = other RNA
aggagaaagcttaccatggacaccagcccgtccgaggggaccaacctgaacgcccccaacagcctgggcgtgtccgccctctgcgccatctgcggggaccgggcgacgggcaagcactacggggccagctcctgcgacggctgcaagggcttcttccgccggagcgtccgcaagaaccacatgtactcctgccggttcagccgccagtgcgtggtggacaaggacaagcggaaccagtgccgctactgccggctgaagaagtgcttccgcgccgggatgaagaaggaggccgtccagaacgagcgggaccgcatctccacccggcgcagctcctacgaggacagctccctgcccagcatcaacgcgctcctgcaggccgaggtgctgtcccggcagatcaccagccccgtgtccggcatcaacggggacatccgcgccaagaagatcgccagcatcgccgacgtctgcgagagcatgaaggagcagctcctggtgctggtggagtgggcgaagtacatcccggccttctgcgagctccccctggacgaccaggtcgccctgctccgggcccacgccggcgagcacctcctgctgggggcgaccaagcgctccatggtgttcaaggacgtgctgctgctcggcaacgactacatcgtcccccggcactgccccgagctggccgagatgagccgcgtgtccatccggatcctggacgagctcgtgctgccgttccaggagctgcagatcgacgacaacgagtacgcctacctcaaggccatcatcttcttcgaccccgacgccaagggcctgagcgaccccgggaagatcaagcgcctgcgctcccaggtccaggtgagcctcgaggactacatcaacgaccggcagtacgactcccgcggccggttcggggagctgctgctcctgctgcccacgctccagagcatcacctggcagatgatcgagcagatccagttcatcaagctgttcggcatggcgaagatcgacaacctgctccaggagatgctgctgggcgggtccccgagcgacgcgccccacgcccaccaccccctccacccccacctgatgcaggagcacatgggcaccaacgtgatcgtcgccaacaccatgccgacgcacctgtccaacgggcagatgtgcgagtggccccgcccccggggccaggccgccacccccgagaccccgcagcccagcccgcccgggggctccggcagcgagccctaccgcctgctccccggggccgtggccaccatcgtgaagcccctgtccgccatcccccagccgacgatcacccggcaggaggtcatctgaggactagttataagactgactagcccgatgggcctcccaacgggccctcctcccctccttgcaccgagattaataaaaaaaaaaaaaaaaaaaaaaaaaaaaaaaaaaaaaaaaaaaaaaaaaaaaaaaaaaaaaaaatgcatcccccccccccccccccccccccccccccccaaaggctcttttcagagccaccagaatt

SEQ ID NO: 2533 - RNA, 1531 nt, synthetic construct
  misc_feature 1..1531: note = mRNA i-3 (A64-N5-C30-hSL-N5) (opt1) from Homo sapiens__NP_000448.3__HNF4A(39-474)(K458R)
  source 1..1531: mol_type = other RNA
aggagaaagcttaccatggacaccagcccgtccgaggggaccaacctgaacgcccccaacagcctgggcgtgtccgccctctgcgccatctgcggggaccgggcgacgggcaagcactacggggccagctcctgcgacggctgcaagggcttcttccgccggagcgtccgcaagaaccacatgtactcctgccggttcagccgccagtgcgtggtggacaaggacaagcggaaccagtgccgctactgccggctgaagaagtgcttccgcgccgggatgaagaaggaggccgtccagaacgagcgggaccgcatctccacccggcgcagctcctacgaggacagctccctgcccagcatcaacgcgctcctgcaggccgaggtgctgtcccggcagatcaccagccccgtgtccggcatcaacggggacatccgcgccaagaagatcgccagcatcgccgacgtctgcgagagcatgaaggagcagctcctggtgctggtggagtgggcgaagtacatcccggccttctgcgagctccccctggacgaccaggtcgccctgctccgggcccacgccggcgagcacctcctgctgggggcgaccaagcgctccatggtgttcaaggacgtgctgctgctcggcaacgactacatcgtcccccggcactgccccgagctggccgagatgagccgcgtgtccatccggatcctggacgagctcgtgctgccgttccaggagctgcagatcgacgacaacgagtacgcctacctcaaggccatcatcttcttcgaccccgacgccaagggcctgagcgaccccgggaagatcaagcgcctgcgctcccaggtccaggtgagcctcgaggactacatcaacgaccggcagtacgactcccgcggccggttcggggagctgctgctcctgctgcccacgctccagagcatcacctggcagatgatcgagcagatccagttcatcaagctgttcggcatggcgaagatcgacaacctgctccaggagatgctgctgggcgggtccccgagcgacgcgccccacgcccaccaccccctccacccccacctgatgcaggagcacatgggcaccaacgtgatcgtcgccaacaccatgccgacgcacctgtccaacgggcagatgtgcgagtggccccgcccccggggccaggccgccacccccgagaccccgcagcccagcccgcccgggggctccggcagcgagccctacaagctgctccccggggccgtggccaccatcgtgcgccccctgtccgccatcccccagccgacgatcaccaagcaggaggtcatctgaggactagttataagactgactagcccgatgggcctcccaacgggccctcctcccctccttgcaccgagattaataaaaaaaaaaaaaaaaaaaaaaaaaaaaaaaaaaaaaaaaaaaaaaaaaaaaaaaaaaaaaaaatgcatcccccccccccccccccccccccccccccccaaaggctcttttcagagccaccagaatt

SEQ ID NO: 2534 - RNA, 1531 nt, synthetic construct
  misc_feature 1..1531: note = mRNA i-3 (A64-N5-C30-hSL-N5) (opt1) from Homo sapiens__NP_000448.3__HNF4A(39-474)(K106R_K108R_K126R_K127R )
  source 1..1531: mol_type = other RNA
aggagaaagcttaccatggacaccagcccgtccgaggggaccaacctgaacgcccccaacagcctgggcgtgtccgccctctgcgccatctgcggggaccgggcgacgggcaagcactacggggccagctcctgcgacggctgcaagggcttcttccgccggagcgtccgcaagaaccacatgtactcctgccggttcagccgccagtgcgtggtggaccgggaccgccggaaccagtgccgctactgccggctgaagaagtgcttccgcgccgggatgcggcgcgaggccgtccagaacgagcgggaccgcatctccacccggcgcagctcctacgaggacagctccctgcccagcatcaacgcgctcctgcaggccgaggtgctgtcccggcagatcaccagccccgtgtccggcatcaacggggacatccgcgccaagaagatcgccagcatcgccgacgtctgcgagagcatgaaggagcagctcctggtgctggtggagtgggcgaagtacatcccggccttctgcgagctccccctggacgaccaggtcgccctgctccgggcccacgccggcgagcacctcctgctgggggcgaccaagcgctccatggtgttcaaggacgtgctgctgctcggcaacgactacatcgtcccccgccactgccccgagctggccgagatgagccgggtgtccatccgcatcctggacgagctcgtgctgccgttccaggagctgcagatcgacgacaacgagtacgcctacctcaaggccatcatcttcttcgaccccgacgccaagggcctgagcgaccccgggaagatcaagcggctgcgctcccaggtccaggtgagcctcgaggactacatcaacgaccggcagtacgactcccgcggccggttcggggagctgctgctcctgctgcccacgctccagagcatcacctggcagatgatcgagcagatccagttcatcaagctgttcggcatggcgaagatcgacaacctgctccaggagatgctgctgggcgggtccccgagcgacgcgccccacgcccaccaccccctccacccccacctgatgcaggagcacatgggcaccaacgtgatcgtcgccaacaccatgccgacgcacctgtccaacgggcagatgtgcgagtggccccgcccccggggccaggccgccacccccgagaccccgcagcccagcccgcccgggggctccggcagcgagccctacaagctgctccccggggccgtggccaccatcgtgaagcccctgtccgccatcccccagccgacgatcaccaagcaggaggtcatctgaggactagttataagactgactagcccgatgggcctcccaacgggccctcctcccctccttgcaccgagattaataaaaaaaaaaaaaaaaaaaaaaaaaaaaaaaaaaaaaaaaaaaaaaaaaaaaaaaaaaaaaaaatgcatcccccccccccccccccccccccccccccccaaaggctcttttcagagccaccagaatt

SEQ ID NO: 2535 - RNA, 1531 nt, synthetic construct; identical to SEQ ID NO: 2486
  misc_feature 1..1531: note = mRNA i-3 (A64-N5-C30-hSL-N5) (opt1) from Homo sapiens__NP_000448.3__HNF4A(39-474)(E285Q)
  source 1..1531: mol_type = other RNA

SEQ ID NO: 2536 - RNA, 1531 nt, synthetic construct
  misc_feature 1..1531: note = mRNA i-3 (A64-N5-C30-hSL-N5) (opt1) from Homo sapiens__NP_000448.3__HNF4A(39-474)(T166E)
  source 1..1531: mol_type = other RNA
aggagaaagcttaccatggacaccagcccgtccgaggggaccaacctgaacgcccccaacagcctgggcgtgtccgccctctgcgccatctgcggggaccgggcgacgggcaagcactacggggccagctcctgcgacggctgcaagggcttcttccgccggagcgtccgcaagaaccacatgtactcctgccggttcagccgccagtgcgtggtggacaaggacaagcggaaccagtgccgctactgccggctgaagaagtgcttccgcgccgggatgaagaaggaggccgtccagaacgagcgggaccgcatctccacccggcgcagctcctacgaggacagctccctgcccagcatcaacgcgctcctgcaggccgaggtgctgtcccggcagatcgagagccccgtgtccggcatcaacggggacatccgcgccaagaagatcgccagcatcgccgacgtctgcgagagcatgaaggagcagctcctggtgctggtggagtgggcgaagtacatcccggccttctgcgagctccccctggacgaccaggtcgccctgctccgggcccacgccggcgagcacctcctgctgggggcgaccaagcgctccatggtgttcaaggacgtgctgctgctcggcaacgactacatcgtcccccggcactgccccgagctggccgagatgagccgcgtgtccatccggatcctggacgagctcgtgctgccgttccaggagctgcagatcgacgacaacgagtacgcctacctcaaggccatcatcttcttcgaccccgacgccaagggcctgagcgaccccgggaagatcaagcgcctgcgctcccaggtccaggtgagcctcgaggactacatcaacgaccggcagtacgactcccgcggccggttcggggagctgctgctcctgctgcccaccctccagagcatcacgtggcagatgatcgagcagatccagttcatcaagctgttcggcatggcgaagatcgacaacctgctccaggagatgctgctgggcgggtccccgagcgacgcgccccacgcccaccaccccctccacccccacctgatgcaggagcacatgggcaccaacgtgatcgtcgccaacaccatgccgacccacctgtccaacgggcagatgtgcgagtggccccgcccccggggccaggccgccacgcccgagaccccgcagcccagcccgcccgggggctccggcagcgagccctacaagctgctccccggggccgtggccaccatcgtgaagcccctgtccgccatcccccagccgaccatcacgaagcaggaggtcatctgaggactagttataagactgactagcccgatgggcctcccaacgggccctcctcccctccttgcaccgagattaataaaaaaaaaaaaaaaaaaaaaaaaaaaaaaaaaaaaaaaaaaaaaaaaaaaaaaaaaaaaaaaatgcatcccccccccccccccccccccccccccccccaaaggctcttttcagagccaccagaatt

SEQ ID NO: 2537 - RNA, 1531 nt, synthetic construct
  misc_feature 1..1531: note = mRNA i-3 (A64-N5-C30-hSL-N5) (opt1) from Homo sapiens__NP_000448.3__HNF4A(39-474)(S148A)
  source 1..1531: mol_type = other RNA
aggagaaagcttaccatggacaccagcccgtccgaggggaccaacctgaacgcccccaacagcctgggcgtgtccgccctctgcgccatctgcggggaccgggcgacgggcaagcactacggggccagctcctgcgacggctgcaagggcttcttccgccggagcgtccgcaagaaccacatgtactcctgccggttcagccgccagtgcgtggtggacaaggacaagcggaaccagtgccgctactgccggctgaagaagtgcttccgcgccgggatgaagaaggaggccgtccagaacgagcgggaccgcatctccacccggcgcagctcctacgaggacagcgcgctgccctccatcaacgccctcctgcaggccgaggtgctgagccggcagatcacctcccccgtgagcggcatcaacggggacatccgcgccaagaagatcgcctccatcgcggacgtctgcgagagcatgaaggagcagctcctggtgctggtggagtgggccaagtacatcccggccttctgcgagctccccctggacgaccaggtcgccctgctccgggcccacgcgggcgagcacctcctgctgggggccaccaagcgcagcatggtgttcaaggacgtgctgctgctcggcaacgactacatcgtcccccggcactgccccgagctggccgagatgtcccgcgtgagcatccggatcctggacgagctcgtgctgccgttccaggagctgcagatcgacgacaacgagtacgcctacctcaaggccatcatcttcttcgaccccgacgcgaagggcctgtccgaccccgggaagatcaagcgcctgcgcagccaggtccaggtgtccctcgaggactacatcaacgaccggcagtacgacagccgcggccggttcggggagctgctgctcctgctgcccacgctccagtccatcacctggcagatgatcgagcagatccagttcatcaagctgttcggcatggccaagatcgacaacctgctccaggagatgctgctgggcgggagcccgtccgacgcgccccacgcccaccaccccctccacccccacctgatgcaggagcacatgggcaccaacgtgatcgtcgccaacaccatgccgacgcacctgagcaacgggcagatgtgcgagtggccccgcccccggggccaggccgccacccccgagaccccgcagccctccccgcccgggggcagcggctccgagccctacaagctgctccccggggccgtggccaccatcgtgaagcccctgagcgcgatcccccagccgacgatcaccaagcaggaggtcatctgaggactagttataagactgactagcccgatgggcctcccaacgggccctcctcccctccttgcaccgagattaataaaaaaaaaaaaaaaaaaaaaaaaaaaaaaaaaaaaaaaaaaaaaaaaaaaaaaaaaaaaaaaatgcatcccccccccccccccccccccccccccccccaaaggctcttttcagagccaccagaatt

SEQ ID NO: 2538 - RNA, 1531 nt, synthetic construct
  misc_feature 1..1531: note = mRNA i-3 (A64-N5-C30-hSL-N5) (opt1) from Homo sapiens__NP_000448.3__HNF4A(39-474)(S148E)
  source 1..1531: mol_type = other RNA
aggagaaagcttaccatggacaccagcccgtccgaggggaccaacctgaacgcccccaacagcctgggcgtgtccgccctctgcgccatctgcggggaccgggcgacgggcaagcactacggggccagctcctgcgacggctgcaagggcttcttccgccggagcgtccgcaagaaccacatgtactcctgccggttcagccgccagtgcgtggtggacaaggacaagcggaaccagtgccgctactgccggctgaagaagtgcttccgcgccgggatgaagaaggaggccgtccagaacgagcgggaccgcatctccacccggcgcagctcctacgaggacagcgagctgccctccatcaacgcgctcctgcaggccgaggtgctgagccggcagatcacctcccccgtgagcggcatcaacggggacatccgcgccaagaagatcgcctccatcgccgacgtctgcgagagcatgaaggagcagctcctggtgctggtggagtgggcgaagtacatcccggccttctgcgagctccccctggacgaccaggtcgccctgctccgggcccacgccggcgagcacctcctgctgggggcgaccaagcgcagcatggtgttcaaggacgtgctgctgctcggcaacgactacatcgtcccccggcactgccccgagctggccgagatgtcccgcgtgagcatccggatcctggacgagctcgtgctgccgttccaggagctgcagatcgacgacaacgagtacgcctacctcaaggccatcatcttcttcgaccccgacgccaagggcctgtccgaccccgggaagatcaagcgcctgcgcagccaggtccaggtgtccctcgaggactacatcaacgaccggcagtacgacagccgcggccggttcggggagctgctgctcctgctgcccacgctccagtccatcacctggcagatgatcgagcagatccagttcatcaagctgttcggcatggcgaagatcgacaacctgctccaggagatgctgctgggcgggagcccgtccgacgcgccccacgcccaccaccccctccacccccacctgatgcaggagcacatgggcaccaacgtgatcgtcgccaacaccatgccgacgcacctgagcaacgggcagatgtgcgagtggccccgcccccggggccaggccgccacccccgagaccccgcagccctccccgcccgggggcagcggctccgagccctacaagctgctccccggggccgtggccaccatcgtgaagcccctgagcgccatcccccagccgacgatcaccaagcaggaggtcatctgaggactagttataagactgactagcccgatgggcctcccaacgggccctcctcccctccttgcaccgagattaataaaaaaaaaaaaaaaaaaaaaaaaaaaaaaaaaaaaaaaaaaaaaaaaaaaaaaaaaaaaaaaatgcatcccccccccccccccccccccccccccccccaaaggctcttttcagagccaccagaatt

SEQ ID NO: 2539 - RNA, 1531 nt, synthetic construct
  misc_feature 1..1531: note = mRNA i-3 (A64-N5-C30-hSL-N5) (opt1) from Homo sapiens__NP_000448.3__HNF4A(39-474)(S183A)
  source 1..1531: mol_type = other RNA
aggagaaagcttaccatggacaccagcccgtccgaggggaccaacctgaacgcccccaacagcctgggcgtgtccgccctctgcgccatctgcggggaccgggcgacgggcaagcactacggggccagctcctgcgacggctgcaagggcttcttccgccggagcgtccgcaagaaccacatgtactcctgccggttcagccgccagtgcgtggtggacaaggacaagcggaaccagtgccgctactgccggctgaagaagtgcttccgcgccgggatgaagaaggaggccgtccagaacgagcgggaccgcatctccacccggcgcagctcctacgaggacagctccctgcccagcatcaacgcgctcctgcaggccgaggtgctgtcccggcagatcaccagccccgtgtccggcatcaacggggacatccgcgccaagaagatcgccgccatcgcggacgtctgcgagagcatgaaggagcagctcctggtgctggtggagtgggccaagtacatcccggccttctgcgagctccccctggacgaccaggtcgccctgctccgggcccacgcgggcgagcacctcctgctgggggccaccaagcgcagcatggtgttcaaggacgtgctgctgctcggcaacgactacatcgtcccccggcactgccccgagctggccgagatgtcccgcgtgagcatccggatcctggacgagctcgtgctgccgttccaggagctgcagatcgacgacaacgagtacgcctacctcaaggccatcatcttcttcgaccccgacgcgaagggcctgtccgaccccgggaagatcaagcgcctgcgcagccaggtccaggtgtccctcgaggactacatcaacgaccggcagtacgacagccgcggccggttcggggagctgctgctcctgctgcccacgctccagtccatcacctggcagatgatcgagcagatccagttcatcaagctgttcggcatggccaagatcgacaacctgctccaggagatgctgctgggcgggagcccgtccgacgcgccccacgcccaccaccccctccacccccacctgatgcaggagcacatgggcaccaacgtgatcgtcgccaacaccatgccgacgcacctgagcaacgggcagatgtgcgagtggccccgcccccggggccaggccgccacccccgagaccccgcagccctccccgcccgggggcagcggctccgagccctacaagctgctccccggggccgtggccaccatcgtgaagcccctgagcgcgatcccccagccgacgatcaccaagcaggaggtcatctgaggactagttataagactgactagcccgatgggcctcccaacgggccctcctcccctccttgcaccgagattaataaaaaaaaaaaaaaaaaaaaaaaaaaaaaaaaaaaaaaaaaaaaaaaaaaaaaaaaaaaaaaaatgcatcccccccccccccccccccccccccccccccaaaggctcttttcagagccaccagaatt

SEQ ID NO: 2540 - RNA, 1531 nt, synthetic construct
  misc_feature 1..1531: note = mRNA i-3 (A64-N5-C30-hSL-N5) (opt1) from Homo sapiens__NP_000448.3__HNF4A(39-474)(S183E)
  source 1..1531: mol_type = other RNA
aggagaaagcttaccatggacaccagcccgtccgaggggaccaacctgaacgcccccaacagcctgggcgtgtccgccctctgcgccatctgcggggaccgggcgacgggcaagcactacggggccagctcctgcgacggctgcaagggcttcttccgccggagcgtccgcaagaaccacatgtactcctgccggttcagccgccagtgcgtggtggacaaggacaagcggaaccagtgccgctactgccggctgaagaagtgcttccgcgccgggatgaagaaggaggccgtccagaacgagcgggaccgcatctccacccggcgcagctcctacgaggacagctccctgcccagcatcaacgcgctcctgcaggccgaggtgctgtcccggcagatcaccagccccgtgtccggcatcaacggggacatccgcgccaagaagatcgccgagatcgccgacgtctgcgagagcatgaaggagcagctcctggtgctggtggagtgggcgaagtacatcccggccttctgcgagctccccctggacgaccaggtcgccctgctccgggcccacgccggcgagcacctcctgctgggggcgaccaagcgcagcatggtgttcaaggacgtgctgctgctcggcaacgactacatcgtcccccggcactgccccgagctggccgagatgtcccgcgtgagcatccggatcctggacgagctcgtgctgccgttccaggagctgcagatcgacgacaacgagtacgcctacctcaaggccatcatcttcttcgaccccgacgccaagggcctgtccgaccccgggaagatcaagcgcctgcgcagccaggtccaggtgtccctcgaggactacatcaacgaccggcagtacgacagccgcggccggttcggggagctgctgctcctgctgcccacgctccagtccatcacctggcagatgatcgagcagatccagttcatcaagctgttcggcatggcgaagatcgacaacctgctccaggagatgctgctgggcgggagcccgtccgacgcgccccacgcccaccaccccctccacccccacctgatgcaggagcacatgggcaccaacgtgatcgtcgccaacaccatgccgacgcacctgagcaacgggcagatgtgcgagtggccccgcccccggggccaggccgccacccccgagaccccgcagccctccccgcccgggggcagcggctccgagccctacaagctgctccccggggccgtggccaccatcgtgaagcccctgagcgccatcccccagccgacgatcaccaagcaggaggtcatctgaggactagttataagactgactagcccgatgggcctcccaacgggccctcctcccctccttgcaccgagattaataaaaaaaaaaaaaaaaaaaaaaaaaaaaaaaaaaaaaaaaaaaaaaaaaaaaaaaaaaaaaaaatgcatcccccccccccccccccccccccccccccccaaaggctcttttcagagccaccagaatt

SEQ ID NO: 2541 - RNA, 1531 nt, synthetic construct
  misc_feature 1..1531: note = mRNA i-3 (A64-N5-C30-hSL-N5) (opt1) from Homo sapiens__NP_000448.3__HNF4A(39-474)(S461A)
  source 1..1531: mol_type = other RNA
aggagaaagcttaccatggacaccagcccgtccgaggggaccaacctgaacgcccccaacagcctgggcgtgtccgccctctgcgccatctgcggggaccgggcgacgggcaagcactacggggccagctcctgcgacggctgcaagggcttcttccgccggagcgtccgcaagaaccacatgtactcctgccggttcagccgccagtgcgtggtggacaaggacaagcggaaccagtgccgctactgccggctgaagaagtgcttccgcgccgggatgaagaaggaggccgtccagaacgagcgggaccgcatctccacccggcgcagctcctacgaggacagctccctgcccagcatcaacgcgctcctgcaggccgaggtgctgtcccggcagatcaccagccccgtgtccggcatcaacggggacatccgcgccaagaagatcgccagcatcgccgacgtctgcgagagcatgaaggagcagctcctggtgctggtggagtgggcgaagtacatcccggccttctgcgagctccccctggacgaccaggtcgccctgctccgggcccacgccggcgagcacctcctgctgggggcgaccaagcgctccatggtgttcaaggacgtgctgctgctcggcaacgactacatcgtcccccggcactgccccgagctggccgagatgagccgcgtgtccatccggatcctggacgagctcgtgctgccgttccaggagctgcagatcgacgacaacgagtacgcctacctcaaggccatcatcttcttcgaccccgacgccaagggcctgagcgaccccgggaagatcaagcgcctgcgctcccaggtccaggtgagcctcgaggactacatcaacgaccggcagtacgactcccgcggccggttcggggagctgctgctcctgctgcccacgctccagagcatcacctggcagatgatcgagcagatccagttcatcaagctgttcggcatggcgaagatcgacaacctgctccaggagatgctgctgggcgggtccccgagcgacgcgccccacgcccaccaccccctccacccccacctgatgcaggagcacatgggcaccaacgtgatcgtcgccaacaccatgccgacgcacctgtccaacgggcagatgtgcgagtggccccgcccccggggccaggccgccacccccgagaccccgcagcccagcccgcccgggggctccggcagcgagccctacaagctgctccccggggccgtggccaccatcgtgaagcccctggccgcgatcccccagccgacgatcaccaagcaggaggtcatctgaggactagttataagactgactagcccgatgggcctcccaacgggccctcctcccctccttgcaccgagattaataaaaaaaaaaaaaaaaaaaaaaaaaaaaaaaaaaaaaaaaaaaaaaaaaaaaaaaaaaaaaaaatgcatcccccccccccccccccccccccccccccccaaaggctcttttcagagccaccagaatt

SEQ ID NO: 2542 - RNA, 1531 nt, synthetic construct; identical to SEQ ID NO: 2493
  misc_feature 1..1531: note = mRNA i-3 (A64-N5-C30-hSL-N5) (opt1) from Homo sapiens__NP_000448.3__HNF4A(39-474)(S461E)
  source 1..1531: mol_type = other RNA

SEQ ID NO: 2543 - RNA, 1531 nt, synthetic construct
  misc_feature 1..1531: note = mRNA i-3 (A64-N5-C30-hSL-N5) (opt1) from Homo sapiens__NP_000448.3__HNF4A(39-474)(S142A_S143A_S313A)
  source 1..1531: mol_type = other RNA
aggagaaagcttaccatggacaccagcccgtccgaggggaccaacctgaacgcccccaacagcctgggcgtgtccgccctctgcgccatctgcggggaccgggcgacgggcaagcactacggggccagctcctgcgacggctgcaagggcttcttccgccggagcgtccgcaagaaccacatgtactcctgccggttcagccgccagtgcgtggtggacaaggacaagcggaaccagtgccgctactgccggctgaagaagtgcttccgcgccgggatgaagaaggaggccgtccagaacgagcgggaccgcatctccacccggcgcgcggcctacgaggacagctccctgcccagcatcaacgccctcctgcaggccgaggtgctgtcccggcagatcaccagccccgtgtccggcatcaacggggacatccgcgccaagaagatcgcgagcatcgccgacgtctgcgagtccatgaaggagcagctcctggtgctggtggagtgggccaagtacatcccggccttctgcgagctccccctggacgaccaggtcgccctgctccgggcgcacgccggcgagcacctcctgctgggggccaccaagcgcagcatggtgttcaaggacgtgctgctgctcggcaacgactacatcgtcccccggcactgccccgagctggccgagatgagccgcgtgtccatccggatcctggacgagctcgtgctgccgttccaggagctgcagatcgacgacaacgagtacgcctacctcaaggcgatcatcttcttcgaccccgacgccaagggcctgagcgaccccgggaagatcaagcgcctgcgcgcccaggtccaggtgtccctcgaggactacatcaacgaccggcagtacgacagccgcggccggttcggggagctgctgctcctgctgcccacgctccagtccatcacctggcagatgatcgagcagatccagttcatcaagctgttcggcatggccaagatcgacaacctgctccaggagatgctgctgggcgggagcccgtccgacgcgccccacgcccaccaccccctccacccccacctgatgcaggagcacatgggcaccaacgtgatcgtcgccaacaccatgccgacgcacctgagcaacgggcagatgtgcgagtggccccgcccccggggccaggccgccacccccgagaccccgcagccctccccgcccgggggcagcggctccgagccctacaagctgctccccggggcggtggccaccatcgtgaagcccctgagcgccatcccccagccgacgatcaccaagcaggaggtcatctgaggactagttataagactgactagcccgatgggcctcccaacgggccctcctcccctccttgcaccgagattaataaaaaaaaaaaaaaaaaaaaaaaaaaaaaaaaaaaaaaaaaaaaaaaaaaaaaaaaaaaaaaaatgcatcccccccccccccccccccccccccccccccaaaggctcttttcagagccaccagaatt

SEQ ID NO: 2544 - RNA, 1531 nt, synthetic construct
  misc_feature 1..1531: note = mRNA i-3 (A64-N5-C30-hSL-N5) (opt1) from Homo sapiens__NP_000448.3__HNF4A(39-474)(S142A_S143A_S313A_K458R )
  source 1..1531: mol_type = other RNA
aggagaaagcttaccatggacaccagcccgtccgaggggaccaacctgaacgcccccaacagcctgggcgtgtccgccctctgcgccatctgcggggaccgggcgacgggcaagcactacggggccagctcctgcgacggctgcaagggcttcttccgccggagcgtccgcaagaaccacatgtactcctgccggttcagccgccagtgcgtggtggacaaggacaagcggaaccagtgccgctactgccggctgaagaagtgcttccgcgccgggatgaagaaggaggccgtccagaacgagcgggaccgcatctccacccggcgcgcggcctacgaggacagctccctgcccagcatcaacgccctcctgcaggccgaggtgctgtcccggcagatcaccagccccgtgtccggcatcaacggggacatccgcgccaagaagatcgcgagcatcgccgacgtctgcgagtccatgaaggagcagctcctggtgctggtggagtgggccaagtacatcccggccttctgcgagctccccctggacgaccaggtcgccctgctccgggcgcacgccggcgagcacctcctgctgggggccaccaagcgcagcatggtgttcaaggacgtgctgctgctcggcaacgactacatcgtcccccggcactgccccgagctggccgagatgagccgcgtgtccatccggatcctggacgagctcgtgctgccgttccaggagctgcagatcgacgacaacgagtacgcctacctcaaggcgatcatcttcttcgaccccgacgccaagggcctgagcgaccccgggaagatcaagcgcctgcgcgcccaggtccaggtgtccctcgaggactacatcaacgaccggcagtacgacagccgcggccggttcggggagctgctgctcctgctgcccacgctccagtccatcacctggcagatgatcgagcagatccagttcatcaagctgttcggcatggccaagatcgacaacctgctccaggagatgctgctgggcgggagcccgtccgacgcgccccacgcccaccaccccctccacccccacctgatgcaggagcacatgggcaccaacgtgatcgtcgccaacaccatgccgacgcacctgagcaacgggcagatgtgcgagtggccccgcccccggggccaggccgccacccccgagaccccgcagccctccccgcccgggggcagcggctccgagccctacaagctgctccccggggcggtggccaccatcgtgcgccccctgagcgccatcccccagccgacgatcaccaagcaggaggtcatctgaggactagttataagactgactagcccgatgggcctcccaacgggccctcctcccctccttgcaccgagattaataaaaaaaaaaaaaaaaaaaaaaaaaaaaaaaaaaaaaaaaaaaaaaaaaaaaaaaaaaaaaaaatgcatcccccccccccccccccccccccccccccccaaaggctcttttcagagccaccagaatt

SEQ ID NO: 2545 - RNA, 1531 nt, synthetic construct
  misc_feature 1..1531: note = mRNA i-3 (A64-N5-C30-hSL-N5) (opt1) from Homo sapiens__NP_000448.3__HNF4A(39-474)(S142A_S143A_S167A_S313A _S378A_T429A_T432A_S436A_K458R)
  source 1..1531: mol_type = other RNA
aggagaaagcttaccatggacaccagcccgtccgaggggaccaacctgaacgcccccaacagcctgggcgtgtccgccctctgcgccatctgcggggaccgggcgacgggcaagcactacggggccagctcctgcgacggctgcaagggcttcttccgccggagcgtccgcaagaaccacatgtactcctgccggttcagccgccagtgcgtggtggacaaggacaagcggaaccagtgccgctactgccggctgaagaagtgcttccgcgccgggatgaagaaggaggccgtccagaacgagcgggaccgcatctccacccggcgcgcggcctacgaggacagctccctgcccagcatcaacgccctcctgcaggccgaggtgctgtcccggcagatcaccgcccccgtgagcggcatcaacggggacatccgcgcgaagaagatcgcctccatcgccgacgtctgcgagagcatgaaggagcagctcctggtgctggtggagtgggccaagtacatcccggccttctgcgagctccccctggacgaccaggtcgcgctgctccgggcccacgccggcgagcacctcctgctgggggccaccaagcgctccatggtgttcaaggacgtgctgctgctcggcaacgactacatcgtcccccggcactgccccgagctggccgagatgagccgcgtgagcatccggatcctggacgagctcgtgctgccgttccaggagctgcagatcgacgacaacgagtacgcgtacctcaaggccatcatcttcttcgaccccgacgccaagggcctgtccgaccccgggaagatcaagcgcctgcgcgcccaggtccaggtgagcctcgaggactacatcaacgaccggcagtacgactcccgcggccggttcggggagctgctgctcctgctgcccacgctccagagcatcacctggcagatgatcgagcagatccagttcatcaagctgttcggcatggccaagatcgacaacctgctccaggagatgctgctgggcggggcgccgtccgacgcgccccacgcccaccaccccctccacccccacctgatgcaggagcacatgggcaccaacgtgatcgtcgccaacaccatgccgacgcacctgagcaacgggcagatgtgcgagtggccccgcccccggggccaggccgccgcccccgaggccccgcagcccgccccgcccgggggctccggcagcgagccctacaagctgctccccggggcggtggccaccatcgtgcgccccctgtccgccatcccccagccgaccatcaccaagcaggaggtcatctgaggactagttataagactgactagcccgatgggcctcccaacgggccctcctcccctccttgcaccgagattaataaaaaaaaaaaaaaaaaaaaaaaaaaaaaaaaaaaaaaaaaaaaaaaaaaaaaaaaaaaaaaaatgcatcccccccccccccccccccccccccccccccaaaggctcttttcagagccaccagaatt

SEQ ID NO: 2546 - RNA, 1531 nt, synthetic construct
  misc_feature 1..1531: note = mRNA i-3 (A64-N5-C30-hSL-N5) (opt1) from Homo sapiens__NP_000448.3__HNF4A(39-474)(S142A_S143A_S148A_S167A _S313A_S378A_T429A_T432A_S436A_K458R)
  source 1..1531: mol_type = other RNA
aggagaaagcttaccatggacaccagcccgtccgaggggaccaacctgaacgcccccaacagcctgggcgtgtccgccctctgcgccatctgcggggaccgggcgacgggcaagcactacggggccagctcctgcgacggctgcaagggcttcttccgccggagcgtccgcaagaaccacatgtactcctgccggttcagccgccagtgcgtggtggacaaggacaagcggaaccagtgccgctactgccggctgaagaagtgcttccgcgccgggatgaagaaggaggccgtccagaacgagcgggaccgcatctccacccggcgcgcggcctacgaggacagcgccctgccctccatcaacgccctcctgcaggccgaggtgctgagccggcagatcaccgcgcccgtgtccggcatcaacggggacatccgcgccaagaagatcgccagcatcgccgacgtctgcgagtccatgaaggagcagctcctggtgctggtggagtgggccaagtacatcccggcgttctgcgagctccccctggacgaccaggtcgccctgctccgggcccacgccggcgagcacctcctgctgggggccaccaagcgcagcatggtgttcaaggacgtgctgctgctcggcaacgactacatcgtcccccggcactgccccgagctggcggagatgtcccgcgtgagcatccggatcctggacgagctcgtgctgccgttccaggagctgcagatcgacgacaacgagtacgcctacctcaaggccatcatcttcttcgaccccgacgccaagggcctgagcgaccccgggaagatcaagcgcctgcgcgcccaggtccaggtgtccctcgaggactacatcaacgaccggcagtacgacagccgcggccggttcggggagctgctgctcctgctgcccacgctccagtccatcacctggcagatgatcgagcagatccagttcatcaagctgttcggcatggcgaagatcgacaacctgctccaggagatgctgctgggcggggccccgagcgacgcgccccacgcccaccaccccctccacccccacctgatgcaggagcacatgggcaccaacgtgatcgtcgccaacaccatgccgacgcacctgtccaacgggcagatgtgcgagtggccccgcccccggggccaggccgccgcccccgaggccccgcagcccgcgccgcccgggggcagcggctccgagccctacaagctgctccccggggccgtggccaccatcgtgcgccccctgagcgccatcccccagccgaccatcaccaagcaggaggtcatctgaggactagttataagactgactagcccgatgggcctcccaacgggccctcctcccctccttgcaccgagattaataaaaaaaaaaaaaaaaaaaaaaaaaaaaaaaaaaaaaaaaaaaaaaaaaaaaaaaaaaaaaaaatgcatcccccccccccccccccccccccccccccccaaaggctcttttcagagccaccagaatt

SEQ ID NO: 2547 - RNA, 1531 nt, synthetic construct
  misc_feature 1..1531: note = mRNA i-3 (A64-N5-C30-hSL-N5) (opt1) from Homo sapiens__NP_000448.3__HNF4A(39-474)(K106R_K108R_K126R_K127R _S142A_S143A_S148A_S167A_S313A_S378A_T429A_T432A_S436A_K458 R)
  source 1..1531: mol_type = other RNA
aggagaaagcttaccatggacaccagcccgtccgaggggaccaacctgaacgcccccaacagcctgggcgtgtccgccctctgcgccatctgcggggaccgggcgacgggcaagcactacggggccagctcctgcgacggctgcaagggcttcttccgccggagcgtccgcaagaaccacatgtactcctgccggttcagccgccagtgcgtggtggaccgggaccgccggaaccagtgccgctactgccggctgaagaagtgcttccgcgccgggatgcggcgcgaggccgtccagaacgagcgggaccgcatctccacccggcgcgcggcctacgaggacagcgccctgccctccatcaacgccctcctgcaggccgaggtgctgagccggcagatcaccgcgcccgtgtccggcatcaacggggacatccgcgccaagaagatcgccagcatcgccgacgtctgcgagtccatgaaggagcagctcctggtgctggtggagtgggccaagtacatcccggcgttctgcgagctccccctggacgaccaggtcgccctgctccgggcccacgccggcgagcacctcctgctgggggccaccaagcgcagcatggtgttcaaggacgtgctgctgctcggcaacgactacatcgtcccccgccactgccccgagctggcggagatgtcccgggtgagcatccgcatcctggacgagctcgtgctgccgttccaggagctgcagatcgacgacaacgagtacgcctacctcaaggccatcatcttcttcgaccccgacgccaagggcctgagcgaccccgggaagatcaagcggctgcgcgcccaggtccaggtgtccctcgaggactacatcaacgaccggcagtacgacagccgcggccggttcggggagctgctgctcctgctgcccacgctccagtccatcacctggcagatgatcgagcagatccagttcatcaagctgttcggcatggcgaagatcgacaacctgctccaggagatgctgctgggcggggccccgagcgacgcgccccacgcccaccaccccctccacccccacctgatgcaggagcacatgggcaccaacgtgatcgtcgccaacaccatgccgacgcacctgtccaacgggcagatgtgcgagtggccccgcccccggggccaggccgccgcccccgaggccccgcagcccgcgccgcccgggggcagcggctccgagccctacaagctgctccccggggccgtggccaccatcgtgcgccccctgagcgccatcccccagccgaccatcaccaagcaggaggtcatctgaggactagttataagactgactagcccgatgggcctcccaacgggccctcctcccctccttgcaccgagattaataaaaaaaaaaaaaaaaaaaaaaaaaaaaaaaaaaaaaaaaaaaaaaaaaaaaaaaaaaaaaaaatgcatcccccccccccccccccccccccccccccccaaaggctcttttcagagccaccagaatt

SEQ ID NO: 2548 - RNA, 1531 nt, synthetic construct
  misc_feature 1..1531: note = mRNA i-3 (A64-N5-C30-hSL-N5) (opt1) from Homo sapiens__NP_000448.3__HNF4A(39-474)(S142A_S143A_S148A_T166A _S167A_S313A_S378A_T429A_T432A_S436A_K458R)
  source 1..1531: mol_type = other RNA
aggagaaagcttaccatggacaccagcccgtccgaggggaccaacctgaacgcccccaacagcctgggcgtgtccgccctctgcgccatctgcggggaccgggcgacgggcaagcactacggggccagctcctgcgacggctgcaagggcttcttccgccggagcgtccgcaagaaccacatgtactcctgccggttcagccgccagtgcgtggtggacaaggacaagcggaaccagtgccgctactgccggctgaagaagtgcttccgcgccgggatgaagaaggaggccgtccagaacgagcgggaccgcatctccacccggcgcgcggcctacgaggacagcgccctgccctccatcaacgccctcctgcaggccgaggtgctgagccggcagatcgcggcccccgtgtccggcatcaacggggacatccgcgccaagaagatcgccagcatcgccgacgtctgcgagtccatgaaggagcagctcctggtgctggtggagtgggcgaagtacatcccggccttctgcgagctccccctggacgaccaggtcgccctgctccgggcccacgccggcgagcacctcctgctgggggcgaccaagcgcagcatggtgttcaaggacgtgctgctgctcggcaacgactacatcgtcccccggcactgccccgagctggccgagatgtcccgcgtgagcatccggatcctggacgagctcgtgctgccgttccaggagctgcagatcgacgacaacgagtacgcctacctcaaggccatcatcttcttcgaccccgacgccaagggcctgagcgaccccgggaagatcaagcgcctgcgcgcgcaggtccaggtgtccctcgaggactacatcaacgaccggcagtacgacagccgcggccggttcggggagctgctgctcctgctgcccaccctccagtccatcacgtggcagatgatcgagcagatccagttcatcaagctgttcggcatggccaagatcgacaacctgctccaggagatgctgctgggcggggccccgagcgacgcgccccacgcccaccaccccctccacccccacctgatgcaggagcacatgggcaccaacgtgatcgtcgccaacaccatgccgacccacctgtccaacgggcagatgtgcgagtggccccgcccccggggccaggccgccgcccccgaggcgccgcagcccgccccgcccgggggcagcggctccgagccctacaagctgctccccggggccgtggccacgatcgtgcgccccctgagcgccatcccccagccgaccatcaccaagcaggaggtcatctgaggactagttataagactgactagcccgatgggcctcccaacgggccctcctcccctccttgcaccgagattaataaaaaaaaaaaaaaaaaaaaaaaaaaaaaaaaaaaaaaaaaaaaaaaaaaaaaaaaaaaaaaaatgcatcccccccccccccccccccccccccccccccaaaggctcttttcagagccaccagaatt

SEQ ID NO: 2549 - RNA, 1531 nt, synthetic construct
  misc_feature 1..1531: note = mRNA i-3 (A64-N5-C30-hSL-N5) (opt1) from Homo sapiens__NP_000448.3__HNF4A(39-474)(S87A_S142A_S143A_S148A_ T166A_S167A_S313A_S378A_T429A_T432A_S436A_K458R)
  source 1..1531: mol_type = other RNA
aggagaaagcttaccatggacaccagcccgtccgaggggaccaacctgaacgcccccaacagcctgggcgtgtccgccctctgcgccatctgcggggaccgggcgacgggcaagcactacggggccagctcctgcgacggctgcaagggcttcttccgccgggccgtccgcaagaaccacatgtacagctgccggttctcccgccagtgcgtggtggacaaggacaagcggaaccagtgccgctactgccggctgaagaagtgcttccgcgccgggatgaagaaggaggcggtccagaacgagcgggaccgcatcagcacccggcgcgccgcctacgaggactccgccctgcccagcatcaacgccctcctgcaggcggaggtgctgtcccggcagatcgccgcccccgtgagcggcatcaacggggacatccgcgccaagaagatcgcctccatcgcggacgtctgcgagagcatgaaggagcagctcctggtgctggtggagtgggccaagtacatcccggccttctgcgagctccccctggacgaccaggtcgccctgctccgggcccacgcgggcgagcacctcctgctgggggccaccaagcgctccatggtgttcaaggacgtgctgctgctcggcaacgactacatcgtcccccggcactgccccgagctggccgagatgagccgcgtgtccatccggatcctggacgagctcgtgctgccgttccaggagctgcagatcgacgacaacgagtacgcctacctcaaggccatcatcttcttcgaccccgacgcgaagggcctgagcgaccccgggaagatcaagcgcctgcgcgcccaggtccaggtgagcctcgaggactacatcaacgaccggcagtacgactcccgcggccggttcggggagctgctgctcctgctgcccaccctccagagcatcacgtggcagatgatcgagcagatccagttcatcaagctgttcggcatggccaagatcgacaacctgctccaggagatgctgctgggcggggccccgtccgacgcgccccacgcccaccaccccctccacccccacctgatgcaggagcacatgggcaccaacgtgatcgtcgccaacaccatgccgacccacctgagcaacgggcagatgtgcgagtggccccgcccccggggccaggccgccgcgcccgaggccccgcagcccgccccgcccgggggctccggcagcgagccctacaagctgctccccggggccgtggccacgatcgtgcgccccctgtccgcgatcccccagccgaccatcaccaagcaggaggtcatctgaggactagttataagactgactagcccgatgggcctcccaacgggccctcctcccctccttgcaccgagattaataaaaaaaaaaaaaaaaaaaaaaaaaaaaaaaaaaaaaaaaaaaaaaaaaaaaaaaaaaaaaaaatgcatcccccccccccccccccccccccccccccccaaaggctcttttcagagccaccagaatt

SEQ ID NO: 2550 - RNA, 1531 nt, synthetic construct
  misc_feature 1..1531: note = mRNA i-3 (A64-N5-C30-hSL-N5) (opt1) from Homo sapiens__NP_000448.3__HNF4A(39-474)(S87A_K106R_K108R_K126R_ K127R_S142A_S143A_S148A_T166A_S167A_S313A_S378A_T429A_T432A _S436A_K458R)
  source 1..1531: mol_type = other RNA
aggagaaagcttaccatggacaccagcccgtccgaggggaccaacctgaacgcccccaacagcctgggcgtgtccgccctctgcgccatctgcggggaccgggcgacgggcaagcactacggggccagctcctgcgacggctgcaagggcttcttccgccgggccgtccgcaagaaccacatgtacagctgccggttctcccgccagtgcgtggtggaccgggaccgccggaaccagtgccgctactgccggctgaagaagtgcttccgcgccgggatgcggcgcgaggcggtccagaacgagcgggaccgcatcagcacccggcgcgccgcctacgaggactccgccctgcccagcatcaacgccctcctgcaggcggaggtgctgtcccggcagatcgccgcccccgtgagcggcatcaacggggacatccgcgccaagaagatcgcctccatcgcggacgtctgcgagagcatgaaggagcagctcctggtgctggtggagtgggccaagtacatcccggccttctgcgagctccccctggacgaccaggtcgccctgctccgggcccacgcgggcgagcacctcctgctgggggccaccaagcgctccatggtgttcaaggacgtgctgctgctcggcaacgactacatcgtcccccgccactgccccgagctggccgagatgagccgggtgtccatccgcatcctggacgagctcgtgctgccgttccaggagctgcagatcgacgacaacgagtacgcctacctcaaggccatcatcttcttcgaccccgacgcgaagggcctgagcgaccccgggaagatcaagcggctgcgcgcccaggtccaggtgagcctcgaggactacatcaacgaccggcagtacgactcccgcggccggttcggggagctgctgctcctgctgcccaccctccagagcatcacgtggcagatgatcgagcagatccagttcatcaagctgttcggcatggccaagatcgacaacctgctccaggagatgctgctgggcggggccccgtccgacgcgccccacgcccaccaccccctccacccccacctgatgcaggagcacatgggcaccaacgtgatcgtcgccaacaccatgccgacccacctgagcaacgggcagatgtgcgagtggccccgcccccggggccaggccgccgcgcccgaggccccgcagcccgccccgcccgggggctccggcagcgagccctacaagctgctccccggggccgtggccacgatcgtgcgccccctgtccgcgatcccccagccgaccatcaccaagcaggaggtcatctgaggactagttataagactgactagcccgatgggcctcccaacgggccctcctcccctccttgcaccgagattaataaaaaaaaaaaaaaaaaaaaaaaaaaaaaaaaaaaaaaaaaaaaaaaaaaaaaaaaaaaaaaaatgcatcccccccccccccccccccccccccccccccaaaggctcttttcagagccaccagaatt

SEQ ID NO: 2551 - RNA, 1531 nt, synthetic construct
  misc_feature 1..1531: note = mRNA i-3 (A64-N5-C30-hSL-N5) (opt1) from Homo sapiens__NP_000448.3__HNF4A(39-474)(S87A_K106R_K108R_K126R_ K127R)
  source 1..1531: mol_type = other RNA
aggagaaagcttaccatggacaccagcccgtccgaggggaccaacctgaacgcccccaacagcctgggcgtgtccgccctctgcgccatctgcggggaccgggcgacgggcaagcactacggggccagctcctgcgacggctgcaagggcttcttccgccgggccgtccgcaagaaccacatgtacagctgccggttctcccgccagtgcgtggtggaccgggaccgccggaaccagtgccgctactgccggctgaagaagtgcttccgcgccgggatgcggcgcgaggcggtccagaacgagcgggaccgcatcagcacccggcgctccagctacgaggactccagcctgccctccatcaacgccctcctgcaggccgaggtgctgagccggcagatcacctcccccgtgagcggcatcaacggggacatccgcgccaagaagatcgcctccatcgcggacgtctgcgagagcatgaaggagcagctcctggtgctggtggagtgggccaagtacatcccggccttctgcgagctccccctggacgaccaggtcgccctgctccgggcccacgcgggcgagcacctcctgctgggggccaccaagcgcagcatggtgttcaaggacgtgctgctgctcggcaacgactacatcgtcccccgccactgccccgagctggccgagatgtcccgggtgagcatccgcatcctggacgagctcgtgctgccgttccaggagctgcagatcgacgacaacgagtacgcctacctcaaggccatcatcttcttcgaccccgacgcgaagggcctgtccgaccccgggaagatcaagcggctgcgcagccaggtccaggtgtccctcgaggactacatcaacgaccggcagtacgacagccgcggccggttcggggagctgctgctcctgctgcccacgctccagtccatcacctggcagatgatcgagcagatccagttcatcaagctgttcggcatggccaagatcgacaacctgctccaggagatgctgctgggcgggagcccgtccgacgcgccccacgcccaccaccccctccacccccacctgatgcaggagcacatgggcaccaacgtgatcgtcgccaacaccatgccgacgcacctgagcaacgggcagatgtgcgagtggccccgcccccggggccaggccgccacccccgagaccccgcagccctccccgcccgggggcagcggctccgagccctacaagctgctccccggggccgtggccaccatcgtgaagcccctgagcgcgatcccccagccgacgatcaccaagcaggaggtcatctgaggactagttataagactgactagcccgatgggcctcccaacgggccctcctcccctccttgcaccgagattaataaaaaaaaaaaaaaaaaaaaaaaaaaaaaaaaaaaaaaaaaaaaaaaaaaaaaaaaaaaaaaaatgcatcccccccccccccccccccccccccccccccaaaggctcttttcagagccaccagaatt

SEQ ID NO: 2552 - RNA, 1531 nt, synthetic construct
  misc_feature 1..1531: note = mRNA i-3 (A64-N5-C30-hSL-N5) (opt1) from Homo sapiens__NP_000448.3__HNF4A(39-474)(S87A_K106R_K108R_K126R_ K127R_S142A_S143A_S148A_T166A_S167A_S313A_S378A_T429A_T432A _S436A_K458R_S461A)
  source 1..1531: mol_type = other RNA
aggagaaagcttaccatggacaccagcccgtccgaggggaccaacctgaacgcccccaacagcctgggcgtgtccgccctctgcgccatctgcggggaccgggcgacgggcaagcactacggggccagctcctgcgacggctgcaagggcttcttccgccgggccgtccgcaagaaccacatgtacagctgccggttctcccgccagtgcgtggtggaccgggaccgccggaaccagtgccgctactgccggctgaagaagtgcttccgcgccgggatgcggcgcgaggcggtccagaacgagcgggaccgcatcagcacccggcgcgccgcctacgaggactccgccctgcccagcatcaacgccctcctgcaggcggaggtgctgtcccggcagatcgccgcccccgtgagcggcatcaacggggacatccgcgccaagaagatcgcctccatcgcggacgtctgcgagagcatgaaggagcagctcctggtgctggtggagtgggccaagtacatcccggccttctgcgagctccccctggacgaccaggtcgccctgctccgggcccacgcgggcgagcacctcctgctgggggccaccaagcgctccatggtgttcaaggacgtgctgctgctcggcaacgactacatcgtcccccgccactgccccgagctggccgagatgagccgggtgtccatccgcatcctggacgagctcgtgctgccgttccaggagctgcagatcgacgacaacgagtacgcctacctcaaggccatcatcttcttcgaccccgacgcgaagggcctgagcgaccccgggaagatcaagcggctgcgcgcccaggtccaggtgagcctcgaggactacatcaacgaccggcagtacgactcccgcggccggttcggggagctgctgctcctgctgcccaccctccagagcatcacgtggcagatgatcgagcagatccagttcatcaagctgttcggcatggccaagatcgacaacctgctccaggagatgctgctgggcggggccccgtccgacgcgccccacgcccaccaccccctccacccccacctgatgcaggagcacatgggcaccaacgtgatcgtcgccaacaccatgccgacccacctgagcaacgggcagatgtgcgagtggccccgcccccggggccaggccgccgcgcccgaggccccgcagcccgccccgcccgggggctccggcagcgagccctacaagctgctccccggggccgtggccacgatcgtgcgccccctggcggccatcccccagccgaccatcaccaagcaggaggtcatctgaggactagttataagactgactagcccgatgggcctcccaacgggccctcctcccctccttgcaccgagattaataaaaaaaaaaaaaaaaaaaaaaaaaaaaaaaaaaaaaaaaaaaaaaaaaaaaaaaaaaaaaaaatgcatcccccccccccccccccccccccccccccccaaaggctcttttcagagccaccagaatt

SEQ ID NO: 2553 - RNA, 1531 nt, synthetic construct
  misc_feature 1..1531: note = mRNA i-3 (A64-N5-C30-hSL-N5) (opt1) from Homo sapiens__NP_000448.3__HNF4A(39-474)(S87A_K106R_K108R_K126R_ K127R_S142A_S143A_S148A_T166A_S167A_S313A_S378A_T429A_T432A _S436A_K458R_S461E)
  source 1..1531: mol_type = other RNA
aggagaaagcttaccatggacaccagcccgtccgaggggaccaacctgaacgcccccaacagcctgggcgtgtccgccctctgcgccatctgcggggaccgggcgacgggcaagcactacggggccagctcctgcgacggctgcaagggcttcttccgccgggccgtccgcaagaaccacatgtacagctgccggttctcccgccagtgcgtggtggaccgggaccgccggaaccagtgccgctactgccggctgaagaagtgcttccgcgccgggatgcggcgcgaggcggtccagaacgagcgggaccgcatcagcacccggcgcgccgcctacgaggactccgccctgcccagcatcaacgccctcctgcaggcggaggtgctgtcccggcagatcgccgcccccgtgagcggcatcaacggggacatccgcgccaagaagatcgcctccatcgcggacgtctgcgagagcatgaaggagcagctcctggtgctggtggagtgggccaagtacatcccggccttctgcgagctccccctggacgaccaggtcgccctgctccgggcccacgcgggcgagcacctcctgctgggggccaccaagcgctccatggtgttcaaggacgtgctgctgctcggcaacgactacatcgtcccccgccactgccccgagctggccgagatgagccgggtgtccatccgcatcctggacgagctcgtgctgccgttccaggagctgcagatcgacgacaacgagtacgcctacctcaaggccatcatcttcttcgaccccgacgcgaagggcctgagcgaccccgggaagatcaagcggctgcgcgcccaggtccaggtgagcctcgaggactacatcaacgaccggcagtacgactcccgcggccggttcggggagctgctgctcctgctgcccaccctccagagcatcacgtggcagatgatcgagcagatccagttcatcaagctgttcggcatggccaagatcgacaacctgctccaggagatgctgctgggcggggccccgtccgacgcgccccacgcccaccaccccctccacccccacctgatgcaggagcacatgggcaccaacgtgatcgtcgccaacaccatgccgacccacctgagcaacgggcagatgtgcgagtggccccgcccccggggccaggccgccgcgcccgaggccccgcagcccgccccgcccgggggctccggcagcgagccctacaagctgctccccggggccgtggccacgatcgtgcgccccctggaggcgatcccccagccgaccatcaccaagcaggaggtcatctgaggactagttataagactgactagcccgatgggcctcccaacgggccctcctcccctccttgcaccgagattaataaaaaaaaaaaaaaaaaaaaaaaaaaaaaaaaaaaaaaaaaaaaaaaaaaaaaaaaaaaaaaaatgcatcccccccccccccccccccccccccccccccaaaggctcttttcagagccaccagaatt

SEQ ID NO: 2554 - RNA, 1531 nt, synthetic construct
  misc_feature 1..1531: note = mRNA i-3 (A64-N5-C30-hSL-N5) (opt1) from Homo sapiens__NP_000448.3__HNF4A(39-474)(S87A_K106R_K108R_K126R_ K127R_S142A_S143A_S148E_T166A_S167E_S313A_S378E_T429E_T432E _S436E_K458R_S461E)
  source 1..1531: mol_type = other RNA
aggagaaagcttaccatggacaccagcccgtccgaggggaccaacctgaacgcccccaacagcctgggcgtgtccgccctctgcgccatctgcggggaccgggcgacgggcaagcactacggggccagctcctgcgacggctgcaagggcttcttccgccgggccgtccgcaagaaccacatgtacagctgccggttctcccgccagtgcgtggtggaccgggaccgccggaaccagtgccgctactgccggctgaagaagtgcttccgcgccgggatgcggcgcgaggcggtccagaacgagcgggaccgcatcagcacccggcgcgccgcctacgaggactccgagctgcccagcatcaacgccctcctgcaggccgaggtgctgtcccggcagatcgcggagcccgtgagcggcatcaacggggacatccgcgccaagaagatcgcctccatcgccgacgtctgcgagagcatgaaggagcagctcctggtgctggtggagtgggccaagtacatcccggcgttctgcgagctccccctggacgaccaggtcgccctgctccgggcccacgccggcgagcacctcctgctgggggccaccaagcgctccatggtgttcaaggacgtgctgctgctcggcaacgactacatcgtcccccgccactgccccgagctggcggagatgagccgggtgtccatccgcatcctggacgagctcgtgctgccgttccaggagctgcagatcgacgacaacgagtacgcctacctcaaggccatcatcttcttcgaccccgacgccaagggcctgagcgaccccgggaagatcaagcggctgcgcgcccaggtccaggtgagcctcgaggactacatcaacgaccggcagtacgactcccgcggccggttcggggagctgctgctcctgctgcccaccctccagagcatcacgtggcagatgatcgagcagatccagttcatcaagctgttcggcatggcgaagatcgacaacctgctccaggagatgctgctgggcggggagccgtccgacgcgccccacgcccaccaccccctccacccccacctgatgcaggagcacatgggcaccaacgtgatcgtcgccaacaccatgccgacccacctgagcaacgggcagatgtgcgagtggccccgcccccggggccaggccgccgagcccgaggagccgcagcccgagccgcccgggggctccggcagcgagccctacaagctgctccccggggccgtggccacgatcgtgcgccccctggaggccatcccccagccgaccatcaccaagcaggaggtcatctgaggactagttataagactgactagcccgatgggcctcccaacgggccctcctcccctccttgcaccgagattaataaaaaaaaaaaaaaaaaaaaaaaaaaaaaaaaaaaaaaaaaaaaaaaaaaaaaaaaaaaaaaaatgcatcccccccccccccccccccccccccccccccaaaggctcttttcagagccaccagaatt

SEQ ID NO: 2555 - RNA, 1531 nt, synthetic construct
  misc_feature 1..1531: note = mRNA i-3 (A64-N5-C30-hSL-N5) (opt1) from Homo sapiens__NP_000448.3__HNF4A(39-474)(S87A_K106R_K108R_K126R_ K127R_S142A_S143A_S148A_T166A_S167A_K179R_K180R_S313A_S378A _T429A_T432A_S436A_K458R_S461E)
  source 1..1531: mol_type = other RNA
aggagaaagcttaccatggacaccagcccgtccgaggggaccaacctgaacgcccccaacagcctgggcgtgtccgccctctgcgccatctgcggggaccgggcgacgggcaagcactacggggccagctcctgcgacggctgcaagggcttcttccgccgggccgtccgcaagaaccacatgtacagctgccggttctcccgccagtgcgtggtggaccgggaccgccggaaccagtgccgctactgccggctgaagaagtgcttccgcgccgggatgcggcgcgaggcggtccagaacgagcgggaccgcatcagcacccggcgcgccgcctacgaggactccgccctgcccagcatcaacgccctcctgcaggcggaggtgctgtcccggcagatcgccgcccccgtgagcggcatcaacggggacatccgcgcccggcgcatcgcctccatcgcggacgtctgcgagagcatgaaggagcagctcctggtgctggtggagtgggccaagtacatcccggccttctgcgagctccccctggacgaccaggtcgccctgctccgcgcccacgcgggcgagcacctcctgctgggggccaccaagcggtccatggtgttcaaggacgtgctgctgctcggcaacgactacatcgtcccccgccactgccccgagctggccgagatgagccgggtgtccatccgcatcctggacgagctcgtgctgccgttccaggagctgcagatcgacgacaacgagtacgcctacctcaaggccatcatcttcttcgaccccgacgcgaagggcctgagcgaccccgggaagatcaagcggctgcgcgcccaggtccaggtgagcctcgaggactacatcaacgaccggcagtacgactcccgcggccggttcggggagctgctgctcctgctgcccaccctccagagcatcacgtggcagatgatcgagcagatccagttcatcaagctgttcggcatggccaagatcgacaacctgctccaggagatgctgctgggcggggccccgtccgacgcgccccacgcccaccaccccctccacccccacctgatgcaggagcacatgggcaccaacgtgatcgtcgccaacaccatgccgacccacctgagcaacgggcagatgtgcgagtggccccgcccccggggccaggccgccgcgcccgaggccccgcagcccgccccgcccgggggctccggcagcgagccctacaagctgctccccggggccgtggccacgatcgtgcgccccctggaggcgatcccccagccgaccatcaccaagcaggaggtcatctgaggactagttataagactgactagcccgatgggcctcccaacgggccctcctcccctccttgcaccgagattaataaaaaaaaaaaaaaaaaaaaaaaaaaaaaaaaaaaaaaaaaaaaaaaaaaaaaaaaaaaaaaaatgcatcccccccccccccccccccccccccccccccaaaggctcttttcagagccaccagaatt

SEQ ID NO: 2556 - RNA, 1531 nt, synthetic construct
  misc_feature 1..1531: note = mRNA i-3 (A64-N5-C30-hSL-N5) (opt1) from Homo sapiens__NP_000448.3__HNF4A(39-474)(S87A_K106R_K108R_K126R_ K127R_S142A_S143A_S148A_T166A_S167A_K300R_K307R_K309R_S313A _S378A_T429A_T432A_S436A_K458R_S461E)
  source 1..1531: mol_type = other RNA
aggagaaagcttaccatggacaccagcccgtccgaggggaccaacctgaacgcccccaacagcctgggcgtgtccgccctctgcgccatctgcggggaccgggcgacgggcaagcactacggggccagctcctgcgacggctgcaagggcttcttccgccgggccgtccgcaagaaccacatgtacagctgccggttctcccgccagtgcgtggtggaccgggaccgccggaaccagtgccgctactgccggctgaagaagtgcttccgcgccgggatgcggcgcgaggcggtccagaacgagcgggaccgcatcagcacccggcgcgccgcctacgaggactccgccctgcccagcatcaacgccctcctgcaggcggaggtgctgtcccggcagatcgccgcccccgtgagcggcatcaacggggacatccgcgccaagaagatcgcctccatcgcggacgtctgcgagagcatgaaggagcagctcctggtgctggtggagtgggccaagtacatcccggccttctgcgagctccccctggacgaccaggtcgccctgctccgggcccacgcgggcgagcacctcctgctgggggccaccaagcgctccatggtgttcaaggacgtgctgctgctcggcaacgactacatcgtcccccgccactgccccgagctggccgagatgagccgggtgtccatccgcatcctggacgagctcgtgctgccgttccaggagctgcagatcgacgacaacgagtacgcctacctcaaggccatcatcttcttcgaccccgacgcgcggggcctgagcgaccccgggcgcatccggcgcctgcgggcccaggtccaggtgagcctcgaggactacatcaacgaccgccagtacgactcccggggccgcttcggggagctgctgctcctgctgcccaccctccagagcatcacgtggcagatgatcgagcagatccagttcatcaagctgttcggcatggccaagatcgacaacctgctccaggagatgctgctgggcggggccccgtccgacgcgccccacgcccaccaccccctccacccccacctgatgcaggagcacatgggcaccaacgtgatcgtcgccaacaccatgccgacccacctgagcaacgggcagatgtgcgagtggccccggccccgcggccaggccgccgcgcccgaggccccgcagcccgccccgcccgggggctccggcagcgagccctacaagctgctccccggggccgtggccacgatcgtgcggcccctggaggcgatcccccagccgaccatcaccaagcaggaggtcatctgaggactagttataagactgactagcccgatgggcctcccaacgggccctcctcccctccttgcaccgagattaataaaaaaaaaaaaaaaaaaaaaaaaaaaaaaaaaaaaaaaaaaaaaaaaaaaaaaaaaaaaaaaatgcatcccccccccccccccccccccccccccccccaaaggctcttttcagagccaccagaatt

SEQ ID NO: 2557 - RNA, 1531 nt, synthetic construct
  misc_feature 1..1531: note = mRNA i-3 (A64-N5-C30-hSL-N5) (opt1) from Homo sapiens__NP_000448.3__HNF4A(39-474)(S87A_K106R_K108R_K126R_ K127R_S142A_S143A_S148A_T166A_S167A_S313A_S378A_T429A_T432A _S436A_K447R_K458R_S461E_K470R)
  source 1..1531: mol_type = other RNA
aggagaaagcttaccatggacaccagcccgtccgaggggaccaacctgaacgcccccaacagcctgggcgtgtccgccctctgcgccatctgcggggaccgggcgacgggcaagcactacggggccagctcctgcgacggctgcaagggcttcttccgccgggccgtccgcaagaaccacatgtacagctgccggttctcccgccagtgcgtggtggaccgggaccgccggaaccagtgccgctactgccggctgaagaagtgcttccgcgccgggatgcggcgcgaggcggtccagaacgagcgggaccgcatcagcacccggcgcgccgcctacgaggactccgccctgcccagcatcaacgccctcctgcaggcggaggtgctgtcccggcagatcgccgcccccgtgagcggcatcaacggggacatccgcgccaagaagatcgcctccatcgcggacgtctgcgagagcatgaaggagcagctcctggtgctggtggagtgggccaagtacatcccggccttctgcgagctccccctggacgaccaggtcgccctgctccgggcccacgcgggcgagcacctcctgctgggggccaccaagcgctccatggtgttcaaggacgtgctgctgctcggcaacgactacatcgtcccccgccactgccccgagctggccgagatgagccgggtgtccatccgcatcctggacgagctcgtgctgccgttccaggagctgcagatcgacgacaacgagtacgcctacctcaaggccatcatcttcttcgaccccgacgcgaagggcctgagcgaccccgggaagatcaagcggctgcgcgcccaggtccaggtgagcctcgaggactacatcaacgaccggcagtacgactcccgcggccggttcggggagctgctgctcctgctgcccaccctccagagcatcacgtggcagatgatcgagcagatccagttcatcaagctgttcggcatggccaagatcgacaacctgctccaggagatgctgctgggcggggccccgtccgacgcgccccacgcccaccaccccctccacccccacctgatgcaggagcacatgggcaccaacgtgatcgtcgccaacaccatgccgacccacctgagcaacgggcagatgtgcgagtggccccgcccccggggccaggccgccgcgcccgaggccccgcagcccgccccgcccgggggctccggcagcgagccctaccgcctgctccccggggccgtggccacgatcgtgcggcccctggaggcgatcccccagccgaccatcacccgccaggaggtcatctgaggactagttataagactgactagcccgatgggcctcccaacgggccctcctcccctccttgcaccgagattaataaaaaaaaaaaaaaaaaaaaaaaaaaaaaaaaaaaaaaaaaaaaaaaaaaaaaaaaaaaaaaaatgcatcccccccccccccccccccccccccccccccaaaggctcttttcagagccaccagaatt

SEQ ID NO: 2558 - RNA, 1531 nt, synthetic construct
  misc_feature 1..1531: note = mRNA i-3 (A64-N5-C30-hSL-N5) (opt1) from Homo sapiens__NP_000448.3__HNF4A(39-474)(S87A_K106R_K108R_K126R_ K127R_S142A_S143A_S148A_T166A_S167A_K179R_K180R_K234R_K300R _K307R_K309R_S313A_S378A_T429A_T432A_S436A_K447R_K458R_S461 E_K470R)
  source 1..1531: mol_type = other RNA
aggagaaagcttaccatggacaccagcccgtccgaggggaccaacctgaacgcccccaacagcctgggcgtgtccgccctctgcgccatctgcggggaccgggcgacgggcaagcactacggggccagctcctgcgacggctgcaagggcttcttccgccgggccgtccgcaagaaccacatgtacagctgccggttctcccgccagtgcgtggtggaccgggaccgccggaaccagtgccgctactgccggctgaagaagtgcttccgcgccgggatgcggcgcgaggcggtccagaacgagcgggaccgcatcagcacccggcgcgccgcctacgaggactccgccctgcccagcatcaacgccctcctgcaggcggaggtgctgtcccggcagatcgccgcccccgtgagcggcatcaacggggacatccgcgcccggcgcatcgcctccatcgcggacgtctgcgagagcatgaaggagcagctcctggtgctggtggagtgggccaagtacatcccggccttctgcgagctccccctggacgaccaggtcgccctgctccgcgcccacgcgggcgagcacctcctgctgggggccacccggcgctccatggtgttcaaggacgtgctgctgctcggcaacgactacatcgtcccccggcactgccccgagctggccgagatgagccgcgtgtccatccggatcctggacgagctcgtgctgccgttccaggagctgcagatcgacgacaacgagtacgcctacctcaaggccatcatcttcttcgaccccgacgcgcgcggcctgagcgaccccgggcggatccgccggctgcgcgcccaggtccaggtgagcctcgaggactacatcaacgaccggcagtacgactcccgcggccggttcggggagctgctgctcctgctgcccaccctccagagcatcacgtggcagatgatcgagcagatccagttcatcaagctgttcggcatggccaagatcgacaacctgctccaggagatgctgctgggcggggccccgtccgacgcgccccacgcccaccaccccctccacccccacctgatgcaggagcacatgggcaccaacgtgatcgtcgccaacaccatgccgacccacctgagcaacgggcagatgtgcgagtggccccgcccccggggccaggccgccgcgcccgaggccccgcagcccgccccgcccgggggctccggcagcgagccctaccgcctgctccccggggccgtggccacgatcgtgcggcccctggaggcgatcccccagccgaccatcacccgccaggaggtcatctgaggactagttataagactgactagcccgatgggcctcccaacgggccctcctcccctccttgcaccgagattaataaaaaaaaaaaaaaaaaaaaaaaaaaaaaaaaaaaaaaaaaaaaaaaaaaaaaaaaaaaaaaaatgcatcccccccccccccccccccccccccccccccaaaggctcttttcagagccaccagaatt

SEQ ID NO: 2559 - RNA, 1531 nt, synthetic construct
  misc_feature 1..1531: note = mRNA i-3 (A64-N5-C30-hSL-N5) (opt1) from Homo sapiens__NP_000448.3__HNF4A(39-474)(S87A_S95A_S99A_K106R_K1 08R_K126R_K127R_S142A_S143A_S148A_T166A_S167A_S313A_S378A_T 429A_T432A_S436A_K458R_S461E)
  source 1..1531: mol_type = other RNA
aggagaaagcttaccatggacaccagcccgtccgaggggaccaacctgaacgcccccaacagcctgggcgtgtccgccctctgcgccatctgcggggaccgggcgacgggcaagcactacggggccagctcctgcgacggctgcaagggcttcttccgccgggccgtccgcaagaaccacatgtacgcctgccggttcgcgcgccagtgcgtggtggaccgggaccgccggaaccagtgccgctactgccggctgaagaagtgcttccgcgccgggatgcggcgcgaggccgtccagaacgagcgggaccgcatcagcacccggcgcgccgcctacgaggactccgcgctgcccagcatcaacgccctcctgcaggccgaggtgctgtcccggcagatcgccgcccccgtgagcggcatcaacggggacatccgcgcgaagaagatcgcctccatcgccgacgtctgcgagagcatgaaggagcagctcctggtgctggtggagtgggccaagtacatcccggccttctgcgagctccccctggacgaccaggtcgcgctgctccgggcccacgccggcgagcacctcctgctgggggccaccaagcgctccatggtgttcaaggacgtgctgctgctcggcaacgactacatcgtcccccgccactgccccgagctggccgagatgagccgggtgtccatccgcatcctggacgagctcgtgctgccgttccaggagctgcagatcgacgacaacgagtacgcgtacctcaaggccatcatcttcttcgaccccgacgccaagggcctgagcgaccccgggaagatcaagcggctgcgcgcccaggtccaggtgtccctcgaggactacatcaacgaccggcagtacgacagccgcggccggttcggggagctgctgctcctgctgcccaccctccagagcatcacgtggcagatgatcgagcagatccagttcatcaagctgttcggcatggcgaagatcgacaacctgctccaggagatgctgctgggcggggccccgtccgacgcgccccacgcccaccaccccctccacccccacctgatgcaggagcacatgggcaccaacgtgatcgtcgccaacaccatgccgacccacctgagcaacgggcagatgtgcgagtggccccgcccccggggccaggccgccgcccccgaggccccgcagcccgccccgcccgggggctccggcagcgagccctacaagctgctccccggggcggtggccacgatcgtgcgccccctggaggccatcccccagccgaccatcaccaagcaggaggtcatctgaggactagttataagactgactagcccgatgggcctcccaacgggccctcctcccctccttgcaccgagattaataaaaaaaaaaaaaaaaaaaaaaaaaaaaaaaaaaaaaaaaaaaaaaaaaaaaaaaaaaaaaaaatgcatcccccccccccccccccccccccccccccccaaaggctcttttcagagccaccagaatt

SEQ ID NO: 2560 - RNA, 1531 nt, synthetic construct
  misc_feature 1..1531: note = mRNA i-3 (A64-N5-C30-hSL-N5) (opt1) from Homo sapiens__NP_000448.3__HNF4A(39-474)(S87A_K106R_K108R_K126R_ K127R_S138A_T139A_S142A_S143A_S148A_T166A_S167A_S313A_S378A _T429A_T432A_S436A_K458R_S461E)
  source 1..1531: mol_type = other RNA
aggagaaagcttaccatggacaccagcccgtccgaggggaccaacctgaacgcccccaacagcctgggcgtgtccgccctctgcgccatctgcggggaccgggcgacgggcaagcactacggggccagctcctgcgacggctgcaagggcttcttccgccgggccgtccgcaagaaccacatgtacagctgccggttctcccgccagtgcgtggtggaccgggaccgccggaaccagtgccgctactgccggctgaagaagtgcttccgcgccgggatgcggcgcgaggcggtccagaacgagcgggaccgcatcgccgcccggcgcgccgcctacgaggacagcgcgctgccctccatcaacgccctcctgcaggccgaggtgctgagccggcagatcgccgcccccgtgtccggcatcaacggggacatccgcgcgaagaagatcgccagcatcgccgacgtctgcgagtccatgaaggagcagctcctggtgctggtggagtgggccaagtacatcccggccttctgcgagctccccctggacgaccaggtcgcgctgctccgggcccacgccggcgagcacctcctgctgggggccaccaagcgcagcatggtgttcaaggacgtgctgctgctcggcaacgactacatcgtcccccgccactgccccgagctggccgagatgtcccgggtgagcatccgcatcctggacgagctcgtgctgccgttccaggagctgcagatcgacgacaacgagtacgcgtacctcaaggccatcatcttcttcgaccccgacgccaagggcctgtccgaccccgggaagatcaagcggctgcgcgcccaggtccaggtgagcctcgaggactacatcaacgaccggcagtacgacagccgcggccggttcggggagctgctgctcctgctgcccaccctccagtccatcacctggcagatgatcgagcagatccagttcatcaagctgttcggcatggcgaagatcgacaacctgctccaggagatgctgctgggcggggccccgagcgacgcgccccacgcccaccaccccctccacccccacctgatgcaggagcacatgggcacgaacgtgatcgtcgccaacaccatgccgacccacctgtccaacgggcagatgtgcgagtggccccgcccccggggccaggccgccgcccccgaggccccgcagcccgccccgcccgggggcagcggctccgagccctacaagctgctccccggggcggtggccaccatcgtgcgccccctggaggccatcccccagccgacgatcaccaagcaggaggtcatctgaggactagttataagactgactagcccgatgggcctcccaacgggccctcctcccctccttgcaccgagattaataaaaaaaaaaaaaaaaaaaaaaaaaaaaaaaaaaaaaaaaaaaaaaaaaaaaaaaaaaaaaaaatgcatcccccccccccccccccccccccccccccccaaaggctcttttcagagccaccagaatt

SEQ ID NO: 2561 - RNA, 1531 nt, synthetic construct
  misc_feature 1..1531: note = mRNA i-3 (A64-N5-C30-hSL-N5) (opt1) from Homo sapiens__NP_000448.3__HNF4A(39-474)(S87A_S95A_S99A_K106R_K1 08R_K126R_K127R_S138A_T139A_S142A_S143A_S148A_T166A_S167A_S 313A_S378A_T429A_T432A_S436A_K458R_S461E)
  source 1..1531: mol_type = other RNA
aggagaaagcttaccatggacaccagcccgtccgaggggaccaacctgaacgcccccaacagcctgggcgtgtccgccctctgcgccatctgcggggaccgggcgacgggcaagcactacggggccagctcctgcgacggctgcaagggcttcttccgccgggccgtccgcaagaaccacatgtacgcctgccggttcgcgcgccagtgcgtggtggaccgggaccgccggaaccagtgccgctactgccggctgaagaagtgcttccgcgccgggatgcggcgcgaggccgtccagaacgagcgggaccgcatcgccgcccggcgcgcggcctacgaggacagcgccctgccctccatcaacgccctcctgcaggccgaggtgctgagccggcagatcgcggcccccgtgtccggcatcaacggggacatccgcgccaagaagatcgccagcatcgccgacgtctgcgagtccatgaaggagcagctcctggtgctggtggagtgggcgaagtacatcccggccttctgcgagctccccctggacgaccaggtcgccctgctccgggcccacgccggcgagcacctcctgctgggggcgaccaagcgcagcatggtgttcaaggacgtgctgctgctcggcaacgactacatcgtcccccgccactgccccgagctggccgagatgtcccgggtgagcatccgcatcctggacgagctcgtgctgccgttccaggagctgcagatcgacgacaacgagtacgcctacctcaaggccatcatcttcttcgaccccgacgcgaagggcctgtccgaccccgggaagatcaagcggctgcgcgcccaggtccaggtgagcctcgaggactacatcaacgaccggcagtacgactcccgcggccggttcggggagctgctgctcctgctgcccaccctccagagcatcacctggcagatgatcgagcagatccagttcatcaagctgttcggcatggccaagatcgacaacctgctccaggagatgctgctgggcggggccccgagcgacgcgccccacgcccaccaccccctccacccccacctgatgcaggagcacatgggcacgaacgtgatcgtcgccaacaccatgccgacccacctgtccaacgggcagatgtgcgagtggccccgcccccggggccaggccgccgcccccgaggcgccgcagcccgccccgcccgggggcagcggctccgagccctacaagctgctccccggggccgtggccaccatcgtgcgccccctggaggccatcccccagccgacgatcaccaagcaggaggtcatctgaggactagttataagactgactagcccgatgggcctcccaacgggccctcctcccctccttgcaccgagattaataaaaaaaaaaaaaaaaaaaaaaaaaaaaaaaaaaaaaaaaaaaaaaaaaaaaaaaaaaaaaaaatgcatcccccccccccccccccccccccccccccccaaaggctcttttcagagccaccagaatt

SEQ ID NO: 2562 - RNA, 1531 nt, synthetic construct
  misc_feature 1..1531: note = mRNA i-3 (A64-N5-C30-hSL-N5) (opt2) from Homo sapiens__NP_000448.3__HNF4A(39-474)
  source 1..1531: mol_type = other RNA
aggagaaagcttaccatggacacctccccctccgagggcaccaacctcaacgcccccaactccctcggcgtctccgccctctgcgccatctgcggcgaccgcgccaccggcaagcactacggcgcctcctcctgcgacggctgcaagggcttcttccgccgctccgtccgcaagaaccacatgtactcctgccgcttctcccgccagtgcgtcgtcgacaaggacaagcgcaaccagtgccgctactgccgcctcaagaagtgcttccgcgccggcatgaagaaggaggccgtccagaacgagcgcgaccgcatctccacccgccgctcctcctacgaggactcctccctcccctccatcaacgccctcctccaggccgaggtcctctcccgccagatcacctcccccgtctccggcatcaacggcgacatccgcgccaagaagatcgcctccatcgccgacgtctgcgagtccatgaaggagcagctcctcgtcctcgtcgagtgggccaagtacatccccgccttctgcgagctccccctcgacgaccaggtcgccctcctccgcgcccacgccggcgagcacctcctcctcggcgccaccaagcgctccatggtcttcaaggacgtcctcctcctcggcaacgactacatcgtcccccgccactgccccgagctcgccgagatgtcccgcgtctccatccgcatcctcgacgagctcgtcctccccttccaggagctccagatcgacgacaacgagtacgcctacctcaaggccatcatcttcttcgaccccgacgccaagggcctctccgaccccggcaagatcaagcgcctccgctcccaggtccaggtctccctcgaggactacatcaacgaccgccagtacgactcgcgcgggcgcttcggcgagctcctcctcctcctccccaccctccagtccatcacctggcagatgatcgagcagatccagttcatcaagctgttcggcatggccaagatcgacaacctcctccaggagatgctcctcggcggctccccctccgacgccccccacgcccaccaccccctccacccccacctcatgcaggagcacatgggcaccaacgtcatcgtcgccaacaccatgcccacccacctctccaacggccagatgtgcgagtggccccgcccgcgcggccaggccgccacccccgagaccccccagccctccccccccggcggctccggctccgagccctacaagctcctccccggcgccgtcgccaccatcgtcaagcccctctccgccatcccccagcccaccatcaccaagcaggaggtcatctgaggactagttataagactgactagcccgatgggcctcccaacgggccctcctcccctccttgcaccgagattaataaaaaaaaaaaaaaaaaaaaaaaaaaaaaaaaaaaaaaaaaaaaaaaaaaaaaaaaaaaaaaaatgcatcccccccccccccccccccccccccccccccaaaggctcttttcagagccaccagaatt

SEQ ID NO: 2563 - RNA, 1531 nt, synthetic construct
  misc_feature 1..1531: note = mRNA i-3 (A64-N5-C30-hSL-N5) (opt2) from Homo sapiens__NP_000448.3__HNF4A(39-474)(S313A)
  source 1..1531: mol_type = other RNA
aggagaaagcttaccatggacacctccccctccgagggcaccaacctcaacgcccccaactccctcggcgtctccgccctctgcgccatctgcggcgaccgcgccaccggcaagcactacggcgcctcctcctgcgacggctgcaagggcttcttccgccgctccgtccgcaagaaccacatgtactcctgccgcttctcccgccagtgcgtcgtcgacaaggacaagcgcaaccagtgccgctactgccgcctcaagaagtgcttccgcgccggcatgaagaaggaggccgtccagaacgagcgcgaccgcatctccacccgccgctcctcctacgaggactcctccctcccctccatcaacgccctcctccaggccgaggtcctctcccgccagatcacctcccccgtctccggcatcaacggcgacatccgcgccaagaagatcgcctccatcgccgacgtctgcgagtccatgaaggagcagctcctcgtcctcgtcgagtgggccaagtacatccccgccttctgcgagctccccctcgacgaccaggtcgccctcctccgcgcccacgccggcgagcacctcctcctcggcgccaccaagcgctccatggtcttcaaggacgtcctcctcctcggcaacgactacatcgtcccccgccactgccccgagctcgccgagatgtcccgcgtctccatccgcatcctcgacgagctcgtcctccccttccaggagctccagatcgacgacaacgagtacgcctacctcaaggccatcatcttcttcgaccccgacgccaagggcctctccgaccccggcaagatcaagcgcctccgcgcccaggtccaggtctccctcgaggactacatcaacgaccgccagtacgactcccgcggccgcttcggcgagctcctcctcctcctccccaccctccagtccatcacctggcagatgatcgagcagatccagttcatcaagctcttcggcatggccaagatcgacaacctcctccaggagatgctcctcggcggctccccctccgacgccccccacgcccaccaccccctccacccccacctcatgcaggagcacatgggcaccaacgtcatcgtcgccaacaccatgcccacccacctctccaacggccagatgtgcgagtggccccgcccccgcggccaggccgccacccccgagaccccccagccctccccccccggcggctccggctccgagccctacaagctcctccccggcgccgtcgccaccatcgtcaagcccctctccgccatcccccagcccaccatcaccaagcaggaggtcatctgaggactagttataagactgactagcccgatgggcctcccaacgggccctcctcccctccttgcaccgagattaataaaaaaaaaaaaaaaaaaaaaaaaaaaaaaaaaaaaaaaaaaaaaaaaaaaaaaaaaaaaaaaatgcatcccccccccccccccccccccccccccccccaaaggctcttttcagagccaccagaatt

SEQ ID NO: 2564 - RNA, 1531 nt, synthetic construct
  misc_feature 1..1531: note = mRNA i-3 (A64-N5-C30-hSL-N5) (opt2) from Homo sapiens__NP_000448.3__HNF4A(39-474)(S313E)
  source 1..1531: mol_type = other RNA
aggagaaagcttaccatggacacctccccctccgagggcaccaacctcaacgcccccaactccctcggcgtctccgccctctgcgccatctgcggcgaccgcgccaccggcaagcactacggcgcctcctcctgcgacggctgcaagggcttcttccgccgctccgtccgcaagaaccacatgtactcctgccgcttctcccgccagtgcgtcgtcgacaaggacaagcgcaaccagtgccgctactgccgcctcaagaagtgcttccgcgccggcatgaagaaggaggccgtccagaacgagcgcgaccgcatctccacccgccgctcctcctacgaggactcctccctcccctccatcaacgccctcctccaggccgaggtcctctcccgccagatcacctcccccgtctccggcatcaacggcgacatccgcgccaagaagatcgcctccatcgccgacgtctgcgagtccatgaaggagcagctcctcgtcctcgtcgagtgggccaagtacatccccgccttctgcgagctccccctcgacgaccaggtcgccctcctccgcgcccacgccggcgagcacctcctcctcggcgccaccaagcgctccatggtcttcaaggacgtcctcctcctcggcaacgactacatcgtcccccgccactgccccgagctcgccgagatgtcccgcgtctccatccgcatcctcgacgagctcgtcctccccttccaggagctccagatcgacgacaacgagtacgcctacctcaaggccatcatcttcttcgaccccgacgccaagggcctctccgaccccggcaagatcaagcgcctccgcgagcaggtccaggtctccctcgaggactacatcaacgaccgccagtacgactcccgcggccgcttcggcgagctcctcctcctcctccccaccctccagtccatcacctggcagatgatcgagcagatccagttcatcaagctcttcggcatggccaagatcgacaacctcctccaggagatgctcctcggcggctccccctccgacgccccccacgcccaccaccccctccacccccacctcatgcaggagcacatgggcaccaacgtcatcgtcgccaacaccatgcccacccacctctccaacggccagatgtgcgagtggccccgcccccgcggccaggccgccacccccgagaccccccagccctccccccccggcggctccggctccgagccctacaagctcctccccggcgccgtcgccaccatcgtcaagcccctctccgccatcccccagcccaccatcaccaagcaggaggtcatctgaggactagttataagactgactagcccgatgggcctcccaacgggccctcctcccctccttgcaccgagattaataaaaaaaaaaaaaaaaaaaaaaaaaaaaaaaaaaaaaaaaaaaaaaaaaaaaaaaaaaaaaaaatgcatcccccccccccccccccccccccccccccccaaaggctcttttcagagccaccagaatt

SEQ ID NO: 2565 - RNA, 1531 nt, synthetic construct
  misc_feature 1..1531: note = mRNA i-3 (A64-N5-C30-hSL-N5) (opt2) from Homo sapiens__NP_000448.3__HNF4A(39-474)(S142A_S143A)
  source 1..1531: mol_type = other RNA
aggagaaagcttaccatggacacctccccctccgagggcaccaacctcaacgcccccaactccctcggcgtctccgccctctgcgccatctgcggcgaccgcgccaccggcaagcactacggcgcctcctcctgcgacggctgcaagggcttcttccgccgctccgtccgcaagaaccacatgtactcctgccgcttctcccgccagtgcgtcgtcgacaaggacaagcgcaaccagtgccgctactgccgcctcaagaagtgcttccgcgccggcatgaagaaggaggccgtccagaacgagcgcgaccgcatctccacccgccgcgccgcctacgaggactcctccctcccctccatcaacgccctcctccaggccgaggtcctctcccgccagatcacctcccccgtctccggcatcaacggcgacatccgcgccaagaagatcgcctccatcgccgacgtctgcgagtccatgaaggagcagctcctcgtcctcgtcgagtgggccaagtacatccccgccttctgcgagctccccctcgacgaccaggtcgccctcctccgcgcccacgccggcgagcacctcctcctcggcgccaccaagcgctccatggtcttcaaggacgtcctcctcctcggcaacgactacatcgtcccccgccactgccccgagctcgccgagatgtcccgcgtctccatccgcatcctcgacgagctcgtcctccccttccaggagctccagatcgacgacaacgagtacgcctacctcaaggccatcatcttcttcgaccccgacgccaagggcctctccgaccccggcaagatcaagcgcctccgctcccaggtccaggtctccctcgaggactacatcaacgaccgccagtacgactcccgcggccgcttcggcgagctcctcctcctcctccccaccctccagtccatcacctggcagatgatcgagcagatccagttcatcaagctcttcggcatggccaagatcgacaacctcctccaggagatgctcctcggcggctccccctccgacgccccccacgcccaccaccccctccacccccacctcatgcaggagcacatgggcaccaacgtcatcgtcgccaacaccatgcccacccacctctccaacggccagatgtgcgagtggccccgcccccgcggccaggccgccacccccgagaccccccagccctccccccccggcggctccggctccgagccctacaagctcctccccggcgccgtcgccaccatcgtcaagcccctctccgccatcccccagcccaccatcaccaagcaggaggtcatctgaggactagttataagactgactagcccgatgggcctcccaacgggccctcctcccctccttgcaccgagattaataaaaaaaaaaaaaaaaaaaaaaaaaaaaaaaaaaaaaaaaaaaaaaaaaaaaaaaaaaaaaaaatgcatcccccccccccccccccccccccccccccccaaaggctcttttcagagccaccagaatt

SEQ ID NO: 2566 - RNA, 1531 nt, synthetic construct
  misc_feature 1..1531: note = mRNA i-3 (A64-N5-C30-hSL-N5) (opt2) from Homo sapiens__NP_000448.3__HNF4A(39-474)(S142E_S143E)
  source 1..1531: mol_type = other RNA
aggagaaagcttaccatggacacctccccctccgagggcaccaacctcaacgcccccaactccctcggcgtctccgccctctgcgccatctgcggcgaccgcgccaccggcaagcactacggcgcctcctcctgcgacggctgcaagggcttcttccgccgctccgtccgcaagaaccacatgtactcctgccgcttctcccgccagtgcgtcgtcgacaaggacaagcgcaaccagtgccgctactgccgcctcaagaagtgcttccgcgccggcatgaagaaggaggccgtccagaacgagcgcgaccgcatctccacccgccgcgaggagtacgaggactcctccctcccctccatcaacgccctcctccaggccgaggtcctctcccgccagatcacctcccccgtctccggcatcaacggcgacatccgcgccaagaagatcgcctccatcgccgacgtctgcgagtccatgaaggagcagctcctcgtcctcgtcgagtgggccaagtacatccccgccttctgcgagctccccctcgacgaccaggtcgccctcctccgcgcccacgccggcgagcacctcctcctcggcgccaccaagcgctccatggtcttcaaggacgtcctcctcctcggcaacgactacatcgtcccccgccactgccccgagctcgccgagatgtcccgcgtctccatccgcatcctcgacgagctcgtcctccccttccaggagctccagatcgacgacaacgagtacgcctacctcaaggccatcatcttcttcgaccccgacgccaagggcctctccgaccccggcaagatcaagcgcctccgctcccaggtccaggtctccctcgaggactacatcaacgaccgccagtacgactcccgcggccgcttcggcgagctcctcctcctcctccccaccctccagtccatcacctggcagatgatcgagcagatccagttcatcaagctcttcggcatggccaagatcgacaacctcctccaggagatgctcctcggcggctccccctccgacgccccccacgcccaccaccccctccacccccacctcatgcaggagcacatgggcaccaacgtcatcgtcgccaacaccatgcccacccacctctccaacggccagatgtgcgagtggccccgcccccgcggccaggccgccacccccgagaccccccagccctccccccccggcggctccggctccgagccctacaagctcctccccggcgccgtcgccaccatcgtcaagcccctctccgccatcccccagcccaccatcaccaagcaggaggtcatctgaggactagttataagactgactagcccgatgggcctcccaacgggccctcctcccctccttgcaccgagattaataaaaaaaaaaaaaaaaaaaaaaaaaaaaaaaaaaaaaaaaaaaaaaaaaaaaaaaaaaaaaaaatgcatcccccccccccccccccccccccccccccccaaaggctcttttcagagccaccagaatt

SEQ ID NO: 2567 - RNA, 1531 nt, synthetic construct
  misc_feature 1..1531: note = mRNA i-3 (A64-N5-C30-hSL-N5) (opt2) from Homo sapiens__NP_000448.3__HNF4A(39-474)(S143A)
  source 1..1531: mol_type = other RNA
aggagaaagcttaccatggacacctccccctccgagggcaccaacctcaacgcccccaactccctcggcgtctccgccctctgcgccatctgcggcgaccgcgccaccggcaagcactacggcgcctcctcctgcgacggctgcaagggcttcttccgccgctccgtccgcaagaaccacatgtactcctgccgcttctcccgccagtgcgtcgtcgacaaggacaagcgcaaccagtgccgctactgccgcctcaagaagtgcttccgcgccggcatgaagaaggaggccgtccagaacgagcgcgaccgcatctccacccgccgctccgcctacgaggactcctccctcccctccatcaacgccctcctccaggccgaggtcctctcccgccagatcacctcccccgtctccggcatcaacggcgacatccgcgccaagaagatcgcctccatcgccgacgtctgcgagtccatgaaggagcagctcctcgtcctcgtcgagtgggccaagtacatccccgccttctgcgagctccccctcgacgaccaggtcgccctcctccgcgcccacgccggcgagcacctcctcctcggcgccaccaagcgctccatggtcttcaaggacgtcctcctcctcggcaacgactacatcgtcccccgccactgccccgagctcgccgagatgtcccgcgtctccatccgcatcctcgacgagctcgtcctccccttccaggagctccagatcgacgacaacgagtacgcctacctcaaggccatcatcttcttcgaccccgacgccaagggcctctccgaccccggcaagatcaagcgcctccgctcccaggtccaggtctccctcgaggactacatcaacgaccgccagtacgactcccgcggccgcttcggcgagctcctcctcctcctccccaccctccagtccatcacctggcagatgatcgagcagatccagttcatcaagctcttcggcatggccaagatcgacaacctcctccaggagatgctcctcggcggctccccctccgacgccccccacgcccaccaccccctccacccccacctcatgcaggagcacatgggcaccaacgtcatcgtcgccaacaccatgcccacccacctctccaacggccagatgtgcgagtggccccgcccccgcggccaggccgccacccccgagaccccccagccctccccccccggcggctccggctccgagccctacaagctcctccccggcgccgtcgccaccatcgtcaagcccctctccgccatcccccagcccaccatcaccaagcaggaggtcatctgaggactagttataagactgactagcccgatgggcctcccaacgggccctcctcccctccttgcaccgagattaataaaaaaaaaaaaaaaaaaaaaaaaaaaaaaaaaaaaaaaaaaaaaaaaaaaaaaaaaaaaaaaatgcatcccccccccccccccccccccccccccccccaaaggctcttttcagagccaccagaatt

SEQ ID NO: 2568 - RNA, 1531 nt, synthetic construct
  misc_feature 1..1531: note = mRNA i-3 (A64-N5-C30-hSL-N5) (opt2) from Homo sapiens__NP_000448.3__HNF4A(39-474)(T166A)
  source 1..1531: mol_type = other RNA
aggagaaagcttaccatggacacctccccctccgagggcaccaacctcaacgcccccaactccctcggcgtctccgccctctgcgccatctgcggcgaccgcgccaccggcaagcactacggcgcctcctcctgcgacggctgcaagggcttcttccgccgctccgtccgcaagaaccacatgtactcctgccgcttctcccgccagtgcgtcgtcgacaaggacaagcgcaaccagtgccgctactgccgcctcaagaagtgcttccgcgccggcatgaagaaggaggccgtccagaacgagcgcgaccgcatctccacccgccgctcctcctacgaggactcctccctcccctccatcaacgccctcctccaggccgaggtcctctcccgccagatcgcctcccccgtctccggcatcaacggcgacatccgcgccaagaagatcgcctccatcgccgacgtctgcgagtccatgaaggagcagctcctcgtcctcgtcgagtgggccaagtacatccccgccttctgcgagctccccctcgacgaccaggtcgccctcctccgcgcccacgccggcgagcacctcctcctcggcgccaccaagcgctccatggtcttcaaggacgtcctcctcctcggcaacgactacatcgtcccccgccactgccccgagctcgccgagatgtcccgcgtctccatccgcatcctcgacgagctcgtcctccccttccaggagctccagatcgacgacaacgagtacgcctacctcaaggccatcatcttcttcgaccccgacgccaagggcctctccgaccccggcaagatcaagcgcctccgctcccaggtccaggtctccctcgaggactacatcaacgaccgccagtacgactcccgcggccgcttcggcgagctcctcctcctcctccccaccctccagtccatcacctggcagatgatcgagcagatccagttcatcaagctcttcggcatggccaagatcgacaacctcctccaggagatgctcctcggcggctccccctccgacgccccccacgcccaccaccccctccacccccacctcatgcaggagcacatgggcaccaacgtcatcgtcgccaacaccatgcccacccacctctccaacggccagatgtgcgagtggccccgcccccgcggccaggccgccacccccgagaccccccagccctccccccccggcggctccggctccgagccctacaagctcctccccggcgccgtcgccaccatcgtcaagcccctctccgccatcccccagcccaccatcaccaagcaggaggtcatctgaggactagttataagactgactagcccgatgggcctcccaacgggccctcctcccctccttgcaccgagattaataaaaaaaaaaaaaaaaaaaaaaaaaaaaaaaaaaaaaaaaaaaaaaaaaaaaaaaaaaaaaaaatgcatcccccccccccccccccccccccccccccccaaaggctcttttcagagccaccagaatt

SEQ ID NO: 2569 - RNA, 1531 nt, synthetic construct
  misc_feature 1..1531: note = mRNA i-3 (A64-N5-C30-hSL-N5) (opt2) from Homo sapiens__NP_000448.3__HNF4A(39-474)(S167E)
  source 1..1531: mol_type = other RNA
aggagaaagcttaccatggacacctccccctccgagggcaccaacctcaacgcccccaactccctcggcgtctccgccctctgcgccatctgcggcgaccgcgccaccggcaagcactacggcgcctcctcctgcgacggctgcaagggcttcttccgccgctccgtccgcaagaaccacatgtactcctgccgcttctcccgccagtgcgtcgtcgacaaggacaagcgcaaccagtgccgctactgccgcctcaagaagtgcttccgcgccggcatgaagaaggaggccgtccagaacgagcgcgaccgcatctccacccgccgctcctcctacgaggactcctccctcccctccatcaacgccctcctccaggccgaggtcctctcccgccagatcaccgagcccgtctccggcatcaacggcgacatccgcgccaagaagatcgcctccatcgccgacgtctgcgagtccatgaaggagcagctcctcgtcctcgtcgagtgggccaagtacatccccgccttctgcgagctccccctcgacgaccaggtcgccctcctccgcgcccacgccggcgagcacctcctcctcggcgccaccaagcgctccatggtcttcaaggacgtcctcctcctcggcaacgactacatcgtcccccgccactgccccgagctcgccgagatgtcccgcgtctccatccgcatcctcgacgagctcgtcctccccttccaggagctccagatcgacgacaacgagtacgcctacctcaaggccatcatcttcttcgaccccgacgccaagggcctctccgaccccggcaagatcaagcgcctccgctcccaggtccaggtctccctcgaggactacatcaacgaccgccagtacgactcccgcggccgcttcggcgagctcctcctcctcctccccaccctccagtccatcacctggcagatgatcgagcagatccagttcatcaagctcttcggcatggccaagatcgacaacctcctccaggagatgctcctcggcggctccccctccgacgccccccacgcccaccaccccctccacccccacctcatgcaggagcacatgggcaccaacgtcatcgtcgccaacaccatgcccacccacctctccaacggccagatgtgcgagtggccccgcccccgcggccaggccgccacccccgagaccccccagccctccccccccggcggctccggctccgagccctacaagctcctccccggcgccgtcgccaccatcgtcaagcccctctccgccatcccccagcccaccatcaccaagcaggaggtcatctgaggactagttataagactgactagcccgatgggcctcccaacgggccctcctcccctccttgcaccgagattaataaaaaaaaaaaaaaaaaaaaaaaaaaaaaaaaaaaaaaaaaaaaaaaaaaaaaaaaaaaaaaaatgcatcccccccccccccccccccccccccccccccaaaggctcttttcagagccaccagaatt

SEQ ID NO: 2570 - RNA, 1531 nt, synthetic construct
  misc_feature 1..1531: note = mRNA i-3 (A64-N5-C30-hSL-N5) (opt2) from Homo sapiens__NP_000448.3__HNF4A(39-474)(S167A)
  source 1..1531: mol_type = other RNA
aggagaaagcttaccatggacacctccccctccgagggcaccaacctcaacgcccccaactccctcggcgtctccgccctctgcgccatctgcggcgaccgcgccaccggcaagcactacggcgcctcctcctgcgacggctgcaagggcttcttccgccgctccgtccgcaagaaccacatgtactcctgccgcttctcccgccagtgcgtcgtcgacaaggacaagcgcaaccagtgccgctactgccgcctcaagaagtgcttccgcgccggcatgaagaaggaggccgtccagaacgagcgcgaccgcatctccacccgccgctcctcctacgaggactcctccctcccctccatcaacgccctcctccaggccgaggtcctctcccgccagatcaccgcccccgtctccggcatcaacggcgacatccgcgccaagaagatcgcctccatcgccgacgtctgcgagtccatgaaggagcagctcctcgtcctcgtcgagtgggccaagtacatccccgccttctgcgagctccccctcgacgaccaggtcgccctcctccgcgcccacgccggcgagcacctcctcctcggcgccaccaagcgctccatggtcttcaaggacgtcctcctcctcggcaacgactacatcgtcccccgccactgccccgagctcgccgagatgtcccgcgtctccatccgcatcctcgacgagctcgtcctccccttccaggagctccagatcgacgacaacgagtacgcctacctcaaggccatcatcttcttcgaccccgacgccaagggcctctccgaccccggcaagatcaagcgcctccgctcccaggtccaggtctccctcgaggactacatcaacgaccgccagtacgactcccgcggccgcttcggcgagctcctcctcctcctccccaccctccagtccatcacctggcagatgatcgagcagatccagttcatcaagctcttcggcatggccaagatcgacaacctcctccaggagatgctcctcggcggctccccctccgacgccccccacgcccaccaccccctccacccccacctcatgcaggagcacatgggcaccaacgtcatcgtcgccaacaccatgcccacccacctctccaacggccagatgtgcgagtggccccgcccccgcggccaggccgccacccccgagaccccccagccctccccccccggcggctccggctccgagccctacaagctcctccccggcgccgtcgccaccatcgtcaagcccctctccgccatcccccagcccaccatcaccaagcaggaggtcatctgaggactagttataagactgactagcccgatgggcctcccaacgggccctcctcccctccttgcaccgagattaataaaaaaaaaaaaaaaaaaaaaaaaaaaaaaaaaaaaaaaaaaaaaaaaaaaaaaaaaaaaaaaatgcatcccccccccccccccccccccccccccccccaaaggctcttttcagagccaccagaatt

SEQ ID NO: 2571 - RNA, 1531 nt, synthetic construct
  misc_feature 1..1531: note = mRNA i-3 (A64-N5-C30-hSL-N5) (opt2) from Homo sapiens__NP_000448.3__HNF4A(39-474)(S167A_S378A_T429A_T432A _S436A)
  source 1..1531: mol_type = other RNA
aggagaaagcttaccatggacacctccccctccgagggcaccaacctcaacgcccccaactccctcggcgtctccgccctctgcgccatctgcggcgaccgcgccaccggcaagcactacggcgcctcctcctgcgacggctgcaagggcttcttccgccgctccgtccgcaagaaccacatgtactcctgccgcttctcccgccagtgcgtcgtcgacaaggacaagcgcaaccagtgccgctactgccgcctcaagaagtgcttccgcgccggcatgaagaaggaggccgtccagaacgagcgcgaccgcatctccacccgccgctcctcctacgaggactcctccctcccctccatcaacgccctcctccaggccgaggtcctctcccgccagatcaccgcccccgtctccggcatcaacggcgacatccgcgccaagaagatcgcctccatcgccgacgtctgcgagtccatgaaggagcagctcctcgtcctcgtcgagtgggccaagtacatccccgccttctgcgagctccccctcgacgaccaggtcgccctcctccgcgcccacgccggcgagcacctcctcctcggcgccaccaagcgctccatggtcttcaaggacgtcctcctcctcggcaacgactacatcgtcccccgccactgccccgagctcgccgagatgtcccgcgtctccatccgcatcctcgacgagctcgtcctccccttccaggagctccagatcgacgacaacgagtacgcctacctcaaggccatcatcttcttcgaccccgacgccaagggcctctccgaccccggcaagatcaagcgcctccgctcccaggtccaggtctccctcgaggactacatcaacgaccgccagtacgactcccgcggccgcttcggcgagctcctcctcctcctccccaccctccagtccatcacctggcagatgatcgagcagatccagttcatcaagctcttcggcatggccaagatcgacaacctcctccaggagatgctcctcggcggcgccccctccgacgccccccacgcccaccaccccctccacccccacctcatgcaggagcacatgggcaccaacgtcatcgtcgccaacaccatgcccacccacctctccaacggccagatgtgcgagtggccccgcccccgcggccaggccgccgcccccgaggccccccagcccgccccccccggcggctccggctccgagccctacaagctcctccccggcgccgtcgccaccatcgtcaagcccctctccgccatcccccagcccaccatcaccaagcaggaggtcatctgaggactagttataagactgactagcccgatgggcctcccaacgggccctcctcccctccttgcaccgagattaataaaaaaaaaaaaaaaaaaaaaaaaaaaaaaaaaaaaaaaaaaaaaaaaaaaaaaaaaaaaaaaatgcatcccccccccccccccccccccccccccccccaaaggctcttttcagagccaccagaatt

SEQ ID NO: 2572 - RNA, 1531 nt, synthetic construct
  misc_feature 1..1531: note = mRNA i-3 (A64-N5-C30-hSL-N5) (opt2) from Homo sapiens__NP_000448.3__HNF4A(39-474)(S167E_S378E_T429E_T432E _S436E)
  source 1..1531: mol_type = other RNA
aggagaaagcttaccatggacacctccccctccgagggcaccaacctcaacgcccccaactccctcggcgtctccgccctctgcgccatctgcggcgaccgcgccaccggcaagcactacggcgcctcctcctgcgacggctgcaagggcttcttccgccgctccgtccgcaagaaccacatgtactcctgccgcttctcccgccagtgcgtcgtcgacaaggacaagcgcaaccagtgccgctactgccgcctcaagaagtgcttccgcgccggcatgaagaaggaggccgtccagaacgagcgcgaccgcatctccacccgccgctcctcctacgaggactcctccctcccctccatcaacgccctcctccaggccgaggtcctctcccgccagatcaccgagcccgtctccggcatcaacggcgacatccgcgccaagaagatcgcctccatcgccgacgtctgcgagtccatgaaggagcagctcctcgtcctcgtcgagtgggccaagtacatccccgccttctgcgagctccccctcgacgaccaggtcgccctcctccgcgcccacgccggcgagcacctcctcctcggcgccaccaagcgctccatggtcttcaaggacgtcctcctcctcggcaacgactacatcgtcccccgccactgccccgagctcgccgagatgtcccgcgtctccatccgcatcctcgacgagctcgtcctccccttccaggagctccagatcgacgacaacgagtacgcctacctcaaggccatcatcttcttcgaccccgacgccaagggcctctccgaccccggcaagatcaagcgcctccgctcccaggtccaggtctccctcgaggactacatcaacgaccgccagtacgactcccgcggccgcttcggcgagctcctcctcctcctccccaccctccagtccatcacctggcagatgatcgagcagatccagttcatcaagctcttcggcatggccaagatcgacaacctcctccaggagatgctcctcggcggcgagccctccgacgccccccacgcccaccaccccctccacccccacctcatgcaggagcacatgggcaccaacgtcatcgtcgccaacaccatgcccacccacctctccaacggccagatgtgcgagtggccccgcccccgcggccaggccgccgagcccgaggagccccagcccgagccccccggcggctccggctccgagccctacaagctcctccccggcgccgtcgccaccatcgtcaagcccctctccgccatcccccagcccaccatcaccaagcaggaggtcatctgaggactagttataagactgactagcccgatgggcctcccaacgggccctcctcccctccttgcaccgagattaataaaaaaaaaaaaaaaaaaaaaaaaaaaaaaaaaaaaaaaaaaaaaaaaaaaaaaaaaaaaaaaatgcatcccccccccccccccccccccccccccccccaaaggctcttttcagagccaccagaatt

SEQ ID NO: 2573 - RNA, 1531 nt, synthetic construct
  misc_feature 1..1531: note = mRNA i-3 (A64-N5-C30-hSL-N5) (opt2) from Homo sapiens__NP_000448.3__HNF4A(39-474)(S87A)
  source 1..1531: mol_type = other RNA
aggagaaagcttaccatggacacctccccctccgagggcaccaacctcaacgcccccaactccctcggcgtctccgccctctgcgccatctgcggcgaccgcgccaccggcaagcactacggcgcctcctcctgcgacggctgcaagggcttcttccgccgcgccgtccgcaagaaccacatgtactcctgccgcttctcccgccagtgcgtcgtcgacaaggacaagcgcaaccagtgccgctactgccgcctcaagaagtgcttccgcgccggcatgaagaaggaggccgtccagaacgagcgcgaccgcatctccacccgccgctcctcctacgaggactcctccctcccctccatcaacgccctcctccaggccgaggtcctctcccgccagatcacctcccccgtctccggcatcaacggcgacatccgcgccaagaagatcgcctccatcgccgacgtctgcgagtccatgaaggagcagctcctcgtcctcgtcgagtgggccaagtacatccccgccttctgcgagctccccctcgacgaccaggtcgccctcctccgcgcccacgccggcgagcacctcctcctcggcgccaccaagcgctccatggtcttcaaggacgtcctcctcctcggcaacgactacatcgtcccccgccactgccccgagctcgccgagatgtcccgcgtctccatccgcatcctcgacgagctcgtcctccccttccaggagctccagatcgacgacaacgagtacgcctacctcaaggccatcatcttcttcgaccccgacgccaagggcctctccgaccccggcaagatcaagcgcctccgctcccaggtccaggtctccctcgaggactacatcaacgaccgccagtacgactcccgcggccgcttcggcgagctcctcctcctcctccccaccctccagtccatcacctggcagatgatcgagcagatccagttcatcaagctcttcggcatggccaagatcgacaacctcctccaggagatgctcctcggcggctccccctccgacgccccccacgcccaccaccccctccacccccacctcatgcaggagcacatgggcaccaacgtcatcgtcgccaacaccatgcccacccacctctccaacggccagatgtgcgagtggccccgcccccgcggccaggccgccacccccgagaccccccagccctccccccccggcggctccggctccgagccctacaagctcctccccggcgccgtcgccaccatcgtcaagcccctctccgccatcccccagcccaccatcaccaagcaggaggtcatctgaggactagttataagactgactagcccgatgggcctcccaacgggccctcctcccctccttgcaccgagattaataaaaaaaaaaaaaaaaaaaaaaaaaaaaaaaaaaaaaaaaaaaaaaaaaaaaaaaaaaaaaaaatgcatcccccccccccccccccccccccccccccccaaaggctcttttcagagccaccagaatt

SEQ ID NO: 2574 - RNA, 1531 nt, synthetic construct
  misc_feature 1..1531: note = mRNA i-3 (A64-N5-C30-hSL-N5) (opt2) from Homo sapiens__NP_000448.3__HNF4A(39-474)(S87E)
  source 1..1531: mol_type = other RNA
aggagaaagcttaccatggacacctccccctccgagggcaccaacctcaacgcccccaactccctcggcgtctccgccctctgcgccatctgcggcgaccgcgccaccggcaagcactacggcgcctcctcctgcgacggctgcaagggcttcttccgccgcgaggtccgcaagaaccacatgtactcctgccgcttctcccgccagtgcgtcgtcgacaaggacaagcgcaaccagtgccgctactgccgcctcaagaagtgcttccgcgccggcatgaagaaggaggccgtccagaacgagcgcgaccgcatctccacccgccgctcctcctacgaggactcctccctcccctccatcaacgccctcctccaggccgaggtcctctcccgccagatcacctcccccgtctccggcatcaacggcgacatccgcgccaagaagatcgcctccatcgccgacgtctgcgagtccatgaaggagcagctcctcgtcctcgtcgagtgggccaagtacatccccgccttctgcgagctccccctcgacgaccaggtcgccctcctccgcgcccacgccggcgagcacctcctcctcggcgccaccaagcgctccatggtcttcaaggacgtcctcctcctcggcaacgactacatcgtcccccgccactgccccgagctcgccgagatgtcccgcgtctccatccgcatcctcgacgagctcgtcctccccttccaggagctccagatcgacgacaacgagtacgcctacctcaaggccatcatcttcttcgaccccgacgccaagggcctctccgaccccggcaagatcaagcgcctccgctcccaggtccaggtctccctcgaggactacatcaacgaccgccagtacgactcccgcggccgcttcggcgagctcctcctcctcctccccaccctccagtccatcacctggcagatgatcgagcagatccagttcatcaagctcttcggcatggccaagatcgacaacctcctccaggagatgctcctcggcggctccccctccgacgccccccacgcccaccaccccctccacccccacctcatgcaggagcacatgggcaccaacgtcatcgtcgccaacaccatgcccacccacctctccaacggccagatgtgcgagtggccccgcccccgcggccaggccgccacccccgagaccccccagccctccccccccggcggctccggctccgagccctacaagctcctccccggcgccgtcgccaccatcgtcaagcccctctccgccatcccccagcccaccatcaccaagcaggaggtcatctgaggactagttataagactgactagcccgatgggcctcccaacgggccctcctcccctccttgcaccgagattaataaaaaaaaaaaaaaaaaaaaaaaaaaaaaaaaaaaaaaaaaaaaaaaaaaaaaaaaaaaaaaaatgcatcccccccccccccccccccccccccccccccaaaggctcttttcagagccaccagaatt

SEQ ID NO: 2575 - RNA, 1531 nt, synthetic construct
  misc_feature 1..1531: note = mRNA i-3 (A64-N5-C30-hSL-N5) (opt2) from Homo sapiens__NP_000448.3__HNF4A(39-474)(R2V)
  source 1..1531: mol_type = other RNA
aggagaaagcttaccatggacacctccccctccgagggcaccaacctcaacgcccccaactccctcggcgtctccgccctctgcgccatctgcggcgaccgcgccaccggcaagcactacggcgcctcctcctgcgacggctgcaagggcttcttccgccgctccgtccgcaagaaccacatgtactcctgccgcttctcccgccagtgcgtcgtcgacaaggacaagcgcaaccagtgccgctactgccgcctcaagaagtgcttccgcgccggcatgaagaaggaggccgtccagaacgagcgcgaccgcatctccacccgccgctcctcctacgaggactcctccctcccctccatcaacgccctcctccaggccgaggtcctctcccgccagatcacctcccccgtctccggcatcaacggcgacatccgcgccaagaagatcgcctccatcgccgacgtctgcgagtccatgaaggagcagctcctcgtcctcgtcgagtgggccaagtacatccccgccttctgcgagctccccctcgacgaccaggtcgccctcctccgcgcccacgccggcgagcacctcctcctcggcgccaccaagcgctccatggtcttcaaggacgtcctcctcctcggcaacgactacatcgtcccccgccactgccccgagctcgccgagatgtcccgcgtctccatccgcatcctcgacgagctcgtcctccccttccaggagctccagatcgacgacaacgagtacgcctacctcaaggccatcatcttcttcgaccccgacgccaagggcctctccgaccccggcaagatcaagcgcctccgctcccaggtccaggtctccctcgaggactacatcaacgaccgccagtacgactcccgcggccgcttcggcgagctcctcctcctcctccccaccctccagtccatcacctggcagatgatcgagcagatccagttcatcaagctcttcggcatggccaagatcgacaacctcctccaggagatgctcctcggcggctccccctccgacgccccccacgcccaccaccccctccacccccacctcatgcaggagcacatgggcaccaacgtcatcgtcgccaacaccatgcccacccacctctccaacggccagatgtgcgagtggccccgcccccgcggccaggccgccacccccgagaccccccagccctccccccccggcggctccggctccgagccctacaagctcctccccggcgccgtcgccaccatcgtcaagcccctctccgccatcccccagcccaccatcaccaagcaggaggtcatctgaggactagttataagactgactagcccgatgggcctcccaacgggccctcctcccctccttgcaccgagattaataaaaaaaaaaaaaaaaaaaaaaaaaaaaaaaaaaaaaaaaaaaaaaaaaaaaaaaaaaaaaaaatgcatcccccccccccccccccccccccccccccccaaaggctcttttcagagccaccagaatt

SEQ ID NO: 2576 - RNA, 1531 nt, synthetic construct; identical to SEQ ID NO: 2575
  misc_feature 1..1531: note = mRNA i-3 (A64-N5-C30-hSL-N5) (opt2) from Homo sapiens__NP_000448.3__HNF4A(39-474)(R2V_K5V)
  source 1..1531: mol_type = other RNA

SEQ ID NO: 2577 - RNA, 1531 nt, synthetic construct
  misc_feature 1..1531: note = mRNA i-3 (A64-N5-C30-hSL-N5) (opt2) from Homo sapiens__NP_000448.3__HNF4A(39-474)(K179R_K180R)
  source 1..1531: mol_type = other RNA
aggagaaagcttaccatggacacctccccctccgagggcaccaacctcaacgcccccaactccctcggcgtctccgccctctgcgccatctgcggcgaccgcgccaccggcaagcactacggcgcctcctcctgcgacggctgcaagggcttcttccgccgctccgtccgcaagaaccacatgtactcctgccgcttctcccgccagtgcgtcgtcgacaaggacaagcgcaaccagtgccgctactgccgcctcaagaagtgcttccgcgccggcatgaagaaggaggccgtccagaacgagcgcgaccgcatctccacccgccgctcctcctacgaggactcctccctcccctccatcaacgccctcctccaggccgaggtcctctcccgccagatcacctcccccgtctccggcatcaacggcgacatccgcgcccgccgcatcgcctccatcgccgacgtctgcgagtccatgaaggagcagctcctcgtcctcgtcgagtgggccaagtacatccccgccttctgcgagctccccctcgacgaccaggtcgccctcctccgcgcccacgccggcgagcacctcctcctcggcgccaccaagcgctccatggtcttcaaggacgtcctcctcctcggcaacgactacatcgtcccccgccactgccccgagctcgccgagatgtcccgcgtctccatccgcatcctcgacgagctcgtcctccccttccaggagctccagatcgacgacaacgagtacgcctacctcaaggccatcatcttcttcgaccccgacgccaagggcctctccgaccccggcaagatcaagcgcctccgctcccaggtccaggtctccctcgaggactacatcaacgaccgccagtacgactcccgcggccgcttcggcgagctcctcctcctcctccccaccctccagtccatcacctggcagatgatcgagcagatccagttcatcaagctcttcggcatggccaagatcgacaacctcctccaggagatgctcctcggcggctccccctccgacgccccccacgcccaccaccccctccacccccacctcatgcaggagcacatgggcaccaacgtcatcgtcgccaacaccatgcccacccacctctccaacggccagatgtgcgagtggccccgcccccgcggccaggccgccacccccgagaccccccagccctccccccccggcggctccggctccgagccctacaagctcctccccggcgccgtcgccaccatcgtcaagcccctctccgccatcccccagcccaccatcaccaagcaggaggtcatctgaggactagttataagactgactagcccgatgggcctcccaacgggccctcctcccctccttgcaccgagattaataaaaaaaaaaaaaaaaaaaaaaaaaaaaaaaaaaaaaaaaaaaaaaaaaaaaaaaaaaaaaaaatgcatcccccccccccccccccccccccccccccccaaaggctcttttcagagccaccagaatt

SEQ ID NO: 2578 - RNA, 1531 nt, synthetic construct
  misc_feature 1..1531: note = mRNA i-3 (A64-N5-C30-hSL-N5) (opt2) from Homo sapiens__NP_000448.3__HNF4A(39-474)(K234R)
  source 1..1531: mol_type = other RNA
aggagaaagcttaccatggacacctccccctccgagggcaccaacctcaacgcccccaactccctcggcgtctccgccctctgcgccatctgcggcgaccgcgccaccggcaagcactacggcgcctcctcctgcgacggctgcaagggcttcttccgccgctccgtccgcaagaaccacatgtactcctgccgcttctcccgccagtgcgtcgtcgacaaggacaagcgcaaccagtgccgctactgccgcctcaagaagtgcttccgcgccggcatgaagaaggaggccgtccagaacgagcgcgaccgcatctccacccgccgctcctcctacgaggactcctccctcccctccatcaacgccctcctccaggccgaggtcctctcccgccagatcacctcccccgtctccggcatcaacggcgacatccgcgccaagaagatcgcctccatcgccgacgtctgcgagtccatgaaggagcagctcctcgtcctcgtcgagtgggccaagtacatccccgccttctgcgagctccccctcgacgaccaggtcgccctcctccgcgcccacgccggcgagcacctcctcctcggcgccacccgccgctccatggtcttcaaggacgtcctcctcctcggcaacgactacatcgtcccccgccactgccccgagctcgccgagatgtcccgcgtctccatccgcatcctcgacgagctcgtcctccccttccaggagctccagatcgacgacaacgagtacgcctacctcaaggccatcatcttcttcgaccccgacgccaagggcctctccgaccccggcaagatcaagcgcctccgctcccaggtccaggtctccctcgaggactacatcaacgaccgccagtacgactcccgcggccgcttcggcgagctcctcctcctcctccccaccctccagtccatcacctggcagatgatcgagcagatccagttcatcaagctcttcggcatggccaagatcgacaacctcctccaggagatgctcctcggcggctccccctccgacgccccccacgcccaccaccccctccacccccacctcatgcaggagcacatgggcaccaacgtcatcgtcgccaacaccatgcccacccacctctccaacggccagatgtgcgagtggccccgcccccgcggccaggccgccacccccgagaccccccagccctccccccccggcggctccggctccgagccctacaagctcctccccggcgccgtcgccaccatcgtcaagcccctctccgccatcccccagcccaccatcaccaagcaggaggtcatctgaggactagttataagactgactagcccgatgggcctcccaacgggccctcctcccctccttgcaccgagattaataaaaaaaaaaaaaaaaaaaaaaaaaaaaaaaaaaaaaaaaaaaaaaaaaaaaaaaaaaaaaaaatgcatcccccccccccccccccccccccccccccccaaaggctcttttcagagccaccagaatt

SEQ ID NO: 2579 - RNA, 1531 nt, synthetic construct
  misc_feature 1..1531: note = mRNA i-3 (A64-N5-C30-hSL-N5) (opt2) from Homo sapiens__NP_000448.3__HNF4A(39-474)(K300R)
  source 1..1531: mol_type = other RNA
aggagaaagcttaccatggacacctccccctccgagggcaccaacctcaacgcccccaactccctcggcgtctccgccctctgcgccatctgcggcgaccgcgccaccggcaagcactacggcgcctcctcctgcgacggctgcaagggcttcttccgccgctccgtccgcaagaaccacatgtactcctgccgcttctcccgccagtgcgtcgtcgacaaggacaagcgcaaccagtgccgctactgccgcctcaagaagtgcttccgcgccggcatgaagaaggaggccgtccagaacgagcgcgaccgcatctccacccgccgctcctcctacgaggactcctccctcccctccatcaacgccctcctccaggccgaggtcctctcccgccagatcacctcccccgtctccggcatcaacggcgacatccgcgccaagaagatcgcctccatcgccgacgtctgcgagtccatgaaggagcagctcctcgtcctcgtcgagtgggccaagtacatccccgccttctgcgagctccccctcgacgaccaggtcgccctcctccgcgcccacgccggcgagcacctcctcctcggcgccaccaagcgctccatggtcttcaaggacgtcctcctcctcggcaacgactacatcgtcccccgccactgccccgagctcgccgagatgtcccgcgtctccatccgcatcctcgacgagctcgtcctccccttccaggagctccagatcgacgacaacgagtacgcctacctcaaggccatcatcttcttcgaccccgacgcccgcggcctctccgaccccggcaagatcaagcgcctccgctcccaggtccaggtctccctcgaggactacatcaacgaccgccagtacgactcccgcggccgcttcggcgagctcctcctcctcctccccaccctccagtccatcacctggcagatgatcgagcagatccagttcatcaagctcttcggcatggccaagatcgacaacctcctccaggagatgctcctcggcggctccccctccgacgccccccacgcccaccaccccctccacccccacctcatgcaggagcacatgggcaccaacgtcatcgtcgccaacaccatgcccacccacctctccaacggccagatgtgcgagtggccccgcccccgcggccaggccgccacccccgagaccccccagccctccccccccggcggctccggctccgagccctacaagctcctccccggcgccgtcgccaccatcgtcaagcccctctccgccatcccccagcccaccatcaccaagcaggaggtcatctgaggactagttataagactgactagcccgatgggcctcccaacgggccctcctcccctccttgcaccgagattaataaaaaaaaaaaaaaaaaaaaaaaaaaaaaaaaaaaaaaaaaaaaaaaaaaaaaaaaaaaaaaaatgcatcccccccccccccccccccccccccccccccaaaggctcttttcagagccaccagaatt

SEQ ID NO: 2580 - RNA, 1531 nt, synthetic construct
  misc_feature 1..1531: note = mRNA i-3 (A64-N5-C30-hSL-N5) (opt2) from Homo sapiens__NP_000448.3__HNF4A(39-474)(K300R_K307R_K309R)
  source 1..1531: mol_type = other RNA
aggagaaagcttaccatggacacctccccctccgagggcaccaacctcaacgcccccaactccctcggcgtctccgccctctgcgccatctgcggcgaccgcgccaccggcaagcactacggcgcctcctcctgcgacggctgcaagggcttcttccgccgctccgtccgcaagaaccacatgtactcctgccgcttctcccgccagtgcgtcgtcgacaaggacaagcgcaaccagtgccgctactgccgcctcaagaagtgcttccgcgccggcatgaagaaggaggccgtccagaacgagcgcgaccgcatctccacccgccgctcctcctacgaggactcctccctcccctccatcaacgccctcctccaggccgaggtcctctcccgccagatcacctcccccgtctccggcatcaacggcgacatccgcgccaagaagatcgcctccatcgccgacgtctgcgagtccatgaaggagcagctcctcgtcctcgtcgagtgggccaagtacatccccgccttctgcgagctccccctcgacgaccaggtcgccctcctccgcgcccacgccggcgagcacctcctcctcggcgccaccaagcgctccatggtcttcaaggacgtcctcctcctcggcaacgactacatcgtcccccgccactgccccgagctcgccgagatgtcccgcgtctccatccgcatcctcgacgagctcgtcctccccttccaggagctccagatcgacgacaacgagtacgcctacctcaaggccatcatcttcttcgaccccgacgcccgcggcctctccgaccccggccgcatccgccgcctccgctcccaggtccaggtctccctcgaggactacatcaacgaccgccagtacgactcccgcggccgcttcggcgagctcctcctcctcctccccaccctccagtccatcacctggcagatgatcgagcagatccagttcatcaagctcttcggcatggccaagatcgacaacctcctccaggagatgctcctcggcggctccccctccgacgccccccacgcccaccaccccctccacccccacctcatgcaggagcacatgggcaccaacgtcatcgtcgccaacaccatgcccacccacctctccaacggccagatgtgcgagtggccccgcccccgcggccaggccgccacccccgagaccccccagccctccccccccggcggctccggctccgagccctacaagctcctccccggcgccgtcgccaccatcgtcaagcccctctccgccatcccccagcccaccatcaccaagcaggaggtcatctgaggactagttataagactgactagcccgatgggcctcccaacgggccctcctcccctccttgcaccgagattaataaaaaaaaaaaaaaaaaaaaaaaaaaaaaaaaaaaaaaaaaaaaaaaaaaaaaaaaaaaaaaaatgcatcccccccccccccccccccccccccccccccaaaggctcttttcagagccaccagaatt

SEQ ID NO: 2581 - RNA, 1531 nt, synthetic construct
  misc_feature 1..1531: note = mRNA i-3 (A64-N5-C30-hSL-N5) (opt2) from Homo sapiens__NP_000448.3__HNF4A(39-474)(K447R_K470R)
  source 1..1531: mol_type = other RNA
aggagaaagcttaccatggacacctccccctccgagggcaccaacctcaacgcccccaactccctcggcgtctccgccctctgcgccatctgcggcgaccgcgccaccggcaagcactacggcgcctcctcctgcgacggctgcaagggcttcttccgccgctccgtccgcaagaaccacatgtactcctgccgcttctcccgccagtgcgtcgtcgacaaggacaagcgcaaccagtgccgctactgccgcctcaagaagtgcttccgcgccggcatgaagaaggaggccgtccagaacgagcgcgaccgcatctccacccgccgctcctcctacgaggactcctccctcccctccatcaacgccctcctccaggccgaggtcctctcccgccagatcacctcccccgtctccggcatcaacggcgacatccgcgccaagaagatcgcctccatcgccgacgtctgcgagtccatgaaggagcagctcctcgtcctcgtcgagtgggccaagtacatccccgccttctgcgagctccccctcgacgaccaggtcgccctcctccgcgcccacgccggcgagcacctcctcctcggcgccaccaagcgctccatggtcttcaaggacgtcctcctcctcggcaacgactacatcgtcccccgccactgccccgagctcgccgagatgtcccgcgtctccatccgcatcctcgacgagctcgtcctccccttccaggagctccagatcgacgacaacgagtacgcctacctcaaggccatcatcttcttcgaccccgacgccaagggcctctccgaccccggcaagatcaagcgcctccgctcccaggtccaggtctccctcgaggactacatcaacgaccgccagtacgactcccgcggccgcttcggcgagctcctcctcctcctccccaccctccagtccatcacctggcagatgatcgagcagatccagttcatcaagctcttcggcatggccaagatcgacaacctcctccaggagatgctcctcggcggctccccctccgacgccccccacgcccaccaccccctccacccccacctcatgcaggagcacatgggcaccaacgtcatcgtcgccaacaccatgcccacccacctctccaacggccagatgtgcgagtggccccgcccccgcggccaggccgccacccccgagaccccccagccctccccccccggcggctccggctccgagccctaccgcctcctccccggcgccgtcgccaccatcgtcaagcccctctccgccatcccccagcccaccatcacccgccaggaggtcatctgaggactagttataagactgactagcccgatgggcctcccaacgggccctcctcccctccttgcaccgagattaataaaaaaaaaaaaaaaaaaaaaaaaaaaaaaaaaaaaaaaaaaaaaaaaaaaaaaaaaaaaaaaatgcatcccccccccccccccccccccccccccccccaaaggctcttttcagagccaccagaatt

SEQ ID NO: 2582 - RNA, 1531 nt, synthetic construct
  misc_feature 1..1531: note = mRNA i-3 (A64-N5-C30-hSL-N5) (opt2) from Homo sapiens__NP_000448.3__HNF4A(39-474)(K458R)
  source 1..1531: mol_type = other RNA
aggagaaagcttaccatggacacctccccctccgagggcaccaacctcaacgcccccaactccctcggcgtctccgccctctgcgccatctgcggcgaccgcgccaccggcaagcactacggcgcctcctcctgcgacggctgcaagggcttcttccgccgctccgtccgcaagaaccacatgtactcctgccgcttctcccgccagtgcgtcgtcgacaaggacaagcgcaaccagtgccgctactgccgcctcaagaagtgcttccgcgccggcatgaagaaggaggccgtccagaacgagcgcgaccgcatctccacccgccgctcctcctacgaggactcctccctcccctccatcaacgccctcctccaggccgaggtcctctcccgccagatcacctcccccgtctccggcatcaacggcgacatccgcgccaagaagatcgcctccatcgccgacgtctgcgagtccatgaaggagcagctcctcgtcctcgtcgagtgggccaagtacatccccgccttctgcgagctccccctcgacgaccaggtcgccctcctccgcgcccacgccggcgagcacctcctcctcggcgccaccaagcgctccatggtcttcaaggacgtcctcctcctcggcaacgactacatcgtcccccgccactgccccgagctcgccgagatgtcccgcgtctccatccgcatcctcgacgagctcgtcctccccttccaggagctccagatcgacgacaacgagtacgcctacctcaaggccatcatcttcttcgaccccgacgccaagggcctctccgaccccggcaagatcaagcgcctccgctcccaggtccaggtctccctcgaggactacatcaacgaccgccagtacgactcccgcggccgcttcggcgagctcctcctcctcctccccaccctccagtccatcacctggcagatgatcgagcagatccagttcatcaagctcttcggcatggccaagatcgacaacctcctccaggagatgctcctcggcggctccccctccgacgccccccacgcccaccaccccctccacccccacctcatgcaggagcacatgggcaccaacgtcatcgtcgccaacaccatgcccacccacctctccaacggccagatgtgcgagtggccccgcccccgcggccaggccgccacccccgagaccccccagccctccccccccggcggctccggctccgagccctacaagctcctccccggcgccgtcgccaccatcgtccgccccctctccgccatcccccagcccaccatcaccaagcaggaggtcatctgaggactagttataagactgactagcccgatgggcctcccaacgggccctcctcccctccttgcaccgagattaataaaaaaaaaaaaaaaaaaaaaaaaaaaaaaaaaaaaaaaaaaaaaaaaaaaaaaaaaaaaaaaatgcatcccccccccccccccccccccccccccccccaaaggctcttttcagagccaccagaatt

SEQ ID NO: 2583 - RNA, 1531 nt, synthetic construct
  misc_feature 1..1531: note = mRNA i-3 (A64-N5-C30-hSL-N5) (opt2) from Homo sapiens__NP_000448.3__HNF4A(39-474)(K106R_K108R_K126R_K127R )
  source 1..1531: mol_type = other RNA
aggagaaagcttaccatggacacctccccctccgagggcaccaacctcaacgcccccaactccctcggcgtctccgccctctgcgccatctgcggcgaccgcgccaccggcaagcactacggcgcctcctcctgcgacggctgcaagggcttcttccgccgctccgtccgcaagaaccacatgtactcctgccgcttctcccgccagtgcgtcgtcgaccgcgaccgccgcaaccagtgccgctactgccgcctcaagaagtgcttccgcgccggcatgcgccgcgaggccgtccagaacgagcgcgaccgcatctccacccgccgctcctcctacgaggactcctccctcccctccatcaacgccctcctccaggccgaggtcctctcccgccagatcacctcccccgtctccggcatcaacggcgacatccgcgccaagaagatcgcctccatcgccgacgtctgcgagtccatgaaggagcagctcctcgtcctcgtcgagtgggccaagtacatccccgccttctgcgagctccccctcgacgaccaggtcgccctcctccgcgcccacgccggcgagcacctcctcctcggcgccaccaagcgctccatggtcttcaaggacgtcctcctcctcggcaacgactacatcgtcccccgccactgccccgagctcgccgagatgtcccgcgtctccatccgcatcctcgacgagctcgtcctccccttccaggagctccagatcgacgacaacgagtacgcctacctcaaggccatcatcttcttcgaccccgacgccaagggcctctccgaccccggcaagatcaagcgcctccgctcccaggtccaggtctccctcgaggactacatcaacgaccgccagtacgactcccgcggccgcttcggcgagctcctcctcctcctccccaccctccagtccatcacctggcagatgatcgagcagatccagttcatcaagctcttcggcatggccaagatcgacaacctcctccaggagatgctcctcggcggctccccctccgacgccccccacgcccaccaccccctccacccccacctcatgcaggagcacatgggcaccaacgtcatcgtcgccaacaccatgcccacccacctctccaacggccagatgtgcgagtggccccgcccccgcggccaggccgccacccccgagaccccccagccctccccccccggcggctccggctccgagccctacaagctcctccccggcgccgtcgccaccatcgtcaagcccctctccgccatcccccagcccaccatcaccaagcaggaggtcatctgaggactagttataagactgactagcccgatgggcctcccaacgggccctcctcccctccttgcaccgagattaataaaaaaaaaaaaaaaaaaaaaaaaaaaaaaaaaaaaaaaaaaaaaaaaaaaaaaaaaaaaaaaatgcatcccccccccccccccccccccccccccccccaaaggctcttttcagagccaccagaatt

SEQ ID NO: 2584 - RNA, 1531 nt, synthetic construct
  misc_feature 1..1531: note = mRNA i-3 (A64-N5-C30-hSL-N5) (opt2) from Homo sapiens__NP_000448.3__HNF4A(39-474)(E285Q)
  source 1..1531: mol_type = other RNA
aggagaaagcttaccatggacacctccccctccgagggcaccaacctcaacgcccccaactccctcggcgtctccgccctctgcgccatctgcggcgaccgcgccaccggcaagcactacggcgcctcctcctgcgacggctgcaagggcttcttccgccgctccgtccgcaagaaccacatgtactcctgccgcttctcccgccagtgcgtcgtcgacaaggacaagcgcaaccagtgccgctactgccgcctcaagaagtgcttccgcgccggcatgaagaaggaggccgtccagaacgagcgcgaccgcatctccacccgccgctcctcctacgaggactcctccctcccctccatcaacgccctcctccaggccgaggtcctctcccgccagatcacctcccccgtctccggcatcaacggcgacatccgcgccaagaagatcgcctccatcgccgacgtctgcgagtccatgaaggagcagctcctcgtcctcgtcgagtgggccaagtacatccccgccttctgcgagctccccctcgacgaccaggtcgccctcctccgcgcccacgccggcgagcacctcctcctcggcgccaccaagcgctccatggtcttcaaggacgtcctcctcctcggcaacgactacatcgtcccccgccactgccccgagctcgccgagatgtcccgcgtctccatccgcatcctcgacgagctcgtcctccccttccaggagctccagatcgacgacaaccagtacgcctacctcaaggccatcatcttcttcgaccccgacgccaagggcctctccgaccccggcaagatcaagcgcctccgctcccaggtccaggtctccctcgaggactacatcaacgaccgccagtacgactcccgcggccgcttcggcgagctcctcctcctcctccccaccctccagtccatcacctggcagatgatcgagcagatccagttcatcaagctcttcggcatggccaagatcgacaacctcctccaggagatgctcctcggcggctccccctccgacgccccccacgcccaccaccccctccacccccacctcatgcaggagcacatgggcaccaacgtcatcgtcgccaacaccatgcccacccacctctccaacggccagatgtgcgagtggccccgcccccgcggccaggccgccacccccgagaccccccagccctccccccccggcggctccggctccgagccctacaagctcctccccggcgccgtcgccaccatcgtcaagcccctctccgccatcccccagcccaccatcaccaagcaggaggtcatctgaggactagttataagactgactagcccgatgggcctcccaacgggccctcctcccctccttgcaccgagattaataaaaaaaaaaaaaaaaaaaaaaaaaaaaaaaaaaaaaaaaaaaaaaaaaaaaaaaaaaaaaaaatgcatcccccccccccccccccccccccccccccccaaaggctcttttcagagccaccagaatt

SEQ ID NO: 2585 - RNA, 1531 nt, synthetic construct
  misc_feature 1..1531: note = mRNA i-3 (A64-N5-C30-hSL-N5) (opt2) from Homo sapiens__NP_000448.3__HNF4A(39-474)(T166E)
  source 1..1531: mol_type = other RNA
aggagaaagcttaccatggacacctccccctccgagggcaccaacctcaacgcccccaactccctcggcgtctccgccctctgcgccatctgcggcgaccgcgccaccggcaagcactacggcgcctcctcctgcgacggctgcaagggcttcttccgccgctccgtccgcaagaaccacatgtactcctgccgcttctcccgccagtgcgtcgtcgacaaggacaagcgcaaccagtgccgctactgccgcctcaagaagtgcttccgcgccggcatgaagaaggaggccgtccagaacgagcgcgaccgcatctccacccgccgctcctcctacgaggactcctccctcccctccatcaacgccctcctccaggccgaggtcctctcccgccagatcgagtcccccgtctccggcatcaacggcgacatccgcgccaagaagatcgcctccatcgccgacgtctgcgagtccatgaaggagcagctcctcgtcctcgtcgagtgggccaagtacatccccgccttctgcgagctccccctcgacgaccaggtcgccctcctccgcgcccacgccggcgagcacctcctcctcggcgccaccaagcgctccatggtcttcaaggacgtcctcctcctcggcaacgactacatcgtcccccgccactgccccgagctcgccgagatgtcccgcgtctccatccgcatcctcgacgagctcgtcctccccttccaggagctccagatcgacgacaacgagtacgcctacctcaaggccatcatcttcttcgaccccgacgccaagggcctctccgaccccggcaagatcaagcgcctccgctcccaggtccaggtctccctcgaggactacatcaacgaccgccagtacgactcccgcggccgcttcggcgagctcctcctcctcctccccaccctccagtccatcacctggcagatgatcgagcagatccagttcatcaagctcttcggcatggccaagatcgacaacctcctccaggagatgctcctcggcggctccccctccgacgccccccacgcccaccaccccctccacccccacctcatgcaggagcacatgggcaccaacgtcatcgtcgccaacaccatgcccacccacctctccaacggccagatgtgcgagtggccccgcccccgcggccaggccgccacccccgagaccccccagccctccccccccggcggctccggctccgagccctacaagctcctccccggcgccgtcgccaccatcgtcaagcccctctccgccatcccccagcccaccatcaccaagcaggaggtcatctgaggactagttataagactgactagcccgatgggcctcccaacgggccctcctcccctccttgcaccgagattaataaaaaaaaaaaaaaaaaaaaaaaaaaaaaaaaaaaaaaaaaaaaaaaaaaaaaaaaaaaaaaaatgcatcccccccccccccccccccccccccccccccaaaggctcttttcagagccaccagaatt

SEQ ID NO: 2586 - RNA, 1531 nt, synthetic construct
  misc_feature 1..1531: note = mRNA i-3 (A64-N5-C30-hSL-N5) (opt2) from Homo sapiens__NP_000448.3__HNF4A(39-474)(S148A)
  source 1..1531: mol_type = other RNA
aggagaaagcttaccatggacacctccccctccgagggcaccaacctcaacgcccccaactccctcggcgtctccgccctctgcgccatctgcggcgaccgcgccaccggcaagcactacggcgcctcctcctgcgacggctgcaagggcttcttccgccgctccgtccgcaagaaccacatgtactcctgccgcttctcccgccagtgcgtcgtcgacaaggacaagcgcaaccagtgccgctactgccgcctcaagaagtgcttccgcgccggcatgaagaaggaggccgtccagaacgagcgcgaccgcatctccacccgccgctcctcctacgaggactccgccctcccctccatcaacgccctcctccaggccgaggtcctctcccgccagatcacctcccccgtctccggcatcaacggcgacatccgcgccaagaagatcgcctccatcgccgacgtctgcgagtccatgaaggagcagctcctcgtcctcgtcgagtgggccaagtacatccccgccttctgcgagctccccctcgacgaccaggtcgccctcctccgcgcccacgccggcgagcacctcctcctcggcgccaccaagcgctccatggtcttcaaggacgtcctcctcctcggcaacgactacatcgtcccccgccactgccccgagctcgccgagatgtcccgcgtctccatccgcatcctcgacgagctcgtcctccccttccaggagctccagatcgacgacaacgagtacgcctacctcaaggccatcatcttcttcgaccccgacgccaagggcctctccgaccccggcaagatcaagcgcctccgctcccaggtccaggtctccctcgaggactacatcaacgaccgccagtacgactcccgcggccgcttcggcgagctcctcctcctcctccccaccctccagtccatcacctggcagatgatcgagcagatccagttcatcaagctcttcggcatggccaagatcgacaacctcctccaggagatgctcctcggcggctccccctccgacgccccccacgcccaccaccccctccacccccacctcatgcaggagcacatgggcaccaacgtcatcgtcgccaacaccatgcccacccacctctccaacggccagatgtgcgagtggccccgcccccgcggccaggccgccacccccgagaccccccagccctccccccccggcggctccggctccgagccctacaagctcctccccggcgccgtcgccaccatcgtcaagcccctctccgccatcccccagcccaccatcaccaagcaggaggtcatctgaggactagttataagactgactagcccgatgggcctcccaacgggccctcctcccctccttgcaccgagattaataaaaaaaaaaaaaaaaaaaaaaaaaaaaaaaaaaaaaaaaaaaaaaaaaaaaaaaaaaaaaaaatgcatcccccccccccccccccccccccccccccccaaaggctcttttcagagccaccagaatt

SEQ ID NO: 2587 - RNA, 1531 nt, synthetic construct
  misc_feature 1..1531: note = mRNA i-3 (A64-N5-C30-hSL-N5) (opt2) from Homo sapiens__NP_000448.3__HNF4A(39-474)(S148E)
  source 1..1531: mol_type = other RNA
aggagaaagcttaccatggacacctccccctccgagggcaccaacctcaacgcccccaactccctcggcgtctccgccctctgcgccatctgcggcgaccgcgccaccggcaagcactacggcgcctcctcctgcgacggctgcaagggcttcttccgccgctccgtccgcaagaaccacatgtactcctgccgcttctcccgccagtgcgtcgtcgacaaggacaagcgcaaccagtgccgctactgccgcctcaagaagtgcttccgcgccggcatgaagaaggaggccgtccagaacgagcgcgaccgcatctccacccgccgctcctcctacgaggactccgagctcccctccatcaacgccctcctccaggccgaggtcctctcccgccagatcacctcccccgtctccggcatcaacggcgacatccgcgccaagaagatcgcctccatcgccgacgtctgcgagtccatgaaggagcagctcctcgtcctcgtcgagtgggccaagtacatccccgccttctgcgagctccccctcgacgaccaggtcgccctcctccgcgcccacgccggcgagcacctcctcctcggcgccaccaagcgctccatggtcttcaaggacgtcctcctcctcggcaacgactacatcgtcccccgccactgccccgagctcgccgagatgtcccgcgtctccatccgcatcctcgacgagctcgtcctccccttccaggagctccagatcgacgacaacgagtacgcctacctcaaggccatcatcttcttcgaccccgacgccaagggcctctccgaccccggcaagatcaagcgcctccgctcccaggtccaggtctccctcgaggactacatcaacgaccgccagtacgactcccgcggccgcttcggcgagctcctcctcctcctccccaccctccagtccatcacctggcagatgatcgagcagatccagttcatcaagctcttcggcatggccaagatcgacaacctcctccaggagatgctcctcggcggctccccctccgacgccccccacgcccaccaccccctccacccccacctcatgcaggagcacatgggcaccaacgtcatcgtcgccaacaccatgcccacccacctctccaacggccagatgtgcgagtggccccgcccccgcggccaggccgccacccccgagaccccccagccctccccccccggcggctccggctccgagccctacaagctcctccccggcgccgtcgccaccatcgtcaagcccctctccgccatcccccagcccaccatcaccaagcaggaggtcatctgaggactagttataagactgactagcccgatgggcctcccaacgggccctcctcccctccttgcaccgagattaataaaaaaaaaaaaaaaaaaaaaaaaaaaaaaaaaaaaaaaaaaaaaaaaaaaaaaaaaaaaaaaatgcatcccccccccccccccccccccccccccccccaaaggctcttttcagagccaccagaatt

SEQ ID NO: 2588 - RNA, 1531 nt, synthetic construct
  misc_feature 1..1531: note = mRNA i-3 (A64-N5-C30-hSL-N5) (opt2) from Homo sapiens__NP_000448.3__HNF4A(39-474)(S183A)
  source 1..1531: mol_type = other RNA
aggagaaagcttaccatggacacctccccctccgagggcaccaacctcaacgcccccaactccctcggcgtctccgccctctgcgccatctgcggcgaccgcgccaccggcaagcactacggcgcctcctcctgcgacggctgcaagggcttcttccgccgctccgtccgcaagaaccacatgtactcctgccgcttctcccgccagtgcgtcgtcgacaaggacaagcgcaaccagtgccgctactgccgcctcaagaagtgcttccgcgccggcatgaagaaggaggccgtccagaacgagcgcgaccgcatctccacccgccgctcctcctacgaggactcctccctcccctccatcaacgccctcctccaggccgaggtcctctcccgccagatcacctcccccgtctccggcatcaacggcgacatccgcgccaagaagatcgccgccatcgccgacgtctgcgagtccatgaaggagcagctcctcgtcctcgtcgagtgggccaagtacatccccgccttctgcgagctccccctcgacgaccaggtcgccctcctccgcgcccacgccggcgagcacctcctcctcggcgccaccaagcgctccatggtcttcaaggacgtcctcctcctcggcaacgactacatcgtcccccgccactgccccgagctcgccgagatgtcccgcgtctccatccgcatcctcgacgagctcgtcctccccttccaggagctccagatcgacgacaacgagtacgcctacctcaaggccatcatcttcttcgaccccgacgccaagggcctctccgaccccggcaagatcaagcgcctccgctcccaggtccaggtctccctcgaggactacatcaacgaccgccagtacgactcccgcggccgcttcggcgagctcctcctcctcctccccaccctccagtccatcacctggcagatgatcgagcagatccagttcatcaagctcttcggcatggccaagatcgacaacctcctccaggagatgctcctcggcggctccccctccgacgccccccacgcccaccaccccctccacccccacctcatgcaggagcacatgggcaccaacgtcatcgtcgccaacaccatgcccacccacctctccaacggccagatgtgcgagtggccccgcccccgcggccaggccgccacccccgagaccccccagccctccccccccggcggctccggctccgagccctacaagctcctccccggcgccgtcgccaccatcgtcaagcccctctccgccatcccccagcccaccatcaccaagcaggaggtcatctgaggactagttataagactgactagcccgatgggcctcccaacgggccctcctcccctccttgcaccgagattaataaaaaaaaaaaaaaaaaaaaaaaaaaaaaaaaaaaaaaaaaaaaaaaaaaaaaaaaaaaaaaaatgcatcccccccccccccccccccccccccccccccaaaggctcttttcagagccaccagaatt

SEQ ID NO: 2589 - RNA, 1531 nt, synthetic construct
  misc_feature 1..1531: note = mRNA i-3 (A64-N5-C30-hSL-N5) (opt2) from Homo sapiens__NP_000448.3__HNF4A(39-474)(S183E)
  source 1..1531: mol_type = other RNA
aggagaaagcttaccatggacacctccccctccgagggcaccaacctcaacgcccccaactccctcggcgtctccgccctctgcgccatctgcggcgaccgcgccaccggcaagcactacggcgcctcctcctgcgacggctgcaagggcttcttccgccgctccgtccgcaagaaccacatgtactcctgccgcttctcccgccagtgcgtcgtcgacaaggacaagcgcaaccagtgccgctactgccgcctcaagaagtgcttccgcgccggcatgaagaaggaggccgtccagaacgagcgcgaccgcatctccacccgccgctcctcctacgaggactcctccctcccctccatcaacgccctcctccaggccgaggtcctctcccgccagatcacctcccccgtctccggcatcaacggcgacatccgcgccaagaagatcgccgagatcgccgacgtctgcgagtccatgaaggagcagctcctcgtcctcgtcgagtgggccaagtacatccccgccttctgcgagctccccctcgacgaccaggtcgccctcctccgcgcccacgccggcgagcacctcctcctcggcgccaccaagcgctccatggtcttcaaggacgtcctcctcctcggcaacgactacatcgtcccccgccactgccccgagctcgccgagatgtcccgcgtctccatccgcatcctcgacgagctcgtcctccccttccaggagctccagatcgacgacaacgagtacgcctacctcaaggccatcatcttcttcgaccccgacgccaagggcctctccgaccccggcaagatcaagcgcctccgctcccaggtccaggtctccctcgaggactacatcaacgaccgccagtacgactcccgcggccgcttcggcgagctcctcctcctcctccccaccctccagtccatcacctggcagatgatcgagcagatccagttcatcaagctcttcggcatggccaagatcgacaacctcctccaggagatgctcctcggcggctccccctccgacgccccccacgcccaccaccccctccacccccacctcatgcaggagcacatgggcaccaacgtcatcgtcgccaacaccatgcccacccacctctccaacggccagatgtgcgagtggccccgcccccgcggccaggccgccacccccgagaccccccagccctccccccccggcggctccggctccgagccctacaagctcctccccggcgccgtcgccaccatcgtcaagcccctctccgccatcccccagcccaccatcaccaagcaggaggtcatctgaggactagttataagactgactagcccgatgggcctcccaacgggccctcctcccctccttgcaccgagattaataaaaaaaaaaaaaaaaaaaaaaaaaaaaaaaaaaaaaaaaaaaaaaaaaaaaaaaaaaaaaaaatgcatcccccccccccccccccccccccccccccccaaaggctcttttcagagccaccagaatt

SEQ ID NO: 2590 - RNA, 1531 nt, synthetic construct
  misc_feature 1..1531: note = mRNA i-3 (A64-N5-C30-hSL-N5) (opt2) from Homo sapiens__NP_000448.3__HNF4A(39-474)(S461A)
  source 1..1531: mol_type = other RNA
aggagaaagcttaccatggacacctccccctccgagggcaccaacctcaacgcccccaactccctcggcgtctccgccctctgcgccatctgcggcgaccgcgccaccggcaagcactacggcgcctcctcctgcgacggctgcaagggcttcttccgccgctccgtccgcaagaaccacatgtactcctgccgcttctcccgccagtgcgtcgtcgacaaggacaagcgcaaccagtgccgctactgccgcctcaagaagtgcttccgcgccggcatgaagaaggaggccgtccagaacgagcgcgaccgcatctccacccgccgctcctcctacgaggactcctccctcccctccatcaacgccctcctccaggccgaggtcctctcccgccagatcacctcccccgtctccggcatcaacggcgacatccgcgccaagaagatcgcctccatcgccgacgtctgcgagtccatgaaggagcagctcctcgtcctcgtcgagtgggccaagtacatccccgccttctgcgagctccccctcgacgaccaggtcgccctcctccgcgcccacgccggcgagcacctcctcctcggcgccaccaagcgctccatggtcttcaaggacgtcctcctcctcggcaacgactacatcgtcccccgccactgccccgagctcgccgagatgtcccgcgtctccatccgcatcctcgacgagctcgtcctccccttccaggagctccagatcgacgacaacgagtacgcctacctcaaggccatcatcttcttcgaccccgacgccaagggcctctccgaccccggcaagatcaagcgcctccgctcccaggtccaggtctccctcgaggactacatcaacgaccgccagtacgactcccgcggccgcttcggcgagctcctcctcctcctccccaccctccagtccatcacctggcagatgatcgagcagatccagttcatcaagctcttcggcatggccaagatcgacaacctcctccaggagatgctcctcggcggctccccctccgacgccccccacgcccaccaccccctccacccccacctcatgcaggagcacatgggcaccaacgtcatcgtcgccaacaccatgcccacccacctctccaacggccagatgtgcgagtggccccgcccccgcggccaggccgccacccccgagaccccccagccctccccccccggcggctccggctccgagccctacaagctcctccccggcgccgtcgccaccatcgtcaagcccctcgccgccatcccccagcccaccatcaccaagcaggaggtcatctgaggactagttataagactgactagcccgatgggcctcccaacgggccctcctcccctccttgcaccgagattaataaaaaaaaaaaaaaaaaaaaaaaaaaaaaaaaaaaaaaaaaaaaaaaaaaaaaaaaaaaaaaaatgcatcccccccccccccccccccccccccccccccaaaggctcttttcagagccaccagaatt

SEQ ID NO: 2591 - RNA, 1531 nt, synthetic construct
  misc_feature 1..1531: note = mRNA i-3 (A64-N5-C30-hSL-N5) (opt2) from Homo sapiens__NP_000448.3__HNF4A(39-474)(S461E)
  source 1..1531: mol_type = other RNA
aggagaaagcttaccatggacacctccccctccgagggcaccaacctcaacgcccccaactccctcggcgtctccgccctctgcgccatctgcggcgaccgcgccaccggcaagcactacggcgcctcctcctgcgacggctgcaagggcttcttccgccgctccgtccgcaagaaccacatgtactcctgccgcttctcccgccagtgcgtcgtcgacaaggacaagcgcaaccagtgccgctactgccgcctcaagaagtgcttccgcgccggcatgaagaaggaggccgtccagaacgagcgcgaccgcatctccacccgccgctcctcctacgaggactcctccctcccctccatcaacgccctcctccaggccgaggtcctctcccgccagatcacctcccccgtctccggcatcaacggcgacatccgcgccaagaagatcgcctccatcgccgacgtctgcgagtccatgaaggagcagctcctcgtcctcgtcgagtgggccaagtacatccccgccttctgcgagctccccctcgacgaccaggtcgccctcctccgcgcccacgccggcgagcacctcctcctcggcgccaccaagcgctccatggtcttcaaggacgtcctcctcctcggcaacgactacatcgtcccccgccactgccccgagctcgccgagatgtcccgcgtctccatccgcatcctcgacgagctcgtcctccccttccaggagctccagatcgacgacaacgagtacgcctacctcaaggccatcatcttcttcgaccccgacgccaagggcctctccgaccccggcaagatcaagcgcctccgctcccaggtccaggtctccctcgaggactacatcaacgaccgccagtacgactcccgcggccgcttcggcgagctcctcctcctcctccccaccctccagtccatcacctggcagatgatcgagcagatccagttcatcaagctcttcggcatggccaagatcgacaacctcctccaggagatgctcctcggcggctccccctccgacgccccccacgcccaccaccccctccacccccacctcatgcaggagcacatgggcaccaacgtcatcgtcgccaacaccatgcccacccacctctccaacggccagatgtgcgagtggccccgcccccgcggccaggccgccacccccgagaccccccagccctccccccccggcggctccggctccgagccctacaagctcctccccggcgccgtcgccaccatcgtcaagcccctcgaggccatcccccagcccaccatcaccaagcaggaggtcatctgaggactagttataagactgactagcccgatgggcctcccaacgggccctcctcccctccttgcaccgagattaataaaaaaaaaaaaaaaaaaaaaaaaaaaaaaaaaaaaaaaaaaaaaaaaaaaaaaaaaaaaaaaatgcatcccccccccccccccccccccccccccccccaaaggctcttttcagagccaccagaatt

SEQ ID NO: 2592 - RNA, 1531 nt, synthetic construct
  misc_feature 1..1531: note = mRNA i-3 (A64-N5-C30-hSL-N5) (opt2) from Homo sapiens__NP_000448.3__HNF4A(39-474)(S142A_S143A_S313A)
  source 1..1531: mol_type = other RNA
aggagaaagcttaccatggacacctccccctccgagggcaccaacctcaacgcccccaactccctcggcgtctccgccctctgcgccatctgcggcgaccgcgccaccggcaagcactacggcgcctcctcctgcgacggctgcaagggcttcttccgccgctccgtccgcaagaaccacatgtactcctgccgcttctcccgccagtgcgtcgtcgacaaggacaagcgcaaccagtgccgctactgccgcctcaagaagtgcttccgcgccggcatgaagaaggaggccgtccagaacgagcgcgaccgcatctccacccgccgcgccgcctacgaggactcctccctcccctccatcaacgccctcctccaggccgaggtcctctcccgccagatcacctcccccgtctccggcatcaacggcgacatccgcgccaagaagatcgcctccatcgccgacgtctgcgagtccatgaaggagcagctcctcgtcctcgtcgagtgggccaagtacatccccgccttctgcgagctccccctcgacgaccaggtcgccctcctccgcgcccacgccggcgagcacctcctcctcggcgccaccaagcgctccatggtcttcaaggacgtcctcctcctcggcaacgactacatcgtcccccgccactgccccgagctcgccgagatgtcccgcgtctccatccgcatcctcgacgagctcgtcctccccttccaggagctccagatcgacgacaacgagtacgcctacctcaaggccatcatcttcttcgaccccgacgccaagggcctctccgaccccggcaagatcaagcgcctccgcgcccaggtccaggtctccctcgaggactacatcaacgaccgccagtacgactcccgcggccgcttcggcgagctcctcctcctcctccccaccctccagtccatcacctggcagatgatcgagcagatccagttcatcaagctcttcggcatggccaagatcgacaacctcctccaggagatgctcctcggcggctccccctccgacgccccccacgcccaccaccccctccacccccacctcatgcaggagcacatgggcaccaacgtcatcgtcgccaacaccatgcccacccacctctccaacggccagatgtgcgagtggccccgcccccgcggccaggccgccacccccgagaccccccagccctccccccccggcggctccggctccgagccctacaagctcctccccggcgccgtcgccaccatcgtcaagcccctctccgccatcccccagcccaccatcaccaagcaggaggtcatctgaggactagttataagactgactagcccgatgggcctcccaacgggccctcctcccctccttgcaccgagattaataaaaaaaaaaaaaaaaaaaaaaaaaaaaaaaaaaaaaaaaaaaaaaaaaaaaaaaaaaaaaaaatgcatcccccccccccccccccccccccccccccccaaaggctcttttcagagccaccagaatt

SEQ ID NO: 2593 - RNA, 1531 nt, synthetic construct
  misc_feature 1..1531: note = mRNA i-3 (A64-N5-C30-hSL-N5) (opt2) from Homo sapiens__NP_000448.3__HNF4A(39-474)(S142A_S143A_S313A_K458R )
  source 1..1531: mol_type = other RNA
aggagaaagcttaccatggacacctccccctccgagggcaccaacctcaacgcccccaactccctcggcgtctccgccctctgcgccatctgcggcgaccgcgccaccggcaagcactacggcgcctcctcctgcgacggctgcaagggcttcttccgccgctccgtccgcaagaaccacatgtactcctgccgcttctcccgccagtgcgtcgtcgacaaggacaagcgcaaccagtgccgctactgccgcctcaagaagtgcttccgcgccggcatgaagaaggaggccgtccagaacgagcgcgaccgcatctccacccgccgcgccgcctacgaggactcctccctcccctccatcaacgccctcctccaggccgaggtcctctcccgccagatcacctcccccgtctccggcatcaacggcgacatccgcgccaagaagatcgcctccatcgccgacgtctgcgagtccatgaaggagcagctcctcgtcctcgtcgagtgggccaagtacatccccgccttctgcgagctccccctcgacgaccaggtcgccctcctccgcgcccacgccggcgagcacctcctcctcggcgccaccaagcgctccatggtcttcaaggacgtcctcctcctcggcaacgactacatcgtcccccgccactgccccgagctcgccgagatgtcccgcgtctccatccgcatcctcgacgagctcgtcctccccttccaggagctccagatcgacgacaacgagtacgcctacctcaaggccatcatcttcttcgaccccgacgccaagggcctctccgaccccggcaagatcaagcgcctccgcgcccaggtccaggtctccctcgaggactacatcaacgaccgccagtacgactcccgcggccgcttcggcgagctcctcctcctcctccccaccctccagtccatcacctggcagatgatcgagcagatccagttcatcaagctcttcggcatggccaagatcgacaacctcctccaggagatgctcctcggcggctccccctccgacgccccccacgcccaccaccccctccacccccacctcatgcaggagcacatgggcaccaacgtcatcgtcgccaacaccatgcccacccacctctccaacggccagatgtgcgagtggccccgcccccgcggccaggccgccacccccgagaccccccagccctccccccccggcggctccggctccgagccctacaagctcctccccggcgccgtcgccaccatcgtccgccccctctccgccatcccccagcccaccatcaccaagcaggaggtcatctgaggactagttataagactgactagcccgatgggcctcccaacgggccctcctcccctccttgcaccgagattaataaaaaaaaaaaaaaaaaaaaaaaaaaaaaaaaaaaaaaaaaaaaaaaaaaaaaaaaaaaaaaaatgcatcccccccccccccccccccccccccccccccaaaggctcttttcagagccaccagaatt

SEQ ID NO: 2594 - RNA, 1531 nt, synthetic construct
  misc_feature 1..1531: note = mRNA i-3 (A64-N5-C30-hSL-N5) (opt2) from Homo sapiens__NP_000448.3__HNF4A(39-474)(S142A_S143A_S167A_S313A _S378A_T429A_T432A_S436A_K458R)
  source 1..1531: mol_type = other RNA
aggagaaagcttaccatggacacctccccctccgagggcaccaacctcaacgcccccaactccctcggcgtctccgccctctgcgccatctgcggcgaccgcgccaccggcaagcactacggcgcctcctcctgcgacggctgcaagggcttcttccgccgctccgtccgcaagaaccacatgtactcctgccgcttctcccgccagtgcgtcgtcgacaaggacaagcgcaaccagtgccgctactgccgcctcaagaagtgcttccgcgccggcatgaagaaggaggccgtccagaacgagcgcgaccgcatctccacccgccgcgccgcctacgaggactcctccctcccctccatcaacgccctcctccaggccgaggtcctctcccgccagatcaccgcccccgtctccggcatcaacggcgacatccgcgccaagaagatcgcctccatcgccgacgtctgcgagtccatgaaggagcagctcctcgtcctcgtcgagtgggccaagtacatccccgccttctgcgagctccccctcgacgaccaggtcgccctcctccgcgcccacgccggcgagcacctcctcctcggcgccaccaagcgctccatggtcttcaaggacgtcctcctcctcggcaacgactacatcgtcccccgccactgccccgagctcgccgagatgtcccgcgtctccatccgcatcctcgacgagctcgtcctccccttccaggagctccagatcgacgacaacgagtacgcctacctcaaggccatcatcttcttcgaccccgacgccaagggcctctccgaccccggcaagatcaagcgcctccgcgcccaggtccaggtctccctcgaggactacatcaacgaccgccagtacgactcccgcggccgcttcggcgagctcctcctcctcctccccaccctccagtccatcacctggcagatgatcgagcagatccagttcatcaagctcttcggcatggccaagatcgacaacctcctccaggagatgctcctcggcggcgccccctccgacgccccccacgcccaccaccccctccacccccacctcatgcaggagcacatgggcaccaacgtcatcgtcgccaacaccatgcccacccacctctccaacggccagatgtgcgagtggccccgcccccgcggccaggccgccgcccccgaggccccccagcccgccccccccggcggctccggctccgagccctacaagctcctccccggcgccgtcgccaccatcgtccgccccctctccgccatcccccagcccaccatcaccaagcaggaggtcatctgaggactagttataagactgactagcccgatgggcctcccaacgggccctcctcccctccttgcaccgagattaataaaaaaaaaaaaaaaaaaaaaaaaaaaaaaaaaaaaaaaaaaaaaaaaaaaaaaaaaaaaaaaatgcatcccccccccccccccccccccccccccccccaaaggctcttttcagagccaccagaatt

SEQ ID NO: 2595 - RNA, 1531 nt, synthetic construct
  misc_feature 1..1531: note = mRNA i-3 (A64-N5-C30-hSL-N5) (opt2) from Homo sapiens__NP_000448.3__HNF4A(39-474)(S142A_S143A_S148A_S167A _S313A_S378A_T429A_T432A_S436A_K458R)
  source 1..1531: mol_type = other RNA
aggagaaagcttaccatggacacctccccctccgagggcaccaacctcaacgcccccaactccctcggcgtctccgccctctgcgccatctgcggcgaccgcgccaccggcaagcactacggcgcctcctcctgcgacggctgcaagggcttcttccgccgctccgtccgcaagaaccacatgtactcctgccgcttctcccgccagtgcgtcgtcgacaaggacaagcgcaaccagtgccgctactgccgcctcaagaagtgcttccgcgccggcatgaagaaggaggccgtccagaacgagcgcgaccgcatctccacccgccgcgccgcctacgaggactccgccctcccctccatcaacgccctcctccaggccgaggtcctctcccgccagatcaccgcccccgtctccggcatcaacggcgacatccgcgccaagaagatcgcctccatcgccgacgtctgcgagtccatgaaggagcagctcctcgtcctcgtcgagtgggccaagtacatccccgccttctgcgagctccccctcgacgaccaggtcgccctcctccgcgcccacgccggcgagcacctcctcctcggcgccaccaagcgctccatggtcttcaaggacgtcctcctcctcggcaacgactacatcgtcccccgccactgccccgagctcgccgagatgtcccgcgtctccatccgcatcctcgacgagctcgtcctccccttccaggagctccagatcgacgacaacgagtacgcctacctcaaggccatcatcttcttcgaccccgacgccaagggcctctccgaccccggcaagatcaagcgcctccgcgcccaggtccaggtctccctcgaggactacatcaacgaccgccagtacgactcccgcggccgcttcggcgagctcctcctcctcctccccaccctccagtccatcacctggcagatgatcgagcagatccagttcatcaagctcttcggcatggccaagatcgacaacctcctccaggagatgctcctcggcggcgccccctccgacgccccccacgcccaccaccccctccacccccacctcatgcaggagcacatgggcaccaacgtcatcgtcgccaacaccatgcccacccacctctccaacggccagatgtgcgagtggccccgcccccgcggccaggccgccgcccccgaggccccccagcccgccccccccggcggctccggctccgagccctacaagctcctccccggcgccgtcgccaccatcgtccgccccctctccgccatcccccagcccaccatcaccaagcaggaggtcatctgaggactagttataagactgactagcccgatgggcctcccaacgggccctcctcccctccttgcaccgagattaataaaaaaaaaaaaaaaaaaaaaaaaaaaaaaaaaaaaaaaaaaaaaaaaaaaaaaaaaaaaaaaatgcatcccccccccccccccccccccccccccccccaaaggctcttttcagagccaccagaatt

SEQ ID NO: 2596 - RNA, 1531 nt, synthetic construct
  misc_feature 1..1531: note = mRNA i-3 (A64-N5-C30-hSL-N5) (opt2) from Homo sapiens__NP_000448.3__HNF4A(39-474)(K106R_K108R_K126R_K127R _S142A_S143A_S148A_S167A_S313A_S378A_T429A_T432A_S436A_K458 R)
  source 1..1531: mol_type = other RNA
aggagaaagcttaccatggacacctccccctccgagggcaccaacctcaacgcccccaactccctcggcgtctccgccctctgcgccatctgcggcgaccgcgccaccggcaagcactacggcgcctcctcctgcgacggctgcaagggcttcttccgccgctccgtccgcaagaaccacatgtactcctgccgcttctcccgccagtgcgtcgtcgaccgcgaccgccgcaaccagtgccgctactgccgcctcaagaagtgcttccgcgccggcatgcgccgcgaggccgtccagaacgagcgcgaccgcatctccacccgccgcgccgcctacgaggactccgccctcccctccatcaacgccctcctccaggccgaggtcctctcccgccagatcaccgcccccgtctccggcatcaacggcgacatccgcgccaagaagatcgcctccatcgccgacgtctgcgagtccatgaaggagcagctcctcgtcctcgtcgagtgggccaagtacatccccgccttctgcgagctccccctcgacgaccaggtcgccctcctccgcgcccacgccggcgagcacctcctcctcggcgccaccaagcgctccatggtcttcaaggacgtcctcctcctcggcaacgactacatcgtcccccgccactgccccgagctcgccgagatgtcccgcgtctccatccgcatcctcgacgagctcgtcctccccttccaggagctccagatcgacgacaacgagtacgcctacctcaaggccatcatcttcttcgaccccgacgccaagggcctctccgaccccggcaagatcaagcgcctccgcgcccaggtccaggtctccctcgaggactacatcaacgaccgccagtacgactcccgcggccgcttcggcgagctcctcctcctcctccccaccctccagtccatcacctggcagatgatcgagcagatccagttcatcaagctcttcggcatggccaagatcgacaacctcctccaggagatgctcctcggcggcgccccctccgacgccccccacgcccaccaccccctccacccccacctcatgcaggagcacatgggcaccaacgtcatcgtcgccaacaccatgcccacccacctctccaacggccagatgtgcgagtggccccgcccccgcggccaggccgccgcccccgaggccccccagcccgccccccccggcggctccggctccgagccctacaagctcctccccggcgccgtcgccaccatcgtccgccccctctccgccatcccccagcccaccatcaccaagcaggaggtcatctgaggactagttataagactgactagcccgatgggcctcccaacgggccctcctcccctccttgcaccgagattaataaaaaaaaaaaaaaaaaaaaaaaaaaaaaaaaaaaaaaaaaaaaaaaaaaaaaaaaaaaaaaaatgcatcccccccccccccccccccccccccccccccaaaggctcttttcagagccaccagaatt

SEQ ID NO: 2597 - RNA, 1531 nt, synthetic construct
  misc_feature 1..1531: note = mRNA i-3 (A64-N5-C30-hSL-N5) (opt2) from Homo sapiens__NP_000448.3__HNF4A(39-474)(S142A_S143A_S148A_T166A _S167A_S313A_S378A_T429A_T432A_S436A_K458R)
  source 1..1531: mol_type = other RNA
aggagaaagcttaccatggacacctccccctccgagggcaccaacctcaacgcccccaactccctcggcgtctccgccctctgcgccatctgcggcgaccgcgccaccggcaagcactacggcgcctcctcctgcgacggctgcaagggcttcttccgccgctccgtccgcaagaaccacatgtactcctgccgcttctcccgccagtgcgtcgtcgacaaggacaagcgcaaccagtgccgctactgccgcctcaagaagtgcttccgcgccggcatgaagaaggaggccgtccagaacgagcgcgaccgcatctccacccgccgcgccgcctacgaggactccgccctcccctccatcaacgccctcctccaggccgaggtcctctcccgccagatcgccgcccccgtctccggcatcaacggcgacatccgcgccaagaagatcgcctccatcgccgacgtctgcgagtccatgaaggagcagctcctcgtcctcgtcgagtgggccaagtacatccccgccttctgcgagctccccctcgacgaccaggtcgccctcctccgcgcccacgccggcgagcacctcctcctcggcgccaccaagcgctccatggtcttcaaggacgtcctcctcctcggcaacgactacatcgtcccccgccactgccccgagctcgccgagatgtcccgcgtctccatccgcatcctcgacgagctcgtcctccccttccaggagctccagatcgacgacaacgagtacgcctacctcaaggccatcatcttcttcgaccccgacgccaagggcctctccgaccccggcaagatcaagcgcctccgcgcccaggtccaggtctccctcgaggactacatcaacgaccgccagtacgactcccgcggccgcttcggcgagctcctcctcctcctccccaccctccagtccatcacctggcagatgatcgagcagatccagttcatcaagctcttcggcatggccaagatcgacaacctcctccaggagatgctcctcggcggcgccccctccgacgccccccacgcccaccaccccctccacccccacctcatgcaggagcacatgggcaccaacgtcatcgtcgccaacaccatgcccacccacctctccaacggccagatgtgcgagtggccccgcccccgcggccaggccgccgcccccgaggccccccagcccgccccccccggcggctccggctccgagccctacaagctcctccccggcgccgtcgccaccatcgtccgccccctctccgccatcccccagcccaccatcaccaagcaggaggtcatctgaggactagttataagactgactagcccgatgggcctcccaacgggccctcctcccctccttgcaccgagattaataaaaaaaaaaaaaaaaaaaaaaaaaaaaaaaaaaaaaaaaaaaaaaaaaaaaaaaaaaaaaaaatgcatcccccccccccccccccccccccccccccccaaaggctcttttcagagccaccagaatt

SEQ ID NO: 2598 - RNA, 1531 nt, synthetic construct
  misc_feature 1..1531: note = mRNA i-3 (A64-N5-C30-hSL-N5) (opt2) from Homo sapiens__NP_000448.3__HNF4A(39-474)(S87A_S142A_S143A_S148A_ T166A_S167A_S313A_S378A_T429A_T432A_S436A_K458R)
  source 1..1531: mol_type = other RNA
aggagaaagcttaccatggacacctccccctccgagggcaccaacctcaacgcccccaactccctcggcgtctccgccctctgcgccatctgcggcgaccgcgccaccggcaagcactacggcgcctcctcctgcgacggctgcaagggcttcttccgccgcgccgtccgcaagaaccacatgtactcctgccgcttctcccgccagtgcgtcgtcgacaaggacaagcgcaaccagtgccgctactgccgcctcaagaagtgcttccgcgccggcatgaagaaggaggccgtccagaacgagcgcgaccgcatctccacccgccgcgccgcctacgaggactccgccctcccctccatcaacgccctcctccaggccgaggtcctctcccgccagatcgccgcccccgtctccggcatcaacggcgacatccgcgccaagaagatcgcctccatcgccgacgtctgcgagtccatgaaggagcagctcctcgtcctcgtcgagtgggccaagtacatccccgccttctgcgagctccccctcgacgaccaggtcgccctcctccgcgcccacgccggcgagcacctcctcctcggcgccaccaagcgctccatggtcttcaaggacgtcctcctcctcggcaacgactacatcgtcccccgccactgccccgagctcgccgagatgtcccgcgtctccatccgcatcctcgacgagctcgtcctccccttccaggagctccagatcgacgacaacgagtacgcctacctcaaggccatcatcttcttcgaccccgacgccaagggcctctccgaccccggcaagatcaagcgcctccgcgcccaggtccaggtctccctcgaggactacatcaacgaccgccagtacgactcccgcggccgcttcggcgagctcctcctcctcctccccaccctccagtccatcacctggcagatgatcgagcagatccagttcatcaagctcttcggcatggccaagatcgacaacctcctccaggagatgctcctcggcggcgccccctccgacgccccccacgcccaccaccccctccacccccacctcatgcaggagcacatgggcaccaacgtcatcgtcgccaacaccatgcccacccacctctccaacggccagatgtgcgagtggccccgcccccgcggccaggccgccgcccccgaggccccccagcccgccccccccggcggctccggctccgagccctacaagctcctccccggcgccgtcgccaccatcgtccgccccctctccgccatcccccagcccaccatcaccaagcaggaggtcatctgaggactagttataagactgactagcccgatgggcctcccaacgggccctcctcccctccttgcaccgagattaataaaaaaaaaaaaaaaaaaaaaaaaaaaaaaaaaaaaaaaaaaaaaaaaaaaaaaaaaaaaaaaatgcatcccccccccccccccccccccccccccccccaaaggctcttttcagagccaccagaatt

SEQ ID NO: 2599 - RNA, 1531 nt, synthetic construct
  misc_feature 1..1531: note = mRNA i-3 (A64-N5-C30-hSL-N5) (opt2) from Homo sapiens__NP_000448.3__HNF4A(39-474)(S87A_K106R_K108R_K126R_ K127R_S142A_S143A_S148A_T166A_S167A_S313A_S378A_T429A_T432A _S436A_K458R)
  source 1..1531: mol_type = other RNA
aggagaaagcttaccatggacacctccccctccgagggcaccaacctcaacgcccccaactccctcggcgtctccgccctctgcgccatctgcggcgaccgcgccaccggcaagcactacggcgcctcctcctgcgacggctgcaagggcttcttccgccgcgccgtccgcaagaaccacatgtactcctgccgcttctcccgccagtgcgtcgtcgaccgcgaccgccgcaaccagtgccgctactgccgcctcaagaagtgcttccgcgccggcatgcgccgcgaggccgtccagaacgagcgcgaccgcatctccacccgccgcgccgcctacgaggactccgccctcccctccatcaacgccctcctccaggccgaggtcctctcccgccagatcgccgcccccgtctccggcatcaacggcgacatccgcgccaagaagatcgcctccatcgccgacgtctgcgagtccatgaaggagcagctcctcgtcctcgtcgagtgggccaagtacatccccgccttctgcgagctccccctcgacgaccaggtcgccctcctccgcgcccacgccggcgagcacctcctcctcggcgccaccaagcgctccatggtcttcaaggacgtcctcctcctcggcaacgactacatcgtcccccgccactgccccgagctcgccgagatgtcccgcgtctccatccgcatcctcgacgagctcgtcctccccttccaggagctccagatcgacgacaacgagtacgcctacctcaaggccatcatcttcttcgaccccgacgccaagggcctctccgaccccggcaagatcaagcgcctccgcgcccaggtccaggtctccctcgaggactacatcaacgaccgccagtacgactcccgcggccgcttcggcgagctcctcctcctcctccccaccctccagtccatcacctggcagatgatcgagcagatccagttcatcaagctcttcggcatggccaagatcgacaacctcctccaggagatgctcctcggcggcgccccctccgacgccccccacgcccaccaccccctccacccccacctcatgcaggagcacatgggcaccaacgtcatcgtcgccaacaccatgcccacccacctctccaacggccagatgtgcgagtggccccgcccccgcggccaggccgccgcccccgaggccccccagcccgccccccccggcggctccggctccgagccctacaagctcctccccggcgccgtcgccaccatcgtccgccccctctccgccatcccccagcccaccatcaccaagcaggaggtcatctgaggactagttataagactgactagcccgatgggcctcccaacgggccctcctcccctccttgcaccgagattaataaaaaaaaaaaaaaaaaaaaaaaaaaaaaaaaaaaaaaaaaaaaaaaaaaaaaaaaaaaaaaaatgcatcccccccccccccccccccccccccccccccaaaggctcttttcagagccaccagaatt

SEQ ID NO: 2600 - RNA, 1531 nt, synthetic construct
  misc_feature 1..1531: note = mRNA i-3 (A64-N5-C30-hSL-N5) (opt2) from Homo sapiens__NP_000448.3__HNF4A(39-474)(S87A_K106R_K108R_K126R_ K127R)
  source 1..1531: mol_type = other RNA
aggagaaagcttaccatggacacctccccctccgagggcaccaacctcaacgcccccaactccctcggcgtctccgccctctgcgccatctgcggcgaccgcgccaccggcaagcactacggcgcctcctcctgcgacggctgcaagggcttcttccgccgcgccgtccgcaagaaccacatgtactcctgccgcttctcccgccagtgcgtcgtcgaccgcgaccgccgcaaccagtgccgctactgccgcctcaagaagtgcttccgcgccggcatgcgccgcgaggccgtccagaacgagcgcgaccgcatctccacccgccgctcctcctacgaggactcctccctcccctccatcaacgccctcctccaggccgaggtcctctcccgccagatcacctcccccgtctccggcatcaacggcgacatccgcgccaagaagatcgcctccatcgccgacgtctgcgagtccatgaaggagcagctcctcgtcctcgtcgagtgggccaagtacatccccgccttctgcgagctccccctcgacgaccaggtcgccctcctccgcgcccacgccggcgagcacctcctcctcggcgccaccaagcgctccatggtcttcaaggacgtcctcctcctcggcaacgactacatcgtcccccgccactgccccgagctcgccgagatgtcccgcgtctccatccgcatcctcgacgagctcgtcctccccttccaggagctccagatcgacgacaacgagtacgcctacctcaaggccatcatcttcttcgaccccgacgccaagggcctctccgaccccggcaagatcaagcgcctccgctcccaggtccaggtctccctcgaggactacatcaacgaccgccagtacgactcccgcggccgcttcggcgagctcctcctcctcctccccaccctccagtccatcacctggcagatgatcgagcagatccagttcatcaagctcttcggcatggccaagatcgacaacctcctccaggagatgctcctcggcggctccccctccgacgccccccacgcccaccaccccctccacccccacctcatgcaggagcacatgggcaccaacgtcatcgtcgccaacaccatgcccacccacctctccaacggccagatgtgcgagtggccccgcccccgcggccaggccgccacccccgagaccccccagccctccccccccggcggctccggctccgagccctacaagctcctccccggcgccgtcgccaccatcgtcaagcccctctccgccatcccccagcccaccatcaccaagcaggaggtcatctgaggactagttataagactgactagcccgatgggcctcccaacgggccctcctcccctccttgcaccgagattaataaaaaaaaaaaaaaaaaaaaaaaaaaaaaaaaaaaaaaaaaaaaaaaaaaaaaaaaaaaaaaaatgcatcccccccccccccccccccccccccccccccaaaggctcttttcagagccaccagaatt

SEQ ID NO: 2601 - RNA, 1531 nt, synthetic construct
  misc_feature 1..1531: note = mRNA i-3 (A64-N5-C30-hSL-N5) (opt2) from Homo sapiens__NP_000448.3__HNF4A(39-474)(S87A_K106R_K108R_K126R_ K127R_S142A_S143A_S148A_T166A_S167A_S313A_S378A_T429A_T432A _S436A_K458R_S461A)
  source 1..1531: mol_type = other RNA
aggagaaagcttaccatggacacctccccctccgagggcaccaacctcaacgcccccaactccctcggcgtctccgccctctgcgccatctgcggcgaccgcgccaccggcaagcactacggcgcctcctcctgcgacggctgcaagggcttcttccgccgcgccgtccgcaagaaccacatgtactcctgccgcttctcccgccagtgcgtcgtcgaccgcgaccgccgcaaccagtgccgctactgccgcctcaagaagtgcttccgcgccggcatgcgccgcgaggccgtccagaacgagcgcgaccgcatctccacccgccgcgccgcctacgaggactccgccctcccctccatcaacgccctcctccaggccgaggtcctctcccgccagatcgccgcccccgtctccggcatcaacggcgacatccgcgccaagaagatcgcctccatcgccgacgtctgcgagtccatgaaggagcagctcctcgtcctcgtcgagtgggccaagtacatccccgccttctgcgagctccccctcgacgaccaggtcgccctcctccgcgcccacgccggcgagcacctcctcctcggcgccaccaagcgctccatggtcttcaaggacgtcctcctcctcggcaacgactacatcgtcccccgccactgccccgagctcgccgagatgtcccgcgtctccatccgcatcctcgacgagctcgtcctccccttccaggagctccagatcgacgacaacgagtacgcctacctcaaggccatcatcttcttcgaccccgacgccaagggcctctccgaccccggcaagatcaagcgcctccgcgcccaggtccaggtctccctcgaggactacatcaacgaccgccagtacgactcccgcggccgcttcggcgagctcctcctcctcctccccaccctccagtccatcacctggcagatgatcgagcagatccagttcatcaagctcttcggcatggccaagatcgacaacctcctccaggagatgctcctcggcggcgccccctccgacgccccccacgcccaccaccccctccacccccacctcatgcaggagcacatgggcaccaacgtcatcgtcgccaacaccatgcccacccacctctccaacggccagatgtgcgagtggccccgcccccgcggccaggccgccgcccccgaggccccccagcccgccccccccggcggctccggctccgagccctacaagctcctccccggcgccgtcgccaccatcgtccgccccctcgccgccatcccccagcccaccatcaccaagcaggaggtcatctgaggactagttataagactgactagcccgatgggcctcccaacgggccctcctcccctccttgcaccgagattaataaaaaaaaaaaaaaaaaaaaaaaaaaaaaaaaaaaaaaaaaaaaaaaaaaaaaaaaaaaaaaaatgcatcccccccccccccccccccccccccccccccaaaggctcttttcagagccaccagaatt

SEQ ID NO: 2602 - RNA, 1531 nt, synthetic construct
  misc_feature 1..1531: note = mRNA i-3 (A64-N5-C30-hSL-N5) (opt2) from Homo sapiens__NP_000448.3__HNF4A(39-474)(S87A_K106R_K108R_K126R_ K127R_S142A_S143A_S148A_T166A_S167A_S313A_S378A_T429A_T432A _S436A_K458R_S461E)
  source 1..1531: mol_type = other RNA
aggagaaagcttaccatggacacctccccctccgagggcaccaacctcaacgcccccaactccctcggcgtctccgccctctgcgccatctgcggcgaccgcgccaccggcaagcactacggcgcctcctcctgcgacggctgcaagggcttcttccgccgcgccgtccgcaagaaccacatgtactcctgccgcttctcccgccagtgcgtcgtcgaccgcgaccgccgcaaccagtgccgctactgccgcctcaagaagtgcttccgcgccggcatgcgccgcgaggccgtccagaacgagcgcgaccgcatctccacccgccgcgccgcctacgaggactccgccctcccctccatcaacgccctcctccaggccgaggtcctctcccgccagatcgccgcccccgtctccggcatcaacggcgacatccgcgccaagaagatcgcctccatcgccgacgtctgcgagtccatgaaggagcagctcctcgtcctcgtcgagtgggccaagtacatccccgccttctgcgagctccccctcgacgaccaggtcgccctcctccgcgcccacgccggcgagcacctcctcctcggcgccaccaagcgctccatggtcttcaaggacgtcctcctcctcggcaacgactacatcgtcccccgccactgccccgagctcgccgagatgtcccgcgtctccatccgcatcctcgacgagctcgtcctccccttccaggagctccagatcgacgacaacgagtacgcctacctcaaggccatcatcttcttcgaccccgacgccaagggcctctccgaccccggcaagatcaagcgcctccgcgcccaggtccaggtctccctcgaggactacatcaacgaccgccagtacgactcccgcggccgcttcggcgagctcctcctcctcctccccaccctccagtccatcacctggcagatgatcgagcagatccagttcatcaagctcttcggcatggccaagatcgacaacctcctccaggagatgctcctcggcggcgccccctccgacgccccccacgcccaccaccccctccacccccacctcatgcaggagcacatgggcaccaacgtcatcgtcgccaacaccatgcccacccacctctccaacggccagatgtgcgagtggccccgcccccgcggccaggccgccgcccccgaggccccccagcccgccccccccggcggctccggctccgagccctacaagctcctccccggcgccgtcgccaccatcgtccgccccctcgaggccatcccccagcccaccatcaccaagcaggaggtcatctgaggactagttataagactgactagcccgatgggcctcccaacgggccctcctcccctccttgcaccgagattaataaaaaaaaaaaaaaaaaaaaaaaaaaaaaaaaaaaaaaaaaaaaaaaaaaaaaaaaaaaaaaaatgcatcccccccccccccccccccccccccccccccaaaggctcttttcagagccaccagaatt

SEQ ID NO: 2603 - RNA, 1531 nt, synthetic construct
  misc_feature 1..1531: note = mRNA i-3 (A64-N5-C30-hSL-N5) (opt2) from Homo sapiens__NP_000448.3__HNF4A(39-474)(S87A_K106R_K108R_K126R_ K127R_S142A_S143A_S148E_T166A_S167E_S313A_S378E_T429E_T432E _S436E_K458R_S461E)
  source 1..1531: mol_type = other RNA
aggagaaagcttaccatggacacctccccctccgagggcaccaacctcaacgcccccaactccctcggcgtctccgccctctgcgccatctgcggcgaccgcgccaccggcaagcactacggcgcctcctcctgcgacggctgcaagggcttcttccgccgcgccgtccgcaagaaccacatgtactcctgccgcttctcccgccagtgcgtcgtcgaccgcgaccgccgcaaccagtgccgctactgccgcctcaagaagtgcttccgcgccggcatgcgccgcgaggccgtccagaacgagcgcgaccgcatctccacccgccgcgccgcctacgaggactccgagctcccctccatcaacgccctcctccaggccgaggtcctctcccgccagatcgccgagcccgtctccggcatcaacggcgacatccgcgccaagaagatcgcctccatcgccgacgtctgcgagtccatgaaggagcagctcctcgtcctcgtcgagtgggccaagtacatccccgccttctgcgagctccccctcgacgaccaggtcgccctcctccgcgcccacgccggcgagcacctcctcctcggcgccaccaagcgctccatggtcttcaaggacgtcctcctcctcggcaacgactacatcgtcccccgccactgccccgagctcgccgagatgtcccgcgtctccatccgcatcctcgacgagctcgtcctccccttccaggagctccagatcgacgacaacgagtacgcctacctcaaggccatcatcttcttcgaccccgacgccaagggcctctccgaccccggcaagatcaagcgcctccgcgcccaggtccaggtctccctcgaggactacatcaacgaccgccagtacgactcccgcggccgcttcggcgagctcctcctcctcctccccaccctccagtccatcacctggcagatgatcgagcagatccagttcatcaagctcttcggcatggccaagatcgacaacctcctccaggagatgctcctcggcggcgagccctccgacgccccccacgcccaccaccccctccacccccacctcatgcaggagcacatgggcaccaacgtcatcgtcgccaacaccatgcccacccacctctccaacggccagatgtgcgagtggccccgcccccgcggccaggccgccgagcccgaggagccccagcccgagccccccggcggctccggctccgagccctacaagctcctccccggcgccgtcgccaccatcgtccgccccctcgaggccatcccccagcccaccatcaccaagcaggaggtcatctgaggactagttataagactgactagcccgatgggcctcccaacgggccctcctcccctccttgcaccgagattaataaaaaaaaaaaaaaaaaaaaaaaaaaaaaaaaaaaaaaaaaaaaaaaaaaaaaaaaaaaaaaaatgcatcccccccccccccccccccccccccccccccaaaggctcttttcagagccaccagaatt

SEQ ID NO: 2604 - RNA, 1531 nt, synthetic construct
  misc_feature 1..1531: note = mRNA i-3 (A64-N5-C30-hSL-N5) (opt2) from Homo sapiens__NP_000448.3__HNF4A(39-474)(S87A_K106R_K108R_K126R_ K127R_S142A_S143A_S148A_T166A_S167A_K179R_K180R_S313A_S378A _T429A_T432A_S436A_K458R_S461E)
  source 1..1531: mol_type = other RNA
aggagaaagcttaccatggacacctccccctccgagggcaccaacctcaacgcccccaactccctcggcgtctccgccctctgcgccatctgcggcgaccgcgccaccggcaagcactacggcgcctcctcctgcgacggctgcaagggcttcttccgccgcgccgtccgcaagaaccacatgtactcctgccgcttctcccgccagtgcgtcgtcgaccgcgaccgccgcaaccagtgccgctactgccgcctcaagaagtgcttccgcgccggcatgcgccgcgaggccgtccagaacgagcgcgaccgcatctccacccgccgcgccgcctacgaggactccgccctcccctccatcaacgccctcctccaggccgaggtcctctcccgccagatcgccgcccccgtctccggcatcaacggcgacatccgcgcccgccgcatcgcctccatcgccgacgtctgcgagtccatgaaggagcagctcctcgtcctcgtcgagtgggccaagtacatccccgccttctgcgagctccccctcgacgaccaggtcgccctcctccgcgcccacgccggcgagcacctcctcctcggcgccaccaagcgctccatggtcttcaaggacgtcctcctcctcggcaacgactacatcgtcccccgccactgccccgagctcgccgagatgtcccgcgtctccatccgcatcctcgacgagctcgtcctccccttccaggagctccagatcgacgacaacgagtacgcctacctcaaggccatcatcttcttcgaccccgacgccaagggcctctccgaccccggcaagatcaagcgcctccgcgcccaggtccaggtctccctcgaggactacatcaacgaccgccagtacgactcccgcggccgcttcggcgagctcctcctcctcctccccaccctccagtccatcacctggcagatgatcgagcagatccagttcatcaagctcttcggcatggccaagatcgacaacctcctccaggagatgctcctcggcggcgccccctccgacgccccccacgcccaccaccccctccacccccacctcatgcaggagcacatgggcaccaacgtcatcgtcgccaacaccatgcccacccacctctccaacggccagatgtgcgagtggccccgcccccgcggccaggccgccgcccccgaggccccccagcccgccccccccggcggctccggctccgagccctacaagctcctccccggcgccgtcgccaccatcgtccgccccctcgaggccatcccccagcccaccatcaccaagcaggaggtcatctgaggactagttataagactgactagcccgatgggcctcccaacgggccctcctcccctccttgcaccgagattaataaaaaaaaaaaaaaaaaaaaaaaaaaaaaaaaaaaaaaaaaaaaaaaaaaaaaaaaaaaaaaaatgcatcccccccccccccccccccccccccccccccaaaggctcttttcagagccaccagaatt

SEQ ID NO: 2605 - RNA, 1531 nt, synthetic construct
  misc_feature 1..1531: note = mRNA i-3 (A64-N5-C30-hSL-N5) (opt2) from Homo sapiens__NP_000448.3__HNF4A(39-474)(S87A_K106R_K108R_K126R_ K127R_S142A_S143A_S148A_T166A_S167A_K300R_K307R_K309R_S313A _S378A_T429A_T432A_S436A_K458R_S461E)
  source 1..1531: mol_type = other RNA
aggagaaagcttaccatggacacctccccctccgagggcaccaacctcaacgcccccaactccctcggcgtctccgccctctgcgccatctgcggcgaccgcgccaccggcaagcactacggcgcctcctcctgcgacggctgcaagggcttcttccgccgcgccgtccgcaagaaccacatgtactcctgccgcttctcccgccagtgcgtcgtcgaccgcgaccgccgcaaccagtgccgctactgccgcctcaagaagtgcttccgcgccggcatgcgccgcgaggccgtccagaacgagcgcgaccgcatctccacccgccgcgccgcctacgaggactccgccctcccctccatcaacgccctcctccaggccgaggtcctctcccgccagatcgccgcccccgtctccggcatcaacggcgacatccgcgccaagaagatcgcctccatcgccgacgtctgcgagtccatgaaggagcagctcctcgtcctcgtcgagtgggccaagtacatccccgccttctgcgagctccccctcgacgaccaggtcgccctcctccgcgcccacgccggcgagcacctcctcctcggcgccaccaagcgctccatggtcttcaaggacgtcctcctcctcggcaacgactacatcgtcccccgccactgccccgagctcgccgagatgtcccgcgtctccatccgcatcctcgacgagctcgtcctccccttccaggagctccagatcgacgacaacgagtacgcctacctcaaggccatcatcttcttcgaccccgacgcccgcggcctctccgaccccggccgcatccgccgcctccgcgcccaggtccaggtctccctcgaggactacatcaacgaccgccagtacgactcccgcggccgcttcggcgagctcctcctcctcctccccaccctccagtccatcacctggcagatgatcgagcagatccagttcatcaagctcttcggcatggccaagatcgacaacctcctccaggagatgctcctcggcggcgccccctccgacgccccccacgcccaccaccccctccacccccacctcatgcaggagcacatgggcaccaacgtcatcgtcgccaacaccatgcccacccacctctccaacggccagatgtgcgagtggccccgcccccgcggccaggccgccgcccccgaggccccccagcccgccccccccggcggctccggctccgagccctacaagctcctccccggcgccgtcgccaccatcgtccgccccctcgaggccatcccccagcccaccatcaccaagcaggaggtcatctgaggactagttataagactgactagcccgatgggcctcccaacgggccctcctcccctccttgcaccgagattaataaaaaaaaaaaaaaaaaaaaaaaaaaaaaaaaaaaaaaaaaaaaaaaaaaaaaaaaaaaaaaaatgcatcccccccccccccccccccccccccccccccaaaggctcttttcagagccaccagaatt

SEQ ID NO: 2606 - RNA, 1531 nt, synthetic construct
  misc_feature 1..1531: note = mRNA i-3 (A64-N5-C30-hSL-N5) (opt2) from Homo sapiens__NP_000448.3__HNF4A(39-474)(S87A_K106R_K108R_K126R_ K127R_S142A_S143A_S148A_T166A_S167A_S313A_S378A_T429A_T432A _S436A_K447R_K458R_S461E_K470R)
  source 1..1531: mol_type = other RNA
aggagaaagcttaccatggacacctccccctccgagggcaccaacctcaacgcccccaactccctcggcgtctccgccctctgcgccatctgcggcgaccgcgccaccggcaagcactacggcgcctcctcctgcgacggctgcaagggcttcttccgccgcgccgtccgcaagaaccacatgtactcctgccgcttctcccgccagtgcgtcgtcgaccgcgaccgccgcaaccagtgccgctactgccgcctcaagaagtgcttccgcgccggcatgcgccgcgaggccgtccagaacgagcgcgaccgcatctccacccgccgcgccgcctacgaggactccgccctcccctccatcaacgccctcctccaggccgaggtcctctcccgccagatcgccgcccccgtctccggcatcaacggcgacatccgcgccaagaagatcgcctccatcgccgacgtctgcgagtccatgaaggagcagctcctcgtcctcgtcgagtgggccaagtacatccccgccttctgcgagctccccctcgacgaccaggtcgccctcctccgcgcccacgccggcgagcacctcctcctcggcgccaccaagcgctccatggtcttcaaggacgtcctcctcctcggcaacgactacatcgtcccccgccactgccccgagctcgccgagatgtcccgcgtctccatccgcatcctcgacgagctcgtcctccccttccaggagctccagatcgacgacaacgagtacgcctacctcaaggccatcatcttcttcgaccccgacgccaagggcctctccgaccccggcaagatcaagcgcctccgcgcccaggtccaggtctccctcgaggactacatcaacgaccgccagtacgactcccgcggccgcttcggcgagctcctcctcctcctccccaccctccagtccatcacctggcagatgatcgagcagatccagttcatcaagctcttcggcatggccaagatcgacaacctcctccaggagatgctcctcggcggcgccccctccgacgccccccacgcccaccaccccctccacccccacctcatgcaggagcacatgggcaccaacgtcatcgtcgccaacaccatgcccacccacctctccaacggccagatgtgcgagtggccccgcccccgcggccaggccgccgcccccgaggccccccagcccgccccccccggcggctccggctccgagccctaccgcctcctccccggcgccgtcgccaccatcgtccgccccctcgaggccatcccccagcccaccatcacccgccaggaggtcatctgaggactagttataagactgactagcccgatgggcctcccaacgggccctcctcccctccttgcaccgagattaataaaaaaaaaaaaaaaaaaaaaaaaaaaaaaaaaaaaaaaaaaaaaaaaaaaaaaaaaaaaaaaatgcatcccccccccccccccccccccccccccccccaaaggctcttttcagagccaccagaatt

SEQ ID NO: 2607 - RNA, 1531 nt, synthetic construct
  misc_feature 1..1531: note = mRNA i-3 (A64-N5-C30-hSL-N5) (opt2) from Homo sapiens__NP_000448.3__HNF4A(39-474)(S87A_K106R_K108R_K126R_ K127R_S142A_S143A_S148A_T166A_S167A_K179R_K180R_K234R_K300R _K307R_K309R_S313A_S378A_T429A_T432A_S436A_K447R_K458R_S461 E_K470R)
  source 1..1531: mol_type = other RNA
aggagaaagcttaccatggacacctccccctccgagggcaccaacctcaacgcccccaactccctcggcgtctccgccctctgcgccatctgcggcgaccgcgccaccggcaagcactacggcgcctcctcctgcgacggctgcaagggcttcttccgccgcgccgtccgcaagaaccacatgtactcctgccgcttctcccgccagtgcgtcgtcgaccgcgaccgccgcaaccagtgccgctactgccgcctcaagaagtgcttccgcgccggcatgcgccgcgaggccgtccagaacgagcgcgaccgcatctccacccgccgcgccgcctacgaggactccgccctcccctccatcaacgccctcctccaggccgaggtcctctcccgccagatcgccgcccccgtctccggcatcaacggcgacatccgcgcccgccgcatcgcctccatcgccgacgtctgcgagtccatgaaggagcagctcctcgtcctcgtcgagtgggccaagtacatccccgccttctgcgagctccccctcgacgaccaggtcgccctcctccgcgcccacgccggcgagcacctcctcctcggcgccacccgccgctccatggtcttcaaggacgtcctcctcctcggcaacgactacatcgtcccccgccactgccccgagctcgccgagatgtcccgcgtctccatccgcatcctcgacgagctcgtcctccccttccaggagctccagatcgacgacaacgagtacgcctacctcaaggccatcatcttcttcgaccccgacgcccgcggcctctccgaccccggccgcatccgccgcctccgcgcccaggtccaggtctccctcgaggactacatcaacgaccgccagtacgactcccgcggccgcttcggcgagctcctcctcctcctccccaccctccagtccatcacctggcagatgatcgagcagatccagttcatcaagctcttcggcatggccaagatcgacaacctcctccaggagatgctcctcggcggcgccccctccgacgccccccacgcccaccaccccctccacccccacctcatgcaggagcacatgggcaccaacgtcatcgtcgccaacaccatgcccacccacctctccaacggccagatgtgcgagtggccccgcccccgcggccaggccgccgcccccgaggccccccagcccgccccccccggcggctccggctccgagccctaccgcctcctccccggcgccgtcgccaccatcgtccgccccctcgaggccatcccccagcccaccatcacccgccaggaggtcatctgaggactagttataagactgactagcccgatgggcctcccaacgggccctcctcccctccttgcaccgagattaataaaaaaaaaaaaaaaaaaaaaaaaaaaaaaaaaaaaaaaaaaaaaaaaaaaaaaaaaaaaaaaatgcatcccccccccccccccccccccccccccccccaaaggctcttttcagagccaccagaatt

SEQ ID NO: 2608 - RNA, 1531 nt, synthetic construct
  misc_feature 1..1531: note = mRNA i-3 (A64-N5-C30-hSL-N5) (opt2) from Homo sapiens__NP_000448.3__HNF4A(39-474)(S87A_S95A_S99A_K106R_K1 08R_K126R_K127R_S142A_S143A_S148A_T166A_S167A_S313A_S378A_T 429A_T432A_S436A_K458R_S461E)
  source 1..1531: mol_type = other RNA
aggagaaagcttaccatggacacctccccctccgagggcaccaacctcaacgcccccaactccctcggcgtctccgccctctgcgccatctgcggcgaccgcgccaccggcaagcactacggcgcctcctcctgcgacggctgcaagggcttcttccgccgcgccgtccgcaagaaccacatgtacgcctgccgcttcgcccgccagtgcgtcgtcgaccgcgaccgccgcaaccagtgccgctactgccgcctcaagaagtgcttccgcgccggcatgcgccgcgaggccgtccagaacgagcgcgaccgcatctccacccgccgcgccgcctacgaggactccgccctcccctccatcaacgccctcctccaggccgaggtcctctcccgccagatcgccgcccccgtctccggcatcaacggcgacatccgcgccaagaagatcgcctccatcgccgacgtctgcgagtccatgaaggagcagctcctcgtcctcgtcgagtgggccaagtacatccccgccttctgcgagctccccctcgacgaccaggtcgccctcctccgcgcccacgccggcgagcacctcctcctcggcgccaccaagcgctccatggtcttcaaggacgtcctcctcctcggcaacgactacatcgtcccccgccactgccccgagctcgccgagatgtcccgcgtctccatccgcatcctcgacgagctcgtcctccccttccaggagctccagatcgacgacaacgagtacgcctacctcaaggccatcatcttcttcgaccccgacgccaagggcctctccgaccccggcaagatcaagcgcctccgcgcccaggtccaggtctccctcgaggactacatcaacgaccgccagtacgactcccgcggccgcttcggcgagctcctcctcctcctccccaccctccagtccatcacctggcagatgatcgagcagatccagttcatcaagctcttcggcatggccaagatcgacaacctcctccaggagatgctcctcggcggcgccccctccgacgccccccacgcccaccaccccctccacccccacctcatgcaggagcacatgggcaccaacgtcatcgtcgccaacaccatgcccacccacctctccaacggccagatgtgcgagtggccccgcccccgcggccaggccgccgcccccgaggccccccagcccgccccccccggcggctccggctccgagccctacaagctcctccccggcgccgtcgccaccatcgtccgccccctcgaggccatcccccagcccaccatcaccaagcaggaggtcatctgaggactagttataagactgactagcccgatgggcctcccaacgggccctcctcccctccttgcaccgagattaataaaaaaaaaaaaaaaaaaaaaaaaaaaaaaaaaaaaaaaaaaaaaaaaaaaaaaaaaaaaaaaatgcatcccccccccccccccccccccccccccccccaaaggctcttttcagagccaccagaatt

SEQ ID NO: 2609 - RNA, 1531 nt, synthetic construct
  misc_feature 1..1531: note = mRNA i-3 (A64-N5-C30-hSL-N5) (opt2) from Homo sapiens__NP_000448.3__HNF4A(39-474)(S87A_K106R_K108R_K126R_ K127R_S138A_T139A_S142A_S143A_S148A_T166A_S167A_S313A_S378A _T429A_T432A_S436A_K458R_S461E)
  source 1..1531: mol_type = other RNA
aggagaaagcttaccatggacacctccccctccgagggcaccaacctcaacgcccccaactccctcggcgtctccgccctctgcgccatctgcggcgaccgcgccaccggcaagcactacggcgcctcctcctgcgacggctgcaagggcttcttccgccgcgccgtccgcaagaaccacatgtactcctgccgcttctcccgccagtgcgtcgtcgaccgcgaccgccgcaaccagtgccgctactgccgcctcaagaagtgcttccgcgccggcatgcgccgcgaggccgtccagaacgagcgcgaccgcatcgccgcccgccgcgccgcctacgaggactccgccctcccctccatcaacgccctcctccaggccgaggtcctctcccgccagatcgccgcccccgtctccggcatcaacggcgacatccgcgccaagaagatcgcctccatcgccgacgtctgcgagtccatgaaggagcagctcctcgtcctcgtcgagtgggccaagtacatccccgccttctgcgagctccccctcgacgaccaggtcgccctcctccgcgcccacgccggcgagcacctcctcctcggcgccaccaagcgctccatggtcttcaaggacgtcctcctcctcggcaacgactacatcgtcccccgccactgccccgagctcgccgagatgtcccgcgtctccatccgcatcctcgacgagctcgtcctccccttccaggagctccagatcgacgacaacgagtacgcctacctcaaggccatcatcttcttcgaccccgacgccaagggcctctccgaccccggcaagatcaagcgcctccgcgcccaggtccaggtctccctcgaggactacatcaacgaccgccagtacgactcccgcggccgcttcggcgagctcctcctcctcctccccaccctccagtccatcacctggcagatgatcgagcagatccagttcatcaagctcttcggcatggccaagatcgacaacctcctccaggagatgctcctcggcggcgccccctccgacgccccccacgcccaccaccccctccacccccacctcatgcaggagcacatgggcaccaacgtcatcgtcgccaacaccatgcccacccacctctccaacggccagatgtgcgagtggccccgcccccgcggccaggccgccgcccccgaggccccccagcccgccccccccggcggctccggctccgagccctacaagctcctccccggcgccgtcgccaccatcgtccgccccctcgaggccatcccccagcccaccatcaccaagcaggaggtcatctgaggactagttataagactgactagcccgatgggcctcccaacgggccctcctcccctccttgcaccgagattaataaaaaaaaaaaaaaaaaaaaaaaaaaaaaaaaaaaaaaaaaaaaaaaaaaaaaaaaaaaaaaaatgcatcccccccccccccccccccccccccccccccaaaggctcttttcagagccaccagaatt

SEQ ID NO: 2610 - RNA, 1531 nt, synthetic construct
  misc_feature 1..1531: note = mRNA i-3 (A64-N5-C30-hSL-N5) (opt2) from Homo sapiens__NP_000448.3__HNF4A(39-474)(S87A_S95A_S99A_K106R_K1 08R_K126R_K127R_S138A_T139A_S142A_S143A_S148A_T166A_S167A_S 313A_S378A_T429A_T432A_S436A_K458R_S461E)
  source 1..1531: mol_type = other RNA
aggagaaagcttaccatggacacctccccctccgagggcaccaacctcaacgcccccaactccctcggcgtctccgccctctgcgccatctgcggcgaccgcgccaccggcaagcactacggcgcctcctcctgcgacggctgcaagggcttcttccgccgcgccgtccgcaagaaccacatgtacgcctgccgcttcgcccgccagtgcgtcgtcgaccgcgaccgccgcaaccagtgccgctactgccgcctcaagaagtgcttccgcgccggcatgcgccgcgaggccgtccagaacgagcgcgaccgcatcgccgcccgccgcgccgcctacgaggactccgccctcccctccatcaacgccctcctccaggccgaggtcctctcccgccagatcgccgcccccgtctccggcatcaacggcgacatccgcgccaagaagatcgcctccatcgccgacgtctgcgagtccatgaaggagcagctcctcgtcctcgtcgagtgggccaagtacatccccgccttctgcgagctccccctcgacgaccaggtcgccctcctccgcgcccacgccggcgagcacctcctcctcggcgccaccaagcgctccatggtcttcaaggacgtcctcctcctcggcaacgactacatcgtcccccgccactgccccgagctcgccgagatgtcccgcgtctccatccgcatcctcgacgagctcgtcctccccttccaggagctccagatcgacgacaacgagtacgcctacctcaaggccatcatcttcttcgaccccgacgccaagggcctctccgaccccggcaagatcaagcgcctccgcgcccaggtccaggtctccctcgaggactacatcaacgaccgccagtacgactcccgcggccgcttcggcgagctcctcctcctcctccccaccctccagtccatcacctggcagatgatcgagcagatccagttcatcaagctcttcggcatggccaagatcgacaacctcctccaggagatgctcctcggcggcgccccctccgacgccccccacgcccaccaccccctccacccccacctcatgcaggagcacatgggcaccaacgtcatcgtcgccaacaccatgcccacccacctctccaacggccagatgtgcgagtggccccgcccccgcggccaggccgccgcccccgaggccccccagcccgccccccccggcggctccggctccgagccctacaagctcctccccggcgccgtcgccaccatcgtccgccccctcgaggccatcccccagcccaccatcaccaagcaggaggtcatctgaggactagttataagactgactagcccgatgggcctcccaacgggccctcctcccctccttgcaccgagattaataaaaaaaaaaaaaaaaaaaaaaaaaaaaaaaaaaaaaaaaaaaaaaaaaaaaaaaaaaaaaaaatgcatcccccccccccccccccccccccccccccccaaaggctcttttcagagccaccagaatt

SEQ ID NO: 2611 - RNA, 1531 nt, synthetic construct
  misc_feature 1..1531: note = mRNA i-3 (A64-N5-C30-hSL-N5) (opt3) from Homo sapiens__NP_000448.3__HNF4A(39-474)
  source 1..1531: mol_type = other RNA
aggagaaagcttaccatggacacctctccttcagaggggacaaacttaaatgcgccaaacagtctgggagtgagcgctctatgcgccatctgtggtgatagggcaactggcaaacactacggggcctcctcttgcgacggatgtaagggctttttccggcgctcggtacgtaaaaatcatatgtattcatgccgatttagcagacaatgtgtggtcgataaggacaaaaggaaccagtgccggtactgtcgcctcaagaagtgcttcagagctggtatgaaaaaggaagcagtgcagaatgagagggatcggattagtacccgccgatcctcttatgaagacagctccctgccgtcaataaacgcccttctgcaggctgaggttttgagtagacaaatcacaagccccgtgtctgggattaatggagatatcagggccaaaaagattgcgtccatcgcagacgtctgtgagtcaatgaaagaacagctcctggtgctggtagagtgggccaagtacatacctgctttttgcgaactcccattagatgaccaggttgccctgcttcgggcacacgctggcgagcatttgctgctaggcgccaccaagcgtagcatggtgttcaaagacgtcctcctgcttgggaacgattatatcgtgccccgccactgtcctgagctggcggaaatgagtagagtgtctattaggatcttggacgagctcgtcctgccatttcaggaattacaaattgatgacaatgagtacgcctacctgaaggcaatcatattctttgatcccgacgctaaaggactctccgatcctggtaagattaaacggcttcgaagccaggttcaggtgtcgctggaagactatatcaacgatcgccagtacgactctagaggcaggttcggggagttgctactgctcctgccaactcttcaatccattacatggcagatgatcgagcagatccaatttattaagctgttcggaatggccaaaatagataatttgctccaggaaatgctgttaggcggttcaccgagtgacgctccccatgcccaccaccctctgcatccacacctaatgcaggagcatatggggaccaacgtaatcgtggcaaatacgatgcccactcacctcagcaacggacagatgtgcgaatggcctcggccacgcggccaagccgctacccccgagacaccgcagccttctcccccaggcgggtccggaagcgaaccttataagctgcttcccggtgcggtcgcaactattgtgaagccattgtcagccatcccccagcctaccataacaaaacaggaggttatttgaggactagttataagactgactagcccgatgggcctcccaacgggccctcctcccctccttgcaccgagattaataaaaaaaaaaaaaaaaaaaaaaaaaaaaaaaaaaaaaaaaaaaaaaaaaaaaaaaaaaaaaaaatgcatcccccccccccccccccccccccccccccccaaaggctcttttcagagccaccagaatt

SEQ ID NO: 2612 - RNA, 1531 nt, synthetic construct
  misc_feature 1..1531: note = mRNA i-3 (A64-N5-C30-hSL-N5) (opt3) from Homo sapiens__NP_000448.3__HNF4A(39-474)(S313A)
  source 1..1531: mol_type = other RNA
aggagaaagcttaccatggacacctctccttcagaggggacaaacttaaatgcgccaaacagtctgggagtgagcgctctatgcgccatctgtggtgatagggcaactggcaaacactacggggcctcctcttgcgacggatgtaagggctttttccggcgctcggtacgtaaaaatcatatgtattcatgccgatttagcagacaatgtgtggtcgataaggacaaaaggaaccagtgccggtactgtcgcctcaagaagtgcttcagagctggtatgaaaaaggaagcagtgcagaatgagagggatcggattagtacccgccgatcctcttatgaagacagctccctgccgtcaataaacgcccttctgcaggctgaggttttgagtagacaaatcacaagccccgtgtctgggattaatggagatatcagggccaaaaagattgcgtccatcgcagacgtctgtgagtcaatgaaagaacagctcctggtgctggtagagtgggccaagtacatacctgctttttgcgaactcccattagatgaccaggttgccctgcttcgggcacacgctggcgagcatttgctgctaggcgccaccaagcgtagcatggtgttcaaagacgtcctcctgcttgggaacgattatatcgtgccccgccactgtcctgagctggcggaaatgagtagagtgtctattaggatcttggacgagctcgtcctgccatttcaggaattacaaattgatgacaatgagtacgcctacctgaaggcaatcatattctttgatcccgacgctaaaggactctccgatcctggtaagattaaacggcttcgagcccaggttcaggtgagcctggaagactatatcaacgatcgccagtacgactcgagaggcaggttcggggagttgctactgctcctgccaactcttcaatctattacatggcagatgatcgagcagatccaatttattaagctgttcggaatggctaaaatagataatttgctccaggaaatgctgttaggcggttccccgtcagacgcaccccatgcccaccaccctctgcatccacacctaatgcaggagcatatggggaccaacgtaatcgtggccaatacgatgcccactcacctcagtaacggacagatgtgcgaatggcctcggccacgcggccaagctgcgacccccgagacaccgcagcctagcccacccggcgggtccggatctgaaccttataagctgcttcccggtgcagtcgccactattgtgaagccattgagcgctatcccccagcctaccataacaaaacaggaggttatttgaggactagttataagactgactagcccgatgggcctcccaacgggccctcctcccctccttgcaccgagattaataaaaaaaaaaaaaaaaaaaaaaaaaaaaaaaaaaaaaaaaaaaaaaaaaaaaaaaaaaaaaaaatgcatcccccccccccccccccccccccccccccccaaaggctcttttcagagccaccagaatt

SEQ ID NO: 2613 - RNA, 1531 nt, synthetic construct
  misc_feature 1..1531: note = mRNA i-3 (A64-N5-C30-hSL-N5) (opt3) from Homo sapiens__NP_000448.3__HNF4A(39-474)(S313E)
  source 1..1531: mol_type = other RNA
aggagaaagcttaccatggacacctctccttcagaggggacaaacttaaatgcgccaaacagtctgggagtgagcgctctatgcgccatctgtggtgatagggcaactggcaaacactacggggcctcctcttgcgacggatgtaagggctttttccggcgctcggtacgtaaaaatcatatgtattcatgccgatttagcagacaatgtgtggtcgataaggacaaaaggaaccagtgccggtactgtcgcctcaagaagtgcttcagagctggtatgaaaaaggaagcagtgcagaatgagagggatcggattagtacccgccgatcctcttatgaagacagctccctgccgtcaataaacgcccttctgcaggctgaggttttgagtagacaaatcacaagccccgtgtctgggattaatggagatatcagggccaaaaagattgcgtccatcgcagacgtctgtgagtcaatgaaagaacagctcctggtgctggtagagtgggccaagtacatacctgctttttgcgaactcccattagatgaccaggttgccctgcttcgggcacacgctggcgagcatttgctgctaggcgccaccaagcgtagcatggtgttcaaagacgtcctcctgcttgggaacgattatatcgtgccccgccactgtcctgagctggcggaaatgagtagagtgtctattaggatcttggacgagctcgtcctgccatttcaggaattacaaattgatgacaatgagtacgcctacctgaaggcaatcatattctttgatcccgacgctaaaggactctccgatcctggtaagattaaacggcttcgagaacaggttcaggtgagcctggaggactatatcaacgatcgccagtacgactcgagaggcaggttcggggagttgctactgctcctgccaactcttcaatctattacatggcagatgatcgaacagatccaatttattaagctgttcggaatggccaaaatagataatttgctccaggagatgctgttaggcggttccccgtcagacgctccccatgcccaccaccctctgcatccacacctaatgcaggaacatatggggaccaacgtaatcgtggcaaatacgatgcccactcacctcagtaacggacagatgtgcgagtggcctcggccacgcggccaagccgctacccccgaaacaccgcagcctagcccacccggcgggtccggatctgagccttataagctgcttcccggtgcggtcgcaactattgtgaagccattgagcgccatcccccagcctaccataacaaaacaggaggttatttgaggactagttataagactgactagcccgatgggcctcccaacgggccctcctcccctccttgcaccgagattaataaaaaaaaaaaaaaaaaaaaaaaaaaaaaaaaaaaaaaaaaaaaaaaaaaaaaaaaaaaaaaaatgcatcccccccccccccccccccccccccccccccaaaggctcttttcagagccaccagaatt

SEQ ID NO: 2614 - RNA, 1531 nt, synthetic construct
  misc_feature 1..1531: note = mRNA i-3 (A64-N5-C30-hSL-N5) (opt3) from Homo sapiens__NP_000448.3__HNF4A(39-474)(S142A_S143A)
  source 1..1531: mol_type = other RNA
aggagaaagcttaccatggacacctctccttcagaggggacaaacttaaatgcgccaaacagtctgggagtgagcgctctatgcgccatctgtggtgatagggcaactggcaaacactacggggcctcctcttgcgacggatgtaagggctttttccggcgctcggtacgtaaaaatcatatgtattcatgccgatttagcagacaatgtgtggtcgataaggacaaaaggaaccagtgccggtactgtcgcctcaagaagtgcttcagagctggtatgaaaaaggaagcagtgcagaatgagagggatcggattagtacccgccgagccgcttatgaagactcctctctgccgagcataaacgcccttctgcaggcggaggttttgtccagacaaatcacatcacccgtgagtgggattaatggagatatcagggccaaaaagattgcaagcatcgctgacgtctgtgagtctatgaaagaacagctcctggtgctggtagagtgggccaagtacatacctgcattttgcgaactcccattagatgaccaggttgctctgcttcgggcccacgcgggcgagcatttgctgctaggcgccaccaagcgttccatggtgttcaaagacgtcctcctgcttgggaacgattatatcgtgccccgccactgtcctgagctggcagaaatgtcaagagtgagcattaggatcttggacgagctcgtcctgccatttcaggaattacaaattgatgacaatgagtacgcttacctgaaggccatcatattctttgatcccgacgctaaaggactcagtgatcctggtaagattaaacggcttcgatctcaggttcaggtgtccctggaagactatatcaacgatcgccagtacgacagcagaggcaggttcggggagttgctactgctcctgccaactcttcaatcgattacatggcagatgatcgagcagatccaatttattaagctgttcggaatggccaaaatagataatttgctccaggaaatgctgttaggcggttctccgtccgacgcaccccatgcccaccaccctctgcatccacacctaatgcaggagcatatggggaccaacgtaatcgtggctaatacgatgcccactcacctctcaaacggacagatgtgcgaatggcctcggccacgcggccaagcggcaacccccgagacaccgcagcctagtcccccaggcgggagcggatccgaaccttataagctgcttcccggtgccgtcgctactattgtgaagccattgtctgccatcccccagcctaccataacaaaacaggaggttatttgaggactagttataagactgactagcccgatgggcctcccaacgggccctcctcccctccttgcaccgagattaataaaaaaaaaaaaaaaaaaaaaaaaaaaaaaaaaaaaaaaaaaaaaaaaaaaaaaaaaaaaaaaatgcatcccccccccccccccccccccccccccccccaaaggctcttttcagagccaccagaatt

SEQ ID NO: 2615 - RNA, 1531 nt, synthetic construct
  misc_feature 1..1531: note = mRNA i-3 (A64-N5-C30-hSL-N5) (opt3) from Homo sapiens__NP_000448.3__HNF4A(39-474)(S142E_S143E)
  source 1..1531: mol_type = other RNA
aggagaaagcttaccatggacacctctccttcagaggggacaaacttaaatgcgccaaacagtctgggagtgagcgctctatgcgccatctgtggtgatagggcaactggcaaacactacggggcctcctcttgcgacggatgtaagggctttttccggcgctcggtacgtaaaaatcatatgtattcatgccgatttagcagacaatgtgtggtcgataaggacaaaaggaaccagtgccggtactgtcgcctcaagaagtgcttcagagctggtatgaaaaaggaagcagtgcagaatgagagggatcggattagtacccgccgagaagagtatgaggactcctctctgccgagcataaacgcccttctgcaggctgaagttttgtccagacaaatcacatcacccgtgagtgggattaatggagatatcagggccaaaaagattgcgagcatcgcagacgtctgtgagtctatgaaagaacagctcctggtgctggtagagtgggccaagtacatacctgctttttgcgagctcccattagatgaccaggttgccctgcttcgggcacacgctggcgaacatttgctgctaggcgccaccaagcgttccatggtgttcaaagacgtcctcctgcttgggaacgattatatcgtgccccgccactgtcctgagctggcggaaatgtcaagagtgagcattaggatcttggacgagctcgtcctgccatttcaggaattacaaattgatgacaatgagtacgcctacctgaaggcaatcatattctttgatcccgacgctaaaggactcagtgatcctggtaagattaaacggcttcgatctcaggttcaggtgtccctggaggactatatcaacgatcgccagtacgacagcagaggcaggttcggggaattgctactgctcctgccaactcttcaatcgattacatggcagatgatcgagcagatccaatttattaagctgttcggaatggccaaaatagataatttgctccaggaaatgctgttaggcggttctccgtccgacgctccccatgcccaccaccctctgcatccacacctaatgcaggagcatatggggaccaacgtaatcgtggcaaatacgatgcccactcacctctcaaacggacagatgtgcgaatggcctcggccacgcggccaagccgctacccccgagacaccgcagcctagtcccccaggcgggagcggatccgagccttataagctgcttcccggtgcggtcgcaactattgtgaagccattgtctgccatcccccagcctaccataacaaaacaggaagttatttgaggactagttataagactgactagcccgatgggcctcccaacgggccctcctcccctccttgcaccgagattaataaaaaaaaaaaaaaaaaaaaaaaaaaaaaaaaaaaaaaaaaaaaaaaaaaaaaaaaaaaaaaaatgcatcccccccccccccccccccccccccccccccaaaggctcttttcagagccaccagaatt

SEQ ID NO: 2616 - RNA, 1531 nt, synthetic construct
  misc_feature 1..1531: note = mRNA i-3 (A64-N5-C30-hSL-N5) (opt3) from Homo sapiens__NP_000448.3__HNF4A(39-474)(S143A)
  source 1..1531: mol_type = other RNA
aggagaaagcttaccatggacacctctccttcagaggggacaaacttaaatgcgccaaacagtctgggagtgagcgctctatgcgccatctgtggtgatagggcaactggcaaacactacggggcctcctcttgcgacggatgtaagggctttttccggcgctcggtacgtaaaaatcatatgtattcatgccgatttagcagacaatgtgtggtcgataaggacaaaaggaaccagtgccggtactgtcgcctcaagaagtgcttcagagctggtatgaaaaaggaagcagtgcagaatgagagggatcggattagtacccgccgatccgcctatgaagactctagcctgccgtccataaacgcccttctgcaggccgaggttttgtcaagacaaatcacaagtcccgtgagcgggattaatggagatatcagggcgaaaaagattgcatctatcgccgacgtctgtgagtccatgaaagaacagctcctggtgctggtagagtgggctaagtacatacctgccttttgcgaactcccattagatgaccaggttgcactgcttcgggctcacgccggcgagcatttgctgctaggcgcgaccaagcgttcaatggtgttcaaagacgtcctcctgcttgggaacgattatatcgtgccccgccactgtcctgagctggccgaaatgagcagagtgagtattaggatcttggacgagctcgtcctgccatttcaggaattacaaattgatgacaatgagtacgcatacctgaaggctatcatattctttgatcccgacgccaaaggactctctgatcctggtaagattaaacggcttcgatcccaggttcaggtgagcctggaagactatatcaacgatcgccagtacgactcgagaggcaggttcggggagttgctactgctcctgccaactcttcaatctattacatggcagatgatcgagcagatccaatttattaagctgttcggaatggctaaaatagataatttgctccaggaaatgctgttaggcggttccccgtcagacgctccccatgcacaccaccctctgcatccacacctaatgcaggagcatatggggaccaacgtaatcgtggccaatacgatgcccactcacctcagtaacggacagatgtgcgaatggcctcggccacgcggccaagctgcgacccccgagacaccgcagcctagcccacccggcgggtccggatctgaaccttataagctgcttcccggtgcagtcgccactattgtgaagccattgagcgctatcccccagcctaccataacaaaacaggaggttatttgaggactagttataagactgactagcccgatgggcctcccaacgggccctcctcccctccttgcaccgagattaataaaaaaaaaaaaaaaaaaaaaaaaaaaaaaaaaaaaaaaaaaaaaaaaaaaaaaaaaaaaaaaatgcatcccccccccccccccccccccccccccccccaaaggctcttttcagagccaccagaatt

SEQ ID NO: 2617 - RNA, 1531 nt, synthetic construct
  misc_feature 1..1531: note = mRNA i-3 (A64-N5-C30-hSL-N5) (opt3) from Homo sapiens__NP_000448.3__HNF4A(39-474)(T166A)
  source 1..1531: mol_type = other RNA
aggagaaagcttaccatggacacctctccttcagaggggacaaacttaaatgcgccaaacagtctgggagtgagcgctctatgcgccatctgtggtgatagggcaactggcaaacactacggggcctcctcttgcgacggatgtaagggctttttccggcgctcggtacgtaaaaatcatatgtattcatgccgatttagcagacaatgtgtggtcgataaggacaaaaggaaccagtgccggtactgtcgcctcaagaagtgcttcagagctggtatgaaaaaggaagcagtgcagaatgagagggatcggattagtacccgccgatcctcttatgaagacagctccctgccgtcaataaacgcccttctgcaggctgaggttttgagtagacaaatcgccagccccgtgtctgggattaatggagatatcagggcgaaaaagattgcatccatcgccgacgtctgtgagtcaatgaaagaacagctcctggtgctggtagagtgggctaagtacatacctgccttttgcgaactcccattagatgaccaggttgcactgcttcgggctcacgccggcgagcatttgctgctaggcgcgacaaagcgtagcatggtgttcaaagacgtcctcctgcttgggaacgattatatcgtgccccgccactgtcctgagctggccgaaatgagtagagtgtctattaggatcttggacgagctcgtcctgccatttcaggaattacaaattgatgacaatgagtacgcatacctgaaggctatcatattctttgatcccgacgccaaaggactctccgatcctggtaagattaaacggcttcgaagccaggttcaggtgtcgctggaagactatatcaacgatcgccagtacgactctagaggcaggttcggggagttgctactgctcctgccaacccttcaatccattacttggcagatgatcgagcagatccaatttattaagctgttcggaatggctaaaatagataatttgctccaggaaatgctgttaggcggttcaccgagtgacgcaccccatgcccaccaccctctgcatccacacctaatgcaggagcatatggggacaaacgtaatcgtggccaataccatgcccacgcacctcagcaacggacagatgtgcgaatggcctcggccacgcggccaagctgcgactcccgagaccccgcagccttctcccccaggcgggtccggaagcgaaccttataagctgcttcccggtgcagtcgccacaattgtgaagccattgtcagctatcccccagcctactataaccaaacaggaggttatttgaggactagttataagactgactagcccgatgggcctcccaacgggccctcctcccctccttgcaccgagattaataaaaaaaaaaaaaaaaaaaaaaaaaaaaaaaaaaaaaaaaaaaaaaaaaaaaaaaaaaaaaaaatgcatcccccccccccccccccccccccccccccccaaaggctcttttcagagccaccagaatt

SEQ ID NO: 2618 - RNA, 1531 nt, synthetic construct
  misc_feature 1..1531: note = mRNA i-3 (A64-N5-C30-hSL-N5) (opt3) from Homo sapiens__NP_000448.3__HNF4A(39-474)(S167E)
  source 1..1531: mol_type = other RNA
aggagaaagcttaccatggacacctctccttcagaggggacaaacttaaatgcgccaaacagtctgggagtgagcgctctatgcgccatctgtggtgatagggcaactggcaaacactacggggcctcctcttgcgacggatgtaagggctttttccggcgctcggtacgtaaaaatcatatgtattcatgccgatttagcagacaatgtgtggtcgataaggacaaaaggaaccagtgccggtactgtcgcctcaagaagtgcttcagagctggtatgaaaaaggaagcagtgcagaatgagagggatcggattagtacccgccgatcctcttatgaagacagctccctgccgtcaataaacgcccttctgcaggctgaggttttgagtagacaaatcacagagcccgtgagcgggattaatggagatatcagggccaaaaagattgcgtctatcgcagacgtctgtgaatccatgaaagagcagctcctggtgctggtagaatgggccaagtacatacctgctttttgcgagctcccattagatgaccaggttgccctgcttcgggcacacgctggcgagcatttgctgctaggcgccaccaagcgttcaatggtgttcaaagacgtcctcctgcttgggaacgattatatcgtgccccgccactgtcctgaactggcggagatgagcagagtgagtattaggatcttggacgaactcgtcctgccatttcaggagttacaaattgatgacaatgaatacgcctacctgaaggcaatcatattctttgatcccgacgctaaaggactctctgatcctggtaagattaaacggcttcgatcccaggttcaggtgagcctggaggactatatcaacgatcgccagtacgactcgagaggcaggttcggggagttgctactgctcctgccaactcttcaatctattacatggcagatgatcgaacagatccaatttattaagctgttcggaatggccaaaatagataatttgctccaggagatgctgttaggcggttccccgtcagacgctccccatgcccaccaccctctgcatccacacctaatgcaggaacatatggggaccaacgtaatcgtggcaaatacgatgcccactcacctcagtaacggacagatgtgcgagtggcctcggccacgcggccaagccgctacccccgaaacaccgcagcctagcccacccggcgggtccggatctgagccttataagctgcttcccggtgcggtcgcaactattgtgaagccattgagcgccatcccccagcctaccataacaaaacaggaggttatttgaggactagttataagactgactagcccgatgggcctcccaacgggccctcctcccctccttgcaccgagattaataaaaaaaaaaaaaaaaaaaaaaaaaaaaaaaaaaaaaaaaaaaaaaaaaaaaaaaaaaaaaaaatgcatcccccccccccccccccccccccccccccccaaaggctcttttcagagccaccagaatt

SEQ ID NO: 2619 - RNA, 1531 nt, synthetic construct
  misc_feature 1..1531: note = mRNA i-3 (A64-N5-C30-hSL-N5) (opt3) from Homo sapiens__NP_000448.3__HNF4A(39-474)(S167A)
  source 1..1531: mol_type = other RNA
aggagaaagcttaccatggacacctctccttcagaggggacaaacttaaatgcgccaaacagtctgggagtgagcgctctatgcgccatctgtggtgatagggcaactggcaaacactacggggcctcctcttgcgacggatgtaagggctttttccggcgctcggtacgtaaaaatcatatgtattcatgccgatttagcagacaatgtgtggtcgataaggacaaaaggaaccagtgccggtactgtcgcctcaagaagtgcttcagagctggtatgaaaaaggaagcagtgcagaatgagagggatcggattagtacccgccgatcctcttatgaagacagctccctgccgtcaataaacgcccttctgcaggctgaggttttgagtagacaaatcacagcccccgtgagcgggattaatggagatatcagggcgaaaaagattgcatctatcgccgacgtctgtgagtccatgaaagaacagctcctggtgctggtagagtgggctaagtacatacctgccttttgcgaactcccattagatgaccaggttgcactgcttcgggctcacgccggcgagcatttgctgctaggcgcgaccaagcgttcaatggtgttcaaagacgtcctcctgcttgggaacgattatatcgtgccccgccactgtcctgagctggccgaaatgagcagagtgagtattaggatcttggacgagctcgtcctgccatttcaggaattacaaattgatgacaatgagtacgcatacctgaaggctatcatattctttgatcccgacgccaaaggactctctgatcctggtaagattaaacggcttcgatcccaggttcaggtgagcctggaagactatatcaacgatcgccagtacgactcgagaggcaggttcggggagttgctactgctcctgccaactcttcaatctattacatggcagatgatcgagcagatccaatttattaagctgttcggaatggctaaaatagataatttgctccaggaaatgctgttaggcggttccccgtcagacgcaccccatgcccaccaccctctgcatccacacctaatgcaggagcatatggggaccaacgtaatcgtggccaatacgatgcccactcacctcagtaacggacagatgtgcgaatggcctcggccacgcggccaagctgcgacccccgagacaccgcagcctagcccacccggcgggtccggatctgaaccttataagctgcttcccggtgcagtcgccactattgtgaagccattgagcgctatcccccagcctaccataacaaaacaggaggttatttgaggactagttataagactgactagcccgatgggcctcccaacgggccctcctcccctccttgcaccgagattaataaaaaaaaaaaaaaaaaaaaaaaaaaaaaaaaaaaaaaaaaaaaaaaaaaaaaaaaaaaaaaaatgcatcccccccccccccccccccccccccccccccaaaggctcttttcagagccaccagaatt

SEQ ID NO: 2620 - RNA, 1531 nt, synthetic construct
  misc_feature 1..1531: note = mRNA i-3 (A64-N5-C30-hSL-N5) (opt3) from Homo sapiens__NP_000448.3__HNF4A(39-474)(S167A_S378A_T429A_T432A _S436A)
  source 1..1531: mol_type = other RNA
aggagaaagcttaccatggacacctctccttcagaggggacaaacttaaatgcgccaaacagtctgggagtgagcgctctatgcgccatctgtggtgatagggcaactggcaaacactacggggcctcctcttgcgacggatgtaagggctttttccggcgctcggtacgtaaaaatcatatgtattcatgccgatttagcagacaatgtgtggtcgataaggacaaaaggaaccagtgccggtactgtcgcctcaagaagtgcttcagagctggtatgaaaaaggaagcagtgcagaatgagagggatcggattagtacccgccgatcctcttatgaagacagctccctgccgtcaataaacgcccttctgcaggctgaggttttgagtagacaaatcacagcccccgtgagcgggattaatggagatatcagggcgaaaaagattgcatctatcgccgacgtctgtgagtccatgaaagaacagctcctggtgctggtagagtgggctaagtacatacctgccttttgcgaactcccattagatgaccaggttgcactgcttcgggctcacgccggcgagcatttgctgctaggcgcgaccaagcgttcaatggtgttcaaagacgtcctcctgcttgggaacgattatatcgtgccccgccactgtcctgagctggccgaaatgagcagagtgagtattaggatcttggacgagctcgtcctgccatttcaggaattacaaattgatgacaatgagtacgcatacctgaaggctatcatattctttgatcccgacgccaaaggactctctgatcctggtaagattaaacggcttcgatcccaggttcaggtgagcctggaagactatatcaacgatcgccagtacgactcgagaggcaggttcggggagttgctactgctcctgccaactcttcaatctattacatggcagatgatcgagcagatccaatttattaagctgttcggaatggctaaaatagataatttgctccaggaaatgctgttaggcggtgccccgtccgacgcaccccatgcccaccaccctctgcatccacacctaatgcaggagcatatggggaccaacgtaatcgtggctaatacgatgcccactcacctctcaaacggacagatgtgcgaatggcctcggccacgcggccaagcggcagcccccgaggctccgcagcctgcacccccaggcgggagtggaagcgaaccttataagctgcttcccggtgccgtcgccaccattgtgaagccattgtccgctatcccccagcctacaataactaaacaggaggttatttgaggactagttataagactgactagcccgatgggcctcccaacgggccctcctcccctccttgcaccgagattaataaaaaaaaaaaaaaaaaaaaaaaaaaaaaaaaaaaaaaaaaaaaaaaaaaaaaaaaaaaaaaaatgcatcccccccccccccccccccccccccccccccaaaggctcttttcagagccaccagaatt

SEQ ID NO: 2621 - RNA, 1531 nt, synthetic construct
  misc_feature 1..1531: note = mRNA i-3 (A64-N5-C30-hSL-N5) (opt3) from Homo sapiens__NP_000448.3__HNF4A(39-474)(S167E_S378E_T429E_T432E _S436E)
  source 1..1531: mol_type = other RNA
aggagaaagcttaccatggacacctctccttcagaggggacaaacttaaatgcgccaaacagtctgggagtgagcgctctatgcgccatctgtggtgatagggcaactggcaaacactacggggcctcctcttgcgacggatgtaagggctttttccggcgctcggtacgtaaaaatcatatgtattcatgccgatttagcagacaatgtgtggtcgataaggacaaaaggaaccagtgccggtactgtcgcctcaagaagtgcttcagagctggtatgaaaaaggaagcagtgcagaatgagagggatcggattagtacccgccgatcctcttatgaagacagctccctgccgtcaataaacgcccttctgcaggctgaggttttgagtagacaaatcacagagcccgtgagcgggattaatggagatatcagggccaaaaagattgcgtctatcgcagacgtctgtgaatccatgaaagagcagctcctggtgctggtagaatgggccaagtacatacctgctttttgcgagctcccattagatgaccaggttgccctgcttcgggcacacgctggcgagcatttgctgctaggcgccaccaagcgttcaatggtgttcaaagacgtcctcctgcttgggaacgattatatcgtgccccgccactgtcctgaactggcggagatgagcagagtgagtattaggatcttggacgaactcgtcctgccatttcaggagttacaaattgatgacaatgaatacgcctacctgaaggcaatcatattctttgatcccgacgctaaaggactctctgatcctggtaagattaaacggcttcgatcccaggttcaggtgagcctggaggactatatcaacgatcgccagtacgactcgagaggcaggttcggggagttgctactgctcctgccaactcttcaatctattacatggcagatgatcgaacagatccaatttattaagctgttcggaatggccaaaatagataatttgctccaggagatgctgttaggcggtgaaccgtccgacgctccccatgcccaccaccctctgcatccacacctaatgcaggagcatatggggaccaacgtaatcgtggcaaatacgatgcccactcacctctcaaacggacagatgtgcgaatggcctcggccacgcggccaagccgctgagcccgaggaaccgcagcctgagcccccaggcgggagtggaagcgaaccttataagctgcttcccggtgcggtcgcaaccattgtgaagccattgtccgccatcccccagcctacaataactaaacaggaggttatttgaggactagttataagactgactagcccgatgggcctcccaacgggccctcctcccctccttgcaccgagattaataaaaaaaaaaaaaaaaaaaaaaaaaaaaaaaaaaaaaaaaaaaaaaaaaaaaaaaaaaaaaaaatgcatcccccccccccccccccccccccccccccccaaaggctcttttcagagccaccagaatt

SEQ ID NO: 2622 - RNA, 1531 nt, synthetic construct
  misc_feature 1..1531: note = mRNA i-3 (A64-N5-C30-hSL-N5) (opt3) from Homo sapiens__NP_000448.3__HNF4A(39-474)(S87A)
  source 1..1531: mol_type = other RNA
aggagaaagcttaccatggacacctctccttcagaggggacaaacttaaatgcgccaaacagtctgggagtgagcgctctatgcgccatctgtggtgatagggcaactggcaaacactacggggcctcctcttgcgacggatgtaagggctttttccggcgcgctgtacgtaaaaatcatatgtattcgtgccgattttcaagacaatgtgtggtcgataaggacaaaaggaaccagtgccggtactgtcgcctcaagaagtgcttcagagcaggtatgaaaaaggaagccgtgcagaatgagagggatcggattagcacccgccgaagttcctatgaagactctagcctgccgtccataaacgcccttctgcaggccgaggttttgtcaagacaaatcacaagtcccgtgagcgggattaatggagatatcagggcgaaaaagattgcatctatcgccgacgtctgtgagtccatgaaagaacagctcctggtgctggtagagtgggctaagtacatacctgccttttgcgaactcccattagatgaccaggttgcactgcttcgggctcacgccggcgagcatttgctgctaggcgcgaccaagcgttcaatggtgttcaaagacgtcctcctgcttgggaacgattatatcgtgccccgccactgtcctgagctggccgaaatgagcagagtgagtattaggatcttggacgagctcgtcctgccatttcaggaattacaaattgatgacaatgagtacgcatacctgaaggctatcatattctttgatcccgacgccaaaggactctctgatcctggtaagattaaacggcttcgatcccaggttcaggtgagcctggaagactatatcaacgatcgccagtacgactcgagaggcaggttcggggagttgctactgctcctgccaactcttcaatctattacatggcagatgatcgagcagatccaatttattaagctgttcggaatggctaaaatagataatttgctccaggaaatgctgttaggcggttccccgtcagacgctccccatgcacaccaccctctgcatccacacctaatgcaggagcatatggggaccaacgtaatcgtggccaatacgatgcccactcacctcagtaacggacagatgtgcgaatggcctcggccacgcggccaagctgcgacccccgagacaccgcagcctagcccacccggcgggtccggatctgaaccttataagctgcttcccggtgcagtcgccactattgtgaagccattgagcgctatcccccagcctaccataacaaaacaggaggttatttgaggactagttataagactgactagcccgatgggcctcccaacgggccctcctcccctccttgcaccgagattaataaaaaaaaaaaaaaaaaaaaaaaaaaaaaaaaaaaaaaaaaaaaaaaaaaaaaaaaaaaaaaaatgcatcccccccccccccccccccccccccccccccaaaggctcttttcagagccaccagaatt

SEQ ID NO: 2623 - RNA, 1531 nt, synthetic construct
  misc_feature 1..1531: note = mRNA i-3 (A64-N5-C30-hSL-N5) (opt3) from Homo sapiens__NP_000448.3__HNF4A(39-474)(S87E)
  source 1..1531: mol_type = other RNA
aggagaaagcttaccatggacacctctccttcagaggggacaaacttaaatgcgccaaacagtctgggagtgagcgctctatgcgccatctgtggtgatagggcaactggcaaacactacggggcctcctcttgcgacggatgtaagggctttttccggcgcgaagtacgtaaaaatcatatgtattcgtgccgattttcaagacaatgtgtggtcgataaggacaaaaggaaccagtgccggtactgtcgcctcaagaagtgcttcagagctggtatgaaaaaggaggcagtgcagaatgaaagggatcggattagcacccgccgaagttcctatgaggactctagcctgccgtccataaacgcccttctgcaggctgaggttttgtcaagacaaatcacaagtcccgtgagcgggattaatggagatatcagggccaaaaagattgcgtctatcgcagacgtctgtgaatccatgaaagagcagctcctggtgctggtagaatgggccaagtacatacctgctttttgcgagctcccattagatgaccaggttgccctgcttcgggcacacgctggcgagcatttgctgctaggcgccaccaagcgttcaatggtgttcaaagacgtcctcctgcttgggaacgattatatcgtgccccgccactgtcctgaactggcggagatgagcagagtgagtattaggatcttggacgaactcgtcctgccatttcaggagttacaaattgatgacaatgaatacgcctacctgaaggcaatcatattctttgatcccgacgctaaaggactctctgatcctggtaagattaaacggcttcgatcccaggttcaggtgagcctggaggactatatcaacgatcgccagtacgactcgagaggcaggttcggggagttgctactgctcctgccaactcttcaatctattacatggcagatgatcgaacagatccaatttattaagctgttcggaatggccaaaatagataatttgctccaggagatgctgttaggcggttccccgtcagacgctccccatgcccaccaccctctgcatccacacctaatgcaggaacatatggggaccaacgtaatcgtggcaaatacgatgcccactcacctcagtaacggacagatgtgcgagtggcctcggccacgcggccaagccgctacccccgaaacaccgcagcctagcccacccggcgggtccggatctgagccttataagctgcttcccggtgcggtcgcaactattgtgaagccattgagcgccatcccccagcctaccataacaaaacaggaggttatttgaggactagttataagactgactagcccgatgggcctcccaacgggccctcctcccctccttgcaccgagattaataaaaaaaaaaaaaaaaaaaaaaaaaaaaaaaaaaaaaaaaaaaaaaaaaaaaaaaaaaaaaaaatgcatcccccccccccccccccccccccccccccccaaaggctcttttcagagccaccagaatt

SEQ ID NO: 2624 - RNA, 1531 nt, synthetic construct
  misc_feature 1..1531: note = mRNA i-3 (A64-N5-C30-hSL-N5) (opt3) from Homo sapiens__NP_000448.3__HNF4A(39-474)(R2V)
  source 1..1531: mol_type = other RNA
aggagaaagcttaccatggacacctctccttcagaggggacaaacttaaatgcgccaaacagtctgggagtaagcgctctatgcgccatctgtggtgatagagcaactggcaaacactacggggcctcctcttgcgacggatgtaagggctttttcaggcggtcggtgcgcaaaaatcatatgtattcatgccgatttagccgtcaatgtgtcgtggataaggacaaaagaaaccagtgcaggtactgtcggctcaagaagtgcttccgcgctggtatgaaaaaggaagcagttcagaatgagagagataggattagtacccggcgctcctcttatgaagacagctccctgccgtcaataaacgcccttctgcaggctgaggtgttgagtcgacaaatcacaagccccgtctctgggattaatggagatatcagagccaaaaagattgcgtccatcgcagacgtgtgtgagtcaatgaaagaacagctcctggtactggttgagtgggccaagtacatacctgctttttgcgaactcccattagatgaccaggtggccctgcttagggcacacgctggcgagcatttgctgctaggcgccaccaagcggagcatggtcttcaaagacgtgctcctgcttgggaacgattatatcgtgccccgtcactgtcctgagctggcggaaatgagtcgcgtctctattagaatcttggacgagctcgttctgccatttcaggaattacaaattgatgacaatgagtacgcctacctgaaggcaatcatattctttgatcccgacgctaaaggactctccgatcctggtaagattaaaaggcttcggagccaggtgcaggtatcgctggaagactatatcaacgatcgacagtacgactctcgcggcagattcggggagttgctactgctcctgccaactcttcaatccattacatggcagatgatcgagcagatccaatttattaagctgttcggaatggccaaaatagataatttgctccaggaaatgctgttaggcggttcaccgagtgacgctccccatgcccaccaccctctgcatccacacctaatgcaggagcatatggggaccaacgtgatcgtcgcaaatacgatgcccactcacctcagcaacggacagatgtgcgaatggcctaggccacggggccaagccgctacccccgagacaccgcagccttctcccccaggcgggtccggaagcgaaccttataagctgcttcccggtgcggtggcaactattgttaagccattgtcagccatcccccagcctaccataacaaaacaggaggtgatttgaggactagttataagactgactagcccgatgggcctcccaacgggccctcctcccctccttgcaccgagattaataaaaaaaaaaaaaaaaaaaaaaaaaaaaaaaaaaaaaaaaaaaaaaaaaaaaaaaaaaaaaaaatgcatcccccccccccccccccccccccccccccccaaaggctcttttcagagccaccagaatt

SEQ ID NO: 2625 - RNA, 1531 nt, synthetic construct
  misc_feature 1..1531: note = mRNA i-3 (A64-N5-C30-hSL-N5) (opt3) from Homo sapiens__NP_000448.3__HNF4A(39-474)(R2V_K5V)
  source 1..1531: mol_type = other RNA
aggagaaagcttaccatggacacctctccttcagaggggacaaacttaaatgcgccaaacagtctgggagtgagcgctctatgcgccatctgtggtgatagagcaactggcaagcactacggggcctcctcttgcgacggatgtaaaggctttttcaggcggtcggtccgcaagaatcatatgtattcatgccgatttagccgtcaatgtgtggttgataaagacaagagaaaccagtgcaggtactgtcggctcaaaaagtgcttccgcgctggtatgaagaaagaagcagtgcagaatgagagagataggattagtacccggcgctcctcttatgaagacagctccctgccgtcaataaacgcccttctgcaggctgaggtcttgagtcgacaaatcacaagccccgtgtctgggattaatggagatatcagagccaagaaaattgcgtccatcgcagacgtatgtgagtcaatgaaggaacagctcctggttctggtggagtgggccaaatacatacctgctttttgcgaactcccattagatgaccaggtcgccctgcttagggcacacgctggcgagcatttgctgctaggcgccaccaagcggagcatggtgttcaaggacgtgctcctgcttgggaacgattatatcgtcccccgtcactgtcctgagctggcggaaatgagtcgcgtttctattagaatcttggacgagctcgtgctgccatttcaggaattacaaattgatgacaatgagtacgcctacctgaaagcaatcatattctttgatcccgacgctaagggactctccgatcctggtaaaattaagaggcttcggagccaggtacaggtgtcgctggaagactatatcaacgatcgacagtacgactctcgcggcagattcggggagttgctactgctcctgccaactcttcaatccattacatggcagatgatcgagcagatccaatttattaaactgttcggaatggccaagatagataatttgctccaggaaatgctgttaggcggttcaccgagtgacgctccccatgcccaccaccctctgcatccacacctaatgcaggagcatatggggaccaacgtcatcgtggcaaatacgatgcccactcacctcagcaacggacagatgtgcgaatggcctaggccacggggccaagccgctacccccgagacaccgcagccttctcccccaggcgggtccggaagcgaaccttataaactgcttcccggtgcggttgcaactattgtgaagccattgtcagccatcccccagcctaccataacaaagcaggaggtcatttgaggactagttataagactgactagcccgatgggcctcccaacgggccctcctcccctccttgcaccgagattaataaaaaaaaaaaaaaaaaaaaaaaaaaaaaaaaaaaaaaaaaaaaaaaaaaaaaaaaaaaaaaaatgcatcccccccccccccccccccccccccccccccaaaggctcttttcagagccaccagaatt

SEQ ID NO: 2626 - RNA, 1531 nt, synthetic construct
  misc_feature 1..1531: note = mRNA i-3 (A64-N5-C30-hSL-N5) (opt3) from Homo sapiens__NP_000448.3__HNF4A(39-474)(K179R_K180R)
  source 1..1531: mol_type = other RNA
aggagaaagcttaccatggacacctctccttcagaggggacaaacttaaatgcgccaaacagtctgggagtgagcgctctatgcgccatctgtggtgatagggcaactggcaaacactacggggcctcctcttgcgacggatgtaagggctttttccggcgctcggtacgtaaaaatcatatgtattcatgccgatttagcagacaatgtgtggtcgataaggacaaaaggaaccagtgccggtactgtcgcctcaagaagtgcttcagagctggtatgaaaaaggaagcagtgcagaatgagagggatcggattagtacccgccgatcctcttatgaagacagctccctgccgtcaataaacgcccttctgcaggctgaggttttgagtagacaaatcacaagccccgtgtctgggattaatggagatatcagggcccggcgtattgcgtccatcgcagacgtctgtgagtcaatgaaagaacagctcctggtgctggtagagtgggccaagtacatacctgctttttgcgaactcccattagatgaccaggttgccctgcttcgcgcacacgctggcgagcatttgctgctaggcgccaccaaaagaagcatggtgttcaaggacgtcctcctgcttgggaacgattatatcgtgcccaggcactgtcctgagctggcggaaatgagtcgggtgtctattcgaatcttggacgagctcgtcctgccatttcaggaattacaaattgatgacaatgagtacgcctacctgaaggcaatcatattctttgatcccgacgctaaaggactctccgatcctggtaagattaaacgccttagaagccaggttcaggtgtcgctggaagactatatcaacgataggcagtacgactctcggggccgcttcggggagttgctactgctcctgccaactcttcaatccattacatggcagatgatcgagcagatccaatttattaagctgttcggaatggccaaaatagataatttgctccaggaaatgctgttaggcggttcaccgagtgacgctccccatgcccaccaccctctgcatccacacctaatgcaggagcatatggggaccaacgtaatcgtggcaaatacgatgcccactcacctcagcaacggacagatgtgcgaatggcctagaccaaggggccaagccgctacccccgagacaccgcagccttctcccccaggcgggtccggaagcgaaccttataagctgcttcccggtgcggtcgcaactattgtgaaaccattgtcagccatcccccagcctaccataacaaagcaggaggttatttgaggactagttataagactgactagcccgatgggcctcccaacgggccctcctcccctccttgcaccgagattaataaaaaaaaaaaaaaaaaaaaaaaaaaaaaaaaaaaaaaaaaaaaaaaaaaaaaaaaaaaaaaaatgcatcccccccccccccccccccccccccccccccaaaggctcttttcagagccaccagaatt

SEQ ID NO: 2627 - RNA, 1531 nt, synthetic construct
  misc_feature 1..1531: note = mRNA i-3 (A64-N5-C30-hSL-N5) (opt3) from Homo sapiens__NP_000448.3__HNF4A(39-474)(K234R)
  source 1..1531: mol_type = other RNA
aggagaaagcttaccatggacacctctccttcagaggggacaaacttaaatgcgccaaacagtctgggagtgagcgctctatgcgccatctgtggtgatagggcaactggcaaacactacggggcctcctcttgcgacggatgtaagggctttttccggcgctcggtacgtaaaaatcatatgtattcatgccgatttagcagacaatgtgtggtcgataaggacaaaaggaaccagtgccggtactgtcgcctcaagaagtgcttcagagctggtatgaaaaaggaagcagtgcagaatgagagggatcggattagtacccgccgatcctcttatgaagacagctccctgccgtcaataaacgcccttctgcaggctgaggttttgagtagacaaatcacaagccccgtgtctgggattaatggagatatcagggccaaaaagattgcgtccatcgcagacgtctgtgagtcaatgaaagaacagctcctggtgctggtagagtgggccaagtacatacctgctttttgcgaactcccattagatgaccaggttgccctgcttcgggcacacgctggcgagcatttgctgctaggcgccacccgtcgcagcatggtgttcaaggacgtcctcctgcttgggaacgattatatcgtgcccagacactgtcctgagctggcggaaatgagtagggtgtctattcggatcttggacgagctcgtcctgccatttcaggaattacaaattgatgacaatgagtacgcctacctgaaagcaatcatattctttgatcccgacgctaagggactctccgatcctggtaaaattaagcgacttcgcagccaggttcaggtgtcgctggaagactatatcaacgatagacagtacgactctaggggccggttcggggagttgctactgctcctgccaactcttcaatccattacatggcagatgatcgagcagatccaatttattaaactgttcggaatggccaagatagataatttgctccaggaaatgctgttaggcggttcaccgagtgacgctccccatgcccaccaccctctgcatccacacctaatgcaggagcatatggggaccaacgtaatcgtggcaaatacgatgcccactcacctcagcaacggacagatgtgcgaatggcctcgcccaagaggccaagccgctacccccgagacaccgcagccttctcccccaggcgggtccggaagcgaaccttataaactgcttcccggtgcggtcgcaactattgtgaagccattgtcagccatcccccagcctaccataacaaagcaggaggttatttgaggactagttataagactgactagcccgatgggcctcccaacgggccctcctcccctccttgcaccgagattaataaaaaaaaaaaaaaaaaaaaaaaaaaaaaaaaaaaaaaaaaaaaaaaaaaaaaaaaaaaaaaaatgcatcccccccccccccccccccccccccccccccaaaggctcttttcagagccaccagaatt

SEQ ID NO: 2628 - RNA, 1531 nt, synthetic construct
  misc_feature 1..1531: note = mRNA i-3 (A64-N5-C30-hSL-N5) (opt3) from Homo sapiens__NP_000448.3__HNF4A(39-474)(K300R)
  source 1..1531: mol_type = other RNA
aggagaaagcttaccatggacacctctccttcagaggggacaaacttaaatgcgccaaacagtctgggagtgagcgctctatgcgccatctgtggtgatagggcaactggcaaacactacggggcctcctcttgcgacggatgtaagggctttttccggcgctcggtacgtaaaaatcatatgtattcatgccgatttagcagacaatgtgtggtcgataaggacaaaaggaaccagtgccggtactgtcgcctcaagaagtgcttcagagctggtatgaaaaaggaagcagtgcagaatgagagggatcggattagtacccgccgatcctcttatgaagacagctccctgccgtcaataaacgcccttctgcaggctgaggttttgagtagacaaatcacaagccccgtgtctgggattaatggagatatcagggccaaaaagattgcgtccatcgcagacgtctgtgagtcaatgaaagaacagctcctggtgctggtagagtgggccaagtacatacctgctttttgcgaactcccattagatgaccaggttgccctgcttcgggcacacgctggcgagcatttgctgctaggcgccaccaagcgtagcatggtgttcaaagacgtcctcctgcttgggaacgattatatcgtgccccgccactgtcctgagctggcggaaatgagtagagtgtctattaggatcttggacgagctcgtcctgccatttcaggaattacaaattgatgacaatgagtacgcctacctgaaggcaatcatattctttgatcccgacgctcggggactctccgatcctggtaaaattaagcgacttcgcagccaggttcaggtgtcgctggaagactatatcaacgatagacagtacgactctaggggccggttcggggagttgctactgctcctgccaactcttcaatccattacatggcagatgatcgagcagatccaatttattaaactgttcggaatggccaagatagataatttgctccaggaaatgctgttaggcggttcaccgagtgacgctccccatgcccaccaccctctgcatccacacctaatgcaggagcatatggggaccaacgtaatcgtggcaaatacgatgcccactcacctcagcaacggacagatgtgcgaatggcctcgcccaagaggccaagccgctacccccgagacaccgcagccttctcccccaggcgggtccggaagcgaaccttataaactgcttcccggtgcggtcgcaactattgtgaagccattgtcagccatcccccagcctaccataacaaagcaggaggttatttgaggactagttataagactgactagcccgatgggcctcccaacgggccctcctcccctccttgcaccgagattaataaaaaaaaaaaaaaaaaaaaaaaaaaaaaaaaaaaaaaaaaaaaaaaaaaaaaaaaaaaaaaaatgcatcccccccccccccccccccccccccccccccaaaggctcttttcagagccaccagaatt

SEQ ID NO: 2629 - RNA, 1531 nt, synthetic construct
  misc_feature 1..1531: note = mRNA i-3 (A64-N5-C30-hSL-N5) (opt3) from Homo sapiens__NP_000448.3__HNF4A(39-474)(K300R_K307R_K309R)
  source 1..1531: mol_type = other RNA
aggagaaagcttaccatggacacctctccttcagaggggacaaacttaaatgcgccaaacagtctgggagtgagcgctctatgcgccatctgtggtgatagggcaactggcaaacactacggggcctcctcttgcgacggatgtaagggctttttccggcgctcggtacgtaaaaatcatatgtattcatgccgatttagcagacaatgtgtggtcgataaggacaaaaggaaccagtgccggtactgtcgcctcaagaagtgcttcagagctggtatgaaaaaggaagcagtgcagaatgagagggatcggattagtacccgccgatcctcttatgaagacagctccctgccgtcaataaacgcccttctgcaggctgaggttttgagtagacaaatcacaagccccgtgtctgggattaatggagatatcagggccaaaaagattgcgtccatcgcagacgtctgtgagtcaatgaaagaacagctcctggtgctggtagagtgggccaagtacatacctgctttttgcgaactcccattagatgaccaggttgccctgcttcgggcacacgctggcgagcatttgctgctaggcgccaccaagcgtagcatggtgttcaaagacgtcctcctgcttgggaacgattatatcgtgccccgccactgtcctgagctggcggaaatgagtagagtgtctattaggatcttggacgagctcgtcctgccatttcaggaattacaaattgatgacaatgagtacgcctacctgaaggcaatcatattctttgatcccgacgctcggggactctccgatcctggtcgcattcgaagacttaggagccaggttcaggtgtcgctggaagactatatcaacgatcggcagtacgactctcgcggcagattcggggagttgctactgctcctgccaactcttcaatccattacatggcagatgatcgagcagatccaatttattaaactgttcggaatggccaagatagataatttgctccaggaaatgctgttaggcggttcaccgagtgacgctccccatgcccaccaccctctgcatccacacctaatgcaggagcatatggggaccaacgtaatcgtggcaaatacgatgcccactcacctcagcaacggacagatgtgcgaatggcctaggccacgtggccaagccgctacccccgagacaccgcagccttctcccccaggcgggtccggaagcgaaccttataaactgcttcccggtgcggtcgcaactattgtgaagccattgtcagccatcccccagcctaccataacaaaacaggaggttatttgaggactagttataagactgactagcccgatgggcctcccaacgggccctcctcccctccttgcaccgagattaataaaaaaaaaaaaaaaaaaaaaaaaaaaaaaaaaaaaaaaaaaaaaaaaaaaaaaaaaaaaaaaatgcatcccccccccccccccccccccccccccccccaaaggctcttttcagagccaccagaatt

SEQ ID NO: 2630 - RNA, 1531 nt, synthetic construct
  misc_feature 1..1531: note = mRNA i-3 (A64-N5-C30-hSL-N5) (opt3) from Homo sapiens__NP_000448.3__HNF4A(39-474)(K447R_K470R)
  source 1..1531: mol_type = other RNA
aggagaaagcttaccatggacacctctccttcagaggggacaaacttaaatgcgccaaacagtctgggagtgagcgctctatgcgccatctgtggtgatagggcaactggcaaacactacggggcctcctcttgcgacggatgtaagggctttttccggcgctcggtacgtaaaaatcatatgtattcatgccgatttagcagacaatgtgtggtcgataaggacaaaaggaaccagtgccggtactgtcgcctcaagaagtgcttcagagctggtatgaaaaaggaagcagtgcagaatgagagggatcggattagtacccgccgatcctcttatgaagacagctccctgccgtcaataaacgcccttctgcaggctgaggttttgagtagacaaatcacaagccccgtgtctgggattaatggagatatcagggccaaaaagattgcgtccatcgcagacgtctgtgagtcaatgaaagaacagctcctggtgctggtagagtgggccaagtacatacctgctttttgcgaactcccattagatgaccaggttgccctgcttcgggcacacgctggcgagcatttgctgctaggcgccaccaagcgtagcatggtgttcaaagacgtcctcctgcttgggaacgattatatcgtgccccgccactgtcctgagctggcggaaatgagtagagtgtctattaggatcttggacgagctcgtcctgccatttcaggaattacaaattgatgacaatgagtacgcctacctgaaggcaatcatattctttgatcccgacgctaaaggactctccgatcctggtaagattaaacggcttcgaagccaggttcaggtgtcgctggaagactatatcaacgatcgccagtacgactctagaggcaggttcggggagttgctactgctcctgccaactcttcaatccattacatggcagatgatcgagcagatccaatttattaagctgttcggaatggccaaaatagataatttgctccaggaaatgctgttaggcggttcaccgagtgacgctccccatgcccaccaccctctgcatccacacctaatgcaggagcatatggggaccaacgtaatcgtggcaaatacgatgcccactcacctcagcaacggacagatgtgcgaatggcctcggccacgcggccaagccgctacccccgagacaccgcagccttctcccccaggcgggtccggaagcgaaccttatagactgcttcccggtgcggtcgcaactattgtgaagccattgtcagccatcccccagcctaccataacaaggcaggaggttatttgaggactagttataagactgactagcccgatgggcctcccaacgggccctcctcccctccttgcaccgagattaataaaaaaaaaaaaaaaaaaaaaaaaaaaaaaaaaaaaaaaaaaaaaaaaaaaaaaaaaaaaaaaatgcatcccccccccccccccccccccccccccccccaaaggctcttttcagagccaccagaatt

SEQ ID NO: 2631 - RNA, 1531 nt, synthetic construct
  misc_feature 1..1531: note = mRNA i-3 (A64-N5-C30-hSL-N5) (opt3) from Homo sapiens__NP_000448.3__HNF4A(39-474)(K458R)
  source 1..1531: mol_type = other RNA
aggagaaagcttaccatggacacctctccttcagaggggacaaacttaaatgcgccaaacagtctgggagtgagcgctctatgcgccatctgtggtgatagggcaactggcaaacactacggggcctcctcttgcgacggatgtaagggctttttccggcgctcggtacgtaaaaatcatatgtattcatgccgatttagcagacaatgtgtggtcgataaggacaaaaggaaccagtgccggtactgtcgcctcaagaagtgcttcagagctggtatgaaaaaggaagcagtgcagaatgagagggatcggattagtacccgccgatcctcttatgaagacagctccctgccgtcaataaacgcccttctgcaggctgaggttttgagtagacaaatcacaagccccgtgtctgggattaatggagatatcagggccaaaaagattgcgtccatcgcagacgtctgtgagtcaatgaaagaacagctcctggtgctggtagagtgggccaagtacatacctgctttttgcgaactcccattagatgaccaggttgccctgcttcgggcacacgctggcgagcatttgctgctaggcgccaccaagcgtagcatggtgttcaaagacgtcctcctgcttgggaacgattatatcgtgccccgccactgtcctgagctggcggaaatgagtagagtgtctattaggatcttggacgagctcgtcctgccatttcaggaattacaaattgatgacaatgagtacgcctacctgaaggcaatcatattctttgatcccgacgctaaaggactctccgatcctggtaagattaaacggcttcgaagccaggttcaggtgtcgctggaagactatatcaacgatcgccagtacgactctagaggcaggttcggggagttgctactgctcctgccaactcttcaatccattacatggcagatgatcgagcagatccaatttattaagctgttcggaatggccaaaatagataatttgctccaggaaatgctgttaggcggttcaccgagtgacgctccccatgcccaccaccctctgcatccacacctaatgcaggagcatatggggaccaacgtaatcgtggcaaatacgatgcccactcacctcagcaacggacagatgtgcgaatggcctcggccacgcggccaagccgctacccccgagacaccgcagccttctcccccaggcgggtccggaagcgaaccttataagctgcttcccggtgcggtcgcaactattgtgagaccattgtcagccatcccccagcctaccataacaaagcaggaggttatttgaggactagttataagactgactagcccgatgggcctcccaacgggccctcctcccctccttgcaccgagattaataaaaaaaaaaaaaaaaaaaaaaaaaaaaaaaaaaaaaaaaaaaaaaaaaaaaaaaaaaaaaaaatgcatcccccccccccccccccccccccccccccccaaaggctcttttcagagccaccagaatt

SEQ ID NO: 2632 - RNA, 1531 nt, synthetic construct
  misc_feature 1..1531: note = mRNA i-3 (A64-N5-C30-hSL-N5) (opt3) from Homo sapiens__NP_000448.3__HNF4A(39-474)(K106R_K108R_K126R_K127R )
  source 1..1531: mol_type = other RNA
aggagaaagcttaccatggacacctctccttcagaggggacaaacttaaatgcgccaaacagtctgggagtgagcgctctatgcgccatctgtggtgatagggcaactggcaaacactacggggcctcctcttgcgacggatgtaagggctttttccggcgctcggtacgtaaaaatcatatgtattcatgccgatttagcagacaatgtgtggtcgatagggaccggcgcaaccagtgcagatactgtaggctcaagaaatgcttccgggctggtatgcgccgagaagcagtgcagaatgagagagataggattagtacccggcgttcctcttatgaagacagctccctgccgtcaataaacgcccttctgcaggctgaggttttgagtcgccaaatcacaagccccgtgtctgggattaatggagatatcagagccaagaagattgcgtccatcgcagacgtctgtgagtcaatgaaagaacagctcctggtgctggtagagtgggccaagtacatacctgctttttgcgaactcccattagatgaccaggttgccctgcttagggcacacgctggcgagcatttgctgctaggcgccaccaaacggagcatggtgttcaaggacgtcctcctgcttgggaacgattatatcgtgccccgacactgtcctgagctggcggaaatgagtcgcgtgtctattagaatcttggacgagctcgtcctgccatttcaggaattacaaattgatgacaatgagtacgcctacctgaaagcaatcatattctttgatcccgacgctaagggactctccgatcctggtaagattaaaaggcttcggagccaggttcaggtgtcgctggaagactatatcaacgatcgccagtacgactctagaggcaggttcggggagttgctactgctcctgccaactcttcaatccattacatggcagatgatcgagcagatccaatttattaagctgttcggaatggccaaaatagataatttgctccaggaaatgctgttaggcggttcaccgagtgacgctccccatgcccaccaccctctgcatccacacctaatgcaggagcatatggggaccaacgtaatcgtggcaaatacgatgcccactcacctcagcaacggacagatgtgcgaatggcctcgtccacggggccaagccgctacccccgagacaccgcagccttctcccccaggcgggtccggaagcgaaccttataagctgcttcccggtgcggtcgcaactattgtgaaaccattgtcagccatcccccagcctaccataacaaagcaggaggttatttgaggactagttataagactgactagcccgatgggcctcccaacgggccctcctcccctccttgcaccgagattaataaaaaaaaaaaaaaaaaaaaaaaaaaaaaaaaaaaaaaaaaaaaaaaaaaaaaaaaaaaaaaaatgcatcccccccccccccccccccccccccccccccaaaggctcttttcagagccaccagaatt

SEQ ID NO: 2633 - RNA, 1531 nt, synthetic construct
  misc_feature 1..1531: note = mRNA i-3 (A64-N5-C30-hSL-N5) (opt3) from Homo sapiens__NP_000448.3__HNF4A(39-474)(E285Q)
  source 1..1531: mol_type = other RNA
aggagaaagcttaccatggacacctctccttcagaggggacaaacttaaatgcgccaaacagtctgggagtgagcgctctatgcgccatctgtggtgatagggcaactggcaaacactacggggcctcctcttgcgacggatgtaagggctttttccggcgctcggtacgtaaaaatcatatgtattcatgccgatttagcagacaatgtgtggtcgataaggacaaaaggaaccagtgccggtactgtcgcctcaagaagtgcttcagagctggtatgaaaaaggaagcagtgcagaatgagagggatcggattagtacccgccgatcctcttatgaagacagctccctgccgtcaataaacgcccttctgcaggctgaggttttgagtagacaaatcacaagccccgtgtctgggattaatggagatatcagggccaaaaagattgcgtccatcgcagacgtctgtgagtcaatgaaagaacagctcctggtgctggtagagtgggccaagtacatacctgctttttgcgaactcccattagatgaccaggttgccctgcttcgggcacacgctggcgagcatttgctgctaggcgccaccaagcgtagcatggtgttcaaagacgtcctcctgcttgggaacgattatatcgtgccccgccactgtcctgagctggcggaaatgagtagagtgtctattaggatcttggacgagctcgtcctgccatttcaggaattacaaattgatgacaatcagtacgcctacctgaaggcaatcatattctttgatcccgacgctaaaggactctccgatcctggtaagattaaacggcttcgaagccaggttcaggtgtcgctggaggactatatcaacgatcgccaatacgactctagaggcaggttcggggaattgctactgctcctgccaactcttcagtccattacatggcagatgatcgagcaaatccagtttattaagctgttcggaatggccaaaatagataatttgctccaggagatgctgttaggcggttcaccgagtgacgctccccatgcccaccaccctctgcatccacacctaatgcaggaacatatggggaccaacgtaatcgtggcaaatacgatgcccactcacctcagcaacggacaaatgtgcgagtggcctcggccacgcggccaggccgctacccccgaaacaccgcagccttctcccccaggcgggtccggaagcgagccttataagctgcttcccggtgcggtcgcaactattgtgaagccattgtcagccatcccccagcctaccataacaaaacaagaagttatttgaggactagttataagactgactagcccgatgggcctcccaacgggccctcctcccctccttgcaccgagattaataaaaaaaaaaaaaaaaaaaaaaaaaaaaaaaaaaaaaaaaaaaaaaaaaaaaaaaaaaaaaaaatgcatcccccccccccccccccccccccccccccccaaaggctcttttcagagccaccagaatt

SEQ ID NO: 2634 - RNA, 1531 nt, synthetic construct
  misc_feature 1..1531: note = mRNA i-3 (A64-N5-C30-hSL-N5) (opt3) from Homo sapiens__NP_000448.3__HNF4A(39-474)(T166E)
  source 1..1531: mol_type = other RNA
aggagaaagcttaccatggacacctctccttcagaggggacaaacttaaatgcgccaaacagtctgggagtgagcgctctatgcgccatctgtggtgatagggcaactggcaaacactacggggcctcctcttgcgacggatgtaagggctttttccggcgctcggtacgtaaaaatcatatgtattcatgccgatttagcagacaatgtgtggtcgataaggacaaaaggaaccagtgccggtactgtcgcctcaagaagtgcttcagagctggtatgaaaaaggaagcagtgcagaatgagagggatcggattagtacccgccgatcctcttatgaagacagctccctgccgtcaataaacgcccttctgcaggctgaggttttgagtagacaaatcgagagccccgtgtctgggattaatggagatatcagggccaaaaagattgcgtccatcgcagacgtctgtgaatcaatgaaagagcagctcctggtgctggtagaatgggccaagtacatacctgctttttgcgagctcccattagatgaccaggttgccctgcttcgggcacacgctggcgagcatttgctgctaggcgccacaaagcgtagcatggtgttcaaagacgtcctcctgcttgggaacgattatatcgtgccccgccactgtcctgaactggcggagatgagtagagtgtctattaggatcttggacgaactcgtcctgccatttcaggagttacaaattgatgacaatgaatacgcctacctgaaggcaatcatattctttgatcccgacgctaaaggactctccgatcctggtaagattaaacggcttcgaagccaggttcaggtgtcgctggaggactatatcaacgatcgccagtacgactctagaggcaggttcggggagttgctactgctcctgccaacccttcaatccattacttggcagatgatcgaacagatccaatttattaagctgttcggaatggccaaaatagataatttgctccaggagatgctgttaggcggttcaccgagtgacgctccccatgcccaccaccctctgcatccacacctaatgcaggaacatatggggacaaacgtaatcgtggcaaataccatgcccacgcacctcagcaacggacagatgtgcgagtggcctcggccacgcggccaagccgctactcccgaaaccccgcagccttctcccccaggcgggtccggaagcgagccttataagctgcttcccggtgcggtcgcaacaattgtgaagccattgtcagccatcccccagcctactataaccaaacaggaggttatttgaggactagttataagactgactagcccgatgggcctcccaacgggccctcctcccctccttgcaccgagattaataaaaaaaaaaaaaaaaaaaaaaaaaaaaaaaaaaaaaaaaaaaaaaaaaaaaaaaaaaaaaaaatgcatcccccccccccccccccccccccccccccccaaaggctcttttcagagccaccagaatt

SEQ ID NO: 2635 - RNA, 1531 nt, synthetic construct
  misc_feature 1..1531: note = mRNA i-3 (A64-N5-C30-hSL-N5) (opt3) from Homo sapiens__NP_000448.3__HNF4A(39-474)(S148A)
  source 1..1531: mol_type = other RNA
aggagaaagcttaccatggacacctctccttcagaggggacaaacttaaatgcgccaaacagtctgggagtgagcgctctatgcgccatctgtggtgatagggcaactggcaaacactacggggcctcctcttgcgacggatgtaagggctttttccggcgctcggtacgtaaaaatcatatgtattcatgccgatttagcagacaatgtgtggtcgataaggacaaaaggaaccagtgccggtactgtcgcctcaagaagtgcttcagagctggtatgaaaaaggaagcagtgcagaatgagagggatcggattagtacccgccgatcctcttatgaagacagcgccctgccgtccataaacgcccttctgcaggccgaggttttgtcaagacaaatcacaagtcccgtgagcgggattaatggagatatcagggcgaaaaagattgcatctatcgccgacgtctgtgagtccatgaaagaacagctcctggtgctggtagagtgggctaagtacatacctgccttttgcgaactcccattagatgaccaggttgcactgcttcgggctcacgccggcgagcatttgctgctaggcgcgaccaagcgttcaatggtgttcaaagacgtcctcctgcttgggaacgattatatcgtgccccgccactgtcctgagctggccgaaatgagcagagtgagtattaggatcttggacgagctcgtcctgccatttcaggaattacaaattgatgacaatgagtacgcatacctgaaggctatcatattctttgatcccgacgccaaaggactctctgatcctggtaagattaaacggcttcgatcccaggttcaggtgagcctggaagactatatcaacgatcgccagtacgactcgagaggcaggttcggggagttgctactgctcctgccaactcttcaatctattacatggcagatgatcgagcagatccaatttattaagctgttcggaatggctaaaatagataatttgctccaggaaatgctgttaggcggttccccgtcagacgctccccatgcacaccaccctctgcatccacacctaatgcaggagcatatggggaccaacgtaatcgtggccaatacgatgcccactcacctcagtaacggacagatgtgcgaatggcctcggccacgcggccaagctgcgacccccgagacaccgcagcctagcccacccggcgggtccggatctgaaccttataagctgcttcccggtgcagtcgccactattgtgaagccattgagcgctatcccccagcctaccataacaaaacaggaggttatttgaggactagttataagactgactagcccgatgggcctcccaacgggccctcctcccctccttgcaccgagattaataaaaaaaaaaaaaaaaaaaaaaaaaaaaaaaaaaaaaaaaaaaaaaaaaaaaaaaaaaaaaaaatgcatcccccccccccccccccccccccccccccccaaaggctcttttcagagccaccagaatt

SEQ ID NO: 2636 - RNA, 1531 nt, synthetic construct
  misc_feature 1..1531: note = mRNA i-3 (A64-N5-C30-hSL-N5) (opt3) from Homo sapiens__NP_000448.3__HNF4A(39-474)(S148E)
  source 1..1531: mol_type = other RNA
aggagaaagcttaccatggacacctctccttcagaggggacaaacttaaatgcgccaaacagtctgggagtgagcgctctatgcgccatctgtggtgatagggcaactggcaaacactacggggcctcctcttgcgacggatgtaagggctttttccggcgctcggtacgtaaaaatcatatgtattcatgccgatttagcagacaatgtgtggtcgataaggacaaaaggaaccagtgccggtactgtcgcctcaagaagtgcttcagagctggtatgaaaaaggaagcagtgcagaatgagagggatcggattagtacccgccgatcctcttatgaagacagcgagctgccgtccataaacgcccttctgcaggctgaggttttgtcaagacaaatcacaagtcccgtgagcgggattaatggagatatcagggccaaaaagattgcgtctatcgcagacgtctgtgaatccatgaaagagcagctcctggtgctggtagaatgggccaagtacatacctgctttttgcgagctcccattagatgaccaggttgccctgcttcgggcacacgctggcgagcatttgctgctaggcgccaccaagcgttcaatggtgttcaaagacgtcctcctgcttgggaacgattatatcgtgccccgccactgtcctgaactggcggagatgagcagagtgagtattaggatcttggacgaactcgtcctgccatttcaggagttacaaattgatgacaatgaatacgcctacctgaaggcaatcatattctttgatcccgacgctaaaggactctctgatcctggtaagattaaacggcttcgatcccaggttcaggtgagcctggaggactatatcaacgatcgccagtacgactcgagaggcaggttcggggagttgctactgctcctgccaactcttcaatctattacatggcagatgatcgaacagatccaatttattaagctgttcggaatggccaaaatagataatttgctccaggagatgctgttaggcggttccccgtcagacgctccccatgcccaccaccctctgcatccacacctaatgcaggaacatatggggaccaacgtaatcgtggcaaatacgatgcccactcacctcagtaacggacagatgtgcgagtggcctcggccacgcggccaagccgctacccccgaaacaccgcagcctagcccacccggcgggtccggatctgagccttataagctgcttcccggtgcggtcgcaactattgtgaagccattgagcgccatcccccagcctaccataacaaaacaggaggttatttgaggactagttataagactgactagcccgatgggcctcccaacgggccctcctcccctccttgcaccgagattaataaaaaaaaaaaaaaaaaaaaaaaaaaaaaaaaaaaaaaaaaaaaaaaaaaaaaaaaaaaaaaaatgcatcccccccccccccccccccccccccccccccaaaggctcttttcagagccaccagaatt

SEQ ID NO: 2637 - RNA, 1531 nt, synthetic construct
  misc_feature 1..1531: note = mRNA i-3 (A64-N5-C30-hSL-N5) (opt3) from Homo sapiens__NP_000448.3__HNF4A(39-474)(S183A)
  source 1..1531: mol_type = other RNA
aggagaaagcttaccatggacacctctccttcagaggggacaaacttaaatgcgccaaacagtctgggagtgagcgctctatgcgccatctgtggtgatagggcaactggcaaacactacggggcctcctcttgcgacggatgtaagggctttttccggcgctcggtacgtaaaaatcatatgtattcatgccgatttagcagacaatgtgtggtcgataaggacaaaaggaaccagtgccggtactgtcgcctcaagaagtgcttcagagctggtatgaaaaaggaagcagtgcagaatgagagggatcggattagtacccgccgatcctcttatgaagacagctccctgccgtcaataaacgcccttctgcaggctgaggttttgagtagacaaatcacaagccccgtgtctgggattaatggagatatcagggccaaaaagattgcggcaatcgccgacgtctgtgagtccatgaaagaacagctcctggtgctggtagagtgggctaagtacatacctgccttttgcgaactcccattagatgaccaggttgcactgcttcgggctcacgccggcgagcatttgctgctaggcgcgaccaagcgttcaatggtgttcaaagacgtcctcctgcttgggaacgattatatcgtgccccgccactgtcctgagctggccgaaatgagcagagtgagtattaggatcttggacgagctcgtcctgccatttcaggaattacaaattgatgacaatgagtacgcatacctgaaggctatcatattctttgatcccgacgccaaaggactctctgatcctggtaagattaaacggcttcgatcccaggttcaggtgagcctggaagactatatcaacgatcgccagtacgactcgagaggcaggttcggggagttgctactgctcctgccaactcttcaatctattacatggcagatgatcgagcagatccaatttattaagctgttcggaatggctaaaatagataatttgctccaggaaatgctgttaggcggttccccgtcagacgcaccccatgcccaccaccctctgcatccacacctaatgcaggagcatatggggaccaacgtaatcgtggccaatacgatgcccactcacctcagtaacggacagatgtgcgaatggcctcggccacgcggccaagctgcgacccccgagacaccgcagcctagcccacccggcgggtccggatctgaaccttataagctgcttcccggtgcagtcgccactattgtgaagccattgagcgctatcccccagcctaccataacaaaacaggaggttatttgaggactagttataagactgactagcccgatgggcctcccaacgggccctcctcccctccttgcaccgagattaataaaaaaaaaaaaaaaaaaaaaaaaaaaaaaaaaaaaaaaaaaaaaaaaaaaaaaaaaaaaaaaatgcatcccccccccccccccccccccccccccccccaaaggctcttttcagagccaccagaatt

SEQ ID NO: 2638 - RNA, 1531 nt, synthetic construct
  misc_feature 1..1531: note = mRNA i-3 (A64-N5-C30-hSL-N5) (opt3) from Homo sapiens__NP_000448.3__HNF4A(39-474)(S183E)
  source 1..1531: mol_type = other RNA
aggagaaagcttaccatggacacctctccttcagaggggacaaacttaaatgcgccaaacagtctgggagtgagcgctctatgcgccatctgtggtgatagggcaactggcaaacactacggggcctcctcttgcgacggatgtaagggctttttccggcgctcggtacgtaaaaatcatatgtattcatgccgatttagcagacaatgtgtggtcgataaggacaaaaggaaccagtgccggtactgtcgcctcaagaagtgcttcagagctggtatgaaaaaggaagcagtgcagaatgagagggatcggattagtacccgccgatcctcttatgaagacagctccctgccgtcaataaacgcccttctgcaggctgaggttttgagtagacaaatcacaagccccgtgtctgggattaatggagatatcagggccaaaaagattgcggagatcgcagacgtctgtgaatccatgaaagagcagctcctggtgctggtagaatgggccaagtacatacctgctttttgcgagctcccattagatgaccaggttgccctgcttcgggcacacgctggcgagcatttgctgctaggcgccaccaagcgttcaatggtgttcaaagacgtcctcctgcttgggaacgattatatcgtgccccgccactgtcctgaactggcggagatgagcagagtgagtattaggatcttggacgaactcgtcctgccatttcaggagttacaaattgatgacaatgaatacgcctacctgaaggcaatcatattctttgatcccgacgctaaaggactctctgatcctggtaagattaaacggcttcgatcccaggttcaggtgagcctggaggactatatcaacgatcgccagtacgactcgagaggcaggttcggggagttgctactgctcctgccaactcttcaatctattacatggcagatgatcgaacagatccaatttattaagctgttcggaatggccaaaatagataatttgctccaggagatgctgttaggcggttccccgtcagacgctccccatgcccaccaccctctgcatccacacctaatgcaggaacatatggggaccaacgtaatcgtggcaaatacgatgcccactcacctcagtaacggacagatgtgcgagtggcctcggccacgcggccaagccgctacccccgaaacaccgcagcctagcccacccggcgggtccggatctgagccttataagctgcttcccggtgcggtcgcaactattgtgaagccattgagcgccatcccccagcctaccataacaaaacaggaggttatttgaggactagttataagactgactagcccgatgggcctcccaacgggccctcctcccctccttgcaccgagattaataaaaaaaaaaaaaaaaaaaaaaaaaaaaaaaaaaaaaaaaaaaaaaaaaaaaaaaaaaaaaaaatgcatcccccccccccccccccccccccccccccccaaaggctcttttcagagccaccagaatt

SEQ ID NO: 2639 - RNA, 1531 nt, synthetic construct
  misc_feature 1..1531: note = mRNA i-3 (A64-N5-C30-hSL-N5) (opt3) from Homo sapiens__NP_000448.3__HNF4A(39-474)(S461A)
  source 1..1531: mol_type = other RNA
aggagaaagcttaccatggacacctctccttcagaggggacaaacttaaatgcgccaaacagtctgggagtgagcgctctatgcgccatctgtggtgatagggcaactggcaaacactacggggcctcctcttgcgacggatgtaagggctttttccggcgctcggtacgtaaaaatcatatgtattcatgccgatttagcagacaatgtgtggtcgataaggacaaaaggaaccagtgccggtactgtcgcctcaagaagtgcttcagagctggtatgaaaaaggaagcagtgcagaatgagagggatcggattagtacccgccgatcctcttatgaagacagctccctgccgtcaataaacgcccttctgcaggctgaggttttgagtagacaaatcacaagccccgtgtctgggattaatggagatatcagggccaaaaagattgcgtccatcgcagacgtctgtgagtcaatgaaagaacagctcctggtgctggtagagtgggccaagtacatacctgctttttgcgaactcccattagatgaccaggttgccctgcttcgggcacacgctggcgagcatttgctgctaggcgccaccaagcgtagcatggtgttcaaagacgtcctcctgcttgggaacgattatatcgtgccccgccactgtcctgagctggcggaaatgagtagagtgtctattaggatcttggacgagctcgtcctgccatttcaggaattacaaattgatgacaatgagtacgcctacctgaaggcaatcatattctttgatcccgacgctaaaggactctccgatcctggtaagattaaacggcttcgaagccaggttcaggtgtcgctggaagactatatcaacgatcgccagtacgactctagaggcaggttcggggagttgctactgctcctgccaactcttcaatccattacatggcagatgatcgagcagatccaatttattaagctgttcggaatggccaaaatagataatttgctccaggaaatgctgttaggcggttcaccgagtgacgctccccatgcccaccaccctctgcatccacacctaatgcaggagcatatggggaccaacgtaatcgtggcaaatacgatgcccactcacctcagcaacggacagatgtgcgaatggcctcggccacgcggccaagccgctacccccgagacaccgcagccttctcccccaggcgggtccggaagcgaaccttataagctgcttcccggtgcggtcgcaactattgtgaagccattggccgctatcccccagcctaccataacaaaacaggaggttatttgaggactagttataagactgactagcccgatgggcctcccaacgggccctcctcccctccttgcaccgagattaataaaaaaaaaaaaaaaaaaaaaaaaaaaaaaaaaaaaaaaaaaaaaaaaaaaaaaaaaaaaaaaatgcatcccccccccccccccccccccccccccccccaaaggctcttttcagagccaccagaatt

SEQ ID NO: 2640 - RNA, 1531 nt, synthetic construct
  misc_feature 1..1531: note = mRNA i-3 (A64-N5-C30-hSL-N5) (opt3) from Homo sapiens__NP_000448.3__HNF4A(39-474)(S461E)
  source 1..1531: mol_type = other RNA
aggagaaagcttaccatggacacctctccttcagaggggacaaacttaaatgcgccaaacagtctgggagtgagcgctctatgcgccatctgtggtgatagggcaactggcaaacactacggggcctcctcttgcgacggatgtaagggctttttccggcgctcggtacgtaaaaatcatatgtattcatgccgatttagcagacaatgtgtggtcgataaggacaaaaggaaccagtgccggtactgtcgcctcaagaagtgcttcagagctggtatgaaaaaggaagcagtgcagaatgagagggatcggattagtacccgccgatcctcttatgaagacagctccctgccgtcaataaacgcccttctgcaggctgaggttttgagtagacaaatcacaagccccgtgtctgggattaatggagatatcagggccaaaaagattgcgtccatcgcagacgtctgtgagtcaatgaaagaacagctcctggtgctggtagagtgggccaagtacatacctgctttttgcgaactcccattagatgaccaggttgccctgcttcgggcacacgctggcgagcatttgctgctaggcgccaccaagcgtagcatggtgttcaaagacgtcctcctgcttgggaacgattatatcgtgccccgccactgtcctgagctggcggaaatgagtagagtgtctattaggatcttggacgagctcgtcctgccatttcaggaattacaaattgatgacaatgagtacgcctacctgaaggcaatcatattctttgatcccgacgctaaaggactctccgatcctggtaagattaaacggcttcgaagccaggttcaggtgtcgctggaagactatatcaacgatcgccagtacgactctagaggcaggttcggggagttgctactgctcctgccaactcttcaatccattacatggcagatgatcgagcagatccaatttattaagctgttcggaatggccaaaatagataatttgctccaggaaatgctgttaggcggttcaccgagtgacgctccccatgcccaccaccctctgcatccacacctaatgcaggagcatatggggaccaacgtaatcgtggcaaatacgatgcccactcacctcagcaacggacagatgtgcgaatggcctcggccacgcggccaagccgctacccccgagacaccgcagccttctcccccaggcgggtccggaagcgaaccttataagctgcttcccggtgcggtcgcaactattgtgaagccattggaggccatcccccagcctaccataacaaaacaggaggttatttgaggactagttataagactgactagcccgatgggcctcccaacgggccctcctcccctccttgcaccgagattaataaaaaaaaaaaaaaaaaaaaaaaaaaaaaaaaaaaaaaaaaaaaaaaaaaaaaaaaaaaaaaaatgcatcccccccccccccccccccccccccccccccaaaggctcttttcagagccaccagaatt

SEQ ID NO: 2641 - RNA, 1531 nt, synthetic construct
  misc_feature 1..1531: note = mRNA i-3 (A64-N5-C30-hSL-N5) (opt3) from Homo sapiens__NP_000448.3__HNF4A(39-474)(S142A_S143A_S313A)
  source 1..1531: mol_type = other RNA
aggagaaagcttaccatggacacctctccttcagaggggacaaacttaaatgcgccaaacagtctgggagtgagcgctctatgcgccatctgtggtgatagggcaactggcaaacactacggggcctcctcttgcgacggatgtaagggctttttccggcgctcggtacgtaaaaatcatatgtattcatgccgatttagcagacaatgtgtggtcgataaggacaaaaggaaccagtgccggtactgtcgcctcaagaagtgcttcagagctggtatgaaaaaggaagcagtgcagaatgagagggatcggattagtacccgccgagccgcttatgaagactcctctctgccgagcataaacgcccttctgcaggcggaggttttgtccagacaaatcacatcacccgtgagtgggattaatggagatatcagggccaaaaagattgccagcatcgctgacgtctgtgagtctatgaaagaacagctcctggtgctggtagagtgggccaagtacatacctgcattttgcgaactcccattagatgaccaggttgctctgcttcgggcccacgcgggcgagcatttgctgctaggcgccaccaagcgttccatggtgttcaaagacgtcctcctgcttgggaacgattatatcgtgccccgccactgtcctgagctggcagaaatgtcaagagtgagcattaggatcttggacgagctcgtcctgccatttcaggaattacaaattgatgacaatgagtacgcttacctgaaggccatcatattctttgatcccgacgctaaaggactcagtgatcctggtaagattaaacggcttcgagcccaggttcaggtgtctctggaagactatatcaacgatcgccagtacgactccagaggcaggttcggggagttgctactgctcctgccaactcttcaaagcattacatggcagatgatcgagcagatccaatttattaagctgttcggaatggcaaaaatagataatttgctccaggaaatgctgttaggcggttcgccgtctgacgcaccccatgctcaccaccctctgcatccacacctaatgcaggagcatatggggaccaacgtaatcgtggcgaatacgatgcccactcacctctccaacggacagatgtgcgaatggcctcggccacgcggccaagcagccacccccgagacaccgcagccttcacccccaggcgggagtggaagcgaaccttataagctgcttcccggtgctgtcgccactattgtgaagccattgtccgcaatcccccagcctaccataacaaaacaggaggttatttgaggactagttataagactgactagcccgatgggcctcccaacgggccctcctcccctccttgcaccgagattaataaaaaaaaaaaaaaaaaaaaaaaaaaaaaaaaaaaaaaaaaaaaaaaaaaaaaaaaaaaaaaaatgcatcccccccccccccccccccccccccccccccaaaggctcttttcagagccaccagaatt

SEQ ID NO: 2642 - RNA, 1531 nt, synthetic construct
  misc_feature 1..1531: note = mRNA i-3 (A64-N5-C30-hSL-N5) (opt3) from Homo sapiens__NP_000448.3__HNF4A(39-474)(S142A_S143A_S313A_K458R )
  source 1..1531: mol_type = other RNA
aggagaaagcttaccatggacacctctccttcagaggggacaaacttaaatgcgccaaacagtctgggagtgagcgctctatgcgccatctgtggtgatagggcaactggcaaacactacggggcctcctcttgcgacggatgtaagggctttttccggcgctcggtacgtaaaaatcatatgtattcatgccgatttagcagacaatgtgtggtcgataaggacaaaaggaaccagtgccggtactgtcgcctcaagaagtgcttcagagctggtatgaaaaaggaagcagtgcagaatgagagggatcggattagtacccgccgagccgcttatgaagactcctctctgccgagcataaacgcccttctgcaggcggaggttttgtccagacaaatcacatcacccgtgagtgggattaatggagatatcagggccaaaaagattgccagcatcgctgacgtctgtgagtctatgaaagaacagctcctggtgctggtagagtgggccaagtacatacctgcattttgcgaactcccattagatgaccaggttgctctgcttcgggcccacgcgggcgagcatttgctgctaggcgccaccaagcgttccatggtgttcaaagacgtcctcctgcttgggaacgattatatcgtgccccgccactgtcctgagctggcagaaatgtcaagagtgagcattaggatcttggacgagctcgtcctgccatttcaggaattacaaattgatgacaatgagtacgcttacctgaaggccatcatattctttgatcccgacgctaaaggactcagtgatcctggtaagattaaacggcttcgagcccaggttcaggtgtctctggaagactatatcaacgatcgccagtacgactccagaggcaggttcggggagttgctactgctcctgccaactcttcaaagcattacatggcagatgatcgagcagatccaatttattaagctgttcggaatggcaaaaatagataatttgctccaggaaatgctgttaggcggttcgccgtctgacgcaccccatgctcaccaccctctgcatccacacctaatgcaggagcatatggggaccaacgtaatcgtggcgaatacgatgcccactcacctctccaacggacagatgtgcgaatggcctcggccacgcggccaagcagccacccccgagacaccgcagccttcacccccaggcgggagtggaagcgaaccttataagctgcttcccggtgctgtcgccactattgtgagaccattgtccgcaatcccccagcctaccataacaaagcaggaggttatttgaggactagttataagactgactagcccgatgggcctcccaacgggccctcctcccctccttgcaccgagattaataaaaaaaaaaaaaaaaaaaaaaaaaaaaaaaaaaaaaaaaaaaaaaaaaaaaaaaaaaaaaaaatgcatcccccccccccccccccccccccccccccccaaaggctcttttcagagccaccagaatt

SEQ ID NO: 2643 - RNA, 1531 nt, synthetic construct
  misc_feature 1..1531: note = mRNA i-3 (A64-N5-C30-hSL-N5) (opt3) from Homo sapiens__NP_000448.3__HNF4A(39-474)(S142A_S143A_S167A_S313A _S378A_T429A_T432A_S436A_K458R)
  source 1..1531: mol_type = other RNA
aggagaaagcttaccatggacacctctccttcagaggggacaaacttaaatgcgccaaacagtctgggagtgagcgctctatgcgccatctgtggtgatagggcaactggcaaacactacggggcctcctcttgcgacggatgtaagggctttttccggcgctcggtacgtaaaaatcatatgtattcatgccgatttagcagacaatgtgtggtcgataaggacaaaaggaaccagtgccggtactgtcgcctcaagaagtgcttcagagctggtatgaaaaaggaagcagtgcagaatgagagggatcggattagtacccgccgagccgcttatgaagactcctctctgccgagcataaacgcccttctgcaggcggaggttttgtccagacaaatcacagcacccgtgtcagggattaatggagatatcagggccaaaaagattgctagtatcgccgacgtctgtgagagcatgaaagaacagctcctggtgctggtagagtgggcaaagtacatacctgctttttgcgaactcccattagatgaccaggttgccctgcttcgggcgcacgccggcgagcatttgctgctaggcgcaaccaagcgttctatggtgttcaaagacgtcctcctgcttgggaacgattatatcgtgccccgccactgtcctgagctggctgaaatgtccagagtgtcaattaggatcttggacgagctcgtcctgccatttcaggaattacaaattgatgacaatgagtacgcctacctgaaggctatcatattctttgatcccgacgccaaaggactcagcgatcctggtaagattaaacggcttcgagcacaggttcaggtgagtctggaagactatatcaacgatcgccagtacgactctagaggcaggttcggggagttgctactgctcctgccaactcttcaatccattacatggcagatgatcgagcagatccaatttattaagctgttcggaatggccaaaatagataatttgctccaggaaatgctgttaggcggtgctccgagcgacgcgccccatgcacaccaccctctgcatccacacctaatgcaggagcatatggggaccaacgtaatcgtggccaatacgatgcccactcacctctcgaacggacagatgtgcgaatggcctcggccacgcggccaagctgccgcacccgaggccccgcagcctgctcccccaggcgggtctggatccgaaccttataagctgcttcccggtgccgtcgcaaccattgtgagaccattgtcagcgatcccccagcctacaataactaagcaggaggttatttgaggactagttataagactgactagcccgatgggcctcccaacgggccctcctcccctccttgcaccgagattaataaaaaaaaaaaaaaaaaaaaaaaaaaaaaaaaaaaaaaaaaaaaaaaaaaaaaaaaaaaaaaaatgcatcccccccccccccccccccccccccccccccaaaggctcttttcagagccaccagaatt

SEQ ID NO: 2644 - RNA, 1531 nt, synthetic construct
  misc_feature 1..1531: note = mRNA i-3 (A64-N5-C30-hSL-N5) (opt3) from Homo sapiens__NP_000448.3__HNF4A(39-474)(S142A_S143A_S148A_S167A _S313A_S378A_T429A_T432A_S436A_K458R)
  source 1..1531: mol_type = other RNA
aggagaaagcttaccatggacacctctccttcagaggggacaaacttaaatgcgccaaacagtctgggagtgagcgctctatgcgccatctgtggtgatagggcaactggcaaacactacggggcctcctcttgcgacggatgtaagggctttttccggcgctcggtacgtaaaaatcatatgtattcatgccgatttagcagacaatgtgtggtcgataaggacaaaaggaaccagtgccggtactgtcgcctcaagaagtgcttcagagctggtatgaaaaaggaagcagtgcagaatgagagggatcggattagtacccgccgagccgcttatgaagactccgccctgccgtctataaacgcgcttctgcaggcagaggttttgagcagacaaatcacagcccccgtgtccgggattaatggagatatcagggctaaaaagattgcctcaatcgcagacgtctgtgagagtatgaaagaacagctcctggtgctggtagagtgggctaagtacatacctgccttttgcgaactcccattagatgaccaggttgcgctgcttcgggcccacgcaggcgagcatttgctgctaggcgctaccaagcgtagcatggtgttcaaagacgtcctcctgcttgggaacgattatatcgtgccccgccactgtcctgagctggccgaaatgtctagagtgtccattaggatcttggacgagctcgtcctgccatttcaggaattacaaattgatgacaatgagtacgcttacctgaaggccatcatattctttgatcccgacgcaaaaggactctcagatcctggtaagattaaacggcttcgagcccaggttcaggtgagcctggaagactatatcaacgatcgccagtacgacagtagaggcaggttcggggagttgctactgctcctgccaactcttcaatctattacatggcagatgatcgagcagatccaatttattaagctgttcggaatggctaaaatagataatttgctccaggaaatgctgttaggcggtgcgccgtccgacgcaccccatgcccaccaccctctgcatccacacctaatgcaggagcatatggggaccaacgtaatcgtggctaatacgatgcccactcacctcagcaacggacagatgtgcgaatggcctcggccacgcggccaagccgcagcccccgaggctccgcagcctgcacccccaggcgggtcgggatctgaaccttataagctgcttcccggtgccgtcgcgaccattgtgagaccattgtccgctatcccccagcctacaataactaagcaggaggttatttgaggactagttataagactgactagcccgatgggcctcccaacgggccctcctcccctccttgcaccgagattaataaaaaaaaaaaaaaaaaaaaaaaaaaaaaaaaaaaaaaaaaaaaaaaaaaaaaaaaaaaaaaaatgcatcccccccccccccccccccccccccccccccaaaggctcttttcagagccaccagaatt

SEQ ID NO: 2645 - RNA, 1531 nt, synthetic construct
  misc_feature 1..1531: note = mRNA i-3 (A64-N5-C30-hSL-N5) (opt3) from Homo sapiens__NP_000448.3__HNF4A(39-474)(K106R_K108R_K126R_K127R _S142A_S143A_S148A_S167A_S313A_S378A_T429A_T432A_S436A_K458 R)
  source 1..1531: mol_type = other RNA
aggagaaagcttaccatggacacctctccttcagaggggacaaacttaaatgcgccaaacagtctgggagtgagcgctctatgcgccatctgtggtgatagggcaactggcaaacactacggggcctcctcttgcgacggatgtaagggctttttccggcgctcggtacgtaaaaatcatatgtattcatgccgatttagcagacaatgtgtggtcgatagggaccggcgcaaccagtgcagatactgtaggctcaagaaatgcttccgggctggtatgcgccgagaagcagtgcagaatgagagagataggattagtacccggcgtgccgcttatgaagactccgccctgccgtctataaacgcgcttctgcaggcagaggttttgagccgccaaatcacagcccccgtgtccgggattaatggagatatcagagctaagaagattgcctcaatcgcagacgtctgtgagagtatgaaagaacagctcctggtgctggtagagtgggctaagtacatacctgccttttgcgaactcccattagatgaccaggttgcgctgcttagggcccacgcaggcgagcatttgctgctaggcgctaccaaacggagcatggtgttcaaggacgtcctcctgcttgggaacgattatatcgtgccccgacactgtcctgagctggccgaaatgtctcgcgtgtccattagaatcttggacgagctcgtcctgccatttcaggaattacaaattgatgacaatgagtacgcttacctgaaagccatcatattctttgatcccgacgcaaagggactctcagatcctggtaagattaaaaggcttcgggcccaggttcaggtgagcctggaagactatatcaacgatcgccagtacgacagtagaggcaggttcggggagttgctactgctcctgccaactcttcaatctattacatggcagatgatcgagcagatccaatttattaagctgttcggaatggctaaaatagataatttgctccaggaaatgctgttaggcggtgcgccgtccgacgcaccccatgcccaccaccctctgcatccacacctaatgcaggagcatatggggaccaacgtaatcgtggctaatacgatgcccactcacctcagcaacggacagatgtgcgaatggcctcgtccacggggccaagccgcagcccccgaggctccgcagcctgcacccccaggcgggtcgggatctgaaccttataagctgcttcccggtgccgtcgcgaccattgtgcgaccattgtccgctatcccccagcctacaataactaaacaggaggttatttgaggactagttataagactgactagcccgatgggcctcccaacgggccctcctcccctccttgcaccgagattaataaaaaaaaaaaaaaaaaaaaaaaaaaaaaaaaaaaaaaaaaaaaaaaaaaaaaaaaaaaaaaaatgcatcccccccccccccccccccccccccccccccaaaggctcttttcagagccaccagaatt

SEQ ID NO: 2646 - RNA, 1531 nt, synthetic construct
  misc_feature 1..1531: note = mRNA i-3 (A64-N5-C30-hSL-N5) (opt3) from Homo sapiens__NP_000448.3__HNF4A(39-474)(S142A_S143A_S148A_T166A _S167A_S313A_S378A_T429A_T432A_S436A_K458R)
  source 1..1531: mol_type = other RNA
aggagaaagcttaccatggacacctctccttcagaggggacaaacttaaatgcgccaaacagtctgggagtgagcgctctatgcgccatctgtggtgatagggcaactggcaaacactacggggcctcctcttgcgacggatgtaagggctttttccggcgctcggtacgtaaaaatcatatgtattcatgccgatttagcagacaatgtgtggtcgataaggacaaaaggaaccagtgccggtactgtcgcctcaagaagtgcttcagagctggtatgaaaaaggaagcagtgcagaatgagagggatcggattagtacccgccgagccgcttatgaagactccgccctgccgtctataaacgcgcttctgcaggcagaggttttgagcagacaaatcgccgctcccgtgtccgggattaatggagatatcagggccaaaaagattgcatcaatcgctgacgtctgtgagagtatgaaagaacagctcctggtgctggtagagtgggccaagtacatacctgcgttttgcgaactcccattagatgaccaggttgccctgcttcgggcacacgctggcgagcatttgctgctaggcgccacaaagcgtagcatggtgttcaaagacgtcctcctgcttgggaacgattatatcgtgccccgccactgtcctgagctggctgaaatgtctagagtgtccattaggatcttggacgagctcgtcctgccatttcaggaattacaaattgatgacaatgagtacgcctacctgaaggcaatcatattctttgatcccgacgccaaaggactctcagatcctggtaagattaaacggcttcgagctcaggttcaggtgagcctggaagactatatcaacgatcgccagtacgacagtagaggcaggttcggggagttgctactgctcctgccaacccttcaatctattacttggcagatgatcgagcagatccaatttattaagctgttcggaatggcgaaaatagataatttgctccaggaaatgctgttaggcggtgcaccgtccgacgctccccatgcccaccaccctctgcatccacacctaatgcaggagcatatggggacaaacgtaatcgtggccaataccatgcccacgcacctcagcaacggacagatgtgcgaatggcctcggccacgcggccaagcagccgctcccgaggccccgcagcctgcacccccaggcgggtcgggatctgaaccttataagctgcttcccggtgcggtcgctactattgtgagaccattgtccgccatcccccagcctaccataacaaagcaggaggttatttgaggactagttataagactgactagcccgatgggcctcccaacgggccctcctcccctccttgcaccgagattaataaaaaaaaaaaaaaaaaaaaaaaaaaaaaaaaaaaaaaaaaaaaaaaaaaaaaaaaaaaaaaaatgcatcccccccccccccccccccccccccccccccaaaggctcttttcagagccaccagaatt

SEQ ID NO: 2647 - RNA, 1531 nt, synthetic construct
  misc_feature 1..1531: note = mRNA i-3 (A64-N5-C30-hSL-N5) (opt3) from Homo sapiens__NP_000448.3__HNF4A(39-474)(S87A_S142A_S143A_S148A_ T166A_S167A_S313A_S378A_T429A_T432A_S436A_K458R)
  source 1..1531: mol_type = other RNA
aggagaaagcttaccatggacacctctccttcagaggggacaaacttaaatgcgccaaacagtctgggagtgagcgctctatgcgccatctgtggtgatagggcaactggcaaacactacggggcctcctcttgcgacggatgtaagggctttttccggcgcgctgtacgtaaaaatcatatgtattcgtgccgattttcaagacaatgtgtggtcgataaggacaaaaggaaccagtgccggtactgtcgcctcaagaagtgcttcagagcaggtatgaaaaaggaagccgtgcagaatgagagggatcggattagcacccgccgagctgcctatgaagacagtgcgctgccgtccataaacgcacttctgcaggccgaggttttgtctagacaaatcgctgcccccgtgagcgggattaatggagatatcagggctaaaaagattgcatccatcgccgacgtctgtgagtcaatgaaagaacagctcctggtgctggtagagtgggcgaagtacatacctgccttttgcgaactcccattagatgaccaggttgcactgcttcgggctcacgccggcgagcatttgctgctaggcgctacaaagcgtagtatggtgttcaaagacgtcctcctgcttgggaacgattatatcgtgccccgccactgtcctgagctggccgaaatgagcagagtgtctattaggatcttggacgagctcgtcctgccatttcaggaattacaaattgatgacaatgagtacgcatacctgaaggccatcatattctttgatcccgacgctaaaggactctccgatcctggtaagattaaacggcttcgagcgcaggttcaggtgtcactggaagactatatcaacgatcgccagtacgacagcagaggcaggttcggggagttgctactgctcctgccaacccttcaaagtattacttggcagatgatcgagcagatccaatttattaagctgttcggaatggcaaaaatagataatttgctccaggaaatgctgttaggcggtgccccgtctgacgctccccatgcccaccaccctctgcatccacacctaatgcaggagcatatggggacaaacgtaatcgtggcaaataccatgcccacgcacctctccaacggacagatgtgcgaatggcctcggccacgcggccaagccgctgcccccgaggcaccgcagcctgcgcccccaggcgggagcggatcggaaccttataagctgcttcccggtgctgtcgccactattgtgagaccattgtctgcaatcccccagcctaccataacaaagcaggaggttatttgaggactagttataagactgactagcccgatgggcctcccaacgggccctcctcccctccttgcaccgagattaataaaaaaaaaaaaaaaaaaaaaaaaaaaaaaaaaaaaaaaaaaaaaaaaaaaaaaaaaaaaaaaatgcatcccccccccccccccccccccccccccccccaaaggctcttttcagagccaccagaatt

SEQ ID NO: 2648 - RNA, 1531 nt, synthetic construct
  misc_feature 1..1531: note = mRNA i-3 (A64-N5-C30-hSL-N5) (opt3) from Homo sapiens__NP_000448.3__HNF4A(39-474)(S87A_K106R_K108R_K126R_ K127R_S142A_S143A_S148A_T166A_S167A_S313A_S378A_T429A_T432A _S436A_K458R)
  source 1..1531: mol_type = other RNA
aggagaaagcttaccatggacacctctccttcagaggggacaaacttaaatgcgccaaacagtctgggagtgagcgctctatgcgccatctgtggtgatagggcaactggcaaacactacggggcctcctcttgcgacggatgtaagggctttttccggcgcgctgtacgtaaaaatcatatgtattcgtgccgattttcaagacaatgtgtggtcgatagggaccggcgcaaccagtgcagatactgtaggctcaagaaatgcttccgggcaggtatgcgccgagaagccgtgcagaatgagagagataggattagcacccggcgtgctgcctatgaagacagtgcgctgccgtccataaacgcacttctgcaggccgaggttttgtctcgccaaatcgctgcccccgtgagcgggattaatggagatatcagagcaaagaagattgcttccatcgccgacgtctgtgagtcaatgaaagaacagctcctggtgctggtagagtgggcgaagtacatacctgccttttgcgaactcccattagatgaccaggttgcactgcttagggctcacgccggcgagcatttgctgctaggcgctacaaaacggagtatggtgttcaaggacgtcctcctgcttgggaacgattatatcgtgccccgacactgtcctgagctggccgaaatgagccgcgtgtctattagaatcttggacgagctcgtcctgccatttcaggaattacaaattgatgacaatgagtacgcatacctgaaagccatcatattctttgatcccgacgctaagggactctccgatcctggtaagattaaaaggcttcgggcgcaggttcaggtgtcactggaagactatatcaacgatcgccagtacgacagcagaggcaggttcggggagttgctactgctcctgccaacccttcaaagtattacttggcagatgatcgagcagatccaatttattaagctgttcggaatggcaaaaatagataatttgctccaggaaatgctgttaggcggtgccccgtctgacgctccccatgcccaccaccctctgcatccacacctaatgcaggagcatatggggacaaacgtaatcgtggcaaataccatgcccacgcacctctccaacggacagatgtgcgaatggcctcgtccacggggccaagccgctgcccccgaggcaccgcagcctgcgcccccaggcgggagcggatcggaaccttataagctgcttcccggtgctgtcgccactattgtgcgaccattgtctgcaatcccccagcctaccataacaaaacaggaggttatttgaggactagttataagactgactagcccgatgggcctcccaacgggccctcctcccctccttgcaccgagattaataaaaaaaaaaaaaaaaaaaaaaaaaaaaaaaaaaaaaaaaaaaaaaaaaaaaaaaaaaaaaaaatgcatcccccccccccccccccccccccccccccccaaaggctcttttcagagccaccagaatt

SEQ ID NO: 2649 - RNA, 1531 nt, synthetic construct
  misc_feature 1..1531: note = mRNA i-3 (A64-N5-C30-hSL-N5) (opt3) from Homo sapiens__NP_000448.3__HNF4A(39-474)(S87A_K106R_K108R_K126R_ K127R)
  source 1..1531: mol_type = other RNA
aggagaaagcttaccatggacacctctccttcagaggggacaaacttaaatgcgccaaacagtctgggagtgagcgctctatgcgccatctgtggtgatagggcaactggcaaacactacggggcctcctcttgcgacggatgtaagggctttttccggcgcgctgtacgtaaaaatcatatgtattcgtgccgattttcaagacaatgtgtggtcgatagggaccggcgcaaccagtgcagatactgtaggctcaagaaatgcttccgggcaggtatgcgccgagaagccgtgcagaatgagagagataggattagcacccggcgtagttcctatgaagactctagcctgccgtccataaacgcccttctgcaggccgaggttttgtcacgccaaatcacaagtcccgtgagcgggattaatggagatatcagagcgaagaagattgcatctatcgccgacgtctgtgagtccatgaaagaacagctcctggtgctggtagagtgggctaagtacatacctgccttttgcgaactcccattagatgaccaggttgcactgcttagggctcacgccggcgagcatttgctgctaggcgcgaccaaacggtcaatggtgttcaaggacgtcctcctgcttgggaacgattatatcgtgccccgacactgtcctgagctggccgaaatgagccgcgtgagtattagaatcttggacgagctcgtcctgccatttcaggaattacaaattgatgacaatgagtacgcatacctgaaagctatcatattctttgatcccgacgccaagggactctctgatcctggtaagattaaaaggcttcggtcccaggttcaggtgagcctggaagactatatcaacgatcgccagtacgactcgagaggcaggttcggggagttgctactgctcctgccaactcttcaatctattacatggcagatgatcgagcagatccaatttattaagctgttcggaatggctaaaatagataatttgctccaggaaatgctgttaggcggttccccgtcagacgctccccatgcacaccaccctctgcatccacacctaatgcaggagcatatggggaccaacgtaatcgtggccaatacgatgcccactcacctcagtaacggacagatgtgcgaatggcctcgtccacggggccaagctgcgacccccgagacaccgcagcctagcccacccggcgggtccggatctgaaccttataagctgcttcccggtgcagtcgccactattgtgaaaccattgagcgctatcccccagcctaccataacaaagcaggaggttatttgaggactagttataagactgactagcccgatgggcctcccaacgggccctcctcccctccttgcaccgagattaataaaaaaaaaaaaaaaaaaaaaaaaaaaaaaaaaaaaaaaaaaaaaaaaaaaaaaaaaaaaaaaatgcatcccccccccccccccccccccccccccccccaaaggctcttttcagagccaccagaatt

SEQ ID NO: 2650 - RNA, 1531 nt, synthetic construct
  misc_feature 1..1531: note = mRNA i-3 (A64-N5-C30-hSL-N5) (opt3) from Homo sapiens__NP_000448.3__HNF4A(39-474)(S87A_K106R_K108R_K126R_ K127R_S142A_S143A_S148A_T166A_S167A_S313A_S378A_T429A_T432A _S436A_K458R_S461A)
  source 1..1531: mol_type = other RNA
aggagaaagcttaccatggacacctctccttcagaggggacaaacttaaatgcgccaaacagtctgggagtgagcgctctatgcgccatctgtggtgatagggcaactggcaaacactacggggcctcctcttgcgacggatgtaagggctttttccggcgcgctgtacgtaaaaatcatatgtattcgtgccgattttcaagacaatgtgtggtcgatagggaccggcgcaaccagtgcagatactgtaggctcaagaaatgcttccgggcaggtatgcgccgagaagccgtgcagaatgagagagataggattagcacccggcgtgctgcctatgaagacagtgcgctgccgtccataaacgcacttctgcaggccgaggttttgtctcgccaaatcgctgcccccgtgagcgggattaatggagatatcagagcaaagaagattgcttccatcgccgacgtctgtgagtcaatgaaagaacagctcctggtgctggtagagtgggcgaagtacatacctgccttttgcgaactcccattagatgaccaggttgcactgcttagggctcacgccggcgagcatttgctgctaggcgctacaaaacggagtatggtgttcaaggacgtcctcctgcttgggaacgattatatcgtgccccgacactgtcctgagctggccgaaatgagccgcgtgtctattagaatcttggacgagctcgtcctgccatttcaggaattacaaattgatgacaatgagtacgcatacctgaaagccatcatattctttgatcccgacgctaagggactctccgatcctggtaagattaaaaggcttcgggcgcaggttcaggtgtcactggaagactatatcaacgatcgccagtacgacagcagaggcaggttcggggagttgctactgctcctgccaacccttcaaagtattacttggcagatgatcgagcagatccaatttattaagctgttcggaatggcaaaaatagataatttgctccaggaaatgctgttaggcggtgccccgtctgacgctccccatgcccaccaccctctgcatccacacctaatgcaggagcatatggggacaaacgtaatcgtggcaaataccatgcccacgcacctctccaacggacagatgtgcgaatggcctcgtccacggggccaagccgctgcccccgaggcaccgcagcctgcgcccccaggcgggagcggatcggaaccttataagctgcttcccggtgctgtcgccactattgtgcgaccattggcagccatcccccagcctaccataacaaaacaggaggttatttgaggactagttataagactgactagcccgatgggcctcccaacgggccctcctcccctccttgcaccgagattaataaaaaaaaaaaaaaaaaaaaaaaaaaaaaaaaaaaaaaaaaaaaaaaaaaaaaaaaaaaaaaaatgcatcccccccccccccccccccccccccccccccaaaggctcttttcagagccaccagaatt

SEQ ID NO: 2651 - RNA, 1531 nt, synthetic construct
  misc_feature 1..1531: note = mRNA i-3 (A64-N5-C30-hSL-N5) (opt3) from Homo sapiens__NP_000448.3__HNF4A(39-474)(S87A_K106R_K108R_K126R_ K127R_S142A_S143A_S148A_T166A_S167A_S313A_S378A_T429A_T432A _S436A_K458R_S461E)
  source 1..1531: mol_type = other RNA
aggagaaagcttaccatggacacctctccttcagaggggacaaacttaaatgcgccaaacagtctgggagtgagcgctctatgcgccatctgtggtgatagggcaactggcaaacactacggggcctcctcttgcgacggatgtaagggctttttccggcgcgctgtacgtaaaaatcatatgtattcgtgccgattttcaagacaatgtgtggtcgatagggaccggcgcaaccagtgcagatactgtaggctcaagaaatgcttccgggcaggtatgcgccgagaagccgtgcagaatgagagagataggattagcacccggcgtgctgcctatgaagacagtgcgctgccgtccataaacgcacttctgcaggccgaggttttgtctcgccaaatcgctgcccccgtgagcgggattaatggagatatcagagcaaagaagattgcttccatcgccgacgtctgtgagtcaatgaaagaacagctcctggtgctggtagagtgggcgaagtacatacctgccttttgcgaactcccattagatgaccaggttgcactgcttagggctcacgccggcgagcatttgctgctaggcgctacaaaacggagtatggtgttcaaggacgtcctcctgcttgggaacgattatatcgtgccccgacactgtcctgagctggccgaaatgagccgcgtgtctattagaatcttggacgagctcgtcctgccatttcaggaattacaaattgatgacaatgagtacgcatacctgaaagccatcatattctttgatcccgacgctaagggactctccgatcctggtaagattaaaaggcttcgggcgcaggttcaggtgtcactggaagactatatcaacgatcgccagtacgacagcagaggcaggttcggggagttgctactgctcctgccaacccttcaaagtattacttggcagatgatcgagcagatccaatttattaagctgttcggaatggcaaaaatagataatttgctccaggaaatgctgttaggcggtgccccgtctgacgctccccatgcccaccaccctctgcatccacacctaatgcaggagcatatggggacaaacgtaatcgtggcaaataccatgcccacgcacctctccaacggacagatgtgcgaatggcctcgtccacggggccaagccgctgcccccgaggcaccgcagcctgcgcccccaggcgggagcggatcggaaccttataagctgcttcccggtgctgtcgccactattgtgcgaccattggaggcaatcccccagcctaccataacaaaacaggaggttatttgaggactagttataagactgactagcccgatgggcctcccaacgggccctcctcccctccttgcaccgagattaataaaaaaaaaaaaaaaaaaaaaaaaaaaaaaaaaaaaaaaaaaaaaaaaaaaaaaaaaaaaaaaatgcatcccccccccccccccccccccccccccccccaaaggctcttttcagagccaccagaatt

SEQ ID NO: 2652 - RNA, 1531 nt, synthetic construct
  misc_feature 1..1531: note = mRNA i-3 (A64-N5-C30-hSL-N5) (opt3) from Homo sapiens__NP_000448.3__HNF4A(39-474)(S87A_K106R_K108R_K126R_ K127R_S142A_S143A_S148E_T166A_S167E_S313A_S378E_T429E_T432E _S436E_K458R_S461E)
  source 1..1531: mol_type = other RNA
aggagaaagcttaccatggacacctctccttcagaggggacaaacttaaatgcgccaaacagtctgggagtgagcgctctatgcgccatctgtggtgatagggcaactggcaaacactacggggcctcctcttgcgacggatgtaagggctttttccggcgcgctgtacgtaaaaatcatatgtattcgtgccgattttcaagacaatgtgtggtcgatagggaccggcgcaaccagtgcagatactgtaggctcaagaaatgcttccgggcaggtatgcgccgagaagccgtgcagaatgagagagataggattagcacccggcgtgctgcctatgaagacagtgagctgccgtccataaacgcgcttctgcaggcagaggttttgtctcgccaaatcgccgaacccgtgagcgggattaatggagatatcagagctaagaagattgcctccatcgcagacgtctgtgagtcaatgaaagaacagctcctggtgctggtagagtgggctaagtacatacctgccttttgcgagctcccattagatgaccaggttgcgctgcttagggcccacgcaggcgaacatttgctgctaggcgctacaaaacggagtatggtgttcaaggacgtcctcctgcttgggaacgattatatcgtgccccgacactgtcctgagctggccgaaatgagccgcgtgtctattagaatcttggacgagctcgtcctgccatttcaggaattacaaattgatgacaatgagtacgcttacctgaaagccatcatattctttgatcccgacgcaaagggactctccgatcctggtaagattaaaaggcttcgggcccaggttcaggtgtcactggaggactatatcaacgatcgccagtacgacagcagaggcaggttcggggaattgctactgctcctgccaacccttcaaagtattacttggcagatgatcgagcagatccaatttattaagctgttcggaatggctaaaatagataatttgctccaggaaatgctgttaggcggtgagccgtctgacgcgccccatgcacaccaccctctgcatccacacctaatgcaggaacatatggggacaaacgtaatcgtggccaataccatgcccacgcacctctccaacggacagatgtgcgagtggcctcgtccacggggccaagctgccgagcccgaggaaccgcagcctgaacccccaggcgggagcggatcggagccttataagctgcttcccggtgcagtcgccactattgtgcgaccattggaagctatcccccagcctaccataacaaaacaggaggttatttgaggactagttataagactgactagcccgatgggcctcccaacgggccctcctcccctccttgcaccgagattaataaaaaaaaaaaaaaaaaaaaaaaaaaaaaaaaaaaaaaaaaaaaaaaaaaaaaaaaaaaaaaaatgcatcccccccccccccccccccccccccccccccaaaggctcttttcagagccaccagaatt

SEQ ID NO: 2653 - RNA, 1531 nt, synthetic construct
  misc_feature 1..1531: note = mRNA i-3 (A64-N5-C30-hSL-N5) (opt3) from Homo sapiens__NP_000448.3__HNF4A(39-474)(S87A_K106R_K108R_K126R_ K127R_S142A_S143A_S148A_T166A_S167A_K179R_K180R_S313A_S378A _T429A_T432A_S436A_K458R_S461E)
  source 1..1531: mol_type = other RNA
aggagaaagcttaccatggacacctctccttcagaggggacaaacttaaatgcgccaaacagtctgggagtgagcgctctatgcgccatctgtggtgatagggcaactggcaaacactacggggcctcctcttgcgacggatgtaagggctttttccggcgcgctgtacgtaaaaatcatatgtattcgtgccgattttcaagacaatgtgtggtcgatagggaccggcgcaaccagtgcagatactgtaggctcaagaaatgcttccgggcaggtatgcgccgagaagccgtgcagaatgagagagataggattagcacccggcgtgctgcctatgaagacagtgcgctgccgtccataaacgcacttctgcaggccgaggttttgtctcgccaaatcgctgcccccgtgagcgggattaatggagatatcagagcaaggcggattgcttccatcgccgacgtctgtgagtcaatgaaggaacagctcctggtgctggtagagtgggcgaagtacatacctgccttttgcgaactcccattagatgaccaggttgcactgcttcgagctcacgccggcgagcatttgctgctaggcgctacaaaacgcagtatggtgttcaaggacgtcctcctgcttgggaacgattatatcgtgcccagacactgtcctgagctggccgaaatgagcagggtgtctattcggatcttggacgagctcgtcctgccatttcaggaattacaaattgatgacaatgagtacgcatacctgaaagccatcatattctttgatcccgacgctaagggactctccgatcctggtaaaattaagcgccttagagcgcaggttcaggtgtcactggaagactatatcaacgataggcagtacgacagccgtggccggttcggggagttgctactgctcctgccaacccttcaaagtattacttggcagatgatcgagcagatccaatttattaagctgttcggaatggcaaaaatagataatttgctccaggaaatgctgttaggcggtgccccgtctgacgctccccatgcccaccaccctctgcatccacacctaatgcaggagcatatggggacaaacgtaatcgtggcaaataccatgcccacgcacctctccaacggacagatgtgcgaatggcctcgaccaagaggccaagccgctgcccccgaggcaccgcagcctgcgcccccaggcgggagcggatcggaaccttataagctgcttcccggtgctgtcgccactattgtgaggccattggaggcaatcccccagcctaccataacaaaacaggaggttatttgaggactagttataagactgactagcccgatgggcctcccaacgggccctcctcccctccttgcaccgagattaataaaaaaaaaaaaaaaaaaaaaaaaaaaaaaaaaaaaaaaaaaaaaaaaaaaaaaaaaaaaaaaatgcatcccccccccccccccccccccccccccccccaaaggctcttttcagagccaccagaatt

SEQ ID NO: 2654 - RNA, 1531 nt, synthetic construct
  misc_feature 1..1531: note = mRNA i-3 (A64-N5-C30-hSL-N5) (opt3) from Homo sapiens__NP_000448.3__HNF4A(39-474)(S87A_K106R_K108R_K126R_ K127R_S142A_S143A_S148A_T166A_S167A_K300R_K307R_K309R_S313A _S378A_T429A_T432A_S436A_K458R_S461E)
  source 1..1531: mol_type = other RNA
aggagaaagcttaccatggacacctctccttcagaggggacaaacttaaatgcgccaaacagtctgggagtgagcgctctatgcgccatctgtggtgatagggcaactggcaaacactacggggcctcctcttgcgacggatgtaagggctttttccggcgcgctgtacgtaaaaatcatatgtattcgtgccgattttcaagacaatgtgtggtcgatagggaccggcgcaaccagtgcagatactgtaggctcaagaaatgcttccgggcaggtatgcgccgagaagccgtgcagaatgagagagataggattagcacccggcgtgctgcctatgaagacagtgcgctgccgtccataaacgcacttctgcaggccgaggttttgtctcgccaaatcgctgcccccgtgagcgggattaatggagatatcagagcaaagaagattgcttccatcgccgacgtctgtgagtcaatgaaagaacagctcctggtgctggtagagtgggcgaagtacatacctgccttttgcgaactcccattagatgaccaggttgcactgcttagggctcacgccggcgagcatttgctgctaggcgctacaaaacggagtatggtgttcaaggacgtcctcctgcttgggaacgattatatcgtgccccgacactgtcctgagctggccgaaatgagccgcgtgtctattagaatcttggacgagctcgtcctgccatttcaggaattacaaattgatgacaatgagtacgcatacctgaaagccatcatattctttgatcccgacgctaggggactctccgatcctggtcggattcgcagacttagggcgcaggttcaggtgtcactggaagactatatcaacgatcgtcagtacgacagccggggccgattcggggagttgctactgctcctgccaacccttcaaagtattacttggcagatgatcgagcagatccaatttattaagctgttcggaatggcaaagatagataatttgctccaggaaatgctgttaggcggtgccccgtctgacgctccccatgcccaccaccctctgcatccacacctaatgcaggagcatatggggacaaacgtaatcgtggcaaataccatgcccacgcacctctccaacggacagatgtgcgaatggcctagaccaaggggccaagccgctgcccccgaggcaccgcagcctgcgcccccaggcgggagcggatcggaaccttataaactgcttcccggtgctgtcgccactattgtgcgcccattggaggcaatcccccagcctaccataacaaagcaggaggttatttgaggactagttataagactgactagcccgatgggcctcccaacgggccctcctcccctccttgcaccgagattaataaaaaaaaaaaaaaaaaaaaaaaaaaaaaaaaaaaaaaaaaaaaaaaaaaaaaaaaaaaaaaaatgcatcccccccccccccccccccccccccccccccaaaggctcttttcagagccaccagaatt

SEQ ID NO: 2655 - RNA, 1531 nt, synthetic construct
  misc_feature 1..1531: note = mRNA i-3 (A64-N5-C30-hSL-N5) (opt3) from Homo sapiens__NP_000448.3__HNF4A(39-474)(S87A_K106R_K108R_K126R_ K127R_S142A_S143A_S148A_T166A_S167A_S313A_S378A_T429A_T432A _S436A_K447R_K458R_S461E_K470R)
  source 1..1531: mol_type = other RNA
aggagaaagcttaccatggacacctctccttcagaggggacaaacttaaatgcgccaaacagtctgggagtgagcgctctatgcgccatctgtggtgatagggcaactggcaaacactacggggcctcctcttgcgacggatgtaagggctttttccggcgcgctgtacgtaaaaatcatatgtattcgtgccgattttcaagacaatgtgtggtcgatagggaccggcgcaaccagtgcagatactgtaggctcaagaaatgcttccgggcaggtatgcgccgagaagccgtgcagaatgagagagataggattagcacccggcgtgctgcctatgaagacagtgcgctgccgtccataaacgcacttctgcaggccgaggttttgtctcgccaaatcgctgcccccgtgagcgggattaatggagatatcagagcaaagaagattgcttccatcgccgacgtctgtgagtcaatgaaagaacagctcctggtgctggtagagtgggcgaagtacatacctgccttttgcgaactcccattagatgaccaggttgcactgcttagggctcacgccggcgagcatttgctgctaggcgctacaaaacggagtatggtgttcaaggacgtcctcctgcttgggaacgattatatcgtgccccgacactgtcctgagctggccgaaatgagccgcgtgtctattagaatcttggacgagctcgtcctgccatttcaggaattacaaattgatgacaatgagtacgcatacctgaaagccatcatattctttgatcccgacgctaagggactctccgatcctggtaagattaaaaggcttcgggcgcaggttcaggtgtcactggaagactatatcaacgatcgccagtacgacagcagaggcaggttcggggagttgctactgctcctgccaacccttcaaagtattacttggcagatgatcgagcagatccaatttattaagctgttcggaatggcaaaaatagataatttgctccaggaaatgctgttaggcggtgccccgtctgacgctccccatgcccaccaccctctgcatccacacctaatgcaggagcatatggggacaaacgtaatcgtggcaaataccatgcccacgcacctctccaacggacagatgtgcgaatggcctcgtccacggggccaagccgctgcccccgaggcaccgcagcctgcgcccccaggcgggagcggatcggaaccttatcgactgcttcccggtgctgtcgccactattgtgagaccattggaggcaatcccccagcctaccataacaaggcaggaggttatttgaggactagttataagactgactagcccgatgggcctcccaacgggccctcctcccctccttgcaccgagattaataaaaaaaaaaaaaaaaaaaaaaaaaaaaaaaaaaaaaaaaaaaaaaaaaaaaaaaaaaaaaaaatgcatcccccccccccccccccccccccccccccccaaaggctcttttcagagccaccagaatt

SEQ ID NO: 2656 - RNA, 1531 nt, synthetic construct
  misc_feature 1..1531: note = mRNA i-3 (A64-N5-C30-hSL-N5) (opt3) from Homo sapiens__NP_000448.3__HNF4A(39-474)(S87A_K106R_K108R_K126R_ K127R_S142A_S143A_S148A_T166A_S167A_K179R_K180R_K234R_K300R _K307R_K309R_S313A_S378A_T429A_T432A_S436A_K447R_K458R_S461 E_K470R)
  source 1..1531: mol_type = other RNA
aggagaaagcttaccatggacacctctccttcagaggggacaaacttaaatgcgccaaacagtctgggagtgagcgctctatgcgccatctgtggtgatagggcaactggcaaacactacggggcctcctcttgcgacggatgtaagggctttttccggcgcgctgtacgtaaaaatcatatgtattcgtgccgattttcaagacaatgtgtggtcgatagggaccggcgcaaccagtgcagatactgtaggctcaagaaatgcttccgggcaggtatgcgccgagaagccgtgcagaatgagagagataggattagcacccggcgtgctgcctatgaagacagtgcgctgccgtccataaacgcacttctgcaggccgaggttttgtctcgccaaatcgctgcccccgtgagcgggattaatggagatatcagagcaaggcggattgcttccatcgccgacgtctgtgagtcaatgaaggaacagctcctggtgctggtagagtgggcgaagtacatacctgccttttgcgaactcccattagatgaccaggttgcactgcttcgagctcacgccggcgagcatttgctgctaggcgctacacgcagaagtatggtgttcaaagacgtcctcctgcttgggaacgattatatcgtgcccaggcactgtcctgagctggccgaaatgagccgggtgtctattcgcatcttggacgagctcgtcctgccatttcaggaattacaaattgatgacaatgagtacgcatacctgaaggccatcatattctttgatcccgacgctagaggactctccgatcctggtaggattcgtcggcttcgagcgcaggttcaggtgtcactggaagactatatcaacgatagacagtacgacagcaggggccgcttcggggagttgctactgctcctgccaacccttcaaagtattacttggcagatgatcgagcagatccaatttattaaactgttcggaatggcaaagatagataatttgctccaggaaatgctgttaggcggtgccccgtctgacgctccccatgcccaccaccctctgcatccacacctaatgcaggagcatatggggacaaacgtaatcgtggcaaataccatgcccacgcacctctccaacggacagatgtgcgaatggcctcggccaagaggccaagccgctgcccccgaggcaccgcagcctgcgcccccaggcgggagcggatcggaaccttataggctgcttcccggtgctgtcgccactattgtgcgcccattggaggcaatcccccagcctaccataacacgacaggaggttatttgaggactagttataagactgactagcccgatgggcctcccaacgggccctcctcccctccttgcaccgagattaataaaaaaaaaaaaaaaaaaaaaaaaaaaaaaaaaaaaaaaaaaaaaaaaaaaaaaaaaaaaaaaatgcatcccccccccccccccccccccccccccccccaaaggctcttttcagagccaccagaatt

SEQ ID NO: 2657 - RNA, 1531 nt, synthetic construct
  misc_feature 1..1531: note = mRNA i-3 (A64-N5-C30-hSL-N5) (opt3) from Homo sapiens__NP_000448.3__HNF4A(39-474)(S87A_S95A_S99A_K106R_K1 08R_K126R_K127R_S142A_S143A_S148A_T166A_S167A_S313A_S378A_T 429A_T432A_S436A_K458R_S461E)
  source 1..1531: mol_type = other RNA
aggagaaagcttaccatggacacctctccttcagaggggacaaacttaaatgcgccaaacagtctgggagtgagcgctctatgcgccatctgtggtgatagggcaactggcaaacactacggggcctcctcttgcgacggatgtaagggctttttccggcgcgctgtacgtaaaaatcatatgtatgcatgccgatttgccagacaatgtgtggtcgatagggaccggcgcaaccagtgcagatactgtaggctcaagaaatgcttccgggctggtatgcgccgagaagccgtgcagaatgagagagataggatttcgacccggcgtgcggcatatgaagactcagccctgccgagcataaacgcccttctgcaggccgaggttttgagtcgccaaatcgcagctcccgtgtccgggattaatggagatatcagagccaagaagattgcgtctatcgccgacgtctgtgagagcatgaaagaacagctcctggtgctggtagagtgggcaaagtacatacctgctttttgcgaactcccattagatgaccaggttgccctgcttagggctcacgccggcgagcatttgctgctaggcgcaacaaaacggtccatggtgttcaaggacgtcctcctgcttgggaacgattatatcgtgccccgacactgtcctgagctggccgaaatgtcacgcgtgagtattagaatcttggacgagctcgtcctgccatttcaggaattacaaattgatgacaatgagtacgcttacctgaaagcgatcatattctttgatcccgacgcaaagggactcagcgatcctggtaagattaaaaggcttcgggcccaggttcaggtgtctctggaagactatatcaacgatcgccagtacgactccagaggcaggttcggggagttgctactgctcctgccaacccttcaatcaattacttggcagatgatcgagcagatccaatttattaagctgttcggaatggctaaaatagataatttgctccaggaaatgctgttaggcggtgccccgagcgacgcaccccatgcccaccaccctctgcatccacacctaatgcaggagcatatggggacaaacgtaatcgtggctaataccatgcccacgcacctcagtaacggacagatgtgcgaatggcctcgtccacggggccaagccgcagcgcccgaggctccgcagcctgctcccccaggcgggtctggatccgaaccttataagctgcttcccggtgcagtcgccactattgtgcgaccattggaggctatcccccagcctaccataacaaaacaggaggttatttgaggactagttataagactgactagcccgatgggcctcccaacgggccctcctcccctccttgcaccgagattaataaaaaaaaaaaaaaaaaaaaaaaaaaaaaaaaaaaaaaaaaaaaaaaaaaaaaaaaaaaaaaaatgcatcccccccccccccccccccccccccccccccaaaggctcttttcagagccaccagaatt

SEQ ID NO: 2658 - RNA, 1531 nt, synthetic construct
  misc_feature 1..1531: note = mRNA i-3 (A64-N5-C30-hSL-N5) (opt3) from Homo sapiens__NP_000448.3__HNF4A(39-474)(S87A_K106R_K108R_K126R_ K127R_S138A_T139A_S142A_S143A_S148A_T166A_S167A_S313A_S378A _T429A_T432A_S436A_K458R_S461E)
  source 1..1531: mol_type = other RNA
aggagaaagcttaccatggacacctctccttcagaggggacaaacttaaatgcgccaaacagtctgggagtgagcgctctatgcgccatctgtggtgatagggcaactggcaaacactacggggcctcctcttgcgacggatgtaagggctttttccggcgcgctgtacgtaaaaatcatatgtattcgtgccgattttcaagacaatgtgtggtcgatagggaccggcgcaaccagtgcagatactgtaggctcaagaaatgcttccgggcaggtatgcgccgagaagccgtgcagaatgagagagataggattgctgcccggcgtgcggcatatgaagacagcgccctgccgagtataaacgcccttctgcaggccgaggttttgtcccgccaaatcgcagctcccgtgtctgggattaatggagatatcagagccaagaagattgcgagcatcgccgacgtctgtgagtccatgaaagaacagctcctggtgctggtagagtgggcaaagtacatacctgctttttgcgaactcccattagatgaccaggttgccctgcttagggctcacgccggcgagcatttgctgctaggcgcaaccaaacggtcaatggtgttcaaggacgtcctcctgcttgggaacgattatatcgtgccccgacactgtcctgagctggccgaaatgagtcgcgtgagcattagaatcttggacgagctcgtcctgccatttcaggaattacaaattgatgacaatgagtacgcttacctgaaagcgatcatattctttgatcccgacgcaaagggactctctgatcctggtaagattaaaaggcttcgggcccaggttcaggtgtccctggaagactatatcaacgatcgccagtacgactcaagaggcaggttcggggagttgctactgctcctgccaacacttcaaagcattacctggcagatgatcgagcagatccaatttattaagctgttcggaatggctaaaatagataatttgctccaggaaatgctgttaggcggtgccccgagtgacgcaccccatgcccaccaccctctgcatccacacctaatgcaggagcatatggggactaacgtaatcgtggctaatacaatgcccacccacctctctaacggacagatgtgcgaatggcctcgtccacggggccaagccgcagcgcccgaggctccgcagcctgctcccccaggcgggtccggaagcgaaccttataagctgcttcccggtgcagtcgccacgattgtgcgaccattggaggctatcccccagcctactataaccaaacaggaggttatttgaggactagttataagactgactagcccgatgggcctcccaacgggccctcctcccctccttgcaccgagattaataaaaaaaaaaaaaaaaaaaaaaaaaaaaaaaaaaaaaaaaaaaaaaaaaaaaaaaaaaaaaaaatgcatcccccccccccccccccccccccccccccccaaaggctcttttcagagccaccagaatt

SEQ ID NO: 2659 - RNA, 1531 nt, synthetic construct
  misc_feature 1..1531: note = mRNA i-3 (A64-N5-C30-hSL-N5) (opt3) from Homo sapiens__NP_000448.3__HNF4A(39-474)(S87A_S95A_S99A_K106R_K1 08R_K126R_K127R_S138A_T139A_S142A_S143A_S148A_T166A_S167A_S 313A_S378A_T429A_T432A_S436A_K458R_S461E)
  source 1..1531: mol_type = other RNA
aggagaaagcttaccatggacacctctccttcagaggggacaaacttaaatgcgccaaacagtctgggagtgagcgctctatgcgccatctgtggtgatagggcaactggcaaacactacggggcctcctcttgcgacggatgtaagggctttttccggcgcgctgtacgtaaaaatcatatgtatgcatgccgatttgccagacaatgtgtggtcgatagggaccggcgcaaccagtgcagatactgtaggctcaagaaatgcttccgggctggtatgcgccgagaagccgtgcagaatgagagagataggattgcggcacggcgtgccgcttatgaagactcggccctgccgtcaataaacgcacttctgcaggctgaggttttgagccgccaaatcgccgcgcccgtgagtgggattaatggagatatcagagccaagaagattgcatccatcgctgacgtctgtgagtctatgaaagaacagctcctggtgctggtagagtgggccaagtacatacctgctttttgcgaactcccattagatgaccaggttgccctgcttagggcacacgccggcgagcatttgctgctaggcgctaccaaacggagcatggtgttcaaggacgtcctcctgcttgggaacgattatatcgtgccccgacactgtcctgagctggcggaaatgtcccgcgtgtcaattagaatcttggacgagctcgtcctgccatttcaggaattacaaattgatgacaatgagtacgcatacctgaaagccatcatattctttgatcccgacgctaagggactcagtgatcctggtaagattaaaaggcttcgggcccaggttcaggtgagcctggaagactatatcaacgatcgccagtacgactctagaggcaggttcggggagttgctactgctcctgccaacacttcaatccattacctggcagatgatcgagcagatccaatttattaagctgttcggaatggcaaaaatagataatttgctccaggaaatgctgttaggcggtgccccgtcagacgctccccatgcccaccaccctctgcatccacacctaatgcaggagcatatggggactaacgtaatcgtggcaaatacaatgcccacccacctcagcaacggacagatgtgcgaatggcctcgtccacggggccaagcggctgcccccgaggcaccgcagcctgctcccccaggcgggagtggatctgaaccttataagctgcttcccggtgccgtcgccacgattgtgcgaccattggaggcaatcccccagcctactataaccaaacaggaggttatttgaggactagttataagactgactagcccgatgggcctcccaacgggccctcctcccctccttgcaccgagattaataaaaaaaaaaaaaaaaaaaaaaaaaaaaaaaaaaaaaaaaaaaaaaaaaaaaaaaaaaaaaaaatgcatcccccccccccccccccccccccccccccccaaaggctcttttcagagccaccagaatt

SEQ ID NO: 2660 - RNA, 1531 nt, synthetic construct
  misc_feature 1..1531: note = mRNA i-3 (A64-N5-C30-hSL-N5) (opt4) from Homo sapiens__NP_000448.3__HNF4A(39-474)
  source 1..1531: mol_type = other RNA
aggagaaagcttaccatggacaccagccccagcgagggcaccaacctgaacgcccccaacagcctgggcgtgagcgccctgtgcgccatctgcggcgacagagccaccggcaagcactacggcgccagcagctgcgacggctgcaagggcttcttcagaagaagcgtgagaaagaaccacatgtacagctgcagattcagcagacagtgcgtggtggacaaggacaagagaaaccagtgcagatactgcagactgaagaagtgcttcagagccggcatgaagaaggaggccgtgcagaacgagagagacagaatcagcaccagaagaagcagctacgaggacagcagcctgcccagcatcaacgccctgctgcaggccgaggtgctgagcagacagatcaccagccccgtgagcggcatcaacggcgacatcagagccaagaagatcgccagcatcgccgacgtgtgcgagagcatgaaggagcagctgctggtgctggtggagtgggccaagtacatccccgccttctgcgagctgcccctggacgaccaggtggccctgctgagagcccacgccggcgagcacctgctgctgggcgccaccaagagaagcatggtgttcaaggacgtgctgctgctgggcaacgactacatcgtgcccagacactgccccgagctggccgagatgagcagagtgagcatcagaatcctggacgagctggtgctgcccttccaggagctgcagatcgacgacaacgagtacgcctacctgaaggccatcatcttcttcgaccccgacgccaagggcctgagcgaccccggcaagatcaagagactgagaagccaggtgcaggtgagcctggaggactacatcaacgacagacagtacgacagcagaggcagattcggcgagctgctgctgctgctgcccaccctgcagagcatcacctggcagatgatcgagcagatccagttcatcaagctgttcggcatggccaagatcgacaacctgctgcaggagatgctgctgggcggcagccccagcgacgccccccacgcccaccaccccctgcacccccacctgatgcaggagcacatgggcaccaacgtgatcgtggccaacaccatgcccacccacctgagcaacggccagatgtgcgagtggcccagacccagaggccaggccgccacccccgagaccccccagcccagcccccccggcggcagcggcagcgagccctacaagctgctgcccggcgccgtggccaccatcgtgaagcccctgagcgccatcccccagcccaccatcaccaagcaggaggtgatctgaggactagttataagactgactagcccgatgggcctcccaacgggccctcctcccctccttgcaccgagattaataaaaaaaaaaaaaaaaaaaaaaaaaaaaaaaaaaaaaaaaaaaaaaaaaaaaaaaaaaaaaaaatgcatcccccccccccccccccccccccccccccccaaaggctcttttcagagccaccagaatt

SEQ ID NO: 2661 - RNA, 1531 nt, synthetic construct
  misc_feature 1..1531: note = mRNA i-3 (A64-N5-C30-hSL-N5) (opt4) from Homo sapiens__NP_000448.3__HNF4A(39-474)(S313A)
  source 1..1531: mol_type = other RNA
aggagaaagcttaccatggacaccagccccagcgagggcaccaacctgaacgcccccaacagcctgggcgtgagcgccctgtgcgccatctgcggcgacagagccaccggcaagcactacggcgccagcagctgcgacggctgcaagggcttcttcagaagaagcgtgagaaagaaccacatgtacagctgcagattcagcagacagtgcgtggtggacaaggacaagagaaaccagtgcagatactgcagactgaagaagtgcttcagagccggcatgaagaaggaggccgtgcagaacgagagagacagaatcagcaccagaagaagcagctacgaggacagcagcctgcccagcatcaacgccctgctgcaggccgaggtgctgagcagacagatcaccagccccgtgagcggcatcaacggcgacatcagagccaagaagatcgccagcatcgccgacgtgtgcgagagcatgaaggagcagctgctggtgctggtggagtgggccaagtacatccccgccttctgcgagctgcccctggacgaccaggtggccctgctgagagcccacgccggcgagcacctgctgctgggcgccaccaagagaagcatggtgttcaaggacgtgctgctgctgggcaacgactacatcgtgcccagacactgccccgagctggccgagatgagcagagtgagcatcagaatcctggacgagctggtgctgcccttccaggagctgcagatcgacgacaacgagtacgcctacctgaaggccatcatcttcttcgaccccgacgccaagggcctgagcgaccccggcaagatcaagagactgagagcccaggtgcaggtgagcctggaggactacatcaacgacagacagtacgacagcagaggcagattcggcgagctgctgctgctgctgcccaccctgcagagcatcacctggcagatgatcgagcagatccagttcatcaagctgttcggcatggccaagatcgacaacctgctgcaggagatgctgctgggcggcagccccagcgacgccccccacgcccaccaccccctgcacccccacctgatgcaggagcacatgggcaccaacgtgatcgtggccaacaccatgcccacccacctgagcaacggccagatgtgcgagtggcccagacccagaggccaggccgccacccccgagaccccccagcccagcccccccggcggcagcggcagcgagccctacaagctgctgcccggcgccgtggccaccatcgtgaagcccctgagcgccatcccccagcccaccatcaccaagcaggaggtgatctgaggactagttataagactgactagcccgatgggcctcccaacgggccctcctcccctccttgcaccgagattaataaaaaaaaaaaaaaaaaaaaaaaaaaaaaaaaaaaaaaaaaaaaaaaaaaaaaaaaaaaaaaaatgcatcccccccccccccccccccccccccccccccaaaggctcttttcagagccaccagaatt

SEQ ID NO: 2662 - RNA, 1531 nt, synthetic construct
  misc_feature 1..1531: note = mRNA i-3 (A64-N5-C30-hSL-N5) (opt4) from Homo sapiens__NP_000448.3__HNF4A(39-474)(S313E)
  source 1..1531: mol_type = other RNA
aggagaaagcttaccatggacaccagccccagcgagggcaccaacctgaacgcccccaacagcctgggcgtgagcgccctgtgcgccatctgcggcgacagagccaccggcaagcactacggcgccagcagctgcgacggctgcaagggcttcttcagaagaagcgtgagaaagaaccacatgtacagctgcagattcagcagacagtgcgtggtggacaaggacaagagaaaccagtgcagatactgcagactgaagaagtgcttcagagccggcatgaagaaggaggccgtgcagaacgagagagacagaatcagcaccagaagaagcagctacgaggacagcagcctgcccagcatcaacgccctgctgcaggccgaggtgctgagcagacagatcaccagccccgtgagcggcatcaacggcgacatcagagccaagaagatcgccagcatcgccgacgtgtgcgagagcatgaaggagcagctgctggtgctggtggagtgggccaagtacatccccgccttctgcgagctgcccctggacgaccaggtggccctgctgagagcccacgccggcgagcacctgctgctgggcgccaccaagagaagcatggtgttcaaggacgtgctgctgctgggcaacgactacatcgtgcccagacactgccccgagctggccgagatgagcagagtgagcatcagaatcctggacgagctggtgctgcccttccaggagctgcagatcgacgacaacgagtacgcctacctgaaggccatcatcttcttcgaccccgacgccaagggcctgagcgaccccggcaagatcaagagactgagagagcaggtgcaggtgagcctggaggactacatcaacgacagacagtacgacagcagaggcagattcggcgagctgctgctgctgctgcccaccctgcagagcatcacctggcagatgatcgagcagatccagttcatcaagctgttcggcatggccaagatcgacaacctgctgcaggagatgctgctgggcggcagccccagcgacgccccccacgcccaccaccccctgcacccccacctgatgcaggagcacatgggcaccaacgtgatcgtggccaacaccatgcccacccacctgagcaacggccagatgtgcgagtggcccagacccagaggccaggccgccacccccgagaccccccagcccagcccccccggcggcagcggcagcgagccctacaagctgctgcccggcgccgtggccaccatcgtgaagcccctgagcgccatcccccagcccaccatcaccaagcaggaggtgatctgaggactagttataagactgactagcccgatgggcctcccaacgggccctcctcccctccttgcaccgagattaataaaaaaaaaaaaaaaaaaaaaaaaaaaaaaaaaaaaaaaaaaaaaaaaaaaaaaaaaaaaaaaatgcatcccccccccccccccccccccccccccccccaaaggctcttttcagagccaccagaatt

SEQ ID NO: 2663 - RNA, 1531 nt, synthetic construct
  misc_feature 1..1531: note = mRNA i-3 (A64-N5-C30-hSL-N5) (opt4) from Homo sapiens__NP_000448.3__HNF4A(39-474)(S142A_S143A)
  source 1..1531: mol_type = other RNA
aggagaaagcttaccatggacaccagccccagcgagggcaccaacctgaacgcccccaacagcctgggcgtgagcgccctgtgcgccatctgcggcgacagagccaccggcaagcactacggcgccagcagctgcgacggctgcaagggcttcttcagaagaagcgtgagaaagaaccacatgtacagctgcagattcagcagacagtgcgtggtggacaaggacaagagaaaccagtgcagatactgcagactgaagaagtgcttcagagccggcatgaagaaggaggccgtgcagaacgagagagacagaatcagcaccagaagagccgcctacgaggacagcagcctgcccagcatcaacgccctgctgcaggccgaggtgctgagcagacagatcaccagccccgtgagcggcatcaacggcgacatcagagccaagaagatcgccagcatcgccgacgtgtgcgagagcatgaaggagcagctgctggtgctggtggagtgggccaagtacatccccgccttctgcgagctgcccctggacgaccaggtggccctgctgagagcccacgccggcgagcacctgctgctgggcgccaccaagagaagcatggtgttcaaggacgtgctgctgctgggcaacgactacatcgtgcccagacactgccccgagctggccgagatgagcagagtgagcatcagaatcctggacgagctggtgctgcccttccaggagctgcagatcgacgacaacgagtacgcctacctgaaggccatcatcttcttcgaccccgacgccaagggcctgagcgaccccggcaagatcaagagactgagaagccaggtgcaggtgagcctggaggactacatcaacgacagacagtacgacagcagaggcagattcggcgagctgctgctgctgctgcccaccctgcagagcatcacctggcagatgatcgagcagatccagttcatcaagctgttcggcatggccaagatcgacaacctgctgcaggagatgctgctgggcggcagccccagcgacgccccccacgcccaccaccccctgcacccccacctgatgcaggagcacatgggcaccaacgtgatcgtggccaacaccatgcccacccacctgagcaacggccagatgtgcgagtggcccagacccagaggccaggccgccacccccgagaccccccagcccagcccccccggcggcagcggcagcgagccctacaagctgctgcccggcgccgtggccaccatcgtgaagcccctgagcgccatcccccagcccaccatcaccaagcaggaggtgatctgaggactagttataagactgactagcccgatgggcctcccaacgggccctcctcccctccttgcaccgagattaataaaaaaaaaaaaaaaaaaaaaaaaaaaaaaaaaaaaaaaaaaaaaaaaaaaaaaaaaaaaaaaatgcatcccccccccccccccccccccccccccccccaaaggctcttttcagagccaccagaatt

SEQ ID NO: 2664 - RNA, 1531 nt, synthetic construct
  misc_feature 1..1531: note = mRNA i-3 (A64-N5-C30-hSL-N5) (opt4) from Homo sapiens__NP_000448.3__HNF4A(39-474)(S142E_S143E)
  source 1..1531: mol_type = other RNA
aggagaaagcttaccatggacaccagccccagcgagggcaccaacctgaacgcccccaacagcctgggcgtgagcgccctgtgcgccatctgcggcgacagagccaccggcaagcactacggcgccagcagctgcgacggctgcaagggcttcttcagaagaagcgtgagaaagaaccacatgtacagctgcagattcagcagacagtgcgtggtggacaaggacaagagaaaccagtgcagatactgcagactgaagaagtgcttcagagccggcatgaagaaggaggccgtgcagaacgagagagacagaatcagcaccagaagagaggagtacgaggacagcagcctgcccagcatcaacgccctgctgcaggccgaggtgctgagcagacagatcaccagccccgtgagcggcatcaacggcgacatcagagccaagaagatcgccagcatcgccgacgtgtgcgagagcatgaaggagcagctgctggtgctggtggagtgggccaagtacatccccgccttctgcgagctgcccctggacgaccaggtggccctgctgagagcccacgccggcgagcacctgctgctgggcgccaccaagagaagcatggtgttcaaggacgtgctgctgctgggcaacgactacatcgtgcccagacactgccccgagctggccgagatgagcagagtgagcatcagaatcctggacgagctggtgctgcccttccaggagctgcagatcgacgacaacgagtacgcctacctgaaggccatcatcttcttcgaccccgacgccaagggcctgagcgaccccggcaagatcaagagactgagaagccaggtgcaggtgagcctggaggactacatcaacgacagacagtacgacagcagaggcagattcggcgagctgctgctgctgctgcccaccctgcagagcatcacctggcagatgatcgagcagatccagttcatcaagctgttcggcatggccaagatcgacaacctgctgcaggagatgctgctgggcggcagccccagcgacgccccccacgcccaccaccccctgcacccccacctgatgcaggagcacatgggcaccaacgtgatcgtggccaacaccatgcccacccacctgagcaacggccagatgtgcgagtggcccagacccagaggccaggccgccacccccgagaccccccagcccagcccccccggcggcagcggcagcgagccctacaagctgctgcccggcgccgtggccaccatcgtgaagcccctgagcgccatcccccagcccaccatcaccaagcaggaggtgatctgaggactagttataagactgactagcccgatgggcctcccaacgggccctcctcccctccttgcaccgagattaataaaaaaaaaaaaaaaaaaaaaaaaaaaaaaaaaaaaaaaaaaaaaaaaaaaaaaaaaaaaaaaatgcatcccccccccccccccccccccccccccccccaaaggctcttttcagagccaccagaatt

SEQ ID NO: 2665 - RNA, 1531 nt, synthetic construct
  misc_feature 1..1531: note = mRNA i-3 (A64-N5-C30-hSL-N5) (opt4) from Homo sapiens__NP_000448.3__HNF4A(39-474)(S143A)
  source 1..1531: mol_type = other RNA
aggagaaagcttaccatggacaccagccccagcgagggcaccaacctgaacgcccccaacagcctgggcgtgagcgccctgtgcgccatctgcggcgacagagccaccggcaagcactacggcgccagcagctgcgacggctgcaagggcttcttcagaagaagcgtgagaaagaaccacatgtacagctgcagattcagcagacagtgcgtggtggacaaggacaagagaaaccagtgcagatactgcagactgaagaagtgcttcagagccggcatgaagaaggaggccgtgcagaacgagagagacagaatcagcaccagaagaagcgcctacgaggacagcagcctgcccagcatcaacgccctgctgcaggccgaggtgctgagcagacagatcaccagccccgtgagcggcatcaacggcgacatcagagccaagaagatcgccagcatcgccgacgtgtgcgagagcatgaaggagcagctgctggtgctggtggagtgggccaagtacatccccgccttctgcgagctgcccctggacgaccaggtggccctgctgagagcccacgccggcgagcacctgctgctgggcgccaccaagagaagcatggtgttcaaggacgtgctgctgctgggcaacgactacatcgtgcccagacactgccccgagctggccgagatgagcagagtgagcatcagaatcctggacgagctggtgctgcccttccaggagctgcagatcgacgacaacgagtacgcctacctgaaggccatcatcttcttcgaccccgacgccaagggcctgagcgaccccggcaagatcaagagactgagaagccaggtgcaggtgagcctggaggactacatcaacgacagacagtacgacagcagaggcagattcggcgagctgctgctgctgctgcccaccctgcagagcatcacctggcagatgatcgagcagatccagttcatcaagctgttcggcatggccaagatcgacaacctgctgcaggagatgctgctgggcggcagccccagcgacgccccccacgcccaccaccccctgcacccccacctgatgcaggagcacatgggcaccaacgtgatcgtggccaacaccatgcccacccacctgagcaacggccagatgtgcgagtggcccagacccagaggccaggccgccacccccgagaccccccagcccagcccccccggcggcagcggcagcgagccctacaagctgctgcccggcgccgtggccaccatcgtgaagcccctgagcgccatcccccagcccaccatcaccaagcaggaggtgatctgaggactagttataagactgactagcccgatgggcctcccaacgggccctcctcccctccttgcaccgagattaataaaaaaaaaaaaaaaaaaaaaaaaaaaaaaaaaaaaaaaaaaaaaaaaaaaaaaaaaaaaaaaatgcatcccccccccccccccccccccccccccccccaaaggctcttttcagagccaccagaatt

SEQ ID NO: 2666 - RNA, 1531 nt, synthetic construct
  misc_feature 1..1531: note = mRNA i-3 (A64-N5-C30-hSL-N5) (opt4) from Homo sapiens__NP_000448.3__HNF4A(39-474)(T166A)
  source 1..1531: mol_type = other RNA
aggagaaagcttaccatggacaccagccccagcgagggcaccaacctgaacgcccccaacagcctgggcgtgagcgccctgtgcgccatctgcggcgacagagccaccggcaagcactacggcgccagcagctgcgacggctgcaagggcttcttcagaagaagcgtgagaaagaaccacatgtacagctgcagattcagcagacagtgcgtggtggacaaggacaagagaaaccagtgcagatactgcagactgaagaagtgcttcagagccggcatgaagaaggaggccgtgcagaacgagagagacagaatcagcaccagaagaagcagctacgaggacagcagcctgcccagcatcaacgccctgctgcaggccgaggtgctgagcagacagatcgccagccccgtgagcggcatcaacggcgacatcagagccaagaagatcgccagcatcgccgacgtgtgcgagagcatgaaggagcagctgctggtgctggtggagtgggccaagtacatccccgccttctgcgagctgcccctggacgaccaggtggccctgctgagagcccacgccggcgagcacctgctgctgggcgccaccaagagaagcatggtgttcaaggacgtgctgctgctgggcaacgactacatcgtgcccagacactgccccgagctggccgagatgagcagagtgagcatcagaatcctggacgagctggtgctgcccttccaggagctgcagatcgacgacaacgagtacgcctacctgaaggccatcatcttcttcgaccccgacgccaagggcctgagcgaccccggcaagatcaagagactgagaagccaggtgcaggtgagcctggaggactacatcaacgacagacagtacgacagcagaggcagattcggcgagctgctgctgctgctgcccaccctgcagagcatcacctggcagatgatcgagcagatccagttcatcaagctgttcggcatggccaagatcgacaacctgctgcaggagatgctgctgggcggcagccccagcgacgccccccacgcccaccaccccctgcacccccacctgatgcaggagcacatgggcaccaacgtgatcgtggccaacaccatgcccacccacctgagcaacggccagatgtgcgagtggcccagacccagaggccaggccgccacccccgagaccccccagcccagcccccccggcggcagcggcagcgagccctacaagctgctgcccggcgccgtggccaccatcgtgaagcccctgagcgccatcccccagcccaccatcaccaagcaggaggtgatctgaggactagttataagactgactagcccgatgggcctcccaacgggccctcctcccctccttgcaccgagattaataaaaaaaaaaaaaaaaaaaaaaaaaaaaaaaaaaaaaaaaaaaaaaaaaaaaaaaaaaaaaaaatgcatcccccccccccccccccccccccccccccccaaaggctcttttcagagccaccagaatt

SEQ ID NO: 2667 - RNA, 1531 nt, synthetic construct
  misc_feature 1..1531: note = mRNA i-3 (A64-N5-C30-hSL-N5) (opt4) from Homo sapiens__NP_000448.3__HNF4A(39-474)(S167E)
  source 1..1531: mol_type = other RNA
aggagaaagcttaccatggacaccagccccagcgagggcaccaacctgaacgcccccaacagcctgggcgtgagcgccctgtgcgccatctgcggcgacagagccaccggcaagcactacggcgccagcagctgcgacggctgcaagggcttcttcagaagaagcgtgagaaagaaccacatgtacagctgcagattcagcagacagtgcgtggtggacaaggacaagagaaaccagtgcagatactgcagactgaagaagtgcttcagagccggcatgaagaaggaggccgtgcagaacgagagagacagaatcagcaccagaagaagcagctacgaggacagcagcctgcccagcatcaacgccctgctgcaggccgaggtgctgagcagacagatcaccgagcccgtgagcggcatcaacggcgacatcagagccaagaagatcgccagcatcgccgacgtgtgcgagagcatgaaggagcagctgctggtgctggtggagtgggccaagtacatccccgccttctgcgagctgcccctggacgaccaggtggccctgctgagagcccacgccggcgagcacctgctgctgggcgccaccaagagaagcatggtgttcaaggacgtgctgctgctgggcaacgactacatcgtgcccagacactgccccgagctggccgagatgagcagagtgagcatcagaatcctggacgagctggtgctgcccttccaggagctgcagatcgacgacaacgagtacgcctacctgaaggccatcatcttcttcgaccccgacgccaagggcctgagcgaccccggcaagatcaagagactgagaagccaggtgcaggtgagcctggaggactacatcaacgacagacagtacgacagcagaggcagattcggcgagctgctgctgctgctgcccaccctgcagagcatcacctggcagatgatcgagcagatccagttcatcaagctgttcggcatggccaagatcgacaacctgctgcaggagatgctgctgggcggcagccccagcgacgccccccacgcccaccaccccctgcacccccacctgatgcaggagcacatgggcaccaacgtgatcgtggccaacaccatgcccacccacctgagcaacggccagatgtgcgagtggcccagacccagaggccaggccgccacccccgagaccccccagcccagcccccccggcggcagcggcagcgagccctacaagctgctgcccggcgccgtggccaccatcgtgaagcccctgagcgccatcccccagcccaccatcaccaagcaggaggtgatctgaggactagttataagactgactagcccgatgggcctcccaacgggccctcctcccctccttgcaccgagattaataaaaaaaaaaaaaaaaaaaaaaaaaaaaaaaaaaaaaaaaaaaaaaaaaaaaaaaaaaaaaaaatgcatcccccccccccccccccccccccccccccccaaaggctcttttcagagccaccagaatt

SEQ ID NO: 2668 - RNA, 1531 nt, synthetic construct
  misc_feature 1..1531: note = mRNA i-3 (A64-N5-C30-hSL-N5) (opt4) from Homo sapiens__NP_000448.3__HNF4A(39-474)(S167A)
  source 1..1531: mol_type = other RNA
aggagaaagcttaccatggacaccagccccagcgagggcaccaacctgaacgcccccaacagcctgggcgtgagcgccctgtgcgccatctgcggcgacagagccaccggcaagcactacggcgccagcagctgcgacggctgcaagggcttcttcagaagaagcgtgagaaagaaccacatgtacagctgcagattcagcagacagtgcgtggtggacaaggacaagagaaaccagtgcagatactgcagactgaagaagtgcttcagagccggcatgaagaaggaggccgtgcagaacgagagagacagaatcagcaccagaagaagcagctacgaggacagcagcctgcccagcatcaacgccctgctgcaggccgaggtgctgagcagacagatcaccgcccccgtgagcggcatcaacggcgacatcagagccaagaagatcgccagcatcgccgacgtgtgcgagagcatgaaggagcagctgctggtgctggtggagtgggccaagtacatccccgccttctgcgagctgcccctggacgaccaggtggccctgctgagagcccacgccggcgagcacctgctgctgggcgccaccaagagaagcatggtgttcaaggacgtgctgctgctgggcaacgactacatcgtgcccagacactgccccgagctggccgagatgagcagagtgagcatcagaatcctggacgagctggtgctgcccttccaggagctgcagatcgacgacaacgagtacgcctacctgaaggccatcatcttcttcgaccccgacgccaagggcctgagcgaccccggcaagatcaagagactgagaagccaggtgcaggtgagcctggaggactacatcaacgacagacagtacgacagcagaggcagattcggcgagctgctgctgctgctgcccaccctgcagagcatcacctggcagatgatcgagcagatccagttcatcaagctgttcggcatggccaagatcgacaacctgctgcaggagatgctgctgggcggcagccccagcgacgccccccacgcccaccaccccctgcacccccacctgatgcaggagcacatgggcaccaacgtgatcgtggccaacaccatgcccacccacctgagcaacggccagatgtgcgagtggcccagacccagaggccaggccgccacccccgagaccccccagcccagcccccccggcggcagcggcagcgagccctacaagctgctgcccggcgccgtggccaccatcgtgaagcccctgagcgccatcccccagcccaccatcaccaagcaggaggtgatctgaggactagttataagactgactagcccgatgggcctcccaacgggccctcctcccctccttgcaccgagattaataaaaaaaaaaaaaaaaaaaaaaaaaaaaaaaaaaaaaaaaaaaaaaaaaaaaaaaaaaaaaaaatgcatcccccccccccccccccccccccccccccccaaaggctcttttcagagccaccagaatt

SEQ ID NO: 2669 - RNA, 1531 nt, synthetic construct
  misc_feature 1..1531: note = mRNA i-3 (A64-N5-C30-hSL-N5) (opt4) from Homo sapiens__NP_000448.3__HNF4A(39-474)(S167A_S378A_T429A_T432A _S436A)
  source 1..1531: mol_type = other RNA
aggagaaagcttaccatggacaccagccccagcgagggcaccaacctgaacgcccccaacagcctgggcgtgagcgccctgtgcgccatctgcggcgacagagccaccggcaagcactacggcgccagcagctgcgacggctgcaagggcttcttcagaagaagcgtgagaaagaaccacatgtacagctgcagattcagcagacagtgcgtggtggacaaggacaagagaaaccagtgcagatactgcagactgaagaagtgcttcagagccggcatgaagaaggaggccgtgcagaacgagagagacagaatcagcaccagaagaagcagctacgaggacagcagcctgcccagcatcaacgccctgctgcaggccgaggtgctgagcagacagatcaccgcccccgtgagcggcatcaacggcgacatcagagccaagaagatcgccagcatcgccgacgtgtgcgagagcatgaaggagcagctgctggtgctggtggagtgggccaagtacatccccgccttctgcgagctgcccctggacgaccaggtggccctgctgagagcccacgccggcgagcacctgctgctgggcgccaccaagagaagcatggtgttcaaggacgtgctgctgctgggcaacgactacatcgtgcccagacactgccccgagctggccgagatgagcagagtgagcatcagaatcctggacgagctggtgctgcccttccaggagctgcagatcgacgacaacgagtacgcctacctgaaggccatcatcttcttcgaccccgacgccaagggcctgagcgaccccggcaagatcaagagactgagaagccaggtgcaggtgagcctggaggactacatcaacgacagacagtacgacagcagaggcagattcggcgagctgctgctgctgctgcccaccctgcagagcatcacctggcagatgatcgagcagatccagttcatcaagctgttcggcatggccaagatcgacaacctgctgcaggagatgctgctgggcggcgcccccagcgacgccccccacgcccaccaccccctgcacccccacctgatgcaggagcacatgggcaccaacgtgatcgtggccaacaccatgcccacccacctgagcaacggccagatgtgcgagtggcccagacccagaggccaggccgccgcccccgaggccccccagcccgccccccccggcggcagcggcagcgagccctacaagctgctgcccggcgccgtggccaccatcgtgaagcccctgagcgccatcccccagcccaccatcaccaagcaggaggtgatctgaggactagttataagactgactagcccgatgggcctcccaacgggccctcctcccctccttgcaccgagattaataaaaaaaaaaaaaaaaaaaaaaaaaaaaaaaaaaaaaaaaaaaaaaaaaaaaaaaaaaaaaaaatgcatcccccccccccccccccccccccccccccccaaaggctcttttcagagccaccagaatt

SEQ ID NO: 2670 - RNA, 1531 nt, synthetic construct
  misc_feature 1..1531: note = mRNA i-3 (A64-N5-C30-hSL-N5) (opt4) from Homo sapiens__NP_000448.3__HNF4A(39-474)(S167E_S378E_T429E_T432E _S436E)
  source 1..1531: mol_type = other RNA
aggagaaagcttaccatggacaccagccccagcgagggcaccaacctgaacgcccccaacagcctgggcgtgagcgccctgtgcgccatctgcggcgacagagccaccggcaagcactacggcgccagcagctgcgacggctgcaagggcttcttcagaagaagcgtgagaaagaaccacatgtacagctgcagattcagcagacagtgcgtggtggacaaggacaagagaaaccagtgcagatactgcagactgaagaagtgcttcagagccggcatgaagaaggaggccgtgcagaacgagagagacagaatcagcaccagaagaagcagctacgaggacagcagcctgcccagcatcaacgccctgctgcaggccgaggtgctgagcagacagatcaccgagcccgtgagcggcatcaacggcgacatcagagccaagaagatcgccagcatcgccgacgtgtgcgagagcatgaaggagcagctgctggtgctggtggagtgggccaagtacatccccgccttctgcgagctgcccctggacgaccaggtggccctgctgagagcccacgccggcgagcacctgctgctgggcgccaccaagagaagcatggtgttcaaggacgtgctgctgctgggcaacgactacatcgtgcccagacactgccccgagctggccgagatgagcagagtgagcatcagaatcctggacgagctggtgctgcccttccaggagctgcagatcgacgacaacgagtacgcctacctgaaggccatcatcttcttcgaccccgacgccaagggcctgagcgaccccggcaagatcaagagactgagaagccaggtgcaggtgagcctggaggactacatcaacgacagacagtacgacagcagaggcagattcggcgagctgctgctgctgctgcccaccctgcagagcatcacctggcagatgatcgagcagatccagttcatcaagctgttcggcatggccaagatcgacaacctgctgcaggagatgctgctgggcggcgagcccagcgacgccccccacgcccaccaccccctgcacccccacctgatgcaggagcacatgggcaccaacgtgatcgtggccaacaccatgcccacccacctgagcaacggccagatgtgcgagtggcccagacccagaggccaggccgccgagcccgaggagccccagcccgagccccccggcggcagcggcagcgagccctacaagctgctgcccggcgccgtggccaccatcgtgaagcccctgagcgccatcccccagcccaccatcaccaagcaggaggtgatctgaggactagttataagactgactagcccgatgggcctcccaacgggccctcctcccctccttgcaccgagattaataaaaaaaaaaaaaaaaaaaaaaaaaaaaaaaaaaaaaaaaaaaaaaaaaaaaaaaaaaaaaaaatgcatcccccccccccccccccccccccccccccccaaaggctcttttcagagccaccagaatt

SEQ ID NO: 2671 - RNA, 1531 nt, synthetic construct
  misc_feature 1..1531: note = mRNA i-3 (A64-N5-C30-hSL-N5) (opt4) from Homo sapiens__NP_000448.3__HNF4A(39-474)(S87A)
  source 1..1531: mol_type = other RNA
aggagaaagcttaccatggacaccagccccagcgagggcaccaacctgaacgcccccaacagcctgggcgtgagcgccctgtgcgccatctgcggcgacagagccaccggcaagcactacggcgccagcagctgcgacggctgcaagggcttcttcagaagagccgtgagaaagaaccacatgtacagctgcagattcagcagacagtgcgtggtggacaaggacaagagaaaccagtgcagatactgcagactgaagaagtgcttcagagccggcatgaagaaggaggccgtgcagaacgagagagacagaatcagcaccagaagaagcagctacgaggacagcagcctgcccagcatcaacgccctgctgcaggccgaggtgctgagcagacagatcaccagccccgtgagcggcatcaacggcgacatcagagccaagaagatcgccagcatcgccgacgtgtgcgagagcatgaaggagcagctgctggtgctggtggagtgggccaagtacatccccgccttctgcgagctgcccctggacgaccaggtggccctgctgagagcccacgccggcgagcacctgctgctgggcgccaccaagagaagcatggtgttcaaggacgtgctgctgctgggcaacgactacatcgtgcccagacactgccccgagctggccgagatgagcagagtgagcatcagaatcctggacgagctggtgctgcccttccaggagctgcagatcgacgacaacgagtacgcctacctgaaggccatcatcttcttcgaccccgacgccaagggcctgagcgaccccggcaagatcaagagactgagaagccaggtgcaggtgagcctggaggactacatcaacgacagacagtacgacagcagaggcagattcggcgagctgctgctgctgctgcccaccctgcagagcatcacctggcagatgatcgagcagatccagttcatcaagctgttcggcatggccaagatcgacaacctgctgcaggagatgctgctgggcggcagccccagcgacgccccccacgcccaccaccccctgcacccccacctgatgcaggagcacatgggcaccaacgtgatcgtggccaacaccatgcccacccacctgagcaacggccagatgtgcgagtggcccagacccagaggccaggccgccacccccgagaccccccagcccagcccccccggcggcagcggcagcgagccctacaagctgctgcccggcgccgtggccaccatcgtgaagcccctgagcgccatcccccagcccaccatcaccaagcaggaggtgatctgaggactagttataagactgactagcccgatgggcctcccaacgggccctcctcccctccttgcaccgagattaataaaaaaaaaaaaaaaaaaaaaaaaaaaaaaaaaaaaaaaaaaaaaaaaaaaaaaaaaaaaaaaatgcatcccccccccccccccccccccccccccccccaaaggctcttttcagagccaccagaatt

SEQ ID NO: 2672 - RNA, 1531 nt, synthetic construct
  misc_feature 1..1531: note = mRNA i-3 (A64-N5-C30-hSL-N5) (opt4) from Homo sapiens__NP_000448.3__HNF4A(39-474)(S87E)
  source 1..1531: mol_type = other RNA
aggagaaagcttaccatggacaccagccccagcgagggcaccaacctgaacgcccccaacagcctgggcgtgagcgccctgtgcgccatctgcggcgacagagccaccggcaagcactacggcgccagcagctgcgacggctgcaagggcttcttcagaagagaggtgagaaagaaccacatgtacagctgcagattcagcagacagtgcgtggtggacaaggacaagagaaaccagtgcagatactgcagactgaagaagtgcttcagagccggcatgaagaaggaggccgtgcagaacgagagagacagaatcagcaccagaagaagcagctacgaggacagcagcctgcccagcatcaacgccctgctgcaggccgaggtgctgagcagacagatcaccagccccgtgagcggcatcaacggcgacatcagagccaagaagatcgccagcatcgccgacgtgtgcgagagcatgaaggagcagctgctggtgctggtggagtgggccaagtacatccccgccttctgcgagctgcccctggacgaccaggtggccctgctgagagcccacgccggcgagcacctgctgctgggcgccaccaagagaagcatggtgttcaaggacgtgctgctgctgggcaacgactacatcgtgcccagacactgccccgagctggccgagatgagcagagtgagcatcagaatcctggacgagctggtgctgcccttccaggagctgcagatcgacgacaacgagtacgcctacctgaaggccatcatcttcttcgaccccgacgccaagggcctgagcgaccccggcaagatcaagagactgagaagccaggtgcaggtgagcctggaggactacatcaacgacagacagtacgacagcagaggcagattcggcgagctgctgctgctgctgcccaccctgcagagcatcacctggcagatgatcgagcagatccagttcatcaagctgttcggcatggccaagatcgacaacctgctgcaggagatgctgctgggcggcagccccagcgacgccccccacgcccaccaccccctgcacccccacctgatgcaggagcacatgggcaccaacgtgatcgtggccaacaccatgcccacccacctgagcaacggccagatgtgcgagtggcccagacccagaggccaggccgccacccccgagaccccccagcccagcccccccggcggcagcggcagcgagccctacaagctgctgcccggcgccgtggccaccatcgtgaagcccctgagcgccatcccccagcccaccatcaccaagcaggaggtgatctgaggactagttataagactgactagcccgatgggcctcccaacgggccctcctcccctccttgcaccgagattaataaaaaaaaaaaaaaaaaaaaaaaaaaaaaaaaaaaaaaaaaaaaaaaaaaaaaaaaaaaaaaaatgcatcccccccccccccccccccccccccccccccaaaggctcttttcagagccaccagaatt

SEQ ID NO: 2673 - RNA, 1531 nt, synthetic construct; identical to SEQ ID NO: 2660
  misc_feature 1..1531: note = mRNA i-3 (A64-N5-C30-hSL-N5) (opt4) from Homo sapiens__NP_000448.3__HNF4A(39-474)(R2V)
  source 1..1531: mol_type = other RNA

SEQ ID NO: 2674 - RNA, 1531 nt, synthetic construct; identical to SEQ ID NO: 2660
  misc_feature 1..1531: note = mRNA i-3 (A64-N5-C30-hSL-N5) (opt4) from Homo sapiens__NP_000448.3__HNF4A(39-474)(R2V_K5V)
  source 1..1531: mol_type = other RNA

SEQ ID NO: 2675 - RNA, 1531 nt, synthetic construct
  misc_feature 1..1531: note = mRNA i-3 (A64-N5-C30-hSL-N5) (opt4) from Homo sapiens__NP_000448.3__HNF4A(39-474)(K179R_K180R)
  source 1..1531: mol_type = other RNA
aggagaaagcttaccatggacaccagccccagcgagggcaccaacctgaacgcccccaacagcctgggcgtgagcgccctgtgcgccatctgcggcgacagagccaccggcaagcactacggcgccagcagctgcgacggctgcaagggcttcttcagaagaagcgtgagaaagaaccacatgtacagctgcagattcagcagacagtgcgtggtggacaaggacaagagaaaccagtgcagatactgcagactgaagaagtgcttcagagccggcatgaagaaggaggccgtgcagaacgagagagacagaatcagcaccagaagaagcagctacgaggacagcagcctgcccagcatcaacgccctgctgcaggccgaggtgctgagcagacagatcaccagccccgtgagcggcatcaacggcgacatcagagccagaagaatcgccagcatcgccgacgtgtgcgagagcatgaaggagcagctgctggtgctggtggagtgggccaagtacatccccgccttctgcgagctgcccctggacgaccaggtggccctgctgagagcccacgccggcgagcacctgctgctgggcgccaccaagagaagcatggtgttcaaggacgtgctgctgctgggcaacgactacatcgtgcccagacactgccccgagctggccgagatgagcagagtgagcatcagaatcctggacgagctggtgctgcccttccaggagctgcagatcgacgacaacgagtacgcctacctgaaggccatcatcttcttcgaccccgacgccaagggcctgagcgaccccggcaagatcaagagactgagaagccaggtgcaggtgagcctggaggactacatcaacgacagacagtacgacagcagaggcagattcggcgagctgctgctgctgctgcccaccctgcagagcatcacctggcagatgatcgagcagatccagttcatcaagctgttcggcatggccaagatcgacaacctgctgcaggagatgctgctgggcggcagccccagcgacgccccccacgcccaccaccccctgcacccccacctgatgcaggagcacatgggcaccaacgtgatcgtggccaacaccatgcccacccacctgagcaacggccagatgtgcgagtggcccagacccagaggccaggccgccacccccgagaccccccagcccagcccccccggcggcagcggcagcgagccctacaagctgctgcccggcgccgtggccaccatcgtgaagcccctgagcgccatcccccagcccaccatcaccaagcaggaggtgatctgaggactagttataagactgactagcccgatgggcctcccaacgggccctcctcccctccttgcaccgagattaataaaaaaaaaaaaaaaaaaaaaaaaaaaaaaaaaaaaaaaaaaaaaaaaaaaaaaaaaaaaaaaatgcatcccccccccccccccccccccccccccccccaaaggctcttttcagagccaccagaatt

SEQ ID NO: 2676 - RNA, 1531 nt, synthetic construct
  misc_feature 1..1531: note = mRNA i-3 (A64-N5-C30-hSL-N5) (opt4) from Homo sapiens__NP_000448.3__HNF4A(39-474)(K234R)
  source 1..1531: mol_type = other RNA
aggagaaagcttaccatggacaccagccccagcgagggcaccaacctgaacgcccccaacagcctgggcgtgagcgccctgtgcgccatctgcggcgacagagccaccggcaagcactacggcgccagcagctgcgacggctgcaagggcttcttcagaagaagcgtgagaaagaaccacatgtacagctgcagattcagcagacagtgcgtggtggacaaggacaagagaaaccagtgcagatactgcagactgaagaagtgcttcagagccggcatgaagaaggaggccgtgcagaacgagagagacagaatcagcaccagaagaagcagctacgaggacagcagcctgcccagcatcaacgccctgctgcaggccgaggtgctgagcagacagatcaccagccccgtgagcggcatcaacggcgacatcagagccaagaagatcgccagcatcgccgacgtgtgcgagagcatgaaggagcagctgctggtgctggtggagtgggccaagtacatccccgccttctgcgagctgcccctggacgaccaggtggccctgctgagagcccacgccggcgagcacctgctgctgggcgccaccagaagaagcatggtgttcaaggacgtgctgctgctgggcaacgactacatcgtgcccagacactgccccgagctggccgagatgagcagagtgagcatcagaatcctggacgagctggtgctgcccttccaggagctgcagatcgacgacaacgagtacgcctacctgaaggccatcatcttcttcgaccccgacgccaagggcctgagcgaccccggcaagatcaagagactgagaagccaggtgcaggtgagcctggaggactacatcaacgacagacagtacgacagcagaggcagattcggcgagctgctgctgctgctgcccaccctgcagagcatcacctggcagatgatcgagcagatccagttcatcaagctgttcggcatggccaagatcgacaacctgctgcaggagatgctgctgggcggcagccccagcgacgccccccacgcccaccaccccctgcacccccacctgatgcaggagcacatgggcaccaacgtgatcgtggccaacaccatgcccacccacctgagcaacggccagatgtgcgagtggcccagacccagaggccaggccgccacccccgagaccccccagcccagcccccccggcggcagcggcagcgagccctacaagctgctgcccggcgccgtggccaccatcgtgaagcccctgagcgccatcccccagcccaccatcaccaagcaggaggtgatctgaggactagttataagactgactagcccgatgggcctcccaacgggccctcctcccctccttgcaccgagattaataaaaaaaaaaaaaaaaaaaaaaaaaaaaaaaaaaaaaaaaaaaaaaaaaaaaaaaaaaaaaaaatgcatcccccccccccccccccccccccccccccccaaaggctcttttcagagccaccagaatt

SEQ ID NO: 2677 - RNA, 1531 nt, synthetic construct
  misc_feature 1..1531: note = mRNA i-3 (A64-N5-C30-hSL-N5) (opt4) from Homo sapiens__NP_000448.3__HNF4A(39-474)(K300R)
  source 1..1531: mol_type = other RNA
aggagaaagcttaccatggacaccagccccagcgagggcaccaacctgaacgcccccaacagcctgggcgtgagcgccctgtgcgccatctgcggcgacagagccaccggcaagcactacggcgccagcagctgcgacggctgcaagggcttcttcagaagaagcgtgagaaagaaccacatgtacagctgcagattcagcagacagtgcgtggtggacaaggacaagagaaaccagtgcagatactgcagactgaagaagtgcttcagagccggcatgaagaaggaggccgtgcagaacgagagagacagaatcagcaccagaagaagcagctacgaggacagcagcctgcccagcatcaacgccctgctgcaggccgaggtgctgagcagacagatcaccagccccgtgagcggcatcaacggcgacatcagagccaagaagatcgccagcatcgccgacgtgtgcgagagcatgaaggagcagctgctggtgctggtggagtgggccaagtacatccccgccttctgcgagctgcccctggacgaccaggtggccctgctgagagcccacgccggcgagcacctgctgctgggcgccaccaagagaagcatggtgttcaaggacgtgctgctgctgggcaacgactacatcgtgcccagacactgccccgagctggccgagatgagcagagtgagcatcagaatcctggacgagctggtgctgcccttccaggagctgcagatcgacgacaacgagtacgcctacctgaaggccatcatcttcttcgaccccgacgccagaggcctgagcgaccccggcaagatcaagagactgagaagccaggtgcaggtgagcctggaggactacatcaacgacagacagtacgacagcagaggcagattcggcgagctgctgctgctgctgcccaccctgcagagcatcacctggcagatgatcgagcagatccagttcatcaagctgttcggcatggccaagatcgacaacctgctgcaggagatgctgctgggcggcagccccagcgacgccccccacgcccaccaccccctgcacccccacctgatgcaggagcacatgggcaccaacgtgatcgtggccaacaccatgcccacccacctgagcaacggccagatgtgcgagtggcccagacccagaggccaggccgccacccccgagaccccccagcccagcccccccggcggcagcggcagcgagccctacaagctgctgcccggcgccgtggccaccatcgtgaagcccctgagcgccatcccccagcccaccatcaccaagcaggaggtgatctgaggactagttataagactgactagcccgatgggcctcccaacgggccctcctcccctccttgcaccgagattaataaaaaaaaaaaaaaaaaaaaaaaaaaaaaaaaaaaaaaaaaaaaaaaaaaaaaaaaaaaaaaaatgcatcccccccccccccccccccccccccccccccaaaggctcttttcagagccaccagaatt

SEQ ID NO: 2678 - RNA, 1531 nt, synthetic construct
  misc_feature 1..1531: note = mRNA i-3 (A64-N5-C30-hSL-N5) (opt4) from Homo sapiens__NP_000448.3__HNF4A(39-474)(K300R_K307R_K309R)
  source 1..1531: mol_type = other RNA
aggagaaagcttaccatggacaccagccccagcgagggcaccaacctgaacgcccccaacagcctgggcgtgagcgccctgtgcgccatctgcggcgacagagccaccggcaagcactacggcgccagcagctgcgacggctgcaagggcttcttcagaagaagcgtgagaaagaaccacatgtacagctgcagattcagcagacagtgcgtggtggacaaggacaagagaaaccagtgcagatactgcagactgaagaagtgcttcagagccggcatgaagaaggaggccgtgcagaacgagagagacagaatcagcaccagaagaagcagctacgaggacagcagcctgcccagcatcaacgccctgctgcaggccgaggtgctgagcagacagatcaccagccccgtgagcggcatcaacggcgacatcagagccaagaagatcgccagcatcgccgacgtgtgcgagagcatgaaggagcagctgctggtgctggtggagtgggccaagtacatccccgccttctgcgagctgcccctggacgaccaggtggccctgctgagagcccacgccggcgagcacctgctgctgggcgccaccaagagaagcatggtgttcaaggacgtgctgctgctgggcaacgactacatcgtgcccagacactgccccgagctggccgagatgagcagagtgagcatcagaatcctggacgagctggtgctgcccttccaggagctgcagatcgacgacaacgagtacgcctacctgaaggccatcatcttcttcgaccccgacgccagaggcctgagcgaccccggcagaatcagaagactgagaagccaggtgcaggtgagcctggaggactacatcaacgacagacagtacgacagcagaggcagattcggcgagctgctgctgctgctgcccaccctgcagagcatcacctggcagatgatcgagcagatccagttcatcaagctgttcggcatggccaagatcgacaacctgctgcaggagatgctgctgggcggcagccccagcgacgccccccacgcccaccaccccctgcacccccacctgatgcaggagcacatgggcaccaacgtgatcgtggccaacaccatgcccacccacctgagcaacggccagatgtgcgagtggcccagacccagaggccaggccgccacccccgagaccccccagcccagcccccccggcggcagcggcagcgagccctacaagctgctgcccggcgccgtggccaccatcgtgaagcccctgagcgccatcccccagcccaccatcaccaagcaggaggtgatctgaggactagttataagactgactagcccgatgggcctcccaacgggccctcctcccctccttgcaccgagattaataaaaaaaaaaaaaaaaaaaaaaaaaaaaaaaaaaaaaaaaaaaaaaaaaaaaaaaaaaaaaaaatgcatcccccccccccccccccccccccccccccccaaaggctcttttcagagccaccagaatt

SEQ ID NO: 2679 - RNA, 1531 nt, synthetic construct
  misc_feature 1..1531: note = mRNA i-3 (A64-N5-C30-hSL-N5) (opt4) from Homo sapiens__NP_000448.3__HNF4A(39-474)(K447R_K470R)
  source 1..1531: mol_type = other RNA
aggagaaagcttaccatggacaccagccccagcgagggcaccaacctgaacgcccccaacagcctgggcgtgagcgccctgtgcgccatctgcggcgacagagccaccggcaagcactacggcgccagcagctgcgacggctgcaagggcttcttcagaagaagcgtgagaaagaaccacatgtacagctgcagattcagcagacagtgcgtggtggacaaggacaagagaaaccagtgcagatactgcagactgaagaagtgcttcagagccggcatgaagaaggaggccgtgcagaacgagagagacagaatcagcaccagaagaagcagctacgaggacagcagcctgcccagcatcaacgccctgctgcaggccgaggtgctgagcagacagatcaccagccccgtgagcggcatcaacggcgacatcagagccaagaagatcgccagcatcgccgacgtgtgcgagagcatgaaggagcagctgctggtgctggtggagtgggccaagtacatccccgccttctgcgagctgcccctggacgaccaggtggccctgctgagagcccacgccggcgagcacctgctgctgggcgccaccaagagaagcatggtgttcaaggacgtgctgctgctgggcaacgactacatcgtgcccagacactgccccgagctggccgagatgagcagagtgagcatcagaatcctggacgagctggtgctgcccttccaggagctgcagatcgacgacaacgagtacgcctacctgaaggccatcatcttcttcgaccccgacgccaagggcctgagcgaccccggcaagatcaagagactgagaagccaggtgcaggtgagcctggaggactacatcaacgacagacagtacgacagcagaggcagattcggcgagctgctgctgctgctgcccaccctgcagagcatcacctggcagatgatcgagcagatccagttcatcaagctgttcggcatggccaagatcgacaacctgctgcaggagatgctgctgggcggcagccccagcgacgccccccacgcccaccaccccctgcacccccacctgatgcaggagcacatgggcaccaacgtgatcgtggccaacaccatgcccacccacctgagcaacggccagatgtgcgagtggcccagacccagaggccaggccgccacccccgagaccccccagcccagcccccccggcggcagcggcagcgagccctacagactgctgcccggcgccgtggccaccatcgtgaagcccctgagcgccatcccccagcccaccatcaccagacaggaggtgatctgaggactagttataagactgactagcccgatgggcctcccaacgggccctcctcccctccttgcaccgagattaataaaaaaaaaaaaaaaaaaaaaaaaaaaaaaaaaaaaaaaaaaaaaaaaaaaaaaaaaaaaaaaatgcatcccccccccccccccccccccccccccccccaaaggctcttttcagagccaccagaatt

SEQ ID NO: 2680 - RNA, 1531 nt, synthetic construct
  misc_feature 1..1531: note = mRNA i-3 (A64-N5-C30-hSL-N5) (opt4) from Homo sapiens__NP_000448.3__HNF4A(39-474)(K458R)
  source 1..1531: mol_type = other RNA
aggagaaagcttaccatggacaccagccccagcgagggcaccaacctgaacgcccccaacagcctgggcgtgagcgccctgtgcgccatctgcggcgacagagccaccggcaagcactacggcgccagcagctgcgacggctgcaagggcttcttcagaagaagcgtgagaaagaaccacatgtacagctgcagattcagcagacagtgcgtggtggacaaggacaagagaaaccagtgcagatactgcagactgaagaagtgcttcagagccggcatgaagaaggaggccgtgcagaacgagagagacagaatcagcaccagaagaagcagctacgaggacagcagcctgcccagcatcaacgccctgctgcaggccgaggtgctgagcagacagatcaccagccccgtgagcggcatcaacggcgacatcagagccaagaagatcgccagcatcgccgacgtgtgcgagagcatgaaggagcagctgctggtgctggtggagtgggccaagtacatccccgccttctgcgagctgcccctggacgaccaggtggccctgctgagagcccacgccggcgagcacctgctgctgggcgccaccaagagaagcatggtgttcaaggacgtgctgctgctgggcaacgactacatcgtgcccagacactgccccgagctggccgagatgagcagagtgagcatcagaatcctggacgagctggtgctgcccttccaggagctgcagatcgacgacaacgagtacgcctacctgaaggccatcatcttcttcgaccccgacgccaagggcctgagcgaccccggcaagatcaagagactgagaagccaggtgcaggtgagcctggaggactacatcaacgacagacagtacgacagcagaggcagattcggcgagctgctgctgctgctgcccaccctgcagagcatcacctggcagatgatcgagcagatccagttcatcaagctgttcggcatggccaagatcgacaacctgctgcaggagatgctgctgggcggcagccccagcgacgccccccacgcccaccaccccctgcacccccacctgatgcaggagcacatgggcaccaacgtgatcgtggccaacaccatgcccacccacctgagcaacggccagatgtgcgagtggcccagacccagaggccaggccgccacccccgagaccccccagcccagcccccccggcggcagcggcagcgagccctacaagctgctgcccggcgccgtggccaccatcgtgagacccctgagcgccatcccccagcccaccatcaccaagcaggaggtgatctgaggactagttataagactgactagcccgatgggcctcccaacgggccctcctcccctccttgcaccgagattaataaaaaaaaaaaaaaaaaaaaaaaaaaaaaaaaaaaaaaaaaaaaaaaaaaaaaaaaaaaaaaaatgcatcccccccccccccccccccccccccccccccaaaggctcttttcagagccaccagaatt

SEQ ID NO: 2681 - RNA, 1531 nt, synthetic construct
  misc_feature 1..1531: note = mRNA i-3 (A64-N5-C30-hSL-N5) (opt4) from Homo sapiens__NP_000448.3__HNF4A(39-474)(K106R_K108R_K126R_K127R )
  source 1..1531: mol_type = other RNA
aggagaaagcttaccatggacaccagccccagcgagggcaccaacctgaacgcccccaacagcctgggcgtgagcgccctgtgcgccatctgcggcgacagagccaccggcaagcactacggcgccagcagctgcgacggctgcaagggcttcttcagaagaagcgtgagaaagaaccacatgtacagctgcagattcagcagacagtgcgtggtggacagagacagaagaaaccagtgcagatactgcagactgaagaagtgcttcagagccggcatgagaagagaggccgtgcagaacgagagagacagaatcagcaccagaagaagcagctacgaggacagcagcctgcccagcatcaacgccctgctgcaggccgaggtgctgagcagacagatcaccagccccgtgagcggcatcaacggcgacatcagagccaagaagatcgccagcatcgccgacgtgtgcgagagcatgaaggagcagctgctggtgctggtggagtgggccaagtacatccccgccttctgcgagctgcccctggacgaccaggtggccctgctgagagcccacgccggcgagcacctgctgctgggcgccaccaagagaagcatggtgttcaaggacgtgctgctgctgggcaacgactacatcgtgcccagacactgccccgagctggccgagatgagcagagtgagcatcagaatcctggacgagctggtgctgcccttccaggagctgcagatcgacgacaacgagtacgcctacctgaaggccatcatcttcttcgaccccgacgccaagggcctgagcgaccccggcaagatcaagagactgagaagccaggtgcaggtgagcctggaggactacatcaacgacagacagtacgacagcagaggcagattcggcgagctgctgctgctgctgcccaccctgcagagcatcacctggcagatgatcgagcagatccagttcatcaagctgttcggcatggccaagatcgacaacctgctgcaggagatgctgctgggcggcagccccagcgacgccccccacgcccaccaccccctgcacccccacctgatgcaggagcacatgggcaccaacgtgatcgtggccaacaccatgcccacccacctgagcaacggccagatgtgcgagtggcccagacccagaggccaggccgccacccccgagaccccccagcccagcccccccggcggcagcggcagcgagccctacaagctgctgcccggcgccgtggccaccatcgtgaagcccctgagcgccatcccccagcccaccatcaccaagcaggaggtgatctgaggactagttataagactgactagcccgatgggcctcccaacgggccctcctcccctccttgcaccgagattaataaaaaaaaaaaaaaaaaaaaaaaaaaaaaaaaaaaaaaaaaaaaaaaaaaaaaaaaaaaaaaaatgcatcccccccccccccccccccccccccccccccaaaggctcttttcagagccaccagaatt

SEQ ID NO: 2682 - RNA, 1531 nt, synthetic construct
  misc_feature 1..1531: note = mRNA i-3 (A64-N5-C30-hSL-N5) (opt4) from Homo sapiens__NP_000448.3__HNF4A(39-474)(E285Q)
  source 1..1531: mol_type = other RNA
aggagaaagcttaccatggacaccagccccagcgagggcaccaacctgaacgcccccaacagcctgggcgtgagcgccctgtgcgccatctgcggcgacagagccaccggcaagcactacggcgccagcagctgcgacggctgcaagggcttcttcagaagaagcgtgagaaagaaccacatgtacagctgcagattcagcagacagtgcgtggtggacaaggacaagagaaaccagtgcagatactgcagactgaagaagtgcttcagagccggcatgaagaaggaggccgtgcagaacgagagagacagaatcagcaccagaagaagcagctacgaggacagcagcctgcccagcatcaacgccctgctgcaggccgaggtgctgagcagacagatcaccagccccgtgagcggcatcaacggcgacatcagagccaagaagatcgccagcatcgccgacgtgtgcgagagcatgaaggagcagctgctggtgctggtggagtgggccaagtacatccccgccttctgcgagctgcccctggacgaccaggtggccctgctgagagcccacgccggcgagcacctgctgctgggcgccaccaagagaagcatggtgttcaaggacgtgctgctgctgggcaacgactacatcgtgcccagacactgccccgagctggccgagatgagcagagtgagcatcagaatcctggacgagctggtgctgcccttccaggagctgcagatcgacgacaaccagtacgcctacctgaaggccatcatcttcttcgaccccgacgccaagggcctgagcgaccccggcaagatcaagagactgagaagccaggtgcaggtgagcctggaggactacatcaacgacagacagtacgacagcagaggcagattcggcgagctgctgctgctgctgcccaccctgcagagcatcacctggcagatgatcgagcagatccagttcatcaagctgttcggcatggccaagatcgacaacctgctgcaggagatgctgctgggcggcagccccagcgacgccccccacgcccaccaccccctgcacccccacctgatgcaggagcacatgggcaccaacgtgatcgtggccaacaccatgcccacccacctgagcaacggccagatgtgcgagtggcccagacccagaggccaggccgccacccccgagaccccccagcccagcccccccggcggcagcggcagcgagccctacaagctgctgcccggcgccgtggccaccatcgtgaagcccctgagcgccatcccccagcccaccatcaccaagcaggaggtgatctgaggactagttataagactgactagcccgatgggcctcccaacgggccctcctcccctccttgcaccgagattaataaaaaaaaaaaaaaaaaaaaaaaaaaaaaaaaaaaaaaaaaaaaaaaaaaaaaaaaaaaaaaaatgcatcccccccccccccccccccccccccccccccaaaggctcttttcagagccaccagaatt

SEQ ID NO: 2683 - RNA, 1531 nt, synthetic construct
  misc_feature 1..1531: note = mRNA i-3 (A64-N5-C30-hSL-N5) (opt4) from Homo sapiens__NP_000448.3__HNF4A(39-474)(T166E)
  source 1..1531: mol_type = other RNA
aggagaaagcttaccatggacaccagccccagcgagggcaccaacctgaacgcccccaacagcctgggcgtgagcgccctgtgcgccatctgcggcgacagagccaccggcaagcactacggcgccagcagctgcgacggctgcaagggcttcttcagaagaagcgtgagaaagaaccacatgtacagctgcagattcagcagacagtgcgtggtggacaaggacaagagaaaccagtgcagatactgcagactgaagaagtgcttcagagccggcatgaagaaggaggccgtgcagaacgagagagacagaatcagcaccagaagaagcagctacgaggacagcagcctgcccagcatcaacgccctgctgcaggccgaggtgctgagcagacagatcgagagccccgtgagcggcatcaacggcgacatcagagccaagaagatcgccagcatcgccgacgtgtgcgagagcatgaaggagcagctgctggtgctggtggagtgggccaagtacatccccgccttctgcgagctgcccctggacgaccaggtggccctgctgagagcccacgccggcgagcacctgctgctgggcgccaccaagagaagcatggtgttcaaggacgtgctgctgctgggcaacgactacatcgtgcccagacactgccccgagctggccgagatgagcagagtgagcatcagaatcctggacgagctggtgctgcccttccaggagctgcagatcgacgacaacgagtacgcctacctgaaggccatcatcttcttcgaccccgacgccaagggcctgagcgaccccggcaagatcaagagactgagaagccaggtgcaggtgagcctggaggactacatcaacgacagacagtacgacagcagaggcagattcggcgagctgctgctgctgctgcccaccctgcagagcatcacctggcagatgatcgagcagatccagttcatcaagctgttcggcatggccaagatcgacaacctgctgcaggagatgctgctgggcggcagccccagcgacgccccccacgcccaccaccccctgcacccccacctgatgcaggagcacatgggcaccaacgtgatcgtggccaacaccatgcccacccacctgagcaacggccagatgtgcgagtggcccagacccagaggccaggccgccacccccgagaccccccagcccagcccccccggcggcagcggcagcgagccctacaagctgctgcccggcgccgtggccaccatcgtgaagcccctgagcgccatcccccagcccaccatcaccaagcaggaggtgatctgaggactagttataagactgactagcccgatgggcctcccaacgggccctcctcccctccttgcaccgagattaataaaaaaaaaaaaaaaaaaaaaaaaaaaaaaaaaaaaaaaaaaaaaaaaaaaaaaaaaaaaaaaatgcatcccccccccccccccccccccccccccccccaaaggctcttttcagagccaccagaatt

SEQ ID NO: 2684 - RNA, 1531 nt, synthetic construct
  misc_feature 1..1531: note = mRNA i-3 (A64-N5-C30-hSL-N5) (opt4) from Homo sapiens__NP_000448.3__HNF4A(39-474)(S148A)
  source 1..1531: mol_type = other RNA
aggagaaagcttaccatggacaccagccccagcgagggcaccaacctgaacgcccccaacagcctgggcgtgagcgccctgtgcgccatctgcggcgacagagccaccggcaagcactacggcgccagcagctgcgacggctgcaagggcttcttcagaagaagcgtgagaaagaaccacatgtacagctgcagattcagcagacagtgcgtggtggacaaggacaagagaaaccagtgcagatactgcagactgaagaagtgcttcagagccggcatgaagaaggaggccgtgcagaacgagagagacagaatcagcaccagaagaagcagctacgaggacagcgccctgcccagcatcaacgccctgctgcaggccgaggtgctgagcagacagatcaccagccccgtgagcggcatcaacggcgacatcagagccaagaagatcgccagcatcgccgacgtgtgcgagagcatgaaggagcagctgctggtgctggtggagtgggccaagtacatccccgccttctgcgagctgcccctggacgaccaggtggccctgctgagagcccacgccggcgagcacctgctgctgggcgccaccaagagaagcatggtgttcaaggacgtgctgctgctgggcaacgactacatcgtgcccagacactgccccgagctggccgagatgagcagagtgagcatcagaatcctggacgagctggtgctgcccttccaggagctgcagatcgacgacaacgagtacgcctacctgaaggccatcatcttcttcgaccccgacgccaagggcctgagcgaccccggcaagatcaagagactgagaagccaggtgcaggtgagcctggaggactacatcaacgacagacagtacgacagcagaggcagattcggcgagctgctgctgctgctgcccaccctgcagagcatcacctggcagatgatcgagcagatccagttcatcaagctgttcggcatggccaagatcgacaacctgctgcaggagatgctgctgggcggcagccccagcgacgccccccacgcccaccaccccctgcacccccacctgatgcaggagcacatgggcaccaacgtgatcgtggccaacaccatgcccacccacctgagcaacggccagatgtgcgagtggcccagacccagaggccaggccgccacccccgagaccccccagcccagcccccccggcggcagcggcagcgagccctacaagctgctgcccggcgccgtggccaccatcgtgaagcccctgagcgccatcccccagcccaccatcaccaagcaggaggtgatctgaggactagttataagactgactagcccgatgggcctcccaacgggccctcctcccctccttgcaccgagattaataaaaaaaaaaaaaaaaaaaaaaaaaaaaaaaaaaaaaaaaaaaaaaaaaaaaaaaaaaaaaaaatgcatcccccccccccccccccccccccccccccccaaaggctcttttcagagccaccagaatt

SEQ ID NO: 2685 - RNA, 1531 nt, synthetic construct
  misc_feature 1..1531: note = mRNA i-3 (A64-N5-C30-hSL-N5) (opt4) from Homo sapiens__NP_000448.3__HNF4A(39-474)(S148E)
  source 1..1531: mol_type = other RNA
aggagaaagcttaccatggacaccagccccagcgagggcaccaacctgaacgcccccaacagcctgggcgtgagcgccctgtgcgccatctgcggcgacagagccaccggcaagcactacggcgccagcagctgcgacggctgcaagggcttcttcagaagaagcgtgagaaagaaccacatgtacagctgcagattcagcagacagtgcgtggtggacaaggacaagagaaaccagtgcagatactgcagactgaagaagtgcttcagagccggcatgaagaaggaggccgtgcagaacgagagagacagaatcagcaccagaagaagcagctacgaggacagcgagctgcccagcatcaacgccctgctgcaggccgaggtgctgagcagacagatcaccagccccgtgagcggcatcaacggcgacatcagagccaagaagatcgccagcatcgccgacgtgtgcgagagcatgaaggagcagctgctggtgctggtggagtgggccaagtacatccccgccttctgcgagctgcccctggacgaccaggtggccctgctgagagcccacgccggcgagcacctgctgctgggcgccaccaagagaagcatggtgttcaaggacgtgctgctgctgggcaacgactacatcgtgcccagacactgccccgagctggccgagatgagcagagtgagcatcagaatcctggacgagctggtgctgcccttccaggagctgcagatcgacgacaacgagtacgcctacctgaaggccatcatcttcttcgaccccgacgccaagggcctgagcgaccccggcaagatcaagagactgagaagccaggtgcaggtgagcctggaggactacatcaacgacagacagtacgacagcagaggcagattcggcgagctgctgctgctgctgcccaccctgcagagcatcacctggcagatgatcgagcagatccagttcatcaagctgttcggcatggccaagatcgacaacctgctgcaggagatgctgctgggcggcagccccagcgacgccccccacgcccaccaccccctgcacccccacctgatgcaggagcacatgggcaccaacgtgatcgtggccaacaccatgcccacccacctgagcaacggccagatgtgcgagtggcccagacccagaggccaggccgccacccccgagaccccccagcccagcccccccggcggcagcggcagcgagccctacaagctgctgcccggcgccgtggccaccatcgtgaagcccctgagcgccatcccccagcccaccatcaccaagcaggaggtgatctgaggactagttataagactgactagcccgatgggcctcccaacgggccctcctcccctccttgcaccgagattaataaaaaaaaaaaaaaaaaaaaaaaaaaaaaaaaaaaaaaaaaaaaaaaaaaaaaaaaaaaaaaaatgcatcccccccccccccccccccccccccccccccaaaggctcttttcagagccaccagaatt

SEQ ID NO: 2686 - RNA, 1531 nt, synthetic construct
  misc_feature 1..1531: note = mRNA i-3 (A64-N5-C30-hSL-N5) (opt4) from Homo sapiens__NP_000448.3__HNF4A(39-474)(S183A)
  source 1..1531: mol_type = other RNA
aggagaaagcttaccatggacaccagccccagcgagggcaccaacctgaacgcccccaacagcctgggcgtgagcgccctgtgcgccatctgcggcgacagagccaccggcaagcactacggcgccagcagctgcgacggctgcaagggcttcttcagaagaagcgtgagaaagaaccacatgtacagctgcagattcagcagacagtgcgtggtggacaaggacaagagaaaccagtgcagatactgcagactgaagaagtgcttcagagccggcatgaagaaggaggccgtgcagaacgagagagacagaatcagcaccagaagaagcagctacgaggacagcagcctgcccagcatcaacgccctgctgcaggccgaggtgctgagcagacagatcaccagccccgtgagcggcatcaacggcgacatcagagccaagaagatcgccgccatcgccgacgtgtgcgagagcatgaaggagcagctgctggtgctggtggagtgggccaagtacatccccgccttctgcgagctgcccctggacgaccaggtggccctgctgagagcccacgccggcgagcacctgctgctgggcgccaccaagagaagcatggtgttcaaggacgtgctgctgctgggcaacgactacatcgtgcccagacactgccccgagctggccgagatgagcagagtgagcatcagaatcctggacgagctggtgctgcccttccaggagctgcagatcgacgacaacgagtacgcctacctgaaggccatcatcttcttcgaccccgacgccaagggcctgagcgaccccggcaagatcaagagactgagaagccaggtgcaggtgagcctggaggactacatcaacgacagacagtacgacagcagaggcagattcggcgagctgctgctgctgctgcccaccctgcagagcatcacctggcagatgatcgagcagatccagttcatcaagctgttcggcatggccaagatcgacaacctgctgcaggagatgctgctgggcggcagccccagcgacgccccccacgcccaccaccccctgcacccccacctgatgcaggagcacatgggcaccaacgtgatcgtggccaacaccatgcccacccacctgagcaacggccagatgtgcgagtggcccagacccagaggccaggccgccacccccgagaccccccagcccagcccccccggcggcagcggcagcgagccctacaagctgctgcccggcgccgtggccaccatcgtgaagcccctgagcgccatcccccagcccaccatcaccaagcaggaggtgatctgaggactagttataagactgactagcccgatgggcctcccaacgggccctcctcccctccttgcaccgagattaataaaaaaaaaaaaaaaaaaaaaaaaaaaaaaaaaaaaaaaaaaaaaaaaaaaaaaaaaaaaaaaatgcatcccccccccccccccccccccccccccccccaaaggctcttttcagagccaccagaatt

SEQ ID NO: 2687 - RNA, 1531 nt, synthetic construct
  misc_feature 1..1531: note = mRNA i-3 (A64-N5-C30-hSL-N5) (opt4) from Homo sapiens__NP_000448.3__HNF4A(39-474)(S183E)
  source 1..1531: mol_type = other RNA
aggagaaagcttaccatggacaccagccccagcgagggcaccaacctgaacgcccccaacagcctgggcgtgagcgccctgtgcgccatctgcggcgacagagccaccggcaagcactacggcgccagcagctgcgacggctgcaagggcttcttcagaagaagcgtgagaaagaaccacatgtacagctgcagattcagcagacagtgcgtggtggacaaggacaagagaaaccagtgcagatactgcagactgaagaagtgcttcagagccggcatgaagaaggaggccgtgcagaacgagagagacagaatcagcaccagaagaagcagctacgaggacagcagcctgcccagcatcaacgccctgctgcaggccgaggtgctgagcagacagatcaccagccccgtgagcggcatcaacggcgacatcagagccaagaagatcgccgagatcgccgacgtgtgcgagagcatgaaggagcagctgctggtgctggtggagtgggccaagtacatccccgccttctgcgagctgcccctggacgaccaggtggccctgctgagagcccacgccggcgagcacctgctgctgggcgccaccaagagaagcatggtgttcaaggacgtgctgctgctgggcaacgactacatcgtgcccagacactgccccgagctggccgagatgagcagagtgagcatcagaatcctggacgagctggtgctgcccttccaggagctgcagatcgacgacaacgagtacgcctacctgaaggccatcatcttcttcgaccccgacgccaagggcctgagcgaccccggcaagatcaagagactgagaagccaggtgcaggtgagcctggaggactacatcaacgacagacagtacgacagcagaggcagattcggcgagctgctgctgctgctgcccaccctgcagagcatcacctggcagatgatcgagcagatccagttcatcaagctgttcggcatggccaagatcgacaacctgctgcaggagatgctgctgggcggcagccccagcgacgccccccacgcccaccaccccctgcacccccacctgatgcaggagcacatgggcaccaacgtgatcgtggccaacaccatgcccacccacctgagcaacggccagatgtgcgagtggcccagacccagaggccaggccgccacccccgagaccccccagcccagcccccccggcggcagcggcagcgagccctacaagctgctgcccggcgccgtggccaccatcgtgaagcccctgagcgccatcccccagcccaccatcaccaagcaggaggtgatctgaggactagttataagactgactagcccgatgggcctcccaacgggccctcctcccctccttgcaccgagattaataaaaaaaaaaaaaaaaaaaaaaaaaaaaaaaaaaaaaaaaaaaaaaaaaaaaaaaaaaaaaaaatgcatcccccccccccccccccccccccccccccccaaaggctcttttcagagccaccagaatt

SEQ ID NO: 2688 - RNA, 1531 nt, synthetic construct
  misc_feature 1..1531: note = mRNA i-3 (A64-N5-C30-hSL-N5) (opt4) from Homo sapiens__NP_000448.3__HNF4A(39-474)(S461A)
  source 1..1531: mol_type = other RNA
aggagaaagcttaccatggacaccagccccagcgagggcaccaacctgaacgcccccaacagcctgggcgtgagcgccctgtgcgccatctgcggcgacagagccaccggcaagcactacggcgccagcagctgcgacggctgcaagggcttcttcagaagaagcgtgagaaagaaccacatgtacagctgcagattcagcagacagtgcgtggtggacaaggacaagagaaaccagtgcagatactgcagactgaagaagtgcttcagagccggcatgaagaaggaggccgtgcagaacgagagagacagaatcagcaccagaagaagcagctacgaggacagcagcctgcccagcatcaacgccctgctgcaggccgaggtgctgagcagacagatcaccagccccgtgagcggcatcaacggcgacatcagagccaagaagatcgccagcatcgccgacgtgtgcgagagcatgaaggagcagctgctggtgctggtggagtgggccaagtacatccccgccttctgcgagctgcccctggacgaccaggtggccctgctgagagcccacgccggcgagcacctgctgctgggcgccaccaagagaagcatggtgttcaaggacgtgctgctgctgggcaacgactacatcgtgcccagacactgccccgagctggccgagatgagcagagtgagcatcagaatcctggacgagctggtgctgcccttccaggagctgcagatcgacgacaacgagtacgcctacctgaaggccatcatcttcttcgaccccgacgccaagggcctgagcgaccccggcaagatcaagagactgagaagccaggtgcaggtgagcctggaggactacatcaacgacagacagtacgacagcagaggcagattcggcgagctgctgctgctgctgcccaccctgcagagcatcacctggcagatgatcgagcagatccagttcatcaagctgttcggcatggccaagatcgacaacctgctgcaggagatgctgctgggcggcagccccagcgacgccccccacgcccaccaccccctgcacccccacctgatgcaggagcacatgggcaccaacgtgatcgtggccaacaccatgcccacccacctgagcaacggccagatgtgcgagtggcccagacccagaggccaggccgccacccccgagaccccccagcccagcccccccggcggcagcggcagcgagccctacaagctgctgcccggcgccgtggccaccatcgtgaagcccctggccgccatcccccagcccaccatcaccaagcaggaggtgatctgaggactagttataagactgactagcccgatgggcctcccaacgggccctcctcccctccttgcaccgagattaataaaaaaaaaaaaaaaaaaaaaaaaaaaaaaaaaaaaaaaaaaaaaaaaaaaaaaaaaaaaaaaatgcatcccccccccccccccccccccccccccccccaaaggctcttttcagagccaccagaatt

SEQ ID NO: 2689 - RNA, 1531 nt, synthetic construct
  misc_feature 1..1531: note = mRNA i-3 (A64-N5-C30-hSL-N5) (opt4) from Homo sapiens__NP_000448.3__HNF4A(39-474)(S461E)
  source 1..1531: mol_type = other RNA
aggagaaagcttaccatggacaccagccccagcgagggcaccaacctgaacgcccccaacagcctgggcgtgagcgccctgtgcgccatctgcggcgacagagccaccggcaagcactacggcgccagcagctgcgacggctgcaagggcttcttcagaagaagcgtgagaaagaaccacatgtacagctgcagattcagcagacagtgcgtggtggacaaggacaagagaaaccagtgcagatactgcagactgaagaagtgcttcagagccggcatgaagaaggaggccgtgcagaacgagagagacagaatcagcaccagaagaagcagctacgaggacagcagcctgcccagcatcaacgccctgctgcaggccgaggtgctgagcagacagatcaccagccccgtgagcggcatcaacggcgacatcagagccaagaagatcgccagcatcgccgacgtgtgcgagagcatgaaggagcagctgctggtgctggtggagtgggccaagtacatccccgccttctgcgagctgcccctggacgaccaggtggccctgctgagagcccacgccggcgagcacctgctgctgggcgccaccaagagaagcatggtgttcaaggacgtgctgctgctgggcaacgactacatcgtgcccagacactgccccgagctggccgagatgagcagagtgagcatcagaatcctggacgagctggtgctgcccttccaggagctgcagatcgacgacaacgagtacgcctacctgaaggccatcatcttcttcgaccccgacgccaagggcctgagcgaccccggcaagatcaagagactgagaagccaggtgcaggtgagcctggaggactacatcaacgacagacagtacgacagcagaggcagattcggcgagctgctgctgctgctgcccaccctgcagagcatcacctggcagatgatcgagcagatccagttcatcaagctgttcggcatggccaagatcgacaacctgctgcaggagatgctgctgggcggcagccccagcgacgccccccacgcccaccaccccctgcacccccacctgatgcaggagcacatgggcaccaacgtgatcgtggccaacaccatgcccacccacctgagcaacggccagatgtgcgagtggcccagacccagaggccaggccgccacccccgagaccccccagcccagcccccccggcggcagcggcagcgagccctacaagctgctgcccggcgccgtggccaccatcgtgaagcccctggaggccatcccccagcccaccatcaccaagcaggaggtgatctgaggactagttataagactgactagcccgatgggcctcccaacgggccctcctcccctccttgcaccgagattaataaaaaaaaaaaaaaaaaaaaaaaaaaaaaaaaaaaaaaaaaaaaaaaaaaaaaaaaaaaaaaaatgcatcccccccccccccccccccccccccccccccaaaggctcttttcagagccaccagaatt

SEQ ID NO: 2690 - RNA, 1531 nt, synthetic construct
  misc_feature 1..1531: note = mRNA i-3 (A64-N5-C30-hSL-N5) (opt4) from Homo sapiens__NP_000448.3__HNF4A(39-474)(S142A_S143A_S313A)
  source 1..1531: mol_type = other RNA
aggagaaagcttaccatggacaccagccccagcgagggcaccaacctgaacgcccccaacagcctgggcgtgagcgccctgtgcgccatctgcggcgacagagccaccggcaagcactacggcgccagcagctgcgacggctgcaagggcttcttcagaagaagcgtgagaaagaaccacatgtacagctgcagattcagcagacagtgcgtggtggacaaggacaagagaaaccagtgcagatactgcagactgaagaagtgcttcagagccggcatgaagaaggaggccgtgcagaacgagagagacagaatcagcaccagaagagccgcctacgaggacagcagcctgcccagcatcaacgccctgctgcaggccgaggtgctgagcagacagatcaccagccccgtgagcggcatcaacggcgacatcagagccaagaagatcgccagcatcgccgacgtgtgcgagagcatgaaggagcagctgctggtgctggtggagtgggccaagtacatccccgccttctgcgagctgcccctggacgaccaggtggccctgctgagagcccacgccggcgagcacctgctgctgggcgccaccaagagaagcatggtgttcaaggacgtgctgctgctgggcaacgactacatcgtgcccagacactgccccgagctggccgagatgagcagagtgagcatcagaatcctggacgagctggtgctgcccttccaggagctgcagatcgacgacaacgagtacgcctacctgaaggccatcatcttcttcgaccccgacgccaagggcctgagcgaccccggcaagatcaagagactgagagcccaggtgcaggtgagcctggaggactacatcaacgacagacagtacgacagcagaggcagattcggcgagctgctgctgctgctgcccaccctgcagagcatcacctggcagatgatcgagcagatccagttcatcaagctgttcggcatggccaagatcgacaacctgctgcaggagatgctgctgggcggcagccccagcgacgccccccacgcccaccaccccctgcacccccacctgatgcaggagcacatgggcaccaacgtgatcgtggccaacaccatgcccacccacctgagcaacggccagatgtgcgagtggcccagacccagaggccaggccgccacccccgagaccccccagcccagcccccccggcggcagcggcagcgagccctacaagctgctgcccggcgccgtggccaccatcgtgaagcccctgagcgccatcccccagcccaccatcaccaagcaggaggtgatctgaggactagttataagactgactagcccgatgggcctcccaacgggccctcctcccctccttgcaccgagattaataaaaaaaaaaaaaaaaaaaaaaaaaaaaaaaaaaaaaaaaaaaaaaaaaaaaaaaaaaaaaaaatgcatcccccccccccccccccccccccccccccccaaaggctcttttcagagccaccagaatt

SEQ ID NO: 2691 - RNA, 1531 nt, synthetic construct
  misc_feature 1..1531: note = mRNA i-3 (A64-N5-C30-hSL-N5) (opt4) from Homo sapiens__NP_000448.3__HNF4A(39-474)(S142A_S143A_S313A_K458R )
  source 1..1531: mol_type = other RNA
aggagaaagcttaccatggacaccagccccagcgagggcaccaacctgaacgcccccaacagcctgggcgtgagcgccctgtgcgccatctgcggcgacagagccaccggcaagcactacggcgccagcagctgcgacggctgcaagggcttcttcagaagaagcgtgagaaagaaccacatgtacagctgcagattcagcagacagtgcgtggtggacaaggacaagagaaaccagtgcagatactgcagactgaagaagtgcttcagagccggcatgaagaaggaggccgtgcagaacgagagagacagaatcagcaccagaagagccgcctacgaggacagcagcctgcccagcatcaacgccctgctgcaggccgaggtgctgagcagacagatcaccagccccgtgagcggcatcaacggcgacatcagagccaagaagatcgccagcatcgccgacgtgtgcgagagcatgaaggagcagctgctggtgctggtggagtgggccaagtacatccccgccttctgcgagctgcccctggacgaccaggtggccctgctgagagcccacgccggcgagcacctgctgctgggcgccaccaagagaagcatggtgttcaaggacgtgctgctgctgggcaacgactacatcgtgcccagacactgccccgagctggccgagatgagcagagtgagcatcagaatcctggacgagctggtgctgcccttccaggagctgcagatcgacgacaacgagtacgcctacctgaaggccatcatcttcttcgaccccgacgccaagggcctgagcgaccccggcaagatcaagagactgagagcccaggtgcaggtgagcctggaggactacatcaacgacagacagtacgacagcagaggcagattcggcgagctgctgctgctgctgcccaccctgcagagcatcacctggcagatgatcgagcagatccagttcatcaagctgttcggcatggccaagatcgacaacctgctgcaggagatgctgctgggcggcagccccagcgacgccccccacgcccaccaccccctgcacccccacctgatgcaggagcacatgggcaccaacgtgatcgtggccaacaccatgcccacccacctgagcaacggccagatgtgcgagtggcccagacccagaggccaggccgccacccccgagaccccccagcccagcccccccggcggcagcggcagcgagccctacaagctgctgcccggcgccgtggccaccatcgtgagacccctgagcgccatcccccagcccaccatcaccaagcaggaggtgatctgaggactagttataagactgactagcccgatgggcctcccaacgggccctcctcccctccttgcaccgagattaataaaaaaaaaaaaaaaaaaaaaaaaaaaaaaaaaaaaaaaaaaaaaaaaaaaaaaaaaaaaaaaatgcatcccccccccccccccccccccccccccccccaaaggctcttttcagagccaccagaatt

SEQ ID NO: 2692 - RNA, 1531 nt, synthetic construct
  misc_feature 1..1531: note = mRNA i-3 (A64-N5-C30-hSL-N5) (opt4) from Homo sapiens__NP_000448.3__HNF4A(39-474)(S142A_S143A_S167A_S313A _S378A_T429A_T432A_S436A_K458R)
  source 1..1531: mol_type = other RNA
aggagaaagcttaccatggacaccagccccagcgagggcaccaacctgaacgcccccaacagcctgggcgtgagcgccctgtgcgccatctgcggcgacagagccaccggcaagcactacggcgccagcagctgcgacggctgcaagggcttcttcagaagaagcgtgagaaagaaccacatgtacagctgcagattcagcagacagtgcgtggtggacaaggacaagagaaaccagtgcagatactgcagactgaagaagtgcttcagagccggcatgaagaaggaggccgtgcagaacgagagagacagaatcagcaccagaagagccgcctacgaggacagcagcctgcccagcatcaacgccctgctgcaggccgaggtgctgagcagacagatcaccgcccccgtgagcggcatcaacggcgacatcagagccaagaagatcgccagcatcgccgacgtgtgcgagagcatgaaggagcagctgctggtgctggtggagtgggccaagtacatccccgccttctgcgagctgcccctggacgaccaggtggccctgctgagagcccacgccggcgagcacctgctgctgggcgccaccaagagaagcatggtgttcaaggacgtgctgctgctgggcaacgactacatcgtgcccagacactgccccgagctggccgagatgagcagagtgagcatcagaatcctggacgagctggtgctgcccttccaggagctgcagatcgacgacaacgagtacgcctacctgaaggccatcatcttcttcgaccccgacgccaagggcctgagcgaccccggcaagatcaagagactgagagcccaggtgcaggtgagcctggaggactacatcaacgacagacagtacgacagcagaggcagattcggcgagctgctgctgctgctgcccaccctgcagagcatcacctggcagatgatcgagcagatccagttcatcaagctgttcggcatggccaagatcgacaacctgctgcaggagatgctgctgggcggcgcccccagcgacgccccccacgcccaccaccccctgcacccccacctgatgcaggagcacatgggcaccaacgtgatcgtggccaacaccatgcccacccacctgagcaacggccagatgtgcgagtggcccagacccagaggccaggccgccgcccccgaggccccccagcccgccccccccggcggcagcggcagcgagccctacaagctgctgcccggcgccgtggccaccatcgtgagacccctgagcgccatcccccagcccaccatcaccaagcaggaggtgatctgaggactagttataagactgactagcccgatgggcctcccaacgggccctcctcccctccttgcaccgagattaataaaaaaaaaaaaaaaaaaaaaaaaaaaaaaaaaaaaaaaaaaaaaaaaaaaaaaaaaaaaaaaatgcatcccccccccccccccccccccccccccccccaaaggctcttttcagagccaccagaatt

SEQ ID NO: 2693 - RNA, 1531 nt, synthetic construct
  misc_feature 1..1531: note = mRNA i-3 (A64-N5-C30-hSL-N5) (opt4) from Homo sapiens__NP_000448.3__HNF4A(39-474)(S142A_S143A_S148A_S167A _S313A_S378A_T429A_T432A_S436A_K458R)
  source 1..1531: mol_type = other RNA
aggagaaagcttaccatggacaccagccccagcgagggcaccaacctgaacgcccccaacagcctgggcgtgagcgccctgtgcgccatctgcggcgacagagccaccggcaagcactacggcgccagcagctgcgacggctgcaagggcttcttcagaagaagcgtgagaaagaaccacatgtacagctgcagattcagcagacagtgcgtggtggacaaggacaagagaaaccagtgcagatactgcagactgaagaagtgcttcagagccggcatgaagaaggaggccgtgcagaacgagagagacagaatcagcaccagaagagccgcctacgaggacagcgccctgcccagcatcaacgccctgctgcaggccgaggtgctgagcagacagatcaccgcccccgtgagcggcatcaacggcgacatcagagccaagaagatcgccagcatcgccgacgtgtgcgagagcatgaaggagcagctgctggtgctggtggagtgggccaagtacatccccgccttctgcgagctgcccctggacgaccaggtggccctgctgagagcccacgccggcgagcacctgctgctgggcgccaccaagagaagcatggtgttcaaggacgtgctgctgctgggcaacgactacatcgtgcccagacactgccccgagctggccgagatgagcagagtgagcatcagaatcctggacgagctggtgctgcccttccaggagctgcagatcgacgacaacgagtacgcctacctgaaggccatcatcttcttcgaccccgacgccaagggcctgagcgaccccggcaagatcaagagactgagagcccaggtgcaggtgagcctggaggactacatcaacgacagacagtacgacagcagaggcagattcggcgagctgctgctgctgctgcccaccctgcagagcatcacctggcagatgatcgagcagatccagttcatcaagctgttcggcatggccaagatcgacaacctgctgcaggagatgctgctgggcggcgcccccagcgacgccccccacgcccaccaccccctgcacccccacctgatgcaggagcacatgggcaccaacgtgatcgtggccaacaccatgcccacccacctgagcaacggccagatgtgcgagtggcccagacccagaggccaggccgccgcccccgaggccccccagcccgccccccccggcggcagcggcagcgagccctacaagctgctgcccggcgccgtggccaccatcgtgagacccctgagcgccatcccccagcccaccatcaccaagcaggaggtgatctgaggactagttataagactgactagcccgatgggcctcccaacgggccctcctcccctccttgcaccgagattaataaaaaaaaaaaaaaaaaaaaaaaaaaaaaaaaaaaaaaaaaaaaaaaaaaaaaaaaaaaaaaaatgcatcccccccccccccccccccccccccccccccaaaggctcttttcagagccaccagaatt

SEQ ID NO: 2694 - RNA, 1531 nt, synthetic construct
  misc_feature 1..1531: note = mRNA i-3 (A64-N5-C30-hSL-N5) (opt4) from Homo sapiens__NP_000448.3__HNF4A(39-474)(K106R_K108R_K126R_K127R _S142A_S143A_S148A_S167A_S313A_S378A_T429A_T432A_S436A_K458 R)
  source 1..1531: mol_type = other RNA
aggagaaagcttaccatggacaccagccccagcgagggcaccaacctgaacgcccccaacagcctgggcgtgagcgccctgtgcgccatctgcggcgacagagccaccggcaagcactacggcgccagcagctgcgacggctgcaagggcttcttcagaagaagcgtgagaaagaaccacatgtacagctgcagattcagcagacagtgcgtggtggacagagacagaagaaaccagtgcagatactgcagactgaagaagtgcttcagagccggcatgagaagagaggccgtgcagaacgagagagacagaatcagcaccagaagagccgcctacgaggacagcgccctgcccagcatcaacgccctgctgcaggccgaggtgctgagcagacagatcaccgcccccgtgagcggcatcaacggcgacatcagagccaagaagatcgccagcatcgccgacgtgtgcgagagcatgaaggagcagctgctggtgctggtggagtgggccaagtacatccccgccttctgcgagctgcccctggacgaccaggtggccctgctgagagcccacgccggcgagcacctgctgctgggcgccaccaagagaagcatggtgttcaaggacgtgctgctgctgggcaacgactacatcgtgcccagacactgccccgagctggccgagatgagcagagtgagcatcagaatcctggacgagctggtgctgcccttccaggagctgcagatcgacgacaacgagtacgcctacctgaaggccatcatcttcttcgaccccgacgccaagggcctgagcgaccccggcaagatcaagagactgagagcccaggtgcaggtgagcctggaggactacatcaacgacagacagtacgacagcagaggcagattcggcgagctgctgctgctgctgcccaccctgcagagcatcacctggcagatgatcgagcagatccagttcatcaagctgttcggcatggccaagatcgacaacctgctgcaggagatgctgctgggcggcgcccccagcgacgccccccacgcccaccaccccctgcacccccacctgatgcaggagcacatgggcaccaacgtgatcgtggccaacaccatgcccacccacctgagcaacggccagatgtgcgagtggcccagacccagaggccaggccgccgcccccgaggccccccagcccgccccccccggcggcagcggcagcgagccctacaagctgctgcccggcgccgtggccaccatcgtgagacccctgagcgccatcccccagcccaccatcaccaagcaggaggtgatctgaggactagttataagactgactagcccgatgggcctcccaacgggccctcctcccctccttgcaccgagattaataaaaaaaaaaaaaaaaaaaaaaaaaaaaaaaaaaaaaaaaaaaaaaaaaaaaaaaaaaaaaaaatgcatcccccccccccccccccccccccccccccccaaaggctcttttcagagccaccagaatt

SEQ ID NO: 2695 - RNA, 1531 nt, synthetic construct
  misc_feature 1..1531: note = mRNA i-3 (A64-N5-C30-hSL-N5) (opt4) from Homo sapiens__NP_000448.3__HNF4A(39-474)(S142A_S143A_S148A_T166A _S167A_S313A_S378A_T429A_T432A_S436A_K458R)
  source 1..1531: mol_type = other RNA
aggagaaagcttaccatggacaccagccccagcgagggcaccaacctgaacgcccccaacagcctgggcgtgagcgccctgtgcgccatctgcggcgacagagccaccggcaagcactacggcgccagcagctgcgacggctgcaagggcttcttcagaagaagcgtgagaaagaaccacatgtacagctgcagattcagcagacagtgcgtggtggacaaggacaagagaaaccagtgcagatactgcagactgaagaagtgcttcagagccggcatgaagaaggaggccgtgcagaacgagagagacagaatcagcaccagaagagccgcctacgaggacagcgccctgcccagcatcaacgccctgctgcaggccgaggtgctgagcagacagatcgccgcccccgtgagcggcatcaacggcgacatcagagccaagaagatcgccagcatcgccgacgtgtgcgagagcatgaaggagcagctgctggtgctggtggagtgggccaagtacatccccgccttctgcgagctgcccctggacgaccaggtggccctgctgagagcccacgccggcgagcacctgctgctgggcgccaccaagagaagcatggtgttcaaggacgtgctgctgctgggcaacgactacatcgtgcccagacactgccccgagctggccgagatgagcagagtgagcatcagaatcctggacgagctggtgctgcccttccaggagctgcagatcgacgacaacgagtacgcctacctgaaggccatcatcttcttcgaccccgacgccaagggcctgagcgaccccggcaagatcaagagactgagagcccaggtgcaggtgagcctggaggactacatcaacgacagacagtacgacagcagaggcagattcggcgagctgctgctgctgctgcccaccctgcagagcatcacctggcagatgatcgagcagatccagttcatcaagctgttcggcatggccaagatcgacaacctgctgcaggagatgctgctgggcggcgcccccagcgacgccccccacgcccaccaccccctgcacccccacctgatgcaggagcacatgggcaccaacgtgatcgtggccaacaccatgcccacccacctgagcaacggccagatgtgcgagtggcccagacccagaggccaggccgccgcccccgaggccccccagcccgccccccccggcggcagcggcagcgagccctacaagctgctgcccggcgccgtggccaccatcgtgagacccctgagcgccatcccccagcccaccatcaccaagcaggaggtgatctgaggactagttataagactgactagcccgatgggcctcccaacgggccctcctcccctccttgcaccgagattaataaaaaaaaaaaaaaaaaaaaaaaaaaaaaaaaaaaaaaaaaaaaaaaaaaaaaaaaaaaaaaaatgcatcccccccccccccccccccccccccccccccaaaggctcttttcagagccaccagaatt

SEQ ID NO: 2696 - RNA, 1531 nt, synthetic construct
  misc_feature 1..1531: note = mRNA i-3 (A64-N5-C30-hSL-N5) (opt4) from Homo sapiens__NP_000448.3__HNF4A(39-474)(S87A_S142A_S143A_S148A_ T166A_S167A_S313A_S378A_T429A_T432A_S436A_K458R)
  source 1..1531: mol_type = other RNA
aggagaaagcttaccatggacaccagccccagcgagggcaccaacctgaacgcccccaacagcctgggcgtgagcgccctgtgcgccatctgcggcgacagagccaccggcaagcactacggcgccagcagctgcgacggctgcaagggcttcttcagaagagccgtgagaaagaaccacatgtacagctgcagattcagcagacagtgcgtggtggacaaggacaagagaaaccagtgcagatactgcagactgaagaagtgcttcagagccggcatgaagaaggaggccgtgcagaacgagagagacagaatcagcaccagaagagccgcctacgaggacagcgccctgcccagcatcaacgccctgctgcaggccgaggtgctgagcagacagatcgccgcccccgtgagcggcatcaacggcgacatcagagccaagaagatcgccagcatcgccgacgtgtgcgagagcatgaaggagcagctgctggtgctggtggagtgggccaagtacatccccgccttctgcgagctgcccctggacgaccaggtggccctgctgagagcccacgccggcgagcacctgctgctgggcgccaccaagagaagcatggtgttcaaggacgtgctgctgctgggcaacgactacatcgtgcccagacactgccccgagctggccgagatgagcagagtgagcatcagaatcctggacgagctggtgctgcccttccaggagctgcagatcgacgacaacgagtacgcctacctgaaggccatcatcttcttcgaccccgacgccaagggcctgagcgaccccggcaagatcaagagactgagagcccaggtgcaggtgagcctggaggactacatcaacgacagacagtacgacagcagaggcagattcggcgagctgctgctgctgctgcccaccctgcagagcatcacctggcagatgatcgagcagatccagttcatcaagctgttcggcatggccaagatcgacaacctgctgcaggagatgctgctgggcggcgcccccagcgacgccccccacgcccaccaccccctgcacccccacctgatgcaggagcacatgggcaccaacgtgatcgtggccaacaccatgcccacccacctgagcaacggccagatgtgcgagtggcccagacccagaggccaggccgccgcccccgaggccccccagcccgccccccccggcggcagcggcagcgagccctacaagctgctgcccggcgccgtggccaccatcgtgagacccctgagcgccatcccccagcccaccatcaccaagcaggaggtgatctgaggactagttataagactgactagcccgatgggcctcccaacgggccctcctcccctccttgcaccgagattaataaaaaaaaaaaaaaaaaaaaaaaaaaaaaaaaaaaaaaaaaaaaaaaaaaaaaaaaaaaaaaaatgcatcccccccccccccccccccccccccccccccaaaggctcttttcagagccaccagaatt

SEQ ID NO: 2697 - RNA, 1531 nt, synthetic construct
  misc_feature 1..1531: note = mRNA i-3 (A64-N5-C30-hSL-N5) (opt4) from Homo sapiens__NP_000448.3__HNF4A(39-474)(S87A_K106R_K108R_K126R_ K127R_S142A_S143A_S148A_T166A_S167A_S313A_S378A_T429A_T432A _S436A_K458R)
  source 1..1531: mol_type = other RNA
aggagaaagcttaccatggacaccagccccagcgagggcaccaacctgaacgcccccaacagcctgggcgtgagcgccctgtgcgccatctgcggcgacagagccaccggcaagcactacggcgccagcagctgcgacggctgcaagggcttcttcagaagagccgtgagaaagaaccacatgtacagctgcagattcagcagacagtgcgtggtggacagagacagaagaaaccagtgcagatactgcagactgaagaagtgcttcagagccggcatgagaagagaggccgtgcagaacgagagagacagaatcagcaccagaagagccgcctacgaggacagcgccctgcccagcatcaacgccctgctgcaggccgaggtgctgagcagacagatcgccgcccccgtgagcggcatcaacggcgacatcagagccaagaagatcgccagcatcgccgacgtgtgcgagagcatgaaggagcagctgctggtgctggtggagtgggccaagtacatccccgccttctgcgagctgcccctggacgaccaggtggccctgctgagagcccacgccggcgagcacctgctgctgggcgccaccaagagaagcatggtgttcaaggacgtgctgctgctgggcaacgactacatcgtgcccagacactgccccgagctggccgagatgagcagagtgagcatcagaatcctggacgagctggtgctgcccttccaggagctgcagatcgacgacaacgagtacgcctacctgaaggccatcatcttcttcgaccccgacgccaagggcctgagcgaccccggcaagatcaagagactgagagcccaggtgcaggtgagcctggaggactacatcaacgacagacagtacgacagcagaggcagattcggcgagctgctgctgctgctgcccaccctgcagagcatcacctggcagatgatcgagcagatccagttcatcaagctgttcggcatggccaagatcgacaacctgctgcaggagatgctgctgggcggcgcccccagcgacgccccccacgcccaccaccccctgcacccccacctgatgcaggagcacatgggcaccaacgtgatcgtggccaacaccatgcccacccacctgagcaacggccagatgtgcgagtggcccagacccagaggccaggccgccgcccccgaggccccccagcccgccccccccggcggcagcggcagcgagccctacaagctgctgcccggcgccgtggccaccatcgtgagacccctgagcgccatcccccagcccaccatcaccaagcaggaggtgatctgaggactagttataagactgactagcccgatgggcctcccaacgggccctcctcccctccttgcaccgagattaataaaaaaaaaaaaaaaaaaaaaaaaaaaaaaaaaaaaaaaaaaaaaaaaaaaaaaaaaaaaaaaatgcatcccccccccccccccccccccccccccccccaaaggctcttttcagagccaccagaatt

SEQ ID NO: 2698 - RNA, 1531 nt, synthetic construct
  misc_feature 1..1531: note = mRNA i-3 (A64-N5-C30-hSL-N5) (opt4) from Homo sapiens__NP_000448.3__HNF4A(39-474)(S87A_K106R_K108R_K126R_ K127R)
  source 1..1531: mol_type = other RNA
aggagaaagcttaccatggacaccagccccagcgagggcaccaacctgaacgcccccaacagcctgggcgtgagcgccctgtgcgccatctgcggcgacagagccaccggcaagcactacggcgccagcagctgcgacggctgcaagggcttcttcagaagagccgtgagaaagaaccacatgtacagctgcagattcagcagacagtgcgtggtggacagagacagaagaaaccagtgcagatactgcagactgaagaagtgcttcagagccggcatgagaagagaggccgtgcagaacgagagagacagaatcagcaccagaagaagcagctacgaggacagcagcctgcccagcatcaacgccctgctgcaggccgaggtgctgagcagacagatcaccagccccgtgagcggcatcaacggcgacatcagagccaagaagatcgccagcatcgccgacgtgtgcgagagcatgaaggagcagctgctggtgctggtggagtgggccaagtacatccccgccttctgcgagctgcccctggacgaccaggtggccctgctgagagcccacgccggcgagcacctgctgctgggcgccaccaagagaagcatggtgttcaaggacgtgctgctgctgggcaacgactacatcgtgcccagacactgccccgagctggccgagatgagcagagtgagcatcagaatcctggacgagctggtgctgcccttccaggagctgcagatcgacgacaacgagtacgcctacctgaaggccatcatcttcttcgaccccgacgccaagggcctgagcgaccccggcaagatcaagagactgagaagccaggtgcaggtgagcctggaggactacatcaacgacagacagtacgacagcagaggcagattcggcgagctgctgctgctgctgcccaccctgcagagcatcacctggcagatgatcgagcagatccagttcatcaagctgttcggcatggccaagatcgacaacctgctgcaggagatgctgctgggcggcagccccagcgacgccccccacgcccaccaccccctgcacccccacctgatgcaggagcacatgggcaccaacgtgatcgtggccaacaccatgcccacccacctgagcaacggccagatgtgcgagtggcccagacccagaggccaggccgccacccccgagaccccccagcccagcccccccggcggcagcggcagcgagccctacaagctgctgcccggcgccgtggccaccatcgtgaagcccctgagcgccatcccccagcccaccatcaccaagcaggaggtgatctgaggactagttataagactgactagcccgatgggcctcccaacgggccctcctcccctccttgcaccgagattaataaaaaaaaaaaaaaaaaaaaaaaaaaaaaaaaaaaaaaaaaaaaaaaaaaaaaaaaaaaaaaaatgcatcccccccccccccccccccccccccccccccaaaggctcttttcagagccaccagaatt

SEQ ID NO: 2699 - RNA, 1531 nt, synthetic construct
  misc_feature 1..1531: note = mRNA i-3 (A64-N5-C30-hSL-N5) (opt4) from Homo sapiens__NP_000448.3__HNF4A(39-474)(S87A_K106R_K108R_K126R_ K127R_S142A_S143A_S148A_T166A_S167A_S313A_S378A_T429A_T432A _S436A_K458R_S461A)
  source 1..1531: mol_type = other RNA
aggagaaagcttaccatggacaccagccccagcgagggcaccaacctgaacgcccccaacagcctgggcgtgagcgccctgtgcgccatctgcggcgacagagccaccggcaagcactacggcgccagcagctgcgacggctgcaagggcttcttcagaagagccgtgagaaagaaccacatgtacagctgcagattcagcagacagtgcgtggtggacagagacagaagaaaccagtgcagatactgcagactgaagaagtgcttcagagccggcatgagaagagaggccgtgcagaacgagagagacagaatcagcaccagaagagccgcctacgaggacagcgccctgcccagcatcaacgccctgctgcaggccgaggtgctgagcagacagatcgccgcccccgtgagcggcatcaacggcgacatcagagccaagaagatcgccagcatcgccgacgtgtgcgagagcatgaaggagcagctgctggtgctggtggagtgggccaagtacatccccgccttctgcgagctgcccctggacgaccaggtggccctgctgagagcccacgccggcgagcacctgctgctgggcgccaccaagagaagcatggtgttcaaggacgtgctgctgctgggcaacgactacatcgtgcccagacactgccccgagctggccgagatgagcagagtgagcatcagaatcctggacgagctggtgctgcccttccaggagctgcagatcgacgacaacgagtacgcctacctgaaggccatcatcttcttcgaccccgacgccaagggcctgagcgaccccggcaagatcaagagactgagagcccaggtgcaggtgagcctggaggactacatcaacgacagacagtacgacagcagaggcagattcggcgagctgctgctgctgctgcccaccctgcagagcatcacctggcagatgatcgagcagatccagttcatcaagctgttcggcatggccaagatcgacaacctgctgcaggagatgctgctgggcggcgcccccagcgacgccccccacgcccaccaccccctgcacccccacctgatgcaggagcacatgggcaccaacgtgatcgtggccaacaccatgcccacccacctgagcaacggccagatgtgcgagtggcccagacccagaggccaggccgccgcccccgaggccccccagcccgccccccccggcggcagcggcagcgagccctacaagctgctgcccggcgccgtggccaccatcgtgagacccctggccgccatcccccagcccaccatcaccaagcaggaggtgatctgaggactagttataagactgactagcccgatgggcctcccaacgggccctcctcccctccttgcaccgagattaataaaaaaaaaaaaaaaaaaaaaaaaaaaaaaaaaaaaaaaaaaaaaaaaaaaaaaaaaaaaaaaatgcatcccccccccccccccccccccccccccccccaaaggctcttttcagagccaccagaatt

SEQ ID NO: 2700 - RNA, 1531 nt, synthetic construct
  misc_feature 1..1531: note = mRNA i-3 (A64-N5-C30-hSL-N5) (opt4) from Homo sapiens__NP_000448.3__HNF4A(39-474)(S87A_K106R_K108R_K126R_ K127R_S142A_S143A_S148A_T166A_S167A_S313A_S378A_T429A_T432A _S436A_K458R_S461E)
  source 1..1531: mol_type = other RNA
aggagaaagcttaccatggacaccagccccagcgagggcaccaacctgaacgcccccaacagcctgggcgtgagcgccctgtgcgccatctgcggcgacagagccaccggcaagcactacggcgccagcagctgcgacggctgcaagggcttcttcagaagagccgtgagaaagaaccacatgtacagctgcagattcagcagacagtgcgtggtggacagagacagaagaaaccagtgcagatactgcagactgaagaagtgcttcagagccggcatgagaagagaggccgtgcagaacgagagagacagaatcagcaccagaagagccgcctacgaggacagcgccctgcccagcatcaacgccctgctgcaggccgaggtgctgagcagacagatcgccgcccccgtgagcggcatcaacggcgacatcagagccaagaagatcgccagcatcgccgacgtgtgcgagagcatgaaggagcagctgctggtgctggtggagtgggccaagtacatccccgccttctgcgagctgcccctggacgaccaggtggccctgctgagagcccacgccggcgagcacctgctgctgggcgccaccaagagaagcatggtgttcaaggacgtgctgctgctgggcaacgactacatcgtgcccagacactgccccgagctggccgagatgagcagagtgagcatcagaatcctggacgagctggtgctgcccttccaggagctgcagatcgacgacaacgagtacgcctacctgaaggccatcatcttcttcgaccccgacgccaagggcctgagcgaccccggcaagatcaagagactgagagcccaggtgcaggtgagcctggaggactacatcaacgacagacagtacgacagcagaggcagattcggcgagctgctgctgctgctgcccaccctgcagagcatcacctggcagatgatcgagcagatccagttcatcaagctgttcggcatggccaagatcgacaacctgctgcaggagatgctgctgggcggcgcccccagcgacgccccccacgcccaccaccccctgcacccccacctgatgcaggagcacatgggcaccaacgtgatcgtggccaacaccatgcccacccacctgagcaacggccagatgtgcgagtggcccagacccagaggccaggccgccgcccccgaggccccccagcccgccccccccggcggcagcggcagcgagccctacaagctgctgcccggcgccgtggccaccatcgtgagacccctggaggccatcccccagcccaccatcaccaagcaggaggtgatctgaggactagttataagactgactagcccgatgggcctcccaacgggccctcctcccctccttgcaccgagattaataaaaaaaaaaaaaaaaaaaaaaaaaaaaaaaaaaaaaaaaaaaaaaaaaaaaaaaaaaaaaaaatgcatcccccccccccccccccccccccccccccccaaaggctcttttcagagccaccagaatt

SEQ ID NO: 2701 - RNA, 1531 nt, synthetic construct
  misc_feature 1..1531: note = mRNA i-3 (A64-N5-C30-hSL-N5) (opt4) from Homo sapiens__NP_000448.3__HNF4A(39-474)(S87A_K106R_K108R_K126R_ K127R_S142A_S143A_S148E_T166A_S167E_S313A_S378E_T429E_T432E _S436E_K458R_S461E)
  source 1..1531: mol_type = other RNA
aggagaaagcttaccatggacaccagccccagcgagggcaccaacctgaacgcccccaacagcctgggcgtgagcgccctgtgcgccatctgcggcgacagagccaccggcaagcactacggcgccagcagctgcgacggctgcaagggcttcttcagaagagccgtgagaaagaaccacatgtacagctgcagattcagcagacagtgcgtggtggacagagacagaagaaaccagtgcagatactgcagactgaagaagtgcttcagagccggcatgagaagagaggccgtgcagaacgagagagacagaatcagcaccagaagagccgcctacgaggacagcgagctgcccagcatcaacgccctgctgcaggccgaggtgctgagcagacagatcgccgagcccgtgagcggcatcaacggcgacatcagagccaagaagatcgccagcatcgccgacgtgtgcgagagcatgaaggagcagctgctggtgctggtggagtgggccaagtacatccccgccttctgcgagctgcccctggacgaccaggtggccctgctgagagcccacgccggcgagcacctgctgctgggcgccaccaagagaagcatggtgttcaaggacgtgctgctgctgggcaacgactacatcgtgcccagacactgccccgagctggccgagatgagcagagtgagcatcagaatcctggacgagctggtgctgcccttccaggagctgcagatcgacgacaacgagtacgcctacctgaaggccatcatcttcttcgaccccgacgccaagggcctgagcgaccccggcaagatcaagagactgagagcccaggtgcaggtgagcctggaggactacatcaacgacagacagtacgacagcagaggcagattcggcgagctgctgctgctgctgcccaccctgcagagcatcacctggcagatgatcgagcagatccagttcatcaagctgttcggcatggccaagatcgacaacctgctgcaggagatgctgctgggcggcgagcccagcgacgccccccacgcccaccaccccctgcacccccacctgatgcaggagcacatgggcaccaacgtgatcgtggccaacaccatgcccacccacctgagcaacggccagatgtgcgagtggcccagacccagaggccaggccgccgagcccgaggagccccagcccgagccccccggcggcagcggcagcgagccctacaagctgctgcccggcgccgtggccaccatcgtgagacccctggaggccatcccccagcccaccatcaccaagcaggaggtgatctgaggactagttataagactgactagcccgatgggcctcccaacgggccctcctcccctccttgcaccgagattaataaaaaaaaaaaaaaaaaaaaaaaaaaaaaaaaaaaaaaaaaaaaaaaaaaaaaaaaaaaaaaaatgcatcccccccccccccccccccccccccccccccaaaggctcttttcagagccaccagaatt

SEQ ID NO: 2702 - RNA, 1531 nt, synthetic construct
  misc_feature 1..1531: note = mRNA i-3 (A64-N5-C30-hSL-N5) (opt4) from Homo sapiens__NP_000448.3__HNF4A(39-474)(S87A_K106R_K108R_K126R_ K127R_S142A_S143A_S148A_T166A_S167A_K179R_K180R_S313A_S378A _T429A_T432A_S436A_K458R_S461E)
  source 1..1531: mol_type = other RNA
aggagaaagcttaccatggacaccagccccagcgagggcaccaacctgaacgcccccaacagcctgggcgtgagcgccctgtgcgccatctgcggcgacagagccaccggcaagcactacggcgccagcagctgcgacggctgcaagggcttcttcagaagagccgtgagaaagaaccacatgtacagctgcagattcagcagacagtgcgtggtggacagagacagaagaaaccagtgcagatactgcagactgaagaagtgcttcagagccggcatgagaagagaggccgtgcagaacgagagagacagaatcagcaccagaagagccgcctacgaggacagcgccctgcccagcatcaacgccctgctgcaggccgaggtgctgagcagacagatcgccgcccccgtgagcggcatcaacggcgacatcagagccagaagaatcgccagcatcgccgacgtgtgcgagagcatgaaggagcagctgctggtgctggtggagtgggccaagtacatccccgccttctgcgagctgcccctggacgaccaggtggccctgctgagagcccacgccggcgagcacctgctgctgggcgccaccaagagaagcatggtgttcaaggacgtgctgctgctgggcaacgactacatcgtgcccagacactgccccgagctggccgagatgagcagagtgagcatcagaatcctggacgagctggtgctgcccttccaggagctgcagatcgacgacaacgagtacgcctacctgaaggccatcatcttcttcgaccccgacgccaagggcctgagcgaccccggcaagatcaagagactgagagcccaggtgcaggtgagcctggaggactacatcaacgacagacagtacgacagcagaggcagattcggcgagctgctgctgctgctgcccaccctgcagagcatcacctggcagatgatcgagcagatccagttcatcaagctgttcggcatggccaagatcgacaacctgctgcaggagatgctgctgggcggcgcccccagcgacgccccccacgcccaccaccccctgcacccccacctgatgcaggagcacatgggcaccaacgtgatcgtggccaacaccatgcccacccacctgagcaacggccagatgtgcgagtggcccagacccagaggccaggccgccgcccccgaggccccccagcccgccccccccggcggcagcggcagcgagccctacaagctgctgcccggcgccgtggccaccatcgtgagacccctggaggccatcccccagcccaccatcaccaagcaggaggtgatctgaggactagttataagactgactagcccgatgggcctcccaacgggccctcctcccctccttgcaccgagattaataaaaaaaaaaaaaaaaaaaaaaaaaaaaaaaaaaaaaaaaaaaaaaaaaaaaaaaaaaaaaaaatgcatcccccccccccccccccccccccccccccccaaaggctcttttcagagccaccagaatt

SEQ ID NO: 2703 - RNA, 1531 nt, synthetic construct
  misc_feature 1..1531: note = mRNA i-3 (A64-N5-C30-hSL-N5) (opt4) from Homo sapiens__NP_000448.3__HNF4A(39-474)(S87A_K106R_K108R_K126R_ K127R_S142A_S143A_S148A_T166A_S167A_K300R_K307R_K309R_S313A _S378A_T429A_T432A_S436A_K458R_S461E)
  source 1..1531: mol_type = other RNA
aggagaaagcttaccatggacaccagccccagcgagggcaccaacctgaacgcccccaacagcctgggcgtgagcgccctgtgcgccatctgcggcgacagagccaccggcaagcactacggcgccagcagctgcgacggctgcaagggcttcttcagaagagccgtgagaaagaaccacatgtacagctgcagattcagcagacagtgcgtggtggacagagacagaagaaaccagtgcagatactgcagactgaagaagtgcttcagagccggcatgagaagagaggccgtgcagaacgagagagacagaatcagcaccagaagagccgcctacgaggacagcgccctgcccagcatcaacgccctgctgcaggccgaggtgctgagcagacagatcgccgcccccgtgagcggcatcaacggcgacatcagagccaagaagatcgccagcatcgccgacgtgtgcgagagcatgaaggagcagctgctggtgctggtggagtgggccaagtacatccccgccttctgcgagctgcccctggacgaccaggtggccctgctgagagcccacgccggcgagcacctgctgctgggcgccaccaagagaagcatggtgttcaaggacgtgctgctgctgggcaacgactacatcgtgcccagacactgccccgagctggccgagatgagcagagtgagcatcagaatcctggacgagctggtgctgcccttccaggagctgcagatcgacgacaacgagtacgcctacctgaaggccatcatcttcttcgaccccgacgccagaggcctgagcgaccccggcagaatcagaagactgagagcccaggtgcaggtgagcctggaggactacatcaacgacagacagtacgacagcagaggcagattcggcgagctgctgctgctgctgcccaccctgcagagcatcacctggcagatgatcgagcagatccagttcatcaagctgttcggcatggccaagatcgacaacctgctgcaggagatgctgctgggcggcgcccccagcgacgccccccacgcccaccaccccctgcacccccacctgatgcaggagcacatgggcaccaacgtgatcgtggccaacaccatgcccacccacctgagcaacggccagatgtgcgagtggcccagacccagaggccaggccgccgcccccgaggccccccagcccgccccccccggcggcagcggcagcgagccctacaagctgctgcccggcgccgtggccaccatcgtgagacccctggaggccatcccccagcccaccatcaccaagcaggaggtgatctgaggactagttataagactgactagcccgatgggcctcccaacgggccctcctcccctccttgcaccgagattaataaaaaaaaaaaaaaaaaaaaaaaaaaaaaaaaaaaaaaaaaaaaaaaaaaaaaaaaaaaaaaaatgcatcccccccccccccccccccccccccccccccaaaggctcttttcagagccaccagaatt

SEQ ID NO: 2704 - RNA, 1531 nt, synthetic construct
  misc_feature 1..1531: note = mRNA i-3 (A64-N5-C30-hSL-N5) (opt4) from Homo sapiens__NP_000448.3__HNF4A(39-474)(S87A_K106R_K108R_K126R_ K127R_S142A_S143A_S148A_T166A_S167A_S313A_S378A_T429A_T432A _S436A_K447R_K458R_S461E_K470R)
  source 1..1531: mol_type = other RNA
aggagaaagcttaccatggacaccagccccagcgagggcaccaacctgaacgcccccaacagcctgggcgtgagcgccctgtgcgccatctgcggcgacagagccaccggcaagcactacggcgccagcagctgcgacggctgcaagggcttcttcagaagagccgtgagaaagaaccacatgtacagctgcagattcagcagacagtgcgtggtggacagagacagaagaaaccagtgcagatactgcagactgaagaagtgcttcagagccggcatgagaagagaggccgtgcagaacgagagagacagaatcagcaccagaagagccgcctacgaggacagcgccctgcccagcatcaacgccctgctgcaggccgaggtgctgagcagacagatcgccgcccccgtgagcggcatcaacggcgacatcagagccaagaagatcgccagcatcgccgacgtgtgcgagagcatgaaggagcagctgctggtgctggtggagtgggccaagtacatccccgccttctgcgagctgcccctggacgaccaggtggccctgctgagagcccacgccggcgagcacctgctgctgggcgccaccaagagaagcatggtgttcaaggacgtgctgctgctgggcaacgactacatcgtgcccagacactgccccgagctggccgagatgagcagagtgagcatcagaatcctggacgagctggtgctgcccttccaggagctgcagatcgacgacaacgagtacgcctacctgaaggccatcatcttcttcgaccccgacgccaagggcctgagcgaccccggcaagatcaagagactgagagcccaggtgcaggtgagcctggaggactacatcaacgacagacagtacgacagcagaggcagattcggcgagctgctgctgctgctgcccaccctgcagagcatcacctggcagatgatcgagcagatccagttcatcaagctgttcggcatggccaagatcgacaacctgctgcaggagatgctgctgggcggcgcccccagcgacgccccccacgcccaccaccccctgcacccccacctgatgcaggagcacatgggcaccaacgtgatcgtggccaacaccatgcccacccacctgagcaacggccagatgtgcgagtggcccagacccagaggccaggccgccgcccccgaggccccccagcccgccccccccggcggcagcggcagcgagccctacagactgctgcccggcgccgtggccaccatcgtgagacccctggaggccatcccccagcccaccatcaccagacaggaggtgatctgaggactagttataagactgactagcccgatgggcctcccaacgggccctcctcccctccttgcaccgagattaataaaaaaaaaaaaaaaaaaaaaaaaaaaaaaaaaaaaaaaaaaaaaaaaaaaaaaaaaaaaaaaatgcatcccccccccccccccccccccccccccccccaaaggctcttttcagagccaccagaatt

SEQ ID NO: 2705 - RNA, 1531 nt, synthetic construct
  misc_feature 1..1531: note = mRNA i-3 (A64-N5-C30-hSL-N5) (opt4) from Homo sapiens__NP_000448.3__HNF4A(39-474)(S87A_K106R_K108R_K126R_ K127R_S142A_S143A_S148A_T166A_S167A_K179R_K180R_K234R_K300R _K307R_K309R_S313A_S378A_T429A_T432A_S436A_K447R_K458R_S461 E_K470R)
  source 1..1531: mol_type = other RNA
aggagaaagcttaccatggacaccagccccagcgagggcaccaacctgaacgcccccaacagcctgggcgtgagcgccctgtgcgccatctgcggcgacagagccaccggcaagcactacggcgccagcagctgcgacggctgcaagggcttcttcagaagagccgtgagaaagaaccacatgtacagctgcagattcagcagacagtgcgtggtggacagagacagaagaaaccagtgcagatactgcagactgaagaagtgcttcagagccggcatgagaagagaggccgtgcagaacgagagagacagaatcagcaccagaagagccgcctacgaggacagcgccctgcccagcatcaacgccctgctgcaggccgaggtgctgagcagacagatcgccgcccccgtgagcggcatcaacggcgacatcagagccagaagaatcgccagcatcgccgacgtgtgcgagagcatgaaggagcagctgctggtgctggtggagtgggccaagtacatccccgccttctgcgagctgcccctggacgaccaggtggccctgctgagagcccacgccggcgagcacctgctgctgggcgccaccagaagaagcatggtgttcaaggacgtgctgctgctgggcaacgactacatcgtgcccagacactgccccgagctggccgagatgagcagagtgagcatcagaatcctggacgagctggtgctgcccttccaggagctgcagatcgacgacaacgagtacgcctacctgaaggccatcatcttcttcgaccccgacgccagaggcctgagcgaccccggcagaatcagaagactgagagcccaggtgcaggtgagcctggaggactacatcaacgacagacagtacgacagcagaggcagattcggcgagctgctgctgctgctgcccaccctgcagagcatcacctggcagatgatcgagcagatccagttcatcaagctgttcggcatggccaagatcgacaacctgctgcaggagatgctgctgggcggcgcccccagcgacgccccccacgcccaccaccccctgcacccccacctgatgcaggagcacatgggcaccaacgtgatcgtggccaacaccatgcccacccacctgagcaacggccagatgtgcgagtggcccagacccagaggccaggccgccgcccccgaggccccccagcccgccccccccggcggcagcggcagcgagccctacagactgctgcccggcgccgtggccaccatcgtgagacccctggaggccatcccccagcccaccatcaccagacaggaggtgatctgaggactagttataagactgactagcccgatgggcctcccaacgggccctcctcccctccttgcaccgagattaataaaaaaaaaaaaaaaaaaaaaaaaaaaaaaaaaaaaaaaaaaaaaaaaaaaaaaaaaaaaaaaatgcatcccccccccccccccccccccccccccccccaaaggctcttttcagagccaccagaatt

SEQ ID NO: 2706 - RNA, 1531 nt, synthetic construct
  misc_feature 1..1531: note = mRNA i-3 (A64-N5-C30-hSL-N5) (opt4) from Homo sapiens__NP_000448.3__HNF4A(39-474)(S87A_S95A_S99A_K106R_K1 08R_K126R_K127R_S142A_S143A_S148A_T166A_S167A_S313A_S378A_T 429A_T432A_S436A_K458R_S461E)
  source 1..1531: mol_type = other RNA
aggagaaagcttaccatggacaccagccccagcgagggcaccaacctgaacgcccccaacagcctgggcgtgagcgccctgtgcgccatctgcggcgacagagccaccggcaagcactacggcgccagcagctgcgacggctgcaagggcttcttcagaagagccgtgagaaagaaccacatgtacgcctgcagattcgccagacagtgcgtggtggacagagacagaagaaaccagtgcagatactgcagactgaagaagtgcttcagagccggcatgagaagagaggccgtgcagaacgagagagacagaatcagcaccagaagagccgcctacgaggacagcgccctgcccagcatcaacgccctgctgcaggccgaggtgctgagcagacagatcgccgcccccgtgagcggcatcaacggcgacatcagagccaagaagatcgccagcatcgccgacgtgtgcgagagcatgaaggagcagctgctggtgctggtggagtgggccaagtacatccccgccttctgcgagctgcccctggacgaccaggtggccctgctgagagcccacgccggcgagcacctgctgctgggcgccaccaagagaagcatggtgttcaaggacgtgctgctgctgggcaacgactacatcgtgcccagacactgccccgagctggccgagatgagcagagtgagcatcagaatcctggacgagctggtgctgcccttccaggagctgcagatcgacgacaacgagtacgcctacctgaaggccatcatcttcttcgaccccgacgccaagggcctgagcgaccccggcaagatcaagagactgagagcccaggtgcaggtgagcctggaggactacatcaacgacagacagtacgacagcagaggcagattcggcgagctgctgctgctgctgcccaccctgcagagcatcacctggcagatgatcgagcagatccagttcatcaagctgttcggcatggccaagatcgacaacctgctgcaggagatgctgctgggcggcgcccccagcgacgccccccacgcccaccaccccctgcacccccacctgatgcaggagcacatgggcaccaacgtgatcgtggccaacaccatgcccacccacctgagcaacggccagatgtgcgagtggcccagacccagaggccaggccgccgcccccgaggccccccagcccgccccccccggcggcagcggcagcgagccctacaagctgctgcccggcgccgtggccaccatcgtgagacccctggaggccatcccccagcccaccatcaccaagcaggaggtgatctgaggactagttataagactgactagcccgatgggcctcccaacgggccctcctcccctccttgcaccgagattaataaaaaaaaaaaaaaaaaaaaaaaaaaaaaaaaaaaaaaaaaaaaaaaaaaaaaaaaaaaaaaaatgcatcccccccccccccccccccccccccccccccaaaggctcttttcagagccaccagaatt

SEQ ID NO: 2707 - RNA, 1531 nt, synthetic construct
  misc_feature 1..1531: note = mRNA i-3 (A64-N5-C30-hSL-N5) (opt4) from Homo sapiens__NP_000448.3__HNF4A(39-474)(S87A_K106R_K108R_K126R_ K127R_S138A_T139A_S142A_S143A_S148A_T166A_S167A_S313A_S378A _T429A_T432A_S436A_K458R_S461E)
  source 1..1531: mol_type = other RNA
aggagaaagcttaccatggacaccagccccagcgagggcaccaacctgaacgcccccaacagcctgggcgtgagcgccctgtgcgccatctgcggcgacagagccaccggcaagcactacggcgccagcagctgcgacggctgcaagggcttcttcagaagagccgtgagaaagaaccacatgtacagctgcagattcagcagacagtgcgtggtggacagagacagaagaaaccagtgcagatactgcagactgaagaagtgcttcagagccggcatgagaagagaggccgtgcagaacgagagagacagaatcgccgccagaagagccgcctacgaggacagcgccctgcccagcatcaacgccctgctgcaggccgaggtgctgagcagacagatcgccgcccccgtgagcggcatcaacggcgacatcagagccaagaagatcgccagcatcgccgacgtgtgcgagagcatgaaggagcagctgctggtgctggtggagtgggccaagtacatccccgccttctgcgagctgcccctggacgaccaggtggccctgctgagagcccacgccggcgagcacctgctgctgggcgccaccaagagaagcatggtgttcaaggacgtgctgctgctgggcaacgactacatcgtgcccagacactgccccgagctggccgagatgagcagagtgagcatcagaatcctggacgagctggtgctgcccttccaggagctgcagatcgacgacaacgagtacgcctacctgaaggccatcatcttcttcgaccccgacgccaagggcctgagcgaccccggcaagatcaagagactgagagcccaggtgcaggtgagcctggaggactacatcaacgacagacagtacgacagcagaggcagattcggcgagctgctgctgctgctgcccaccctgcagagcatcacctggcagatgatcgagcagatccagttcatcaagctgttcggcatggccaagatcgacaacctgctgcaggagatgctgctgggcggcgcccccagcgacgccccccacgcccaccaccccctgcacccccacctgatgcaggagcacatgggcaccaacgtgatcgtggccaacaccatgcccacccacctgagcaacggccagatgtgcgagtggcccagacccagaggccaggccgccgcccccgaggccccccagcccgccccccccggcggcagcggcagcgagccctacaagctgctgcccggcgccgtggccaccatcgtgagacccctggaggccatcccccagcccaccatcaccaagcaggaggtgatctgaggactagttataagactgactagcccgatgggcctcccaacgggccctcctcccctccttgcaccgagattaataaaaaaaaaaaaaaaaaaaaaaaaaaaaaaaaaaaaaaaaaaaaaaaaaaaaaaaaaaaaaaaatgcatcccccccccccccccccccccccccccccccaaaggctcttttcagagccaccagaatt

SEQ ID NO: 2708 - RNA, 1531 nt, synthetic construct
  misc_feature 1..1531: note = mRNA i-3 (A64-N5-C30-hSL-N5) (opt4) from Homo sapiens__NP_000448.3__HNF4A(39-474)(S87A_S95A_S99A_K106R_K1 08R_K126R_K127R_S138A_T139A_S142A_S143A_S148A_T166A_S167A_S 313A_S378A_T429A_T432A_S436A_K458R_S461E)
  source 1..1531: mol_type = other RNA
aggagaaagcttaccatggacaccagccccagcgagggcaccaacctgaacgcccccaacagcctgggcgtgagcgccctgtgcgccatctgcggcgacagagccaccggcaagcactacggcgccagcagctgcgacggctgcaagggcttcttcagaagagccgtgagaaagaaccacatgtacgcctgcagattcgccagacagtgcgtggtggacagagacagaagaaaccagtgcagatactgcagactgaagaagtgcttcagagccggcatgagaagagaggccgtgcagaacgagagagacagaatcgccgccagaagagccgcctacgaggacagcgccctgcccagcatcaacgccctgctgcaggccgaggtgctgagcagacagatcgccgcccccgtgagcggcatcaacggcgacatcagagccaagaagatcgccagcatcgccgacgtgtgcgagagcatgaaggagcagctgctggtgctggtggagtgggccaagtacatccccgccttctgcgagctgcccctggacgaccaggtggccctgctgagagcccacgccggcgagcacctgctgctgggcgccaccaagagaagcatggtgttcaaggacgtgctgctgctgggcaacgactacatcgtgcccagacactgccccgagctggccgagatgagcagagtgagcatcagaatcctggacgagctggtgctgcccttccaggagctgcagatcgacgacaacgagtacgcctacctgaaggccatcatcttcttcgaccccgacgccaagggcctgagcgaccccggcaagatcaagagactgagagcccaggtgcaggtgagcctggaggactacatcaacgacagacagtacgacagcagaggcagattcggcgagctgctgctgctgctgcccaccctgcagagcatcacctggcagatgatcgagcagatccagttcatcaagctgttcggcatggccaagatcgacaacctgctgcaggagatgctgctgggcggcgcccccagcgacgccccccacgcccaccaccccctgcacccccacctgatgcaggagcacatgggcaccaacgtgatcgtggccaacaccatgcccacccacctgagcaacggccagatgtgcgagtggcccagacccagaggccaggccgccgcccccgaggccccccagcccgccccccccggcggcagcggcagcgagccctacaagctgctgcccggcgccgtggccaccatcgtgagacccctggaggccatcccccagcccaccatcaccaagcaggaggtgatctgaggactagttataagactgactagcccgatgggcctcccaacgggccctcctcccctccttgcaccgagattaataaaaaaaaaaaaaaaaaaaaaaaaaaaaaaaaaaaaaaaaaaaaaaaaaaaaaaaaaaaaaaaatgcatcccccccccccccccccccccccccccccccaaaggctcttttcagagccaccagaatt

SEQ ID NO: 2709 - RNA, 1531 nt, synthetic construct
  misc_feature 1..1531: note = mRNA i-3 (A64-N5-C30-hSL-N5) (opt5) from Homo sapiens__NP_000448.3__HNF4A(39-474)
  source 1..1531: mol_type = other RNA
aggagaaagcttaccatggacacatctcctagcgaggggaccaacctcaatgctccgaactccctgggagtgtctgccctttgcgccatctgtggcgatcgggctacagggaaacactacggagccagctcctgcgacggctgtaaggggtttttccgcagatctgtgcggaaaaatcatatgtatagctgccgcttttccagacaatgtgtcgtggataaggacaaacggaaccagtgccgctactgtagactgaagaagtgcttccgggctggaatgaaaaaggaagccgttcagaatgagcgcgatagaattagcacccggcgcagctcctatgaagacagctctctcccctccatcaacgcgctgctgcaggccgaggtgctcagcagacaaattacatctcctgtctccggcatcaatggcgatattcgggctaaaaagatcgccagcatcgctgacgtgtgtgagtccatgaaagaacagctgcttgttctggtggagtgggccaagtacattcccgcgttttgcgaactccctctggatgaccaggtcgcccttctgcgcgctcacgccggggagcatctcctgctgggagctaccaagagatctatggtgttcaaagacgtgctcctgcttggcaacgattatatcgtcccccggcactgtcctgagctggccgaaatgagcagagtttccattcgcatcctcgacgagctggtgcttccgtttcaggaactgcaaattgatgacaatgagtacgcctacctcaaggctatcattttctttgatcccgacgcgaaagggctgagcgatcctggaaagatcaaacggctgagatctcaggtgcaggtctccctcgaagactatatcaacgatcgccagtacgacagccggggcagattcggggagctgcttctgctcctgcccacgcttcaatctattacctggcagatgatcgagcagattcaatttatcaagctgttcggaatggccaaaattgataatctcctgcaggaaatgctgctcggcggcagcccttccgacgctccccatgcccaccacccgctgcatcctcaccttatgcaggagcatatggggacaaacgtgatcgttgccaataccatgcccacacacctgtctaacggacagatgtgcgaatggcctcgcccccggggccaagctgccacccccgagacgcctcagccgtctccccctgggggatccggcagcgaaccctataagctcctgcctggggcggtggctacaatcgtcaagcccctgtctgccattccgcagcctaccatcacaaaacaggaggtgatttgaggactagttataagactgactagcccgatgggcctcccaacgggccctcctcccctccttgcaccgagattaataaaaaaaaaaaaaaaaaaaaaaaaaaaaaaaaaaaaaaaaaaaaaaaaaaaaaaaaaaaaaaaatgcatcccccccccccccccccccccccccccccccaaaggctcttttcagagccaccagaatt

SEQ ID NO: 2710 - RNA, 1531 nt, synthetic construct
  misc_feature 1..1531: note = mRNA i-3 (A64-N5-C30-hSL-N5) (opt5) from Homo sapiens__NP_000448.3__HNF4A(39-474)(S313A)
  source 1..1531: mol_type = other RNA
aggagaaagcttaccatggacacatctcctagcgaggggaccaacctcaatgctccgaactccctgggagtgtctgccctttgcgccatctgtggcgatcgggctacagggaaacactacggagccagctcctgcgacggctgtaaggggtttttccgcagatctgtgcggaaaaatcatatgtatagctgccgcttttccagacaatgtgtcgtggataaggacaaacggaaccagtgccgctactgtagactgaagaagtgcttccgggctggaatgaaaaaggaagccgttcagaatgagcgcgatagaattagcacccggagatcttcctatgaagacagctctctcccctccatcaacgcgctgctgcaggccgaggtgctcagccgccaaattacatctcctgtctccggcatcaatggcgatattcgggctaaaaagatcgccagcatcgctgacgtgtgtgagtccatgaaagaacagctgcttgttctggtggagtgggccaagtacattcccgcgttttgcgaactccctctggatgaccaggtcgcccttctgcgcgctcacgccggggagcatctcctgctgggagctaccaagagatctatggtgttcaaagacgtgctcctgcttggcaacgattatatcgtcccccggcactgtcctgagctggccgaaatgagcagagtttccattcgcatcctcgacgagctggtgcttccgtttcaggaactgcaaattgatgacaatgagtacgcctacctcaaggctatcattttctttgatcccgacgcgaaagggctgagcgatcctggaaagatcaaacggctgagagcccaggtgcaggtctctctcgaagactatatcaacgatcgccagtacgactcccggggcagattcggggagctgcttctgctcctgcccacgcttcaaagcattacctggcagatgatcgagcagattcaatttatcaagctgttcggaatggctaaaattgataatctcctgcaggaaatgctgctcggcggctctcctagcgacgctccccatgcccaccacccgctgcatcctcaccttatgcaggagcatatggggacaaacgtgatcgttgccaataccatgcccacacacctgtccaacggacagatgtgcgaatggcctcgcccccggggccaagccgcgacccccgagacgcctcagccgtctccccctgggggaagcggctccgaaccctataagctcctgcctggggctgtggccacaatcgtcaagcccctgagcgccattccgcagcctaccatcacaaaacaggaggtgatttgaggactagttataagactgactagcccgatgggcctcccaacgggccctcctcccctccttgcaccgagattaataaaaaaaaaaaaaaaaaaaaaaaaaaaaaaaaaaaaaaaaaaaaaaaaaaaaaaaaaaaaaaaatgcatcccccccccccccccccccccccccccccccaaaggctcttttcagagccaccagaatt

SEQ ID NO: 2711 - RNA, 1531 nt, synthetic construct
  misc_feature 1..1531: note = mRNA i-3 (A64-N5-C30-hSL-N5) (opt5) from Homo sapiens__NP_000448.3__HNF4A(39-474)(S313E)
  source 1..1531: mol_type = other RNA
aggagaaagcttaccatggacacatctcctagcgaggggaccaacctcaatgctccgaactccctgggagtgtctgccctttgcgccatctgtggcgatcgggctacagggaaacactacggagccagctcctgcgacggctgtaaggggtttttccgcagatctgtgcggaaaaatcatatgtatagctgccgcttttccagacaatgtgtcgtggataaggacaaacggaaccagtgccgctactgtagactgaagaagtgcttccgggctggaatgaaaaaggaagccgttcagaatgagcgcgatagaattagcacccggagatcttcctatgaagacagctctctcccctccatcaacgcgctgctgcaggccgaggtgctcagccgccaaattacatctcctgtctccggcatcaatggcgatattcgggctaaaaagatcgccagcatcgctgacgtgtgtgagtccatgaaagaacagctgcttgttctggtggagtgggccaagtacattcccgcgttttgcgaactccctctggatgaccaggtcgcccttctgcgcgctcacgccggggagcatctcctgctgggagctaccaagagatctatggtgttcaaagacgtgctcctgcttggcaacgattatatcgtcccccggcactgtcctgagctggccgaaatgagcagagtttccattcgcatcctcgacgagctggtgcttccgtttcaggaactgcaaattgatgacaatgagtacgcctacctcaaggctatcattttctttgatcccgacgcgaaagggctgagcgatcctggaaagatcaaacggctgagagaacaggtgcaggtctctctcgaggactatatcaacgatcgccagtacgactcccggggcagattcggggagctgcttctgctcctgcccacgcttcaaagcattacctggcagatgatcgaacagattcaatttatcaagctgttcggaatggccaaaattgataatctcctgcaggagatgctgctcggcggctctcctagcgacgctccccatgcccaccacccgctgcatcctcaccttatgcaggaacatatggggacaaacgtgatcgttgccaataccatgcccacacacctgtccaacggacagatgtgcgagtggcctcgcccccggggccaagctgccacccccgaaacgcctcagccgtctccccctgggggaagcggctccgagccctataagctcctgcctggggcggtggctacaatcgtcaagcccctgagcgccattccgcagcctaccatcacaaaacaggaggtgatttgaggactagttataagactgactagcccgatgggcctcccaacgggccctcctcccctccttgcaccgagattaataaaaaaaaaaaaaaaaaaaaaaaaaaaaaaaaaaaaaaaaaaaaaaaaaaaaaaaaaaaaaaaatgcatcccccccccccccccccccccccccccccccaaaggctcttttcagagccaccagaatt

SEQ ID NO: 2712 - RNA, 1531 nt, synthetic construct
  misc_feature 1..1531: note = mRNA i-3 (A64-N5-C30-hSL-N5) (opt5) from Homo sapiens__NP_000448.3__HNF4A(39-474)(S142A_S143A)
  source 1..1531: mol_type = other RNA
aggagaaagcttaccatggacacatctcctagcgaggggaccaacctcaatgctccgaactccctgggagtgtctgccctttgcgccatctgtggcgatcgggctacagggaaacactacggagccagctcctgcgacggctgtaaggggtttttccgcagatctgtgcggaaaaatcatatgtatagctgccgcttttccagacaatgtgtcgtggataaggacaaacggaaccagtgccgctactgtagactgaagaagtgcttccgggctggaatgaaaaaggaagccgttcagaatgagcgcgatagaattagcacccggcgcgcggcctatgaagactcttccctccccagcatcaacgctctgctgcaggccgaggtgctctctagacaaattacatcccctgtcagcggcatcaatggcgatattcgggctaaaaagatcgcctctatcgcggacgtgtgtgagtccatgaaagaacagctgcttgttctggtggagtgggccaagtacattcccgctttttgcgaactccctctggatgaccaggtcgcccttctgcgcgctcacgccggggagcatctcctgctgggagccaccaagagaagcatggtgttcaaagacgtgctcctgcttggcaacgattatatcgtcccccggcactgtcctgagctggctgaaatgtccagagtttctattcgcatcctcgacgagctggtgcttccgtttcaggaactgcaaattgatgacaatgagtacgcgtacctcaaggccatcattttctttgatcccgacgctaaagggctgagcgatcctggaaagatcaaacggctgagatcccaggtgcaggtcagcctcgaagactatatcaacgatcgccagtacgactctcggggcagattcggggagctgcttctgctcctgcccacgcttcaatccattacctggcagatgatcgagcagattcaatttatcaagctgttcggaatggccaaaattgataatctcctgcaggaaatgctgctcggcggcagcccttctgacgctccccatgcccaccacccgctgcatcctcaccttatgcaggagcatatggggacaaacgtgatcgttgccaataccatgcccacacacctgagcaacggacagatgtgcgaatggcctcgcccccggggccaagcggctacccccgagacgcctcagccgtctccccctgggggatccggcagcgaaccctataagctcctgcctggggccgtggccacaatcgtcaagcccctgtccgctattccgcagcctaccatcacaaaacaggaggtgatttgaggactagttataagactgactagcccgatgggcctcccaacgggccctcctcccctccttgcaccgagattaataaaaaaaaaaaaaaaaaaaaaaaaaaaaaaaaaaaaaaaaaaaaaaaaaaaaaaaaaaaaaaaatgcatcccccccccccccccccccccccccccccccaaaggctcttttcagagccaccagaatt

SEQ ID NO: 2713 - RNA, 1531 nt, synthetic construct
  misc_feature 1..1531: note = mRNA i-3 (A64-N5-C30-hSL-N5) (opt5) from Homo sapiens__NP_000448.3__HNF4A(39-474)(S142E_S143E)
  source 1..1531: mol_type = other RNA
aggagaaagcttaccatggacacatctcctagcgaggggaccaacctcaatgctccgaactccctgggagtgtctgccctttgcgccatctgtggcgatcgggctacagggaaacactacggagccagctcctgcgacggctgtaaggggtttttccgcagatctgtgcggaaaaatcatatgtatagctgccgcttttccagacaatgtgtcgtggataaggacaaacggaaccagtgccgctactgtagactgaagaagtgcttccgggctggaatgaaaaaggaagccgttcagaatgagcgcgatagaattagcacccggcgcgaagagtatgaggactcttccctccccagcatcaacgcgctgctgcaggccgaagtgctctctagacaaattacatcccctgtcagcggcatcaatggcgatattcgggctaaaaagatcgcctctatcgctgacgtgtgtgagtccatgaaagaacagctgcttgttctggtggagtgggccaagtacattcccgcgttttgcgagctccctctggatgaccaggtcgcccttctgcgcgctcacgccggggaacatctcctgctgggagctaccaagagaagcatggtgttcaaagacgtgctcctgcttggcaacgattatatcgtcccccggcactgtcctgagctggccgaaatgtccagagtttctattcgcatcctcgacgagctggtgcttccgtttcaggaactgcaaattgatgacaatgagtacgcctacctcaaggctatcattttctttgatcccgacgcgaaagggctgagcgatcctggaaagatcaaacggctgagatcccaggtgcaggtcagcctcgaggactatatcaacgatcgccagtacgactctcggggcagattcggggaactgcttctgctcctgcccacgcttcaatccattacctggcagatgatcgagcagattcaatttatcaagctgttcggaatggccaaaattgataatctcctgcaggaaatgctgctcggcggcagcccttctgacgctccccatgcccaccacccgctgcatcctcaccttatgcaggagcatatggggacaaacgtgatcgttgccaataccatgcccacacacctgagcaacggacagatgtgcgaatggcctcgcccccggggccaagctgccacccccgagacgcctcagccgtctccccctgggggatccggcagcgagccctataagctcctgcctggggcggtggctacaatcgtcaagcccctgtccgccattccgcagcctaccatcacaaaacaggaagtgatttgaggactagttataagactgactagcccgatgggcctcccaacgggccctcctcccctccttgcaccgagattaataaaaaaaaaaaaaaaaaaaaaaaaaaaaaaaaaaaaaaaaaaaaaaaaaaaaaaaaaaaaaaaatgcatcccccccccccccccccccccccccccccccaaaggctcttttcagagccaccagaatt

SEQ ID NO: 2714 - RNA, 1531 nt, synthetic construct
  misc_feature 1..1531: note = mRNA i-3 (A64-N5-C30-hSL-N5) (opt5) from Homo sapiens__NP_000448.3__HNF4A(39-474)(S143A)
  source 1..1531: mol_type = other RNA
aggagaaagcttaccatggacacatctcctagcgaggggaccaacctcaatgctccgaactccctgggagtgtctgccctttgcgccatctgtggcgatcgggctacagggaaacactacggagccagctcctgcgacggctgtaaggggtttttccgcagatctgtgcggaaaaatcatatgtatagctgccgcttttccagacaatgtgtcgtggataaggacaaacggaaccagtgccgctactgtagactgaagaagtgcttccgggctggaatgaaaaaggaagccgttcagaatgagcgcgatagaattagcacccggcgctctgcgtatgaagactccagcctcccctctatcaacgccctgctgcaggctgaggtgctctccagacaaattacaagccctgtctctggcatcaatggcgatattcgggccaaaaagatcgcttccatcgccgacgtgtgtgagagcatgaaagaacagctgcttgttctggtggagtgggcgaagtacattcccgccttttgcgaactccctctggatgaccaggtcgcccttctgcgcgcccacgctggggagcatctcctgctgggagccaccaagagatccatggtgttcaaagacgtgctcctgcttggcaacgattatatcgtcccccggcactgtcctgagctggccgaaatgtctagagttagcattcgcatcctcgacgagctggtgcttccgtttcaggaactgcaaattgatgacaatgagtacgcttacctcaaggcgatcattttctttgatcccgacgccaaagggctgtccgatcctggaaagatcaaacggctgagaagccaggtgcaggtctctctcgaagactatatcaacgatcgccagtacgactcccggggcagattcggggagctgcttctgctcctgcccacgcttcaaagcattacctggcagatgatcgagcagattcaatttatcaagctgttcggaatggctaaaattgataatctcctgcaggaaatgctgctcggcggctctcctagcgacgctccccatgcccaccacccgctgcatcctcaccttatgcaggagcatatggggacaaacgtgatcgttgctaataccatgcccacacacctgtccaacggacagatgtgcgaatggcctcgcccccggggccaagccgcgacccccgagacgcctcagccgtctccccctgggggaagcggctccgaaccctataagctcctgcctggggctgtggccacaatcgtcaagcccctgagcgccattccgcagcctaccatcacaaaacaggaggtgatttgaggactagttataagactgactagcccgatgggcctcccaacgggccctcctcccctccttgcaccgagattaataaaaaaaaaaaaaaaaaaaaaaaaaaaaaaaaaaaaaaaaaaaaaaaaaaaaaaaaaaaaaaaatgcatcccccccccccccccccccccccccccccccaaaggctcttttcagagccaccagaatt

SEQ ID NO: 2715 - RNA, 1531 nt, synthetic construct
  misc_feature 1..1531: note = mRNA i-3 (A64-N5-C30-hSL-N5) (opt5) from Homo sapiens__NP_000448.3__HNF4A(39-474)(T166A)
  source 1..1531: mol_type = other RNA
aggagaaagcttaccatggacacatctcctagcgaggggaccaacctcaatgctccgaactccctgggagtgtctgccctttgcgccatctgtggcgatcgggctacagggaaacactacggagccagctcctgcgacggctgtaaggggtttttccgcagatctgtgcggaaaaatcatatgtatagctgccgcttttccagacaatgtgtcgtggataaggacaaacggaaccagtgccgctactgtagactgaagaagtgcttccgggctggaatgaaaaaggaagccgttcagaatgagcgcgatagaattagcacccggcgcagctcctatgaagacagctctctcccctccatcaacgcgctgctgcaggccgaggtgctcagcagacaaattgcttctcctgtctccggcatcaatggcgatattcgggccaaaaagatcgctagcatcgccgacgtgtgtgagtccatgaaagaacagctgcttgttctggtggagtgggcgaagtacattcccgccttttgcgaactccctctggatgaccaggtcgcccttctgcgcgcccacgctggggagcatctcctgctgggagccacaaagagatctatggtgttcaaagacgtgctcctgcttggcaacgattatatcgtcccccggcactgtcctgagctggccgaaatgagcagagtttccattcgcatcctcgacgagctggtgcttccgtttcaggaactgcaaattgatgacaatgagtacgcttacctcaaggcgatcattttctttgatcccgacgccaaagggctgagcgatcctggaaagatcaaacggctgagatctcaggtgcaggtctccctcgaagactatatcaacgatcgccagtacgacagccggggcagattcggggagctgcttctgctcctgcccacccttcaatctattacgtggcagatgatcgagcagattcaatttatcaagctgttcggaatggctaaaattgataatctcctgcaggaaatgctgctcggcggcagcccttccgacgctccccatgcccaccacccgctgcatcctcaccttatgcaggagcatatggggaccaacgtgatcgttgctaatacaatgcccacccacctgtctaacggacagatgtgcgaatggcctcgcccccggggccaagccgcgacacccgagacccctcagccgtctccccctgggggatccggcagcgaaccctataagctcctgcctggggctgtggccacgatcgtcaagcccctgtctgccattccgcagcctacaatcaccaaacaggaggtgatttgaggactagttataagactgactagcccgatgggcctcccaacgggccctcctcccctccttgcaccgagattaataaaaaaaaaaaaaaaaaaaaaaaaaaaaaaaaaaaaaaaaaaaaaaaaaaaaaaaaaaaaaaaatgcatcccccccccccccccccccccccccccccccaaaggctcttttcagagccaccagaatt

SEQ ID NO: 2716 - RNA, 1531 nt, synthetic construct
  misc_feature 1..1531: note = mRNA i-3 (A64-N5-C30-hSL-N5) (opt5) from Homo sapiens__NP_000448.3__HNF4A(39-474)(S167E)
  source 1..1531: mol_type = other RNA
aggagaaagcttaccatggacacatctcctagcgaggggaccaacctcaatgctccgaactccctgggagtgtctgccctttgcgccatctgtggcgatcgggctacagggaaacactacggagccagctcctgcgacggctgtaaggggtttttccgcagatctgtgcggaaaaatcatatgtatagctgccgcttttccagacaatgtgtcgtggataaggacaaacggaaccagtgccgctactgtagactgaagaagtgcttccgggctggaatgaaaaaggaagccgttcagaatgagcgcgatagaattagcacccggagatcttcctatgaagacagctctctcccctccatcaacgcgctgctgcaggccgaggtgctcagccgccaaattacagagcctgtctctggcatcaatggcgatattcgggctaaaaagatcgcctccatcgctgacgtgtgtgaaagcatgaaagagcagctgcttgttctggtggaatgggccaagtacattcccgcgttttgcgagctccctctggatgaccaggtcgcccttctgcgcgctcacgccggggagcatctcctgctgggagctaccaagagatccatggtgttcaaagacgtgctcctgcttggcaacgattatatcgtcccccggcactgtcctgaactggccgagatgtctagagttagcattcgcatcctcgacgaactggtgcttccgtttcaggagctgcaaattgatgacaatgaatacgcctacctcaaggctatcattttctttgatcccgacgcgaaagggctgtccgatcctggaaagatcaaacggctgagaagccaggtgcaggtctctctcgaggactatatcaacgatcgccagtacgactcccggggcagattcggggagctgcttctgctcctgcccacgcttcaaagcattacctggcagatgatcgaacagattcaatttatcaagctgttcggaatggccaaaattgataatctcctgcaggagatgctgctcggcggctctcctagcgacgctccccatgcccaccacccgctgcatcctcaccttatgcaggaacatatggggacaaacgtgatcgttgccaataccatgcccacacacctgtccaacggacagatgtgcgagtggcctcgcccccggggccaagctgccacccccgaaacgcctcagccgtctccccctgggggaagcggctccgagccctataagctcctgcctggggcggtggctacaatcgtcaagcccctgagcgccattccgcagcctaccatcacaaaacaggaggtgatttgaggactagttataagactgactagcccgatgggcctcccaacgggccctcctcccctccttgcaccgagattaataaaaaaaaaaaaaaaaaaaaaaaaaaaaaaaaaaaaaaaaaaaaaaaaaaaaaaaaaaaaaaaatgcatcccccccccccccccccccccccccccccccaaaggctcttttcagagccaccagaatt

SEQ ID NO: 2717 - RNA, 1531 nt, synthetic construct
  misc_feature 1..1531: note = mRNA i-3 (A64-N5-C30-hSL-N5) (opt5) from Homo sapiens__NP_000448.3__HNF4A(39-474)(S167A)
  source 1..1531: mol_type = other RNA
aggagaaagcttaccatggacacatctcctagcgaggggaccaacctcaatgctccgaactccctgggagtgtctgccctttgcgccatctgtggcgatcgggctacagggaaacactacggagccagctcctgcgacggctgtaaggggtttttccgcagatctgtgcggaaaaatcatatgtatagctgccgcttttccagacaatgtgtcgtggataaggacaaacggaaccagtgccgctactgtagactgaagaagtgcttccgggctggaatgaaaaaggaagccgttcagaatgagcgcgatagaattagcacccggagatcttcctatgaagacagctctctcccctccatcaacgcgctgctgcaggccgaggtgctcagccgccaaattacagctcctgtctctggcatcaatggcgatattcgggccaaaaagatcgcttccatcgccgacgtgtgtgagagcatgaaagaacagctgcttgttctggtggagtgggcgaagtacattcccgccttttgcgaactccctctggatgaccaggtcgcccttctgcgcgcccacgctggggagcatctcctgctgggagccaccaagagatccatggtgttcaaagacgtgctcctgcttggcaacgattatatcgtcccccggcactgtcctgagctggccgaaatgtctagagttagcattcgcatcctcgacgagctggtgcttccgtttcaggaactgcaaattgatgacaatgagtacgcttacctcaaggcgatcattttctttgatcccgacgccaaagggctgtccgatcctggaaagatcaaacggctgagaagccaggtgcaggtctctctcgaagactatatcaacgatcgccagtacgactcccggggcagattcggggagctgcttctgctcctgcccacgcttcaaagcattacctggcagatgatcgagcagattcaatttatcaagctgttcggaatggctaaaattgataatctcctgcaggaaatgctgctcggcggctctcctagcgacgctccccatgcccaccacccgctgcatcctcaccttatgcaggagcatatggggacaaacgtgatcgttgctaataccatgcccacacacctgtccaacggacagatgtgcgaatggcctcgcccccggggccaagccgcgacccccgagacgcctcagccgtctccccctgggggaagcggctccgaaccctataagctcctgcctggggctgtggccacaatcgtcaagcccctgagcgccattccgcagcctaccatcacaaaacaggaggtgatttgaggactagttataagactgactagcccgatgggcctcccaacgggccctcctcccctccttgcaccgagattaataaaaaaaaaaaaaaaaaaaaaaaaaaaaaaaaaaaaaaaaaaaaaaaaaaaaaaaaaaaaaaaatgcatcccccccccccccccccccccccccccccccaaaggctcttttcagagccaccagaatt

SEQ ID NO: 2718 - RNA, 1531 nt, synthetic construct
  misc_feature 1..1531: note = mRNA i-3 (A64-N5-C30-hSL-N5) (opt5) from Homo sapiens__NP_000448.3__HNF4A(39-474)(S167A_S378A_T429A_T432A _S436A)
  source 1..1531: mol_type = other RNA
aggagaaagcttaccatggacacatctcctagcgaggggaccaacctcaatgctccgaactccctgggagtgtctgccctttgcgccatctgtggcgatcgggctacagggaaacactacggagccagctcctgcgacggctgtaaggggtttttccgcagatctgtgcggaaaaatcatatgtatagctgccgcttttccagacaatgtgtcgtggataaggacaaacggaaccagtgccgctactgtagactgaagaagtgcttccgggctggaatgaaaaaggaagccgttcagaatgagcgcgatagaattagcacccggagatcttcctatgaagacagctctctcccctccatcaacgcgctgctgcaggccgaggtgctcagccgccaaattacagctcctgtctctggcatcaatggcgatattcgggccaaaaagatcgcttccatcgccgacgtgtgtgagagcatgaaagaacagctgcttgttctggtggagtgggcgaagtacattcccgccttttgcgaactccctctggatgaccaggtcgcccttctgcgcgcccacgctggggagcatctcctgctgggagccaccaagagatccatggtgttcaaagacgtgctcctgcttggcaacgattatatcgtcccccggcactgtcctgagctggccgaaatgtctagagttagcattcgcatcctcgacgagctggtgcttccgtttcaggaactgcaaattgatgacaatgagtacgcttacctcaaggcgatcattttctttgatcccgacgccaaagggctgtccgatcctggaaagatcaaacggctgagaagccaggtgcaggtctctctcgaagactatatcaacgatcgccagtacgactcccggggcagattcggggagctgcttctgctcctgcccacgcttcaaagcattacctggcagatgatcgagcagattcaatttatcaagctgttcggaatggctaaaattgataatctcctgcaggaaatgctgctcggcggcgccccttctgacgctccccatgctcaccacccgctgcatcctcaccttatgcaggagcatatggggacaaacgtgatcgttgccaataccatgcccacacacctgagcaacggacagatgtgcgaatggcctcgcccccggggccaagcggctgcccccgaggcccctcagccggctccccctgggggatccggctctgaaccctataagctcctgcctggggccgtggctaccatcgtcaagcccctgagcgccattccgcagcctacgatcacaaaacaggaggtgatttgaggactagttataagactgactagcccgatgggcctcccaacgggccctcctcccctccttgcaccgagattaataaaaaaaaaaaaaaaaaaaaaaaaaaaaaaaaaaaaaaaaaaaaaaaaaaaaaaaaaaaaaaaatgcatcccccccccccccccccccccccccccccccaaaggctcttttcagagccaccagaatt

SEQ ID NO: 2719 - RNA, 1531 nt, synthetic construct
  misc_feature 1..1531: note = mRNA i-3 (A64-N5-C30-hSL-N5) (opt5) from Homo sapiens__NP_000448.3__HNF4A(39-474)(S167E_S378E_T429E_T432E _S436E)
  source 1..1531: mol_type = other RNA
aggagaaagcttaccatggacacatctcctagcgaggggaccaacctcaatgctccgaactccctgggagtgtctgccctttgcgccatctgtggcgatcgggctacagggaaacactacggagccagctcctgcgacggctgtaaggggtttttccgcagatctgtgcggaaaaatcatatgtatagctgccgcttttccagacaatgtgtcgtggataaggacaaacggaaccagtgccgctactgtagactgaagaagtgcttccgggctggaatgaaaaaggaagccgttcagaatgagcgcgatagaattagcacccggagatcttcctatgaagacagctctctcccctccatcaacgcgctgctgcaggccgaggtgctcagccgccaaattacagagcctgtctctggcatcaatggcgatattcgggctaaaaagatcgcctccatcgctgacgtgtgtgaaagcatgaaagagcagctgcttgttctggtggaatgggccaagtacattcccgcgttttgcgagctccctctggatgaccaggtcgcccttctgcgcgctcacgccggggagcatctcctgctgggagctaccaagagatccatggtgttcaaagacgtgctcctgcttggcaacgattatatcgtcccccggcactgtcctgaactggccgagatgtctagagttagcattcgcatcctcgacgaactggtgcttccgtttcaggagctgcaaattgatgacaatgaatacgcctacctcaaggctatcattttctttgatcccgacgcgaaagggctgtccgatcctggaaagatcaaacggctgagaagccaggtgcaggtctctctcgaggactatatcaacgatcgccagtacgactcccggggcagattcggggagctgcttctgctcctgcccacgcttcaaagcattacctggcagatgatcgaacagattcaatttatcaagctgttcggaatggccaaaattgataatctcctgcaggagatgctgctcggcggcgaaccttctgacgctccccatgcccaccacccgctgcatcctcaccttatgcaggagcatatggggacaaacgtgatcgttgccaataccatgcccacacacctgagcaacggacagatgtgcgaatggcctcgcccccggggccaagctgccgagcccgaggaacctcagccggagccccctgggggatccggctctgaaccctataagctcctgcctggggcggtggctaccatcgtcaagcccctgagcgccattccgcagcctacgatcacaaaacaggaggtgatttgaggactagttataagactgactagcccgatgggcctcccaacgggccctcctcccctccttgcaccgagattaataaaaaaaaaaaaaaaaaaaaaaaaaaaaaaaaaaaaaaaaaaaaaaaaaaaaaaaaaaaaaaaatgcatcccccccccccccccccccccccccccccccaaaggctcttttcagagccaccagaatt

SEQ ID NO: 2720 - RNA, 1531 nt, synthetic construct
  misc_feature 1..1531: note = mRNA i-3 (A64-N5-C30-hSL-N5) (opt5) from Homo sapiens__NP_000448.3__HNF4A(39-474)(S87A)
  source 1..1531: mol_type = other RNA
aggagaaagcttaccatggacacatctcctagcgaggggaccaacctcaatgctccgaactccctgggagtgtctgccctttgcgccatctgtggcgatcgggctacagggaaacactacggagccagctcctgcgacggctgtaaggggtttttccgcagagctgtgcggaaaaatcatatgtattcttgccgctttagcagacaatgtgtcgtggataaggacaaacggaaccagtgccgctactgtagactgaagaagtgcttccgggccggaatgaaaaaggaagcggttcagaatgagcgcgatagaatttccacccggcgcagctcttatgaagactccagcctcccctctatcaacgccctgctgcaggctgaggtgctctccagacaaattacaagccctgtctctggcatcaatggcgatattcgggccaaaaagatcgcttccatcgccgacgtgtgtgagagcatgaaagaacagctgcttgttctggtggagtgggcgaagtacattcccgccttttgcgaactccctctggatgaccaggtcgcccttctgcgcgcccacgctggggagcatctcctgctgggagccaccaagagatccatggtgttcaaagacgtgctcctgcttggcaacgattatatcgtcccccggcactgtcctgagctggccgaaatgtctagagttagcattcgcatcctcgacgagctggtgcttccgtttcaggaactgcaaattgatgacaatgagtacgcttacctcaaggcgatcattttctttgatcccgacgccaaagggctgtccgatcctggaaagatcaaacggctgagaagccaggtgcaggtctctctcgaagactatatcaacgatcgccagtacgactcccggggcagattcggggagctgcttctgctcctgcccacgcttcaaagcattacctggcagatgatcgagcagattcaatttatcaagctgttcggaatggctaaaattgataatctcctgcaggaaatgctgctcggcggctctcctagcgacgctccccatgcccaccacccgctgcatcctcaccttatgcaggagcatatggggacaaacgtgatcgttgctaataccatgcccacacacctgtccaacggacagatgtgcgaatggcctcgcccccggggccaagccgcgacccccgagacgcctcagccgtctccccctgggggaagcggctccgaaccctataagctcctgcctggggctgtggccacaatcgtcaagcccctgagcgccattccgcagcctaccatcacaaaacaggaggtgatttgaggactagttataagactgactagcccgatgggcctcccaacgggccctcctcccctccttgcaccgagattaataaaaaaaaaaaaaaaaaaaaaaaaaaaaaaaaaaaaaaaaaaaaaaaaaaaaaaaaaaaaaaaatgcatcccccccccccccccccccccccccccccccaaaggctcttttcagagccaccagaatt

SEQ ID NO: 2721 - RNA, 1531 nt, synthetic construct
  misc_feature 1..1531: note = mRNA i-3 (A64-N5-C30-hSL-N5) (opt5) from Homo sapiens__NP_000448.3__HNF4A(39-474)(S87E)
  source 1..1531: mol_type = other RNA
aggagaaagcttaccatggacacatctcctagcgaggggaccaacctcaatgctccgaactccctgggagtgtctgccctttgcgccatctgtggcgatcgggctacagggaaacactacggagccagctcctgcgacggctgtaaggggtttttccgcagagaagtgcggaaaaatcatatgtattcttgccgctttagcagacaatgtgtcgtggataaggacaaacggaaccagtgccgctactgtagactgaagaagtgcttccgggctggaatgaaaaaggaggccgttcagaatgaacgcgatagaatttccacccggcgcagctcttatgaggactccagcctcccctctatcaacgcgctgctgcaggccgaggtgctctccagacaaattacaagccctgtctctggcatcaatggcgatattcgggctaaaaagatcgcctccatcgctgacgtgtgtgaaagcatgaaagagcagctgcttgttctggtggaatgggccaagtacattcccgcgttttgcgagctccctctggatgaccaggtcgcccttctgcgcgctcacgccggggagcatctcctgctgggagctaccaagagatccatggtgttcaaagacgtgctcctgcttggcaacgattatatcgtcccccggcactgtcctgaactggccgagatgtctagagttagcattcgcatcctcgacgaactggtgcttccgtttcaggagctgcaaattgatgacaatgaatacgcctacctcaaggctatcattttctttgatcccgacgcgaaagggctgtccgatcctggaaagatcaaacggctgagaagccaggtgcaggtctctctcgaggactatatcaacgatcgccagtacgactcccggggcagattcggggagctgcttctgctcctgcccacgcttcaaagcattacctggcagatgatcgaacagattcaatttatcaagctgttcggaatggccaaaattgataatctcctgcaggagatgctgctcggcggctctcctagcgacgctccccatgcccaccacccgctgcatcctcaccttatgcaggaacatatggggacaaacgtgatcgttgccaataccatgcccacacacctgtccaacggacagatgtgcgagtggcctcgcccccggggccaagctgccacccccgaaacgcctcagccgtctccccctgggggaagcggctccgagccctataagctcctgcctggggcggtggctacaatcgtcaagcccctgagcgccattccgcagcctaccatcacaaaacaggaggtgatttgaggactagttataagactgactagcccgatgggcctcccaacgggccctcctcccctccttgcaccgagattaataaaaaaaaaaaaaaaaaaaaaaaaaaaaaaaaaaaaaaaaaaaaaaaaaaaaaaaaaaaaaaaatgcatcccccccccccccccccccccccccccccccaaaggctcttttcagagccaccagaatt

SEQ ID NO: 2722 - RNA, 1531 nt, synthetic construct
  misc_feature 1..1531: note = mRNA i-3 (A64-N5-C30-hSL-N5) (opt5) from Homo sapiens__NP_000448.3__HNF4A(39-474)(R2V)
  source 1..1531: mol_type = other RNA
aggagaaagcttaccatggacacatctcctagcgaggggaccaacctcaatgctccgaactccctgggagtgtctgccctttgcgccatctgtggcgatagagctacagggaaacactacggagccagctcctgcgacggctgtaaggggtttttccggcgctctgtccggaaaaatcatatgtatagctgcagattttcccgccaatgtgtggttgataaggacaaaagaaaccagtgccggtactgtcgcctgaagaagtgcttcagagctggaatgaaaaaggaagccgtgcagaatgagcgggatcgcattagcaccagacggtcttcctatgaagacagctctctcccctccatcaacgcgctgctgcaggccgaggtcctcagccgccaaattacatctcctgtgtccggcatcaatggcgatattagagctaaaaagatcgccagcatcgctgacgtttgtgagtccatgaaagaacagctgcttgtgctggtcgagtgggccaagtacattcccgcgttttgcgaactccctctggatgaccaggtggcccttctgcgggctcacgccggggagcatctcctgctgggagctaccaagcgctctatggtgttcaaagacgtcctcctgcttggcaacgattatatcgttcccagacactgtcctgagctggccgaaatgagccgggtgtccattagaatcctcgacgagctggtgcttccgtttcaggaactgcaaattgatgacaatgagtacgcctacctcaaggctatcattttctttgatcccgacgcgaaagggctgagcgatcctggaaagatcaaacgcctgcggtctcaggtccaggtgtccctcgaagactatatcaacgatagacagtacgacagccgcggccggttcggggagctgcttctgctcctgcccacgcttcaatctattacctggcagatgatcgagcagattcaatttatcaagctgttcggaatggccaaaattgataatctcctgcaggaaatgctgctcggcggcagcccttccgacgctccccatgcccaccacccgctgcatcctcaccttatgcaggagcatatggggacaaacgttatcgtggccaataccatgcccacacacctgtctaacggacagatgtgcgaatggcctagaccccgcggccaagctgccacccccgagacgcctcagccgagccctcccgggggatccggcagcgaaccctataagctcctgcctggggcggtcgctacaatcgtgaagcccctgtctgccattccgcagcctaccatcacaaaacaggaggttatttgaggactagttataagactgactagcccgatgggcctcccaacgggccctcctcccctccttgcaccgagattaataaaaaaaaaaaaaaaaaaaaaaaaaaaaaaaaaaaaaaaaaaaaaaaaaaaaaaaaaaaaaaaatgcatcccccccccccccccccccccccccccccccaaaggctcttttcagagccaccagaatt

SEQ ID NO: 2723 - RNA, 1531 nt, synthetic construct
  misc_feature 1..1531: note = mRNA i-3 (A64-N5-C30-hSL-N5) (opt5) from Homo sapiens__NP_000448.3__HNF4A(39-474)(R2V_K5V)
  source 1..1531: mol_type = other RNA
aggagaaagcttaccatggacacatctcctagcgaggggaccaacctcaatgctccgaactccctgggagtgtctgccctttgcgccatctgtggcgatagagctacagggaagcactacggagccagctcctgcgacggctgtaaagggtttttccggcgctctgtgagaaagaatcatatgtatagctgccggttttcccgccaatgtgttgtggataaagacaagagaaaccagtgccggtactgtcgcctgaaaaagtgcttcagagctggaatgaagaaagaagccgtccagaatgagcgggatcgcattagcaccagacggtcttcctatgaagacagctctctcccctccatcaacgcgctgctgcaggccgaggtgctcagccgccaaattacatctcctgtttccggcatcaatggcgatattagagctaagaaaatcgccagcatcgctgacgtgtgtgagtccatgaaggaacagctgcttgtcctggtggagtgggccaaatacattcccgcgttttgcgaactccctctggatgaccaggtggcccttctgcgggctcacgccggggagcatctcctgctgggagctaccaagcgctctatggtcttcaaggacgttctcctgcttggcaacgattatatcgtgcccagacactgtcctgagctggccgaaatgagccgggtgtccattagaatcctcgacgagctggtccttccgtttcaggaactgcaaattgatgacaatgagtacgcctacctcaaagctatcattttctttgatcccgacgcgaaggggctgagcgatcctggaaaaatcaagcgcctgcggtctcaggtgcaggtttccctcgaagactatatcaacgatagacagtacgacagccgcggccggttcggggagctgcttctgctcctgcccacgcttcaatctattacctggcagatgatcgagcagattcaatttatcaaactgttcggaatggccaagattgataatctcctgcaggaaatgctgctcggcggcagcccttccgacgctccccatgcccaccacccgctgcatcctcaccttatgcaggagcatatggggacaaacgtgatcgtcgccaataccatgcccacacacctgtctaacggacagatgtgcgaatggcctagaccccgcggccaagctgccacccccgagacgcctcagccgagccctcccgggggatccggcagcgaaccctataaactcctgcctggggcggtggctacaatcgttaagcccctgtctgccattccgcagcctaccatcacaaagcaggaggtgatttgaggactagttataagactgactagcccgatgggcctcccaacgggccctcctcccctccttgcaccgagattaataaaaaaaaaaaaaaaaaaaaaaaaaaaaaaaaaaaaaaaaaaaaaaaaaaaaaaaaaaaaaaaatgcatcccccccccccccccccccccccccccccccaaaggctcttttcagagccaccagaatt

SEQ ID NO: 2724 - RNA, 1531 nt, synthetic construct
  misc_feature 1..1531: note = mRNA i-3 (A64-N5-C30-hSL-N5) (opt5) from Homo sapiens__NP_000448.3__HNF4A(39-474)(K179R_K180R)
  source 1..1531: mol_type = other RNA
aggagaaagcttaccatggacacatctcctagcgaggggaccaacctcaatgctccgaactccctgggagtgtctgccctttgcgccatctgtggcgatcgggctacagggaaacactacggagccagctcctgcgacggctgtaaggggtttttccgcagatctgtgcggaaaaatcatatgtatagctgccgcttttccagacaatgtgtcgtggataaggacaaacggaaccagtgccgctactgtagactgaagaagtgcttccgggctggaatgaaaaaggaagccgttcagaatgagcgcgatagaattagcacccggcgcagctcctatgaagacagctctctcccctccatcaacgcgctgctgcaggccgaggtgctcagcagacaaattacatctcctgtctccggcatcaatggcgatattcgggctcgcagaatcgccagcatcgctgacgtgtgtgagtccatgaaagaacagctgcttgttctggtggagtgggccaagtacattcccgcgttttgcgaactccctctggatgaccaggtcgcccttctgcgggctcacgccggggagcatctcctgctgggagctaccaaaagatctatggtgttcaaggacgtgctcctgcttggcaacgattatatcgtcccccgccactgtcctgagctggccgaaatgagccgggtttccattagaatcctcgacgagctggtgcttccgtttcaggaactgcaaattgatgacaatgagtacgcctacctcaaggctatcattttctttgatcccgacgcgaaagggctgagcgatcctggaaagatcaaacgcctgcggtctcaggtgcaggtctccctcgaagactatatcaacgatagacagtacgacagccgcggccggttcggggagctgcttctgctcctgcccacgcttcaatctattacctggcagatgatcgagcagattcaatttatcaagctgttcggaatggccaaaattgataatctcctgcaggaaatgctgctcggcggcagcccttccgacgctccccatgcccaccacccgctgcatcctcaccttatgcaggagcatatggggacaaacgtgatcgttgccaataccatgcccacacacctgtctaacggacagatgtgcgaatggcctagaccccgcggccaagctgccacccccgagacgcctcagccgtctccccctgggggatccggcagcgaaccctataagctcctgcctggggcggtggctacaatcgtcaaacccctgtctgccattccgcagcctaccatcacaaagcaggaggtgatttgaggactagttataagactgactagcccgatgggcctcccaacgggccctcctcccctccttgcaccgagattaataaaaaaaaaaaaaaaaaaaaaaaaaaaaaaaaaaaaaaaaaaaaaaaaaaaaaaaaaaaaaaaatgcatcccccccccccccccccccccccccccccccaaaggctcttttcagagccaccagaatt

SEQ ID NO: 2725 - RNA, 1531 nt, synthetic construct
  misc_feature 1..1531: note = mRNA i-3 (A64-N5-C30-hSL-N5) (opt5) from Homo sapiens__NP_000448.3__HNF4A(39-474)(K234R)
  source 1..1531: mol_type = other RNA
aggagaaagcttaccatggacacatctcctagcgaggggaccaacctcaatgctccgaactccctgggagtgtctgccctttgcgccatctgtggcgatcgggctacagggaaacactacggagccagctcctgcgacggctgtaaggggtttttccgcagatctgtgcggaaaaatcatatgtatagctgccgcttttccagacaatgtgtcgtggataaggacaaacggaaccagtgccgctactgtagactgaagaagtgcttccgggctggaatgaaaaaggaagccgttcagaatgagcgcgatagaattagcacccggcgcagctcctatgaagacagctctctcccctccatcaacgcgctgctgcaggccgaggtgctcagcagacaaattacatctcctgtctccggcatcaatggcgatattcgggctaaaaagatcgccagcatcgctgacgtgtgtgagtccatgaaagaacagctgcttgttctggtggagtgggccaagtacattcccgcgttttgcgaactccctctggatgaccaggtcgcccttctgcgcgctcacgccggggagcatctcctgctgggagctaccagacggtctatggtgttcaaggacgtgctcctgcttggcaacgattatatcgtccccagacactgtcctgagctggccgaaatgagccgcgtttccattcggatcctcgacgagctggtgcttccgtttcaggaactgcaaattgatgacaatgagtacgcctacctcaaagctatcattttctttgatcccgacgcgaaggggctgagcgatcctggaaaaatcaagagactgcgctctcaggtgcaggtctccctcgaagactatatcaacgatcggcagtacgacagcagaggccgcttcggggagctgcttctgctcctgcccacgcttcaatctattacctggcagatgatcgagcagattcaatttatcaaactgttcggaatggccaagattgataatctcctgcaggaaatgctgctcggcggcagcccttccgacgctccccatgcccaccacccgctgcatcctcaccttatgcaggagcatatggggacaaacgtgatcgttgccaataccatgcccacacacctgtctaacggacagatgtgcgaatggcctcggcccagaggccaagctgccacccccgagacgcctcagccgtctccccctgggggatccggcagcgaaccctataaactcctgcctggggcggtggctacaatcgtcaagcccctgtctgccattccgcagcctaccatcacaaagcaggaggtgatttgaggactagttataagactgactagcccgatgggcctcccaacgggccctcctcccctccttgcaccgagattaataaaaaaaaaaaaaaaaaaaaaaaaaaaaaaaaaaaaaaaaaaaaaaaaaaaaaaaaaaaaaaaatgcatcccccccccccccccccccccccccccccccaaaggctcttttcagagccaccagaatt

SEQ ID NO: 2726 - RNA, 1531 nt, synthetic construct
  misc_feature 1..1531: note = mRNA i-3 (A64-N5-C30-hSL-N5) (opt5) from Homo sapiens__NP_000448.3__HNF4A(39-474)(K300R)
  source 1..1531: mol_type = other RNA
aggagaaagcttaccatggacacatctcctagcgaggggaccaacctcaatgctccgaactccctgggagtgtctgccctttgcgccatctgtggcgatcgggctacagggaaacactacggagccagctcctgcgacggctgtaaggggtttttccgcagatctgtgcggaaaaatcatatgtatagctgccgcttttccagacaatgtgtcgtggataaggacaaacggaaccagtgccgctactgtagactgaagaagtgcttccgggctggaatgaaaaaggaagccgttcagaatgagcgcgatagaattagcacccggcgcagctcctatgaagacagctctctcccctccatcaacgcgctgctgcaggccgaggtgctcagcagacaaattacatctcctgtctccggcatcaatggcgatattcgggctaaaaagatcgccagcatcgctgacgtgtgtgagtccatgaaagaacagctgcttgttctggtggagtgggccaagtacattcccgcgttttgcgaactccctctggatgaccaggtcgcccttctgcgcgctcacgccggggagcatctcctgctgggagctaccaagagatctatggtgttcaaagacgtgctcctgcttggcaacgattatatcgtcccccggcactgtcctgagctggccgaaatgagcagagtttccattcgcatcctcgacgagctggtgcttccgtttcaggaactgcaaattgatgacaatgagtacgcctacctcaaggctatcattttctttgatcccgacgcgcgggggctgagcgatcctggaaaaatcaagagactgcgctctcaggtgcaggtctccctcgaagactatatcaacgatcggcagtacgacagcagaggccgcttcggggagctgcttctgctcctgcccacgcttcaatctattacctggcagatgatcgagcagattcaatttatcaaactgttcggaatggccaagattgataatctcctgcaggaaatgctgctcggcggcagcccttccgacgctccccatgcccaccacccgctgcatcctcaccttatgcaggagcatatggggacaaacgtgatcgttgccaataccatgcccacacacctgtctaacggacagatgtgcgaatggcctcggcccagaggccaagctgccacccccgagacgcctcagccgtctccccctgggggatccggcagcgaaccctataaactcctgcctggggcggtggctacaatcgtcaagcccctgtctgccattccgcagcctaccatcacaaagcaggaggtgatttgaggactagttataagactgactagcccgatgggcctcccaacgggccctcctcccctccttgcaccgagattaataaaaaaaaaaaaaaaaaaaaaaaaaaaaaaaaaaaaaaaaaaaaaaaaaaaaaaaaaaaaaaaatgcatcccccccccccccccccccccccccccccccaaaggctcttttcagagccaccagaatt

SEQ ID NO: 2727 - RNA, 1531 nt, synthetic construct
  misc_feature 1..1531: note = mRNA i-3 (A64-N5-C30-hSL-N5) (opt5) from Homo sapiens__NP_000448.3__HNF4A(39-474)(K300R_K307R_K309R)
  source 1..1531: mol_type = other RNA
aggagaaagcttaccatggacacatctcctagcgaggggaccaacctcaatgctccgaactccctgggagtgtctgccctttgcgccatctgtggcgatcgggctacagggaaacactacggagccagctcctgcgacggctgtaaggggtttttccgcagatctgtgcggaaaaatcatatgtatagctgccgcttttccagacaatgtgtcgtggataaggacaaacggaaccagtgccgctactgtagactgaagaagtgcttccgggctggaatgaaaaaggaagccgttcagaatgagcgcgatagaattagcacccggcgcagctcctatgaagacagctctctcccctccatcaacgcgctgctgcaggccgaggtgctcagcagacaaattacatctcctgtctccggcatcaatggcgatattcgggctaaaaagatcgccagcatcgctgacgtgtgtgagtccatgaaagaacagctgcttgttctggtggagtgggccaagtacattcccgcgttttgcgaactccctctggatgaccaggtcgcccttctgcgcgctcacgccggggagcatctcctgctgggagctaccaagagatctatggtgttcaaagacgtgctcctgcttggcaacgattatatcgtcccccggcactgtcctgagctggccgaaatgagcagagtttccattcgcatcctcgacgagctggtgcttccgtttcaggaactgcaaattgatgacaatgagtacgcctacctcaaggctatcattttctttgatcccgacgcgcgggggctgagcgatcctggaagaatccgccggctgagatctcaggtgcaggtctccctcgaagactatatcaacgatcgccagtacgacagccggggcagattcggggagctgcttctgctcctgcccacgcttcaatctattacctggcagatgatcgagcagattcaatttatcaaactgttcggaatggccaagattgataatctcctgcaggaaatgctgctcggcggcagcccttccgacgctccccatgcccaccacccgctgcatcctcaccttatgcaggagcatatggggacaaacgtgatcgttgccaataccatgcccacacacctgtctaacggacagatgtgcgaatggcctcgcccccggggccaagctgccacccccgagacgcctcagccgtctccccctgggggatccggcagcgaaccctataaactcctgcctggggcggtggctacaatcgtcaagcccctgtctgccattccgcagcctaccatcacaaaacaggaggtgatttgaggactagttataagactgactagcccgatgggcctcccaacgggccctcctcccctccttgcaccgagattaataaaaaaaaaaaaaaaaaaaaaaaaaaaaaaaaaaaaaaaaaaaaaaaaaaaaaaaaaaaaaaaatgcatcccccccccccccccccccccccccccccccaaaggctcttttcagagccaccagaatt

SEQ ID NO: 2728 - RNA, 1531 nt, synthetic construct
  misc_feature 1..1531: note = mRNA i-3 (A64-N5-C30-hSL-N5) (opt5) from Homo sapiens__NP_000448.3__HNF4A(39-474)(K447R_K470R)
  source 1..1531: mol_type = other RNA
aggagaaagcttaccatggacacatctcctagcgaggggaccaacctcaatgctccgaactccctgggagtgtctgccctttgcgccatctgtggcgatcgggctacagggaaacactacggagccagctcctgcgacggctgtaaggggtttttccgcagatctgtgcggaaaaatcatatgtatagctgccgcttttccagacaatgtgtcgtggataaggacaaacggaaccagtgccgctactgtagactgaagaagtgcttccgggctggaatgaaaaaggaagccgttcagaatgagcgcgatagaattagcacccggcgcagctcctatgaagacagctctctcccctccatcaacgcgctgctgcaggccgaggtgctcagcagacaaattacatctcctgtctccggcatcaatggcgatattcgggctaaaaagatcgccagcatcgctgacgtgtgtgagtccatgaaagaacagctgcttgttctggtggagtgggccaagtacattcccgcgttttgcgaactccctctggatgaccaggtcgcccttctgcgcgctcacgccggggagcatctcctgctgggagctaccaagagatctatggtgttcaaagacgtgctcctgcttggcaacgattatatcgtcccccggcactgtcctgagctggccgaaatgagcagagtttccattcgcatcctcgacgagctggtgcttccgtttcaggaactgcaaattgatgacaatgagtacgcctacctcaaggctatcattttctttgatcccgacgcgaaagggctgagcgatcctggaaagatcaaacggctgagatctcaggtgcaggtctccctcgaagactatatcaacgatcgccagtacgacagccggggcagattcggggagctgcttctgctcctgcccacgcttcaatctattacctggcagatgatcgagcagattcaatttatcaagctgttcggaatggccaaaattgataatctcctgcaggaaatgctgctcggcggcagcccttccgacgctccccatgcccaccacccgctgcatcctcaccttatgcaggagcatatggggacaaacgtgatcgttgccaataccatgcccacacacctgtctaacggacagatgtgcgaatggcctcgcccccggggccaagctgccacccccgagacgcctcagccgtctccccctgggggatccggcagcgaaccctatagactcctgcctggggcggtggctacaatcgtcaagcccctgtctgccattccgcagcctaccatcacacgccaggaggtgatttgaggactagttataagactgactagcccgatgggcctcccaacgggccctcctcccctccttgcaccgagattaataaaaaaaaaaaaaaaaaaaaaaaaaaaaaaaaaaaaaaaaaaaaaaaaaaaaaaaaaaaaaaaatgcatcccccccccccccccccccccccccccccccaaaggctcttttcagagccaccagaatt

SEQ ID NO: 2729 - RNA, 1531 nt, synthetic construct
  misc_feature 1..1531: note = mRNA i-3 (A64-N5-C30-hSL-N5) (opt5) from Homo sapiens__NP_000448.3__HNF4A(39-474)(K458R)
  source 1..1531: mol_type = other RNA
aggagaaagcttaccatggacacatctcctagcgaggggaccaacctcaatgctccgaactccctgggagtgtctgccctttgcgccatctgtggcgatcgggctacagggaaacactacggagccagctcctgcgacggctgtaaggggtttttccgcagatctgtgcggaaaaatcatatgtatagctgccgcttttccagacaatgtgtcgtggataaggacaaacggaaccagtgccgctactgtagactgaagaagtgcttccgggctggaatgaaaaaggaagccgttcagaatgagcgcgatagaattagcacccggcgcagctcctatgaagacagctctctcccctccatcaacgcgctgctgcaggccgaggtgctcagcagacaaattacatctcctgtctccggcatcaatggcgatattcgggctaaaaagatcgccagcatcgctgacgtgtgtgagtccatgaaagaacagctgcttgttctggtggagtgggccaagtacattcccgcgttttgcgaactccctctggatgaccaggtcgcccttctgcgcgctcacgccggggagcatctcctgctgggagctaccaagagatctatggtgttcaaagacgtgctcctgcttggcaacgattatatcgtcccccggcactgtcctgagctggccgaaatgagcagagtttccattcgcatcctcgacgagctggtgcttccgtttcaggaactgcaaattgatgacaatgagtacgcctacctcaaggctatcattttctttgatcccgacgcgaaagggctgagcgatcctggaaagatcaaacggctgagatctcaggtgcaggtctccctcgaagactatatcaacgatcgccagtacgacagccggggcagattcggggagctgcttctgctcctgcccacgcttcaatctattacctggcagatgatcgagcagattcaatttatcaagctgttcggaatggccaaaattgataatctcctgcaggaaatgctgctcggcggcagcccttccgacgctccccatgcccaccacccgctgcatcctcaccttatgcaggagcatatggggacaaacgtgatcgttgccaataccatgcccacacacctgtctaacggacagatgtgcgaatggcctcgcccccggggccaagctgccacccccgagacgcctcagccgtctccccctgggggatccggcagcgaaccctataagctcctgcctggggcggtggctacaatcgtcagacccctgtctgccattccgcagcctaccatcacaaagcaggaggtgatttgaggactagttataagactgactagcccgatgggcctcccaacgggccctcctcccctccttgcaccgagattaataaaaaaaaaaaaaaaaaaaaaaaaaaaaaaaaaaaaaaaaaaaaaaaaaaaaaaaaaaaaaaaatgcatcccccccccccccccccccccccccccccccaaaggctcttttcagagccaccagaatt

SEQ ID NO: 2730 - RNA, 1531 nt, synthetic construct
  misc_feature 1..1531: note = mRNA i-3 (A64-N5-C30-hSL-N5) (opt5) from Homo sapiens__NP_000448.3__HNF4A(39-474)(K106R_K108R_K126R_K127R )
  source 1..1531: mol_type = other RNA
aggagaaagcttaccatggacacatctcctagcgaggggaccaacctcaatgctccgaactccctgggagtgtctgccctttgcgccatctgtggcgatcgggctacagggaaacactacggagccagctcctgcgacggctgtaaggggtttttccgcagatctgtgcggaaaaatcatatgtatagctgccgcttttccagacaatgtgtcgtggatcgggaccgcagaaaccagtgccggtactgtcgcctgaagaaatgcttcagagctggaatgcggcgcgaagccgttcagaatgagagagatcggattagcacccgcagatcttcctatgaagacagctctctcccctccatcaacgcgctgctgcaggccgaggtgctcagccggcaaattacatctcctgtctccggcatcaatggcgatattagagctaagaagatcgccagcatcgctgacgtgtgtgagtccatgaaagaacagctgcttgttctggtggagtgggccaagtacattcccgcgttttgcgaactccctctggatgaccaggtcgcccttctgcgcgctcacgccggggagcatctcctgctgggagctaccaaacggtctatggtgttcaaggacgtgctcctgcttggcaacgattatatcgtccccagacactgtcctgagctggccgaaatgagccgcgtttccattcggatcctcgacgagctggtgcttccgtttcaggaactgcaaattgatgacaatgagtacgcctacctcaaagctatcattttctttgatcccgacgcgaaggggctgagcgatcctggaaagatcaaaagactgcgctctcaggtgcaggtctccctcgaagactatatcaacgatcggcagtacgacagcagaggccgcttcggggagctgcttctgctcctgcccacgcttcaatctattacctggcagatgatcgagcagattcaatttatcaagctgttcggaatggccaaaattgataatctcctgcaggaaatgctgctcggcggcagcccttccgacgctccccatgcccaccacccgctgcatcctcaccttatgcaggagcatatggggacaaacgtgatcgttgccaataccatgcccacacacctgtctaacggacagatgtgcgaatggcctcggcccagaggccaagctgccacccccgagacgcctcagccgagccctcccgggggatccggcagcgaaccctataagctcctgcctggggcggtggctacaatcgtcaaacccctgtctgccattccgcagcctaccatcacaaagcaggaggtgatttgaggactagttataagactgactagcccgatgggcctcccaacgggccctcctcccctccttgcaccgagattaataaaaaaaaaaaaaaaaaaaaaaaaaaaaaaaaaaaaaaaaaaaaaaaaaaaaaaaaaaaaaaaatgcatcccccccccccccccccccccccccccccccaaaggctcttttcagagccaccagaatt

SEQ ID NO: 2731 - RNA, 1531 nt, synthetic construct
  misc_feature 1..1531: note = mRNA i-3 (A64-N5-C30-hSL-N5) (opt5) from Homo sapiens__NP_000448.3__HNF4A(39-474)(E285Q)
  source 1..1531: mol_type = other RNA
aggagaaagcttaccatggacacatctcctagcgaggggaccaacctcaatgctccgaactccctgggagtgtctgccctttgcgccatctgtggcgatcgggctacagggaaacactacggagccagctcctgcgacggctgtaaggggtttttccgcagatctgtgcggaaaaatcatatgtatagctgccgcttttccagacaatgtgtcgtggataaggacaaacggaaccagtgccgctactgtagactgaagaagtgcttccgggctggaatgaaaaaggaagccgttcagaatgagcgcgatagaattagcacccggcgcagctcctatgaagacagctctctcccctccatcaacgcgctgctgcaggccgaggtgctcagcagacaaattacatctcctgtctccggcatcaatggcgatattcgggctaaaaagatcgccagcatcgctgacgtgtgtgagtccatgaaagaacagctgcttgttctggtggagtgggccaagtacattcccgcgttttgcgaactccctctggatgaccaggtcgcccttctgcgcgctcacgccggggagcatctcctgctgggagctaccaagagatctatggtgttcaaagacgtgctcctgcttggcaacgattatatcgtcccccggcactgtcctgagctggccgaaatgagcagagtttccattcgcatcctcgacgagctggtgcttccgtttcaggaactgcaaattgatgacaatcagtacgcctacctcaaggctatcattttctttgatcccgacgcgaaagggctgagcgatcctggaaagatcaaacggctgagatctcaggtgcaggtctccctcgaggactatatcaacgatcgccaatacgacagccggggcagattcggggaactgcttctgctcctgcccacgcttcagtctattacctggcagatgatcgagcaaattcagtttatcaagctgttcggaatggccaaaattgataatctcctgcaggagatgctgctcggcggcagcccttccgacgctccccatgcccaccacccgctgcatcctcaccttatgcaggaacatatggggacaaacgtgatcgttgccaataccatgcccacacacctgtctaacggacaaatgtgcgagtggcctcgcccccggggccaggctgccacccccgaaacgcctcagccgtctccccctgggggatccggcagcgagccctataagctcctgcctggggcggtggctacaatcgtcaagcccctgtctgccattccgcagcctaccatcacaaaacaagaagtgatttgaggactagttataagactgactagcccgatgggcctcccaacgggccctcctcccctccttgcaccgagattaataaaaaaaaaaaaaaaaaaaaaaaaaaaaaaaaaaaaaaaaaaaaaaaaaaaaaaaaaaaaaaaatgcatcccccccccccccccccccccccccccccccaaaggctcttttcagagccaccagaatt

SEQ ID NO: 2732 - RNA, 1531 nt, synthetic construct
  misc_feature 1..1531: note = mRNA i-3 (A64-N5-C30-hSL-N5) (opt5) from Homo sapiens__NP_000448.3__HNF4A(39-474)(T166E)
  source 1..1531: mol_type = other RNA
aggagaaagcttaccatggacacatctcctagcgaggggaccaacctcaatgctccgaactccctgggagtgtctgccctttgcgccatctgtggcgatcgggctacagggaaacactacggagccagctcctgcgacggctgtaaggggtttttccgcagatctgtgcggaaaaatcatatgtatagctgccgcttttccagacaatgtgtcgtggataaggacaaacggaaccagtgccgctactgtagactgaagaagtgcttccgggctggaatgaaaaaggaagccgttcagaatgagcgcgatagaattagcacccggcgcagctcctatgaagacagctctctcccctccatcaacgcgctgctgcaggccgaggtgctcagcagacaaattgagtctcctgtctccggcatcaatggcgatattcgggctaaaaagatcgccagcatcgctgacgtgtgtgaatccatgaaagagcagctgcttgttctggtggaatgggccaagtacattcccgcgttttgcgagctccctctggatgaccaggtcgcccttctgcgcgctcacgccggggagcatctcctgctgggagctacaaagagatctatggtgttcaaagacgtgctcctgcttggcaacgattatatcgtcccccggcactgtcctgaactggccgagatgagcagagtttccattcgcatcctcgacgaactggtgcttccgtttcaggagctgcaaattgatgacaatgaatacgcctacctcaaggctatcattttctttgatcccgacgcgaaagggctgagcgatcctggaaagatcaaacggctgagatctcaggtgcaggtctccctcgaggactatatcaacgatcgccagtacgacagccggggcagattcggggagctgcttctgctcctgcccacccttcaatctattacgtggcagatgatcgaacagattcaatttatcaagctgttcggaatggccaaaattgataatctcctgcaggagatgctgctcggcggcagcccttccgacgctccccatgcccaccacccgctgcatcctcaccttatgcaggaacatatggggaccaacgtgatcgttgccaatacaatgcccacccacctgtctaacggacagatgtgcgagtggcctcgcccccggggccaagctgccacacccgaaacccctcagccgtctccccctgggggatccggcagcgagccctataagctcctgcctggggcggtggctacgatcgtcaagcccctgtctgccattccgcagcctacaatcaccaaacaggaggtgatttgaggactagttataagactgactagcccgatgggcctcccaacgggccctcctcccctccttgcaccgagattaataaaaaaaaaaaaaaaaaaaaaaaaaaaaaaaaaaaaaaaaaaaaaaaaaaaaaaaaaaaaaaaatgcatcccccccccccccccccccccccccccccccaaaggctcttttcagagccaccagaatt

SEQ ID NO: 2733 - RNA, 1531 nt, synthetic construct
  misc_feature 1..1531: note = mRNA i-3 (A64-N5-C30-hSL-N5) (opt5) from Homo sapiens__NP_000448.3__HNF4A(39-474)(S148A)
  source 1..1531: mol_type = other RNA
aggagaaagcttaccatggacacatctcctagcgaggggaccaacctcaatgctccgaactccctgggagtgtctgccctttgcgccatctgtggcgatcgggctacagggaaacactacggagccagctcctgcgacggctgtaaggggtttttccgcagatctgtgcggaaaaatcatatgtatagctgccgcttttccagacaatgtgtcgtggataaggacaaacggaaccagtgccgctactgtagactgaagaagtgcttccgggctggaatgaaaaaggaagccgttcagaatgagcgcgatagaattagcacccggagatcttcctatgaagacagcgcgctcccctctatcaacgccctgctgcaggctgaggtgctctcccgccaaattacaagccctgtctctggcatcaatggcgatattcgggccaaaaagatcgcttccatcgccgacgtgtgtgagagcatgaaagaacagctgcttgttctggtggagtgggcgaagtacattcccgccttttgcgaactccctctggatgaccaggtcgcccttctgcgcgcccacgctggggagcatctcctgctgggagccaccaagagatccatggtgttcaaagacgtgctcctgcttggcaacgattatatcgtcccccggcactgtcctgagctggccgaaatgtctagagttagcattcgcatcctcgacgagctggtgcttccgtttcaggaactgcaaattgatgacaatgagtacgcttacctcaaggcgatcattttctttgatcccgacgccaaagggctgtccgatcctggaaagatcaaacggctgagaagccaggtgcaggtctctctcgaagactatatcaacgatcgccagtacgactcccggggcagattcggggagctgcttctgctcctgcccacgcttcaaagcattacctggcagatgatcgagcagattcaatttatcaagctgttcggaatggctaaaattgataatctcctgcaggaaatgctgctcggcggctctcctagcgacgctccccatgcccaccacccgctgcatcctcaccttatgcaggagcatatggggacaaacgtgatcgttgctaataccatgcccacacacctgtccaacggacagatgtgcgaatggcctcgcccccggggccaagccgcgacccccgagacgcctcagccgtctccccctgggggaagcggctccgaaccctataagctcctgcctggggctgtggccacaatcgtcaagcccctgagcgccattccgcagcctaccatcacaaaacaggaggtgatttgaggactagttataagactgactagcccgatgggcctcccaacgggccctcctcccctccttgcaccgagattaataaaaaaaaaaaaaaaaaaaaaaaaaaaaaaaaaaaaaaaaaaaaaaaaaaaaaaaaaaaaaaaatgcatcccccccccccccccccccccccccccccccaaaggctcttttcagagccaccagaatt

SEQ ID NO: 2734 - RNA, 1531 nt, synthetic construct
  misc_feature 1..1531: note = mRNA i-3 (A64-N5-C30-hSL-N5) (opt5) from Homo sapiens__NP_000448.3__HNF4A(39-474)(S148E)
  source 1..1531: mol_type = other RNA
aggagaaagcttaccatggacacatctcctagcgaggggaccaacctcaatgctccgaactccctgggagtgtctgccctttgcgccatctgtggcgatcgggctacagggaaacactacggagccagctcctgcgacggctgtaaggggtttttccgcagatctgtgcggaaaaatcatatgtatagctgccgcttttccagacaatgtgtcgtggataaggacaaacggaaccagtgccgctactgtagactgaagaagtgcttccgggctggaatgaaaaaggaagccgttcagaatgagcgcgatagaattagcacccggagatcttcctatgaagacagcgagctcccctctatcaacgcgctgctgcaggccgaggtgctctcccgccaaattacaagccctgtctctggcatcaatggcgatattcgggctaaaaagatcgcctccatcgctgacgtgtgtgaaagcatgaaagagcagctgcttgttctggtggaatgggccaagtacattcccgcgttttgcgagctccctctggatgaccaggtcgcccttctgcgcgctcacgccggggagcatctcctgctgggagctaccaagagatccatggtgttcaaagacgtgctcctgcttggcaacgattatatcgtcccccggcactgtcctgaactggccgagatgtctagagttagcattcgcatcctcgacgaactggtgcttccgtttcaggagctgcaaattgatgacaatgaatacgcctacctcaaggctatcattttctttgatcccgacgcgaaagggctgtccgatcctggaaagatcaaacggctgagaagccaggtgcaggtctctctcgaggactatatcaacgatcgccagtacgactcccggggcagattcggggagctgcttctgctcctgcccacgcttcaaagcattacctggcagatgatcgaacagattcaatttatcaagctgttcggaatggccaaaattgataatctcctgcaggagatgctgctcggcggctctcctagcgacgctccccatgcccaccacccgctgcatcctcaccttatgcaggaacatatggggacaaacgtgatcgttgccaataccatgcccacacacctgtccaacggacagatgtgcgagtggcctcgcccccggggccaagctgccacccccgaaacgcctcagccgtctccccctgggggaagcggctccgagccctataagctcctgcctggggcggtggctacaatcgtcaagcccctgagcgccattccgcagcctaccatcacaaaacaggaggtgatttgaggactagttataagactgactagcccgatgggcctcccaacgggccctcctcccctccttgcaccgagattaataaaaaaaaaaaaaaaaaaaaaaaaaaaaaaaaaaaaaaaaaaaaaaaaaaaaaaaaaaaaaaaatgcatcccccccccccccccccccccccccccccccaaaggctcttttcagagccaccagaatt

SEQ ID NO: 2735 - RNA, 1531 nt, synthetic construct
  misc_feature 1..1531: note = mRNA i-3 (A64-N5-C30-hSL-N5) (opt5) from Homo sapiens__NP_000448.3__HNF4A(39-474)(S183A)
  source 1..1531: mol_type = other RNA
aggagaaagcttaccatggacacatctcctagcgaggggaccaacctcaatgctccgaactccctgggagtgtctgccctttgcgccatctgtggcgatcgggctacagggaaacactacggagccagctcctgcgacggctgtaaggggtttttccgcagatctgtgcggaaaaatcatatgtatagctgccgcttttccagacaatgtgtcgtggataaggacaaacggaaccagtgccgctactgtagactgaagaagtgcttccgggctggaatgaaaaaggaagccgttcagaatgagcgcgatagaattagcacccggagatcttcctatgaagacagctctctcccctccatcaacgcgctgctgcaggccgaggtgctcagccgccaaattacatctcctgtctccggcatcaatggcgatattcgggctaaaaagatcgccgctatcgccgacgtgtgtgagagcatgaaagaacagctgcttgttctggtggagtgggcgaagtacattcccgccttttgcgaactccctctggatgaccaggtcgcccttctgcgcgcccacgctggggagcatctcctgctgggagccaccaagagatccatggtgttcaaagacgtgctcctgcttggcaacgattatatcgtcccccggcactgtcctgagctggccgaaatgtctagagttagcattcgcatcctcgacgagctggtgcttccgtttcaggaactgcaaattgatgacaatgagtacgcttacctcaaggcgatcattttctttgatcccgacgccaaagggctgtccgatcctggaaagatcaaacggctgagaagccaggtgcaggtctctctcgaagactatatcaacgatcgccagtacgactcccggggcagattcggggagctgcttctgctcctgcccacgcttcaaagcattacctggcagatgatcgagcagattcaatttatcaagctgttcggaatggctaaaattgataatctcctgcaggaaatgctgctcggcggctctcctagcgacgctccccatgcccaccacccgctgcatcctcaccttatgcaggagcatatggggacaaacgtgatcgttgctaataccatgcccacacacctgtccaacggacagatgtgcgaatggcctcgcccccggggccaagccgcgacccccgagacgcctcagccgtctccccctgggggaagcggctccgaaccctataagctcctgcctggggctgtggccacaatcgtcaagcccctgagcgccattccgcagcctaccatcacaaaacaggaggtgatttgaggactagttataagactgactagcccgatgggcctcccaacgggccctcctcccctccttgcaccgagattaataaaaaaaaaaaaaaaaaaaaaaaaaaaaaaaaaaaaaaaaaaaaaaaaaaaaaaaaaaaaaaaatgcatcccccccccccccccccccccccccccccccaaaggctcttttcagagccaccagaatt

SEQ ID NO: 2736 - RNA, 1531 nt, synthetic construct
  misc_feature 1..1531: note = mRNA i-3 (A64-N5-C30-hSL-N5) (opt5) from Homo sapiens__NP_000448.3__HNF4A(39-474)(S183E)
  source 1..1531: mol_type = other RNA
aggagaaagcttaccatggacacatctcctagcgaggggaccaacctcaatgctccgaactccctgggagtgtctgccctttgcgccatctgtggcgatcgggctacagggaaacactacggagccagctcctgcgacggctgtaaggggtttttccgcagatctgtgcggaaaaatcatatgtatagctgccgcttttccagacaatgtgtcgtggataaggacaaacggaaccagtgccgctactgtagactgaagaagtgcttccgggctggaatgaaaaaggaagccgttcagaatgagcgcgatagaattagcacccggagatcttcctatgaagacagctctctcccctccatcaacgcgctgctgcaggccgaggtgctcagccgccaaattacatctcctgtctccggcatcaatggcgatattcgggctaaaaagatcgccgagatcgctgacgtgtgtgaaagcatgaaagagcagctgcttgttctggtggaatgggccaagtacattcccgcgttttgcgagctccctctggatgaccaggtcgcccttctgcgcgctcacgccggggagcatctcctgctgggagctaccaagagatccatggtgttcaaagacgtgctcctgcttggcaacgattatatcgtcccccggcactgtcctgaactggccgagatgtctagagttagcattcgcatcctcgacgaactggtgcttccgtttcaggagctgcaaattgatgacaatgaatacgcctacctcaaggctatcattttctttgatcccgacgcgaaagggctgtccgatcctggaaagatcaaacggctgagaagccaggtgcaggtctctctcgaggactatatcaacgatcgccagtacgactcccggggcagattcggggagctgcttctgctcctgcccacgcttcaaagcattacctggcagatgatcgaacagattcaatttatcaagctgttcggaatggccaaaattgataatctcctgcaggagatgctgctcggcggctctcctagcgacgctccccatgcccaccacccgctgcatcctcaccttatgcaggaacatatggggacaaacgtgatcgttgccaataccatgcccacacacctgtccaacggacagatgtgcgagtggcctcgcccccggggccaagctgccacccccgaaacgcctcagccgtctccccctgggggaagcggctccgagccctataagctcctgcctggggcggtggctacaatcgtcaagcccctgagcgccattccgcagcctaccatcacaaaacaggaggtgatttgaggactagttataagactgactagcccgatgggcctcccaacgggccctcctcccctccttgcaccgagattaataaaaaaaaaaaaaaaaaaaaaaaaaaaaaaaaaaaaaaaaaaaaaaaaaaaaaaaaaaaaaaaatgcatcccccccccccccccccccccccccccccccaaaggctcttttcagagccaccagaatt

SEQ ID NO: 2737 - RNA, 1531 nt, synthetic construct
  misc_feature 1..1531: note = mRNA i-3 (A64-N5-C30-hSL-N5) (opt5) from Homo sapiens__NP_000448.3__HNF4A(39-474)(S461A)
  source 1..1531: mol_type = other RNA
aggagaaagcttaccatggacacatctcctagcgaggggaccaacctcaatgctccgaactccctgggagtgtctgccctttgcgccatctgtggcgatcgggctacagggaaacactacggagccagctcctgcgacggctgtaaggggtttttccgcagatctgtgcggaaaaatcatatgtatagctgccgcttttccagacaatgtgtcgtggataaggacaaacggaaccagtgccgctactgtagactgaagaagtgcttccgggctggaatgaaaaaggaagccgttcagaatgagcgcgatagaattagcacccggcgcagctcctatgaagacagctctctcccctccatcaacgcgctgctgcaggccgaggtgctcagcagacaaattacatctcctgtctccggcatcaatggcgatattcgggctaaaaagatcgccagcatcgctgacgtgtgtgagtccatgaaagaacagctgcttgttctggtggagtgggccaagtacattcccgcgttttgcgaactccctctggatgaccaggtcgcccttctgcgcgctcacgccggggagcatctcctgctgggagctaccaagagatctatggtgttcaaagacgtgctcctgcttggcaacgattatatcgtcccccggcactgtcctgagctggccgaaatgagcagagtttccattcgcatcctcgacgagctggtgcttccgtttcaggaactgcaaattgatgacaatgagtacgcctacctcaaggctatcattttctttgatcccgacgcgaaagggctgagcgatcctggaaagatcaaacggctgagatctcaggtgcaggtctccctcgaagactatatcaacgatcgccagtacgacagccggggcagattcggggagctgcttctgctcctgcccacgcttcaatctattacctggcagatgatcgagcagattcaatttatcaagctgttcggaatggccaaaattgataatctcctgcaggaaatgctgctcggcggcagcccttccgacgctccccatgcccaccacccgctgcatcctcaccttatgcaggagcatatggggacaaacgtgatcgttgccaataccatgcccacacacctgtctaacggacagatgtgcgaatggcctcgcccccggggccaagctgccacccccgagacgcctcagccgtctccccctgggggatccggcagcgaaccctataagctcctgcctggggcggtggctacaatcgtcaagcccctggccgccattccgcagcctaccatcacaaaacaggaggtgatttgaggactagttataagactgactagcccgatgggcctcccaacgggccctcctcccctccttgcaccgagattaataaaaaaaaaaaaaaaaaaaaaaaaaaaaaaaaaaaaaaaaaaaaaaaaaaaaaaaaaaaaaaaatgcatcccccccccccccccccccccccccccccccaaaggctcttttcagagccaccagaatt

SEQ ID NO: 2738 - RNA, 1531 nt, synthetic construct
  misc_feature 1..1531: note = mRNA i-3 (A64-N5-C30-hSL-N5) (opt5) from Homo sapiens__NP_000448.3__HNF4A(39-474)(S461E)
  source 1..1531: mol_type = other RNA
aggagaaagcttaccatggacacatctcctagcgaggggaccaacctcaatgctccgaactccctgggagtgtctgccctttgcgccatctgtggcgatcgggctacagggaaacactacggagccagctcctgcgacggctgtaaggggtttttccgcagatctgtgcggaaaaatcatatgtatagctgccgcttttccagacaatgtgtcgtggataaggacaaacggaaccagtgccgctactgtagactgaagaagtgcttccgggctggaatgaaaaaggaagccgttcagaatgagcgcgatagaattagcacccggcgcagctcctatgaagacagctctctcccctccatcaacgcgctgctgcaggccgaggtgctcagcagacaaattacatctcctgtctccggcatcaatggcgatattcgggctaaaaagatcgccagcatcgctgacgtgtgtgagtccatgaaagaacagctgcttgttctggtggagtgggccaagtacattcccgcgttttgcgaactccctctggatgaccaggtcgcccttctgcgcgctcacgccggggagcatctcctgctgggagctaccaagagatctatggtgttcaaagacgtgctcctgcttggcaacgattatatcgtcccccggcactgtcctgagctggccgaaatgagcagagtttccattcgcatcctcgacgagctggtgcttccgtttcaggaactgcaaattgatgacaatgagtacgcctacctcaaggctatcattttctttgatcccgacgcgaaagggctgagcgatcctggaaagatcaaacggctgagatctcaggtgcaggtctccctcgaagactatatcaacgatcgccagtacgacagccggggcagattcggggagctgcttctgctcctgcccacgcttcaatctattacctggcagatgatcgagcagattcaatttatcaagctgttcggaatggccaaaattgataatctcctgcaggaaatgctgctcggcggcagcccttccgacgctccccatgcccaccacccgctgcatcctcaccttatgcaggagcatatggggacaaacgtgatcgttgccaataccatgcccacacacctgtctaacggacagatgtgcgaatggcctcgcccccggggccaagctgccacccccgagacgcctcagccgtctccccctgggggatccggcagcgaaccctataagctcctgcctggggcggtggctacaatcgtcaagcccctggaggccattccgcagcctaccatcacaaaacaggaggtgatttgaggactagttataagactgactagcccgatgggcctcccaacgggccctcctcccctccttgcaccgagattaataaaaaaaaaaaaaaaaaaaaaaaaaaaaaaaaaaaaaaaaaaaaaaaaaaaaaaaaaaaaaaaatgcatcccccccccccccccccccccccccccccccaaaggctcttttcagagccaccagaatt

SEQ ID NO: 2739 - RNA, 1531 nt, synthetic construct
  misc_feature 1..1531: note = mRNA i-3 (A64-N5-C30-hSL-N5) (opt5) from Homo sapiens__NP_000448.3__HNF4A(39-474)(S142A_S143A_S313A)
  source 1..1531: mol_type = other RNA
aggagaaagcttaccatggacacatctcctagcgaggggaccaacctcaatgctccgaactccctgggagtgtctgccctttgcgccatctgtggcgatcgggctacagggaaacactacggagccagctcctgcgacggctgtaaggggtttttccgcagatctgtgcggaaaaatcatatgtatagctgccgcttttccagacaatgtgtcgtggataaggacaaacggaaccagtgccgctactgtagactgaagaagtgcttccgggctggaatgaaaaaggaagccgttcagaatgagcgcgatagaattagcacccggcgcgcggcctatgaagactcttccctccccagcatcaacgctctgctgcaggccgaggtgctctctagacaaattacatcccctgtcagcggcatcaatggcgatattcgggctaaaaagatcgcctctatcgcggacgtgtgtgagtccatgaaagaacagctgcttgttctggtggagtgggccaagtacattcccgctttttgcgaactccctctggatgaccaggtcgcccttctgcgcgctcacgccggggagcatctcctgctgggagccaccaagagaagcatggtgttcaaagacgtgctcctgcttggcaacgattatatcgtcccccggcactgtcctgagctggctgaaatgtccagagtttctattcgcatcctcgacgagctggtgcttccgtttcaggaactgcaaattgatgacaatgagtacgcgtacctcaaggccatcattttctttgatcccgacgctaaagggctgagcgatcctggaaagatcaaacggctgagagcccaggtgcaggtctccctcgaagactatatcaacgatcgccagtacgacagccggggcagattcggggagctgcttctgctcctgcccacgcttcaatctattacctggcagatgatcgagcagattcaatttatcaagctgttcggaatggccaaaattgataatctcctgcaggaaatgctgctcggcggctcccctagcgacgctccccatgcccaccacccgctgcatcctcaccttatgcaggagcatatggggacaaacgtgatcgttgcgaataccatgcccacacacctgtctaacggacagatgtgcgaatggcctcgcccccggggccaagctgccacccccgagacgcctcagccgagccctcccgggggatccggctctgaaccctataagctcctgcctggggccgtggctacaatcgtcaagcccctgagcgccattccgcagcctaccatcacaaaacaggaggtgatttgaggactagttataagactgactagcccgatgggcctcccaacgggccctcctcccctccttgcaccgagattaataaaaaaaaaaaaaaaaaaaaaaaaaaaaaaaaaaaaaaaaaaaaaaaaaaaaaaaaaaaaaaaatgcatcccccccccccccccccccccccccccccccaaaggctcttttcagagccaccagaatt

SEQ ID NO: 2740 - RNA, 1531 nt, synthetic construct
  misc_feature 1..1531: note = mRNA i-3 (A64-N5-C30-hSL-N5) (opt5) from Homo sapiens__NP_000448.3__HNF4A(39-474)(S142A_S143A_S313A_K458R )
  source 1..1531: mol_type = other RNA
aggagaaagcttaccatggacacatctcctagcgaggggaccaacctcaatgctccgaactccctgggagtgtctgccctttgcgccatctgtggcgatcgggctacagggaaacactacggagccagctcctgcgacggctgtaaggggtttttccgcagatctgtgcggaaaaatcatatgtatagctgccgcttttccagacaatgtgtcgtggataaggacaaacggaaccagtgccgctactgtagactgaagaagtgcttccgggctggaatgaaaaaggaagccgttcagaatgagcgcgatagaattagcacccggcgcgcggcctatgaagactcttccctccccagcatcaacgctctgctgcaggccgaggtgctctctagacaaattacatcccctgtcagcggcatcaatggcgatattcgggctaaaaagatcgcctctatcgcggacgtgtgtgagtccatgaaagaacagctgcttgttctggtggagtgggccaagtacattcccgctttttgcgaactccctctggatgaccaggtcgcccttctgcgcgctcacgccggggagcatctcctgctgggagccaccaagagaagcatggtgttcaaagacgtgctcctgcttggcaacgattatatcgtcccccggcactgtcctgagctggctgaaatgtccagagtttctattcgcatcctcgacgagctggtgcttccgtttcaggaactgcaaattgatgacaatgagtacgcgtacctcaaggccatcattttctttgatcccgacgctaaagggctgagcgatcctggaaagatcaaacggctgagagcccaggtgcaggtctccctcgaagactatatcaacgatcgccagtacgacagccggggcagattcggggagctgcttctgctcctgcccacgcttcaatctattacctggcagatgatcgagcagattcaatttatcaagctgttcggaatggccaaaattgataatctcctgcaggaaatgctgctcggcggctcccctagcgacgctccccatgcccaccacccgctgcatcctcaccttatgcaggagcatatggggacaaacgtgatcgttgcgaataccatgcccacacacctgtctaacggacagatgtgcgaatggcctcgcccccggggccaagctgccacccccgagacgcctcagccgagccctcccgggggatccggctctgaaccctataagctcctgcctggggccgtggctacaatcgtcagacccctgagcgccattccgcagcctaccatcacaaagcaggaggtgatttgaggactagttataagactgactagcccgatgggcctcccaacgggccctcctcccctccttgcaccgagattaataaaaaaaaaaaaaaaaaaaaaaaaaaaaaaaaaaaaaaaaaaaaaaaaaaaaaaaaaaaaaaaatgcatcccccccccccccccccccccccccccccccaaaggctcttttcagagccaccagaatt

SEQ ID NO: 2741 - RNA, 1531 nt, synthetic construct
  misc_feature 1..1531: note = mRNA i-3 (A64-N5-C30-hSL-N5) (opt5) from Homo sapiens__NP_000448.3__HNF4A(39-474)(S142A_S143A_S167A_S313A _S378A_T429A_T432A_S436A_K458R)
  source 1..1531: mol_type = other RNA
aggagaaagcttaccatggacacatctcctagcgaggggaccaacctcaatgctccgaactccctgggagtgtctgccctttgcgccatctgtggcgatcgggctacagggaaacactacggagccagctcctgcgacggctgtaaggggtttttccgcagatctgtgcggaaaaatcatatgtatagctgccgcttttccagacaatgtgtcgtggataaggacaaacggaaccagtgccgctactgtagactgaagaagtgcttccgggctggaatgaaaaaggaagccgttcagaatgagcgcgatagaattagcacccggcgcgcggcctatgaagactcttccctccccagcatcaacgctctgctgcaggccgaggtgctctctagacaaattacagctcctgtctccggcatcaatggcgatattcgggccaaaaagatcgcgagcatcgccgacgtgtgtgagtctatgaaagaacagctgcttgttctggtggagtgggctaagtacattcccgccttttgcgaactccctctggatgaccaggtcgcccttctgcgcgcccacgccggggagcatctcctgctgggagctaccaagagatccatggtgttcaaagacgtgctcctgcttggcaacgattatatcgtcccccggcactgtcctgagctggcggaaatgagcagagtttccattcgcatcctcgacgagctggtgcttccgtttcaggaactgcaaattgatgacaatgagtacgcctacctcaaggctatcattttctttgatcccgacgccaaagggctgtctgatcctggaaagatcaaacggctgagagcccaggtgcaggtcagcctcgaagactatatcaacgatcgccagtacgactcccggggcagattcggggagctgcttctgctcctgcccacgcttcaaagcattacctggcagatgatcgagcagattcaatttatcaagctgttcggaatggctaaaattgataatctcctgcaggaaatgctgctcggcggcgccccttctgacgcgccccatgctcaccacccgctgcatcctcaccttatgcaggagcatatggggacaaacgtgatcgttgccaataccatgcccacacacctgtccaacggacagatgtgcgaatggcctcgcccccggggccaagccgctgcccccgaggctcctcagccggctccccctgggggaagcggctctgaaccctataagctcctgcctggggcggtggccaccatcgtcagacccctgagcgctattccgcagcctacgatcacaaagcaggaggtgatttgaggactagttataagactgactagcccgatgggcctcccaacgggccctcctcccctccttgcaccgagattaataaaaaaaaaaaaaaaaaaaaaaaaaaaaaaaaaaaaaaaaaaaaaaaaaaaaaaaaaaaaaaaatgcatcccccccccccccccccccccccccccccccaaaggctcttttcagagccaccagaatt

SEQ ID NO: 2742 - RNA, 1531 nt, synthetic construct
  misc_feature 1..1531: note = mRNA i-3 (A64-N5-C30-hSL-N5) (opt5) from Homo sapiens__NP_000448.3__HNF4A(39-474)(S142A_S143A_S148A_S167A _S313A_S378A_T429A_T432A_S436A_K458R)
  source 1..1531: mol_type = other RNA
aggagaaagcttaccatggacacatctcctagcgaggggaccaacctcaatgctccgaactccctgggagtgtctgccctttgcgccatctgtggcgatcgggctacagggaaacactacggagccagctcctgcgacggctgtaaggggtttttccgcagatctgtgcggaaaaatcatatgtatagctgccgcttttccagacaatgtgtcgtggataaggacaaacggaaccagtgccgctactgtagactgaagaagtgcttccgggctggaatgaaaaaggaagccgttcagaatgagcgcgatagaattagcacccggcgcgcggcctatgaagactctgctctcccctccatcaacgccctgctgcaggctgaggtgctcagcagacaaattacagcccctgtctctggcatcaatggcgatattcgggcgaaaaagatcgcctccatcgctgacgtgtgtgagagcatgaaagaacagctgcttgttctggtggagtgggccaagtacattcccgctttttgcgaactccctctggatgaccaggtcgcccttctgcgcgcccacgctggggagcatctcctgctgggagcgaccaagagatctatggtgttcaaagacgtgctcctgcttggcaacgattatatcgtcccccggcactgtcctgagctggccgaaatgtccagagttagcattcgcatcctcgacgagctggtgcttccgtttcaggaactgcaaattgatgacaatgagtacgcttacctcaaggccatcattttctttgatcccgacgccaaagggctgtccgatcctggaaagatcaaacggctgagagctcaggtgcaggtctctctcgaagactatatcaacgatcgccagtacgacagccggggcagattcggggagctgcttctgctcctgcccacgcttcaatccattacctggcagatgatcgagcagattcaatttatcaagctgttcggaatggccaaaattgataatctcctgcaggaaatgctgctcggcggcgcgcctagcgacgctccccatgcccaccacccgctgcatcctcaccttatgcaggagcatatggggacaaacgtgatcgttgccaataccatgcccacacacctgtctaacggacagatgtgcgaatggcctcgcccccggggccaagctgccgctcccgaggcccctcagccggcgccccctgggggatccggcagcgaaccctataagctcctgcctggggccgtggctaccatcgtcagacccctgtctgccattccgcagcctacgatcacaaagcaggaggtgatttgaggactagttataagactgactagcccgatgggcctcccaacgggccctcctcccctccttgcaccgagattaataaaaaaaaaaaaaaaaaaaaaaaaaaaaaaaaaaaaaaaaaaaaaaaaaaaaaaaaaaaaaaaatgcatcccccccccccccccccccccccccccccccaaaggctcttttcagagccaccagaatt

SEQ ID NO: 2743 - RNA, 1531 nt, synthetic construct
  misc_feature 1..1531: note = mRNA i-3 (A64-N5-C30-hSL-N5) (opt5) from Homo sapiens__NP_000448.3__HNF4A(39-474)(K106R_K108R_K126R_K127R _S142A_S143A_S148A_S167A_S313A_S378A_T429A_T432A_S436A_K458 R)
  source 1..1531: mol_type = other RNA
aggagaaagcttaccatggacacatctcctagcgaggggaccaacctcaatgctccgaactccctgggagtgtctgccctttgcgccatctgtggcgatcgggctacagggaaacactacggagccagctcctgcgacggctgtaaggggtttttccgcagatctgtgcggaaaaatcatatgtatagctgccgcttttccagacaatgtgtcgtggatcgggaccgcagaaaccagtgccggtactgtcgcctgaagaaatgcttcagagctggaatgcggcgcgaagccgttcagaatgagagagatcggattagcacccgcagagcggcctatgaagactctgctctcccctccatcaacgccctgctgcaggctgaggtgctcagccggcaaattacagcccctgtctctggcatcaatggcgatattagagcgaagaagatcgcctccatcgctgacgtgtgtgagagcatgaaagaacagctgcttgttctggtggagtgggccaagtacattcccgctttttgcgaactccctctggatgaccaggtcgcccttctgcgcgcccacgctggggagcatctcctgctgggagcgaccaaacggtctatggtgttcaaggacgtgctcctgcttggcaacgattatatcgtccccagacactgtcctgagctggccgaaatgtcccgcgttagcattcggatcctcgacgagctggtgcttccgtttcaggaactgcaaattgatgacaatgagtacgcttacctcaaagccatcattttctttgatcccgacgccaaggggctgtccgatcctggaaagatcaaaagactgcgcgctcaggtgcaggtctctctcgaagactatatcaacgatcggcagtacgacagcagaggccgcttcggggagctgcttctgctcctgcccacgcttcaatccattacctggcagatgatcgagcagattcaatttatcaagctgttcggaatggccaaaattgataatctcctgcaggaaatgctgctcggcggcgcgcctagcgacgctccccatgcccaccacccgctgcatcctcaccttatgcaggagcatatggggacaaacgtgatcgttgccaataccatgcccacacacctgtctaacggacagatgtgcgaatggcctcggcccagaggccaagctgccgctcccgaggcccctcagccggcgccccctgggggatccggcagcgaaccctataagctcctgcctggggccgtggctaccatcgtccgccccctgtctgccattccgcagcctacgatcacaaaacaggaggtgatttgaggactagttataagactgactagcccgatgggcctcccaacgggccctcctcccctccttgcaccgagattaataaaaaaaaaaaaaaaaaaaaaaaaaaaaaaaaaaaaaaaaaaaaaaaaaaaaaaaaaaaaaaaatgcatcccccccccccccccccccccccccccccccaaaggctcttttcagagccaccagaatt

SEQ ID NO: 2744 - RNA, 1531 nt, synthetic construct
  misc_feature 1..1531: note = mRNA i-3 (A64-N5-C30-hSL-N5) (opt5) from Homo sapiens__NP_000448.3__HNF4A(39-474)(S142A_S143A_S148A_T166A _S167A_S313A_S378A_T429A_T432A_S436A_K458R)
  source 1..1531: mol_type = other RNA
aggagaaagcttaccatggacacatctcctagcgaggggaccaacctcaatgctccgaactccctgggagtgtctgccctttgcgccatctgtggcgatcgggctacagggaaacactacggagccagctcctgcgacggctgtaaggggtttttccgcagatctgtgcggaaaaatcatatgtatagctgccgcttttccagacaatgtgtcgtggataaggacaaacggaaccagtgccgctactgtagactgaagaagtgcttccgggctggaatgaaaaaggaagccgttcagaatgagcgcgatagaattagcacccggcgcgcggcctatgaagactctgctctcccctccatcaacgccctgctgcaggctgaggtgctcagcagacaaattgccgcgcctgtctctggcatcaatggcgatattcgggccaaaaagatcgcttccatcgccgacgtgtgtgagagcatgaaagaacagctgcttgttctggtggagtgggctaagtacattcccgccttttgcgaactccctctggatgaccaggtcgcccttctgcgcgctcacgcgggggagcatctcctgctgggagccacaaagagatctatggtgttcaaagacgtgctcctgcttggcaacgattatatcgtcccccggcactgtcctgagctggctgaaatgtccagagttagcattcgcatcctcgacgagctggtgcttccgtttcaggaactgcaaattgatgacaatgagtacgcctacctcaaggccatcattttctttgatcccgacgctaaagggctgtccgatcctggaaagatcaaacggctgagagcccaggtgcaggtctctctcgaagactatatcaacgatcgccagtacgacagccggggcagattcggggagctgcttctgctcctgcccacccttcaatccattacgtggcagatgatcgagcagattcaatttatcaagctgttcggaatggcgaaaattgataatctcctgcaggaaatgctgctcggcggcgctcctagcgacgctccccatgcccaccacccgctgcatcctcaccttatgcaggagcatatggggaccaacgtgatcgttgccaatacaatgcccacccacctgtctaacggacagatgtgcgaatggcctcgcccccggggccaagccgctgcccccgaggcgcctcagccggctccccctgggggatccggcagcgaaccctataagctcctgcctggggccgtggccacaatcgtcagacccctgtctgctattccgcagcctaccatcacgaagcaggaggtgatttgaggactagttataagactgactagcccgatgggcctcccaacgggccctcctcccctccttgcaccgagattaataaaaaaaaaaaaaaaaaaaaaaaaaaaaaaaaaaaaaaaaaaaaaaaaaaaaaaaaaaaaaaaatgcatcccccccccccccccccccccccccccccccaaaggctcttttcagagccaccagaatt

SEQ ID NO: 2745 - RNA, 1531 nt, synthetic construct
  misc_feature 1..1531: note = mRNA i-3 (A64-N5-C30-hSL-N5) (opt5) from Homo sapiens__NP_000448.3__HNF4A(39-474)(S87A_S142A_S143A_S148A_ T166A_S167A_S313A_S378A_T429A_T432A_S436A_K458R)
  source 1..1531: mol_type = other RNA
aggagaaagcttaccatggacacatctcctagcgaggggaccaacctcaatgctccgaactccctgggagtgtctgccctttgcgccatctgtggcgatcgggctacagggaaacactacggagccagctcctgcgacggctgtaaggggtttttccgcagagctgtgcggaaaaatcatatgtattcttgccgctttagcagacaatgtgtcgtggataaggacaaacggaaccagtgccgctactgtagactgaagaagtgcttccgggccggaatgaaaaaggaagcggttcagaatgagcgcgatagaatttccacccggcgcgccgcttatgaagacagcgccctcccctctatcaacgctctgctgcaggccgaggtgctctccagacaaattgcggcccctgtcagcggcatcaatggcgatattcgggctaaaaagatcgcctctatcgctgacgtgtgtgagtccatgaaagaacagctgcttgttctggtggagtgggccaagtacattcccgccttttgcgaactccctctggatgaccaggtcgcccttctgcgcgcgcacgccggggagcatctcctgctgggagctacaaagagaagcatggtgttcaaagacgtgctcctgcttggcaacgattatatcgtcccccggcactgtcctgagctggccgaaatgtctagagtttccattcgcatcctcgacgagctggtgcttccgtttcaggaactgcaaattgatgacaatgagtacgcctacctcaaggctatcattttctttgatcccgacgccaaagggctgagcgatcctggaaagatcaaacggctgagagctcaggtgcaggtctccctcgaagactatatcaacgatcgccagtacgactctcggggcagattcggggagctgcttctgctcctgcccacccttcaaagcattacgtggcagatgatcgagcagattcaatttatcaagctgttcggaatggcgaaaattgataatctcctgcaggaaatgctgctcggcggcgccccttccgacgctccccatgctcaccacccgctgcatcctcaccttatgcaggagcatatggggaccaacgtgatcgttgccaatacaatgcccacccacctgagcaacggacagatgtgcgaatggcctcgcccccggggccaagctgccgcgcccgaggcccctcagccggctccccctgggggatctggctccgaaccctataagctcctgcctggggccgtggctacaatcgtcagacccctgagcgccattccgcagcctaccatcacgaagcaggaggtgatttgaggactagttataagactgactagcccgatgggcctcccaacgggccctcctcccctccttgcaccgagattaataaaaaaaaaaaaaaaaaaaaaaaaaaaaaaaaaaaaaaaaaaaaaaaaaaaaaaaaaaaaaaaatgcatcccccccccccccccccccccccccccccccaaaggctcttttcagagccaccagaatt

SEQ ID NO: 2746 - RNA, 1531 nt, synthetic construct
  misc_feature 1..1531: note = mRNA i-3 (A64-N5-C30-hSL-N5) (opt5) from Homo sapiens__NP_000448.3__HNF4A(39-474)(S87A_K106R_K108R_K126R_ K127R_S142A_S143A_S148A_T166A_S167A_S313A_S378A_T429A_T432A _S436A_K458R)
  source 1..1531: mol_type = other RNA
aggagaaagcttaccatggacacatctcctagcgaggggaccaacctcaatgctccgaactccctgggagtgtctgccctttgcgccatctgtggcgatcgggctacagggaaacactacggagccagctcctgcgacggctgtaaggggtttttccgcagagctgtgcggaaaaatcatatgtattcttgccgctttagcagacaatgtgtcgtggatcgggaccgcagaaaccagtgccggtactgtcgcctgaagaaatgcttcagagccggaatgcggcgcgaagcggttcagaatgagagagatcggatttccacccgcagagccgcttatgaagacagcgccctcccctctatcaacgctctgctgcaggccgaggtgctctcccggcaaattgcggcccctgtcagcggcatcaatggcgatattagagctaagaagatcgcctctatcgctgacgtgtgtgagtccatgaaagaacagctgcttgttctggtggagtgggccaagtacattcccgccttttgcgaactccctctggatgaccaggtcgcccttctgcgcgcgcacgccggggagcatctcctgctgggagctacaaaacggagcatggtgttcaaggacgtgctcctgcttggcaacgattatatcgtccccagacactgtcctgagctggccgaaatgtctcgcgtttccattcggatcctcgacgagctggtgcttccgtttcaggaactgcaaattgatgacaatgagtacgcctacctcaaagctatcattttctttgatcccgacgccaaggggctgagcgatcctggaaagatcaaaagactgcgcgctcaggtgcaggtctccctcgaagactatatcaacgatcggcagtacgactctagaggccgcttcggggagctgcttctgctcctgcccacccttcaaagcattacgtggcagatgatcgagcagattcaatttatcaagctgttcggaatggcgaaaattgataatctcctgcaggaaatgctgctcggcggcgccccttccgacgctccccatgctcaccacccgctgcatcctcaccttatgcaggagcatatggggaccaacgtgatcgttgccaatacaatgcccacccacctgagcaacggacagatgtgcgaatggcctcggcccagaggccaagctgccgcgcccgaggcccctcagccggctccccctgggggatctggctccgaaccctataagctcctgcctggggccgtggctacaatcgtccgccccctgagcgccattccgcagcctaccatcacgaaacaggaggtgatttgaggactagttataagactgactagcccgatgggcctcccaacgggccctcctcccctccttgcaccgagattaataaaaaaaaaaaaaaaaaaaaaaaaaaaaaaaaaaaaaaaaaaaaaaaaaaaaaaaaaaaaaaaatgcatcccccccccccccccccccccccccccccccaaaggctcttttcagagccaccagaatt

SEQ ID NO: 2747 - RNA, 1531 nt, synthetic construct
  misc_feature 1..1531: note = mRNA i-3 (A64-N5-C30-hSL-N5) (opt5) from Homo sapiens__NP_000448.3__HNF4A(39-474)(S87A_K106R_K108R_K126R_ K127R)
  source 1..1531: mol_type = other RNA
aggagaaagcttaccatggacacatctcctagcgaggggaccaacctcaatgctccgaactccctgggagtgtctgccctttgcgccatctgtggcgatcgggctacagggaaacactacggagccagctcctgcgacggctgtaaggggtttttccgcagagctgtgcggaaaaatcatatgtattcttgccgctttagcagacaatgtgtcgtggatcgggaccgcagaaaccagtgccggtactgtcgcctgaagaaatgcttcagagccggaatgcggcgcgaagcggttcagaatgagagagatcggatttccacccgcagaagctcttatgaagactccagcctcccctctatcaacgccctgctgcaggctgaggtgctctcccggcaaattacaagccctgtctctggcatcaatggcgatattagagccaagaagatcgcttccatcgccgacgtgtgtgagagcatgaaagaacagctgcttgttctggtggagtgggcgaagtacattcccgccttttgcgaactccctctggatgaccaggtcgcccttctgcgcgcccacgctggggagcatctcctgctgggagccaccaaacggtccatggtgttcaaggacgtgctcctgcttggcaacgattatatcgtccccagacactgtcctgagctggccgaaatgtctcgcgttagcattcggatcctcgacgagctggtgcttccgtttcaggaactgcaaattgatgacaatgagtacgcttacctcaaagcgatcattttctttgatcccgacgccaaggggctgtccgatcctggaaagatcaaaagactgcgcagccaggtgcaggtctctctcgaagactatatcaacgatcggcagtacgactccagaggccgcttcggggagctgcttctgctcctgcccacgcttcaaagcattacctggcagatgatcgagcagattcaatttatcaagctgttcggaatggctaaaattgataatctcctgcaggaaatgctgctcggcggctctcctagcgacgctccccatgcccaccacccgctgcatcctcaccttatgcaggagcatatggggacaaacgtgatcgttgctaataccatgcccacacacctgtccaacggacagatgtgcgaatggcctcggcccagaggccaagccgcgacccccgagacgcctcagccgtctccccctgggggaagcggctccgaaccctataagctcctgcctggggctgtggccacaatcgtcaaacccctgagcgccattccgcagcctaccatcacaaagcaggaggtgatttgaggactagttataagactgactagcccgatgggcctcccaacgggccctcctcccctccttgcaccgagattaataaaaaaaaaaaaaaaaaaaaaaaaaaaaaaaaaaaaaaaaaaaaaaaaaaaaaaaaaaaaaaaatgcatcccccccccccccccccccccccccccccccaaaggctcttttcagagccaccagaatt

SEQ ID NO: 2748 - RNA, 1531 nt, synthetic construct
  misc_feature 1..1531: note = mRNA i-3 (A64-N5-C30-hSL-N5) (opt5) from Homo sapiens__NP_000448.3__HNF4A(39-474)(S87A_K106R_K108R_K126R_ K127R_S142A_S143A_S148A_T166A_S167A_S313A_S378A_T429A_T432A _S436A_K458R_S461A)
  source 1..1531: mol_type = other RNA
aggagaaagcttaccatggacacatctcctagcgaggggaccaacctcaatgctccgaactccctgggagtgtctgccctttgcgccatctgtggcgatcgggctacagggaaacactacggagccagctcctgcgacggctgtaaggggtttttccgcagagctgtgcggaaaaatcatatgtattcttgccgctttagcagacaatgtgtcgtggatcgggaccgcagaaaccagtgccggtactgtcgcctgaagaaatgcttcagagccggaatgcggcgcgaagcggttcagaatgagagagatcggatttccacccgcagagccgcttatgaagacagcgccctcccctctatcaacgctctgctgcaggccgaggtgctctcccggcaaattgcggcccctgtcagcggcatcaatggcgatattagagctaagaagatcgcctctatcgctgacgtgtgtgagtccatgaaagaacagctgcttgttctggtggagtgggccaagtacattcccgccttttgcgaactccctctggatgaccaggtcgcccttctgcgcgcgcacgccggggagcatctcctgctgggagctacaaaacggagcatggtgttcaaggacgtgctcctgcttggcaacgattatatcgtccccagacactgtcctgagctggccgaaatgtctcgcgtttccattcggatcctcgacgagctggtgcttccgtttcaggaactgcaaattgatgacaatgagtacgcctacctcaaagctatcattttctttgatcccgacgccaaggggctgagcgatcctggaaagatcaaaagactgcgcgctcaggtgcaggtctccctcgaagactatatcaacgatcggcagtacgactctagaggccgcttcggggagctgcttctgctcctgcccacccttcaaagcattacgtggcagatgatcgagcagattcaatttatcaagctgttcggaatggcgaaaattgataatctcctgcaggaaatgctgctcggcggcgccccttccgacgctccccatgctcaccacccgctgcatcctcaccttatgcaggagcatatggggaccaacgtgatcgttgccaatacaatgcccacccacctgagcaacggacagatgtgcgaatggcctcggcccagaggccaagctgccgcgcccgaggcccctcagccggctccccctgggggatctggctccgaaccctataagctcctgcctggggccgtggctacaatcgtccgccccctggccgcgattccgcagcctaccatcacgaaacaggaggtgatttgaggactagttataagactgactagcccgatgggcctcccaacgggccctcctcccctccttgcaccgagattaataaaaaaaaaaaaaaaaaaaaaaaaaaaaaaaaaaaaaaaaaaaaaaaaaaaaaaaaaaaaaaaatgcatcccccccccccccccccccccccccccccccaaaggctcttttcagagccaccagaatt

SEQ ID NO: 2749 - RNA, 1531 nt, synthetic construct
  misc_feature 1..1531: note = mRNA i-3 (A64-N5-C30-hSL-N5) (opt5) from Homo sapiens__NP_000448.3__HNF4A(39-474)(S87A_K106R_K108R_K126R_ K127R_S142A_S143A_S148A_T166A_S167A_S313A_S378A_T429A_T432A _S436A_K458R_S461E)
  source 1..1531: mol_type = other RNA
aggagaaagcttaccatggacacatctcctagcgaggggaccaacctcaatgctccgaactccctgggagtgtctgccctttgcgccatctgtggcgatcgggctacagggaaacactacggagccagctcctgcgacggctgtaaggggtttttccgcagagctgtgcggaaaaatcatatgtattcttgccgctttagcagacaatgtgtcgtggatcgggaccgcagaaaccagtgccggtactgtcgcctgaagaaatgcttcagagccggaatgcggcgcgaagcggttcagaatgagagagatcggatttccacccgcagagccgcttatgaagacagcgccctcccctctatcaacgctctgctgcaggccgaggtgctctcccggcaaattgcggcccctgtcagcggcatcaatggcgatattagagctaagaagatcgcctctatcgctgacgtgtgtgagtccatgaaagaacagctgcttgttctggtggagtgggccaagtacattcccgccttttgcgaactccctctggatgaccaggtcgcccttctgcgcgcgcacgccggggagcatctcctgctgggagctacaaaacggagcatggtgttcaaggacgtgctcctgcttggcaacgattatatcgtccccagacactgtcctgagctggccgaaatgtctcgcgtttccattcggatcctcgacgagctggtgcttccgtttcaggaactgcaaattgatgacaatgagtacgcctacctcaaagctatcattttctttgatcccgacgccaaggggctgagcgatcctggaaagatcaaaagactgcgcgctcaggtgcaggtctccctcgaagactatatcaacgatcggcagtacgactctagaggccgcttcggggagctgcttctgctcctgcccacccttcaaagcattacgtggcagatgatcgagcagattcaatttatcaagctgttcggaatggcgaaaattgataatctcctgcaggaaatgctgctcggcggcgccccttccgacgctccccatgctcaccacccgctgcatcctcaccttatgcaggagcatatggggaccaacgtgatcgttgccaatacaatgcccacccacctgagcaacggacagatgtgcgaatggcctcggcccagaggccaagctgccgcgcccgaggcccctcagccggctccccctgggggatctggctccgaaccctataagctcctgcctggggccgtggctacaatcgtccgccccctggaggccattccgcagcctaccatcacgaaacaggaggtgatttgaggactagttataagactgactagcccgatgggcctcccaacgggccctcctcccctccttgcaccgagattaataaaaaaaaaaaaaaaaaaaaaaaaaaaaaaaaaaaaaaaaaaaaaaaaaaaaaaaaaaaaaaaatgcatcccccccccccccccccccccccccccccccaaaggctcttttcagagccaccagaatt

SEQ ID NO: 2750 - RNA, 1531 nt, synthetic construct
  misc_feature 1..1531: note = mRNA i-3 (A64-N5-C30-hSL-N5) (opt5) from Homo sapiens__NP_000448.3__HNF4A(39-474)(S87A_K106R_K108R_K126R_ K127R_S142A_S143A_S148E_T166A_S167E_S313A_S378E_T429E_T432E _S436E_K458R_S461E)
  source 1..1531: mol_type = other RNA
aggagaaagcttaccatggacacatctcctagcgaggggaccaacctcaatgctccgaactccctgggagtgtctgccctttgcgccatctgtggcgatcgggctacagggaaacactacggagccagctcctgcgacggctgtaaggggtttttccgcagagctgtgcggaaaaatcatatgtattcttgccgctttagcagacaatgtgtcgtggatcgggaccgcagaaaccagtgccggtactgtcgcctgaagaaatgcttcagagccggaatgcggcgcgaagcggttcagaatgagagagatcggatttccacccgcagagccgcttatgaagacagcgagctcccctctatcaacgccctgctgcaggctgaggtgctctcccggcaaattgccgaacctgtcagcggcatcaatggcgatattagagcgaagaagatcgcctctatcgctgacgtgtgtgagtccatgaaagaacagctgcttgttctggtggagtgggccaagtacattcccgctttttgcgagctccctctggatgaccaggtcgcccttctgcgcgcccacgctggggaacatctcctgctgggagcgacaaaacggagcatggtgttcaaggacgtgctcctgcttggcaacgattatatcgtccccagacactgtcctgagctggccgaaatgtctcgcgtttccattcggatcctcgacgagctggtgcttccgtttcaggaactgcaaattgatgacaatgagtacgcttacctcaaagccatcattttctttgatcccgacgccaaggggctgagcgatcctggaaagatcaaaagactgcgcgctcaggtgcaggtctccctcgaggactatatcaacgatcggcagtacgactctagaggccgcttcggggaactgcttctgctcctgcccacccttcaaagcattacgtggcagatgatcgagcagattcaatttatcaagctgttcggaatggccaaaattgataatctcctgcaggaaatgctgctcggcggcgagccttccgacgcgccccatgctcaccacccgctgcatcctcaccttatgcaggaacatatggggaccaacgtgatcgttgccaatacaatgcccacccacctgagcaacggacagatgtgcgagtggcctcggcccagaggccaagccgctgagcccgaggaacctcagccggaaccccctgggggatctggctccgagccctataagctcctgcctggggccgtggctacaatcgtccgccccctggaagccattccgcagcctaccatcacgaaacaggaggtgatttgaggactagttataagactgactagcccgatgggcctcccaacgggccctcctcccctccttgcaccgagattaataaaaaaaaaaaaaaaaaaaaaaaaaaaaaaaaaaaaaaaaaaaaaaaaaaaaaaaaaaaaaaaatgcatcccccccccccccccccccccccccccccccaaaggctcttttcagagccaccagaatt

SEQ ID NO: 2751 - RNA, 1531 nt, synthetic construct
  misc_feature 1..1531: note = mRNA i-3 (A64-N5-C30-hSL-N5) (opt5) from Homo sapiens__NP_000448.3__HNF4A(39-474)(S87A_K106R_K108R_K126R_ K127R_S142A_S143A_S148A_T166A_S167A_K179R_K180R_S313A_S378A _T429A_T432A_S436A_K458R_S461E)
  source 1..1531: mol_type = other RNA
aggagaaagcttaccatggacacatctcctagcgaggggaccaacctcaatgctccgaactccctgggagtgtctgccctttgcgccatctgtggcgatcgggctacagggaaacactacggagccagctcctgcgacggctgtaaggggtttttccgcagagctgtgcggaaaaatcatatgtattcttgccgctttagcagacaatgtgtcgtggatcgggaccgcagaaaccagtgccggtactgtcgcctgaagaaatgcttcagagccggaatgcggcgcgaagcggttcagaatgagagagatcggatttccacccgcagagccgcttatgaagacagcgccctcccctctatcaacgctctgctgcaggccgaggtgctctcccggcaaattgcggcccctgtcagcggcatcaatggcgatattagagctcgccggatcgcctctatcgctgacgtgtgtgagtccatgaaggaacagctgcttgttctggtggagtgggccaagtacattcccgccttttgcgaactccctctggatgaccaggtcgcccttctgagagcgcacgccggggagcatctcctgctgggagctacaaaacgcagcatggtgttcaaggacgtgctcctgcttggcaacgattatatcgtcccccggcactgtcctgagctggccgaaatgtctagagtttccattcgcatcctcgacgagctggtgcttccgtttcaggaactgcaaattgatgacaatgagtacgcctacctcaaagctatcattttctttgatcccgacgccaaggggctgagcgatcctggaaaaatcaagcggctgagagctcaggtgcaggtctccctcgaagactatatcaacgatcgccagtacgactctcggggcagattcggggagctgcttctgctcctgcccacccttcaaagcattacgtggcagatgatcgagcagattcaatttatcaagctgttcggaatggcgaaaattgataatctcctgcaggaaatgctgctcggcggcgccccttccgacgctccccatgctcaccacccgctgcatcctcaccttatgcaggagcatatggggaccaacgtgatcgttgccaatacaatgcccacccacctgagcaacggacagatgtgcgaatggcctcgcccccggggccaagctgccgcgcccgaggcccctcagccggctccccctgggggatctggctccgaaccctataagctcctgcctggggccgtggctacaatcgtcagacccctggaggccattccgcagcctaccatcacgaaacaggaggtgatttgaggactagttataagactgactagcccgatgggcctcccaacgggccctcctcccctccttgcaccgagattaataaaaaaaaaaaaaaaaaaaaaaaaaaaaaaaaaaaaaaaaaaaaaaaaaaaaaaaaaaaaaaaatgcatcccccccccccccccccccccccccccccccaaaggctcttttcagagccaccagaatt

SEQ ID NO: 2752 - RNA, 1531 nt, synthetic construct
  misc_feature 1..1531: note = mRNA i-3 (A64-N5-C30-hSL-N5) (opt5) from Homo sapiens__NP_000448.3__HNF4A(39-474)(S87A_K106R_K108R_K126R_ K127R_S142A_S143A_S148A_T166A_S167A_K300R_K307R_K309R_S313A _S378A_T429A_T432A_S436A_K458R_S461E)
  source 1..1531: mol_type = other RNA
aggagaaagcttaccatggacacatctcctagcgaggggaccaacctcaatgctccgaactccctgggagtgtctgccctttgcgccatctgtggcgatcgggctacagggaaacactacggagccagctcctgcgacggctgtaaggggtttttccgcagagctgtgcggaaaaatcatatgtattcttgccgctttagcagacaatgtgtcgtggatcgggaccgcagaaaccagtgccggtactgtcgcctgaagaaatgcttcagagccggaatgcggcgcgaagcggttcagaatgagagagatcggatttccacccgcagagccgcttatgaagacagcgccctcccctctatcaacgctctgctgcaggccgaggtgctctcccggcaaattgcggcccctgtcagcggcatcaatggcgatattagagctaagaagatcgcctctatcgctgacgtgtgtgagtccatgaaagaacagctgcttgttctggtggagtgggccaagtacattcccgccttttgcgaactccctctggatgaccaggtcgcccttctgcgcgcgcacgccggggagcatctcctgctgggagctacaaaacggagcatggtgttcaaggacgtgctcctgcttggcaacgattatatcgtccccagacactgtcctgagctggccgaaatgtctcgcgtttccattcggatcctcgacgagctggtgcttccgtttcaggaactgcaaattgatgacaatgagtacgcctacctcaaagctatcattttctttgatcccgacgccagagggctgagcgatcctggacgcatccggagactgcgcgctcaggtgcaggtctccctcgaagactatatcaacgatcggcagtacgactctagaggccgcttcggggagctgcttctgctcctgcccacccttcaaagcattacgtggcagatgatcgagcagattcaatttatcaagctgttcggaatggcgaagattgataatctcctgcaggaaatgctgctcggcggcgccccttccgacgctccccatgctcaccacccgctgcatcctcaccttatgcaggagcatatggggaccaacgtgatcgttgccaatacaatgcccacccacctgagcaacggacagatgtgcgaatggcctcggcccagaggccaagctgccgcgcccgaggcccctcagccggctccccctgggggatctggctccgaaccctataaactcctgcctggggccgtggctacaatcgtccggcccctggaggccattccgcagcctaccatcacgaagcaggaggtgatttgaggactagttataagactgactagcccgatgggcctcccaacgggccctcctcccctccttgcaccgagattaataaaaaaaaaaaaaaaaaaaaaaaaaaaaaaaaaaaaaaaaaaaaaaaaaaaaaaaaaaaaaaaatgcatcccccccccccccccccccccccccccccccaaaggctcttttcagagccaccagaatt

SEQ ID NO: 2753 - RNA, 1531 nt, synthetic construct
  misc_feature 1..1531: note = mRNA i-3 (A64-N5-C30-hSL-N5) (opt5) from Homo sapiens__NP_000448.3__HNF4A(39-474)(S87A_K106R_K108R_K126R_ K127R_S142A_S143A_S148A_T166A_S167A_S313A_S378A_T429A_T432A _S436A_K447R_K458R_S461E_K470R)
  source 1..1531: mol_type = other RNA
aggagaaagcttaccatggacacatctcctagcgaggggaccaacctcaatgctccgaactccctgggagtgtctgccctttgcgccatctgtggcgatcgggctacagggaaacactacggagccagctcctgcgacggctgtaaggggtttttccgcagagctgtgcggaaaaatcatatgtattcttgccgctttagcagacaatgtgtcgtggatcgggaccgcagaaaccagtgccggtactgtcgcctgaagaaatgcttcagagccggaatgcggcgcgaagcggttcagaatgagagagatcggatttccacccgcagagccgcttatgaagacagcgccctcccctctatcaacgctctgctgcaggccgaggtgctctcccggcaaattgcggcccctgtcagcggcatcaatggcgatattagagctaagaagatcgcctctatcgctgacgtgtgtgagtccatgaaagaacagctgcttgttctggtggagtgggccaagtacattcccgccttttgcgaactccctctggatgaccaggtcgcccttctgcgcgcgcacgccggggagcatctcctgctgggagctacaaaacggagcatggtgttcaaggacgtgctcctgcttggcaacgattatatcgtccccagacactgtcctgagctggccgaaatgtctcgcgtttccattcggatcctcgacgagctggtgcttccgtttcaggaactgcaaattgatgacaatgagtacgcctacctcaaagctatcattttctttgatcccgacgccaaggggctgagcgatcctggaaagatcaaaagactgcgcgctcaggtgcaggtctccctcgaagactatatcaacgatcggcagtacgactctagaggccgcttcggggagctgcttctgctcctgcccacccttcaaagcattacgtggcagatgatcgagcagattcaatttatcaagctgttcggaatggcgaaaattgataatctcctgcaggaaatgctgctcggcggcgccccttccgacgctccccatgctcaccacccgctgcatcctcaccttatgcaggagcatatggggaccaacgtgatcgttgccaatacaatgcccacccacctgagcaacggacagatgtgcgaatggcctcggcccagaggccaagctgccgcgcccgaggcccctcagccggctccccctgggggatctggctccgaaccctatcgcctcctgcctggggccgtggctacaatcgtccggcccctggaggccattccgcagcctaccatcacgagacaggaggtgatttgaggactagttataagactgactagcccgatgggcctcccaacgggccctcctcccctccttgcaccgagattaataaaaaaaaaaaaaaaaaaaaaaaaaaaaaaaaaaaaaaaaaaaaaaaaaaaaaaaaaaaaaaaatgcatcccccccccccccccccccccccccccccccaaaggctcttttcagagccaccagaatt

SEQ ID NO: 2754 - RNA, 1531 nt, synthetic construct
  misc_feature 1..1531: note = mRNA i-3 (A64-N5-C30-hSL-N5) (opt5) from Homo sapiens__NP_000448.3__HNF4A(39-474)(S87A_K106R_K108R_K126R_ K127R_S142A_S143A_S148A_T166A_S167A_K179R_K180R_K234R_K300R _K307R_K309R_S313A_S378A_T429A_T432A_S436A_K447R_K458R_S461 E_K470R)
  source 1..1531: mol_type = other RNA
aggagaaagcttaccatggacacatctcctagcgaggggaccaacctcaatgctccgaactccctgggagtgtctgccctttgcgccatctgtggcgatcgggctacagggaaacactacggagccagctcctgcgacggctgtaaggggtttttccgcagagctgtgcggaaaaatcatatgtattcttgccgctttagcagacaatgtgtcgtggatcgggaccgcagaaaccagtgccggtactgtcgcctgaagaaatgcttcagagccggaatgcggcgcgaagcggttcagaatgagagagatcggatttccacccgcagagccgcttatgaagacagcgccctcccctctatcaacgctctgctgcaggccgaggtgctctcccggcaaattgcggcccctgtcagcggcatcaatggcgatattagagctcgccggatcgcctctatcgctgacgtgtgtgagtccatgaaggaacagctgcttgttctggtggagtgggccaagtacattcccgccttttgcgaactccctctggatgaccaggtcgcccttctgagagcgcacgccggggagcatctcctgctgggagctacacgccggagcatggtgttcaaagacgtgctcctgcttggcaacgattatatcgtccccagacactgtcctgagctggccgaaatgtctcgcgtttccattcggatcctcgacgagctggtgcttccgtttcaggaactgcaaattgatgacaatgagtacgcctacctcaaggctatcattttctttgatcccgacgccagagggctgagcgatcctggacgcatccggagactgcgcgctcaggtgcaggtctccctcgaagactatatcaacgatcggcagtacgactctagaggccggttcggggagctgcttctgctcctgcccacccttcaaagcattacgtggcagatgatcgagcagattcaatttatcaaactgttcggaatggcgaagattgataatctcctgcaggaaatgctgctcggcggcgccccttccgacgctccccatgctcaccacccgctgcatcctcaccttatgcaggagcatatggggaccaacgtgatcgttgccaatacaatgcccacccacctgagcaacggacagatgtgcgaatggcctcgccccagaggccaagctgccgcgcccgaggcccctcagccggctccccctgggggatctggctccgaaccctatcggctcctgcctggggccgtggctacaatcgtcagacccctggaggccattccgcagcctaccatcacgcgccaggaggtgatttgaggactagttataagactgactagcccgatgggcctcccaacgggccctcctcccctccttgcaccgagattaataaaaaaaaaaaaaaaaaaaaaaaaaaaaaaaaaaaaaaaaaaaaaaaaaaaaaaaaaaaaaaaatgcatcccccccccccccccccccccccccccccccaaaggctcttttcagagccaccagaatt

SEQ ID NO: 2755 - RNA, 1531 nt, synthetic construct
  misc_feature 1..1531: note = mRNA i-3 (A64-N5-C30-hSL-N5) (opt5) from Homo sapiens__NP_000448.3__HNF4A(39-474)(S87A_S95A_S99A_K106R_K1 08R_K126R_K127R_S142A_S143A_S148A_T166A_S167A_S313A_S378A_T 429A_T432A_S436A_K458R_S461E)
  source 1..1531: mol_type = other RNA
aggagaaagcttaccatggacacatctcctagcgaggggaccaacctcaatgctccgaactccctgggagtgtctgccctttgcgccatctgtggcgatcgggctacagggaaacactacggagccagctcctgcgacggctgtaaggggtttttccgcagagctgtgcggaaaaatcatatgtatgcctgccgctttgcgagacaatgtgtcgtggatcgggaccgcagaaaccagtgccggtactgtcgcctgaagaaatgcttcagagccggaatgcggcgcgaagctgttcagaatgagagagatcggatttctacccgcagagccgcttatgaagacagcgccctcccctccatcaacgcgctgctgcaggccgaggtgctcagccggcaaattgctgcccctgtctctggcatcaatggcgatattagagctaagaagatcgcctccatcgccgacgtgtgtgagagcatgaaagaacagctgcttgttctggtggagtgggctaagtacattcccgcgttttgcgaactccctctggatgaccaggtcgcccttctgcgcgctcacgccggggagcatctcctgctgggagccacaaaacggtctatggtgttcaaggacgtgctcctgcttggcaacgattatatcgtccccagacactgtcctgagctggctgaaatgtcccgcgttagcattcggatcctcgacgagctggtgcttccgtttcaggaactgcaaattgatgacaatgagtacgcctacctcaaagcgatcattttctttgatcccgacgctaaggggctgtctgatcctggaaagatcaaaagactgcgcgcccaggtgcaggtctccctcgaagactatatcaacgatcggcagtacgacagcagaggccgcttcggggagctgcttctgctcctgcccacccttcaatccattacgtggcagatgatcgagcagattcaatttatcaagctgttcggaatggccaaaattgataatctcctgcaggaaatgctgctcggcggcgctccttctgacgctccccatgcccaccacccgctgcatcctcaccttatgcaggagcatatggggaccaacgtgatcgttgccaatacaatgcccacccacctgagcaacggacagatgtgcgaatggcctcggcccagaggccaagcggccgctcccgaggcccctcagccggctccccctgggggatccggcagcgaaccctataagctcctgcctggggccgtggcgacaatcgtccgccccctggaggccattccgcagcctaccatcacgaaacaggaggtgatttgaggactagttataagactgactagcccgatgggcctcccaacgggccctcctcccctccttgcaccgagattaataaaaaaaaaaaaaaaaaaaaaaaaaaaaaaaaaaaaaaaaaaaaaaaaaaaaaaaaaaaaaaaatgcatcccccccccccccccccccccccccccccccaaaggctcttttcagagccaccagaatt

SEQ ID NO: 2756 - RNA, 1531 nt, synthetic construct
  misc_feature 1..1531: note = mRNA i-3 (A64-N5-C30-hSL-N5) (opt5) from Homo sapiens__NP_000448.3__HNF4A(39-474)(S87A_K106R_K108R_K126R_ K127R_S138A_T139A_S142A_S143A_S148A_T166A_S167A_S313A_S378A _T429A_T432A_S436A_K458R_S461E)
  source 1..1531: mol_type = other RNA
aggagaaagcttaccatggacacatctcctagcgaggggaccaacctcaatgctccgaactccctgggagtgtctgccctttgcgccatctgtggcgatcgggctacagggaaacactacggagccagctcctgcgacggctgtaaggggtttttccgcagagctgtgcggaaaaatcatatgtattcttgccgctttagcagacaatgtgtcgtggatcgggaccgcagaaaccagtgccggtactgtcgcctgaagaaatgcttcagagccggaatgcggcgcgaagcggttcagaatgagagagatcggattgccgctcgcagagccgcttatgaagactccgccctccccagcatcaacgcgctgctgcaggccgaggtgctctctcggcaaattgctgcccctgtctccggcatcaatggcgatattagagctaagaagatcgccagcatcgccgacgtgtgtgagtctatgaaagaacagctgcttgttctggtggagtgggctaagtacattcccgcgttttgcgaactccctctggatgaccaggtcgcccttctgcgcgctcacgccggggagcatctcctgctgggagccaccaaacggtccatggtgttcaaggacgtgctcctgcttggcaacgattatatcgtccccagacactgtcctgagctggctgaaatgagccgcgtttctattcggatcctcgacgagctggtgcttccgtttcaggaactgcaaattgatgacaatgagtacgcctacctcaaagcgatcattttctttgatcccgacgctaaggggctgtccgatcctggaaagatcaaaagactgcgcgcccaggtgcaggtcagcctcgaagactatatcaacgatcggcagtacgactccagaggccgcttcggggagctgcttctgctcctgcccacacttcaatctattacctggcagatgatcgagcagattcaatttatcaagctgttcggaatggccaaaattgataatctcctgcaggaaatgctgctcggcggcgctcctagcgacgctccccatgcccaccacccgctgcatcctcaccttatgcaggagcatatggggacgaacgtgatcgttgccaataccatgcccacacacctgtccaacggacagatgtgcgaatggcctcggcccagaggccaagcggccgctcccgaggcccctcagccggctccccctgggggaagcggctctgaaccctataagctcctgcctggggccgtggcgaccatcgtccgccccctggaggccattccgcagcctacaatcaccaaacaggaggtgatttgaggactagttataagactgactagcccgatgggcctcccaacgggccctcctcccctccttgcaccgagattaataaaaaaaaaaaaaaaaaaaaaaaaaaaaaaaaaaaaaaaaaaaaaaaaaaaaaaaaaaaaaaaatgcatcccccccccccccccccccccccccccccccaaaggctcttttcagagccaccagaatt

SEQ ID NO: 2757 - RNA, 1531 nt, synthetic construct
  misc_feature 1..1531: note = mRNA i-3 (A64-N5-C30-hSL-N5) (opt5) from Homo sapiens__NP_000448.3__HNF4A(39-474)(S87A_S95A_S99A_K106R_K1 08R_K126R_K127R_S138A_T139A_S142A_S143A_S148A_T166A_S167A_S 313A_S378A_T429A_T432A_S436A_K458R_S461E)
  source 1..1531: mol_type = other RNA
aggagaaagcttaccatggacacatctcctagcgaggggaccaacctcaatgctccgaactccctgggagtgtctgccctttgcgccatctgtggcgatcgggctacagggaaacactacggagccagctcctgcgacggctgtaaggggtttttccgcagagctgtgcggaaaaatcatatgtatgcctgccgctttgcgagacaatgtgtcgtggatcgggaccgcagaaaccagtgccggtactgtcgcctgaagaaatgcttcagagccggaatgcggcgcgaagctgttcagaatgagagagatcggattgccgctcgcagagccgcgtatgaagactctgccctccccagcatcaacgctctgctgcaggccgaggtgctctcccggcaaattgctgcccctgtcagcggcatcaatggcgatattagagccaagaagatcgcttctatcgcggacgtgtgtgagtccatgaaagaacagctgcttgttctggtggagtgggccaagtacattcccgctttttgcgaactccctctggatgaccaggtcgcccttctgcgcgcccacgctggggagcatctcctgctgggagccaccaaacggagcatggtgttcaaggacgtgctcctgcttggcaacgattatatcgtccccagacactgtcctgagctggcggaaatgtctcgcgtttccattcggatcctcgacgagctggtgcttccgtttcaggaactgcaaattgatgacaatgagtacgcttacctcaaagccatcattttctttgatcccgacgccaaggggctgagcgatcctggaaagatcaaaagactgcgcgctcaggtgcaggtctctctcgaagactatatcaacgatcggcagtacgactccagaggccgcttcggggagctgcttctgctcctgcccacacttcaaagcattacctggcagatgatcgagcagattcaatttatcaagctgttcggaatggccaaaattgataatctcctgcaggaaatgctgctcggcggcgctccttccgacgcgccccatgcccaccacccgctgcatcctcaccttatgcaggagcatatggggacgaacgtgatcgttgccaataccatgcccacacacctgtctaacggacagatgtgcgaatggcctcggcccagaggccaagctgccgctcccgaggcccctcagccggcgccccctgggggaagcggctccgaaccctataagctcctgcctggggccgtggctaccatcgtccgccccctggaggccattccgcagcctacaatcaccaaacaggaggtgatttgaggactagttataagactgactagcccgatgggcctcccaacgggccctcctcccctccttgcaccgagattaataaaaaaaaaaaaaaaaaaaaaaaaaaaaaaaaaaaaaaaaaaaaaaaaaaaaaaaaaaaaaaaatgcatcccccccccccccccccccccccccccccccaaaggctcttttcagagccaccagaatt

SEQ ID NO: 2758 - RNA, 1531 nt, synthetic construct
  misc_feature 1..1531: note = mRNA i-3 (A64-N5-C30-hSL-N5) (opt11) from Homo sapiens__NP_000448.3__HNF4A(39-474)
  source 1..1531: mol_type = other RNA
aggagaaagcttaccatggacacatcaccctcagaaggtacaaacctcaacgcccccaactcgctaggcgtctccgcactatgcgcaatctgcggcgaccgtgccaccggcaaacactacggagcctcatcctgcgacggttgtaaaggcttcttccgacgcagcgtcagaaaaaaccacatgtactcctgccgcttctcccgtcaatgcgtcgtcgacaaagacaaacgcaaccaatgccggtactgccgcctaaaaaaatgcttccgcgcaggcatgaaaaaagaagcagtccaaaacgaacgcgaccgcatatcaacccgtcgatcatcatacgaagactcctccctccccagcatcaacgccctcctccaagcagaagtactaagccggcaaataacatccccagtcagcggcatcaacggagacatacgagccaaaaaaatagcttcaatcgccgacgtctgcgaatccatgaaagagcaactactggtcctcgtcgaatgggctaaatacatcccggccttctgcgaactccccctcgacgatcaagtcgcccttctaagagcccacgccggcgaacacctcctcttaggcgcaaccaaacgcagcatggtattcaaagacgtactgctcctcggcaacgattacatcgtcccacgacattgccccgagctcgcagaaatgtcccgagtctccatccgcatactcgacgaactcgtactccccttccaagaactccaaatagacgacaatgaatacgcatacctcaaagcaatcatcttcttcgaccccgacgccaaaggactcagcgacccaggcaaaatcaaacgcctacgatcacaagtacaagtttcacttgaagactacatcaacgacagacaatacgactcaagaggtcgtttcggagaactactcctactactaccaaccctccaaagcataacctggcaaatgatagaacaaatacaatttataaaactcttcggcatggccaaaatcgacaatctcctacaagaaatgctcctcggaggaagcccctcagatgccccacacgcccaccacccactacacccccacctcatgcaagagcacatgggtaccaacgtcatagtcgccaacacaatgcccacccacctctcaaacggccaaatgtgcgaatggccgcgcccacgcggacaagccgccacccccgaaaccccacagccaagcccacccggtggctccggcagcgaaccctacaaactcctacccggcgccgttgcaacaatagtcaaacccctatccgccataccccaaccaacgatcaccaaacaagaagtcatctagggactagttataagactgactagcccgatgggcctcccaacgggccctcctcccctccttgcaccgagattaataaaaaaaaaaaaaaaaaaaaaaaaaaaaaaaaaaaaaaaaaaaaaaaaaaaaaaaaaaaaaaaatgcatcccccccccccccccccccccccccccccccaaaggctcttttcagagccaccagaatt

SEQ ID NO: 2759 - RNA, 1531 nt, synthetic construct
  misc_feature 1..1531: note = mRNA i-3 (A64-N5-C30-hSL-N5) (opt11) from Homo sapiens__NP_000448.3__HNF4A(39-474)(S313A)
  source 1..1531: mol_type = other RNA
aggagaaagcttaccatggatacctccccatctgaaggcaccaacctcaacgcacccaactctctcggagtctccgccctatgcgcaatctgcggcgaccgagccactggaaaacactacggcgcctcctcttgcgacggatgcaaaggcttcttccgaagatcagtccgaaaaaaccacatgtactcatgccgcttctcgcgccaatgcgtcgtcgacaaagacaaacgtaaccaatgcagatactgccgactcaaaaaatgcttccgcgccggcatgaaaaaagaagccgtccagaacgaacgcgaccgcatctcaaccagacgctcgagctacgaagactcctccctaccctccatcaacgccctactccaagcagaagtactatcccgccaaataacctcccccgtcagcggcatcaacggcgacatcagagccaaaaaaatcgcctcaatcgccgacgtatgcgagagcatgaaagaacagctccttgtcctagtagaatgggccaaatacatcccagccttctgcgaactccccctcgacgaccaagtcgccctactcagagcccacgccggcgaacacctcctcctcggcgctaccaagcgatctatggtattcaaggatgtacttctactcggaaacgactacatcgtaccacgccactgcccagaactagccgaaatgtcccgcgtatccatccgaatcctcgatgaactcgtactccccttccaagaactacaaattgacgacaatgaatacgcctacttaaaagccatcatattcttcgaccccgacgccaaaggtctgtccgacccaggcaaaatcaaacgactacgggcccaagtccaagtatcactcgaagactacatcaacgaccgccaatacgactcacgcggccgcttcggcgagctcctcctccttctcccaaccctacaatccataacctggcaaatgatcgaacaaatccaattcataaaactcttcggcatggcaaaaattgacaaccttctccaagaaatgctcctgggcggatccccctccgacgccccacacgcccatcaccccctccacccccacctaatgcaggaacacatgggcacaaatgtcatagtagccaacactatgcccacacatctctcaaacggccagatgtgtgaatggccacgcccacgaggacaagcagccacacccgaaacaccacaaccctcccccccaggcggctccggatccgaaccctacaaactcctacccggcgccgtcgccacaatcgtcaaacccctatccgccatcccccaacccacgatcaccaaacaagaagtcatctaaggactagttataagactgactagcccgatgggcctcccaacgggccctcctcccctccttgcaccgagattaataaaaaaaaaaaaaaaaaaaaaaaaaaaaaaaaaaaaaaaaaaaaaaaaaaaaaaaaaaaaaaaatgcatcccccccccccccccccccccccccccccccaaaggctcttttcagagccaccagaatt

SEQ ID NO: 2760 - RNA, 1531 nt, synthetic construct
  misc_feature 1..1531: note = mRNA i-3 (A64-N5-C30-hSL-N5) (opt11) from Homo sapiens__NP_000448.3__HNF4A(39-474)(S313E)
  source 1..1531: mol_type = other RNA
aggagaaagcttaccatggacacctccccctcagaaggaaccaacctaaacgctcccaactcccttggcgtctccgccctctgcgcaatatgcggagaccgcgccaccggaaaacactacggcgcctcatcctgcgacggttgcaaaggcttcttccgccgatccgtccgcaaaaaccacatgtattcctgccgcttctcgcgacagtgcgtagtcgacaaagataaacgaaaccaatgccgatactgccgccttaaaaaatgcttccgcgccggaatgaaaaaagaagcagtccaaaacgaacgagaccgcatcagcacccgtaggagctcatacgaggactcgagcctcccctcgatcaacgccttactccaagccgaagtactgtcccgccagatcacctcacccgtctccggcatcaacggagacatcagagccaaaaaaatagcatcgatcgccgacgtatgcgagtccatgaaagaacaactcctagtactagtcgaatgggccaaatacatcccagcattctgcgaactacccctagatgatcaagtagccctactacgagcccacgccggcgaacacctcctcctcggggccaccaaacgatcaatggtcttcaaagacgtcctcctcctcggcaacgactacatcgtaccccgccactgcccagaactcgcagaaatgtcacgcgtctcaatccgcatcctggacgaacttgtactcccattccaagaactacaaatagacgacaacgaatacgcatacctgaaagcaatcatctttttcgaccccgacgccaaaggcctatctgaccccggtaaaataaaacgcctccgcgaacaagtacaagtctctctcgaagactacatcaacgaccgccagtacgacagccggggacgcttcggcgaacttctcctcctcctccccactctacaaagcatcacctggcaaatgatcgaacaaatacaattcatcaaactcttcggaatggcaaaaatcgacaacctcctccaagaaatgctcctcggcggctccccgagcgacgcccctcacgcccaccacccactccacccccacctaatgcaagagcacatgggaaccaacgtcatagtcgcaaacacaatgcccacccacctctccaacggccaaatgtgcgaatggccccgcccacgcggccaagccgccacacccgaaacaccccaaccatcacccccaggcggatcaggatccgagccctacaaactcctcccaggcgccgtcgccacaatcgtcaaacccctcagcgccataccacaaccaacaataacgaaacaagaagtcatataaggactagttataagactgactagcccgatgggcctcccaacgggccctcctcccctccttgcaccgagattaataaaaaaaaaaaaaaaaaaaaaaaaaaaaaaaaaaaaaaaaaaaaaaaaaaaaaaaaaaaaaaaatgcatcccccccccccccccccccccccccccccccaaaggctcttttcagagccaccagaatt

SEQ ID NO: 2761 - RNA, 1531 nt, synthetic construct
  misc_feature 1..1531: note = mRNA i-3 (A64-N5-C30-hSL-N5) (opt11) from Homo sapiens__NP_000448.3__HNF4A(39-474)(S142A_S143A)
  source 1..1531: mol_type = other RNA
aggagaaagcttaccatggacacctccccctccgaaggcaccaacttaaacgcccccaactcccttggggtctccgctctctgcgcaatctgcggagacagagccaccggtaaacactacggagcctcctcctgcgacggatgcaaaggcttcttccgccgctcagtacgcaaaaaccacatgtatagttgccgcttctctcgccagtgcgtggtcgacaaagacaaacgcaaccaatgccgatactgccgcctcaaaaagtgcttccgcgccggaatgaagaaagaagctgtccaaaacgaacgcgaccgcatctcaacccgcagagcggcatacgaagacagctcgctaccctccataaacgccctccttcaagccgaagtcctatcccgacagatcacctcccccgtctctggaataaacggcgacatccgcgcaaagaaaatcgcctccatcgccgacgtatgcgaatccatgaaagaacaactcctagtgctagtagaatgggccaaatacatacccgccttctgcgagctccccctagacgaccaagtagccctactccgcgcacacgcaggcgaacacctcctcctcggcgccaccaaacgatcaatggtcttcaaagacgtactactcctcggcaatgactacatcgtcccacgacactgccccgaattagcagaaatgtcgcgagtctccatacgcatcctagacgaactcgtactccctttccaagaactacaaatcgatgacaacgaatacgcatacctcaaagccatcatcttcttcgacccagacgccaaaggcctttccgatcccggcaaaatcaaaagactacgctcacaagtacaagtctccctcgaagattacatcaacgaccgccaatacgactcacgcggccgcttcggagaactcctactactcctcccaaccctacaatccatcacctggcaaatgatcgaacaaatccagttcattaaactcttcggaatggccaaaatcgataacctcctacaagaaatgctcctaggcggcagtccatccgacgcgccccacgcacaccatccactccacccccacctcatgcaagaacacatgggcaccaacgtaatcgtcgcaaacaccatgcccacacacctttcaaacggccaaatgtgcgaatggccgcgcccccgcggccaagcagccaccccagaaaccccacaaccatcacccccaggcggcagcggctcagaaccctataaactcctccccggcgccgtagccacaatcgtcaaacctctctccgcaatcccccaacccaccatcaccaaacaagaagtcatctaaggactagttataagactgactagcccgatgggcctcccaacgggccctcctcccctccttgcaccgagattaataaaaaaaaaaaaaaaaaaaaaaaaaaaaaaaaaaaaaaaaaaaaaaaaaaaaaaaaaaaaaaaatgcatcccccccccccccccccccccccccccccccaaaggctcttttcagagccaccagaatt

SEQ ID NO: 2762 - RNA, 1531 nt, synthetic construct
  misc_feature 1..1531: note = mRNA i-3 (A64-N5-C30-hSL-N5) (opt11) from Homo sapiens__NP_000448.3__HNF4A(39-474)(S142E_S143E)
  source 1..1531: mol_type = other RNA
aggagaaagcttaccatggacaccagcccgtccgaaggcacaaacctcaacgcccccaactcccttggtgtctcagccctctgcgcaatctgcggcgaccgtgccaccggtaaacactatggcgcctcatcctgcgacggctgcaaaggcttcttcagacgatcggtacgcaaaaaccacatgtactcatgtcgcttctcccgacaatgtgtagtggacaaagacaaaagaaaccaatgccgctactgccgcctcaaaaaatgcttccgcgcaggcatgaaaaaagaagccgtccagaatgaacgagaccgcataagcacccgccgagaagaatatgaagactcctcacttccctcaatcaacgccctactccaagccgaagtactatcacggcaaatcacaagccccgtctcaggaataaacggagacatccgcgccaaaaaaattgcctccatcgcggacgtatgcgaaagcatgaaagaacaactactcgtactcgtcgaatgggcaaaatacatccccgcattctgcgaactccccctcgacgaccaagtagccctgctcagagcacacgccggagaacaccttctcctcggcgccaccaaacgctccatggtcttcaaagacgtcctcctcctagggaacgactacatagtaccacgacactgcccagaactagccgaaatgtccagagtatcaatccgaatcctcgacgaactcgtcctccccttccaagaactacaaatcgacgacaacgaatacgcctacctaaaagccatcatattcttcgatcccgacgcaaaaggcctctccgaccccggcaaaatcaagcgactacgatcacaagtacaagtctccctggaagactacatcaacgaccgccaatacgacagccgcggaagattcggcgaactcctgctactactccccaccctacaatccatcacctggcaaatgatagaacaaatacaattcatcaaactcttcggcatggctaaaatcgacaacctcctacaagaaatgctactaggcggcagcccctcagacgccccccacgcccaccaccccctccacccccacctcatgcaggaacacatgggcaccaacgtcatcgtcgccaacacaatgcccacccatctctccaacggccaaatgtgcgaatggcctaggccacgtggtcaagcagcaacccccgaaaccccccaaccctccccaccaggcggttcaggatccgaaccctacaaactactcccaggcgccgtagccaccattgtcaagccgctcagcgctataccccaacccaccataaccaaacaagaagtcatataaggactagttataagactgactagcccgatgggcctcccaacgggccctcctcccctccttgcaccgagattaataaaaaaaaaaaaaaaaaaaaaaaaaaaaaaaaaaaaaaaaaaaaaaaaaaaaaaaaaaaaaaaatgcatcccccccccccccccccccccccccccccccaaaggctcttttcagagccaccagaatt

SEQ ID NO: 2763 - RNA, 1531 nt, synthetic construct
  misc_feature 1..1531: note = mRNA i-3 (A64-N5-C30-hSL-N5) (opt11) from Homo sapiens__NP_000448.3__HNF4A(39-474)(S143A)
  source 1..1531: mol_type = other RNA
aggagaaagcttaccatggacacctcaccatcagaaggcaccaacctcaacgcccccaactccctcggagtctcagccctctgcgcaatctgcggcgaccgcgccaccggcaaacactacggagcctcgtcctgcgacggatgcaaaggattcttcaggcgctccgtacggaaaaaccacatgtactcttgtcgtttctcccgccaatgcgtagtcgacaaagacaaacgcaaccaatgccgctactgtcgcctcaaaaaatgcttccgcgccggcatgaagaaagaagccgtccaaaacgaacgcgaccgcatctccacccgcaggtccgcctacgaagactccagcctaccctccatcaacgcactactccaagccgaagtcctctcccgccaaatcacgtctcccgtctcaggaatcaacggcgacatccgcgctaagaaaatagcatctatcgccgacgtctgtgaatccatgaaagaacaactactcgtactggtagaatgggccaaatacatccccgccttctgcgaacttcccctcgacgaccaagttgcactcctccgagcccacgccggggaacacctactcctcggagccaccaaacgctcaatggtcttcaaagacgtactcctcctcggcaacgactacatcgtgccacgccactgccccgaactagccgaaatgtcccgggtctccattcgaatcctcgacgaactcgtcctccccttccaagaactccaaatagacgacaacgaatacgcttacctcaaagcaataatcttcttcgacccagatgccaaaggcctcagcgacccgggcaagattaaacgcctccgctctcaagtccaagtctcccttgaagactacatcaacgaccgccaatacgactcccgcggtcgattcggggaactactcctactcctcccaacactacaatccatcacctggcaaatgatcgaacaaatccaattcatcaaactcttcggcatggccaaaatcgacaacctcctacaggaaatgctcctaggaggcagcccctccgacgccccccacgcccaccaccccctccacccccacctaatgcaagaacatatgggaaccaacgtaatcgtcgcaaacacaatgcccacccacctctccaacggccaaatgtgcgaatggccccgcccccgcggtcaagcagccacacccgaaacccctcaaccctccccgcccggaggcagcggctccgaaccatacaaactcctcccaggcgccgtagccaccatcgtaaaacccctatcggccataccccaacccacaatcaccaaacaagaagtaatctaaggactagttataagactgactagcccgatgggcctcccaacgggccctcctcccctccttgcaccgagattaataaaaaaaaaaaaaaaaaaaaaaaaaaaaaaaaaaaaaaaaaaaaaaaaaaaaaaaaaaaaaaaatgcatcccccccccccccccccccccccccccccccaaaggctcttttcagagccaccagaatt

SEQ ID NO: 2764 - RNA, 1531 nt, synthetic construct
  misc_feature 1..1531: note = mRNA i-3 (A64-N5-C30-hSL-N5) (opt11) from Homo sapiens__NP_000448.3__HNF4A(39-474)(T166A)
  source 1..1531: mol_type = other RNA
aggagaaagcttaccatggacacttccccctcagaaggcacaaacctcaacgcacccaactccctaggagtctccgccctatgcgcgatctgtggcgaccgagcaaccggcaagcattacggcgcatcctcctgcgacggatgcaaaggcttcttccgccgatccgtccgaaagaaccacatgtactcctgccgattctcccgccaatgcgtagttgacaaagacaaacgcaatcaatgccgatactgccgcctcaagaaatgcttccgagcaggaatgaagaaagaagccgtccaaaacgaacgcgatcgcatatccacccgccgctcctcctacgaagactcctccctcccctccatcaacgcactcctccaagcggaagtactctcacgccaaatcgcgtccccagtctccggcataaacggagacatccgcgccaagaaaatagcctcaatcgctgacgtctgcgaatctatgaaagaacagctcctcgtcctagtcgaatgggccaaatacatccccgccttctgcgaactcccactagacgaccaagtggcactcctccgcgcccacgccggcgaacacctactactcggagccaccaaacgctccatggtgttcaaagacgtactactcctcggaaatgactacatcgtcccccgacactgccccgaactcgccgaaatgtccagggtctccatccgcatcctcgacgaactggtcctcccattccaagaactccaaatcgacgacaacgaatacgcctacctaaaagccatcatcttcttcgaccccgacgccaaaggcctatccgacccgggcaaaatcaaacgactccgctcccaagtccaagtctcactcgaagactacatcaacgatagacagtacgactcacgcggtagattcggagaactcctactcctactccccacactccaatccataacctggcaaatgatagaacaaatacaattcatcaaactcttcggcatggccaaaatcgacaacctactccaggaaatgctcttaggcggctccccatccgacgccccacacgcccaccaccccctccacccccacctcatgcaagaacacatgggcaccaatgtcatagtagcaaacaccatgcccacacacctctccaacggacaaatgtgcgaatggccccgcccacgcggtcaggccgccacccccgaaaccccacaaccctccccacccggaggctccggatcagaaccctacaaactcctccccggcgccgtcgcaaccatcgttaaaccactatccgccataccccaacccaccatcaccaaacaagaggtcatataaggactagttataagactgactagcccgatgggcctcccaacgggccctcctcccctccttgcaccgagattaataaaaaaaaaaaaaaaaaaaaaaaaaaaaaaaaaaaaaaaaaaaaaaaaaaaaaaaaaaaaaaaatgcatcccccccccccccccccccccccccccccccaaaggctcttttcagagccaccagaatt

SEQ ID NO: 2765 - RNA, 1531 nt, synthetic construct
  misc_feature 1..1531: note = mRNA i-3 (A64-N5-C30-hSL-N5) (opt11) from Homo sapiens__NP_000448.3__HNF4A(39-474)(S167E)
  source 1..1531: mol_type = other RNA
aggagaaagcttaccatggacacctccccctctgaaggcaccaacctcaacgcacccaacagccttggcgtcagcgccttatgcgccatttgcggagaccgcgccaccggcaaacactacggagcatcctcatgcgacggctgcaaaggcttcttccgccgatcagtccgaaaaaaccacatgtactcctgccgcttctctcgccagtgcgtagtcgataaagataaaagaaatcaatgccgctactgccgcctcaaaaaatgcttccgcgccggcatgaaaaaagaagcagttcaaaacgaacgcgaccgaatctccacccgccgctcatcctacgaagactcttccctcccctctataaacgccctcctccaagccgaagtactctcacgccaaatcaccgaacctgtctccggcattaacggagacatacgcgccaagaaaatagccagcatcgccgacgtctgcgaatcaatgaaagaacaactcctcgtcctagtcgaatgggccaaatacatccccgcattctgcgaacttcccctcgacgaccaagtcgccctcctccgtgcccatgcaggcgaacacctcctcctcggcgccaccaaacgctccatggtctttaaagacgtcctcctcctgggcaacgactacatcgtcccccgacactgcccagaactcgccgagatgagccgcgtgtccatacgcatactcgacgaactcgtcctccccttccaagaactccagatagacgataacgaatacgcatacctaaaagccataatattcttcgaccccgacgctaaaggtctctcagacccaggaaaaatcaaacgtctcagaagccaagtccaagtctcactcgaagactacatcaacgaccgccaatacgactctcgcggccgcttcggcgaactcctcttattactcccaacactccaatcaatcacctggcaaatgatcgaacaaatacaatttatcaaactcttcggcatggctaaaatcgacaatctcctccaagaaatgctcctcggaggctccccctcagatgccccccacgcccaccacccccttcatccccacttaatgcaagaacatatgggcaccaacgtcatcgtagccaacaccatgcccacacacctatccaacggccaaatgtgcgaatggccccgcccccgaggacaagccgccaccccagaaacaccccaaccctccccccccggaggcagcggctccgaaccatacaaactcctcccaggtgccgtcgccactatcgtcaaacccctctcagccatcccccaaccaaccatcacaaagcaagaagtcatctaaggactagttataagactgactagcccgatgggcctcccaacgggccctcctcccctccttgcaccgagattaataaaaaaaaaaaaaaaaaaaaaaaaaaaaaaaaaaaaaaaaaaaaaaaaaaaaaaaaaaaaaaaatgcatcccccccccccccccccccccccccccccccaaaggctcttttcagagccaccagaatt

SEQ ID NO: 2766 - RNA, 1531 nt, synthetic construct
  misc_feature 1..1531: note = mRNA i-3 (A64-N5-C30-hSL-N5) (opt11) from Homo sapiens__NP_000448.3__HNF4A(39-474)(S167A)
  source 1..1531: mol_type = other RNA
aggagaaagcttaccatggacacctcaccctccgaaggtaccaacctcaacgcgcccaactccctcggcgtctcagccctctgcgccatctgcggcgaccgcgcgaccggcaaacactacggtgcctcctcatgcgacggatgcaaaggcttcttccgacgctcagtccgcaaaaaccacatgtactcctgccgcttctcacgacaatgcgtcgttgacaaagacaaacgcaaccaatgccgctactgccgcctcaaaaaatgcttccgcgcaggaatgaaaaaagaagcagttcaaaacgaacgcgaccgcatctcaacccgcagatcatcatacgaagactcatccctaccatcaataaacgccctcctacaagccgaagtcctctccagacaaatcaccgcccccgtctcaggcataaacggcgacatccgtgcaaaaaaaatcgcctccatcgctgacgtctgcgaatccatgaaagaacaactccttgtcctcgtcgaatgggccaaatacattcctgccttctgcgaactccccctcgacgaccaagtcgcactactcagagcccacgcaggcgaacacctcctcctcggagcaacaaaacgctccatggtcttcaaagacgtcctcctactcggaaatgactacatcgtccccagacactgccccgaactcgctgaaatgtcaagagtctccatacgaatactagacgaactagtcctacccttccaagaactgcaaatagacgacaacgaatacgcctacctcaaagccatcatattcttcgaccccgacgccaagggactctcagaccccggcaaaatcaaacgcctacgctcccaagtgcaagtcagcctcgaagactacataaacgatcgccagtacgactcacgaggacgattcggagaactcctcctcctcctcccaacactccagtccatcacctggcaaatgatcgaacaaatccaatttatcaaactcttcggcatggccaaaatcgacaacctactacaagaaatgctcctcggaggatccccctcagacgccccccacgcccaccaccctctccacccccacctaatgcaagaacacatggggaccaacgtaatcgtcgccaataccatgccaactcatctatcaaacggtcaaatgtgcgaatggccccgcccccggggacaagccgccacccccgagacaccgcaaccctccccccctggcggatccggctcagaaccctataaactactccccggcgcggtcgccaccatagtcaaaccactctctgccatcccccaaccaaccataaccaaacaagaagtcatctaaggactagttataagactgactagcccgatgggcctcccaacgggccctcctcccctccttgcaccgagattaataaaaaaaaaaaaaaaaaaaaaaaaaaaaaaaaaaaaaaaaaaaaaaaaaaaaaaaaaaaaaaaatgcatcccccccccccccccccccccccccccccccaaaggctcttttcagagccaccagaatt

SEQ ID NO: 2767 - RNA, 1531 nt, synthetic construct
  misc_feature 1..1531: note = mRNA i-3 (A64-N5-C30-hSL-N5) (opt11) from Homo sapiens__NP_000448.3__HNF4A(39-474)(S167A_S378A_T429A_T432A _S436A)
  source 1..1531: mol_type = other RNA
aggagaaagcttaccatggacacaagcccctccgaaggcacaaatctcaacgcccccaactcactaggcgtctcagccctatgtgctatctgcggcgaccgcgccaccggcaaacactacggcgcatcatcatgtgacggatgcaaaggattcttccgacgctccgtccgaaagaaccacatgtactcctgccgattcagcagacaatgtgttgtcgacaaagacaaacgcaaccaatgtcgctactgccgcctcaaaaaatgctttagagccggaatgaaaaaagaagccgtccaaaacgaacgcgaccgcatctccacacgccgaagctcatacgaagactcatctctcccctccatcaacgcactcctccaagccgaagtcctatctcgccaaatcaccgcacccgtctccggcatcaacggcgacatacgcgccaaaaaaatagcctccatagcagacgtatgcgaatccatgaaagagcaactcctcgtgctagtcgaatgggccaaatacatccccgccttctgcgagctcccactagacgaccaagtcgccctcctccgcgcccacgccggcgaacacctgctcctaggcgccaccaaaagaagcatggtattcaaagacgtcctactcctcggcaacgactatatagtccctcgccactgtccagaactcgcagaaatgtccagagtcagcatccgaatcctcgacgaactcgtcctacccttccaagaactacaaatcgacgacaacgaatacgcctaccttaaagccatcatcttcttcgaccccgacgccaaaggcctatccgaccccggcaaaatcaaacgcttacgatcccaagtccaggtcagcctcgaagactacataaacgaccgccaatacgactcacgcggccgcttcggcgaactactcctcctcctcccaaccctccaaagcatcacctggcaaatgatagaacaaatacaattcatcaaacttttcggcatggccaaaatcgacaaccttttacaagaaatgctactcggtggcgcgcccagcgacgctccgcacgcccaccaccccctccacccacacctcatgcaggaacacatgggcaccaacgtaatagtcgccaacacaatgccaacccacctctcaaacggccagatgtgcgaatggccccgaccccgaggccaagccgcagccccagaagccccccaaccagcccccccaggaggatccggctcagaaccctataaactcttacccggtgccgtcgcgaccattgtcaaacccctctccgccataccccagcccacaatcaccaaacaagaagtcatctaaggactagttataagactgactagcccgatgggcctcccaacgggccctcctcccctccttgcaccgagattaataaaaaaaaaaaaaaaaaaaaaaaaaaaaaaaaaaaaaaaaaaaaaaaaaaaaaaaaaaaaaaaatgcatcccccccccccccccccccccccccccccccaaaggctcttttcagagccaccagaatt

SEQ ID NO: 2768 - RNA, 1531 nt, synthetic construct
  misc_feature 1..1531: note = mRNA i-3 (A64-N5-C30-hSL-N5) (opt11) from Homo sapiens__NP_000448.3__HNF4A(39-474)(S167E_S378E_T429E_T432E _S436E)
  source 1..1531: mol_type = other RNA
aggagaaagcttaccatggacacctccccctcagaaggcaccaacctcaacgctccaaactccctaggggtctccgcactctgcgcaatctgcggcgaccgtgccaccggcaaacattacggcgcctcatcctgcgacggctgcaaaggattcttccggcgatccgtccgaaagaaccacatgtacagctgcagattcagccgacaatgcgtcgtggacaaagataaacgcaaccaatgccgctactgccgactcaagaaatgcttccgcgcaggcatgaagaaagaagcagtacaaaacgaacgcgaccgcatctcaacaagacgtagctcctacgaagactcaagcctcccatccatcaacgccctcctccaagccgaagtactctcacgtcaaatcaccgaacccgtgtcaggaatcaacggcgacatccgcgccaagaaaatcgcctccatcgcagacgtctgcgaatccatgaaagaacaactcctcgtcctggtcgaatgggctaaatacatccccgcattctgcgaactccccctagatgaccaagtcgccctactgcgcgcccacgcaggcgaacatctattactcggcgccaccaaacgcagcatggtattcaaagacgtcctcctcctcggcaacgactacatagtcccacgccactgcccagaactggccgaaatgagccgagtctctatccgcatactcgacgagctagtcctccccttccaagaactccaaattgacgacaacgaatacgcctacctcaaagccatcatattcttcgaccccgacgcgaaaggcctatccgaccccggtaaaatcaaaagactacgctcacaagtccaagtctcccttgaagactacatcaacgaccgccagtacgacagccgcggccgcttcggcgaactacttctcctcctccccaccctccaatccatcacctggcaaatgatcgaacaaatccaattcataaaactattcggaatggccaaaatcgacaacctcctgcaagaaatgctcctcggaggcgaaccctcagacgcaccccacgcccatcaccccctccatccacacttaatgcaagaacacatgggcaccaacgtaatcgtagccaacactatgcccacccacctatccaatggccaaatgtgcgaatggcccagaccaagaggacaagccgccgaacccgaagaaccacaaccagaacctcccggtggatccggctcagaaccctacaaactactccccggagccgtagctaccatcgtcaagcccctatcagccatcccccaacccacaatcaccaaacaggaagtcatctaaggactagttataagactgactagcccgatgggcctcccaacgggccctcctcccctccttgcaccgagattaataaaaaaaaaaaaaaaaaaaaaaaaaaaaaaaaaaaaaaaaaaaaaaaaaaaaaaaaaaaaaaaatgcatcccccccccccccccccccccccccccccccaaaggctcttttcagagccaccagaatt

SEQ ID NO: 2769 - RNA, 1531 nt, synthetic construct
  misc_feature 1..1531: note = mRNA i-3 (A64-N5-C30-hSL-N5) (opt11) from Homo sapiens__NP_000448.3__HNF4A(39-474)(S87A)
  source 1..1531: mol_type = other RNA
aggagaaagcttaccatggacacctcaccctcagagggcaccaatctcaacgccccaaactcactcggagtaagtgcactatgcgcgatctgcggcgaccgcgccaccggcaaacactacggcgcatcctcctgcgacggctgcaaaggattcttccgacgcgccgtccgcaaaaaccacatgtactcatgccgcttctcacgccagtgcgtcgtagacaaagacaaacgcaatcaatgccgctactgccgactcaagaaatgcttccgcgccggaatgaagaaagaagcagtacaaaacgaacgcgaccgaatctccacccgccgctcctcctacgaagattcctccctcccctccatcaacgccctactccaagccgaagtactctcccgccaaatcacctctccagtttccggcataaacggcgacatacgagcaaagaaaattgcatctatcgccgacgtctgcgaatcgatgaaagagcaactcctagtactcgtagaatgggccaaatacatccccgcattctgcgaactcccacttgacgaccaagtcgcccttctccgagcacacgccggcgaacatctcctgctcggcgctacaaaaagaagcatggtcttcaaagacgtcctcctactcggcaacgactacatcgtcccccgccactgccccgaactagccgaaatgagccgagtctccatcagaatcctcgacgaactcgtactccccttccaagaactccaaatagacgacaacgaatatgcatacctcaaagcaatcatattcttcgaccccgacgccaaaggactttccgaccccggcaaaataaaacgcctccgatcccaagtacaggtctccctcgaagactacatcaacgacagacaatacgacagccgtggacgattcggagagttactcctactacttcccacccttcagtcaatcacctggcaaatgatagaacaaatccaattcatcaaactgttcggaatggctaaaatcgacaacctgctacaagaaatgctcctcggcggctcccctagcgacgccccacacgcacaccaccccctccacccacacctcatgcaagagcacatgggcacaaacgtaatagtagccaacacaatgcccacccacctctcgaacggccaaatgtgcgaatggccccgcccccgcggacaagccgcaaccccagaaacaccccaaccttcacccccaggcggctccggatccgaaccctacaaactactccccggagccgtagcaaccatagtcaaaccgctcagcgccatcccccaacccacaataaccaaacaagaagtcatctagggactagttataagactgactagcccgatgggcctcccaacgggccctcctcccctccttgcaccgagattaataaaaaaaaaaaaaaaaaaaaaaaaaaaaaaaaaaaaaaaaaaaaaaaaaaaaaaaaaaaaaaaatgcatcccccccccccccccccccccccccccccccaaaggctcttttcagagccaccagaatt

SEQ ID NO: 2770 - RNA, 1531 nt, synthetic construct
  misc_feature 1..1531: note = mRNA i-3 (A64-N5-C30-hSL-N5) (opt11) from Homo sapiens__NP_000448.3__HNF4A(39-474)(S87E)
  source 1..1531: mol_type = other RNA
aggagaaagcttaccatggacacctccccctccgaaggaaccaacctaaacgcaccaaattccctcggcgtctccgccctttgcgccatatgtggggaccgcgcaacaggaaaacactacggcgcctcctcctgcgacggatgcaaaggattcttccgacgcgaagtcagaaaaaaccacatgtactcatgtcgattctcccgccagtgcgtcgtcgacaaagacaaaagaaaccaatgcagatactgtcgcctaaaaaaatgcttccgcgccggaatgaaaaaggaagcagtacagaacgaacgcgaccgcatctccaccagacgctcctcctacgaagactcatccctgccctcgatcaacgcacttctccaagccgaggtcctatcaagacaaatcacttctccagtatccggcatcaatggcgacatccgcgccaaaaaaatcgcctcaatcgccgacgtctgcgagtccatgaaagaacaactactagtccttgtagaatgggctaaatatattcccgccttctgcgaacttcccctagacgaccaagtagcactcctccgcgctcacgccggcgagcacctactactcggcgcaaccaaaagatcaatggtcttcaaagacgtcctcctcctgggcaacgactacatcgtcccccgacactgccccgaactcgcggaaatgtcccgcgtcagcatccgcatcctcgacgaactcgtactccccttccaagaactacaaatcgacgacaacgaatacgcctacctcaaagcgataatcttcttcgacccagacgccaaaggtctatccgacccaggaaaaatcaaacgtctccgctctcaagtacaagtctctctcgaagactacataaacgaccgccaatacgactccagaggccggttcggcgaactcctcctcctactccccacactccaaagcatcacctggcaaatgatcgaacaaatccaattcataaaactattcggcatggccaaaatagacaacctgctacaagaaatgctcctcggaggttccccctcagacgccccccacgcccaccacccccttcacccacacctaatgcaagaacacatgggcactaacgtaatagtagccaacacaatgcccacccacctctccaacggccaaatgtgtgaatggccaagaccacgcggacaagccgcaacccctgagaccccccagccctccccacccggcggctctggcagcgaaccctacaaactgctacccggggccgtcgccacaatcgtaaaaccactctcggcaatcccccaacccaccatcaccaaacaagaagttatctaaggactagttataagactgactagcccgatgggcctcccaacgggccctcctcccctccttgcaccgagattaataaaaaaaaaaaaaaaaaaaaaaaaaaaaaaaaaaaaaaaaaaaaaaaaaaaaaaaaaaaaaaaatgcatcccccccccccccccccccccccccccccccaaaggctcttttcagagccaccagaatt

SEQ ID NO: 2771 - RNA, 1531 nt, synthetic construct
  misc_feature 1..1531: note = mRNA i-3 (A64-N5-C30-hSL-N5) (opt11) from Homo sapiens__NP_000448.3__HNF4A(39-474)(R2V)
  source 1..1531: mol_type = other RNA
aggagaaagcttaccatggacacctccccctccgaaggcacaaacctcaacgcccccaactccctcggcgtctccgccctatgcgccatatgcggagaccgagccaccggcaagcactacggcgcttcctcctgcgacggatgcaaaggcttcttccggagaagcgtccggaaaaaccacatgtattcctgccgattctcacgccaatgcgtagtcgacaaagacaaacgcaaccaatgccgctactgccgccttaagaaatgtttcagagccggaatgaagaaagaagccgtccaaaacgaacgcgaccgcataagcacccgccgctcctcatacgaagacagcagcctcccctccatcaacgccctcctccaagcagaagtgctctcccgacaaatcaccagccccgtaagcggaatcaacggcgacatacgcgccaagaaaatcgcctccatcgccgacgtctgcgaatcaatgaaagaacaactactcgtccttgtagaatgggccaaatacatccccgccttctgcgagctcccactcgacgaccaagtcgccctcctccgcgcacacgccggtgaacatctcctactaggagcaaccaaacgatcaatggtattcaaagacgtcctcctcctcggtaacgactacatagtcccaagacactgccccgaactagccgaaatgtcacgcgtctccatccgcatcctagacgaactcgtccttccctttcaagaactacaaatcgacgacaacgaatacgcctacctcaaagccatcatcttcttcgacccagacgcaaaaggactctcagaccccggcaaaatcaaacgcctccgctcccaagtccaagtcagcctcgaagactacatcaacgacagacaatacgactcacgaggccgcttcggagaactactactcttgctccccacactacaatcgataacctggcaaatgatcgaacaaatccaatttatcaaactattcggaatggcaaaaatagacaaccttctgcaagaaatgctccttggcggctctccctctgacgctccccacgcccaccaccccctccacccccaccttatgcaagaacacatgggaaccaacgtcatcgtagccaacacaatgcccacccacctatcaaacggccaaatgtgcgaatggccacggccacgcggccaagccgcaacacccgaaaccccacaaccctcacccccaggcggctccggctcagagccgtacaaactactacccggcgccgtagccaccatcgtgaaacctctctccgccatccctcaacccacaatcaccaaacaagaggtcatctaaggactagttataagactgactagcccgatgggcctcccaacgggccctcctcccctccttgcaccgagattaataaaaaaaaaaaaaaaaaaaaaaaaaaaaaaaaaaaaaaaaaaaaaaaaaaaaaaaaaaaaaaaatgcatcccccccccccccccccccccccccccccccaaaggctcttttcagagccaccagaatt

SEQ ID NO: 2772 - RNA, 1531 nt, synthetic construct
  misc_feature 1..1531: note = mRNA i-3 (A64-N5-C30-hSL-N5) (opt11) from Homo sapiens__NP_000448.3__HNF4A(39-474)(R2V_K5V)
  source 1..1531: mol_type = other RNA
aggagaaagcttaccatggacacctccccctcagaaggtaccaacctcaacgcacccaactcgctcggcgtatcagccctttgtgccatctgcggtgatcgcgcaaccggaaaacactacggcgcatcctcatgcgacggctgcaaaggcttcttccgccgatccgtccgtaaaaaccatatgtactcctgtcgattctcccgccaatgtgtcgtagataaagacaaacgcaaccaatgcagatactgccgcctaaaaaaatgcttccgggcaggtatgaagaaagaagcagtccaaaacgaacgcgaccgcatcagcacccgccgctcctcctacgaagactcgtccctcccatccatcaacgccctactccaagccgaagtcttatcccgacaaatcacttcccccgtctccggcataaacggcgacatccgcgcaaaaaaaatcgcctccatagccgacgtctgcgaatcaatgaaagaacaactcctagtccttgtcgaatgggccaaatacatccccgcattctgcgaactcccactcgatgaccaggtagccctcctccgcgcccacgcgggtgaacacctcctcctcggggccaccaaacgctccatggtattcaaagacgtcctcctcctcggaaacgactacatcgtcccacgccattgccccgagctagccgaaatgtctagagtctccatacgcatcctcgacgaactcgtactccccttccaagaactccaaattgatgacaacgaatacgcctacctcaaagcaatcatcttcttcgaccccgacgccaaagggctctccgacccaggaaaaatcaaacgcctcagatcccaagtccaggtatcactcgaagactacatcaacgaccgacaatacgactcccgaggccgtttcggcgaactcctactcctcttaccaaccctacaatccatcacatggcaaatgatcgaacaaattcaattcatcaaactcttcggaatggccaaaatcgacaatctcctacaagaaatgctcctcggaggatcaccctcagacgccccacacgcccaccaccctttacatccccacctaatgcaagaacacatgggaaccaacgtcatcgtagccaacaccatgccaacacacctctcaaacggacaaatgtgcgagtggcccagaccccgaggccaagccgccacaccagaaacaccccagccctcaccacccggcggctcaggctccgaaccctacaaactactccccggagccgtcgccaccatcgtcaagccactatcagcaatcccacaacccaccatcaccaaacaagaagtaatctaaggactagttataagactgactagcccgatgggcctcccaacgggccctcctcccctccttgcaccgagattaataaaaaaaaaaaaaaaaaaaaaaaaaaaaaaaaaaaaaaaaaaaaaaaaaaaaaaaaaaaaaaaatgcatcccccccccccccccccccccccccccccccaaaggctcttttcagagccaccagaatt

SEQ ID NO: 2773 - RNA, 1531 nt, synthetic construct
  misc_feature 1..1531: note = mRNA i-3 (A64-N5-C30-hSL-N5) (opt11) from Homo sapiens__NP_000448.3__HNF4A(39-474)(K179R_K180R)
  source 1..1531: mol_type = other RNA
aggagaaagcttaccatggacacctccccctccgaaggaaccaacctaaacgcccccaactccctaggcgtctccgccctctgcgcaatatgcggagaccgcgcaaccggcaaacattacggcgcttcctcctgtgacggttgcaaaggatttttccgccgatccgtccgtaaaaaccacatgtactcctgccgcttcagccgacaatgcgtggtagataaagacaaacgcaaccaatgccgttactgccgactcaaaaaatgcttccgagccggaatgaaaaaagaagcagtccaaaacgaacgcgaccgcatctctacacgcagatcttcatatgaagatagcagcctccccagcatcaacgccctcctccaagccgaagtcctctcccgacaaatcacctccccagtaagcggcataaatggcgacatccgtgcccggcgcatcgcatcaatcgccgacgtatgcgaatcaatgaaagaacaactactagtcctcgtcgaatgggcaaaatacatacccgcattctgcgaactccccctcgacgaccaagtagccctcctacgcgcccacgccggagaacacctactcctcggggccacgaaacgatccatggtcttcaaagacgtcctactcctcggaaatgactacatagtccccaggcactgccccgaactcgccgaaatgtcccgcgtctcaattcgaatcctagacgaactcgtcctacccttccaagaactccaaatagacgacaacgaatacgcttacctcaaagccattatcttcttcgacccagacgccaaaggactctccgacccgggaaaaataaaacgactacgcagccaagtccaagtctccttagaagactacatcaacgaccgccagtacgactcccgcggccgattcggagagcttctcctactcctccccaccctccaatccatcacatggcaaatgatcgaacaaatccaattcataaaactcttcggcatggccaaaatcgataatctactccaagaaatgctcctcggcgggtccccatcagacgccccccacgcacaccacccgctgcacccacacctaatgcaagaacacatgggaacaaacgtcatcgtcgccaacacaatgcccacccacctctcaaacggacagatgtgcgaatggccccgcccacgcggccaagcggcaacccccgaaacaccacagccctccccccccggcggcagcggctcagaaccctacaaactcctcccaggagcagtcgccaccatagtcaagcccctctcagccatcccacaaccaaccatcaccaaacaagaagtaatatagggactagttataagactgactagcccgatgggcctcccaacgggccctcctcccctccttgcaccgagattaataaaaaaaaaaaaaaaaaaaaaaaaaaaaaaaaaaaaaaaaaaaaaaaaaaaaaaaaaaaaaaaatgcatcccccccccccccccccccccccccccccccaaaggctcttttcagagccaccagaatt

SEQ ID NO: 2774 - RNA, 1531 nt, synthetic construct
  misc_feature 1..1531: note = mRNA i-3 (A64-N5-C30-hSL-N5) (opt11) from Homo sapiens__NP_000448.3__HNF4A(39-474)(K234R)
  source 1..1531: mol_type = other RNA
aggagaaagcttaccatggacacctccccatccgaaggcaccaaccttaacgcacccaactccctcggagtatccgccctctgcgccatctgcggcgaccgcgccacaggcaaacactacggagcctcatcctgcgacggctgcaaaggcttcttccgacgctccgtcagaaaaaaccacatgtactcctgccgattctcccgtcaatgcgtagtcgacaaagacaaacgcaaccaatgccgatactgccgcctcaaaaagtgcttccgagccggcatgaaaaaagaagccgtccagaacgagcgcgaccgaatctccacaagaagatcatcatacgaagactcctccctcccctccatcaacgccctactccaagccgaagtcctctccagacaaatcacaagccccgtatccggtatcaacggcgacataagagccaaaaaaatcgcctccatagccgacgtctgcgaatccatgaaagaacaactcctcgtgctcgtagaatgggccaaatacattcccgccttctgcgaactccctctcgacgaccaggtcgctctactcagggctcacgccggcgaacacctcctcctcggcgcaacccgccgctccatggtattcaaagacgtcctactactcggaaacgactacatcgttccccgccactgcccagagctcgctgaaatgtctcgcgtctccatccgcatcctcgacgaactcgtcctcccattccaagaactccaaatcgacgacaacgaatacgcctacctaaaagccataatcttcttcgaccccgacgcaaaaggactctccgacccagggaaaattaaacgactccgctcccaagtacaggtaagcctcgaagactacatcaacgaccgccaatacgattcccgaggccgcttcggcgaacttctcctactactacccaccctacagtccatcacctggcaaatgatcgaacaaatccaattcatcaaacttttcggaatggccaaaatcgacaacctcctccaagaaatgctcctcggcggctccccctccgacgccccccacgcacaccaccccctccacccacaccttatgcaagaacatatgggcacaaacgtcatcgtcgccaacaccatgcccacccacctctctaacggccaaatgtgcgaatggccccgcccaagaggccaagccgccaccccagaaaccccgcaacctagcccacccggcggctccggcagcgaaccctacaaactattacccggagcagtggccacgatcgtaaagcccctcagcgcaatcccacaaccaacaatcactaaacaagaagtcatctaaggactagttataagactgactagcccgatgggcctcccaacgggccctcctcccctccttgcaccgagattaataaaaaaaaaaaaaaaaaaaaaaaaaaaaaaaaaaaaaaaaaaaaaaaaaaaaaaaaaaaaaaaatgcatcccccccccccccccccccccccccccccccaaaggctcttttcagagccaccagaatt

SEQ ID NO: 2775 - RNA, 1531 nt, synthetic construct
  misc_feature 1..1531: note = mRNA i-3 (A64-N5-C30-hSL-N5) (opt11) from Homo sapiens__NP_000448.3__HNF4A(39-474)(K300R)
  source 1..1531: mol_type = other RNA
aggagaaagcttaccatggacacctccccctcggaaggcaccaacctcaacgcccccaactcccttggggtcagtgcactatgcgccatctgcggcgatagagccaccggaaagcactacggcgcctcctcatgcgacggctgcaaaggcttcttccgccgatccgtccgcaaaaaccacatgtactcatgcagattcagcagacaatgcgtcgtcgacaaagacaagagaaaccagtgccgatactgccgcctcaagaaatgtttccgcgccggcatgaagaaagaagcagtccaaaacgaacgcgaccgcatctccacccgccgctcatcctacgaagactccagcctaccctccataaatgccctactccaagcagaagtcctctcccgccaaataacctccccagtatccggaatcaacggcgacatccgcgccaagaaaatcgcctcaatagcagacgtctgcgaatccatgaaagaacaactacttgtcttagtagaatgggccaaatacatccccgccttttgcgaactaccccttgacgaccaagtcgccctcctccgcgcacacgccggcgaacacctattactaggcgccactaaacgctccatggtcttcaaagacgtactcctcctcggcaacgactatatcgtcccccgacactgccccgaactcgccgaaatgtcccgcgtctcaatacgaatcctcgacgaactcgtcctccccttccaagaactacagatcgacgacaacgaatacgcctacctcaaagcaatcatcttcttcgaccccgacgcccgcggcctatccgaccctggcaaaatcaaacgcctgcgctcccaagtacaagtgtccctcgaagactacatcaacgaccgacagtacgattcccgaggccgattcggcgaactcctcctcctactcccaacactccaatccatcacctggcaaatgatcgaacaaatccaattcattaaactcttcggcatggcaaaaatcgacaacctcctacaagaaatgctcctcggtgggtccccctccgatgctccccacgcccaccaccccctccacccccacctcatgcaggaacacatgggcaccaacgtcatcgtcgccaacacaatgccaacccacctctcaaacggacaaatgtgtgaatggccccgaccccgaggccaagcagccacacccgaaacaccccaaccctcacccccaggcggctccggctcagaaccctacaaactactcccaggagccgtcgccaccatcgtaaaaccactaagcgccataccccaaccaactatcacaaaacaggaggtcatctaaggactagttataagactgactagcccgatgggcctcccaacgggccctcctcccctccttgcaccgagattaataaaaaaaaaaaaaaaaaaaaaaaaaaaaaaaaaaaaaaaaaaaaaaaaaaaaaaaaaaaaaaaatgcatcccccccccccccccccccccccccccccccaaaggctcttttcagagccaccagaatt

SEQ ID NO: 2776 - RNA, 1531 nt, synthetic construct
  misc_feature 1..1531: note = mRNA i-3 (A64-N5-C30-hSL-N5) (opt11) from Homo sapiens__NP_000448.3__HNF4A(39-474)(K300R_K307R_K309R)
  source 1..1531: mol_type = other RNA
aggagaaagcttaccatggacacctccccatccgaaggcaccaacctcaacgccccaaactccctcggtgtatccgcactctgcgcaatctgcggcgaccgcgctacaggcaaacactacggcgcatcctcctgcgacggatgcaagggcttcttccgccgctcagtccggaaaaaccacatgtactcttgccgcttctcacgtcagtgcgtggtcgacaaagacaaacgcaaccaatgccgctactgccgactcaaaaaatgcttccgcgccggaatgaaaaaagaagcagtacaaaacgaacgagaccgcatcagcacccgtcgctccagctacgaagactcttcacttccctccatcaacgccctcctccaagccgaagtcctctcacgccaaatcacgtcccccgtctccggcataaacggcgacatccgagcaaaaaaaatcgcctccatcgcagacgtatgcgaatccatgaaagaacagctcctagtcctcgtcgaatgggccaaatacatcccagcattctgcgaacttcccctagacgaccaagtcgcccttctcagagcacacgctggggaacacctcctactaggcgcaacaaaacgctccatggtcttcaaagacgtactactcctcggcaacgactacatagtccctcgccactgccccgaactcgcagaaatgtcccgagtctcaatacgaatactagacgaactagtcctccctttccaagaactacaaatcgacgacaacgaatacgcttacctaaaagccatcattttcttcgacccagacgcccgcgggctctccgaccccggccgcatacgacgccttcgctcccaagtccaagtatcattagaagactacatcaacgaccgccaatacgactcccgcggccgcttcggagaactcctactcctcctacccacactccagtccatcacctggcaaatgatcgaacaaatccaattcattaaactattcggcatggccaaaatcgacaacctactccaagaaatgctcctcggcggaagcccctctgacgcccctcacgcacaccaccccctacacccacacttgatgcaggaacacatggggaccaacgtcatcgtcgccaacaccatgcccacacatctctcaaatggccaaatgtgcgaatggccacgacctcgcggtcaagctgctaccccagaaaccccccaaccttccccacccggcggttcaggctcggaaccctacaaactccttcccggcgccgtcgccacaatagtcaaaccactatccgcaatcccccaacccacaattaccaaacaagaagtaatctagggactagttataagactgactagcccgatgggcctcccaacgggccctcctcccctccttgcaccgagattaataaaaaaaaaaaaaaaaaaaaaaaaaaaaaaaaaaaaaaaaaaaaaaaaaaaaaaaaaaaaaaaatgcatcccccccccccccccccccccccccccccccaaaggctcttttcagagccaccagaatt

SEQ ID NO: 2777 - RNA, 1531 nt, synthetic construct
  misc_feature 1..1531: note = mRNA i-3 (A64-N5-C30-hSL-N5) (opt11) from Homo sapiens__NP_000448.3__HNF4A(39-474)(K447R_K470R)
  source 1..1531: mol_type = other RNA
aggagaaagcttaccatggacacctccccatccgaaggaacaaacctcaacgctcccaacagcttaggtgtctccgccctctgcgccatctgcggagatcgcgccaccggcaaacactacggcgcctcatcatgcgacggctgcaaaggcttcttccgacgctcagtccgcaaaaaccacatgtactcctgcagattctcaagacaatgtgtcgttgacaaagacaaacgaaaccaatgccgatactgccgccttaaaaaatgcttccgcgcaggaatgaaaaaagaagcagtccagaacgaacgcgaccgcatatccacccgccgttccagctacgaagacagctcactcccttcaatcaacgccctactacaagccgaagtcctctcccgacaaataacctcacccgtatccggcatcaacggagacatacgcgccaaaaaaatagcctcaatcgccgacgtctgcgaatccatgaaagaacaactcctagtcctagtcgaatgggccaaatacatacccgcattctgcgaactccccctagacgaccaggtagccctcctccgagcccacgccggcgagcacctcttacttggcgcaaccaaacgctccatggtattcaaggacgtcctactcctaggcaatgactacatcgtcccccgccactgccccgaactcgctgaaatgtcccgagtctcaatcagaattctagatgaactagtcctacccttccaagaactccaaatagacgacaacgaatacgcatacctcaaagccatcatattcttcgaccccgatgccaaaggtctaagcgaccccggaaaaataaagcgactacggtcgcaagtacaagtctccctggaagactacataaacgaccgccaatacgacagccgcggacgattcggagaactactcctactcctccccactctccaatccataacatggcaaatgatcgaacaaatccaattcatcaaactattcggcatggccaaaatcgacaatcttttacaggaaatgctacttggaggatccccatccgacgcccctcacgcgcaccacccactccacccacacctcatgcaagaacacatgggcaccaacgtgatagtagcaaacaccatgcccacccacctctccaacggccaaatgtgcgagtggccacgaccacggggccaagccgccaccccagagacaccacaaccctcaccccccggaggctccggctccgaaccctaccgactactgccaggagccgtcgcaaccatcgtaaaaccactcagcgccatcccccaacccaccatcacccggcaagaagtcatctaaggactagttataagactgactagcccgatgggcctcccaacgggccctcctcccctccttgcaccgagattaataaaaaaaaaaaaaaaaaaaaaaaaaaaaaaaaaaaaaaaaaaaaaaaaaaaaaaaaaaaaaaaatgcatcccccccccccccccccccccccccccccccaaaggctcttttcagagccaccagaatt

SEQ ID NO: 2778 - RNA, 1531 nt, synthetic construct
  misc_feature 1..1531: note = mRNA i-3 (A64-N5-C30-hSL-N5) (opt11) from Homo sapiens__NP_000448.3__HNF4A(39-474)(K458R)
  source 1..1531: mol_type = other RNA
aggagaaagcttaccatggacacaagcccatctgaaggaactaacctcaacgcccccaactccctaggagtatccgctctctgcgccatctgcggagaccgcgccaccgggaaacactacggcgcctcctcatgcgacggatgcaaaggcttcttccgccgctcagtccgcaaaaaccacatgtactcctgtcgattctcccgacaatgcgtcgtcgacaaagacaaacgcaaccaatgccgatactgccgcctcaagaaatgcttcagagccggcatgaagaaagaagccgtacaaaacgaacgagaccgcatctccacacgccgtagctcctacgaagactcaagcctcccctcaatcaacgccctacttcaggccgaagtcctctcccgacaaattaccagcccagtctccggcatcaacggcgacatccgagccaagaaaatcgcatcaatagccgatgtctgcgaaagcatgaaagaacaactccttgtcctcgtagaatgggccaaatacatccccgccttctgcgaactacccctcgatgaccaagtagccctactcagagcccacgccggcgaacacctcctcctcggcgccaccaaacgcagcatggtcttcaaagatgtactcctcctcggcaacgactacatcgtcccccgacactgccccgaacttgcagaaatgagcagagtctcaatccgcatcctcgacgaactcgtactaccattccaagaactccagatcgacgacaacgaatacgcctacctgaaagcaattatcttcttcgaccccgacgccaaaggcctctcagaccccggcaaaattaaacgcctcagaagtcaagtccaagtatccctcgaagactatatcaatgaccgccaatacgactcccgcgggcgcttcggcgaactcctcctccttctcccaaccctccaatcaatcacctggcaaatgatcgaacaaatccaattcataaaattattcggaatggccaaaatcgacaacctactccaggaaatgctcctcggcgggtccccctccgacgccccacacgcccaccaccccctccacccccacctaatgcaagaacatatgggcaccaacgtcatcgtcgcaaacaccatgccaacccacctctcaaacggacaaatgtgcgaatggccccgtccccgaggccaggccgccacccccgaaacccctcaaccctcgcctcccggaggctccggctcagaaccctacaaactcctcccaggtgcagttgcaacaatagtcagacccctctccgccatcccccagcccacaataacaaaacaagaagtcatctaaggactagttataagactgactagcccgatgggcctcccaacgggccctcctcccctccttgcaccgagattaataaaaaaaaaaaaaaaaaaaaaaaaaaaaaaaaaaaaaaaaaaaaaaaaaaaaaaaaaaaaaaaatgcatcccccccccccccccccccccccccccccccaaaggctcttttcagagccaccagaatt

SEQ ID NO: 2779 - RNA, 1531 nt, synthetic construct
  misc_feature 1..1531: note = mRNA i-3 (A64-N5-C30-hSL-N5) (opt11) from Homo sapiens__NP_000448.3__HNF4A(39-474)(K106R_K108R_K126R_K127R )
  source 1..1531: mol_type = other RNA
aggagaaagcttaccatggacacctcaccctccgaaggcaccaacctcaacgctcccaactccctaggcgtctcagccctctgcgcgatatgcggagaccgagccaccggtaaacactacggcgcttcgagctgcgacggctgcaaaggcttcttccgtcgctcagtccgcaaaaaccacatgtactcatgccgattctcacgccaatgcgtagtagaccgcgaccgccgcaaccagtgccgatactgccgtcttaagaaatgcttccgcgccggcatgcgcagagaagcagtccaaaacgaacgcgaccgcatctcaacccggcgcagctcttacgaagactcaagccttccctcaatcaacgccctactacaagccgaagtcctaagccgccaaatcacttcacccgtatccggaataaacggcgacatccgagccaagaaaatagcctccatcgccgacgtctgcgaaagcatgaaagaacaactcctcgtcttagtcgaatgggccaaatacatccccgcattctgcgaactcccactggacgaccaagtagccctgctccgagcccacgccggcgaacacctcctcctcggcgccacgaaacgaagcatggtcttcaaagacgtccttctccttggcaacgactacatcgtcccacgccactgcccagagctagccgaaatgtcacgagtctcaatccgcatactcgacgagctagtactcccattccaagaactacaaatagacgacaacgaatacgcctatctcaaagcgatcatattcttcgaccccgacgccaaaggcctctccgacccaggcaaaatcaaacgcctccgctcccaagtccaggtgtcccttgaagactacataaacgatcgccaatacgactcacgaggaagattcggcgaactccttcttcttctccccacactccagtcaatcacatggcaaatgatcgaacagatacaattcatcaaacttttcggcatggccaaaatagacaacctcctacaggaaatgctactaggaggatccccatcagacgcaccccacgcccaccaccccctacacccccacctcatgcaagaacacatgggcaccaacgtcatagtcgccaacaccatgcccacccacctaagcaacggacaaatgtgcgagtggccccgcccacgcggccaagccgccacccccgaaacaccacaaccaagcccacccggcggctccggctccgaaccatacaaacttctcccaggcgctgtagccaccatcgtaaaaccactctcagccataccccaacccactatcaccaaacaagaggttatctagggactagttataagactgactagcccgatgggcctcccaacgggccctcctcccctccttgcaccgagattaataaaaaaaaaaaaaaaaaaaaaaaaaaaaaaaaaaaaaaaaaaaaaaaaaaaaaaaaaaaaaaaatgcatcccccccccccccccccccccccccccccccaaaggctcttttcagagccaccagaatt

SEQ ID NO: 2780 - RNA, 1531 nt, synthetic construct
  misc_feature 1..1531: note = mRNA i-3 (A64-N5-C30-hSL-N5) (opt11) from Homo sapiens__NP_000448.3__HNF4A(39-474)(E285Q)
  source 1..1531: mol_type = other RNA
aggagaaagcttaccatggacacctcgccatccgaaggcacgaacctaaatgcccccaactcccttggcgtctccgcactctgcgccatctgcggcgaccgcgcaaccgggaaacactacggcgcctcatcctgcgacggctgcaaaggattcttccgtcgatctgtacgcaaaaaccacatgtactcttgccgattcagccgacaatgcgtcgttgacaaagacaaacgcaaccaatgccgctactgccgactcaaaaagtgcttccgcgcaggtatgaaaaaggaagcagtacaaaacgaacgagaccgcatttccacccgacgatcatcctatgaagactcctccctcccctcaatcaacgccctacttcaagccgaagtcctctcccgacaaataacctcccccgtcagcggcatcaacggcgacatcagagccaagaaaatcgcaagcatcgcagacgtatgcgagtcaatgaaagaacaactcctcgtcctagtcgaatgggcaaaatacatccccgccttctgcgaactcccactagacgaccaagtagccctcctccgcgcccacgccggagaacacctcctcctaggcgccactaaacgctccatggtcttcaaagacgtcctcctcctaggcaatgattacatcgttccccgacattgccccgaactagccgaaatgtcccgagtatccatccgcatcctcgacgaactcgtcctaccattccaagaactacaaatcgacgacaaccaatatgcatacctaaaagcaatcatcttcttcgaccccgacgccaaaggccttagcgacccaggcaaaatcaagcgactacgcagccaagtacaagtatccctagaagattacatcaacgatcgccaatacgactcccgcggccggttcggcgaactcctcctcctcctccccactctacaatccataacctggcaaatgatagaacaaatccaattcatcaagttattcggcatggccaaaatagacaacctcctccaagaaatgctactcggcggctccccatccgacgccccacacgcccatcaccccctccacccacaccttatgcaagaacacatgggcaccaacgtaatagtcgccaacaccatgccaacccacctctccaacggacaaatgtgcgaatggccacggccacgcggacaagccgccacaccggaaacaccacaacccagcccacccggcggttccggctccgaaccctacaaactactacccggcgcagtcgccaccatcgtcaaaccgctctcagccatccctcaaccaaccatcaccaaacaagaagtcatataaggactagttataagactgactagcccgatgggcctcccaacgggccctcctcccctccttgcaccgagattaataaaaaaaaaaaaaaaaaaaaaaaaaaaaaaaaaaaaaaaaaaaaaaaaaaaaaaaaaaaaaaaatgcatcccccccccccccccccccccccccccccccaaaggctcttttcagagccaccagaatt

SEQ ID NO: 2781 - RNA, 1531 nt, synthetic construct
  misc_feature 1..1531: note = mRNA i-3 (A64-N5-C30-hSL-N5) (opt11) from Homo sapiens__NP_000448.3__HNF4A(39-474)(T166E)
  source 1..1531: mol_type = other RNA
aggagaaagcttaccatggacactagcccctccgaaggcaccaacctcaacgcaccaaactccttaggggtttcagccctatgcgccatatgcggcgatagagcaacaggaaaacactacggcgcctcatcatgcgatggctgcaaaggcttcttccgccgatccgtccgaaagaaccacatgtactcatgccgcttctcacgacaatgcgtcgtcgacaaagacaagcgaaaccaatgccgctactgccgcctaaagaaatgcttccgcgccggcatgaagaaagaagcagtacaaaacgaacgcgatcgcatctccacccgcagatcgtcctacgaagacagcagcctccccagcatcaacgccctcctccaagctgaagtcctctcccgccaaatcgaatcacccgtctcaggcatcaacggtgatatccgcgcaaagaaaatagcctccatcgccgacgtctgcgaatccatgaaagaacaactcctagtcctagtagaatgggccaaatacatcccagcattctgcgagctccccctggacgatcaagtcgctctcctccgcgcccacgccggcgaacacctcctactcggagcaaccaaacgcagtatggtattcaaagacgtcctactactcggtaacgactacatagtaccccgccactgcccagaactcgccgaaatgtcccgtgtctccatacgcatcctagacgaactcgtcctccccttccaagaactacaaatcgacgacaacgaatacgcctacctaaaagccatcatcttcttcgaccccgacgctaaaggcctctccgatccaggcaaaatcaaacgcctacgaagccaagtccaagtttccctcgaagactacatcaacgacagacaatacgactcccgcggccgcttcggcgaactactcctcctacttccaacactccaaagcataacgtggcaaatgatagaacaaatccaattcatcaaactcttcggcatggctaaaatagacaacctcctccaggaaatgctccttggaggctccccctccgacgcaccccacgcccaccacccactccaccctcacctcatgcaagaacacatgggcacaaacgtaatcgttgccaacactatgcccacccacctatccaacggacaaatgtgcgaatggccccgaccccgcggccaagccgccaccccagagactccccaaccctcgccacccggagggtccggctccgaaccctacaaactactccccggagcagtagcaacaatcgtaaaaccactctccgccataccccaacccactatcaccaaacaagaagtcatctaaggactagttataagactgactagcccgatgggcctcccaacgggccctcctcccctccttgcaccgagattaataaaaaaaaaaaaaaaaaaaaaaaaaaaaaaaaaaaaaaaaaaaaaaaaaaaaaaaaaaaaaaaatgcatcccccccccccccccccccccccccccccccaaaggctcttttcagagccaccagaatt

SEQ ID NO: 2782 - RNA, 1531 nt, synthetic construct
  misc_feature 1..1531: note = mRNA i-3 (A64-N5-C30-hSL-N5) (opt11) from Homo sapiens__NP_000448.3__HNF4A(39-474)(S148A)
  source 1..1531: mol_type = other RNA
aggagaaagcttaccatggacacctctccctccgaaggcaccaacctcaacgcacccaactccctcggagtctccgccctctgcgccatctgtggcgaccgagcaaccgggaaacattacggcgcatcctcctgcgacggctgcaaaggcttcttccgccgatccgtcagaaaaaaccacatgtactcgtgccgattctcacgccaatgcgtagttgacaaagacaaacgcaaccaatgccgctactgccgccttaaaaaatgcttccgcgccggaatgaaaaaagaggccgtacaaaatgaacgcgaccgaatcagcacacgccgctcttcatacgaagactccgcactcccatccatcaacgccctactacaagccgaagtcctcagccggcaaatcacatccccagtgtccggtattaacggagacatacgcgccaagaaaatagcctccatagcagacgtctgcgagtcaatgaaagaacaactcctcgtactcgtagaatgggcaaaatacatccccgccttctgcgaacttcccctcgacgaccaagtcgcactcctccgcgcccacgccggcgaacatctcctactaggagccaccaaacgttcaatggtcttcaaagacgtcctgctactcggcaacgactatatcgtccccagacactgccccgaactagcagaaatgtccagagtctcaatacgaatcctagacgaactcgtcctcccattccaagaactacaaatcgacgacaacgaatacgcctacctcaaagccatcatcttctttgaccccgacgccaaagggctctccgaccccggaaaaatcaaacgcctgcgctcacaagtccaagtatccctcgaagactacatcaacgaccgccagtacgacagccgaggacgtttcggcgaactcctactcctcctcccaacactccagtccatcacctggcaaatgatcgaacaaatccaattcataaaactcttcggcatggccaaaatcgacaacctactccaagaaatgctcctcggcggatccccgtccgacgccccccacgcccaccaccccctacacccacacctcatgcaagaacacatgggaacaaacgtcatcgtagccaacaccatgcccacccacctctccaacggccaaatgtgcgaatggccccgcccacgcggccaagctgcaacaccagaaaccccacaaccatccccccccggcggcagcggctccgaaccctacaagcttctccccggtgccgtggccacaatagtcaaaccactctcggccattccccaaccaacaataacaaaacaagaagtgatctaaggactagttataagactgactagcccgatgggcctcccaacgggccctcctcccctccttgcaccgagattaataaaaaaaaaaaaaaaaaaaaaaaaaaaaaaaaaaaaaaaaaaaaaaaaaaaaaaaaaaaaaaaatgcatcccccccccccccccccccccccccccccccaaaggctcttttcagagccaccagaatt

SEQ ID NO: 2783 - RNA, 1531 nt, synthetic construct
  misc_feature 1..1531: note = mRNA i-3 (A64-N5-C30-hSL-N5) (opt11) from Homo sapiens__NP_000448.3__HNF4A(39-474)(S148E)
  source 1..1531: mol_type = other RNA
aggagaaagcttaccatggacacctcaccctctgaaggaaccaacctcaacgcacccaactccctcggcgtatccgccctgtgcgccatctgcggtgatcgcgccaccggcaaacactacggggcctcaagctgcgacggctgcaaaggcttcttccgccgctctgtcaggaaaaaccacatgtacagctgccgattctcccgccaatgcgtagtcgataaagacaaacggaaccaatgccgatactgtcgcctcaagaaatgcttccgagcaggcatgaaaaaggaagcagtccaaaacgaacgggaccgaatctccactcgccgctcatcctacgaagacagcgaactaccctccattaatgccctcctccaagcagaagtactttcacgacaaataacctcccccgtctcaggcatcaacggcgacatcagagccaagaaaatcgcctccatcgccgacgtatgcgaatccatgaaagaacaactcctggtgctagtcgaatgggcaaaatatatccccgctttctgcgaactccccctagacgaccaagtcgcactcctccgagcccacgccggagagcacctcttactaggcgccaccaaacgaagcatggtcttcaaagacgtcctcctcctcggaaatgactacatcgtccccagacactgccccgaactcgccgaaatgtcacgagtctccatcagaatcctcgacgaactggtcctaccatttcaagaactacaaatcgatgacaacgaatacgcatacctcaaagcgatcatcttcttcgaccccgacgccaaagggctctccgacccaggcaaaatcaaacgcctcagaagccaggtccaagtctccctagaagactacataaacgaccgccagtatgactcccgcggcagattcggcgaactcctccttctacttccgaccctccaatccatcacctggcaaatgatcgaacaaatccaattcatcaaactcttcggcatggccaaaattgacaacctcctacaagaaatgctcctaggcggcagcccctcagacgcgccccacgcccaccacccactccacccacacctcatgcaagagcacatgggcaccaacgtcatagtagccaacaccatgcccacacacctctccaacggccagatgtgcgaatggccacgcccacgtggtcaagcagccacccccgaaaccccgcaaccatccccacccggcggatccggatccgaaccctacaaactcctacccggcgcagtcgccacaatcgtaaaacccctcagcgccatccctcagcccaccataaccaaacaagaagtcatctgaggactagttataagactgactagcccgatgggcctcccaacgggccctcctcccctccttgcaccgagattaataaaaaaaaaaaaaaaaaaaaaaaaaaaaaaaaaaaaaaaaaaaaaaaaaaaaaaaaaaaaaaaatgcatcccccccccccccccccccccccccccccccaaaggctcttttcagagccaccagaatt

SEQ ID NO: 2784 - RNA, 1531 nt, synthetic construct
  misc_feature 1..1531: note = mRNA i-3 (A64-N5-C30-hSL-N5) (opt11) from Homo sapiens__NP_000448.3__HNF4A(39-474)(S183A)
  source 1..1531: mol_type = other RNA
aggagaaagcttaccatggacacctccccctcggagggaacaaacctcaacgcccccaactcactcggcgtcagcgcactctgcgccatatgcggcgaccgcgccaccggaaaacactacggagcctcaagctgcgacggctgcaaaggattcttcagacgcagcgtccggaaaaaccacatgtactcctgccgcttctcccgacaatgcgtcgtcgacaaagacaaacgaaaccaatgccgatactgccgcctaaaaaaatgcttccgcgctggaatgaaaaaagaagcagtacaaaacgaacgcgaccgcatatccaccagaagatcctcctacgaagactccagcctaccctcaatcaacgctctcctccaagcagaagtcctcagccgccaaatcacctcacccgtcagcggcatcaacggggacatccgcgccaaaaaaatcgccgcgattgccgacgtgtgcgaatccatgaaagagcaactcctcgtcctcgtagaatgggccaaatacatccccgccttctgcgaactacccctagacgaccaagtagcccttctacgcgcccacgccggggaacacctcctactcggcgcaaccaaaaggtcaatggtcttcaaagacgtcctcctactcggaaacgactacatcgtgcccaggcactgtccggaactcgccgaaatgtccagagtctcaatccggatactagacgaactcgtactccccttccaagaactacaaatcgacgacaacgaatacgcatacctaaaagccatcatcttcttcgacccagacgctaaaggactaagcgacccaggcaagatcaaacgactacgttcccaagtacaagtatccctggaagactacatcaacgaccgccaatacgactcacgaggtcgcttcggcgaactgctcctactcctacccaccctccaatccatcacatggcaaatgatcgaacaaatccaattcatcaaactcttcggtatggctaaaatcgacaacctactccaagaaatgcttctcggcggctccccatccgacgccccccacgcccaccacccactccacccccacctaatgcaagaacacatgggcaccaatgtcatagtcgccaacaccatgcccacccacctctcaaacggacaaatgtgcgaatggccccgaccacggggacaagcagccacaccagaaaccccccaacctagcccacccggaggctccggctcggaaccctacaaactcctccccggcgccgtagccaccatagtaaaacctttatccgccatcccacaacccaccatcacgaaacaggaagtaatataaggactagttataagactgactagcccgatgggcctcccaacgggccctcctcccctccttgcaccgagattaataaaaaaaaaaaaaaaaaaaaaaaaaaaaaaaaaaaaaaaaaaaaaaaaaaaaaaaaaaaaaaaatgcatcccccccccccccccccccccccccccccccaaaggctcttttcagagccaccagaatt

SEQ ID NO: 2785 - RNA, 1531 nt, synthetic construct
  misc_feature 1..1531: note = mRNA i-3 (A64-N5-C30-hSL-N5) (opt11) from Homo sapiens__NP_000448.3__HNF4A(39-474)(S183E)
  source 1..1531: mol_type = other RNA
aggagaaagcttaccatggatacctccccctcggaagggaccaacctcaacgccccaaattcacttggagtctccgccctatgcgccatatgtggagaccgcgctaccggaaaacactatggcgcgtcatcctgcgacggatgcaaaggcttcttcagacgctcggtccgcaaaaaccacatgtactcctgccgattctcccgccaatgcgtcgtcgacaaagacaaaagaaaccaatgcaggtactgccgtctgaagaaatgcttccgcgccggaatgaagaaagaagccgtccaaaacgaacgcgaccgaatcagcaccagacgcagctcctacgaagactcctcactcccatcaatcaacgccctactccaagccgaagtcctctcccgccaaatcacctccccagtaagcggaatcaacggcgacatccgcgccaagaaaatagccgaaatagccgacgtctgcgaatcaatgaaagaacagctactcgtcctcgtcgaatgggccaaatacatacccgccttctgcgaactccctctcgacgaccaagtcgcactactcagagcccacgccggagaacacctactcctcggagccacgaaacgatccatggtattcaaagacgtactcctccttggtaacgattacatcgtcccaagacactgcccagaactcgccgaaatgtccagagtatcaatccgaatcctcgacgagctagtactcccctttcaggaactacaaatagatgacaacgaatacgcatacctaaaagccatcatcttctttgaccccgacgccaaaggcctctccgacccaggcaaaatcaaacgcctacgctcccaagttcaagtatccctcgaagactacatcaatgaccgccaatacgacagccgaggacgcttcggcgaactactcctgctactccccaccctacaatccatcacttggcaaatgatcgaacaaatccaattcatcaaactcttcggcatggccaaaatcgacaaccttctccaggaaatgctcctcggtggcagcccctccgacgcaccccacgcccaccaccccctccacccacacctcatgcaagaacacatgggcaccaacgtcatagtagcaaacaccatgcccacccacctatcaaacggacaaatgtgcgaatggccgcgcccgagaggacaagccgccacacccgaaacaccccaaccaagccctcccggcggctcaggttcagaaccctataaactcctacccggcgccgtagccaccatcgtaaaacccctcagcgccatcccccaacccaccatcaccaaacaagaagtgatataaggactagttataagactgactagcccgatgggcctcccaacgggccctcctcccctccttgcaccgagattaataaaaaaaaaaaaaaaaaaaaaaaaaaaaaaaaaaaaaaaaaaaaaaaaaaaaaaaaaaaaaaaatgcatcccccccccccccccccccccccccccccccaaaggctcttttcagagccaccagaatt

SEQ ID NO: 2786 - RNA, 1531 nt, synthetic construct
  misc_feature 1..1531: note = mRNA i-3 (A64-N5-C30-hSL-N5) (opt11) from Homo sapiens__NP_000448.3__HNF4A(39-474)(S461A)
  source 1..1531: mol_type = other RNA
aggagaaagcttaccatggacacatcccccagcgaaggcaccaatctaaacgcacccaactccctcggggtctcagcactatgcgccatctgcggagatcgcgctactggcaaacactacggagcctcctcctgcgacggctgcaaaggcttcttccgaagatcagtccgcaaaaaccacatgtactcatgccgcttctctcgccaatgcgtcgtcgacaaagacaaacgaaaccagtgccgctactgccgcctaaagaaatgctttcgcgccggcatgaagaaagaagcagtacaaaacgaacgcgaccgcatctccacccgccggtcaagctacgaggactcatcactcccatcaatcaacgctctcctccaagcagaagtccttagccgacaaatcacatcccccgtttccggaatcaacggcgacatccgagcaaagaaaatcgcctctatcgcagacgtatgcgaatccatgaaagaacaactcctagtcctagtcgaatgggcaaaatatatacccgccttctgcgaactgcccctagacgatcaagtcgcactactccgagcccacgccggcgagcacctcctgctcggcgccacaaaacgatccatggtattcaaagacgtactactcctcgggaacgactacatcgtaccccgccactgccccgagctcgccgaaatgtcacgtgtctcaattcgcatactagacgagctagtcctccccttccaagaactacaaatagacgacaacgaatacgcatacctaaaagccatcatcttcttcgaccccgatgccaaaggactatccgaccccggcaaaatcaaacgccttcgttcacaagtgcaagtctcgctcgaagactacatcaacgaccgccaatacgactccagaggccgattcggagaactcctactcctcctccccaccctccaatccatcacatggcaaatgatagaacaaatccaattcataaaactcttcggcatggccaaaatcgacaacctgctccaagaaatgctcctcggcggatcaccctccgacgccccacacgcccaccaccccctacacccccaccttatgcaagaacacatgggaaccaacgtcatcgtcgccaacacaatgcccacacacctatcaaacggacaaatgtgcgagtggcctcgcccccgcggccaagcagccacacccgaaacaccccagccctccccacccggcggctccggctcggaaccctacaaacttctcccaggcgccgtcgccaccatcgtaaaaccactcgccgcaataccccaaccaaccatcaccaaacaagaggtaatctaaggactagttataagactgactagcccgatgggcctcccaacgggccctcctcccctccttgcaccgagattaataaaaaaaaaaaaaaaaaaaaaaaaaaaaaaaaaaaaaaaaaaaaaaaaaaaaaaaaaaaaaaaatgcatcccccccccccccccccccccccccccccccaaaggctcttttcagagccaccagaatt

SEQ ID NO: 2787 - RNA, 1531 nt, synthetic construct
  misc_feature 1..1531: note = mRNA i-3 (A64-N5-C30-hSL-N5) (opt11) from Homo sapiens__NP_000448.3__HNF4A(39-474)(S461E)
  source 1..1531: mol_type = other RNA
aggagaaagcttaccatggacacctctccatccgaaggcacaaacctcaacgcacccaactccctcggcgtctccgcactttgcgcaatctgcggcgaccgagccaccggcaaacattacggagcctccagctgcgacggctgcaagggattcttccgccgcagcgtccgcaaaaaccacatgtactcgtgccgcttctcacgacagtgcgtagtcgacaaagacaaacgcaaccaatgcagatactgcagacttaaaaagtgcttccgcgcgggaatgaagaaagaagccgtccaaaacgaacgagatcgcatctccacccgccggagctcatacgaagactcatcactaccatcaataaacgccctcctacaagccgaagtcctatcccgccaaataacctcccccgtctctggcatcaacggagacatccgcgccaagaaaatcgcaagcatcgccgacgtctgcgaatcaatgaaagagcaactactcgtcctagtagaatgggcaaaatacataccagccttctgcgaactccccctagacgaccaagtcgcgctactccgagcccacgcaggagaacaccttctcctaggcgcaaccaaacgctccatggtatttaaagacgtcctactcctgggcaacgactacatagtcccccgccattgcccagaactcgccgaaatgtcacgcgtatcgatacgcatcctcgacgagctagtcctccccttccaagaactacaaatagacgacaacgaatacgcctacttgaaagccataatcttcttcgacccagacgccaaaggcctctccgacccaggcaaaataaaacgcctacgcagccaggtacaggtcagcctcgaagactatatcaacgaccgtcaatacgactcccgaggccgattcggagaactcctcctactcctaccaaccctccaatcaatcacctggcaaatgatcgaacaaatacaattcatcaaactgttcggcatggcaaaaatagacaacctacttcaagaaatgctcttaggaggctccccctccgacgccccacacgcccaccaccccctccacccacacctcatgcaagaacacatggggaccaacgtaatagtcgccaacaccatgcccacccacctatccaacggccaaatgtgcgaatggccccgcccgcgcggccaagccgccacccctgaaacaccacaaccctcccctcccggcggatcaggctccgaaccctacaaactccttcccggcgccgtagccactatcgtcaaacccctcgaagccatacctcaaccaaccatcaccaaacaagaggtcatctaaggactagttataagactgactagcccgatgggcctcccaacgggccctcctcccctccttgcaccgagattaataaaaaaaaaaaaaaaaaaaaaaaaaaaaaaaaaaaaaaaaaaaaaaaaaaaaaaaaaaaaaaaatgcatcccccccccccccccccccccccccccccccaaaggctcttttcagagccaccagaatt

SEQ ID NO: 2788 - RNA, 1531 nt, synthetic construct
  misc_feature 1..1531: note = mRNA i-3 (A64-N5-C30-hSL-N5) (opt11) from Homo sapiens__NP_000448.3__HNF4A(39-474)(S142A_S143A_S313A)
  source 1..1531: mol_type = other RNA
aggagaaagcttaccatggacacctcaccctctgaagggaccaacctaaacgcaccaaactcactcggagtcagcgccctatgcgccatctgcggcgaccgcgcaaccggaaaacactacggcgcctcctcttgcgacggctgcaaaggcttcttccgaagatccgtcagaaaaaaccatatgtacagctgccgcttctcacgacaatgcgtcgtcgacaaagacaaaagaaaccaatgcagatattgccgactcaaaaaatgctttcgagccggcatgaaaaaggaagcagtccaaaacgaacgcgaccgcatttccacccgcagagccgcctacgaagacagctccctccccagcatcaacgcactactccaagctgaagtattatcccgccaaatcacctccccagtctccggcatcaacggcgacatacgggccaaaaaaatcgcctcaatcgccgacgtctgcgaatccatgaaagaacaactcctagtcctagtcgaatgggccaaatacatacccgcattctgcgaactacctttagacgaccaagtcgccctcttacgagcccacgccggcgaacatctactgcttggcgccaccaaacgatccatggttttcaaagacgtactactcctcggaaacgactacatcgtcccacgtcactgcccagaactagccgaaatgtcccgcgtctcaatccgcatcctcgacgaactcgtactcccctttcaagaactacaaatcgacgacaacgagtacgcctacctcaaagccatcatcttcttcgaccccgacgcaaaaggcctctccgaccccggcaaaattaaacgacttagagcacaagtacaagtcagcctagaagactacataaatgaccgccaatacgacagcagaggccgcttcggcgagctcctactcctcctccccaccctacaatcaattacctggcagatgatcgaacaaatacaattcataaaacttttcggaatggccaaaatcgacaacctactccaagaaatgctcctcggcggctcccccagcgacgccccccacgcacaccaccccctacacccccacctaatgcaagagcacatgggaaccaacgtcatagtagccaacacaatgcccactcacctcagcaacggccaaatgtgcgaatggccccgcccccgaggacaagccgccacccccgaaaccccccaaccgagcccccccggcggctccggctccgaaccctacaaactcctccctggcgccgtagccacgatagtaaaaccgctctccgccatcccccaaccgacaataacgaaacaagaagtaatctaaggactagttataagactgactagcccgatgggcctcccaacgggccctcctcccctccttgcaccgagattaataaaaaaaaaaaaaaaaaaaaaaaaaaaaaaaaaaaaaaaaaaaaaaaaaaaaaaaaaaaaaaaatgcatcccccccccccccccccccccccccccccccaaaggctcttttcagagccaccagaatt

SEQ ID NO: 2789 - RNA, 1531 nt, synthetic construct
  misc_feature 1..1531: note = mRNA i-3 (A64-N5-C30-hSL-N5) (opt11) from Homo sapiens__NP_000448.3__HNF4A(39-474)(S142A_S143A_S313A_K458R )
  source 1..1531: mol_type = other RNA
aggagaaagcttaccatggacacatccccctccgagggcaccaacctcaacgcccccaactctctcggcgtctctgccctctgcgccatctgcggcgaccgcgccaccggaaaacactacggagccagctcatgcgacggctgcaaaggattctttcgacgctccgttagaaaaaaccacatgtactcatgccgtttctctcgccaatgcgtcgtcgacaaagacaaacgtaaccagtgccgctactgccgcctaaaaaaatgcttccgcgcaggcatgaaaaaagaagccgtccaaaacgagagagaccgcatatccacccgccgagccgcctacgaagactcttcactaccgtccataaacgccctcctacaagccgaagtcctatcacgacaaataacctcccccgtcagcggcatcaacggcgacatcagagccaagaaaatagcctctatagcagacgtatgcgaatcaatgaaagaacaactcctagtactagtcgaatgggccaaatacattcccgccttctgcgaactgccactcgacgaccaagtggccctactccgtgcccacgccggcgaacatttactcctcggcgccaccaaacgatcaatggtattcaaagacgtactactcctcggcaacgactacatagtcccccgccactgccccgaactcgccgaaatgtcacgtgtctctatccggatcctagacgaactcgtcctccccttccaagaactccaaatcgacgacaacgaatacgcctacctaaaagccatcatattcttcgatcccgacgccaagggtctctccgacccaggaaaaatcaaacgcctacgcgcacaagtacaagtatccctcgaagactacatcaacgaccgacaatacgacagccgcggccgattcggcgaactactccttctcctccccacactacaatcaataacctggcaaatgatcgaacaaatccagttcataaaactctttggcatggccaaaatagacaacctcctccaggaaatgctcctcggaggaagcccctccgacgccccccacgcccaccacccactccacccccacctcatgcaagagcacatgggcaccaacgtcatcgtcgccaacaccatgcccacacacctatcaaacggccaaatgtgtgaatggcccagacctcgcggccaagccgccacacccgaaaccccacaaccctcccccccggggggctcaggctccgaaccctacaaactcctcccaggtgccgtcgccacaatcgtacgacccctctccgccatccctcaaccaacaataaccaaacaagaagtcatctaaggactagttataagactgactagcccgatgggcctcccaacgggccctcctcccctccttgcaccgagattaataaaaaaaaaaaaaaaaaaaaaaaaaaaaaaaaaaaaaaaaaaaaaaaaaaaaaaaaaaaaaaaatgcatcccccccccccccccccccccccccccccccaaaggctcttttcagagccaccagaatt

SEQ ID NO: 2790 - RNA, 1531 nt, synthetic construct
  misc_feature 1..1531: note = mRNA i-3 (A64-N5-C30-hSL-N5) (opt11) from Homo sapiens__NP_000448.3__HNF4A(39-474)(S142A_S143A_S167A_S313A _S378A_T429A_T432A_S436A_K458R)
  source 1..1531: mol_type = other RNA
aggagaaagcttaccatggacacatcgccaagcgaaggaaccaaccttaacgccccaaactccctgggcgtctccgccctttgcgccatctgcggagaccgcgccacaggcaaacactatggcgcctccagctgcgacggctgcaaaggcttcttccgacgctcagtacggaaaaaccacatgtactcatgccgcttctcacgccaatgcgtcgtcgacaaagacaaacgcaaccaatgccgctactgccgactcaaaaaatgcttccgcgcaggcatgaaaaaggaagccgtccaaaacgaacgcgaccgtatctcaacccgacgtgctgcatacgaagactcatccctcccctccatcaacgccctactccaggccgaagtcctgagtcgacaaatcacagcccccgtctcaggcatcaacggcgacatccgagcaaagaaaatcgcctctatagccgacgtctgcgaatcaatgaaagaacaactcctcgtcctcgtagaatgggccaaatacatccccgcattctgcgaactacccctcgacgaccaagtcgccctactaagagcccacgccggcgaacaccttctgcttggcgccacaaaacgcagcatggtattcaaagacgtactactcctcggcaacgactacatcgtaccccgacactgccccgaactcgccgaaatgtcccgcgtctccatacgcatcctagacgaactggtcctccccttccaggaactccaaatcgacgacaacgaatacgcctacctcaaagccatcatattcttcgacccagacgcaaaaggcctcagcgaccccggcaaaatcaaaagactccgcgcccaagtacaagtcagcctagaagattacataaacgaccgccaatacgatagcagaggccgattcggcgaactcctcctactcctacccacactacaatcaatcacctggcaaatgatagaacaaatccaattcatcaagctattcggcatggcaaaaattgacaacctactacaagaaatgctcctcggcggcgccccaagcgacgcaccacacgcccaccaccccctccacccgcacctcatgcaagaacacatgggcaccaacgtcatcgtcgccaacacaatgcccacacacctctccaatggacaaatgtgcgaatggccacgcccacgaggccaagcggccgcgcccgaagccccacaacctgccccgcccggaggctctggaagcgaaccctacaaactactccccggcgcagtcgccacgatagtccgcccactatccgccatcccccagcccacaataaccaaacaagaagtcatataaggactagttataagactgactagcccgatgggcctcccaacgggccctcctcccctccttgcaccgagattaataaaaaaaaaaaaaaaaaaaaaaaaaaaaaaaaaaaaaaaaaaaaaaaaaaaaaaaaaaaaaaaatgcatcccccccccccccccccccccccccccccccaaaggctcttttcagagccaccagaatt

SEQ ID NO: 2791 - RNA, 1531 nt, synthetic construct
  misc_feature 1..1531: note = mRNA i-3 (A64-N5-C30-hSL-N5) (opt11) from Homo sapiens__NP_000448.3__HNF4A(39-474)(S142A_S143A_S148A_S167A _S313A_S378A_T429A_T432A_S436A_K458R)
  source 1..1531: mol_type = other RNA
aggagaaagcttaccatggacacctccccatccgaaggcaccaacctcaacgcccccaactcactaggagtctccgccctttgcgccatctgcggcgaccgcgccacaggaaaacactacggcgcgtcaagctgcgatggatgcaaaggtttcttccgtcgttccgtccgcaaaaaccacatgtattcctgccgattctcgcgccaatgcgtcgtcgacaaagacaaacgaaaccaatgccgatactgccgcctcaaaaagtgcttccgcgccggcatgaagaaagaagccgtccaaaacgaacgcgacagaatatcaacccgacgagccgcctacgaagactcagccctcccctcaataaatgccctcctccaagcagaggtcctttccagacagatcaccgcccccgtctccggcatcaacggcgacatcagagccaagaaaatcgcctccatcgccgacgtctgcgaatccatgaaagaacaacttctagttctcgtcgaatgggccaaatacatccccgccttctgcgaactaccccttgacgaccaagtcgctctcctgcgcgcccacgccggcgaacacctccttctcggagcaactaaacgctccatggtgttcaaagacgtcctcctcctcggcaacgactacatcgtcccccgacactgccccgaactagctgaaatgtcacgcgtcagcatcagaatcctcgacgaactcgtcctccccttccaagaactccaaatcgatgacaacgagtacgcctatcttaaagccatcatattcttcgacccagacgcaaaaggtctctccgaccccggcaaaataaaacgactccgcgcccaagtccaagtttccctcgaagactacatcaacgaccgacaatacgattcccgcggccgattcggcgaactcctcctactccttcccaccctccagtccataacatggcaaatgatcgaacaaatccaattcataaaactcttcggcatggccaaaatagacaacctcctccaagagatgctactcggcggtgctccatccgacgccccacacgcacaccaccccctccacccccacctcatgcaagagcacatgggcaccaacgtcatagtagcaaacaccatgcctacccacctatccaacggacaaatgtgcgaatggccccgcccacggggccaagccgccgcccccgaagccccacaacccgccccacccggaggatccggcagcgaaccctacaaactactacccggtgccgtcgccacaatcgtccgccccctatccgccataccacagcccaccatcaccaaacaagaagtcatatagggactagttataagactgactagcccgatgggcctcccaacgggccctcctcccctccttgcaccgagattaataaaaaaaaaaaaaaaaaaaaaaaaaaaaaaaaaaaaaaaaaaaaaaaaaaaaaaaaaaaaaaaatgcatcccccccccccccccccccccccccccccccaaaggctcttttcagagccaccagaatt

SEQ ID NO: 2792 - RNA, 1531 nt, synthetic construct
  misc_feature 1..1531: note = mRNA i-3 (A64-N5-C30-hSL-N5) (opt11) from Homo sapiens__NP_000448.3__HNF4A(39-474)(K106R_K108R_K126R_K127R _S142A_S143A_S148A_S167A_S313A_S378A_T429A_T432A_S436A_K458 R)
  source 1..1531: mol_type = other RNA
aggagaaagcttaccatggacacctcaccatccgaaggcacaaacctaaacgcccccaactcacttggcgtttcggccctctgcgccatatgcggagaccgcgccaccggcaaacactacggagcatcctcctgcgacggctgtaaaggcttcttcagacgatccgtacgcaaaaaccacatgtactcctgccgcttcagcagacaatgcgtcgtcgaccgcgaccgccgcaaccaatgccgctactgccgcctaaagaaatgcttccgcgcaggcatgcgccgagaagcagtccaaaacgaacgagaccgaataagcacccgcagagccgcgtacgaagactccgccctcccatcaatcaacgcacttctacaagccgaagtactctcccgccaaataaccgccccagtatccggaatcaacggcgacatccgcgccaagaaaatcgcttccatagcagacgtctgtgaatccatgaaagagcaactcctcgtcctcgtcgagtgggccaaatacatccccgccttctgcgagctacccctcgacgaccaagtcgccctcctccgagcccacgctggcgaacacctcctactcggcgccaccaaaagatccatggttttcaaagacgtactccttctgggaaacgactacatcgtacccaggcactgccccgagctagccgaaatgtccagagtctcaatccgcatactcgacgagctcgtccttccctttcaagaacttcaaatagacgacaacgaatacgcatacctgaaagccatcatcttcttcgaccccgacgccaaaggactatccgacccaggcaaaatcaaacgcctacgagcacaagtacaagtctccctagaagactacataaacgaccgccaatacgactcgagaggccgcttcggcgaactactccttctcctccctaccctacaaagcatcacctggcaaatgatcgaacaaatccaattcataaaactcttcggaatggccaaaatcgacaatttactccaggaaatgttactcggcggcgcaccatccgacgcaccccacgcccaccaccccctacacccccacctcatgcaagaacacatgggaaccaatgtcatagtcgccaacacaatgcctacacatctctccaacggccaaatgtgcgaatggccgcgtccccgaggacaagcagccgcccccgaagcaccccagcccgccccgcccggcggatccggatcagaaccctacaaactcctcccaggcgccgtcgcaaccatcgtccgccccctctcagcaatcccccaacccaccatcaccaaacaagaagtcatctaaggactagttataagactgactagcccgatgggcctcccaacgggccctcctcccctccttgcaccgagattaataaaaaaaaaaaaaaaaaaaaaaaaaaaaaaaaaaaaaaaaaaaaaaaaaaaaaaaaaaaaaaaatgcatcccccccccccccccccccccccccccccccaaaggctcttttcagagccaccagaatt

SEQ ID NO: 2793 - RNA, 1531 nt, synthetic construct
  misc_feature 1..1531: note = mRNA i-3 (A64-N5-C30-hSL-N5) (opt11) from Homo sapiens__NP_000448.3__HNF4A(39-474)(S142A_S143A_S148A_T166A _S167A_S313A_S378A_T429A_T432A_S436A_K458R)
  source 1..1531: mol_type = other RNA
aggagaaagcttaccatggacacctccccctcagaaggaaccaacctaaatgcccccaactctctcggcgtctccgctctctgcgccatctgcggcgaccgagccaccggaaaacactacggagcctcctcctgcgacgggtgcaaaggcttcttcagaagatccgtccgcaaaaaccacatgtactcatgccggttctcccgacaatgcgtagtcgacaaagacaaacgcaaccaatgccgctactgccgcctcaaaaaatgctttcgcgccggcatgaagaaagaagcagtacaaaacgaaagagacagaatctcaactcgcagagccgcctacgaagactcggcgctcccctctatcaacgccctgcttcaagccgaagtcctctcacgccaaatcgccgcacccgtatccggaatcaacggcgatatccgcgcaaaaaaaatcgcatccatcgccgacgtctgcgaatccatgaaggaacaactgctagtcctcgtagaatgggccaaatacatccctgccttctgtgaactccccctagacgatcaagtcgccctcctacgcgcccacgccggcgagcacctactacttggagccaccaaacgttctatggtcttcaaagacgtactcttactcggcaacgactacatagtcccccgccactgcccagaactggccgaaatgagccgcgtctcaatacgaatcctagacgaactcgtgctaccattccaagaactacaaatcgacgacaacgaatacgcatacctaaaagctattatcttcttcgaccccgacgccaaaggcctatccgaccccggcaaaataaaacgcctgcgagcccaagtacaagtaagcctcgaagactacatcaacgaccgacagtacgactcccgaggccgcttcggcgaactcctacttctcctccccaccctacaatccatcacctggcaaatgatagaacaaatccaattcatcaaactcttcggaatggcaaaaatcgataacctgctccaagaaatgctcctcggcggagccccaagcgatgcaccacacgcacaccacccactacacccacacctcatgcaagaacacatgggaaccaacgtcatagtcgccaacacaatgccaacccacctatccaacggccaaatgtgcgaatggccccgcccccgcggtcaagcagcagctcccgaagcacctcaaccagccccccccggaggctccggctccgaaccttacaaactcctcccaggagccgtcgccacaatcgtaagacccctctcagccatcccccaaccaaccatcacaaaacaagaagtgatataaggactagttataagactgactagcccgatgggcctcccaacgggccctcctcccctccttgcaccgagattaataaaaaaaaaaaaaaaaaaaaaaaaaaaaaaaaaaaaaaaaaaaaaaaaaaaaaaaaaaaaaaaatgcatcccccccccccccccccccccccccccccccaaaggctcttttcagagccaccagaatt

SEQ ID NO: 2794 - RNA, 1531 nt, synthetic construct
  misc_feature 1..1531: note = mRNA i-3 (A64-N5-C30-hSL-N5) (opt11) from Homo sapiens__NP_000448.3__HNF4A(39-474)(S87A_S142A_S143A_S148A_ T166A_S167A_S313A_S378A_T429A_T432A_S436A_K458R)
  source 1..1531: mol_type = other RNA
aggagaaagcttaccatggacacctcaccatcagaaggtacaaacctcaacgcccctaactcactcggcgtatctgcactatgcgcaatatgcggagaccgtgccactggcaaacactacggagcctcatcatgtgacggctgcaaaggcttcttccgacgtgcagtccgcaaaaaccatatgtactcctgccgattctcccgacaatgcgtcgtagacaaagacaaacgaaaccaatgccggtactgccgcctaaagaaatgcttccgcgccgggatgaagaaagaagccgtacaaaacgaacgagatcgcatctccacacgccgagccgcctacgaagactccgccctcccctccatcaacgccctactccaggccgaagtactgtcgcgccaaatcgccgcgccagtttccggaataaacggcgacatccgcgccaagaaaatcgcctcaatcgcagacgtatgcgaatccatgaaagaacaactcctcgtcctcgtagaatgggccaaatacatccccgcattctgcgaactacccctagatgaccaagtagcactattacgcgctcacgccggagaacacctcctcctcggagccactaaacgctccatggtcttcaaagacgtcctcctcctcggcaacgactacatcgtaccccgccactgccccgaactcgcagaaatgtcaagggtctccataagaatcctagacgagctagtcctaccgttccaagaactccaaatcgacgacaatgaatacgcatacctcaaagccataatcttcttcgacccagacgccaaaggcctctcagaccccggcaaaatcaaacgactacgcgcccaggtccaagtctccctagaagactacatcaacgacagacaatacgacagccgagggagattcggcgaactcctcctactcctccccaccctccaatcaataacatggcaaatgatcgaacaaatccagttcatcaaactcttcggcatggccaaaatcgacaacctactccaagaaatgctcctcggaggcgccccaagcgacgcaccccacgcacaccaccccctccacccacacctcatgcaagaacacatgggaaccaacgtcatagtagcaaacacaatgcccacccacctctcaaacggccaaatgtgcgaatggccccgcccacgaggccaagcagcggcccccgaagctccccaacccgcccctcccggagggtccggcagcgaaccctacaaactcctcccaggcgcagtagccaccatcgtacgcccgctttccgcaatacctcagcccacaatcacaaaacaagaagtaatataaggactagttataagactgactagcccgatgggcctcccaacgggccctcctcccctccttgcaccgagattaataaaaaaaaaaaaaaaaaaaaaaaaaaaaaaaaaaaaaaaaaaaaaaaaaaaaaaaaaaaaaaaatgcatcccccccccccccccccccccccccccccccaaaggctcttttcagagccaccagaatt

SEQ ID NO: 2795 - RNA, 1531 nt, synthetic construct
  misc_feature 1..1531: note = mRNA i-3 (A64-N5-C30-hSL-N5) (opt11) from Homo sapiens__NP_000448.3__HNF4A(39-474)(S87A_K106R_K108R_K126R_ K127R_S142A_S143A_S148A_T166A_S167A_S313A_S378A_T429A_T432A _S436A_K458R)
  source 1..1531: mol_type = other RNA
aggagaaagcttaccatggacacctccccatccgaaggtaccaacttaaacgcccccaactccttaggcgtctccgccctctgcgcaatctgcggcgaccgagctacaggtaaacactacggcgcatcaagctgtgacggctgcaaaggcttcttccgacgagccgtccgcaaaaaccacatgtactcatgcagattctcccgacaatgcgtcgtggacagagaccgacgaaaccaatgccgctactgccgcctcaaaaaatgcttccgcgccggcatgcgacgtgaagcagtccaaaacgaacgtgatcgcataagcactagacgcgccgcctacgaagactccgccctgccctccatcaacgccctactacaagccgaagtccttagcagacaaatagccgccccagtctccggaataaacggagacatacgtgccaaaaaaatagcatccatcgccgacgtatgcgaaagcatgaaagaacaactccttgtcctagtagaatgggctaaatacatccccgcattctgcgaactccccctagacgaccaagtagccctcctccgagcacacgccggcgaacacctcctactcggcgccacaaaaagaagcatggtcttcaaagacgtcctacttctaggaaacgactacatcgtccctcgccactgccccgaactcgccgagatgagtagagtctctatcagaatcctcgacgaactcgtactcccattccaagaactacaaatagacgacaacgaatacgcctacctcaaagcgatcatcttcttcgaccccgacgccaaaggcctatcagaccccggcaaaatcaaaagactccgcgcccaagtacaagtctccctagaagactacatcaacgaccgccagtacgacagccgaggccgattcggcgaactacttctactcctcccaacactacaatcaatcacctggcagatgatcgaacaaatccaattcatcaaactattcggcatggccaaaatagacaaccttctacaagaaatgctcctaggcggcgcccccagcgacgcaccacacgcacaccacccccttcacccccacctaatgcaagagcacatgggcaccaacgtcattgtagccaacacaatgcccacccacctctcgaacggtcaaatgtgcgaatggccccgcccacgcggccaagcagccgcacccgaagcaccccaaccagccccacccggaggatccggttcggaaccctacaaactcctacccggcgccgtggccacaatagtaagacccctctcagcaatcccccaacccaccatcaccaaacaagaagtcatctaaggactagttataagactgactagcccgatgggcctcccaacgggccctcctcccctccttgcaccgagattaataaaaaaaaaaaaaaaaaaaaaaaaaaaaaaaaaaaaaaaaaaaaaaaaaaaaaaaaaaaaaaaatgcatcccccccccccccccccccccccccccccccaaaggctcttttcagagccaccagaatt

SEQ ID NO: 2796 - RNA, 1531 nt, synthetic construct
  misc_feature 1..1531: note = mRNA i-3 (A64-N5-C30-hSL-N5) (opt11) from Homo sapiens__NP_000448.3__HNF4A(39-474)(S87A_K106R_K108R_K126R_ K127R)
  source 1..1531: mol_type = other RNA
aggagaaagcttaccatggacaccagcccatctgaaggtaccaacctcaacgcaccaaactccctcggcgtttcagctctatgcgccatatgcggagaccgcgccaccggcaaacactacggagcctcctcttgcgacggctgcaaaggcttcttccgcagagccgtacgcaaaaaccacatgtacagctgtagattttcccgccaatgcgtcgtcgaccgcgaccgccgcaaccagtgcagatattgccgactcaagaaatgcttccgcgcaggaatgcgccgcgaagccgtacaaaacgaacgcgaccgcatctccacacgccgctcatcttacgaagactcctccctaccaagcatcaacgcactacttcaagcagaagtcctatcccgacaaatcacctcccccgtctcaggcataaacggcgacataagggcaaagaaaatcgcctccatagccgacgtatgcgaatcaatgaaagaacaactcctagtcctcgtcgaatgggccaaatacatccccgccttctgcgaactgcccctcgacgaccaagtagcacttctccgcgcccacgccggcgaacacctcctactcggcgccaccaaacgttccatggtcttcaaagacgtcctcctacttggtaacgactacatcgtaccccgccactgccctgaactcgcagaaatgtcccgcgtctcaataagaatcctcgacgagctagttctccccttccaagaactacaaatcgacgacaacgaatacgcctacctcaaagccatcatatttttcgaccccgacgccaaaggcctttccgaccccggcaaaataaaacgcctccgctctcaagtccaggtcagcctcgaagactacatcaacgaccgccaatacgactctcgtggccgcttcggagaactactactactcctccccacactacaatccatcacctggcaaatgatcgaacaaatccaattcatcaaactcttcggcatggccaaaattgacaacctactccaagaaatgctcctaggcggctccccatccgacgcaccccacgcccaccaccccctccacccccacctcatgcaagaacacatgggaaccaacgtaatcgtcgcaaacacaatgccaacccacctatccaacggtcaaatgtgcgaatggccacgaccccgcggccaagcagctacccccgaaaccccacaaccctcaccaccaggaggcagcggttccgaaccatacaaactcctacccggggccgtcgccaccatcgtaaaacccctctccgccatcccccaacctacaatcaccaaacaagaagtcatctaaggactagttataagactgactagcccgatgggcctcccaacgggccctcctcccctccttgcaccgagattaataaaaaaaaaaaaaaaaaaaaaaaaaaaaaaaaaaaaaaaaaaaaaaaaaaaaaaaaaaaaaaaatgcatcccccccccccccccccccccccccccccccaaaggctcttttcagagccaccagaatt

SEQ ID NO: 2797 - RNA, 1531 nt, synthetic construct
  misc_feature 1..1531: note = mRNA i-3 (A64-N5-C30-hSL-N5) (opt11) from Homo sapiens__NP_000448.3__HNF4A(39-474)(S87A_K106R_K108R_K126R_ K127R_S142A_S143A_S148A_T166A_S167A_S313A_S378A_T429A_T432A _S436A_K458R_S461A)
  source 1..1531: mol_type = other RNA
aggagaaagcttaccatggacacctctcccagcgaaggcacaaacctcaacgcccccaactcactcggggtctccgccctctgcgccatatgcggtgaccgtgcaaccggcaaacactacggcgcctcatcctgcgacggctgcaaaggattcttccgacgcgccgtacgcaaaaaccacatgtactcctgcagattctcacgccaatgcgtcgtggaccgagaccgccgcaaccaatgccgttactgccgcctcaagaaatgcttccgagccggaatgcgaagagaagccgtacaaaacgaacgcgaccgcatctccacacgacgagcagcctacgaagactccgccctaccctccataaacgcactcctccaagccgaagtactctcccgacaaatagccgcaccagtctccggcataaacggagacatccgagcaaagaaaatagcctcaatcgccgacgtatgcgaatcaatgaaagaacaacttctcgtcctcgtcgaatgggccaaatatatacccgccttctgcgaactccccctagacgaccaagtggcccttcttcgcgcccacgccggcgaacacctcctactcggagccaccaaacgctccatggtcttcaaagacgtactactcctcggtaacgactacatcgtcccacgacactgccccgaactagccgaaatgtcacgcgtctccatccgcatcctagacgaactcgtactcccattccaagaactccaaatcgacgacaacgaatacgcatacctcaaagccatcatcttcttcgacccagacgccaaaggcctatccgacccaggaaaaataaaacgcttacgcgcacaagtccaagtctccctcgaagactacatcaacgaccgtcagtacgacagccgggggagattcggcgaactgctactactacttcccaccctccaatccatcacctggcaaatgatagaacaaatacaattcatcaaactattcggcatggccaaaatcgacaacctcctacaagaaatgctactcggcggcgccccctccgacgcaccccacgcccaccaccccctccacccccatctaatgcaagaacacatgggcacaaacgtcatcgttgccaacacaatgcccacccacctttccaacggccaaatgtgcgaatggccacgcccccgtggccaagccgccgcccccgaagccccacaaccggccccaccaggtggatccggctcggaaccctacaaactactcccaggagcggtcgctaccatcgtacgccctttggccgccatcccccaacccacaatcaccaaacaagaagttatctagggactagttataagactgactagcccgatgggcctcccaacgggccctcctcccctccttgcaccgagattaataaaaaaaaaaaaaaaaaaaaaaaaaaaaaaaaaaaaaaaaaaaaaaaaaaaaaaaaaaaaaaaatgcatcccccccccccccccccccccccccccccccaaaggctcttttcagagccaccagaatt

SEQ ID NO: 2798 - RNA, 1531 nt, synthetic construct
  misc_feature 1..1531: note = mRNA i-3 (A64-N5-C30-hSL-N5) (opt11) from Homo sapiens__NP_000448.3__HNF4A(39-474)(S87A_K106R_K108R_K126R_ K127R_S142A_S143A_S148A_T166A_S167A_S313A_S378A_T429A_T432A _S436A_K458R_S461E)
  source 1..1531: mol_type = other RNA
aggagaaagcttaccatggacacctcaccatccgaaggcacaaacctcaacgccccgaactccctaggagtctcagccctctgcgccatatgcggcgaccgagccacaggcaaacactacggcgcctcatcgtgcgacggatgcaaaggattcttccgacgagctgtccgcaaaaaccacatgtactcctgccgcttctcccgccaatgcgtcgttgaccgcgaccggcgcaaccaatgcagatactgccgactcaagaaatgcttccgcgcaggcatgcgacgagaagccgtccaaaacgaacgcgaccgcatctcaaccagacgcgccgcctacgaagactctgcactccccagcatcaacgccctcctgcaagccgaagtattatcccgacagatcgccgcccccgtatccggcatcaacggcgacatccgcgccaagaaaatcgcctccatcgcagatgtctgcgaaagcatgaaagaacaattactcgtactcgtcgaatgggcaaaatacatccccgcattctgcgaactccccctcgacgaccaagtcgccctattacgcgcccacgcaggagaacaccttctcttaggcgcaacgaaacgcagcatggtcttcaaagacgtcctactcctcggcaacgactacatcgtcccccgtcactgccccgaactcgccgaaatgtcccgcgtatccatccgcatcctcgacgaactcgtcctaccattccaagaactccaaatcgacgacaacgaatacgcctacctcaaagcaatcatcttcttcgaccccgacgcaaaaggactatccgaccccggcaaaatcaaacgcctccgcgcacaagtccaagtctccctcgaagactacataaacgacagacaatacgacagccgaggcagattcggagaacttctcctcctcctccccacactacaatccatcacatggcaaatgatcgaacaaatacaattcatcaaactcttcggcatggcaaaaatcgacaacctgctccaagaaatgctacttggcggagcccccagcgacgccccacacgcacaccaccccctccacccccacctcatgcaagagcacatgggcaccaacgtcatcgtagccaacacaatgcccacacacctctccaacggccaaatgtgcgaatggccccgtccccgcggccaagccgcagcccccgaagcaccacaacccgcacctccaggcggcagcggctctgaaccctacaaactcctccccggcgcagtcgccacaatcgtccgccccctagaggccataccccaacccacaattaccaaacaagaggtaatctaaggactagttataagactgactagcccgatgggcctcccaacgggccctcctcccctccttgcaccgagattaataaaaaaaaaaaaaaaaaaaaaaaaaaaaaaaaaaaaaaaaaaaaaaaaaaaaaaaaaaaaaaaatgcatcccccccccccccccccccccccccccccccaaaggctcttttcagagccaccagaatt

SEQ ID NO: 2799 - RNA, 1531 nt, synthetic construct
  misc_feature 1..1531: note = mRNA i-3 (A64-N5-C30-hSL-N5) (opt11) from Homo sapiens__NP_000448.3__HNF4A(39-474)(S87A_K106R_K108R_K126R_ K127R_S142A_S143A_S148E_T166A_S167E_S313A_S378E_T429E_T432E _S436E_K458R_S461E)
  source 1..1531: mol_type = other RNA
aggagaaagcttaccatggacacaagccccagcgaagggaccaacctcaacgcgccaaacagcctaggcgtctcagccctatgtgccatctgcggagacagagccaccggcaaacactacggagcctcatcctgcgacggatgcaaaggcttcttccgacgcgccgtccgcaaaaaccacatgtactcctgccgtttctcccgacaatgcgtcgtagaccgcgaccgccgcaaccaatgccgctattgccgcctaaagaaatgcttccgcgccggcatgcgacgcgaagccgtccagaacgagcgcgaccgaatctccacacgtcgcgctgcctacgaagactctgaactcccctcgataaacgcactgctccaagccgaagttctatcacgccaaatagccgaacccgtcagcggcatcaacggcgacatccgcgccaagaaaatcgcatcaatcgcagatgtatgcgaatccatgaaagaacagctcctcgtcctcgtagaatgggctaaatacatccccgccttctgtgagctccccctcgacgaccaggtagccctgctaagagcccatgccggcgaacacctcctccttggcgccactaaacgatcaatggtattcaaagacgtcctcctactaggaaacgactacatagtccccagacactgccccgaacttgcagaaatgagccgagtctccatccgcatcttagacgaactcgtcctcccattccaagaactccagatcgacgacaacgaatacgcataccttaaagcaataatcttcttcgaccccgacgccaaaggactatcagaccccgggaaaattaaaagactccgagcacaagtccaagtctcactcgaagactacatcaacgatcgccaatacgactcacgcggacgatttggcgaactcctcctgttactccccaccctacaaagcatcacctggcaaatgatcgaacaaatccagttcataaaactcttcggaatggccaaaatcgacaacctgctccaagaaatgctcctcggcggcgaaccctccgacgcaccccacgcccaccaccccctccacccacacctaatgcaagaacacatgggaaccaacgtcatagtcgccaacaccatgccaacacacctctcgaacggccaaatgtgcgaatggccccgaccacgcggccaagccgctgaacccgaagaaccccaacccgaacccccaggaggctccggctccgaaccctacaaactcctccctggcgccgtcgcaaccatagtacgccccctagaagctatcccacaacccacaataaccaaacaagaagtcatctgaggactagttataagactgactagcccgatgggcctcccaacgggccctcctcccctccttgcaccgagattaataaaaaaaaaaaaaaaaaaaaaaaaaaaaaaaaaaaaaaaaaaaaaaaaaaaaaaaaaaaaaaaatgcatcccccccccccccccccccccccccccccccaaaggctcttttcagagccaccagaatt

SEQ ID NO: 2800 - RNA, 1531 nt, synthetic construct
  misc_feature 1..1531: note = mRNA i-3 (A64-N5-C30-hSL-N5) (opt11) from Homo sapiens__NP_000448.3__HNF4A(39-474)(S87A_K106R_K108R_K126R_ K127R_S142A_S143A_S148A_T166A_S167A_K179R_K180R_S313A_S378A _T429A_T432A_S436A_K458R_S461E)
  source 1..1531: mol_type = other RNA
aggagaaagcttaccatggacacatccccctcagaaggaaccaacctcaacgcacccaactccctcggagtttccgccctatgcgcaatctgcggcgatcgagccaccggcaaacactacggcgcctcgtcttgcgacggctgcaaaggcttcttccgccgcgccgtcagaaaaaaccacatgtactcatgccggttctccagacaatgcgtcgtcgaccgagaccgccgaaaccaatgcaggtactgccgcctgaaaaaatgcttccgcgcaggcatgcgccgcgaagccgtccaaaacgagcgagaccgaatctcaacgcgacgcgccgcctacgaagactcagccctcccatccatcaacgcactactacaagccgaagtactatcccgacaaatagccgcaccagtctcaggaatcaacggagacatacgcgccagacgaatagcctccattgccgacgtatgcgaaagcatgaaagaacaactactcgttctcgtcgagtgggccaaatacattcccgctttctgcgaattacccctagacgaccaagtcgccctcctcagagcccacgcaggcgaacacctcctactcggagccaccaaacgatccatggtcttcaaagacgtcttactcctcggcaacgactacatcgtccccagacactgtcccgaactcgccgaaatgtcccgcgtctccatccgaatcctcgacgaactcgtactccccttccaggaactccaaatcgacgacaacgaatacgcctacctaaaagccatcatttttttcgaccctgatgccaaaggcctctctgaccccggcaaaatcaaacgactacgcgcccaagtccaagtctcactcgaagactacatcaacgatcgccagtacgactcccgaggccgcttcggtgaactcctcctcctcctgcccaccctacaatcaataacttggcaaatgatcgaacaaatacaattcatcaaactcttcggcatggccaaaattgacaacctcctacaagaaatgcttctcggcggagcacccagcgatgccccacacgcccaccaccccctccacccacacctcatgcaagaacacatgggcaccaacgtaatcgtcgccaacacaatgcccacacacctctccaacggacaaatgtgcgaatggccccgcccccgaggccaagcagccgccccagaagcaccccaacccgccccacccggaggctcaggctctgaaccctacaaactcctcccaggagcagtcgcaaccatcgtccggcccctcgaagcaatcccccaacccacaatcacaaaacaagaggtaatctagggactagttataagactgactagcccgatgggcctcccaacgggccctcctcccctccttgcaccgagattaataaaaaaaaaaaaaaaaaaaaaaaaaaaaaaaaaaaaaaaaaaaaaaaaaaaaaaaaaaaaaaaatgcatcccccccccccccccccccccccccccccccaaaggctcttttcagagccaccagaatt

SEQ ID NO: 2801 - RNA, 1531 nt, synthetic construct
  misc_feature 1..1531: note = mRNA i-3 (A64-N5-C30-hSL-N5) (opt11) from Homo sapiens__NP_000448.3__HNF4A(39-474)(S87A_K106R_K108R_K126R_ K127R_S142A_S143A_S148A_T166A_S167A_K300R_K307R_K309R_S313A _S378A_T429A_T432A_S436A_K458R_S461E)
  source 1..1531: mol_type = other RNA
aggagaaagcttaccatggacacatccccatcagaagggaccaacctaaacgcccccaactccctcggcgtctccgcactctgcgcaatctgcggcgacagagccaccggaaaacactacggcgcctcctcatgcgacggatgcaaaggattcttccgaagagccgtccgaaaaaaccacatgtactcatgccgattctcgcgccaatgcgtcgtcgatcgcgacagacgcaaccaatgccgatactgcagacttaaaaaatgcttccgtgctggcatgcgacgcgaagctgtccaaaatgagcgcgaccgcatatctacccgaagagccgcctacgaagactcagcactaccctcaatcaacgccctactccaggccgaagtcctatcccgacaaatcgcagcccccgtgtccggcataaacggtgacatccgcgccaaaaaaatcgcctcaatagccgacgtctgtgaaagcatgaaagaacaactactagttctcgtcgaatgggcaaaatacatacccgcattctgcgaactcccactagacgaccaagtggccctcctccgagcccatgcaggagaacacctcctcctcggggccacaaaacgctccatggtgttcaaagacgtactactcctaggaaacgactacatcgtaccccgccactgccccgaactagctgaaatgtcacgcgtctcgatccgcatcctcgacgaactcgtcctaccattccaagaactgcaaatcgacgacaacgagtacgcgtacctaaaagcaataatattcttcgaccccgacgcccgcggcctctccgaccccggaagaatcaggcgactccgcgcccaagtccaagtaagcctcgaagactacatcaacgaccgccaatacgactcacgaggcagattcggcgaactactcctcctcctcccaacacttcaatcaatcacctggcaaatgatcgaacaaatccaattcatcaagctattcggcatggccaaaatcgacaacctcctacaagaaatgctactgggaggcgccccctccgacgccccccacgcccaccaccccctacatccacacctcatgcaggaacatatgggaaccaacgtcatcgtcgcaaacaccatgcccacccacctttccaacggccaaatgtgcgaatggccccgcccccgcggccaagcagccgcccccgaagccccccaacccgcaccacccggcggcagtggctcggaaccctacaaactcctccccggcgccgtagccaccatcgtccgaccactagaagcaataccacaacccaccataaccaaacaagaagtaatctaaggactagttataagactgactagcccgatgggcctcccaacgggccctcctcccctccttgcaccgagattaataaaaaaaaaaaaaaaaaaaaaaaaaaaaaaaaaaaaaaaaaaaaaaaaaaaaaaaaaaaaaaaatgcatcccccccccccccccccccccccccccccccaaaggctcttttcagagccaccagaatt

SEQ ID NO: 2802 - RNA, 1531 nt, synthetic construct
  misc_feature 1..1531: note = mRNA i-3 (A64-N5-C30-hSL-N5) (opt11) from Homo sapiens__NP_000448.3__HNF4A(39-474)(S87A_K106R_K108R_K126R_ K127R_S142A_S143A_S148A_T166A_S167A_S313A_S378A_T429A_T432A _S436A_K447R_K458R_S461E_K470R)
  source 1..1531: mol_type = other RNA
aggagaaagcttaccatggacacatccccctccgaaggaacaaacctaaacgcccccaactccctcggtgtgtccgccttatgcgccatctgcggagaccgcgccacaggcaaacactacggcgcatcaagctgcgacggctgtaaaggattcttccgccgcgccgtgcgcaaaaaccacatgtactcatgccgcttctcccgccagtgcgtcgtcgaccgcgaccgccgcaaccaatgccgatactgccgcctcaagaaatgcttccgagccggcatgcgacgagaagcagtccaaaacgaacgcgatcgcatctccacaagacgcgcagcatatgaagactcggccctcccatcaatcaacgccctcctacaagccgaagtactatcccgccaaatcgccgcccccgtctccggcatcaacggcgacatacgcgctaagaaaatcgcctcaatagcagacgtctgcgaatcaatgaaagaacaactgctcgtactcgtggaatgggccaaatacatcccagcgttctgcgaactccccctcgacgaccaagtagcattactacgcgcccacgccggcgaacaccttctactaggagcaaccaaacgatccatggtcttcaaagacgtcctgctcctaggaaatgactacatcgtcccccgccattgccctgaactagcagaaatgtcgcgcgtctcaatccgaatcctcgacgaactcgttctaccattccaagaactacaaatcgacgacaacgaatacgcctaccttaaagcaataatcttcttcgacccagatgcaaaaggcctctccgaccccggcaaaatcaaacgcctacgagcacaagtccaagtctctctcgaagactacatcaacgaccgccaatacgactcacgtggccgcttcggcgaactcctcctcctcctacccacccttcaatcaatcacatggcaaatgatcgaacaaatacaattcataaaactattcggcatggccaaaatcgacaacctcctccaagaaatgctactcggcggtgccccgtccgacgcaccccacgcccaccaccccctccatccacacctcatgcaggaacacatgggaaccaacgtcatcgtcgccaacaccatgcccactcacctcagcaacggacaaatgtgcgaatggccaagaccgcgaggacaagccgccgcccccgaagccccacaacctgcacccccaggaggctccggatcagaaccttaccgcctcctccccggcgccgtcgccacaatcgtacgcccactcgaagccatcccccaaccaaccatcacccgccaagaagtcatctaaggactagttataagactgactagcccgatgggcctcccaacgggccctcctcccctccttgcaccgagattaataaaaaaaaaaaaaaaaaaaaaaaaaaaaaaaaaaaaaaaaaaaaaaaaaaaaaaaaaaaaaaaatgcatcccccccccccccccccccccccccccccccaaaggctcttttcagagccaccagaatt

SEQ ID NO: 2803 - RNA, 1531 nt, synthetic construct
  misc_feature 1..1531: note = mRNA i-3 (A64-N5-C30-hSL-N5) (opt11) from Homo sapiens__NP_000448.3__HNF4A(39-474)(S87A_K106R_K108R_K126R_ K127R_S142A_S143A_S148A_T166A_S167A_K179R_K180R_K234R_K300R _K307R_K309R_S313A_S378A_T429A_T432A_S436A_K447R_K458R_S461 E_K470R)
  source 1..1531: mol_type = other RNA
aggagaaagcttaccatggacacctccccctcggaaggcaccaacctcaacgcccctaactcactcggcgtttccgctctctgcgccatctgcggagaccgagcgacaggaaaacactacggagcctcctcatgcgatggctgcaaaggcttcttccgccgcgcagtacgcaaaaaccacatgtactcatgcagattctcaagacaatgcgtcgtcgaccgcgaccgacgcaaccaatgccgatactgccgcctcaagaaatgcttccgcgccggcatgcgccgagaagcagtccaaaacgaacgcgacagaataagtactcgccgagccgcatacgaagacagcgccctaccatccatcaacgcactcctccaagccgaagtcctatcacgacaaatcgcagctcccgtttccggcatcaacggcgatatccgcgcaagacgaatagcaagcattgcagacgtctgcgaatcaatgaaagaacaactcctcgtcctcgtcgaatgggccaaatacatccccgcattctgcgaactccccctcgacgaccaagtcgccctactaagagcccacgccggcgaacacctcctcctaggcgctacccgacgctccatggtattcaaagacgtcctactcctaggtaacgactacatcgtaccccgccactgccccgaactcgcagaaatgagcagagtttcaatccgcatcctagacgagctagttctccccttccaagaacttcaaatcgacgataacgaatacgcctacctaaaagccatcatcttcttcgacccagacgcccgaggcctctccgacccaggacgaataagaagactacgcgcccaagtacaagtttccctcgaagattacatcaacgacagacagtacgactccagaggccgattcggtgaactcctcctgctactccccaccctccaaagcataacatggcaaatgatcgaacaaatccaattcatcaaactcttcggcatggccaaaatcgacaacctcctacaagaaatgctactgggcggtgcaccctccgacgccccacacgctcaccaccccctccacccccatcttatgcaagaacacatgggaaccaatgtcatcgtcgcaaacacaatgcccacccacctaagcaacggccaaatgtgcgaatggcccagaccacgcggccaagcagccgcccccgaagccccacaaccagcccctcccggaggatcaggatctgaaccctaccgactactccccggagccgtcgccaccatcgtccgccccctcgaagcaataccacaaccgaccataacgcgccaagaagtcatctaaggactagttataagactgactagcccgatgggcctcccaacgggccctcctcccctccttgcaccgagattaataaaaaaaaaaaaaaaaaaaaaaaaaaaaaaaaaaaaaaaaaaaaaaaaaaaaaaaaaaaaaaaatgcatcccccccccccccccccccccccccccccccaaaggctcttttcagagccaccagaatt

SEQ ID NO: 2804 - RNA, 1531 nt, synthetic construct
  misc_feature 1..1531: note = mRNA i-3 (A64-N5-C30-hSL-N5) (opt11) from Homo sapiens__NP_000448.3__HNF4A(39-474)(S87A_S95A_S99A_K106R_K1 08R_K126R_K127R_S142A_S143A_S148A_T166A_S167A_S313A_S378A_T 429A_T432A_S436A_K458R_S461E)
  source 1..1531: mol_type = other RNA
aggagaaagcttaccatggatacctccccatccgaaggaaccaacctcaacgccccaaactcactaggcgtctccgccctctgcgccatctgcggcgaccgcgccaccggcaaacactacggcgcctcttcctgtgacggatgcaaaggctttttccggcgcgcagtccgcaaaaaccacatgtacgcctgccgtttcgcccgacagtgcgtagtcgaccgcgaccgtcgaaaccaatgcagatactgccgactaaagaaatgcttccgcgccggcatgcgcagagaagcagtacaaaacgaacgagaccgcatctcaacccgccgtgcggcatatgaagactcggccctaccatccatcaacgccctgctccaagccgaagtattatcccgccaaatcgcagcccccgttagtggaatcaacggcgacatccgagccaagaaaatcgcctccatagccgacgtctgcgagagcatgaaagaacaactcctcgtactcgtagaatgggcaaaatacatacccgccttctgcgaactccccctagacgaccaagtagccctactccgagcccacgccggtgaacatctactcctcggagccaccaaaagatccatggtattcaaagacgtcctcctcctaggcaacgactacatcgtcccccgccactgccccgaactcgccgaaatgtcccgcgtctcaatccgcatactggacgagctcgtactccccttccaagaactacaaatcgacgacaacgaatacgcttacctaaaagcaatcatcttcttcgacccagacgcgaaaggcctatcagatcccggcaaaatcaaacgcctacgcgcacaagtacaagtatcccttgaagactacataaacgaccgacaatacgacagccggggccgtttcggagaacttctcctcctcctacccacactccaatccattacctggcaaatgatagaacaaatccaattcatcaaactcttcggaatggccaagatcgacaacctcctccaagaaatgctactcggaggcgcccccagtgacgctccccacgcccatcaccccctccacccccacctaatgcaagaacacatgggcaccaacgtcatagtcgccaacaccatgccaacccacctctcaaacggccaaatgtgcgaatggcctcgccccagaggccaagcggccgcccccgaagccccacaacccgccccacccggcggctccggatcagaaccatacaaactcctacccggcgccgtagccactatcgtacgaccactcgaagccatcccacaacccacaatcaccaaacaagaagtcatctaaggactagttataagactgactagcccgatgggcctcccaacgggccctcctcccctccttgcaccgagattaataaaaaaaaaaaaaaaaaaaaaaaaaaaaaaaaaaaaaaaaaaaaaaaaaaaaaaaaaaaaaaaatgcatcccccccccccccccccccccccccccccccaaaggctcttttcagagccaccagaatt

SEQ ID NO: 2805 - RNA, 1531 nt, synthetic construct
  misc_feature 1..1531: note = mRNA i-3 (A64-N5-C30-hSL-N5) (opt11) from Homo sapiens__NP_000448.3__HNF4A(39-474)(S87A_K106R_K108R_K126R_ K127R_S138A_T139A_S142A_S143A_S148A_T166A_S167A_S313A_S378A _T429A_T432A_S436A_K458R_S461E)
  source 1..1531: mol_type = other RNA
aggagaaagcttaccatggacacctctccttccgaaggcaccaacctcaacgccccaaactccctcggcgtctccgccttgtgcgccatctgcggcgaccgagccacaggaaaacactacggagcctcctcctgcgatggctgcaaaggcttcttccgccgcgcagtaagaaaaaaccacatgtactcatgccgcttctcccgccagtgcgtcgtagaccgcgaccgccgcaaccaatgccgctactgccgcctcaaaaaatgcttccgagccggaatgcgaagagaagccgtccaaaacgaacgcgaccgcatcgccgcccgacgggccgcatacgaggatagcgccctcccaagcatcaatgctcttctccaagccgaggtcctttcccgtcaaatcgcagcccccgtatccggaatcaacggagacatacgcgccaaaaaaatcgcaagcatcgccgacgtctgcgaaagcatgaaagaacaactcctcgtactcgtcgaatgggccaaatacataccagccttctgcgaactacccctcgacgatcaagtagccctcctacgagcccacgccggagaacacctcctacttggcgccacaaaacgaagcatggttttcaaggacgtcctcctcctcggcaacgactacatagtaccccgccactgccccgaactagcagaaatgtcccgggtatcgatccgcatactagacgaactagtcctcccctttcaagaactccaaatcgatgacaacgaatacgcttacctgaaagcaataatcttcttcgaccctgacgccaaaggcctctccgacccaggaaaaataaaacgcctccgcgcccaagtacaagtctccctagaagactacataaacgaccgacaatacgactcccgaggacgattcggcgaactactattattactacctacactacaatccatcacctggcaaatgatcgaacaaatccaattcatcaaactattcggcatggccaaaatcgacaacctactccaagaaatgctcctaggcggcgcccccagcgacgccccacacgcccaccaccccctccacccccacctaatgcaagaacacatgggcacaaacgtcatagtagccaacaccatgcccacccacctcagcaacggccaaatgtgcgagtggccccgaccacgcggccaagccgcagcccctgaagccccccaacctgccccccccggcggctccggctccgaaccatacaaactactccccggggccgtcgccacaatcgtcagacccctcgaagcaatcccccaacctacaatcaccaaacaagaagtaatttaaggactagttataagactgactagcccgatgggcctcccaacgggccctcctcccctccttgcaccgagattaataaaaaaaaaaaaaaaaaaaaaaaaaaaaaaaaaaaaaaaaaaaaaaaaaaaaaaaaaaaaaaaatgcatcccccccccccccccccccccccccccccccaaaggctcttttcagagccaccagaatt

SEQ ID NO: 2806 - RNA, 1531 nt, synthetic construct
  misc_feature 1..1531: note = mRNA i-3 (A64-N5-C30-hSL-N5) (opt11) from Homo sapiens__NP_000448.3__HNF4A(39-474)(S87A_S95A_S99A_K106R_K1 08R_K126R_K127R_S138A_T139A_S142A_S143A_S148A_T166A_S167A_S 313A_S378A_T429A_T432A_S436A_K458R_S461E)
  source 1..1531: mol_type = other RNA
aggagaaagcttaccatggacacctcccccagcgaaggcaccaacctaaacgcccctaactcactcggagtgtccgcactatgcgcaatctgcggggaccgcgccaccggcaaacactacggcgcctccagctgcgacggctgcaaaggcttcttccgccgagccgtccgcaagaaccacatgtacgcctgccgcttcgctcgccaatgcgtcgtagaccgagaccgcagaaaccaatgcagatactgcagactcaagaaatgcttccgcgccggcatgcgacgcgaagccgtacaaaacgaacgcgaccgcatcgccgctcgtcgagcagcctatgaagactcagcccttccctcaataaacgcactactccaagccgaagtcctcagccgacaaatcgccgccccagtctcaggcatcaacggcgacatccgcgccaagaaaatagcctccatcgcggacgtctgcgagtccatgaaagaacaactcctagttctggtcgaatgggctaaatacatccccgcattctgcgaactcccactcgacgaccaagtagccctactccgagcccacgcaggagaacacctactcctaggagccacaaaacgttccatggtatttaaagacgtcctcctactaggcaacgactacatcgtcccccgccactgccccgaactcgccgaaatgtcccgcgtctccatccgcatcctagacgagctcgtactcccattccaagaactccaaatagacgacaacgaatacgcctacctaaaagccatcatcttcttcgatccagacgcaaaaggcctctcagacccaggcaaaatcaaaagacttagagcccaagtccaagtatcactcgaagactacatcaacgaccgacaatacgactcccgcggaaggttcggcgaactcctcctcctcctccccacactacaatccatcacctggcaaatgatagaacaaattcaattcataaaactattcggcatggccaagatagacaacctcctccaagaaatgctcctcggcggagccccctccgacgcaccccacgcccaccaccccctacacccccacctgatgcaagaacacatgggaacaaacgtaatcgtagccaacaccatgccgacacatctctctaacggccaaatgtgcgaatggccacgcccacgcggccaagccgcagcccccgaagcaccacaaccagccccacccggaggctccggatccgaaccctacaagttgctccccggcgccgtagccacaatcgtccgccccctagaggccataccacaacccacaatcacaaaacaagaagtcatataaggactagttataagactgactagcccgatgggcctcccaacgggccctcctcccctccttgcaccgagattaataaaaaaaaaaaaaaaaaaaaaaaaaaaaaaaaaaaaaaaaaaaaaaaaaaaaaaaaaaaaaaaatgcatcccccccccccccccccccccccccccccccaaaggctcttttcagagccaccagaatt

SEQ ID NO: 2807 - RNA, 1531 nt, synthetic construct
  misc_feature 1..1531: note = mRNA i-3 (A64-N5-C30-hSL-N5) (opt28) from Homo sapiens__NP_000448.3__HNF4A(39-474)
  source 1..1531: mol_type = other RNA
aggagaaagcttaccatggacacatctcccagtgagggcactaacctgaatgcccctaactcactgggggtgagcgctctgtgcgcaatctgcggagacagggccaccggcaaacactacggggcttcctcttgtgatggatgcaagggctttttcagacgcagcgtccggaaaaatcatatgtacagttgccgattttcaaggcagtgcgtggtggacaaggacaagagaaaccagtgccgctattgtcggctgaaaaagtgcttcagggcaggaatgaaaaaggaagccgtccagaatgagagagatcgaatttccacacggcgcagctcttacgaagacagctccctgccaagtatcaacgctctgctgcaggcagaggtgctgtcaaggcagatcactagccccgtgtctgggattaacggcgatatcagagccaagaaaattgcttccatcgcagacgtctgcgaaagcatgaaggagcagctgctggtgctggtggagtgggccaaatacatccctgcattttgcgaactgccactggacgatcaggtcgctctgctgcgggcccacgcaggagagcatctgctgctgggcgctaccaagcgaagtatggtgttcaaggacgtgctgctgctggggaatgactatattgtccccaggcactgccctgaactggccgagatgtcaagagtgtctatccgcatcctggatgaactggtgctgccattccaggagctgcagattgacgataacgaatacgcatacctgaaagctatcatctttttcgaccccgacgccaagggactgtccgatcctggcaaaattaagcggctgaggagccaggtccaggtgagtctggaggactatatcaatgacagacagtacgatagccgagggcggtttggagaactgctgctgctgctgccaacactgcagtccattacctggcagatgatcgagcagatccagttcattaaactgttcggcatggcaaagatcgacaacctgctgcaggagatgctgctgggagggtcaccctctgatgcccctcatgctcaccacccactgcatccccacctgatgcaggaacatatgggcactaatgtgatcgtcgcaaacacaatgcctacccacctgagcaatggacagatgtgtgagtggccacgccccaggggccaggccgcaactcctgaaaccccacagccctcccctccagggggatctggcagcgagccctacaagctgctgcctggagctgtggccacaattgtgaaaccactgagtgcaatcccccagcctaccattactaagcaggaagtcatctgaggactagttataagactgactagcccgatgggcctcccaacgggccctcctcccctccttgcaccgagattaataaaaaaaaaaaaaaaaaaaaaaaaaaaaaaaaaaaaaaaaaaaaaaaaaaaaaaaaaaaaaaaatgcatcccccccccccccccccccccccccccccccaaaggctcttttcagagccaccagaatt

SEQ ID NO: 2808 - RNA, 1531 nt, synthetic construct
  misc_feature 1..1531: note = mRNA i-3 (A64-N5-C30-hSL-N5) (opt28) from Homo sapiens__NP_000448.3__HNF4A(39-474)(S313A)
  source 1..1531: mol_type = other RNA
aggagaaagcttaccatggacacatctccctcagagggcactaacctgaatgcccctaacagtctgggggtgagcgctctgtgcgcaatctgcggagacagggccaccggcaaacactacggggcttcctcttgtgatggatgcaagggctttttcagacgcagcgtccggaaaaatcatatgtactcatgccgatttagtaggcagtgcgtggtggacaaggacaagagaaaccagtgccgctattgtcggctgaaaaagtgcttcagggcaggaatgaaaaaggaagccgtccagaatgagagagatcgaatttccacacggcgcagctcttacgaagacagctccctgccatcaatcaacgctctgctgcaggcagaggtgctgagtaggcagatcactagccccgtgtctgggattaacggcgatatcagagccaagaaaattgcatccatcgctgacgtctgcgaaagcatgaaggagcagctgctggtgctggtggagtgggccaaatacatccctgcattttgcgaactgccactggacgatcaggtcgctctgctgcgggcccacgcaggagagcatctgctgctgggcgctaccaagcgatcaatggtgttcaaggacgtgctgctgctggggaatgactatattgtccccaggcactgccctgaactggccgagatgagtagagtgtctatccgcatcctggatgaactggtgctgccattccaggagctgcagattgacgataacgaatacgcatacctgaaagctatcatctttttcgaccccgacgccaagggactgtccgatcctggcaaaattaagcggctgagggcacaggtccaggtgagcctggaggactatatcaatgacagacagtacgatagccgagggcggtttggagaactgctgctgctgctgccaacactgcagtccattacctggcagatgatcgagcagatccagttcattaaactgttcggcatggccaagatcgacaacctgctgcaggagatgctgctgggagggtcaccctctgatgctcctcatgcacaccacccactgcatccccacctgatgcaggaacatatgggcactaatgtgatcgtcgccaacacaatgcctacccacctgagtaatggacagatgtgtgagtggccacgccccaggggccaggcagctactcctgaaaccccacagcccagccctccagggggatccggctctgagccctacaagctgctgcctggagcagtggccacaattgtgaaaccactgagcgctatcccccagcctaccattactaagcaggaagtcatctgaggactagttataagactgactagcccgatgggcctcccaacgggccctcctcccctccttgcaccgagattaataaaaaaaaaaaaaaaaaaaaaaaaaaaaaaaaaaaaaaaaaaaaaaaaaaaaaaaaaaaaaaaatgcatcccccccccccccccccccccccccccccccaaaggctcttttcagagccaccagaatt

SEQ ID NO: 2809 - RNA, 1531 nt, synthetic construct
  misc_feature 1..1531: note = mRNA i-3 (A64-N5-C30-hSL-N5) (opt28) from Homo sapiens__NP_000448.3__HNF4A(39-474)(S313E)
  source 1..1531: mol_type = other RNA
aggagaaagcttaccatggacacatctccctcagagggcactaacctgaatgcccctaacagtctgggggtgagcgctctgtgcgcaatctgcggagacagggccaccggcaaacactacggggcttcctcttgtgatggatgcaagggctttttcagacgcagcgtccggaaaaatcatatgtactcatgccgatttagtaggcagtgcgtggtggacaaggacaagagaaaccagtgccgctattgtcggctgaaaaagtgcttcagggcaggaatgaaaaaggaagccgtccagaatgagagagatcgaatttccacacggcgcagctcttacgaagacagctccctgccatcaatcaacgctctgctgcaggcagaggtgctgagtaggcagatcactagccccgtgtctgggattaacggcgatatcagagccaagaaaattgcatccatcgctgacgtctgcgaaagcatgaaggagcagctgctggtgctggtggagtgggccaaatacatccctgcattttgcgaactgccactggacgatcaggtcgctctgctgcgggcccacgcaggagagcatctgctgctgggcgctaccaagcgatcaatggtgttcaaggacgtgctgctgctggggaatgactatattgtccccaggcactgccctgaactggccgagatgagtagagtgtctatccgcatcctggatgaactggtgctgccattccaggagctgcagattgacgataacgaatacgcatacctgaaagctatcatctttttcgaccccgacgccaagggactgtccgatcctggcaaaattaagcggctgagggagcaggtccaggtgagcctggaagactatatcaatgacagacagtacgatagccgagggcggtttggagagctgctgctgctgctgccaacactgcagtccattacctggcagatgatcgagcagatccagttcattaaactgttcggcatggcaaagatcgacaacctgctgcaggaaatgctgctgggagggtcaccctctgatgcccctcatgctcaccacccactgcatccccacctgatgcaggagcatatgggcactaatgtgatcgtcgcaaacacaatgcctacccacctgagtaatggacagatgtgtgaatggccacgccccaggggccaggccgcaactcctgagaccccacagcccagccctccagggggatccggctctgaaccctacaagctgctgcctggagctgtggcaacaattgtgaaaccactgagcgccatcccccagcctaccattactaagcaggaggtcatctgaggactagttataagactgactagcccgatgggcctcccaacgggccctcctcccctccttgcaccgagattaataaaaaaaaaaaaaaaaaaaaaaaaaaaaaaaaaaaaaaaaaaaaaaaaaaaaaaaaaaaaaaaatgcatcccccccccccccccccccccccccccccccaaaggctcttttcagagccaccagaatt

SEQ ID NO: 2810 - RNA, 1531 nt, synthetic construct
  misc_feature 1..1531: note = mRNA i-3 (A64-N5-C30-hSL-N5) (opt28) from Homo sapiens__NP_000448.3__HNF4A(39-474)(S142A_S143A)
  source 1..1531: mol_type = other RNA
aggagaaagcttaccatggacacatctccctcagagggcactaacctgaatgcccctaacagtctgggggtgagcgctctgtgcgcaatctgcggagacagggccaccggcaaacactacggggcttcctcttgtgatggatgcaagggctttttcagacgcagcgtccggaaaaatcatatgtactcatgccgatttagtaggcagtgcgtggtggacaaggacaagagaaaccagtgccgctattgtcggctgaaaaagtgcttcagggcaggaatgaaaaaggaagccgtccagaatgagagagatcgaatttccacacggcgcgctgcatacgaagacagctctctgccaagcatcaacgccctgctgcaggcagaggtgctgtccaggcagatcacttcacccgtgagtgggattaacggcgatatcagagctaagaaaattgccagcatcgcagacgtctgcgaatctatgaaggagcagctgctggtgctggtggagtgggctaaatacatccctgccttttgcgaactgccactggacgatcaggtcgcactgctgcgggctcacgccggagagcatctgctgctgggcgcaaccaagcgatccatggtgttcaaggacgtgctgctgctggggaatgactatattgtccccaggcactgccctgaactggctgagatgagcagagtgtcaatccgcatcctggatgaactggtgctgccattccaggagctgcagattgacgataacgaatacgcctacctgaaagcaatcatctttttcgaccccgacgccaagggactgagtgatcctggcaaaattaagcggctgaggtctcaggtccaggtgtccctggaggactatatcaatgacagacagtacgatagccgagggcggtttggagaactgctgctgctgctgccaacactgcagagcattacctggcagatgatcgagcagatccagttcattaaactgttcggcatggctaagatcgacaacctgctgcaggagatgctgctgggagggtccccctcagatgcacctcatgcccaccacccactgcatccccacctgatgcaggaacatatgggcactaatgtgatcgtcgcaaacacaatgcctacccacctgtctaatggacagatgtgtgagtggccacgccccaggggccaggctgcaactcctgaaaccccacagcccagtcctccagggggaagcggctccgagccctacaagctgctgcctggagccgtggctacaattgtgaaaccactgtctgcaatcccccagcctaccattactaagcaggaagtcatctgaggactagttataagactgactagcccgatgggcctcccaacgggccctcctcccctccttgcaccgagattaataaaaaaaaaaaaaaaaaaaaaaaaaaaaaaaaaaaaaaaaaaaaaaaaaaaaaaaaaaaaaaaatgcatcccccccccccccccccccccccccccccccaaaggctcttttcagagccaccagaatt

SEQ ID NO: 2811 - RNA, 1531 nt, synthetic construct
  misc_feature 1..1531: note = mRNA i-3 (A64-N5-C30-hSL-N5) (opt28) from Homo sapiens__NP_000448.3__HNF4A(39-474)(S142E_S143E)
  source 1..1531: mol_type = other RNA
aggagaaagcttaccatggacacatctccctcagagggcactaacctgaatgcccctaacagtctgggggtgagcgctctgtgcgcaatctgcggagacagggccaccggcaaacactacggggcttcctcttgtgatggatgcaagggctttttcagacgcagcgtccggaaaaatcatatgtactcatgccgatttagtaggcagtgcgtggtggacaaggacaagagaaaccagtgccgctattgtcggctgaaaaagtgcttcagggcaggaatgaaaaaggaagccgtccagaatgagagagatcgaatttccacacggcgcgaagagtacgaagacagctctctgccaagcatcaacgctctgctgcaggcagaggtgctgtccaggcagatcacttcacccgtgagtgggattaacggcgatatcagagccaagaaaattgcaagcatcgctgacgtctgcgagtctatgaaggaacagctgctggtgctggtggagtgggccaaatacatccctgcattttgcgaactgccactggacgatcaggtcgctctgctgcgggcccacgcaggagagcatctgctgctgggcgctaccaagcgatccatggtgttcaaggacgtgctgctgctggggaatgactatattgtccccaggcactgccctgaactggccgagatgagcagagtgtcaatccgcatcctggatgaactggtgctgccattccaggagctgcagattgacgataacgaatacgcatacctgaaagctatcatctttttcgaccccgacgccaagggactgagtgatcctggcaaaattaagcggctgaggtctcaggtccaggtgtccctggaggactatatcaatgacagacagtacgatagccgagggcggtttggagagctgctgctgctgctgccaacactgcagagcattacctggcagatgatcgaacagatccagttcattaaactgttcggcatggcaaagatcgacaacctgctgcaggagatgctgctgggagggtccccctcagatgcccctcatgctcaccacccactgcatccccacctgatgcaggaacatatgggcactaatgtgatcgtcgcaaacacaatgcctacccacctgtctaatggacagatgtgtgagtggccacgccccaggggccaggccgcaactcctgaaaccccacagcccagtcctccagggggaagcggctccgagccctacaagctgctgcctggagctgtggcaacaattgtgaaaccactgtctgccatcccccagcctaccattactaagcaggaagtcatctgaggactagttataagactgactagcccgatgggcctcccaacgggccctcctcccctccttgcaccgagattaataaaaaaaaaaaaaaaaaaaaaaaaaaaaaaaaaaaaaaaaaaaaaaaaaaaaaaaaaaaaaaaatgcatcccccccccccccccccccccccccccccccaaaggctcttttcagagccaccagaatt

SEQ ID NO: 2812 - RNA, 1531 nt, synthetic construct
  misc_feature 1..1531: note = mRNA i-3 (A64-N5-C30-hSL-N5) (opt28) from Homo sapiens__NP_000448.3__HNF4A(39-474)(S143A)
  source 1..1531: mol_type = other RNA
aggagaaagcttaccatggacacatctccctcagagggcactaacctgaatgcccctaacagtctgggggtgagcgctctgtgcgcaatctgcggagacagggccaccggcaaacactacggggcttcctcttgtgatggatgcaagggctttttcagacgcagcgtccggaaaaatcatatgtactcatgccgatttagtaggcagtgcgtggtggacaaggacaagagaaaccagtgccgctattgtcggctgaaaaagtgcttcagggcaggaatgaaaaaggaagccgtccagaatgagagagatcgaatttccacacggcgcagcgcttacgaagactctagcctgccatccatcaacgcactgctgcaggccgaggtgctgtcaaggcagatcaccagtcccgtgagcgggattaacggcgatatcagagcaaagaaaattgcttctatcgccgacgtctgcgaatccatgaaggagcagctgctggtgctggtggagtgggcaaaatacatccctgctttttgcgaactgccactggacgatcaggtcgccctgctgcgggcacacgctggagagcatctgctgctgggcgccactaagcgaagcatggtgttcaaggacgtgctgctgctggggaatgactatattgtccccaggcactgccctgaactggcagagatgtcaagagtgagtatccgcatcctggatgaactggtgctgccattccaggagctgcagattgacgataacgaatacgcttacctgaaagccatcatctttttcgaccccgacgcaaagggactgtctgatcctggcaaaattaagcggctgaggtcccaggtccaggtgagcctggaggactatatcaatgacagacagtacgatagccgagggcggtttggagaactgctgctgctgctgccaacactgcagtccattacctggcagatgatcgagcagatccagttcattaaactgttcggcatggccaagatcgacaacctgctgcaggagatgctgctgggagggtcaccctctgatgctcctcatgcacaccacccactgcatccccacctgatgcaggaacatatgggcactaatgtgatcgtcgccaacacaatgcctacccacctgagtaatggacagatgtgtgagtggccacgccccaggggccaggcagctactcctgaaaccccacagcccagccctccagggggatccggctctgagccctacaagctgctgcctggagcagtggccacaattgtgaaaccactgagcgctatcccccagcctaccattactaagcaggaagtcatctgaggactagttataagactgactagcccgatgggcctcccaacgggccctcctcccctccttgcaccgagattaataaaaaaaaaaaaaaaaaaaaaaaaaaaaaaaaaaaaaaaaaaaaaaaaaaaaaaaaaaaaaaaatgcatcccccccccccccccccccccccccccccccaaaggctcttttcagagccaccagaatt

SEQ ID NO: 2813 - RNA, 1531 nt, synthetic construct
  misc_feature 1..1531: note = mRNA i-3 (A64-N5-C30-hSL-N5) (opt28) from Homo sapiens__NP_000448.3__HNF4A(39-474)(T166A)
  source 1..1531: mol_type = other RNA
aggagaaagcttaccatggacacatctccctcagagggcactaacctgaatgcccctaacagtctgggggtgagcgctctgtgcgcaatctgcggagacagggccaccggcaaacactacggggcttcctcttgtgatggatgcaagggctttttcagacgcagcgtccggaaaaatcatatgtactcatgccgatttagtaggcagtgcgtggtggacaaggacaagagaaaccagtgccgctattgtcggctgaaaaagtgcttcagggcaggaatgaaaaaggaagccgtccagaatgagagagatcgaatttccacacggcgcagctcttacgaagacagctccctgccatcaatcaacgctctgctgcaggcagaggtgctgagtaggcagatcgccagccccgtgtctgggattaacggcgatatcagagcaaagaaaattgcttccatcgccgacgtctgcgaaagcatgaaggagcagctgctggtgctggtggagtgggcaaaatacatccctgctttttgcgaactgccactggacgatcaggtcgccctgctgcgggcacacgctggagagcatctgctgctgggcgccactaagcgatcaatggtgttcaaggacgtgctgctgctggggaatgactatattgtccccaggcactgccctgaactggcagagatgagtagagtgtctatccgcatcctggatgaactggtgctgccattccaggagctgcagattgacgataacgaatacgcttacctgaaagccatcatctttttcgaccccgacgcaaagggactgtccgatcctggcaaaattaagcggctgaggagccaggtccaggtgagcctggaggactatatcaatgacagacagtacgattcccgagggcggtttggagaactgctgctgctgctgccaaccctgcagtcaattacatggcagatgatcgagcagatccagttcattaaactgttcggcatggccaagatcgacaacctgctgcaggagatgctgctgggagggtctcccagtgatgctcctcatgcacaccacccactgcatccccacctgatgcaggaacatatgggcaccaatgtgatcgtcgccaacactatgcctacacacctgagcaatggacagatgtgtgagtggccacgccccaggggccaggcagctacccctgaaactccacagccctcccctccagggggatctggcagcgagccctacaagctgctgcctggagcagtggccaccattgtgaaaccactgtcagctatcccccagcctacaattaccaagcaggaagtcatctgaggactagttataagactgactagcccgatgggcctcccaacgggccctcctcccctccttgcaccgagattaataaaaaaaaaaaaaaaaaaaaaaaaaaaaaaaaaaaaaaaaaaaaaaaaaaaaaaaaaaaaaaaatgcatcccccccccccccccccccccccccccccccaaaggctcttttcagagccaccagaatt

SEQ ID NO: 2814 - RNA, 1531 nt, synthetic construct
  misc_feature 1..1531: note = mRNA i-3 (A64-N5-C30-hSL-N5) (opt28) from Homo sapiens__NP_000448.3__HNF4A(39-474)(S167E)
  source 1..1531: mol_type = other RNA
aggagaaagcttaccatggacacatctccctcagagggcactaacctgaatgcccctaacagtctgggggtgagcgctctgtgcgcaatctgcggagacagggccaccggcaaacactacggggcttcctcttgtgatggatgcaagggctttttcagacgcagcgtccggaaaaatcatatgtactcatgccgatttagtaggcagtgcgtggtggacaaggacaagagaaaccagtgccgctattgtcggctgaaaaagtgcttcagggcaggaatgaaaaaggaagccgtccagaatgagagagatcgaatttccacacggcgcagctcttacgaagacagctccctgccatcaatcaacgctctgctgcaggcagaggtgctgagtaggcagatcactgaacccgtgagcgggattaacggcgatatcagagccaagaaaattgcatctatcgctgacgtctgcgagtccatgaaggagcagctgctggtgctggtggaatgggccaaatacatccctgcattttgcgagctgccactggacgatcaggtcgctctgctgcgggcccacgcaggagaacatctgctgctgggcgctaccaagcgaagcatggtgttcaaggacgtgctgctgctggggaatgactatattgtccccaggcactgccctgagctggccgaaatgtcaagagtgagtatccgcatcctggatgagctggtgctgccattccaggaactgcagattgacgataacgagtacgcatacctgaaagctatcatctttttcgaccccgacgccaagggactgtctgatcctggcaaaattaagcggctgaggtcccaggtccaggtgagcctggaagactatatcaatgacagacagtacgatagccgagggcggtttggagagctgctgctgctgctgccaacactgcagtccattacctggcagatgatcgagcagatccagttcattaaactgttcggcatggcaaagatcgacaacctgctgcaggaaatgctgctgggagggtcaccctctgatgcccctcatgctcaccacccactgcatccccacctgatgcaggagcatatgggcactaatgtgatcgtcgcaaacacaatgcctacccacctgagtaatggacagatgtgtgaatggccacgccccaggggccaggccgcaactcctgagaccccacagcccagccctccagggggatccggctctgaaccctacaagctgctgcctggagctgtggcaacaattgtgaaaccactgagcgccatcccccagcctaccattactaagcaggaggtcatctgaggactagttataagactgactagcccgatgggcctcccaacgggccctcctcccctccttgcaccgagattaataaaaaaaaaaaaaaaaaaaaaaaaaaaaaaaaaaaaaaaaaaaaaaaaaaaaaaaaaaaaaaaatgcatcccccccccccccccccccccccccccccccaaaggctcttttcagagccaccagaatt

SEQ ID NO: 2815 - RNA, 1531 nt, synthetic construct
  misc_feature 1..1531: note = mRNA i-3 (A64-N5-C30-hSL-N5) (opt28) from Homo sapiens__NP_000448.3__HNF4A(39-474)(S167A)
  source 1..1531: mol_type = other RNA
aggagaaagcttaccatggacacatctccctcagagggcactaacctgaatgcccctaacagtctgggggtgagcgctctgtgcgcaatctgcggagacagggccaccggcaaacactacggggcttcctcttgtgatggatgcaagggctttttcagacgcagcgtccggaaaaatcatatgtactcatgccgatttagtaggcagtgcgtggtggacaaggacaagagaaaccagtgccgctattgtcggctgaaaaagtgcttcagggcaggaatgaaaaaggaagccgtccagaatgagagagatcgaatttccacacggcgcagctcttacgaagacagctccctgccatcaatcaacgctctgctgcaggcagaggtgctgagtaggcagatcactgcccccgtgagcgggattaacggcgatatcagagcaaagaaaattgcttctatcgccgacgtctgcgaatccatgaaggagcagctgctggtgctggtggagtgggcaaaatacatccctgctttttgcgaactgccactggacgatcaggtcgccctgctgcgggcacacgctggagagcatctgctgctgggcgccaccaagcgaagcatggtgttcaaggacgtgctgctgctggggaatgactatattgtccccaggcactgccctgaactggcagagatgtcaagagtgagtatccgcatcctggatgaactggtgctgccattccaggagctgcagattgacgataacgaatacgcttacctgaaagccatcatctttttcgaccccgacgcaaagggactgtctgatcctggcaaaattaagcggctgaggtcccaggtccaggtgagcctggaggactatatcaatgacagacagtacgatagccgagggcggtttggagaactgctgctgctgctgccaacactgcagtccattacctggcagatgatcgagcagatccagttcattaaactgttcggcatggccaagatcgacaacctgctgcaggagatgctgctgggagggtcaccctctgatgctcctcatgcacaccacccactgcatccccacctgatgcaggaacatatgggcactaatgtgatcgtcgccaacacaatgcctacccacctgagtaatggacagatgtgtgagtggccacgccccaggggccaggcagctactcctgaaaccccacagcccagccctccagggggatccggctctgagccctacaagctgctgcctggagcagtggccacaattgtgaaaccactgagcgctatcccccagcctaccattactaagcaggaagtcatctgaggactagttataagactgactagcccgatgggcctcccaacgggccctcctcccctccttgcaccgagattaataaaaaaaaaaaaaaaaaaaaaaaaaaaaaaaaaaaaaaaaaaaaaaaaaaaaaaaaaaaaaaaatgcatcccccccccccccccccccccccccccccccaaaggctcttttcagagccaccagaatt

SEQ ID NO: 2816 - RNA, 1531 nt, synthetic construct
  misc_feature 1..1531: note = mRNA i-3 (A64-N5-C30-hSL-N5) (opt28) from Homo sapiens__NP_000448.3__HNF4A(39-474)(S167A_S378A_T429A_T432A _S436A)
  source 1..1531: mol_type = other RNA
aggagaaagcttaccatggacacatctccctcagagggcactaacctgaatgcccctaacagtctgggggtgagcgctctgtgcgcaatctgcggagacagggccaccggcaaacactacggggcttcctcttgtgatggatgcaagggctttttcagacgcagcgtccggaaaaatcatatgtactcatgccgatttagtaggcagtgcgtggtggacaaggacaagagaaaccagtgccgctattgtcggctgaaaaagtgcttcagggcaggaatgaaaaaggaagccgtccagaatgagagagatcgaatttccacacggcgcagctcttacgaagacagctccctgccatcaatcaacgctctgctgcaggcagaggtgctgagtaggcagatcactgcccccgtgagcgggattaacggcgatatcagagcaaagaaaattgcttctatcgccgacgtctgcgaatccatgaaggagcagctgctggtgctggtggagtgggcaaaatacatccctgctttttgcgaactgccactggacgatcaggtcgccctgctgcgggcacacgctggagagcatctgctgctgggcgccaccaagcgaagcatggtgttcaaggacgtgctgctgctggggaatgactatattgtccccaggcactgccctgaactggcagagatgtcaagagtgagtatccgcatcctggatgaactggtgctgccattccaggagctgcagattgacgataacgaatacgcttacctgaaagccatcatctttttcgaccccgacgcaaagggactgtctgatcctggcaaaattaagcggctgaggtcccaggtccaggtgagcctggaggactatatcaatgacagacagtacgatagccgagggcggtttggagaactgctgctgctgctgccaacactgcagtccattacctggcagatgatcgagcagatccagttcattaaactgttcggcatggccaagatcgacaacctgctgcaggagatgctgctgggaggggctccctcagatgcacctcatgcccaccacccactgcatccccacctgatgcaggaacatatgggcactaatgtgatcgtcgcaaacacaatgcctacccacctgtctaatggacagatgtgtgagtggccacgccccaggggccaggctgcagcccctgaagctccacagcccgcacctccagggggaagtggcagcgagccctacaagctgctgcctggagccgtggctactattgtgaaaccactgtccgcaatcccccagcctaccattacaaagcaggaagtcatctgaggactagttataagactgactagcccgatgggcctcccaacgggccctcctcccctccttgcaccgagattaataaaaaaaaaaaaaaaaaaaaaaaaaaaaaaaaaaaaaaaaaaaaaaaaaaaaaaaaaaaaaaaatgcatcccccccccccccccccccccccccccccccaaaggctcttttcagagccaccagaatt

SEQ ID NO: 2817 - RNA, 1531 nt, synthetic construct
  misc_feature 1..1531: note = mRNA i-3 (A64-N5-C30-hSL-N5) (opt28) from Homo sapiens__NP_000448.3__HNF4A(39-474)(S167E_S378E_T429E_T432E _S436E)
  source 1..1531: mol_type = other RNA
aggagaaagcttaccatggacacatctccctcagagggcactaacctgaatgcccctaacagtctgggggtgagcgctctgtgcgcaatctgcggagacagggccaccggcaaacactacggggcttcctcttgtgatggatgcaagggctttttcagacgcagcgtccggaaaaatcatatgtactcatgccgatttagtaggcagtgcgtggtggacaaggacaagagaaaccagtgccgctattgtcggctgaaaaagtgcttcagggcaggaatgaaaaaggaagccgtccagaatgagagagatcgaatttccacacggcgcagctcttacgaagacagctccctgccatcaatcaacgctctgctgcaggcagaggtgctgagtaggcagatcactgaacccgtgagcgggattaacggcgatatcagagccaagaaaattgcatctatcgctgacgtctgcgagtccatgaaggagcagctgctggtgctggtggaatgggccaaatacatccctgcattttgcgagctgccactggacgatcaggtcgctctgctgcgggcccacgcaggagaacatctgctgctgggcgctaccaagcgaagcatggtgttcaaggacgtgctgctgctggggaatgactatattgtccccaggcactgccctgagctggccgaaatgtcaagagtgagtatccgcatcctggatgagctggtgctgccattccaggaactgcagattgacgataacgagtacgcatacctgaaagctatcatctttttcgaccccgacgccaagggactgtctgatcctggcaaaattaagcggctgaggtcccaggtccaggtgagcctggaagactatatcaatgacagacagtacgatagccgagggcggtttggagagctgctgctgctgctgccaacactgcagtccattacctggcagatgatcgagcagatccagttcattaaactgttcggcatggcaaagatcgacaacctgctgcaggaaatgctgctgggaggggagccctcagatgcccctcatgctcaccacccactgcatccccacctgatgcaggaacatatgggcactaatgtgatcgtcgcaaacacaatgcctacccacctgtctaatggacagatgtgtgagtggccacgccccaggggccaggccgcagaacctgaggaaccacagcccgagcctccagggggaagtggcagcgagccctacaagctgctgcctggagctgtggcaactattgtgaaaccactgtccgccatcccccagcctaccattacaaagcaggaagtcatctgaggactagttataagactgactagcccgatgggcctcccaacgggccctcctcccctccttgcaccgagattaataaaaaaaaaaaaaaaaaaaaaaaaaaaaaaaaaaaaaaaaaaaaaaaaaaaaaaaaaaaaaaaatgcatcccccccccccccccccccccccccccccccaaaggctcttttcagagccaccagaatt

SEQ ID NO: 2818 - RNA, 1531 nt, synthetic construct
  misc_feature 1..1531: note = mRNA i-3 (A64-N5-C30-hSL-N5) (opt28) from Homo sapiens__NP_000448.3__HNF4A(39-474)(S87A)
  source 1..1531: mol_type = other RNA
aggagaaagcttaccatggacacatctccctcagagggcactaacctgaatgcccctaacagtctgggggtgagcgctctgtgcgcaatctgcggagacagggccaccggcaaacactacggggcttcctcttgtgatggatgcaagggctttttcagacgcgcagtccggaaaaatcatatgtacagctgccgattttcaaggcagtgcgtggtggacaaggacaagagaaaccagtgccgctattgtcggctgaaaaagtgcttcagggccggaatgaaaaaggaagctgtccagaatgagagagatcgaattagtacacggcgctccagctacgaagactctagcctgccatccatcaacgcactgctgcaggccgaggtgctgtcaaggcagatcaccagtcccgtgagcgggattaacggcgatatcagagcaaagaaaattgcttctatcgccgacgtctgcgaatccatgaaggagcagctgctggtgctggtggagtgggcaaaatacatccctgctttttgcgaactgccactggacgatcaggtcgccctgctgcgggcacacgctggagagcatctgctgctgggcgccactaagcgaagcatggtgttcaaggacgtgctgctgctggggaatgactatattgtccccaggcactgccctgaactggcagagatgtcaagagtgagtatccgcatcctggatgaactggtgctgccattccaggagctgcagattgacgataacgaatacgcttacctgaaagccatcatctttttcgaccccgacgcaaagggactgtctgatcctggcaaaattaagcggctgaggtcccaggtccaggtgagcctggaggactatatcaatgacagacagtacgatagccgagggcggtttggagaactgctgctgctgctgccaacactgcagtccattacctggcagatgatcgagcagatccagttcattaaactgttcggcatggccaagatcgacaacctgctgcaggagatgctgctgggagggtcaccctctgatgctcctcatgcacaccacccactgcatccccacctgatgcaggaacatatgggcactaatgtgatcgtcgccaacacaatgcctacccacctgagtaatggacagatgtgtgagtggccacgccccaggggccaggcagctactcctgaaaccccacagcccagccctccagggggatccggctctgagccctacaagctgctgcctggagcagtggccacaattgtgaaaccactgagcgctatcccccagcctaccattactaagcaggaagtcatctgaggactagttataagactgactagcccgatgggcctcccaacgggccctcctcccctccttgcaccgagattaataaaaaaaaaaaaaaaaaaaaaaaaaaaaaaaaaaaaaaaaaaaaaaaaaaaaaaaaaaaaaaaatgcatcccccccccccccccccccccccccccccccaaaggctcttttcagagccaccagaatt

SEQ ID NO: 2819 - RNA, 1531 nt, synthetic construct
  misc_feature 1..1531: note = mRNA i-3 (A64-N5-C30-hSL-N5) (opt28) from Homo sapiens__NP_000448.3__HNF4A(39-474)(S87E)
  source 1..1531: mol_type = other RNA
aggagaaagcttaccatggacacatctccctcagagggcactaacctgaatgcccctaacagtctgggggtgagcgctctgtgcgcaatctgcggagacagggccaccggcaaacactacggggcttcctcttgtgatggatgcaagggctttttcagacgcgaagtccggaaaaatcatatgtacagctgccgattttcaaggcagtgcgtggtggacaaggacaagagaaaccagtgccgctattgtcggctgaaaaagtgcttcagggcaggaatgaaaaaggaggccgtccagaatgaaagagatcgaattagtacacggcgctccagctacgaggactctagcctgccatccatcaacgctctgctgcaggcagaagtgctgtcaaggcagatcaccagtcccgtgagcgggattaacggcgatatcagagccaagaaaattgcatctatcgctgacgtctgcgagtccatgaaggagcagctgctggtgctggtggaatgggccaaatacatccctgcattttgcgagctgccactggacgatcaggtcgctctgctgcgggcccacgcaggagaacatctgctgctgggcgctactaagcgaagcatggtgttcaaggacgtgctgctgctggggaatgactatattgtccccaggcactgccctgagctggccgaaatgtcaagagtgagtatccgcatcctggatgagctggtgctgccattccaggaactgcagattgacgataacgagtacgcatacctgaaagctatcatctttttcgaccccgacgccaagggactgtctgatcctggcaaaattaagcggctgaggtcccaggtccaggtgagcctggaagactatatcaatgacagacagtacgatagccgagggcggtttggagagctgctgctgctgctgccaacactgcagtccattacctggcagatgatcgagcagatccagttcattaaactgttcggcatggcaaagatcgacaacctgctgcaggaaatgctgctgggagggtcaccctctgatgcccctcatgctcaccacccactgcatccccacctgatgcaggagcatatgggcactaatgtgatcgtcgcaaacacaatgcctacccacctgagtaatggacagatgtgtgaatggccacgccccaggggccaggccgcaactcctgagaccccacagcccagccctccagggggatccggctctgaaccctacaagctgctgcctggagctgtggcaacaattgtgaaaccactgagcgccatcccccagcctaccattactaagcaggaggtcatctgaggactagttataagactgactagcccgatgggcctcccaacgggccctcctcccctccttgcaccgagattaataaaaaaaaaaaaaaaaaaaaaaaaaaaaaaaaaaaaaaaaaaaaaaaaaaaaaaaaaaaaaaaatgcatcccccccccccccccccccccccccccccccaaaggctcttttcagagccaccagaatt

SEQ ID NO: 2820 - RNA, 1531 nt, synthetic construct
  misc_feature 1..1531: note = mRNA i-3 (A64-N5-C30-hSL-N5) (opt28) from Homo sapiens__NP_000448.3__HNF4A(39-474)(R2V)
  source 1..1531: mol_type = other RNA
aggagaaagcttaccatggacacatctccctcagagggcactaacctgaatgcccctaacagtctgggggtgagcgctctgtgcgcaatctgcggagaccgggccaccggcaaacactacggggcttcctcttgtgatggatgcaagggctttttcaggagaagcgtgcgcaaaaatcatatgtactcatgccgatttagtcggcagtgcgtggtcgacaaggacaagaggaaccagtgcagatattgtcgcctgaaaaagtgcttccgggcaggaatgaaaaaggaagccgtgcagaatgagagggatagaatttccacacgacggagctcttacgaagacagctccctgccatcaatcaacgctctgctgcaggcagaggtgctgagtcgccagatcactagccccgtctctgggattaacggcgatatcagggccaagaaaattgcatccatcgctgacgtgtgcgaaagcatgaaggagcagctgctggtgctggtcgagtgggccaaatacatccctgcattttgcgaactgccactggacgatcaggtggctctgctgagagcccacgcaggagagcatctgctgctgggcgctaccaagcggtcaatggtgttcaaggacgtcctgctgctggggaatgactatattgtgccccgacactgccctgaactggccgagatgagtagggtgtctatcagaatcctggatgaactggtcctgccattccaggagctgcagattgacgataacgaatacgcatacctgaaagctatcatctttttcgaccccgacgccaagggactgtccgatcctggcaaaattaagcgcctgcggagccaggtccaggtgagcctggaggactatatcaatgacaggcagtacgattccagagggcgatttggagaactgctgctgctgctgccaacactgcagtcaattacctggcagatgatcgagcagatccagttcattaaactgttcggcatggcaaagatcgacaacctgctgcaggagatgctgctgggagggtctcccagtgatgcccctcatgctcaccacccactgcatccccacctgatgcaggaacatatgggcactaatgtgatcgtggcaaacacaatgcctacccacctgagcaatggacagatgtgtgagtggccacggccccgcggccaggccgcaactcctgaaaccccacagccctcccctccagggggatctggcagcgagccctacaagctgctgcctggagctgtggcaacaattgtcaaaccactgtcagccatcccccagcctaccattactaagcaggaagtgatctgaggactagttataagactgactagcccgatgggcctcccaacgggccctcctcccctccttgcaccgagattaataaaaaaaaaaaaaaaaaaaaaaaaaaaaaaaaaaaaaaaaaaaaaaaaaaaaaaaaaaaaaaaatgcatcccccccccccccccccccccccccccccccaaaggctcttttcagagccaccagaatt

SEQ ID NO: 2821 - RNA, 1531 nt, synthetic construct
  misc_feature 1..1531: note = mRNA i-3 (A64-N5-C30-hSL-N5) (opt28) from Homo sapiens__NP_000448.3__HNF4A(39-474)(R2V_K5V)
  source 1..1531: mol_type = other RNA
aggagaaagcttaccatggacacatctccctcagagggcactaacctgaatgcccctaacagtctgggggtgagcgctctgtgcgcaatctgcggagaccgggccaccggcaagcactacggggcttcctcttgtgatggatgcaaaggctttttcaggagaagcgtgcgcaagaatcatatgtactcatgccgatttagtcggcagtgcgtcgtggacaaagacaagaggaaccagtgcagatattgtcgcctgaagaaatgcttccgggcaggaatgaagaaagaagccgtgcagaatgagagggatagaatttccacacgacggagctcttacgaagacagctccctgccatcaatcaacgctctgctgcaggcagaggtcctgagtcgccagatcactagccccgtgtctgggattaacggcgatatcagggccaagaagattgcatccatcgctgacgtgtgcgaaagcatgaaagagcagctgctggtcctggtggagtgggccaagtacatccctgcattttgcgaactgccactggacgatcaggtggctctgctgagagcccacgcaggagagcatctgctgctgggcgctaccaaacggtcaatggtcttcaaggacgtgctgctgctggggaatgactatattgtgccccgacactgccctgaactggccgagatgagtagggtctctatcagaatcctggatgaactggtgctgccattccaggagctgcagattgacgataacgaatacgcatacctgaaggctatcatctttttcgaccccgacgccaaaggactgtccgatcctggcaagattaaacgcctgcggagccaggtgcaggtcagcctggaggactatatcaatgacaggcagtacgattccagagggcgatttggagaactgctgctgctgctgccaacactgcagtcaattacctggcagatgatcgagcagatccagttcattaagctgttcggcatggcaaaaatcgacaacctgctgcaggagatgctgctgggagggtctcccagtgatgcccctcatgctcaccacccactgcatccccacctgatgcaggaacatatgggcactaatgtgatcgtggcaaacacaatgcctacccacctgagcaatggacagatgtgtgagtggccacggccccgcggccaggccgcaactcctgaaaccccacagccctcccctccagggggatctggcagcgagccctacaagctgctgcctggagctgtcgcaacaattgtgaagccactgtcagccatcccccagcctaccattactaaacaggaagtcatctgaggactagttataagactgactagcccgatgggcctcccaacgggccctcctcccctccttgcaccgagattaataaaaaaaaaaaaaaaaaaaaaaaaaaaaaaaaaaaaaaaaaaaaaaaaaaaaaaaaaaaaaaaatgcatcccccccccccccccccccccccccccccccaaaggctcttttcagagccaccagaatt

SEQ ID NO: 2822 - RNA, 1531 nt, synthetic construct
  misc_feature 1..1531: note = mRNA i-3 (A64-N5-C30-hSL-N5) (opt28) from Homo sapiens__NP_000448.3__HNF4A(39-474)(K179R_K180R)
  source 1..1531: mol_type = other RNA
aggagaaagcttaccatggacacatctccctcagagggcactaacctgaatgcccctaacagtctgggggtgagcgctctgtgcgcaatctgcggagacagggccaccggcaaacactacggggcttcctcttgtgatggatgcaagggctttttcagacgcagcgtccggaaaaatcatatgtactcatgccgatttagtaggcagtgcgtggtggacaaggacaagagaaaccagtgccgctattgtcggctgaaaaagtgcttcagggcaggaatgaaaaaggaagccgtccagaatgagagagatcgaatttccacacggcgcagctcttacgaagacagctccctgccatcaatcaacgctctgctgcaggcagaggtgctgagtaggcagatcactagccccgtgtctgggattaacggcgatatcagagcccggcgaattgcatccatcgctgacgtctgcgaaagcatgaaggagcagctgctggtgctggtggagtgggccaaatacatccctgcattttgcgaactgccactggacgatcaggtcgctctgctgagggcccacgcaggagagcatctgctgctgggcgctaccaagagatcaatggtgttcaaagacgtgctgctgctggggaatgactatattgtcccccgccactgccctgaactggccgagatgagtcgggtgtctatcaggatcctggatgaactggtgctgccattccaggagctgcagattgacgataacgaatacgcatacctgaaggctatcatctttttcgaccccgacgccaagggactgtccgatcctggcaaaattaagagactgcgaagccaggtccaggtgagcctggaggactatatcaatgaccggcagtacgattcccgcgggaggtttggagaactgctgctgctgctgccaacactgcagtcaattacctggcagatgatcgagcagatccagttcattaaactgttcggcatggcaaagatcgacaacctgctgcaggagatgctgctgggagggtctcccagtgatgcccctcatgctcaccacccactgcatccccacctgatgcaggaacatatgggcactaatgtgatcgtcgcaaacacaatgcctacccacctgagcaatggacagatgtgtgagtggccaagaccccggggccaggccgcaactcctgaaaccccacagccctcccctccagggggatctggcagcgagccctacaaactgctgcctggagctgtggcaacaattgtgaagccactgtcagccatcccccagcctaccattactaagcaggaagtcatctgaggactagttataagactgactagcccgatgggcctcccaacgggccctcctcccctccttgcaccgagattaataaaaaaaaaaaaaaaaaaaaaaaaaaaaaaaaaaaaaaaaaaaaaaaaaaaaaaaaaaaaaaaatgcatcccccccccccccccccccccccccccccccaaaggctcttttcagagccaccagaatt

SEQ ID NO: 2823 - RNA, 1531 nt, synthetic construct
  misc_feature 1..1531: note = mRNA i-3 (A64-N5-C30-hSL-N5) (opt28) from Homo sapiens__NP_000448.3__HNF4A(39-474)(K234R)
  source 1..1531: mol_type = other RNA
aggagaaagcttaccatggacacatctccctcagagggcactaacctgaatgcccctaacagtctgggggtgagcgctctgtgcgcaatctgcggagacagggccaccggcaaacactacggggcttcctcttgtgatggatgcaagggctttttcagacgcagcgtccggaaaaatcatatgtactcatgccgatttagtaggcagtgcgtggtggacaaggacaagagaaaccagtgccgctattgtcggctgaaaaagtgcttcagggcaggaatgaaaaaggaagccgtccagaatgagagagatcgaatttccacacggcgcagctcttacgaagacagctccctgccatcaatcaacgctctgctgcaggcagaggtgctgagtaggcagatcactagccccgtgtctgggattaacggcgatatcagagccaagaaaattgcatccatcgctgacgtctgcgaaagcatgaaggagcagctgctggtgctggtggagtgggccaaatacatccctgcattttgcgaactgccactggacgatcaggtcgctctgctgcgggcccacgcaggagagcatctgctgctgggcgctacccgaaggtcaatggtgttcaaggacgtgctgctgctggggaatgactatattgtccccagacactgccctgaactggccgagatgagtcgcgtgtctatccggatcctggatgaactggtgctgccattccaggagctgcagattgacgataacgaatacgcatacctgaaggctatcatctttttcgaccccgacgccaaaggactgtccgatcctggcaagattaaaaggctgagaagccaggtccaggtgagcctggaggactatatcaatgaccgacagtacgattcccgggggcgctttggagaactgctgctgctgctgccaacactgcagtcaattacctggcagatgatcgagcagatccagttcattaagctgttcggcatggcaaaaatcgacaacctgctgcaggagatgctgctgggagggtctcccagtgatgcccctcatgctcaccacccactgcatccccacctgatgcaggaacatatgggcactaatgtgatcgtcgcaaacacaatgcctacccacctgagcaatggacagatgtgtgagtggccaaggcccagaggccaggccgcaactcctgaaaccccacagccctcccctccagggggatctggcagcgagccctacaagctgctgcctggagctgtggcaacaattgtgaagccactgtcagccatcccccagcctaccattactaaacaggaagtcatctgaggactagttataagactgactagcccgatgggcctcccaacgggccctcctcccctccttgcaccgagattaataaaaaaaaaaaaaaaaaaaaaaaaaaaaaaaaaaaaaaaaaaaaaaaaaaaaaaaaaaaaaaaatgcatcccccccccccccccccccccccccccccccaaaggctcttttcagagccaccagaatt

SEQ ID NO: 2824 - RNA, 1531 nt, synthetic construct
  misc_feature 1..1531: note = mRNA i-3 (A64-N5-C30-hSL-N5) (opt28) from Homo sapiens__NP_000448.3__HNF4A(39-474)(K300R)
  source 1..1531: mol_type = other RNA
aggagaaagcttaccatggacacatctccctcagagggcactaacctgaatgcccctaacagtctgggggtgagcgctctgtgcgcaatctgcggagacagggccaccggcaaacactacggggcttcctcttgtgatggatgcaagggctttttcagacgcagcgtccggaaaaatcatatgtactcatgccgatttagtaggcagtgcgtggtggacaaggacaagagaaaccagtgccgctattgtcggctgaaaaagtgcttcagggcaggaatgaaaaaggaagccgtccagaatgagagagatcgaatttccacacggcgcagctcttacgaagacagctccctgccatcaatcaacgctctgctgcaggcagaggtgctgagtaggcagatcactagccccgtgtctgggattaacggcgatatcagagccaagaaaattgcatccatcgctgacgtctgcgaaagcatgaaggagcagctgctggtgctggtggagtgggccaaatacatccctgcattttgcgaactgccactggacgatcaggtcgctctgctgcgggcccacgcaggagagcatctgctgctgggcgctaccaagcgatcaatggtgttcaaggacgtgctgctgctggggaatgactatattgtccccaggcactgccctgaactggccgagatgagtagagtgtctatccgcatcctggatgaactggtgctgccattccaggagctgcagattgacgataacgaatacgcatacctgaaagctatcatctttttcgaccccgacgcccggggactgtccgatcctggcaagattaaaaggctgagaagccaggtccaggtgagcctggaggactatatcaatgaccgacagtacgattcccgggggcgctttggagaactgctgctgctgctgccaacactgcagtcaattacctggcagatgatcgagcagatccagttcattaagctgttcggcatggcaaaaatcgacaacctgctgcaggagatgctgctgggagggtctcccagtgatgcccctcatgctcaccacccactgcatccccacctgatgcaggaacatatgggcactaatgtgatcgtcgcaaacacaatgcctacccacctgagcaatggacagatgtgtgagtggccaaggcccagaggccaggccgcaactcctgaaaccccacagccctcccctccagggggatctggcagcgagccctacaagctgctgcctggagctgtggcaacaattgtgaagccactgtcagccatcccccagcctaccattactaaacaggaagtcatctgaggactagttataagactgactagcccgatgggcctcccaacgggccctcctcccctccttgcaccgagattaataaaaaaaaaaaaaaaaaaaaaaaaaaaaaaaaaaaaaaaaaaaaaaaaaaaaaaaaaaaaaaaatgcatcccccccccccccccccccccccccccccccaaaggctcttttcagagccaccagaatt

SEQ ID NO: 2825 - RNA, 1531 nt, synthetic construct
  misc_feature 1..1531: note = mRNA i-3 (A64-N5-C30-hSL-N5) (opt28) from Homo sapiens__NP_000448.3__HNF4A(39-474)(K300R_K307R_K309R)
  source 1..1531: mol_type = other RNA
aggagaaagcttaccatggacacatctccctcagagggcactaacctgaatgcccctaacagtctgggggtgagcgctctgtgcgcaatctgcggagacagggccaccggcaaacactacggggcttcctcttgtgatggatgcaagggctttttcagacgcagcgtccggaaaaatcatatgtactcatgccgatttagtaggcagtgcgtggtggacaaggacaagagaaaccagtgccgctattgtcggctgaaaaagtgcttcagggcaggaatgaaaaaggaagccgtccagaatgagagagatcgaatttccacacggcgcagctcttacgaagacagctccctgccatcaatcaacgctctgctgcaggcagaggtgctgagtaggcagatcactagccccgtgtctgggattaacggcgatatcagagccaagaaaattgcatccatcgctgacgtctgcgaaagcatgaaggagcagctgctggtgctggtggagtgggccaaatacatccctgcattttgcgaactgccactggacgatcaggtcgctctgctgcgggcccacgcaggagagcatctgctgctgggcgctaccaagcgatcaatggtgttcaaggacgtgctgctgctggggaatgactatattgtccccaggcactgccctgaactggccgagatgagtagagtgtctatccgcatcctggatgaactggtgctgccattccaggagctgcagattgacgataacgaatacgcatacctgaaagctatcatctttttcgaccccgacgcccggggactgtccgatcctggcaggattagacgactgcggagccaggtccaggtgagcctggaggactatatcaatgaccgccagtacgattccagggggagatttggagaactgctgctgctgctgccaacactgcagtcaattacctggcagatgatcgagcagatccagttcattaagctgttcggcatggcaaaaatcgacaacctgctgcaggagatgctgctgggagggtctcccagtgatgcccctcatgctcaccacccactgcatccccacctgatgcaggaacatatgggcactaatgtgatcgtcgcaaacacaatgcctacccacctgagcaatggacagatgtgtgagtggccacggccccgcggccaggccgcaactcctgaaaccccacagccctcccctccagggggatctggcagcgagccctacaagctgctgcctggagctgtggcaacaattgtgaaaccactgtcagccatcccccagcctaccattactaagcaggaagtcatctgaggactagttataagactgactagcccgatgggcctcccaacgggccctcctcccctccttgcaccgagattaataaaaaaaaaaaaaaaaaaaaaaaaaaaaaaaaaaaaaaaaaaaaaaaaaaaaaaaaaaaaaaaatgcatcccccccccccccccccccccccccccccccaaaggctcttttcagagccaccagaatt

SEQ ID NO: 2826 - RNA, 1531 nt, synthetic construct
  misc_feature 1..1531: note = mRNA i-3 (A64-N5-C30-hSL-N5) (opt28) from Homo sapiens__NP_000448.3__HNF4A(39-474)(K447R_K470R)
  source 1..1531: mol_type = other RNA
aggagaaagcttaccatggacacatctccctcagagggcactaacctgaatgcccctaacagtctgggggtgagcgctctgtgcgcaatctgcggagacagggccaccggcaaacactacggggcttcctcttgtgatggatgcaagggctttttcagacgcagcgtccggaaaaatcatatgtactcatgccgatttagtaggcagtgcgtggtggacaaggacaagagaaaccagtgccgctattgtcggctgaaaaagtgcttcagggcaggaatgaaaaaggaagccgtccagaatgagagagatcgaatttccacacggcgcagctcttacgaagacagctccctgccatcaatcaacgctctgctgcaggcagaggtgctgagtaggcagatcactagccccgtgtctgggattaacggcgatatcagagccaagaaaattgcatccatcgctgacgtctgcgaaagcatgaaggagcagctgctggtgctggtggagtgggccaaatacatccctgcattttgcgaactgccactggacgatcaggtcgctctgctgcgggcccacgcaggagagcatctgctgctgggcgctaccaagcgatcaatggtgttcaaggacgtgctgctgctggggaatgactatattgtccccaggcactgccctgaactggccgagatgagtagagtgtctatccgcatcctggatgaactggtgctgccattccaggagctgcagattgacgataacgaatacgcatacctgaaagctatcatctttttcgaccccgacgccaagggactgtccgatcctggcaaaattaagcggctgaggagccaggtccaggtgagcctggaggactatatcaatgacagacagtacgattcccgagggcggtttggagaactgctgctgctgctgccaacactgcagtcaattacctggcagatgatcgagcagatccagttcattaaactgttcggcatggcaaagatcgacaacctgctgcaggagatgctgctgggagggtctcccagtgatgcccctcatgctcaccacccactgcatccccacctgatgcaggaacatatgggcactaatgtgatcgtcgcaaacacaatgcctacccacctgagcaatggacagatgtgtgagtggccacgccccaggggccaggccgcaactcctgaaaccccacagccctcccctccagggggatctggcagcgagccctacagactgctgcctggagctgtggcaacaattgtgaagccactgtcagccatcccccagcctaccattactcggcaggaagtcatctgaggactagttataagactgactagcccgatgggcctcccaacgggccctcctcccctccttgcaccgagattaataaaaaaaaaaaaaaaaaaaaaaaaaaaaaaaaaaaaaaaaaaaaaaaaaaaaaaaaaaaaaaaatgcatcccccccccccccccccccccccccccccccaaaggctcttttcagagccaccagaatt

SEQ ID NO: 2827 - RNA, 1531 nt, synthetic construct
  misc_feature 1..1531: note = mRNA i-3 (A64-N5-C30-hSL-N5) (opt28) from Homo sapiens__NP_000448.3__HNF4A(39-474)(K458R)
  source 1..1531: mol_type = other RNA
aggagaaagcttaccatggacacatctccctcagagggcactaacctgaatgcccctaacagtctgggggtgagcgctctgtgcgcaatctgcggagacagggccaccggcaaacactacggggcttcctcttgtgatggatgcaagggctttttcagacgcagcgtccggaaaaatcatatgtactcatgccgatttagtaggcagtgcgtggtggacaaggacaagagaaaccagtgccgctattgtcggctgaaaaagtgcttcagggcaggaatgaaaaaggaagccgtccagaatgagagagatcgaatttccacacggcgcagctcttacgaagacagctccctgccatcaatcaacgctctgctgcaggcagaggtgctgagtaggcagatcactagccccgtgtctgggattaacggcgatatcagagccaagaaaattgcatccatcgctgacgtctgcgaaagcatgaaggagcagctgctggtgctggtggagtgggccaaatacatccctgcattttgcgaactgccactggacgatcaggtcgctctgctgcgggcccacgcaggagagcatctgctgctgggcgctaccaagcgatcaatggtgttcaaggacgtgctgctgctggggaatgactatattgtccccaggcactgccctgaactggccgagatgagtagagtgtctatccgcatcctggatgaactggtgctgccattccaggagctgcagattgacgataacgaatacgcatacctgaaagctatcatctttttcgaccccgacgccaagggactgtccgatcctggcaaaattaagcggctgaggagccaggtccaggtgagcctggaggactatatcaatgacagacagtacgattcccgagggcggtttggagaactgctgctgctgctgccaacactgcagtcaattacctggcagatgatcgagcagatccagttcattaaactgttcggcatggcaaagatcgacaacctgctgcaggagatgctgctgggagggtctcccagtgatgcccctcatgctcaccacccactgcatccccacctgatgcaggaacatatgggcactaatgtgatcgtcgcaaacacaatgcctacccacctgagcaatggacagatgtgtgagtggccacgccccaggggccaggccgcaactcctgaaaccccacagccctcccctccagggggatctggcagcgagccctacaagctgctgcctggagctgtggcaacaattgtgagaccactgtcagccatcccccagcctaccattactaaacaggaagtcatctgaggactagttataagactgactagcccgatgggcctcccaacgggccctcctcccctccttgcaccgagattaataaaaaaaaaaaaaaaaaaaaaaaaaaaaaaaaaaaaaaaaaaaaaaaaaaaaaaaaaaaaaaaatgcatcccccccccccccccccccccccccccccccaaaggctcttttcagagccaccagaatt

SEQ ID NO: 2828 - RNA, 1531 nt, synthetic construct
  misc_feature 1..1531: note = mRNA i-3 (A64-N5-C30-hSL-N5) (opt28) from Homo sapiens__NP_000448.3__HNF4A(39-474)(K106R_K108R_K126R_K127R )
  source 1..1531: mol_type = other RNA
aggagaaagcttaccatggacacatctccctcagagggcactaacctgaatgcccctaacagtctgggggtgagcgctctgtgcgcaatctgcggagacagggccaccggcaaacactacggggcttcctcttgtgatggatgcaagggctttttcagacgcagcgtccggaaaaatcatatgtactcatgccgatttagtaggcagtgcgtggtggacagagaccgccggaaccagtgcaggtattgtagactgaagaagtgcttccgagcaggaatgcggcgcgaagccgtccagaatgagagggatagaatttccacacggcgaagctcttacgaagacagctccctgccatcaatcaacgctctgctgcaggcagaggtgctgagtaggcagatcactagccccgtgtctgggattaacggcgatatcagagccaaaaagattgcatccatcgctgacgtctgcgaaagcatgaaagagcagctgctggtgctggtggagtgggccaagtacatccctgcattttgcgaactgccactggacgatcaggtcgctctgctgcgcgcccacgcaggagagcatctgctgctgggcgctaccaagcggtcaatggtgttcaaagacgtgctgctgctggggaatgactatattgtccccaggcactgccctgaactggccgagatgagtagagtgtctatccgaatcctggatgaactggtgctgccattccaggagctgcagattgacgataacgaatacgcatacctgaaggctatcatctttttcgaccccgacgccaaaggactgtccgatcctggcaagattaagcggctgcgcagccaggtccaggtgagcctggaggactatatcaatgacaggcagtacgattccagagggcggtttggagaactgctgctgctgctgccaacactgcagtcaattacctggcagatgatcgagcagatccagttcattaaactgttcggcatggcaaagatcgacaacctgctgcaggagatgctgctgggagggtctcccagtgatgcccctcatgctcaccacccactgcatccccacctgatgcaggaacatatgggcactaatgtgatcgtcgcaaacacaatgcctacccacctgagcaatggacagatgtgtgagtggccacgccccaggggccaggccgcaactcctgaaaccccacagccctcccctccagggggatctggcagcgagccctacaaactgctgcctggagctgtggcaacaattgtgaagccactgtcagccatcccccagcctaccattactaaacaggaagtcatctgaggactagttataagactgactagcccgatgggcctcccaacgggccctcctcccctccttgcaccgagattaataaaaaaaaaaaaaaaaaaaaaaaaaaaaaaaaaaaaaaaaaaaaaaaaaaaaaaaaaaaaaaaatgcatcccccccccccccccccccccccccccccccaaaggctcttttcagagccaccagaatt

SEQ ID NO: 2829 - RNA, 1531 nt, synthetic construct
  misc_feature 1..1531: note = mRNA i-3 (A64-N5-C30-hSL-N5) (opt28) from Homo sapiens__NP_000448.3__HNF4A(39-474)(E285Q)
  source 1..1531: mol_type = other RNA
aggagaaagcttaccatggacacatctccctcagagggcactaacctgaatgcccctaacagtctgggggtgagcgctctgtgcgcaatctgcggagacagggccaccggcaaacactacggggcttcctcttgtgatggatgcaagggctttttcagacgcagcgtccggaaaaatcatatgtactcatgccgatttagtaggcagtgcgtggtggacaaggacaagagaaaccagtgccgctattgtcggctgaaaaagtgcttcagggcaggaatgaaaaaggaagccgtccagaatgagagagatcgaatttccacacggcgcagctcttacgaagacagctccctgccatcaatcaacgctctgctgcaggcagaggtgctgagtaggcagatcactagccccgtgtctgggattaacggcgatatcagagccaagaaaattgcatccatcgctgacgtctgcgaaagcatgaaggagcagctgctggtgctggtggagtgggccaaatacatccctgcattttgcgaactgccactggacgatcaggtcgctctgctgcgggcccacgcaggagagcatctgctgctgggcgctaccaagcgatcaatggtgttcaaggacgtgctgctgctggggaatgactatattgtccccaggcactgccctgaactggccgagatgagtagagtgtctatccgcatcctggatgaactggtgctgccattccaggagctgcagattgacgataaccagtacgcatacctgaaagctatcatctttttcgaccccgacgccaagggactgtccgatcctggcaaaattaagcggctgaggagccaggtccaggtgagcctggaagactatatcaatgacagacagtacgattcccgagggcggtttggagagctgctgctgctgctgccaacactgcagtcaattacctggcagatgatcgaacagatccagttcattaaactgttcggcatggcaaagatcgacaacctgctgcaggagatgctgctgggagggtctcccagtgatgcccctcatgctcaccacccactgcatccccacctgatgcaggagcatatgggcactaatgtgatcgtcgcaaacacaatgcctacccacctgagcaatggacagatgtgtgaatggccacgccccaggggccaggccgcaactcctgagaccccacagccctcccctccagggggatctggcagcgaaccctacaagctgctgcctggagctgtggcaacaattgtgaaaccactgtcagccatcccccagcctaccattactaagcaggaggtcatctgaggactagttataagactgactagcccgatgggcctcccaacgggccctcctcccctccttgcaccgagattaataaaaaaaaaaaaaaaaaaaaaaaaaaaaaaaaaaaaaaaaaaaaaaaaaaaaaaaaaaaaaaaatgcatcccccccccccccccccccccccccccccccaaaggctcttttcagagccaccagaatt

SEQ ID NO: 2830 - RNA, 1531 nt, synthetic construct
  misc_feature 1..1531: note = mRNA i-3 (A64-N5-C30-hSL-N5) (opt28) from Homo sapiens__NP_000448.3__HNF4A(39-474)(T166E)
  source 1..1531: mol_type = other RNA
aggagaaagcttaccatggacacatctccctcagagggcactaacctgaatgcccctaacagtctgggggtgagcgctctgtgcgcaatctgcggagacagggccaccggcaaacactacggggcttcctcttgtgatggatgcaagggctttttcagacgcagcgtccggaaaaatcatatgtactcatgccgatttagtaggcagtgcgtggtggacaaggacaagagaaaccagtgccgctattgtcggctgaaaaagtgcttcagggcaggaatgaaaaaggaagccgtccagaatgagagagatcgaatttccacacggcgcagctcttacgaagacagctccctgccatcaatcaacgctctgctgcaggcagaggtgctgagtaggcagatcgaaagccccgtgtctgggattaacggcgatatcagagccaagaaaattgcatccatcgctgacgtctgcgagagcatgaaggagcagctgctggtgctggtggaatgggccaaatacatccctgcattttgcgagctgccactggacgatcaggtcgctctgctgcgggcccacgcaggagaacatctgctgctgggcgctactaagcgatcaatggtgttcaaggacgtgctgctgctggggaatgactatattgtccccaggcactgccctgagctggccgaaatgagtagagtgtctatccgcatcctggatgagctggtgctgccattccaggaactgcagattgacgataacgagtacgcatacctgaaagctatcatctttttcgaccccgacgccaagggactgtccgatcctggcaaaattaagcggctgaggagccaggtccaggtgagcctggaagactatatcaatgacagacagtacgattcccgagggcggtttggagagctgctgctgctgctgccaaccctgcagtcaattacatggcagatgatcgagcagatccagttcattaaactgttcggcatggcaaagatcgacaacctgctgcaggaaatgctgctgggagggtctcccagtgatgcccctcatgctcaccacccactgcatccccacctgatgcaggagcatatgggcaccaatgtgatcgtcgcaaacactatgcctacacacctgagcaatggacagatgtgtgaatggccacgccccaggggccaggccgcaacccctgagactccacagccctcccctccagggggatctggcagcgaaccctacaagctgctgcctggagctgtggcaaccattgtgaaaccactgtcagccatcccccagcctacaattaccaagcaggaggtcatctgaggactagttataagactgactagcccgatgggcctcccaacgggccctcctcccctccttgcaccgagattaataaaaaaaaaaaaaaaaaaaaaaaaaaaaaaaaaaaaaaaaaaaaaaaaaaaaaaaaaaaaaaaatgcatcccccccccccccccccccccccccccccccaaaggctcttttcagagccaccagaatt

SEQ ID NO: 2831 - RNA, 1531 nt, synthetic construct
  misc_feature 1..1531: note = mRNA i-3 (A64-N5-C30-hSL-N5) (opt28) from Homo sapiens__NP_000448.3__HNF4A(39-474)(S148A)
  source 1..1531: mol_type = other RNA
aggagaaagcttaccatggacacatctccctcagagggcactaacctgaatgcccctaacagtctgggggtgagcgctctgtgcgcaatctgcggagacagggccaccggcaaacactacggggcttcctcttgtgatggatgcaagggctttttcagacgcagcgtccggaaaaatcatatgtactcatgccgatttagtaggcagtgcgtggtggacaaggacaagagaaaccagtgccgctattgtcggctgaaaaagtgcttcagggcaggaatgaaaaaggaagccgtccagaatgagagagatcgaatttccacacggcgcagctcttacgaagacagcgctctgccatccatcaacgcactgctgcaggccgaggtgctgtcaaggcagatcaccagtcccgtgagcgggattaacggcgatatcagagcaaagaaaattgcttctatcgccgacgtctgcgaatccatgaaggagcagctgctggtgctggtggagtgggcaaaatacatccctgctttttgcgaactgccactggacgatcaggtcgccctgctgcgggcacacgctggagagcatctgctgctgggcgccactaagcgaagcatggtgttcaaggacgtgctgctgctggggaatgactatattgtccccaggcactgccctgaactggcagagatgtcaagagtgagtatccgcatcctggatgaactggtgctgccattccaggagctgcagattgacgataacgaatacgcttacctgaaagccatcatctttttcgaccccgacgcaaagggactgtctgatcctggcaaaattaagcggctgaggtcccaggtccaggtgagcctggaggactatatcaatgacagacagtacgatagccgagggcggtttggagaactgctgctgctgctgccaacactgcagtccattacctggcagatgatcgagcagatccagttcattaaactgttcggcatggccaagatcgacaacctgctgcaggagatgctgctgggagggtcaccctctgatgctcctcatgcacaccacccactgcatccccacctgatgcaggaacatatgggcactaatgtgatcgtcgccaacacaatgcctacccacctgagtaatggacagatgtgtgagtggccacgccccaggggccaggcagctactcctgaaaccccacagcccagccctccagggggatccggctctgagccctacaagctgctgcctggagcagtggccacaattgtgaaaccactgagcgctatcccccagcctaccattactaagcaggaagtcatctgaggactagttataagactgactagcccgatgggcctcccaacgggccctcctcccctccttgcaccgagattaataaaaaaaaaaaaaaaaaaaaaaaaaaaaaaaaaaaaaaaaaaaaaaaaaaaaaaaaaaaaaaaatgcatcccccccccccccccccccccccccccccccaaaggctcttttcagagccaccagaatt

SEQ ID NO: 2832 - RNA, 1531 nt, synthetic construct
  misc_feature 1..1531: note = mRNA i-3 (A64-N5-C30-hSL-N5) (opt28) from Homo sapiens__NP_000448.3__HNF4A(39-474)(S148E)
  source 1..1531: mol_type = other RNA
aggagaaagcttaccatggacacatctccctcagagggcactaacctgaatgcccctaacagtctgggggtgagcgctctgtgcgcaatctgcggagacagggccaccggcaaacactacggggcttcctcttgtgatggatgcaagggctttttcagacgcagcgtccggaaaaatcatatgtactcatgccgatttagtaggcagtgcgtggtggacaaggacaagagaaaccagtgccgctattgtcggctgaaaaagtgcttcagggcaggaatgaaaaaggaagccgtccagaatgagagagatcgaatttccacacggcgcagctcttacgaagacagcgagctgccatccatcaacgctctgctgcaggcagaagtgctgtcaaggcagatcaccagtcccgtgagcgggattaacggcgatatcagagccaagaaaattgcatctatcgctgacgtctgcgagtccatgaaggagcagctgctggtgctggtggaatgggccaaatacatccctgcattttgcgagctgccactggacgatcaggtcgctctgctgcgggcccacgcaggagaacatctgctgctgggcgctactaagcgaagcatggtgttcaaggacgtgctgctgctggggaatgactatattgtccccaggcactgccctgagctggccgaaatgtcaagagtgagtatccgcatcctggatgagctggtgctgccattccaggaactgcagattgacgataacgagtacgcatacctgaaagctatcatctttttcgaccccgacgccaagggactgtctgatcctggcaaaattaagcggctgaggtcccaggtccaggtgagcctggaagactatatcaatgacagacagtacgatagccgagggcggtttggagagctgctgctgctgctgccaacactgcagtccattacctggcagatgatcgagcagatccagttcattaaactgttcggcatggcaaagatcgacaacctgctgcaggaaatgctgctgggagggtcaccctctgatgcccctcatgctcaccacccactgcatccccacctgatgcaggagcatatgggcactaatgtgatcgtcgcaaacacaatgcctacccacctgagtaatggacagatgtgtgaatggccacgccccaggggccaggccgcaactcctgagaccccacagcccagccctccagggggatccggctctgaaccctacaagctgctgcctggagctgtggcaacaattgtgaaaccactgagcgccatcccccagcctaccattactaagcaggaggtcatctgaggactagttataagactgactagcccgatgggcctcccaacgggccctcctcccctccttgcaccgagattaataaaaaaaaaaaaaaaaaaaaaaaaaaaaaaaaaaaaaaaaaaaaaaaaaaaaaaaaaaaaaaaatgcatcccccccccccccccccccccccccccccccaaaggctcttttcagagccaccagaatt

SEQ ID NO: 2833 - RNA, 1531 nt, synthetic construct
  misc_feature 1..1531: note = mRNA i-3 (A64-N5-C30-hSL-N5) (opt28) from Homo sapiens__NP_000448.3__HNF4A(39-474)(S183A)
  source 1..1531: mol_type = other RNA
aggagaaagcttaccatggacacatctccctcagagggcactaacctgaatgcccctaacagtctgggggtgagcgctctgtgcgcaatctgcggagacagggccaccggcaaacactacggggcttcctcttgtgatggatgcaagggctttttcagacgcagcgtccggaaaaatcatatgtactcatgccgatttagtaggcagtgcgtggtggacaaggacaagagaaaccagtgccgctattgtcggctgaaaaagtgcttcagggcaggaatgaaaaaggaagccgtccagaatgagagagatcgaatttccacacggcgcagctcttacgaagacagctccctgccatcaatcaacgctctgctgcaggcagaggtgctgagtaggcagatcactagccccgtgtctgggattaacggcgatatcagagccaagaaaattgcagctatcgccgacgtctgcgaatccatgaaggagcagctgctggtgctggtggagtgggcaaaatacatccctgctttttgcgaactgccactggacgatcaggtcgccctgctgcgggcacacgctggagagcatctgctgctgggcgccaccaagcgaagcatggtgttcaaggacgtgctgctgctggggaatgactatattgtccccaggcactgccctgaactggcagagatgtcaagagtgagtatccgcatcctggatgaactggtgctgccattccaggagctgcagattgacgataacgaatacgcttacctgaaagccatcatctttttcgaccccgacgcaaagggactgtctgatcctggcaaaattaagcggctgaggtcccaggtccaggtgagcctggaggactatatcaatgacagacagtacgatagccgagggcggtttggagaactgctgctgctgctgccaacactgcagtccattacctggcagatgatcgagcagatccagttcattaaactgttcggcatggccaagatcgacaacctgctgcaggagatgctgctgggagggtcaccctctgatgctcctcatgcacaccacccactgcatccccacctgatgcaggaacatatgggcactaatgtgatcgtcgccaacacaatgcctacccacctgagtaatggacagatgtgtgagtggccacgccccaggggccaggcagctactcctgaaaccccacagcccagccctccagggggatccggctctgagccctacaagctgctgcctggagcagtggccacaattgtgaaaccactgagcgctatcccccagcctaccattactaagcaggaagtcatctgaggactagttataagactgactagcccgatgggcctcccaacgggccctcctcccctccttgcaccgagattaataaaaaaaaaaaaaaaaaaaaaaaaaaaaaaaaaaaaaaaaaaaaaaaaaaaaaaaaaaaaaaaatgcatcccccccccccccccccccccccccccccccaaaggctcttttcagagccaccagaatt

SEQ ID NO: 2834 - RNA, 1531 nt, synthetic construct
  misc_feature 1..1531: note = mRNA i-3 (A64-N5-C30-hSL-N5) (opt28) from Homo sapiens__NP_000448.3__HNF4A(39-474)(S183E)
  source 1..1531: mol_type = other RNA
aggagaaagcttaccatggacacatctccctcagagggcactaacctgaatgcccctaacagtctgggggtgagcgctctgtgcgcaatctgcggagacagggccaccggcaaacactacggggcttcctcttgtgatggatgcaagggctttttcagacgcagcgtccggaaaaatcatatgtactcatgccgatttagtaggcagtgcgtggtggacaaggacaagagaaaccagtgccgctattgtcggctgaaaaagtgcttcagggcaggaatgaaaaaggaagccgtccagaatgagagagatcgaatttccacacggcgcagctcttacgaagacagctccctgccatcaatcaacgctctgctgcaggcagaggtgctgagtaggcagatcactagccccgtgtctgggattaacggcgatatcagagccaagaaaattgcagaaatcgctgacgtctgcgagtccatgaaggagcagctgctggtgctggtggaatgggccaaatacatccctgcattttgcgagctgccactggacgatcaggtcgctctgctgcgggcccacgcaggagaacatctgctgctgggcgctaccaagcgaagcatggtgttcaaggacgtgctgctgctggggaatgactatattgtccccaggcactgccctgagctggccgaaatgtcaagagtgagtatccgcatcctggatgagctggtgctgccattccaggaactgcagattgacgataacgagtacgcatacctgaaagctatcatctttttcgaccccgacgccaagggactgtctgatcctggcaaaattaagcggctgaggtcccaggtccaggtgagcctggaagactatatcaatgacagacagtacgatagccgagggcggtttggagagctgctgctgctgctgccaacactgcagtccattacctggcagatgatcgagcagatccagttcattaaactgttcggcatggcaaagatcgacaacctgctgcaggaaatgctgctgggagggtcaccctctgatgcccctcatgctcaccacccactgcatccccacctgatgcaggagcatatgggcactaatgtgatcgtcgcaaacacaatgcctacccacctgagtaatggacagatgtgtgaatggccacgccccaggggccaggccgcaactcctgagaccccacagcccagccctccagggggatccggctctgaaccctacaagctgctgcctggagctgtggcaacaattgtgaaaccactgagcgccatcccccagcctaccattactaagcaggaggtcatctgaggactagttataagactgactagcccgatgggcctcccaacgggccctcctcccctccttgcaccgagattaataaaaaaaaaaaaaaaaaaaaaaaaaaaaaaaaaaaaaaaaaaaaaaaaaaaaaaaaaaaaaaaatgcatcccccccccccccccccccccccccccccccaaaggctcttttcagagccaccagaatt

SEQ ID NO: 2835 - RNA, 1531 nt, synthetic construct
  misc_feature 1..1531: note = mRNA i-3 (A64-N5-C30-hSL-N5) (opt28) from Homo sapiens__NP_000448.3__HNF4A(39-474)(S461A)
  source 1..1531: mol_type = other RNA
aggagaaagcttaccatggacacatctccctcagagggcactaacctgaatgcccctaacagtctgggggtgagcgctctgtgcgcaatctgcggagacagggccaccggcaaacactacggggcttcctcttgtgatggatgcaagggctttttcagacgcagcgtccggaaaaatcatatgtactcatgccgatttagtaggcagtgcgtggtggacaaggacaagagaaaccagtgccgctattgtcggctgaaaaagtgcttcagggcaggaatgaaaaaggaagccgtccagaatgagagagatcgaatttccacacggcgcagctcttacgaagacagctccctgccatcaatcaacgctctgctgcaggcagaggtgctgagtaggcagatcactagccccgtgtctgggattaacggcgatatcagagccaagaaaattgcatccatcgctgacgtctgcgaaagcatgaaggagcagctgctggtgctggtggagtgggccaaatacatccctgcattttgcgaactgccactggacgatcaggtcgctctgctgcgggcccacgcaggagagcatctgctgctgggcgctaccaagcgatcaatggtgttcaaggacgtgctgctgctggggaatgactatattgtccccaggcactgccctgaactggccgagatgagtagagtgtctatccgcatcctggatgaactggtgctgccattccaggagctgcagattgacgataacgaatacgcatacctgaaagctatcatctttttcgaccccgacgccaagggactgtccgatcctggcaaaattaagcggctgaggagccaggtccaggtgagcctggaggactatatcaatgacagacagtacgattcccgagggcggtttggagaactgctgctgctgctgccaacactgcagtcaattacctggcagatgatcgagcagatccagttcattaaactgttcggcatggcaaagatcgacaacctgctgcaggagatgctgctgggagggtctcccagtgatgcccctcatgctcaccacccactgcatccccacctgatgcaggaacatatgggcactaatgtgatcgtcgcaaacacaatgcctacccacctgagcaatggacagatgtgtgagtggccacgccccaggggccaggccgcaactcctgaaaccccacagccctcccctccagggggatctggcagcgagccctacaagctgctgcctggagctgtggcaacaattgtgaaaccactggccgctatcccccagcctaccattactaagcaggaagtcatctgaggactagttataagactgactagcccgatgggcctcccaacgggccctcctcccctccttgcaccgagattaataaaaaaaaaaaaaaaaaaaaaaaaaaaaaaaaaaaaaaaaaaaaaaaaaaaaaaaaaaaaaaaatgcatcccccccccccccccccccccccccccccccaaaggctcttttcagagccaccagaatt

SEQ ID NO: 2836 - RNA, 1531 nt, synthetic construct
  misc_feature 1..1531: note = mRNA i-3 (A64-N5-C30-hSL-N5) (opt28) from Homo sapiens__NP_000448.3__HNF4A(39-474)(S461E)
  source 1..1531: mol_type = other RNA
aggagaaagcttaccatggacacatctccctcagagggcactaacctgaatgcccctaacagtctgggggtgagcgctctgtgcgcaatctgcggagacagggccaccggcaaacactacggggcttcctcttgtgatggatgcaagggctttttcagacgcagcgtccggaaaaatcatatgtactcatgccgatttagtaggcagtgcgtggtggacaaggacaagagaaaccagtgccgctattgtcggctgaaaaagtgcttcagggcaggaatgaaaaaggaagccgtccagaatgagagagatcgaatttccacacggcgcagctcttacgaagacagctccctgccatcaatcaacgctctgctgcaggcagaggtgctgagtaggcagatcactagccccgtgtctgggattaacggcgatatcagagccaagaaaattgcatccatcgctgacgtctgcgaaagcatgaaggagcagctgctggtgctggtggagtgggccaaatacatccctgcattttgcgaactgccactggacgatcaggtcgctctgctgcgggcccacgcaggagagcatctgctgctgggcgctaccaagcgatcaatggtgttcaaggacgtgctgctgctggggaatgactatattgtccccaggcactgccctgaactggccgagatgagtagagtgtctatccgcatcctggatgaactggtgctgccattccaggagctgcagattgacgataacgaatacgcatacctgaaagctatcatctttttcgaccccgacgccaagggactgtccgatcctggcaaaattaagcggctgaggagccaggtccaggtgagcctggaggactatatcaatgacagacagtacgattcccgagggcggtttggagaactgctgctgctgctgccaacactgcagtcaattacctggcagatgatcgagcagatccagttcattaaactgttcggcatggcaaagatcgacaacctgctgcaggagatgctgctgggagggtctcccagtgatgcccctcatgctcaccacccactgcatccccacctgatgcaggaacatatgggcactaatgtgatcgtcgcaaacacaatgcctacccacctgagcaatggacagatgtgtgagtggccacgccccaggggccaggccgcaactcctgaaaccccacagccctcccctccagggggatctggcagcgagccctacaagctgctgcctggagctgtggcaacaattgtgaaaccactggaagccatcccccagcctaccattactaagcaggaggtcatctgaggactagttataagactgactagcccgatgggcctcccaacgggccctcctcccctccttgcaccgagattaataaaaaaaaaaaaaaaaaaaaaaaaaaaaaaaaaaaaaaaaaaaaaaaaaaaaaaaaaaaaaaaatgcatcccccccccccccccccccccccccccccccaaaggctcttttcagagccaccagaatt

SEQ ID NO: 2837 - RNA, 1531 nt, synthetic construct
  misc_feature 1..1531: note = mRNA i-3 (A64-N5-C30-hSL-N5) (opt28) from Homo sapiens__NP_000448.3__HNF4A(39-474)(S142A_S143A_S313A)
  source 1..1531: mol_type = other RNA
aggagaaagcttaccatggacacatctccctcagagggcactaacctgaatgcccctaacagtctgggggtgagcgctctgtgcgcaatctgcggagacagggccaccggcaaacactacggggcttcctcttgtgatggatgcaagggctttttcagacgcagcgtccggaaaaatcatatgtactcatgccgatttagtaggcagtgcgtggtggacaaggacaagagaaaccagtgccgctattgtcggctgaaaaagtgcttcagggcaggaatgaaaaaggaagccgtccagaatgagagagatcgaatttccacacggcgcgctgcatacgaagacagctctctgccaagcatcaacgccctgctgcaggcagaggtgctgtccaggcagatcacttcacccgtgagtgggattaacggcgatatcagagctaagaaaattgccagcatcgcagacgtctgcgaatctatgaaggagcagctgctggtgctggtggagtgggctaaatacatccctgccttttgcgaactgccactggacgatcaggtcgcactgctgcgggctcacgccggagagcatctgctgctgggcgcaaccaagcgatccatggtgttcaaggacgtgctgctgctggggaatgactatattgtccccaggcactgccctgaactggctgagatgagcagagtgtcaatccgcatcctggatgaactggtgctgccattccaggagctgcagattgacgataacgaatacgcctacctgaaagcaatcatctttttcgaccccgacgccaagggactgagtgatcctggcaaaattaagcggctgagggctcaggtccaggtgtctctggaggactatatcaatgacagacagtacgattcccgagggcggtttggagaactgctgctgctgctgccaacactgcagagcattacctggcagatgatcgagcagatccagttcattaaactgttcggcatggcaaagatcgacaacctgctgcaggagatgctgctgggagggagcccctccgatgcccctcatgcacaccacccactgcatccccacctgatgcaggaacatatgggcactaatgtgatcgtcgctaacacaatgcctacccacctgtcaaatggacagatgtgtgagtggccacgccccaggggccaggcagccactcctgaaaccccacagccctctcctccagggggaagtggcagcgagccctacaagctgctgcctggagctgtggcaacaattgtgaaaccactgtccgccatcccccagcctaccattactaagcaggaagtcatctgaggactagttataagactgactagcccgatgggcctcccaacgggccctcctcccctccttgcaccgagattaataaaaaaaaaaaaaaaaaaaaaaaaaaaaaaaaaaaaaaaaaaaaaaaaaaaaaaaaaaaaaaaatgcatcccccccccccccccccccccccccccccccaaaggctcttttcagagccaccagaatt

SEQ ID NO: 2838 - RNA, 1531 nt, synthetic construct
  misc_feature 1..1531: note = mRNA i-3 (A64-N5-C30-hSL-N5) (opt28) from Homo sapiens__NP_000448.3__HNF4A(39-474)(S142A_S143A_S313A_K458R )
  source 1..1531: mol_type = other RNA
aggagaaagcttaccatggacacatctccctcagagggcactaacctgaatgcccctaacagtctgggggtgagcgctctgtgcgcaatctgcggagacagggccaccggcaaacactacggggcttcctcttgtgatggatgcaagggctttttcagacgcagcgtccggaaaaatcatatgtactcatgccgatttagtaggcagtgcgtggtggacaaggacaagagaaaccagtgccgctattgtcggctgaaaaagtgcttcagggcaggaatgaaaaaggaagccgtccagaatgagagagatcgaatttccacacggcgcgctgcatacgaagacagctctctgccaagcatcaacgccctgctgcaggcagaggtgctgtccaggcagatcacttcacccgtgagtgggattaacggcgatatcagagctaagaaaattgccagcatcgcagacgtctgcgaatctatgaaggagcagctgctggtgctggtggagtgggctaaatacatccctgccttttgcgaactgccactggacgatcaggtcgcactgctgcgggctcacgccggagagcatctgctgctgggcgcaaccaagcgatccatggtgttcaaggacgtgctgctgctggggaatgactatattgtccccaggcactgccctgaactggctgagatgagcagagtgtcaatccgcatcctggatgaactggtgctgccattccaggagctgcagattgacgataacgaatacgcctacctgaaagcaatcatctttttcgaccccgacgccaagggactgagtgatcctggcaaaattaagcggctgagggctcaggtccaggtgtctctggaggactatatcaatgacagacagtacgattcccgagggcggtttggagaactgctgctgctgctgccaacactgcagagcattacctggcagatgatcgagcagatccagttcattaaactgttcggcatggcaaagatcgacaacctgctgcaggagatgctgctgggagggagcccctccgatgcccctcatgcacaccacccactgcatccccacctgatgcaggaacatatgggcactaatgtgatcgtcgctaacacaatgcctacccacctgtcaaatggacagatgtgtgagtggccacgccccaggggccaggcagccactcctgaaaccccacagccctctcctccagggggaagtggcagcgagccctacaagctgctgcctggagctgtggcaacaattgtgagaccactgtccgccatcccccagcctaccattactaaacaggaagtcatctgaggactagttataagactgactagcccgatgggcctcccaacgggccctcctcccctccttgcaccgagattaataaaaaaaaaaaaaaaaaaaaaaaaaaaaaaaaaaaaaaaaaaaaaaaaaaaaaaaaaaaaaaaatgcatcccccccccccccccccccccccccccccccaaaggctcttttcagagccaccagaatt

SEQ ID NO: 2839 - RNA, 1531 nt, synthetic construct
  misc_feature 1..1531: note = mRNA i-3 (A64-N5-C30-hSL-N5) (opt28) from Homo sapiens__NP_000448.3__HNF4A(39-474)(S142A_S143A_S167A_S313A _S378A_T429A_T432A_S436A_K458R)
  source 1..1531: mol_type = other RNA
aggagaaagcttaccatggacacatctccctcagagggcactaacctgaatgcccctaacagtctgggggtgagcgctctgtgcgcaatctgcggagacagggccaccggcaaacactacggggcttcctcttgtgatggatgcaagggctttttcagacgcagcgtccggaaaaatcatatgtactcatgccgatttagtaggcagtgcgtggtggacaaggacaagagaaaccagtgccgctattgtcggctgaaaaagtgcttcagggcaggaatgaaaaaggaagccgtccagaatgagagagatcgaatttccacacggcgcgctgcatacgaagacagctctctgccaagcatcaacgccctgctgcaggcagaggtgctgtccaggcagatcactgctcccgtgtcagggattaacggcgatatcagagccaagaaaattgcaagtatcgctgacgtctgcgaaagcatgaaggagcagctgctggtgctggtggagtgggccaaatacatccctgcattttgcgaactgccactggacgatcaggtcgctctgctgcgggcccacgcaggagagcatctgctgctgggcgctaccaagcgatctatggtgttcaaggacgtgctgctgctggggaatgactatattgtccccaggcactgccctgaactggccgagatgtccagagtgagcatccgcatcctggatgaactggtgctgccattccaggagctgcagattgacgataacgaatacgcatacctgaaagccatcatctttttcgaccccgacgctaagggactgtcagatcctggcaaaattaagcggctgagggcacaggtccaggtgagtctggaggactatatcaatgacagacagtacgattctcgagggcggtttggagaactgctgctgctgctgccaacactgcagtccattacctggcagatgatcgagcagatccagttcattaaactgttcggcatggccaagatcgacaacctgctgcaggagatgctgctgggaggggcacccagcgatgctcctcatgcacaccacccactgcatccccacctgatgcaggaacatatgggcactaatgtgatcgtcgccaacacaatgcctacccacctgagcaatggacagatgtgtgagtggccacgccccaggggccaggctgcagcccctgaagctccacagcccgcacctccagggggatccggctcagagccctacaagctgctgcctggagccgtggctactattgtgagaccactgtctgcaatcccccagcctaccattacaaaacaggaagtcatctgaggactagttataagactgactagcccgatgggcctcccaacgggccctcctcccctccttgcaccgagattaataaaaaaaaaaaaaaaaaaaaaaaaaaaaaaaaaaaaaaaaaaaaaaaaaaaaaaaaaaaaaaaatgcatcccccccccccccccccccccccccccccccaaaggctcttttcagagccaccagaatt

SEQ ID NO: 2840 - RNA, 1531 nt, synthetic construct
  misc_feature 1..1531: note = mRNA i-3 (A64-N5-C30-hSL-N5) (opt28) from Homo sapiens__NP_000448.3__HNF4A(39-474)(S142A_S143A_S148A_S167A _S313A_S378A_T429A_T432A_S436A_K458R)
  source 1..1531: mol_type = other RNA
aggagaaagcttaccatggacacatctccctcagagggcactaacctgaatgcccctaacagtctgggggtgagcgctctgtgcgcaatctgcggagacagggccaccggcaaacactacggggcttcctcttgtgatggatgcaagggctttttcagacgcagcgtccggaaaaatcatatgtactcatgccgatttagtaggcagtgcgtggtggacaaggacaagagaaaccagtgccgctattgtcggctgaaaaagtgcttcagggcaggaatgaaaaaggaagccgtccagaatgagagagatcgaatttccacacggcgcgctgcatacgaagacagcgccctgccatctatcaacgcactgctgcaggctgaggtgctgagcaggcagatcactgcccccgtgtccgggattaacggcgatatcagagcaaagaaaattgcttcaatcgccgacgtctgcgaaagtatgaaggagcagctgctggtgctggtggagtgggcaaaatacatccctgctttttgcgaactgccactggacgatcaggtcgccctgctgcgggcacacgctggagagcatctgctgctgggcgccaccaagcgaagcatggtgttcaaggacgtgctgctgctggggaatgactatattgtccccaggcactgccctgaactggcagagatgtctagagtgtccatccgcatcctggatgaactggtgctgccattccaggagctgcagattgacgataacgaatacgcctacctgaaagctatcatctttttcgaccccgacgcaaagggactgagcgatcctggcaaaattaagcggctgagggcccaggtccaggtgtcactggaggactatatcaatgacagacagtacgatagtcgagggcggtttggagaactgctgctgctgctgccaacactgcagtctattacctggcagatgatcgagcagatccagttcattaaactgttcggcatggcaaagatcgacaacctgctgcaggagatgctgctgggaggggctccctccgatgcacctcatgcccaccacccactgcatccccacctgatgcaggaacatatgggcactaatgtgatcgtcgctaacacaatgcctacccacctgagcaatggacagatgtgtgagtggccacgccccaggggccaggcagccgctcctgaagcaccacagcccgcccctccagggggaagcggctccgagccctacaagctgctgcctggagctgtggcaactattgtgagaccactgtcagccatcccccagcctaccattacaaaacaggaagtcatctgaggactagttataagactgactagcccgatgggcctcccaacgggccctcctcccctccttgcaccgagattaataaaaaaaaaaaaaaaaaaaaaaaaaaaaaaaaaaaaaaaaaaaaaaaaaaaaaaaaaaaaaaaatgcatcccccccccccccccccccccccccccccccaaaggctcttttcagagccaccagaatt

SEQ ID NO: 2841 - RNA, 1531 nt, synthetic construct
  misc_feature 1..1531: note = mRNA i-3 (A64-N5-C30-hSL-N5) (opt28) from Homo sapiens__NP_000448.3__HNF4A(39-474)(K106R_K108R_K126R_K127R _S142A_S143A_S148A_S167A_S313A_S378A_T429A_T432A_S436A_K458 R)
  source 1..1531: mol_type = other RNA
aggagaaagcttaccatggacacatctccctcagagggcactaacctgaatgcccctaacagtctgggggtgagcgctctgtgcgcaatctgcggagacagggccaccggcaaacactacggggcttcctcttgtgatggatgcaagggctttttcagacgcagcgtccggaaaaatcatatgtactcatgccgatttagtaggcagtgcgtggtggacagagaccgccggaaccagtgcaggtattgtagactgaagaagtgcttccgagcaggaatgcggcgcgaagccgtccagaatgagagggatagaatttccacacggcgagctgcatacgaagacagcgccctgccatctatcaacgcactgctgcaggctgaggtgctgagcaggcagatcactgcccccgtgtccgggattaacggcgatatcagagctaaaaagattgcatcaatcgccgacgtctgcgaaagtatgaaagagcagctgctggtgctggtggagtgggcaaagtacatccctgctttttgcgaactgccactggacgatcaggtcgccctgctgcgcgcacacgctggagagcatctgctgctgggcgccaccaagcggagcatggtgttcaaagacgtgctgctgctggggaatgactatattgtccccaggcactgccctgaactggcagagatgtctagagtgtccatccgaatcctggatgaactggtgctgccattccaggagctgcagattgacgataacgaatacgcctacctgaaggctatcatctttttcgaccccgacgcaaaaggactgagcgatcctggcaagattaagcggctgcgcgcccaggtccaggtgtcactggaggactatatcaatgacaggcagtacgatagtagagggcggtttggagaactgctgctgctgctgccaacactgcagtctattacctggcagatgatcgagcagatccagttcattaaactgttcggcatggcaaagatcgacaacctgctgcaggagatgctgctgggaggggctccctccgatgcacctcatgcccaccacccactgcatccccacctgatgcaggaacatatgggcactaatgtgatcgtcgctaacacaatgcctacccacctgagcaatggacagatgtgtgagtggccacgccccaggggccaggcagccgctcctgaagcaccacagcccgcccctccagggggaagcggctccgagccctacaaactgctgcctggagctgtggcaactattgtgagaccactgtcagccatcccccagcctaccattacaaagcaggaagtcatctgaggactagttataagactgactagcccgatgggcctcccaacgggccctcctcccctccttgcaccgagattaataaaaaaaaaaaaaaaaaaaaaaaaaaaaaaaaaaaaaaaaaaaaaaaaaaaaaaaaaaaaaaaatgcatcccccccccccccccccccccccccccccccaaaggctcttttcagagccaccagaatt

SEQ ID NO: 2842 - RNA, 1531 nt, synthetic construct
  misc_feature 1..1531: note = mRNA i-3 (A64-N5-C30-hSL-N5) (opt28) from Homo sapiens__NP_000448.3__HNF4A(39-474)(S142A_S143A_S148A_T166A _S167A_S313A_S378A_T429A_T432A_S436A_K458R)
  source 1..1531: mol_type = other RNA
aggagaaagcttaccatggacacatctccctcagagggcactaacctgaatgcccctaacagtctgggggtgagcgctctgtgcgcaatctgcggagacagggccaccggcaaacactacggggcttcctcttgtgatggatgcaagggctttttcagacgcagcgtccggaaaaatcatatgtactcatgccgatttagtaggcagtgcgtggtggacaaggacaagagaaaccagtgccgctattgtcggctgaaaaagtgcttcagggcaggaatgaaaaaggaagccgtccagaatgagagagatcgaatttccacacggcgcgctgcatacgaagacagcgccctgccatctatcaacgcactgctgcaggctgaggtgctgagcaggcagatcgccgcacccgtgtccgggattaacggcgatatcagagctaagaaaattgcctcaatcgcagacgtctgcgaaagtatgaaggagcagctgctggtgctggtggagtgggctaaatacatccctgccttttgcgaactgccactggacgatcaggtcgcactgctgcgggctcacgccggagagcatctgctgctgggcgcaactaagcgaagcatggtgttcaaggacgtgctgctgctggggaatgactatattgtccccaggcactgccctgaactggccgagatgtctagagtgtccatccgcatcctggatgaactggtgctgccattccaggagctgcagattgacgataacgaatacgcttacctgaaagcaatcatctttttcgaccccgacgccaagggactgagcgatcctggcaaaattaagcggctgagggcacaggtccaggtgtcactggaggactatatcaatgacagacagtacgatagtcgagggcggtttggagaactgctgctgctgctgccaaccctgcagtctattacatggcagatgatcgagcagatccagttcattaaactgttcggcatggctaagatcgacaacctgctgcaggagatgctgctgggaggggcaccctccgatgcccctcatgctcaccacccactgcatccccacctgatgcaggaacatatgggcaccaatgtgatcgtcgcaaacactatgcctacacacctgagcaatggacagatgtgtgagtggccacgccccaggggccaggccgctgcacctgaagccccacagcccgctcctccagggggaagcggctccgagccctacaagctgctgcctggagcagtggccaccattgtgagaccactgtcagcaatcccccagcctactattaccaaacaggaagtcatctgaggactagttataagactgactagcccgatgggcctcccaacgggccctcctcccctccttgcaccgagattaataaaaaaaaaaaaaaaaaaaaaaaaaaaaaaaaaaaaaaaaaaaaaaaaaaaaaaaaaaaaaaaatgcatcccccccccccccccccccccccccccccccaaaggctcttttcagagccaccagaatt

SEQ ID NO: 2843 - RNA, 1531 nt, synthetic construct
  misc_feature 1..1531: note = mRNA i-3 (A64-N5-C30-hSL-N5) (opt28) from Homo sapiens__NP_000448.3__HNF4A(39-474)(S87A_S142A_S143A_S148A_ T166A_S167A_S313A_S378A_T429A_T432A_S436A_K458R)
  source 1..1531: mol_type = other RNA
aggagaaagcttaccatggacacatctccctcagagggcactaacctgaatgcccctaacagtctgggggtgagcgctctgtgcgcaatctgcggagacagggccaccggcaaacactacggggcttcctcttgtgatggatgcaagggctttttcagacgcgcagtccggaaaaatcatatgtacagctgccgattttcaaggcagtgcgtggtggacaaggacaagagaaaccagtgccgctattgtcggctgaaaaagtgcttcagggccggaatgaaaaaggaagctgtccagaatgagagagatcgaattagtacacggcgcgcagcctacgaagactccgcactgccaagcatcaacgctctgctgcaggccgaggtgctgtctaggcagatcgcagctcccgtgagcgggattaacggcgatatcagagccaagaaaattgcatccatcgctgacgtctgcgaatcaatgaaggagcagctgctggtgctggtggagtgggccaaatacatccctgcattttgcgaactgccactggacgatcaggtcgctctgctgcgggcccacgcaggagagcatctgctgctgggcgccactaagcgaagtatggtgttcaaggacgtgctgctgctggggaatgactatattgtccccaggcactgccctgaactggctgagatgagcagagtgtctatccgcatcctggatgaactggtgctgccattccaggagctgcagattgacgataacgaatacgcatacctgaaagccatcatctttttcgaccccgacgcaaagggactgtccgatcctggcaaaattaagcggctgagggctcaggtccaggtgagcctggaggactatatcaatgacagacagtacgattcacgagggcggtttggagaactgctgctgctgctgccaaccctgcagagtattacatggcagatgatcgagcagatccagttcattaaactgttcggcatggcaaagatcgacaacctgctgcaggagatgctgctgggaggggccccctctgatgctcctcatgcacaccacccactgcatccccacctgatgcaggaacatatgggcaccaatgtgatcgtcgccaacactatgcctacacacctgtccaatggacagatgtgtgagtggccacgccccaggggccaggctgcagcccctgaagctccacagcccgcacctccagggggaagcggcagcgagccctacaagctgctgcctggagccgtggcaaccattgtgagaccactgtccgctatcccccagcctactattaccaaacaggaagtcatctgaggactagttataagactgactagcccgatgggcctcccaacgggccctcctcccctccttgcaccgagattaataaaaaaaaaaaaaaaaaaaaaaaaaaaaaaaaaaaaaaaaaaaaaaaaaaaaaaaaaaaaaaaatgcatcccccccccccccccccccccccccccccccaaaggctcttttcagagccaccagaatt

SEQ ID NO: 2844 - RNA, 1531 nt, synthetic construct
  misc_feature 1..1531: note = mRNA i-3 (A64-N5-C30-hSL-N5) (opt28) from Homo sapiens__NP_000448.3__HNF4A(39-474)(S87A_K106R_K108R_K126R_ K127R_S142A_S143A_S148A_T166A_S167A_S313A_S378A_T429A_T432A _S436A_K458R)
  source 1..1531: mol_type = other RNA
aggagaaagcttaccatggacacatctccctcagagggcactaacctgaatgcccctaacagtctgggggtgagcgctctgtgcgcaatctgcggagacagggccaccggcaaacactacggggcttcctcttgtgatggatgcaagggctttttcagacgcgcagtccggaaaaatcatatgtacagctgccgattttcaaggcagtgcgtggtggacagagaccgccggaaccagtgcaggtattgtagactgaagaagtgcttccgagccggaatgcggcgcgaagctgtccagaatgagagggatagaattagtacacggcgagcagcctacgaagactccgcactgccaagcatcaacgctctgctgcaggccgaggtgctgtctaggcagatcgcagctcccgtgagcgggattaacggcgatatcagagccaaaaagattgcatccatcgctgacgtctgcgaatcaatgaaagagcagctgctggtgctggtggagtgggccaagtacatccctgcattttgcgaactgccactggacgatcaggtcgctctgctgcgcgcccacgcaggagagcatctgctgctgggcgccactaagcggagtatggtgttcaaagacgtgctgctgctggggaatgactatattgtccccaggcactgccctgaactggctgagatgagcagagtgtctatccgaatcctggatgaactggtgctgccattccaggagctgcagattgacgataacgaatacgcatacctgaaggccatcatctttttcgaccccgacgcaaaaggactgtccgatcctggcaagattaagcggctgcgcgctcaggtccaggtgagcctggaggactatatcaatgacaggcagtacgattcaagagggcggtttggagaactgctgctgctgctgccaaccctgcagagtattacatggcagatgatcgagcagatccagttcattaaactgttcggcatggcaaagatcgacaacctgctgcaggagatgctgctgggaggggccccctctgatgctcctcatgcacaccacccactgcatccccacctgatgcaggaacatatgggcaccaatgtgatcgtcgccaacactatgcctacacacctgtccaatggacagatgtgtgagtggccacgccccaggggccaggctgcagcccctgaagctccacagcccgcacctccagggggaagcggcagcgagccctacaaactgctgcctggagccgtggcaaccattgtgagaccactgtccgctatcccccagcctactattaccaagcaggaagtcatctgaggactagttataagactgactagcccgatgggcctcccaacgggccctcctcccctccttgcaccgagattaataaaaaaaaaaaaaaaaaaaaaaaaaaaaaaaaaaaaaaaaaaaaaaaaaaaaaaaaaaaaaaaatgcatcccccccccccccccccccccccccccccccaaaggctcttttcagagccaccagaatt

SEQ ID NO: 2845 - RNA, 1531 nt, synthetic construct
  misc_feature 1..1531: note = mRNA i-3 (A64-N5-C30-hSL-N5) (opt28) from Homo sapiens__NP_000448.3__HNF4A(39-474)(S87A_K106R_K108R_K126R_ K127R)
  source 1..1531: mol_type = other RNA
aggagaaagcttaccatggacacatctccctcagagggcactaacctgaatgcccctaacagtctgggggtgagcgctctgtgcgcaatctgcggagacagggccaccggcaaacactacggggcttcctcttgtgatggatgcaagggctttttcagacgcgcagtccggaaaaatcatatgtacagctgccgattttcaaggcagtgcgtggtggacagagaccgccggaaccagtgcaggtattgtagactgaagaagtgcttccgagccggaatgcggcgcgaagctgtccagaatgagagggatagaattagtacacggcgatccagctacgaagactctagcctgccatccatcaacgcactgctgcaggccgaggtgctgtcaaggcagatcaccagtcccgtgagcgggattaacggcgatatcagagctaaaaagattgcatctatcgccgacgtctgcgaatccatgaaagagcagctgctggtgctggtggagtgggcaaagtacatccctgctttttgcgaactgccactggacgatcaggtcgccctgctgcgcgcacacgctggagagcatctgctgctgggcgccactaagcggagcatggtgttcaaagacgtgctgctgctggggaatgactatattgtccccaggcactgccctgaactggcagagatgtcaagagtgagtatccgaatcctggatgaactggtgctgccattccaggagctgcagattgacgataacgaatacgcttacctgaaggccatcatctttttcgaccccgacgcaaaaggactgtctgatcctggcaagattaagcggctgcgctcccaggtccaggtgagcctggaggactatatcaatgacaggcagtacgatagcagagggcggtttggagaactgctgctgctgctgccaacactgcagtccattacctggcagatgatcgagcagatccagttcattaaactgttcggcatggccaagatcgacaacctgctgcaggagatgctgctgggagggtcaccctctgatgctcctcatgcacaccacccactgcatccccacctgatgcaggaacatatgggcactaatgtgatcgtcgccaacacaatgcctacccacctgagtaatggacagatgtgtgagtggccacgccccaggggccaggcagctactcctgaaaccccacagcccagccctccagggggatccggctctgagccctacaaactgctgcctggagcagtggccacaattgtgaagccactgagcgctatcccccagcctaccattactaaacaggaagtcatctgaggactagttataagactgactagcccgatgggcctcccaacgggccctcctcccctccttgcaccgagattaataaaaaaaaaaaaaaaaaaaaaaaaaaaaaaaaaaaaaaaaaaaaaaaaaaaaaaaaaaaaaaaatgcatcccccccccccccccccccccccccccccccaaaggctcttttcagagccaccagaatt

SEQ ID NO: 2846 - RNA, 1531 nt, synthetic construct
  misc_feature 1..1531: note = mRNA i-3 (A64-N5-C30-hSL-N5) (opt28) from Homo sapiens__NP_000448.3__HNF4A(39-474)(S87A_K106R_K108R_K126R_ K127R_S142A_S143A_S148A_T166A_S167A_S313A_S378A_T429A_T432A _S436A_K458R_S461A)
  source 1..1531: mol_type = other RNA
aggagaaagcttaccatggacacatctccctcagagggcactaacctgaatgcccctaacagtctgggggtgagcgctctgtgcgcaatctgcggagacagggccaccggcaaacactacggggcttcctcttgtgatggatgcaagggctttttcagacgcgcagtccggaaaaatcatatgtacagctgccgattttcaaggcagtgcgtggtggacagagaccgccggaaccagtgcaggtattgtagactgaagaagtgcttccgagccggaatgcggcgcgaagctgtccagaatgagagggatagaattagtacacggcgagcagcctacgaagactccgcactgccaagcatcaacgctctgctgcaggccgaggtgctgtctaggcagatcgcagctcccgtgagcgggattaacggcgatatcagagccaaaaagattgcatccatcgctgacgtctgcgaatcaatgaaagagcagctgctggtgctggtggagtgggccaagtacatccctgcattttgcgaactgccactggacgatcaggtcgctctgctgcgcgcccacgcaggagagcatctgctgctgggcgccactaagcggagtatggtgttcaaagacgtgctgctgctggggaatgactatattgtccccaggcactgccctgaactggctgagatgagcagagtgtctatccgaatcctggatgaactggtgctgccattccaggagctgcagattgacgataacgaatacgcatacctgaaggccatcatctttttcgaccccgacgcaaaaggactgtccgatcctggcaagattaagcggctgcgcgctcaggtccaggtgagcctggaggactatatcaatgacaggcagtacgattcaagagggcggtttggagaactgctgctgctgctgccaaccctgcagagtattacatggcagatgatcgagcagatccagttcattaaactgttcggcatggcaaagatcgacaacctgctgcaggagatgctgctgggaggggccccctctgatgctcctcatgcacaccacccactgcatccccacctgatgcaggaacatatgggcaccaatgtgatcgtcgccaacactatgcctacacacctgtccaatggacagatgtgtgagtggccacgccccaggggccaggctgcagcccctgaagctccacagcccgcacctccagggggaagcggcagcgagccctacaaactgctgcctggagccgtggcaaccattgtgagaccactggctgccatcccccagcctactattaccaagcaggaagtcatctgaggactagttataagactgactagcccgatgggcctcccaacgggccctcctcccctccttgcaccgagattaataaaaaaaaaaaaaaaaaaaaaaaaaaaaaaaaaaaaaaaaaaaaaaaaaaaaaaaaaaaaaaaatgcatcccccccccccccccccccccccccccccccaaaggctcttttcagagccaccagaatt

SEQ ID NO: 2847 - RNA, 1531 nt, synthetic construct
  misc_feature 1..1531: note = mRNA i-3 (A64-N5-C30-hSL-N5) (opt28) from Homo sapiens__NP_000448.3__HNF4A(39-474)(S87A_K106R_K108R_K126R_ K127R_S142A_S143A_S148A_T166A_S167A_S313A_S378A_T429A_T432A _S436A_K458R_S461E)
  source 1..1531: mol_type = other RNA
aggagaaagcttaccatggacacatctccctcagagggcactaacctgaatgcccctaacagtctgggggtgagcgctctgtgcgcaatctgcggagacagggccaccggcaaacactacggggcttcctcttgtgatggatgcaagggctttttcagacgcgcagtccggaaaaatcatatgtacagctgccgattttcaaggcagtgcgtggtggacagagaccgccggaaccagtgcaggtattgtagactgaagaagtgcttccgagccggaatgcggcgcgaagctgtccagaatgagagggatagaattagtacacggcgagcagcctacgaagactccgcactgccaagcatcaacgctctgctgcaggccgaggtgctgtctaggcagatcgcagctcccgtgagcgggattaacggcgatatcagagccaaaaagattgcatccatcgctgacgtctgcgaatcaatgaaagagcagctgctggtgctggtggagtgggccaagtacatccctgcattttgcgaactgccactggacgatcaggtcgctctgctgcgcgcccacgcaggagagcatctgctgctgggcgccactaagcggagtatggtgttcaaagacgtgctgctgctggggaatgactatattgtccccaggcactgccctgaactggctgagatgagcagagtgtctatccgaatcctggatgaactggtgctgccattccaggagctgcagattgacgataacgaatacgcatacctgaaggccatcatctttttcgaccccgacgcaaaaggactgtccgatcctggcaagattaagcggctgcgcgctcaggtccaggtgagcctggaggactatatcaatgacaggcagtacgattcaagagggcggtttggagaactgctgctgctgctgccaaccctgcagagtattacatggcagatgatcgagcagatccagttcattaaactgttcggcatggcaaagatcgacaacctgctgcaggagatgctgctgggaggggccccctctgatgctcctcatgcacaccacccactgcatccccacctgatgcaggaacatatgggcaccaatgtgatcgtcgccaacactatgcctacacacctgtccaatggacagatgtgtgagtggccacgccccaggggccaggctgcagcccctgaagctccacagcccgcacctccagggggaagcggcagcgagccctacaaactgctgcctggagccgtggcaaccattgtgagaccactggaagctatcccccagcctactattaccaagcaggaggtcatctgaggactagttataagactgactagcccgatgggcctcccaacgggccctcctcccctccttgcaccgagattaataaaaaaaaaaaaaaaaaaaaaaaaaaaaaaaaaaaaaaaaaaaaaaaaaaaaaaaaaaaaaaaatgcatcccccccccccccccccccccccccccccccaaaggctcttttcagagccaccagaatt

SEQ ID NO: 2848 - RNA, 1531 nt, synthetic construct
  misc_feature 1..1531: note = mRNA i-3 (A64-N5-C30-hSL-N5) (opt28) from Homo sapiens__NP_000448.3__HNF4A(39-474)(S87A_K106R_K108R_K126R_ K127R_S142A_S143A_S148E_T166A_S167E_S313A_S378E_T429E_T432E _S436E_K458R_S461E)
  source 1..1531: mol_type = other RNA
aggagaaagcttaccatggacacatctccctcagagggcactaacctgaatgcccctaacagtctgggggtgagcgctctgtgcgcaatctgcggagacagggccaccggcaaacactacggggcttcctcttgtgatggatgcaagggctttttcagacgcgcagtccggaaaaatcatatgtacagctgccgattttcaaggcagtgcgtggtggacagagaccgccggaaccagtgcaggtattgtagactgaagaagtgcttccgagccggaatgcggcgcgaagctgtccagaatgagagggatagaattagtacacggcgagcagcctacgaagactccgagctgccaagcatcaacgcactgctgcaggctgaagtgctgtctaggcagatcgccgagcccgtgagcgggattaacggcgatatcagagctaaaaagattgcatccatcgccgacgtctgcgagtcaatgaaagaacagctgctggtgctggtggagtgggcaaagtacatccctgctttttgcgaactgccactggacgatcaggtcgccctgctgcgcgcacacgctggagagcatctgctgctgggcgccactaagcggagtatggtgttcaaagacgtgctgctgctggggaatgactatattgtccccaggcactgccctgaactggcagagatgagcagagtgtctatccgaatcctggatgaactggtgctgccattccaggagctgcagattgacgataacgaatacgcctacctgaaggctatcatctttttcgaccccgacgcaaaaggactgtccgatcctggcaagattaagcggctgcgcgcccaggtccaggtgagcctggaggactatatcaatgacaggcagtacgattcaagagggcggtttggagagctgctgctgctgctgccaaccctgcagagtattacatggcagatgatcgaacagatccagttcattaaactgttcggcatggcaaagatcgacaacctgctgcaggagatgctgctgggaggggaaccctctgatgctcctcatgcacaccacccactgcatccccacctgatgcaggagcatatgggcaccaatgtgatcgtcgccaacactatgcctacacacctgtccaatggacagatgtgtgaatggccacgccccaggggccaggctgcagagcctgaggaaccacagcccgagcctccagggggaagcggcagcgaaccctacaaactgctgcctggagccgtggctaccattgtgagaccactggaggcaatcccccagcctactattaccaagcaggaagtcatctgaggactagttataagactgactagcccgatgggcctcccaacgggccctcctcccctccttgcaccgagattaataaaaaaaaaaaaaaaaaaaaaaaaaaaaaaaaaaaaaaaaaaaaaaaaaaaaaaaaaaaaaaaatgcatcccccccccccccccccccccccccccccccaaaggctcttttcagagccaccagaatt

SEQ ID NO: 2849 - RNA, 1531 nt, synthetic construct
  misc_feature 1..1531: note = mRNA i-3 (A64-N5-C30-hSL-N5) (opt28) from Homo sapiens__NP_000448.3__HNF4A(39-474)(S87A_K106R_K108R_K126R_ K127R_S142A_S143A_S148A_T166A_S167A_K179R_K180R_S313A_S378A _T429A_T432A_S436A_K458R_S461E)
  source 1..1531: mol_type = other RNA
aggagaaagcttaccatggacacatctccctcagagggcactaacctgaatgcccctaacagtctgggggtgagcgctctgtgcgcaatctgcggagacagggccaccggcaaacactacggggcttcctcttgtgatggatgcaagggctttttcagacgcgcagtccggaaaaatcatatgtacagctgccgattttcaaggcagtgcgtggtggacagagaccgccggaaccagtgcaggtattgtagactgaagaagtgcttccgagccggaatgcggcgcgaagctgtccagaatgagagggatagaattagtacacggcgagcagcctacgaagactccgcactgccaagcatcaacgctctgctgcaggccgaggtgctgtctaggcagatcgcagctcccgtgagcgggattaacggcgatatcagagcccgccggattgcatccatcgctgacgtctgcgaatcaatgaaagagcagctgctggtgctggtggagtgggccaagtacatccctgcattttgcgaactgccactggacgatcaggtcgctctgctgagggcccacgcaggagagcatctgctgctgggcgccactaaaagaagtatggtgttcaaggacgtgctgctgctggggaatgactatattgtcccccgacactgccctgaactggctgagatgagccgggtgtctatccgcatcctggatgaactggtgctgccattccaggagctgcagattgacgataacgaatacgcatacctgaaggccatcatctttttcgaccccgacgcaaaaggactgtccgatcctggcaagattaaaaggctgagagctcaggtccaggtgagcctggaggactatatcaatgaccggcagtacgattcacgcgggaggtttggagaactgctgctgctgctgccaaccctgcagagtattacatggcagatgatcgagcagatccagttcattaagctgttcggcatggcaaagatcgacaacctgctgcaggagatgctgctgggaggggccccctctgatgctcctcatgcacaccacccactgcatccccacctgatgcaggaacatatgggcaccaatgtgatcgtcgccaacactatgcctacacacctgtccaatggacagatgtgtgagtggccaagaccccgaggccaggctgcagcccctgaagctccacagcccgcacctccagggggaagcggcagcgagccctacaaactgctgcctggagccgtggcaaccattgtgcggccactggaagctatcccccagcctactattaccaagcaggaggtcatctgaggactagttataagactgactagcccgatgggcctcccaacgggccctcctcccctccttgcaccgagattaataaaaaaaaaaaaaaaaaaaaaaaaaaaaaaaaaaaaaaaaaaaaaaaaaaaaaaaaaaaaaaaatgcatcccccccccccccccccccccccccccccccaaaggctcttttcagagccaccagaatt

SEQ ID NO: 2850 - RNA, 1531 nt, synthetic construct
  misc_feature 1..1531: note = mRNA i-3 (A64-N5-C30-hSL-N5) (opt28) from Homo sapiens__NP_000448.3__HNF4A(39-474)(S87A_K106R_K108R_K126R_ K127R_S142A_S143A_S148A_T166A_S167A_K300R_K307R_K309R_S313A _S378A_T429A_T432A_S436A_K458R_S461E)
  source 1..1531: mol_type = other RNA
aggagaaagcttaccatggacacatctccctcagagggcactaacctgaatgcccctaacagtctgggggtgagcgctctgtgcgcaatctgcggagacagggccaccggcaaacactacggggcttcctcttgtgatggatgcaagggctttttcagacgcgcagtccggaaaaatcatatgtacagctgccgattttcaaggcagtgcgtggtggacagagaccgccggaaccagtgcaggtattgtagactgaagaagtgcttccgagccggaatgcggcgcgaagctgtccagaatgagagggatagaattagtacacggcgagcagcctacgaagactccgcactgccaagcatcaacgctctgctgcaggccgaggtgctgtctaggcagatcgcagctcccgtgagcgggattaacggcgatatcagagccaaaaagattgcatccatcgctgacgtctgcgaatcaatgaaagagcagctgctggtgctggtggagtgggccaagtacatccctgcattttgcgaactgccactggacgatcaggtcgctctgctgcgcgcccacgcaggagagcatctgctgctgggcgccactaagcggagtatggtgttcaaagacgtgctgctgctggggaatgactatattgtccccaggcactgccctgaactggctgagatgagcagagtgtctatccgaatcctggatgaactggtgctgccattccaggagctgcagattgacgataacgaatacgcatacctgaaggccatcatctttttcgaccccgacgcacggggactgtccgatcctggccgcattaggagactgcgggctcaggtccaggtgagcctggaggactatatcaatgaccgccagtacgattcaagggggagatttggagaactgctgctgctgctgccaaccctgcagagtattacatggcagatgatcgagcagatccagttcattaaactgttcggcatggcaaagatcgacaacctgctgcaggagatgctgctgggaggggccccctctgatgctcctcatgcacaccacccactgcatccccacctgatgcaggaacatatgggcaccaatgtgatcgtcgccaacactatgcctacacacctgtccaatggacagatgtgtgagtggccacgaccccggggccaggctgcagcccctgaagctccacagcccgcacctccagggggaagcggcagcgagccctacaagctgctgcctggagccgtggcaaccattgtgaggccactggaagctatcccccagcctactattaccaaacaggaggtcatctgaggactagttataagactgactagcccgatgggcctcccaacgggccctcctcccctccttgcaccgagattaataaaaaaaaaaaaaaaaaaaaaaaaaaaaaaaaaaaaaaaaaaaaaaaaaaaaaaaaaaaaaaaatgcatcccccccccccccccccccccccccccccccaaaggctcttttcagagccaccagaatt

SEQ ID NO: 2851 - RNA, 1531 nt, synthetic construct
  misc_feature 1..1531: note = mRNA i-3 (A64-N5-C30-hSL-N5) (opt28) from Homo sapiens__NP_000448.3__HNF4A(39-474)(S87A_K106R_K108R_K126R_ K127R_S142A_S143A_S148A_T166A_S167A_S313A_S378A_T429A_T432A _S436A_K447R_K458R_S461E_K470R)
  source 1..1531: mol_type = other RNA
aggagaaagcttaccatggacacatctccctcagagggcactaacctgaatgcccctaacagtctgggggtgagcgctctgtgcgcaatctgcggagacagggccaccggcaaacactacggggcttcctcttgtgatggatgcaagggctttttcagacgcgcagtccggaaaaatcatatgtacagctgccgattttcaaggcagtgcgtggtggacagagaccgccggaaccagtgcaggtattgtagactgaagaagtgcttccgagccggaatgcggcgcgaagctgtccagaatgagagggatagaattagtacacggcgagcagcctacgaagactccgcactgccaagcatcaacgctctgctgcaggccgaggtgctgtctaggcagatcgcagctcccgtgagcgggattaacggcgatatcagagccaaaaagattgcatccatcgctgacgtctgcgaatcaatgaaagagcagctgctggtgctggtggagtgggccaagtacatccctgcattttgcgaactgccactggacgatcaggtcgctctgctgcgcgcccacgcaggagagcatctgctgctgggcgccactaagcggagtatggtgttcaaagacgtgctgctgctggggaatgactatattgtccccaggcactgccctgaactggctgagatgagcagagtgtctatccgaatcctggatgaactggtgctgccattccaggagctgcagattgacgataacgaatacgcatacctgaaggccatcatctttttcgaccccgacgcaaaaggactgtccgatcctggcaagattaagcggctgcgcgctcaggtccaggtgagcctggaggactatatcaatgacaggcagtacgattcaagagggcggtttggagaactgctgctgctgctgccaaccctgcagagtattacatggcagatgatcgagcagatccagttcattaaactgttcggcatggcaaagatcgacaacctgctgcaggagatgctgctgggaggggccccctctgatgctcctcatgcacaccacccactgcatccccacctgatgcaggaacatatgggcaccaatgtgatcgtcgccaacactatgcctacacacctgtccaatggacagatgtgtgagtggccacgccccaggggccaggctgcagcccctgaagctccacagcccgcacctccagggggaagcggcagcgagccctacagactgctgcctggagccgtggcaaccattgtgcgaccactggaagctatcccccagcctactattacccggcaggaggtcatctgaggactagttataagactgactagcccgatgggcctcccaacgggccctcctcccctccttgcaccgagattaataaaaaaaaaaaaaaaaaaaaaaaaaaaaaaaaaaaaaaaaaaaaaaaaaaaaaaaaaaaaaaaatgcatcccccccccccccccccccccccccccccccaaaggctcttttcagagccaccagaatt

SEQ ID NO: 2852 - RNA, 1531 nt, synthetic construct
  misc_feature 1..1531: note = mRNA i-3 (A64-N5-C30-hSL-N5) (opt28) from Homo sapiens__NP_000448.3__HNF4A(39-474)(S87A_K106R_K108R_K126R_ K127R_S142A_S143A_S148A_T166A_S167A_K179R_K180R_K234R_K300R _K307R_K309R_S313A_S378A_T429A_T432A_S436A_K447R_K458R_S461 E_K470R)
  source 1..1531: mol_type = other RNA
aggagaaagcttaccatggacacatctccctcagagggcactaacctgaatgcccctaacagtctgggggtgagcgctctgtgcgcaatctgcggagacagggccaccggcaaacactacggggcttcctcttgtgatggatgcaagggctttttcagacgcgcagtccggaaaaatcatatgtacagctgccgattttcaaggcagtgcgtggtggacagagaccgccggaaccagtgcaggtattgtagactgaagaagtgcttccgagccggaatgcggcgcgaagctgtccagaatgagagggatagaattagtacacggcgagcagcctacgaagactccgcactgccaagcatcaacgctctgctgcaggccgaggtgctgtctaggcagatcgcagctcccgtgagcgggattaacggcgatatcagagcccgccggattgcatccatcgctgacgtctgcgaatcaatgaaagagcagctgctggtgctggtggagtgggccaagtacatccctgcattttgcgaactgccactggacgatcaggtcgctctgctgagggcccacgcaggagagcatctgctgctgggcgccactagacgaagtatggtgttcaaagacgtgctgctgctggggaatgactatattgtcccccggcactgccctgaactggctgagatgagccgcgtgtctatcaggatcctggatgaactggtgctgccattccaggagctgcagattgacgataacgaatacgcatacctgaaggccatcatctttttcgaccccgacgcaagaggactgtccgatcctggccggattcgcaggctgagagctcaggtccaggtgagcctggaggactatatcaatgaccgacagtacgattcacgggggaggtttggagaactgctgctgctgctgccaaccctgcagagtattacatggcagatgatcgagcagatccagttcattaagctgttcggcatggcaaaaatcgacaacctgctgcaggagatgctgctgggaggggccccctctgatgctcctcatgcacaccacccactgcatccccacctgatgcaggaacatatgggcaccaatgtgatcgtcgccaacactatgcctacacacctgtccaatggacagatgtgtgagtggccaagaccccgcggccaggctgcagcccctgaagctccacagcccgcacctccagggggaagcggcagcgagccctaccggctgctgcctggagccgtggcaaccattgtgcgaccactggaagctatcccccagcctactattaccaggcaggaggtcatctgaggactagttataagactgactagcccgatgggcctcccaacgggccctcctcccctccttgcaccgagattaataaaaaaaaaaaaaaaaaaaaaaaaaaaaaaaaaaaaaaaaaaaaaaaaaaaaaaaaaaaaaaaatgcatcccccccccccccccccccccccccccccccaaaggctcttttcagagccaccagaatt

SEQ ID NO: 2853 - RNA, 1531 nt, synthetic construct
  misc_feature 1..1531: note = mRNA i-3 (A64-N5-C30-hSL-N5) (opt28) from Homo sapiens__NP_000448.3__HNF4A(39-474)(S87A_S95A_S99A_K106R_K1 08R_K126R_K127R_S142A_S143A_S148A_T166A_S167A_S313A_S378A_T 429A_T432A_S436A_K458R_S461E)
  source 1..1531: mol_type = other RNA
aggagaaagcttaccatggacacatctccctcagagggcactaacctgaatgcccctaacagtctgggggtgagcgctctgtgcgcaatctgcggagacagggccaccggcaaacactacggggcttcctcttgtgatggatgcaagggctttttcagacgcgcagtccggaaaaatcatatgtacgcctgccgatttgctaggcagtgcgtggtggacagagaccgccggaaccagtgcaggtattgtagactgaagaagtgcttccgagcaggaatgcggcgcgaagccgtccagaatgagagggatagaattagcacacggcgagcagcttacgaagactcagccctgccaagtatcaacgcactgctgcaggctgaggtgctgtccaggcagatcgccgcacccgtgagcgggattaacggcgatatcagagctaaaaagattgcctctatcgcagacgtctgcgaaagcatgaaagagcagctgctggtgctggtggagtgggctaagtacatccctgccttttgcgaactgccactggacgatcaggtcgcactgctgcgcgcccacgctggagagcatctgctgctgggcgcaactaagcggtccatggtgttcaaagacgtgctgctgctggggaatgactatattgtccccaggcactgccctgaactggccgagatgtcaagagtgagtatccgaatcctggatgaactggtgctgccattccaggagctgcagattgacgataacgaatacgcatacctgaaggctatcatctttttcgaccccgacgcaaaaggactgagcgatcctggcaagattaagcggctgcgcgcccaggtccaggtgtctctggaggactatatcaatgacaggcagtacgattccagagggcggtttggagaactgctgctgctgctgccaaccctgcagagcattacatggcagatgatcgagcagatccagttcattaaactgttcggcatggctaagatcgacaacctgctgcaggagatgctgctgggaggggcaccctcagatgcccctcatgctcaccacccactgcatccccacctgatgcaggaacatatgggcaccaatgtgatcgtcgcaaacactatgcctacacacctgagtaatggacagatgtgtgagtggccacgccccaggggccaggccgctgcacctgaagccccacagcccgcacctccagggggatctggctccgagccctacaaactgctgcctggagctgtggccaccattgtgagaccactggaagcaatcccccagcctactattaccaagcaggaggtcatctgaggactagttataagactgactagcccgatgggcctcccaacgggccctcctcccctccttgcaccgagattaataaaaaaaaaaaaaaaaaaaaaaaaaaaaaaaaaaaaaaaaaaaaaaaaaaaaaaaaaaaaaaaatgcatcccccccccccccccccccccccccccccccaaaggctcttttcagagccaccagaatt

SEQ ID NO: 2854 - RNA, 1531 nt, synthetic construct
  misc_feature 1..1531: note = mRNA i-3 (A64-N5-C30-hSL-N5) (opt28) from Homo sapiens__NP_000448.3__HNF4A(39-474)(S87A_K106R_K108R_K126R_ K127R_S138A_T139A_S142A_S143A_S148A_T166A_S167A_S313A_S378A _T429A_T432A_S436A_K458R_S461E)
  source 1..1531: mol_type = other RNA
aggagaaagcttaccatggacacatctccctcagagggcactaacctgaatgcccctaacagtctgggggtgagcgctctgtgcgcaatctgcggagacagggccaccggcaaacactacggggcttcctcttgtgatggatgcaagggctttttcagacgcgcagtccggaaaaatcatatgtacagctgccgattttcaaggcagtgcgtggtggacagagaccgccggaaccagtgcaggtattgtagactgaagaagtgcttccgagccggaatgcggcgcgaagctgtccagaatgagagggatagaattgcagcccggcgagcagcttacgaagacagtgccctgccatccatcaacgcactgctgcaggctgaggtgctgagcaggcagatcgccgcacccgtgtctgggattaacggcgatatcagagctaaaaagattgccagcatcgcagacgtctgcgaatccatgaaagagcagctgctggtgctggtggagtgggctaagtacatccctgccttttgcgaactgccactggacgatcaggtcgcactgctgcgcgcccacgctggagagcatctgctgctgggcgcaacaaagcggtcaatggtgttcaaagacgtgctgctgctggggaatgactatattgtccccaggcactgccctgaactggccgagatgagtagagtgagcatccgaatcctggatgaactggtgctgccattccaggagctgcagattgacgataacgaatacgcatacctgaaggctatcatctttttcgaccccgacgcaaaaggactgtctgatcctggcaagattaagcggctgcgcgcccaggtccaggtgtccctggaggactatatcaatgacaggcagtacgatagcagagggcggtttggagaactgctgctgctgctgccaactctgcagtcaattacctggcagatgatcgagcagatccagttcattaaactgttcggcatggctaagatcgacaacctgctgcaggagatgctgctgggaggggcacccagtgatgcccctcatgctcaccacccactgcatccccacctgatgcaggaacatatgggcacaaatgtgatcgtcgcaaacaccatgcctactcacctgtctaatggacagatgtgtgagtggccacgccccaggggccaggccgctgcacctgaagccccacagcccgcacctccagggggatccggcagcgagccctacaaactgctgcctggagctgtggccacaattgtgagaccactggaagcaatcccccagcctaccattactaagcaggaggtcatctgaggactagttataagactgactagcccgatgggcctcccaacgggccctcctcccctccttgcaccgagattaataaaaaaaaaaaaaaaaaaaaaaaaaaaaaaaaaaaaaaaaaaaaaaaaaaaaaaaaaaaaaaaatgcatcccccccccccccccccccccccccccccccaaaggctcttttcagagccaccagaatt

SEQ ID NO: 2855 - RNA, 1531 nt, synthetic construct
  misc_feature 1..1531: note = mRNA i-3 (A64-N5-C30-hSL-N5) (opt28) from Homo sapiens__NP_000448.3__HNF4A(39-474)(S87A_S95A_S99A_K106R_K1 08R_K126R_K127R_S138A_T139A_S142A_S143A_S148A_T166A_S167A_S 313A_S378A_T429A_T432A_S436A_K458R_S461E)
  source 1..1531: mol_type = other RNA
aggagaaagcttaccatggacacatctccctcagagggcactaacctgaatgcccctaacagtctgggggtgagcgctctgtgcgcaatctgcggagacagggccaccggcaaacactacggggcttcctcttgtgatggatgcaagggctttttcagacgcgcagtccggaaaaatcatatgtacgcctgccgatttgctaggcagtgcgtggtggacagagaccgccggaaccagtgcaggtattgtagactgaagaagtgcttccgagcaggaatgcggcgcgaagccgtccagaatgagagggatagaattgcagctcggcgagccgcatacgaagacagcgctctgccatcaatcaacgccctgctgcaggcagaggtgctgagtaggcagatcgctgcccccgtgtccgggattaacggcgatatcagagctaaaaagattgcaagcatcgccgacgtctgcgaatctatgaaagagcagctgctggtgctggtggagtgggcaaagtacatccctgccttttgcgaactgccactggacgatcaggtcgctctgctgcgcgcacacgccggagagcatctgctgctgggcgcaacaaagcggagcatggtgttcaaagacgtgctgctgctggggaatgactatattgtccccaggcactgccctgaactggctgagatgtccagagtgtcaatccgaatcctggatgaactggtgctgccattccaggagctgcagattgacgataacgaatacgcatacctgaaggccatcatctttttcgaccccgacgctaaaggactgagtgatcctggcaagattaagcggctgcgcgcacaggtccaggtgagcctggaggactatatcaatgacaggcagtacgattctagagggcggtttggagaactgctgctgctgctgccaactctgcagtccattacctggcagatgatcgagcagatccagttcattaaactgttcggcatggccaagatcgacaacctgctgcaggagatgctgctgggaggggctcccagcgatgcacctcatgcccaccacccactgcatccccacctgatgcaggaacatatgggcacaaatgtgatcgtcgctaacaccatgcctactcacctgtcaaatggacagatgtgtgagtggccacgccccaggggccaggcagccgcacctgaagctccacagcccgcccctccagggggaagtggctctgagccctacaaactgctgcctggagcagtggctacaattgtgagaccactggaagccatcccccagcctaccattactaagcaggaggtcatctgaggactagttataagactgactagcccgatgggcctcccaacgggccctcctcccctccttgcaccgagattaataaaaaaaaaaaaaaaaaaaaaaaaaaaaaaaaaaaaaaaaaaaaaaaaaaaaaaaaaaaaaaaatgcatcccccccccccccccccccccccccccccccaaaggctcttttcagagccaccagaatt

SEQ ID NO: 2856 - RNA, 1531 nt, synthetic construct
  misc_feature 1..1531: note = mRNA i-3 (A64-N5-C30-hSL-N5) (opt29) from Homo sapiens__NP_000448.3__HNF4A(39-474)
  source 1..1531: mol_type = other RNA
aggagaaagcttaccatggacaccagccctagcgagggcaccaacctgaacgcccctaatagcctgggagtgtccgccctgtgtgccatctgtggcgatagagccaccggcaagcactacggcgccagctcttgtgatggctgcaagggcttcttccggcggagcgtgcggaagaaccacatgtacagctgccggttcagccggcagtgcgtggtggacaaggataagcggaaccagtgccggtactgcagactgaagaagtgcttcagagccggcatgaagaaagaagccgtgcagaacgagcgggaccggatcagcaccagaagaagcagctacgaggacagcagcctgcccagcatcaacgccctgctgcaggccgaggtgctgagcagacagatcaccagcccagtgtccggcatcaacggcgacatccgggccaagaagatcgccagcattgccgacgtgtgcgagagcatgaaggaacagctgctggtgctggtggaatgggccaagtacatccccgccttttgcgagctgcccctggacgatcaggtggccctgctgagagcacacgccggcgaacatctgctgctgggagccaccaagcggagcatggtgttcaaggacgtgctgctgctgggcaacgactacatcgtgcccagacactgccctgagctggccgagatgagccgggtgtccatcagaatcctggacgaactggtgctgccgtttcaggaactgcagatcgacgacaacgagtacgcctacctgaaggccatcatctttttcgaccccgacgccaagggcctgagcgaccctggcaagatcaagcggctgagaagccaggtgcaagtgtccctggaagattacatcaacgaccggcagtacgacagccggggcagatttggcgaactgctcctgctgctgcccaccctgcagagcatcacctggcagatgatcgagcagatccagttcatcaagctgttcggcatggccaagatcgacaatctgctgcaggaaatgctgctcgggggcagcccttctgatgcccctcatgcccaccaccctctgcaccctcacctgatgcaagaacacatgggcaccaatgtgatcgtggccaacacaatgcccacccacctgagcaacggccagatgtgcgagtggcccagacctagaggacaggccgccacacctgagacacctcagccttctccacctggcggctctggcagcgagccttacaaactgctgcctggcgctgtggccaccatcgtgaaacctctgagcgccatcccccagcccaccatcaccaagcaggaagtgatctgaggactagttataagactgactagcccgatgggcctcccaacgggccctcctcccctccttgcaccgagattaataaaaaaaaaaaaaaaaaaaaaaaaaaaaaaaaaaaaaaaaaaaaaaaaaaaaaaaaaaaaaaaatgcatcccccccccccccccccccccccccccccccaaaggctcttttcagagccaccagaatt

SEQ ID NO: 2857 - RNA, 1531 nt, synthetic construct
  misc_feature 1..1531: note = mRNA i-3 (A64-N5-C30-hSL-N5) (opt29) from Homo sapiens__NP_000448.3__HNF4A(39-474)(S313A)
  source 1..1531: mol_type = other RNA
aggagaaagcttaccatggacaccagccctagcgagggcaccaacctgaacgcccctaatagcctgggagtgtccgccctgtgtgccatctgtggcgatagagccaccggcaagcactacggcgccagctcttgtgatggctgcaagggcttcttccggcggagcgtgcggaagaaccacatgtacagctgccggttcagccggcagtgcgtggtggacaaggataagcggaaccagtgccggtactgcagactgaagaagtgcttcagagccggcatgaagaaagaagccgtgcagaacgagcgggaccggatcagcaccagaagaagcagctacgaggacagcagcctgcccagcatcaacgccctgctgcaggccgaggtgctgagcagacagatcaccagcccagtgtccggcatcaacggcgacatccgggccaagaagatcgccagcattgccgacgtgtgcgagagcatgaaggaacagctgctggtgctggtggaatgggccaagtacatccccgccttttgcgagctgcccctggacgatcaggtggccctgctgagagcacacgccggcgaacatctgctgctgggagccaccaagcggagcatggtgttcaaggacgtgctgctgctgggcaacgactacatcgtgcccagacactgccctgagctggccgagatgagccgggtgtccatcagaatcctggacgaactggtgctgccgtttcaggaactgcagatcgacgacaacgagtacgcctacctgaaggccatcatctttttcgaccccgacgccaagggcctgagcgaccctggcaagatcaagcggctgagagcccaggtgcaagtgtccctggaagattacatcaacgaccggcagtacgacagccggggcagatttggcgaactgctcctgctgctgcccaccctgcagagcatcacctggcagatgatcgagcagatccagttcatcaagctgttcggcatggccaagatcgacaatctgctgcaggaaatgctgctcgggggcagcccttctgatgcccctcatgcccaccaccctctgcaccctcacctgatgcaagaacacatgggcaccaatgtgatcgtggccaacacaatgcccacccacctgagcaacggccagatgtgcgagtggcccagacctagaggacaggccgccacacctgagacacctcagccttctccacctggcggctctggcagcgagccttacaaactgctgcctggcgctgtggccaccatcgtgaaacctctgagcgccatcccccagcccaccatcaccaagcaggaagtgatctgaggactagttataagactgactagcccgatgggcctcccaacgggccctcctcccctccttgcaccgagattaataaaaaaaaaaaaaaaaaaaaaaaaaaaaaaaaaaaaaaaaaaaaaaaaaaaaaaaaaaaaaaaatgcatcccccccccccccccccccccccccccccccaaaggctcttttcagagccaccagaatt

SEQ ID NO: 2858 - RNA, 1531 nt, synthetic construct
  misc_feature 1..1531: note = mRNA i-3 (A64-N5-C30-hSL-N5) (opt29) from Homo sapiens__NP_000448.3__HNF4A(39-474)(S313E)
  source 1..1531: mol_type = other RNA
aggagaaagcttaccatggacaccagccctagcgagggcaccaacctgaacgcccctaatagcctgggagtgtccgccctgtgtgccatctgtggcgatagagccaccggcaagcactacggcgccagctcttgtgatggctgcaagggcttcttccggcggagcgtgcggaagaaccacatgtacagctgccggttcagccggcagtgcgtggtggacaaggataagcggaaccagtgccggtactgcagactgaagaagtgcttcagagccggcatgaagaaagaagccgtgcagaacgagcgggaccggatcagcaccagaagaagcagctacgaggacagcagcctgcccagcatcaacgccctgctgcaggccgaggtgctgagcagacagatcaccagcccagtgtccggcatcaacggcgacatccgggccaagaagatcgccagcattgccgacgtgtgcgagagcatgaaggaacagctgctggtgctggtggaatgggccaagtacatccccgccttttgcgagctgcccctggacgatcaggtggccctgctgagagcacacgccggcgaacatctgctgctgggagccaccaagcggagcatggtgttcaaggacgtgctgctgctgggcaacgactacatcgtgcccagacactgccctgagctggccgagatgagccgggtgtccatcagaatcctggacgaactggtgctgccgtttcaggaactgcagatcgacgacaacgagtacgcctacctgaaggccatcatctttttcgaccccgacgccaagggcctgagcgaccctggcaagatcaagcggctgagagaacaggtgcaagtgtccctggaagattacatcaacgaccggcagtacgacagccggggcagatttggcgaactgctcctgctgctgcccaccctgcagagcatcacctggcagatgatcgagcagatccagttcatcaagctgttcggcatggccaagatcgacaatctgctgcaggaaatgctgctcgggggcagcccttctgatgcccctcatgcccaccaccctctgcaccctcacctgatgcaagaacacatgggcaccaatgtgatcgtggccaacacaatgcccacccacctgagcaacggccagatgtgcgagtggcccagacctagaggacaggccgccacacctgagacacctcagccttctccacctggcggctctggcagcgagccttacaaactgctgcctggcgctgtggccaccatcgtgaaacctctgagcgccatcccccagcccaccatcaccaagcaggaagtgatctgaggactagttataagactgactagcccgatgggcctcccaacgggccctcctcccctccttgcaccgagattaataaaaaaaaaaaaaaaaaaaaaaaaaaaaaaaaaaaaaaaaaaaaaaaaaaaaaaaaaaaaaaaatgcatcccccccccccccccccccccccccccccccaaaggctcttttcagagccaccagaatt

SEQ ID NO: 2859 - RNA, 1531 nt, synthetic construct
  misc_feature 1..1531: note = mRNA i-3 (A64-N5-C30-hSL-N5) (opt29) from Homo sapiens__NP_000448.3__HNF4A(39-474)(S142A_S143A)
  source 1..1531: mol_type = other RNA
aggagaaagcttaccatggacaccagccctagcgagggcaccaacctgaacgcccctaatagcctgggagtgtccgccctgtgtgccatctgtggcgatagagccaccggcaagcactacggcgccagctcttgtgatggctgcaagggcttcttccggcggagcgtgcggaagaaccacatgtacagctgccggttcagccggcagtgcgtggtggacaaggataagcggaaccagtgccggtactgcagactgaagaagtgcttcagagccggcatgaagaaagaagccgtgcagaacgagcgggaccggatcagcaccagaagagccgcctacgaggacagcagcctgcccagcatcaacgccctgctgcaggccgaggtgctgagcagacagatcaccagcccagtgtccggcatcaacggcgacatccgggccaagaagatcgccagcattgccgacgtgtgcgagagcatgaaggaacagctgctggtgctggtggaatgggccaagtacatccccgccttttgcgagctgcccctggacgatcaggtggccctgctgagagcacacgccggcgaacatctgctgctgggagccaccaagcggagcatggtgttcaaggacgtgctgctgctgggcaacgactacatcgtgcccagacactgccctgagctggccgagatgagccgggtgtccatcagaatcctggacgaactggtgctgccgtttcaggaactgcagatcgacgacaacgagtacgcctacctgaaggccatcatctttttcgaccccgacgccaagggcctgagcgaccctggcaagatcaagcggctgagaagccaggtgcaagtgtccctggaagattacatcaacgaccggcagtacgacagccggggcagatttggcgaactgctcctgctgctgcccaccctgcagagcatcacctggcagatgatcgagcagatccagttcatcaagctgttcggcatggccaagatcgacaatctgctgcaggaaatgctgctcgggggcagcccttctgatgcccctcatgcccaccaccctctgcaccctcacctgatgcaagaacacatgggcaccaatgtgatcgtggccaacacaatgcccacccacctgagcaacggccagatgtgcgagtggcccagacctagaggacaggccgccacacctgagacacctcagccttctccacctggcggctctggcagcgagccttacaaactgctgcctggcgctgtggccaccatcgtgaaacctctgagcgccatcccccagcccaccatcaccaagcaggaagtgatctgaggactagttataagactgactagcccgatgggcctcccaacgggccctcctcccctccttgcaccgagattaataaaaaaaaaaaaaaaaaaaaaaaaaaaaaaaaaaaaaaaaaaaaaaaaaaaaaaaaaaaaaaaatgcatcccccccccccccccccccccccccccccccaaaggctcttttcagagccaccagaatt

SEQ ID NO: 2860 - RNA, 1531 nt, synthetic construct
  misc_feature 1..1531: note = mRNA i-3 (A64-N5-C30-hSL-N5) (opt29) from Homo sapiens__NP_000448.3__HNF4A(39-474)(S142E_S143E)
  source 1..1531: mol_type = other RNA
aggagaaagcttaccatggacaccagccctagcgagggcaccaacctgaacgcccctaatagcctgggagtgtccgccctgtgtgccatctgtggcgatagagccaccggcaagcactacggcgccagctcttgtgatggctgcaagggcttcttccggcggagcgtgcggaagaaccacatgtacagctgccggttcagccggcagtgcgtggtggacaaggataagcggaaccagtgccggtactgcagactgaagaagtgcttcagagccggcatgaagaaagaagccgtgcagaacgagcgggaccggatcagcaccagaagagaagagtacgaggacagcagcctgcccagcatcaacgccctgctgcaggccgaggtgctgagcagacagatcaccagcccagtgtccggcatcaacggcgacatccgggccaagaagatcgccagcattgccgacgtgtgcgagagcatgaaggaacagctgctggtgctggtggaatgggccaagtacatccccgccttttgcgagctgcccctggacgatcaggtggccctgctgagagcacacgccggcgaacatctgctgctgggagccaccaagcggagcatggtgttcaaggacgtgctgctgctgggcaacgactacatcgtgcccagacactgccctgagctggccgagatgagccgggtgtccatcagaatcctggacgaactggtgctgccgtttcaggaactgcagatcgacgacaacgagtacgcctacctgaaggccatcatctttttcgaccccgacgccaagggcctgagcgaccctggcaagatcaagcggctgagaagccaggtgcaagtgtccctggaagattacatcaacgaccggcagtacgacagccggggcagatttggcgaactgctcctgctgctgcccaccctgcagagcatcacctggcagatgatcgagcagatccagttcatcaagctgttcggcatggccaagatcgacaatctgctgcaggaaatgctgctcgggggcagcccttctgatgcccctcatgcccaccaccctctgcaccctcacctgatgcaagaacacatgggcaccaatgtgatcgtggccaacacaatgcccacccacctgagcaacggccagatgtgcgagtggcccagacctagaggacaggccgccacacctgagacacctcagccttctccacctggcggctctggcagcgagccttacaaactgctgcctggcgctgtggccaccatcgtgaaacctctgagcgccatcccccagcccaccatcaccaagcaggaagtgatctgaggactagttataagactgactagcccgatgggcctcccaacgggccctcctcccctccttgcaccgagattaataaaaaaaaaaaaaaaaaaaaaaaaaaaaaaaaaaaaaaaaaaaaaaaaaaaaaaaaaaaaaaaatgcatcccccccccccccccccccccccccccccccaaaggctcttttcagagccaccagaatt

SEQ ID NO: 2861 - RNA, 1531 nt, synthetic construct
  misc_feature 1..1531: note = mRNA i-3 (A64-N5-C30-hSL-N5) (opt29) from Homo sapiens__NP_000448.3__HNF4A(39-474)(S143A)
  source 1..1531: mol_type = other RNA
aggagaaagcttaccatggacaccagccctagcgagggcaccaacctgaacgcccctaatagcctgggagtgtccgccctgtgtgccatctgtggcgatagagccaccggcaagcactacggcgccagctcttgtgatggctgcaagggcttcttccggcggagcgtgcggaagaaccacatgtacagctgccggttcagccggcagtgcgtggtggacaaggataagcggaaccagtgccggtactgcagactgaagaagtgcttcagagccggcatgaagaaagaagccgtgcagaacgagcgggaccggatcagcaccagaagaagcgcctacgaggacagcagcctgcccagcatcaacgccctgctgcaggccgaggtgctgagcagacagatcaccagcccagtgtccggcatcaacggcgacatccgggccaagaagatcgccagcattgccgacgtgtgcgagagcatgaaggaacagctgctggtgctggtggaatgggccaagtacatccccgccttttgcgagctgcccctggacgatcaggtggccctgctgagagcacacgccggcgaacatctgctgctgggagccaccaagcggagcatggtgttcaaggacgtgctgctgctgggcaacgactacatcgtgcccagacactgccctgagctggccgagatgagccgggtgtccatcagaatcctggacgaactggtgctgccgtttcaggaactgcagatcgacgacaacgagtacgcctacctgaaggccatcatctttttcgaccccgacgccaagggcctgagcgaccctggcaagatcaagcggctgagaagccaggtgcaagtgtccctggaagattacatcaacgaccggcagtacgacagccggggcagatttggcgaactgctcctgctgctgcccaccctgcagagcatcacctggcagatgatcgagcagatccagttcatcaagctgttcggcatggccaagatcgacaatctgctgcaggaaatgctgctcgggggcagcccttctgatgcccctcatgcccaccaccctctgcaccctcacctgatgcaagaacacatgggcaccaatgtgatcgtggccaacacaatgcccacccacctgagcaacggccagatgtgcgagtggcccagacctagaggacaggccgccacacctgagacacctcagccttctccacctggcggctctggcagcgagccttacaaactgctgcctggcgctgtggccaccatcgtgaaacctctgagcgccatcccccagcccaccatcaccaagcaggaagtgatctgaggactagttataagactgactagcccgatgggcctcccaacgggccctcctcccctccttgcaccgagattaataaaaaaaaaaaaaaaaaaaaaaaaaaaaaaaaaaaaaaaaaaaaaaaaaaaaaaaaaaaaaaaatgcatcccccccccccccccccccccccccccccccaaaggctcttttcagagccaccagaatt

SEQ ID NO: 2862 - RNA, 1531 nt, synthetic construct
  misc_feature 1..1531: note = mRNA i-3 (A64-N5-C30-hSL-N5) (opt29) from Homo sapiens__NP_000448.3__HNF4A(39-474)(T166A)
  source 1..1531: mol_type = other RNA
aggagaaagcttaccatggacaccagccctagcgagggcaccaacctgaacgcccctaatagcctgggagtgtccgccctgtgtgccatctgtggcgatagagccaccggcaagcactacggcgccagctcttgtgatggctgcaagggcttcttccggcggagcgtgcggaagaaccacatgtacagctgccggttcagccggcagtgcgtggtggacaaggataagcggaaccagtgccggtactgcagactgaagaagtgcttcagagccggcatgaagaaagaagccgtgcagaacgagcgggaccggatcagcaccagaagaagcagctacgaggacagcagcctgcccagcatcaacgccctgctgcaggccgaggtgctgagcagacagatcgccagcccagtgtccggcatcaacggcgacatccgggccaagaagatcgccagcattgccgacgtgtgcgagagcatgaaggaacagctgctggtgctggtggaatgggccaagtacatccccgccttttgcgagctgcccctggacgatcaggtggccctgctgagagcacacgccggcgaacatctgctgctgggagccaccaagcggagcatggtgttcaaggacgtgctgctgctgggcaacgactacatcgtgcccagacactgccctgagctggccgagatgagccgggtgtccatcagaatcctggacgaactggtgctgccgtttcaggaactgcagatcgacgacaacgagtacgcctacctgaaggccatcatctttttcgaccccgacgccaagggcctgagcgaccctggcaagatcaagcggctgagaagccaggtgcaagtgtccctggaagattacatcaacgaccggcagtacgacagccggggcagatttggcgaactgctcctgctgctgcccaccctgcagagcatcacctggcagatgatcgagcagatccagttcatcaagctgttcggcatggccaagatcgacaatctgctgcaggaaatgctgctcgggggcagcccttctgatgcccctcatgcccaccaccctctgcaccctcacctgatgcaagaacacatgggcaccaatgtgatcgtggccaacacaatgcccacccacctgagcaacggccagatgtgcgagtggcccagacctagaggacaggccgccacacctgagacacctcagccttctccacctggcggctctggcagcgagccttacaaactgctgcctggcgctgtggccaccatcgtgaaacctctgagcgccatcccccagcccaccatcaccaagcaggaagtgatctgaggactagttataagactgactagcccgatgggcctcccaacgggccctcctcccctccttgcaccgagattaataaaaaaaaaaaaaaaaaaaaaaaaaaaaaaaaaaaaaaaaaaaaaaaaaaaaaaaaaaaaaaaatgcatcccccccccccccccccccccccccccccccaaaggctcttttcagagccaccagaatt

SEQ ID NO: 2863 - RNA, 1531 nt, synthetic construct
  misc_feature 1..1531: note = mRNA i-3 (A64-N5-C30-hSL-N5) (opt29) from Homo sapiens__NP_000448.3__HNF4A(39-474)(S167E)
  source 1..1531: mol_type = other RNA
aggagaaagcttaccatggacaccagccctagcgagggcaccaacctgaacgcccctaatagcctgggagtgtccgccctgtgtgccatctgtggcgatagagccaccggcaagcactacggcgccagctcttgtgatggctgcaagggcttcttccggcggagcgtgcggaagaaccacatgtacagctgccggttcagccggcagtgcgtggtggacaaggataagcggaaccagtgccggtactgcagactgaagaagtgcttcagagccggcatgaagaaagaagccgtgcagaacgagcgggaccggatcagcaccagaagaagcagctacgaggacagcagcctgcccagcatcaacgccctgctgcaggccgaggtgctgagcagacagatcaccgaaccagtgtccggcatcaacggcgacatccgggccaagaagatcgccagcattgccgacgtgtgcgagagcatgaaggaacagctgctggtgctggtggaatgggccaagtacatccccgccttttgcgagctgcccctggacgatcaggtggccctgctgagagcacacgccggcgaacatctgctgctgggagccaccaagcggagcatggtgttcaaggacgtgctgctgctgggcaacgactacatcgtgcccagacactgccctgagctggccgagatgagccgggtgtccatcagaatcctggacgaactggtgctgccgtttcaggaactgcagatcgacgacaacgagtacgcctacctgaaggccatcatctttttcgaccccgacgccaagggcctgagcgaccctggcaagatcaagcggctgagaagccaggtgcaagtgtccctggaagattacatcaacgaccggcagtacgacagccggggcagatttggcgaactgctcctgctgctgcccaccctgcagagcatcacctggcagatgatcgagcagatccagttcatcaagctgttcggcatggccaagatcgacaatctgctgcaggaaatgctgctcgggggcagcccttctgatgcccctcatgcccaccaccctctgcaccctcacctgatgcaagaacacatgggcaccaatgtgatcgtggccaacacaatgcccacccacctgagcaacggccagatgtgcgagtggcccagacctagaggacaggccgccacacctgagacacctcagccttctccacctggcggctctggcagcgagccttacaaactgctgcctggcgctgtggccaccatcgtgaaacctctgagcgccatcccccagcccaccatcaccaagcaggaagtgatctgaggactagttataagactgactagcccgatgggcctcccaacgggccctcctcccctccttgcaccgagattaataaaaaaaaaaaaaaaaaaaaaaaaaaaaaaaaaaaaaaaaaaaaaaaaaaaaaaaaaaaaaaaatgcatcccccccccccccccccccccccccccccccaaaggctcttttcagagccaccagaatt

SEQ ID NO: 2864 - RNA, 1531 nt, synthetic construct
  misc_feature 1..1531: note = mRNA i-3 (A64-N5-C30-hSL-N5) (opt29) from Homo sapiens__NP_000448.3__HNF4A(39-474)(S167A)
  source 1..1531: mol_type = other RNA
aggagaaagcttaccatggacaccagccctagcgagggcaccaacctgaacgcccctaatagcctgggagtgtccgccctgtgtgccatctgtggcgatagagccaccggcaagcactacggcgccagctcttgtgatggctgcaagggcttcttccggcggagcgtgcggaagaaccacatgtacagctgccggttcagccggcagtgcgtggtggacaaggataagcggaaccagtgccggtactgcagactgaagaagtgcttcagagccggcatgaagaaagaagccgtgcagaacgagcgggaccggatcagcaccagaagaagcagctacgaggacagcagcctgcccagcatcaacgccctgctgcaggccgaggtgctgagcagacagatcaccgccccagtgtccggcatcaacggcgacatccgggccaagaagatcgccagcattgccgacgtgtgcgagagcatgaaggaacagctgctggtgctggtggaatgggccaagtacatccccgccttttgcgagctgcccctggacgatcaggtggccctgctgagagcacacgccggcgaacatctgctgctgggagccaccaagcggagcatggtgttcaaggacgtgctgctgctgggcaacgactacatcgtgcccagacactgccctgagctggccgagatgagccgggtgtccatcagaatcctggacgaactggtgctgccgtttcaggaactgcagatcgacgacaacgagtacgcctacctgaaggccatcatctttttcgaccccgacgccaagggcctgagcgaccctggcaagatcaagcggctgagaagccaggtgcaagtgtccctggaagattacatcaacgaccggcagtacgacagccggggcagatttggcgaactgctcctgctgctgcccaccctgcagagcatcacctggcagatgatcgagcagatccagttcatcaagctgttcggcatggccaagatcgacaatctgctgcaggaaatgctgctcgggggcagcccttctgatgcccctcatgcccaccaccctctgcaccctcacctgatgcaagaacacatgggcaccaatgtgatcgtggccaacacaatgcccacccacctgagcaacggccagatgtgcgagtggcccagacctagaggacaggccgccacacctgagacacctcagccttctccacctggcggctctggcagcgagccttacaaactgctgcctggcgctgtggccaccatcgtgaaacctctgagcgccatcccccagcccaccatcaccaagcaggaagtgatctgaggactagttataagactgactagcccgatgggcctcccaacgggccctcctcccctccttgcaccgagattaataaaaaaaaaaaaaaaaaaaaaaaaaaaaaaaaaaaaaaaaaaaaaaaaaaaaaaaaaaaaaaaatgcatcccccccccccccccccccccccccccccccaaaggctcttttcagagccaccagaatt

SEQ ID NO: 2865 - RNA, 1531 nt, synthetic construct
  misc_feature 1..1531: note = mRNA i-3 (A64-N5-C30-hSL-N5) (opt29) from Homo sapiens__NP_000448.3__HNF4A(39-474)(S167A_S378A_T429A_T432A _S436A)
  source 1..1531: mol_type = other RNA
aggagaaagcttaccatggacaccagccctagcgagggcaccaacctgaacgcccctaatagcctgggagtgtccgccctgtgtgccatctgtggcgatagagccaccggcaagcactacggcgccagctcttgtgatggctgcaagggcttcttccggcggagcgtgcggaagaaccacatgtacagctgccggttcagccggcagtgcgtggtggacaaggataagcggaaccagtgccggtactgcagactgaagaagtgcttcagagccggcatgaagaaagaagccgtgcagaacgagcgggaccggatcagcaccagaagaagcagctacgaggacagcagcctgcccagcatcaacgccctgctgcaggccgaggtgctgagcagacagatcaccgccccagtgtccggcatcaacggcgacatccgggccaagaagatcgccagcattgccgacgtgtgcgagagcatgaaggaacagctgctggtgctggtggaatgggccaagtacatccccgccttttgcgagctgcccctggacgatcaggtggccctgctgagagcacacgccggcgaacatctgctgctgggagccaccaagcggagcatggtgttcaaggacgtgctgctgctgggcaacgactacatcgtgcccagacactgccctgagctggccgagatgagccgggtgtccatcagaatcctggacgaactggtgctgccgtttcaggaactgcagatcgacgacaacgagtacgcctacctgaaggccatcatctttttcgaccccgacgccaagggcctgagcgaccctggcaagatcaagcggctgagaagccaggtgcaagtgtccctggaagattacatcaacgaccggcagtacgacagccggggcagatttggcgaactgctcctgctgctgcccaccctgcagagcatcacctggcagatgatcgagcagatccagttcatcaagctgttcggcatggccaagatcgacaatctgctgcaggaaatgctgctcgggggcgccccttctgatgcccctcatgcccaccaccctctgcaccctcacctgatgcaagaacacatgggcaccaatgtgatcgtggccaacacaatgcccacccacctgagcaacggccagatgtgcgagtggcccagacctagaggacaggccgccgcccctgaggcccctcagcctgccccacctggcggctctggcagcgagccttacaaactgctgcctggcgctgtggccaccatcgtgaaacctctgagcgccatcccccagcccaccatcaccaagcaggaagtgatctgaggactagttataagactgactagcccgatgggcctcccaacgggccctcctcccctccttgcaccgagattaataaaaaaaaaaaaaaaaaaaaaaaaaaaaaaaaaaaaaaaaaaaaaaaaaaaaaaaaaaaaaaaatgcatcccccccccccccccccccccccccccccccaaaggctcttttcagagccaccagaatt

SEQ ID NO: 2866 - RNA, 1531 nt, synthetic construct
  misc_feature 1..1531: note = mRNA i-3 (A64-N5-C30-hSL-N5) (opt29) from Homo sapiens__NP_000448.3__HNF4A(39-474)(S167E_S378E_T429E_T432E _S436E)
  source 1..1531: mol_type = other RNA
aggagaaagcttaccatggacaccagccctagcgagggcaccaacctgaacgcccctaatagcctgggagtgtccgccctgtgtgccatctgtggcgatagagccaccggcaagcactacggcgccagctcttgtgatggctgcaagggcttcttccggcggagcgtgcggaagaaccacatgtacagctgccggttcagccggcagtgcgtggtggacaaggataagcggaaccagtgccggtactgcagactgaagaagtgcttcagagccggcatgaagaaagaagccgtgcagaacgagcgggaccggatcagcaccagaagaagcagctacgaggacagcagcctgcccagcatcaacgccctgctgcaggccgaggtgctgagcagacagatcaccgaaccagtgtccggcatcaacggcgacatccgggccaagaagatcgccagcattgccgacgtgtgcgagagcatgaaggaacagctgctggtgctggtggaatgggccaagtacatccccgccttttgcgagctgcccctggacgatcaggtggccctgctgagagcacacgccggcgaacatctgctgctgggagccaccaagcggagcatggtgttcaaggacgtgctgctgctgggcaacgactacatcgtgcccagacactgccctgagctggccgagatgagccgggtgtccatcagaatcctggacgaactggtgctgccgtttcaggaactgcagatcgacgacaacgagtacgcctacctgaaggccatcatctttttcgaccccgacgccaagggcctgagcgaccctggcaagatcaagcggctgagaagccaggtgcaagtgtccctggaagattacatcaacgaccggcagtacgacagccggggcagatttggcgaactgctcctgctgctgcccaccctgcagagcatcacctggcagatgatcgagcagatccagttcatcaagctgttcggcatggccaagatcgacaatctgctgcaggaaatgctgctcgggggcgagccttctgatgcccctcatgcccaccaccctctgcaccctcacctgatgcaagaacacatgggcaccaatgtgatcgtggccaacacaatgcccacccacctgagcaacggccagatgtgcgagtggcccagacctagaggacaggccgccgaacctgaggagcctcagcctgaaccacctggcggctctggcagcgagccttacaaactgctgcctggcgctgtggccaccatcgtgaaacctctgagcgccatcccccagcccaccatcaccaagcaggaagtgatctgaggactagttataagactgactagcccgatgggcctcccaacgggccctcctcccctccttgcaccgagattaataaaaaaaaaaaaaaaaaaaaaaaaaaaaaaaaaaaaaaaaaaaaaaaaaaaaaaaaaaaaaaaatgcatcccccccccccccccccccccccccccccccaaaggctcttttcagagccaccagaatt

SEQ ID NO: 2867 - RNA, 1531 nt, synthetic construct
  misc_feature 1..1531: note = mRNA i-3 (A64-N5-C30-hSL-N5) (opt29) from Homo sapiens__NP_000448.3__HNF4A(39-474)(S87A)
  source 1..1531: mol_type = other RNA
aggagaaagcttaccatggacaccagccctagcgagggcaccaacctgaacgcccctaatagcctgggagtgtccgccctgtgtgccatctgtggcgatagagccaccggcaagcactacggcgccagctcttgtgatggctgcaagggcttcttccggcgggccgtgcggaagaaccacatgtacagctgccggttcagccggcagtgcgtggtggacaaggataagcggaaccagtgccggtactgcagactgaagaagtgcttcagagccggcatgaagaaagaagccgtgcagaacgagcgggaccggatcagcaccagaagaagcagctacgaggacagcagcctgcccagcatcaacgccctgctgcaggccgaggtgctgagcagacagatcaccagcccagtgtccggcatcaacggcgacatccgggccaagaagatcgccagcattgccgacgtgtgcgagagcatgaaggaacagctgctggtgctggtggaatgggccaagtacatccccgccttttgcgagctgcccctggacgatcaggtggccctgctgagagcacacgccggcgaacatctgctgctgggagccaccaagcggagcatggtgttcaaggacgtgctgctgctgggcaacgactacatcgtgcccagacactgccctgagctggccgagatgagccgggtgtccatcagaatcctggacgaactggtgctgccgtttcaggaactgcagatcgacgacaacgagtacgcctacctgaaggccatcatctttttcgaccccgacgccaagggcctgagcgaccctggcaagatcaagcggctgagaagccaggtgcaagtgtccctggaagattacatcaacgaccggcagtacgacagccggggcagatttggcgaactgctcctgctgctgcccaccctgcagagcatcacctggcagatgatcgagcagatccagttcatcaagctgttcggcatggccaagatcgacaatctgctgcaggaaatgctgctcgggggcagcccttctgatgcccctcatgcccaccaccctctgcaccctcacctgatgcaagaacacatgggcaccaatgtgatcgtggccaacacaatgcccacccacctgagcaacggccagatgtgcgagtggcccagacctagaggacaggccgccacacctgagacacctcagccttctccacctggcggctctggcagcgagccttacaaactgctgcctggcgctgtggccaccatcgtgaaacctctgagcgccatcccccagcccaccatcaccaagcaggaagtgatctgaggactagttataagactgactagcccgatgggcctcccaacgggccctcctcccctccttgcaccgagattaataaaaaaaaaaaaaaaaaaaaaaaaaaaaaaaaaaaaaaaaaaaaaaaaaaaaaaaaaaaaaaaatgcatcccccccccccccccccccccccccccccccaaaggctcttttcagagccaccagaatt

SEQ ID NO: 2868 - RNA, 1531 nt, synthetic construct
  misc_feature 1..1531: note = mRNA i-3 (A64-N5-C30-hSL-N5) (opt29) from Homo sapiens__NP_000448.3__HNF4A(39-474)(S87E)
  source 1..1531: mol_type = other RNA
aggagaaagcttaccatggacaccagccctagcgagggcaccaacctgaacgcccctaatagcctgggagtgtccgccctgtgtgccatctgtggcgatagagccaccggcaagcactacggcgccagctcttgtgatggctgcaagggcttcttccggcgggaggtgcggaagaaccacatgtacagctgccggttcagccggcagtgcgtggtggacaaggataagcggaaccagtgccggtactgcagactgaagaagtgcttcagagccggcatgaagaaagaagccgtgcagaacgagcgggaccggatcagcaccagaagaagcagctacgaggacagcagcctgcccagcatcaacgccctgctgcaggccgaggtgctgagcagacagatcaccagcccagtgtccggcatcaacggcgacatccgggccaagaagatcgccagcattgccgacgtgtgcgagagcatgaaggaacagctgctggtgctggtggaatgggccaagtacatccccgccttttgcgagctgcccctggacgatcaggtggccctgctgagagcacacgccggcgaacatctgctgctgggagccaccaagcggagcatggtgttcaaggacgtgctgctgctgggcaacgactacatcgtgcccagacactgccctgagctggccgagatgagccgggtgtccatcagaatcctggacgaactggtgctgccgtttcaggaactgcagatcgacgacaacgagtacgcctacctgaaggccatcatctttttcgaccccgacgccaagggcctgagcgaccctggcaagatcaagcggctgagaagccaggtgcaagtgtccctggaagattacatcaacgaccggcagtacgacagccggggcagatttggcgaactgctcctgctgctgcccaccctgcagagcatcacctggcagatgatcgagcagatccagttcatcaagctgttcggcatggccaagatcgacaatctgctgcaggaaatgctgctcgggggcagcccttctgatgcccctcatgcccaccaccctctgcaccctcacctgatgcaagaacacatgggcaccaatgtgatcgtggccaacacaatgcccacccacctgagcaacggccagatgtgcgagtggcccagacctagaggacaggccgccacacctgagacacctcagccttctccacctggcggctctggcagcgagccttacaaactgctgcctggcgctgtggccaccatcgtgaaacctctgagcgccatcccccagcccaccatcaccaagcaggaagtgatctgaggactagttataagactgactagcccgatgggcctcccaacgggccctcctcccctccttgcaccgagattaataaaaaaaaaaaaaaaaaaaaaaaaaaaaaaaaaaaaaaaaaaaaaaaaaaaaaaaaaaaaaaaatgcatcccccccccccccccccccccccccccccccaaaggctcttttcagagccaccagaatt

SEQ ID NO: 2869 - RNA, 1531 nt, synthetic construct; identical to SEQ ID NO: 2856
  misc_feature 1..1531: note = mRNA i-3 (A64-N5-C30-hSL-N5) (opt29) from Homo sapiens__NP_000448.3__HNF4A(39-474)(R2V)
  source 1..1531: mol_type = other RNA

SEQ ID NO: 2870 - RNA, 1531 nt, synthetic construct; identical to SEQ ID NO: 2856
  misc_feature 1..1531: note = mRNA i-3 (A64-N5-C30-hSL-N5) (opt29) from Homo sapiens__NP_000448.3__HNF4A(39-474)(R2V_K5V)
  source 1..1531: mol_type = other RNA

SEQ ID NO: 2871 - RNA, 1531 nt, synthetic construct
  misc_feature 1..1531: note = mRNA i-3 (A64-N5-C30-hSL-N5) (opt29) from Homo sapiens__NP_000448.3__HNF4A(39-474)(K179R_K180R)
  source 1..1531: mol_type = other RNA
aggagaaagcttaccatggacaccagccctagcgagggcaccaacctgaacgcccctaatagcctgggagtgtccgccctgtgtgccatctgtggcgatagagccaccggcaagcactacggcgccagctcttgtgatggctgcaagggcttcttccggcggagcgtgcggaagaaccacatgtacagctgccggttcagccggcagtgcgtggtggacaaggataagcggaaccagtgccggtactgcagactgaagaagtgcttcagagccggcatgaagaaagaagccgtgcagaacgagcgggaccggatcagcaccagaagaagcagctacgaggacagcagcctgcccagcatcaacgccctgctgcaggccgaggtgctgagcagacagatcaccagcccagtgtccggcatcaacggcgacatccgggcccggagaatcgccagcattgccgacgtgtgcgagagcatgaaggaacagctgctggtgctggtggaatgggccaagtacatccccgccttttgcgagctgcccctggacgatcaggtggccctgctgagagcacacgccggcgaacatctgctgctgggagccaccaagcggagcatggtgttcaaggacgtgctgctgctgggcaacgactacatcgtgcccagacactgccctgagctggccgagatgagccgggtgtccatcagaatcctggacgaactggtgctgccgtttcaggaactgcagatcgacgacaacgagtacgcctacctgaaggccatcatctttttcgaccccgacgccaagggcctgagcgaccctggcaagatcaagcggctgagaagccaggtgcaagtgtccctggaagattacatcaacgaccggcagtacgacagccggggcagatttggcgaactgctcctgctgctgcccaccctgcagagcatcacctggcagatgatcgagcagatccagttcatcaagctgttcggcatggccaagatcgacaatctgctgcaggaaatgctgctcgggggcagcccttctgatgcccctcatgcccaccaccctctgcaccctcacctgatgcaagaacacatgggcaccaatgtgatcgtggccaacacaatgcccacccacctgagcaacggccagatgtgcgagtggcccagacctagaggacaggccgccacacctgagacacctcagccttctccacctggcggctctggcagcgagccttacaaactgctgcctggcgctgtggccaccatcgtgaaacctctgagcgccatcccccagcccaccatcaccaagcaggaagtgatctgaggactagttataagactgactagcccgatgggcctcccaacgggccctcctcccctccttgcaccgagattaataaaaaaaaaaaaaaaaaaaaaaaaaaaaaaaaaaaaaaaaaaaaaaaaaaaaaaaaaaaaaaaatgcatcccccccccccccccccccccccccccccccaaaggctcttttcagagccaccagaatt

SEQ ID NO: 2872 - RNA, 1531 nt, synthetic construct
  misc_feature 1..1531: note = mRNA i-3 (A64-N5-C30-hSL-N5) (opt29) from Homo sapiens__NP_000448.3__HNF4A(39-474)(K234R)
  source 1..1531: mol_type = other RNA
aggagaaagcttaccatggacaccagccctagcgagggcaccaacctgaacgcccctaatagcctgggagtgtccgccctgtgtgccatctgtggcgatagagccaccggcaagcactacggcgccagctcttgtgatggctgcaagggcttcttccggcggagcgtgcggaagaaccacatgtacagctgccggttcagccggcagtgcgtggtggacaaggataagcggaaccagtgccggtactgcagactgaagaagtgcttcagagccggcatgaagaaagaagccgtgcagaacgagcgggaccggatcagcaccagaagaagcagctacgaggacagcagcctgcccagcatcaacgccctgctgcaggccgaggtgctgagcagacagatcaccagcccagtgtccggcatcaacggcgacatccgggccaagaagatcgccagcattgccgacgtgtgcgagagcatgaaggaacagctgctggtgctggtggaatgggccaagtacatccccgccttttgcgagctgcccctggacgatcaggtggccctgctgagagcacacgccggcgaacatctgctgctgggagccacccggcggagcatggtgttcaaggacgtgctgctgctgggcaacgactacatcgtgcccagacactgccctgagctggccgagatgagccgggtgtccatcagaatcctggacgaactggtgctgccgtttcaggaactgcagatcgacgacaacgagtacgcctacctgaaggccatcatctttttcgaccccgacgccaagggcctgagcgaccctggcaagatcaagcggctgagaagccaggtgcaagtgtccctggaagattacatcaacgaccggcagtacgacagccggggcagatttggcgaactgctcctgctgctgcccaccctgcagagcatcacctggcagatgatcgagcagatccagttcatcaagctgttcggcatggccaagatcgacaatctgctgcaggaaatgctgctcgggggcagcccttctgatgcccctcatgcccaccaccctctgcaccctcacctgatgcaagaacacatgggcaccaatgtgatcgtggccaacacaatgcccacccacctgagcaacggccagatgtgcgagtggcccagacctagaggacaggccgccacacctgagacacctcagccttctccacctggcggctctggcagcgagccttacaaactgctgcctggcgctgtggccaccatcgtgaaacctctgagcgccatcccccagcccaccatcaccaagcaggaagtgatctgaggactagttataagactgactagcccgatgggcctcccaacgggccctcctcccctccttgcaccgagattaataaaaaaaaaaaaaaaaaaaaaaaaaaaaaaaaaaaaaaaaaaaaaaaaaaaaaaaaaaaaaaaatgcatcccccccccccccccccccccccccccccccaaaggctcttttcagagccaccagaatt

SEQ ID NO: 2873 - RNA, 1531 nt, synthetic construct
  misc_feature 1..1531: note = mRNA i-3 (A64-N5-C30-hSL-N5) (opt29) from Homo sapiens__NP_000448.3__HNF4A(39-474)(K300R)
  source 1..1531: mol_type = other RNA
aggagaaagcttaccatggacaccagccctagcgagggcaccaacctgaacgcccctaatagcctgggagtgtccgccctgtgtgccatctgtggcgatagagccaccggcaagcactacggcgccagctcttgtgatggctgcaagggcttcttccggcggagcgtgcggaagaaccacatgtacagctgccggttcagccggcagtgcgtggtggacaaggataagcggaaccagtgccggtactgcagactgaagaagtgcttcagagccggcatgaagaaagaagccgtgcagaacgagcgggaccggatcagcaccagaagaagcagctacgaggacagcagcctgcccagcatcaacgccctgctgcaggccgaggtgctgagcagacagatcaccagcccagtgtccggcatcaacggcgacatccgggccaagaagatcgccagcattgccgacgtgtgcgagagcatgaaggaacagctgctggtgctggtggaatgggccaagtacatccccgccttttgcgagctgcccctggacgatcaggtggccctgctgagagcacacgccggcgaacatctgctgctgggagccaccaagcggagcatggtgttcaaggacgtgctgctgctgggcaacgactacatcgtgcccagacactgccctgagctggccgagatgagccgggtgtccatcagaatcctggacgaactggtgctgccgtttcaggaactgcagatcgacgacaacgagtacgcctacctgaaggccatcatctttttcgaccccgacgccagaggcctgagcgaccctggcaagatcaagcggctgagaagccaggtgcaagtgtccctggaagattacatcaacgaccggcagtacgacagccggggcagatttggcgaactgctcctgctgctgcccaccctgcagagcatcacctggcagatgatcgagcagatccagttcatcaagctgttcggcatggccaagatcgacaatctgctgcaggaaatgctgctcgggggcagcccttctgatgcccctcatgcccaccaccctctgcaccctcacctgatgcaagaacacatgggcaccaatgtgatcgtggccaacacaatgcccacccacctgagcaacggccagatgtgcgagtggcccagacctagaggacaggccgccacacctgagacacctcagccttctccacctggcggctctggcagcgagccttacaaactgctgcctggcgctgtggccaccatcgtgaaacctctgagcgccatcccccagcccaccatcaccaagcaggaagtgatctgaggactagttataagactgactagcccgatgggcctcccaacgggccctcctcccctccttgcaccgagattaataaaaaaaaaaaaaaaaaaaaaaaaaaaaaaaaaaaaaaaaaaaaaaaaaaaaaaaaaaaaaaaatgcatcccccccccccccccccccccccccccccccaaaggctcttttcagagccaccagaatt

SEQ ID NO: 2874 - RNA, 1531 nt, synthetic construct
  misc_feature 1..1531: note = mRNA i-3 (A64-N5-C30-hSL-N5) (opt29) from Homo sapiens__NP_000448.3__HNF4A(39-474)(K300R_K307R_K309R)
  source 1..1531: mol_type = other RNA
aggagaaagcttaccatggacaccagccctagcgagggcaccaacctgaacgcccctaatagcctgggagtgtccgccctgtgtgccatctgtggcgatagagccaccggcaagcactacggcgccagctcttgtgatggctgcaagggcttcttccggcggagcgtgcggaagaaccacatgtacagctgccggttcagccggcagtgcgtggtggacaaggataagcggaaccagtgccggtactgcagactgaagaagtgcttcagagccggcatgaagaaagaagccgtgcagaacgagcgggaccggatcagcaccagaagaagcagctacgaggacagcagcctgcccagcatcaacgccctgctgcaggccgaggtgctgagcagacagatcaccagcccagtgtccggcatcaacggcgacatccgggccaagaagatcgccagcattgccgacgtgtgcgagagcatgaaggaacagctgctggtgctggtggaatgggccaagtacatccccgccttttgcgagctgcccctggacgatcaggtggccctgctgagagcacacgccggcgaacatctgctgctgggagccaccaagcggagcatggtgttcaaggacgtgctgctgctgggcaacgactacatcgtgcccagacactgccctgagctggccgagatgagccgggtgtccatcagaatcctggacgaactggtgctgccgtttcaggaactgcagatcgacgacaacgagtacgcctacctgaaggccatcatctttttcgaccccgacgccagaggcctgagcgaccctggccggatcagacggctgagaagccaggtgcaagtgtccctggaagattacatcaacgaccggcagtacgacagccggggcagatttggcgaactgctcctgctgctgcccaccctgcagagcatcacctggcagatgatcgagcagatccagttcatcaagctgttcggcatggccaagatcgacaatctgctgcaggaaatgctgctcgggggcagcccttctgatgcccctcatgcccaccaccctctgcaccctcacctgatgcaagaacacatgggcaccaatgtgatcgtggccaacacaatgcccacccacctgagcaacggccagatgtgcgagtggcccagacctagaggacaggccgccacacctgagacacctcagccttctccacctggcggctctggcagcgagccttacaaactgctgcctggcgctgtggccaccatcgtgaaacctctgagcgccatcccccagcccaccatcaccaagcaggaagtgatctgaggactagttataagactgactagcccgatgggcctcccaacgggccctcctcccctccttgcaccgagattaataaaaaaaaaaaaaaaaaaaaaaaaaaaaaaaaaaaaaaaaaaaaaaaaaaaaaaaaaaaaaaaatgcatcccccccccccccccccccccccccccccccaaaggctcttttcagagccaccagaatt

SEQ ID NO: 2875 - RNA, 1531 nt, synthetic construct
  misc_feature 1..1531: note = mRNA i-3 (A64-N5-C30-hSL-N5) (opt29) from Homo sapiens__NP_000448.3__HNF4A(39-474)(K447R_K470R)
  source 1..1531: mol_type = other RNA
aggagaaagcttaccatggacaccagccctagcgagggcaccaacctgaacgcccctaatagcctgggagtgtccgccctgtgtgccatctgtggcgatagagccaccggcaagcactacggcgccagctcttgtgatggctgcaagggcttcttccggcggagcgtgcggaagaaccacatgtacagctgccggttcagccggcagtgcgtggtggacaaggataagcggaaccagtgccggtactgcagactgaagaagtgcttcagagccggcatgaagaaagaagccgtgcagaacgagcgggaccggatcagcaccagaagaagcagctacgaggacagcagcctgcccagcatcaacgccctgctgcaggccgaggtgctgagcagacagatcaccagcccagtgtccggcatcaacggcgacatccgggccaagaagatcgccagcattgccgacgtgtgcgagagcatgaaggaacagctgctggtgctggtggaatgggccaagtacatccccgccttttgcgagctgcccctggacgatcaggtggccctgctgagagcacacgccggcgaacatctgctgctgggagccaccaagcggagcatggtgttcaaggacgtgctgctgctgggcaacgactacatcgtgcccagacactgccctgagctggccgagatgagccgggtgtccatcagaatcctggacgaactggtgctgccgtttcaggaactgcagatcgacgacaacgagtacgcctacctgaaggccatcatctttttcgaccccgacgccaagggcctgagcgaccctggcaagatcaagcggctgagaagccaggtgcaagtgtccctggaagattacatcaacgaccggcagtacgacagccggggcagatttggcgaactgctcctgctgctgcccaccctgcagagcatcacctggcagatgatcgagcagatccagttcatcaagctgttcggcatggccaagatcgacaatctgctgcaggaaatgctgctcgggggcagcccttctgatgcccctcatgcccaccaccctctgcaccctcacctgatgcaagaacacatgggcaccaatgtgatcgtggccaacacaatgcccacccacctgagcaacggccagatgtgcgagtggcccagacctagaggacaggccgccacacctgagacacctcagccttctccacctggcggctctggcagcgagccttaccggctgctgcctggcgctgtggccaccatcgtgaaacctctgagcgccatcccccagcccaccatcacccggcaggaagtgatctgaggactagttataagactgactagcccgatgggcctcccaacgggccctcctcccctccttgcaccgagattaataaaaaaaaaaaaaaaaaaaaaaaaaaaaaaaaaaaaaaaaaaaaaaaaaaaaaaaaaaaaaaaatgcatcccccccccccccccccccccccccccccccaaaggctcttttcagagccaccagaatt

SEQ ID NO: 2876 - RNA, 1531 nt, synthetic construct
  misc_feature 1..1531: note = mRNA i-3 (A64-N5-C30-hSL-N5) (opt29) from Homo sapiens__NP_000448.3__HNF4A(39-474)(K458R)
  source 1..1531: mol_type = other RNA
aggagaaagcttaccatggacaccagccctagcgagggcaccaacctgaacgcccctaatagcctgggagtgtccgccctgtgtgccatctgtggcgatagagccaccggcaagcactacggcgccagctcttgtgatggctgcaagggcttcttccggcggagcgtgcggaagaaccacatgtacagctgccggttcagccggcagtgcgtggtggacaaggataagcggaaccagtgccggtactgcagactgaagaagtgcttcagagccggcatgaagaaagaagccgtgcagaacgagcgggaccggatcagcaccagaagaagcagctacgaggacagcagcctgcccagcatcaacgccctgctgcaggccgaggtgctgagcagacagatcaccagcccagtgtccggcatcaacggcgacatccgggccaagaagatcgccagcattgccgacgtgtgcgagagcatgaaggaacagctgctggtgctggtggaatgggccaagtacatccccgccttttgcgagctgcccctggacgatcaggtggccctgctgagagcacacgccggcgaacatctgctgctgggagccaccaagcggagcatggtgttcaaggacgtgctgctgctgggcaacgactacatcgtgcccagacactgccctgagctggccgagatgagccgggtgtccatcagaatcctggacgaactggtgctgccgtttcaggaactgcagatcgacgacaacgagtacgcctacctgaaggccatcatctttttcgaccccgacgccaagggcctgagcgaccctggcaagatcaagcggctgagaagccaggtgcaagtgtccctggaagattacatcaacgaccggcagtacgacagccggggcagatttggcgaactgctcctgctgctgcccaccctgcagagcatcacctggcagatgatcgagcagatccagttcatcaagctgttcggcatggccaagatcgacaatctgctgcaggaaatgctgctcgggggcagcccttctgatgcccctcatgcccaccaccctctgcaccctcacctgatgcaagaacacatgggcaccaatgtgatcgtggccaacacaatgcccacccacctgagcaacggccagatgtgcgagtggcccagacctagaggacaggccgccacacctgagacacctcagccttctccacctggcggctctggcagcgagccttacaaactgctgcctggcgctgtggccaccatcgtgagacctctgagcgccatcccccagcccaccatcaccaagcaggaagtgatctgaggactagttataagactgactagcccgatgggcctcccaacgggccctcctcccctccttgcaccgagattaataaaaaaaaaaaaaaaaaaaaaaaaaaaaaaaaaaaaaaaaaaaaaaaaaaaaaaaaaaaaaaaatgcatcccccccccccccccccccccccccccccccaaaggctcttttcagagccaccagaatt

SEQ ID NO: 2877 - RNA, 1531 nt, synthetic construct
  misc_feature 1..1531: note = mRNA i-3 (A64-N5-C30-hSL-N5) (opt29) from Homo sapiens__NP_000448.3__HNF4A(39-474)(K106R_K108R_K126R_K127R )
  source 1..1531: mol_type = other RNA
aggagaaagcttaccatggacaccagccctagcgagggcaccaacctgaacgcccctaatagcctgggagtgtccgccctgtgtgccatctgtggcgatagagccaccggcaagcactacggcgccagctcttgtgatggctgcaagggcttcttccggcggagcgtgcggaagaaccacatgtacagctgccggttcagccggcagtgcgtggtggaccgggatagacggaaccagtgccggtactgcagactgaagaagtgcttcagagccggcatgcggagagaagccgtgcagaacgagcgggaccggatcagcaccagaagaagcagctacgaggacagcagcctgcccagcatcaacgccctgctgcaggccgaggtgctgagcagacagatcaccagcccagtgtccggcatcaacggcgacatccgggccaagaagatcgccagcattgccgacgtgtgcgagagcatgaaggaacagctgctggtgctggtggaatgggccaagtacatccccgccttttgcgagctgcccctggacgatcaggtggccctgctgagagcacacgccggcgaacatctgctgctgggagccaccaagcggagcatggtgttcaaggacgtgctgctgctgggcaacgactacatcgtgcccagacactgccctgagctggccgagatgagccgggtgtccatcagaatcctggacgaactggtgctgccgtttcaggaactgcagatcgacgacaacgagtacgcctacctgaaggccatcatctttttcgaccccgacgccaagggcctgagcgaccctggcaagatcaagcggctgagaagccaggtgcaagtgtccctggaagattacatcaacgaccggcagtacgacagccggggcagatttggcgaactgctcctgctgctgcccaccctgcagagcatcacctggcagatgatcgagcagatccagttcatcaagctgttcggcatggccaagatcgacaatctgctgcaggaaatgctgctcgggggcagcccttctgatgcccctcatgcccaccaccctctgcaccctcacctgatgcaagaacacatgggcaccaatgtgatcgtggccaacacaatgcccacccacctgagcaacggccagatgtgcgagtggcccagacctagaggacaggccgccacacctgagacacctcagccttctccacctggcggctctggcagcgagccttacaaactgctgcctggcgctgtggccaccatcgtgaaacctctgagcgccatcccccagcccaccatcaccaagcaggaagtgatctgaggactagttataagactgactagcccgatgggcctcccaacgggccctcctcccctccttgcaccgagattaataaaaaaaaaaaaaaaaaaaaaaaaaaaaaaaaaaaaaaaaaaaaaaaaaaaaaaaaaaaaaaaatgcatcccccccccccccccccccccccccccccccaaaggctcttttcagagccaccagaatt

SEQ ID NO: 2878 - RNA, 1531 nt, synthetic construct
  misc_feature 1..1531: note = mRNA i-3 (A64-N5-C30-hSL-N5) (opt29) from Homo sapiens__NP_000448.3__HNF4A(39-474)(E285Q)
  source 1..1531: mol_type = other RNA
aggagaaagcttaccatggacaccagccctagcgagggcaccaacctgaacgcccctaatagcctgggagtgtccgccctgtgtgccatctgtggcgatagagccaccggcaagcactacggcgccagctcttgtgatggctgcaagggcttcttccggcggagcgtgcggaagaaccacatgtacagctgccggttcagccggcagtgcgtggtggacaaggataagcggaaccagtgccggtactgcagactgaagaagtgcttcagagccggcatgaagaaagaagccgtgcagaacgagcgggaccggatcagcaccagaagaagcagctacgaggacagcagcctgcccagcatcaacgccctgctgcaggccgaggtgctgagcagacagatcaccagcccagtgtccggcatcaacggcgacatccgggccaagaagatcgccagcattgccgacgtgtgcgagagcatgaaggaacagctgctggtgctggtggaatgggccaagtacatccccgccttttgcgagctgcccctggacgatcaggtggccctgctgagagcacacgccggcgaacatctgctgctgggagccaccaagcggagcatggtgttcaaggacgtgctgctgctgggcaacgactacatcgtgcccagacactgccctgagctggccgagatgagccgggtgtccatcagaatcctggacgaactggtgctgccgtttcaggaactgcagatcgacgacaaccagtacgcctacctgaaggccatcatctttttcgaccccgacgccaagggcctgagcgaccctggcaagatcaagcggctgagaagccaggtgcaagtgtccctggaagattacatcaacgaccggcagtacgacagccggggcagatttggcgaactgctcctgctgctgcccaccctgcagagcatcacctggcagatgatcgagcagatccagttcatcaagctgttcggcatggccaagatcgacaatctgctgcaggaaatgctgctcgggggcagcccttctgatgcccctcatgcccaccaccctctgcaccctcacctgatgcaagaacacatgggcaccaatgtgatcgtggccaacacaatgcccacccacctgagcaacggccagatgtgcgagtggcccagacctagaggacaggccgccacacctgagacacctcagccttctccacctggcggctctggcagcgagccttacaaactgctgcctggcgctgtggccaccatcgtgaaacctctgagcgccatcccccagcccaccatcaccaagcaggaagtgatctgaggactagttataagactgactagcccgatgggcctcccaacgggccctcctcccctccttgcaccgagattaataaaaaaaaaaaaaaaaaaaaaaaaaaaaaaaaaaaaaaaaaaaaaaaaaaaaaaaaaaaaaaaatgcatcccccccccccccccccccccccccccccccaaaggctcttttcagagccaccagaatt

SEQ ID NO: 2879 - RNA, 1531 nt, synthetic construct
  misc_feature 1..1531: note = mRNA i-3 (A64-N5-C30-hSL-N5) (opt29) from Homo sapiens__NP_000448.3__HNF4A(39-474)(T166E)
  source 1..1531: mol_type = other RNA
aggagaaagcttaccatggacaccagccctagcgagggcaccaacctgaacgcccctaatagcctgggagtgtccgccctgtgtgccatctgtggcgatagagccaccggcaagcactacggcgccagctcttgtgatggctgcaagggcttcttccggcggagcgtgcggaagaaccacatgtacagctgccggttcagccggcagtgcgtggtggacaaggataagcggaaccagtgccggtactgcagactgaagaagtgcttcagagccggcatgaagaaagaagccgtgcagaacgagcgggaccggatcagcaccagaagaagcagctacgaggacagcagcctgcccagcatcaacgccctgctgcaggccgaggtgctgagcagacagatcgagagcccagtgtccggcatcaacggcgacatccgggccaagaagatcgccagcattgccgacgtgtgcgagagcatgaaggaacagctgctggtgctggtggaatgggccaagtacatccccgccttttgcgagctgcccctggacgatcaggtggccctgctgagagcacacgccggcgaacatctgctgctgggagccaccaagcggagcatggtgttcaaggacgtgctgctgctgggcaacgactacatcgtgcccagacactgccctgagctggccgagatgagccgggtgtccatcagaatcctggacgaactggtgctgccgtttcaggaactgcagatcgacgacaacgagtacgcctacctgaaggccatcatctttttcgaccccgacgccaagggcctgagcgaccctggcaagatcaagcggctgagaagccaggtgcaagtgtccctggaagattacatcaacgaccggcagtacgacagccggggcagatttggcgaactgctcctgctgctgcccaccctgcagagcatcacctggcagatgatcgagcagatccagttcatcaagctgttcggcatggccaagatcgacaatctgctgcaggaaatgctgctcgggggcagcccttctgatgcccctcatgcccaccaccctctgcaccctcacctgatgcaagaacacatgggcaccaatgtgatcgtggccaacacaatgcccacccacctgagcaacggccagatgtgcgagtggcccagacctagaggacaggccgccacacctgagacacctcagccttctccacctggcggctctggcagcgagccttacaaactgctgcctggcgctgtggccaccatcgtgaaacctctgagcgccatcccccagcccaccatcaccaagcaggaagtgatctgaggactagttataagactgactagcccgatgggcctcccaacgggccctcctcccctccttgcaccgagattaataaaaaaaaaaaaaaaaaaaaaaaaaaaaaaaaaaaaaaaaaaaaaaaaaaaaaaaaaaaaaaaatgcatcccccccccccccccccccccccccccccccaaaggctcttttcagagccaccagaatt

SEQ ID NO: 2880 - RNA, 1531 nt, synthetic construct
  misc_feature 1..1531: note = mRNA i-3 (A64-N5-C30-hSL-N5) (opt29) from Homo sapiens__NP_000448.3__HNF4A(39-474)(S148A)
  source 1..1531: mol_type = other RNA
aggagaaagcttaccatggacaccagccctagcgagggcaccaacctgaacgcccctaatagcctgggagtgtccgccctgtgtgccatctgtggcgatagagccaccggcaagcactacggcgccagctcttgtgatggctgcaagggcttcttccggcggagcgtgcggaagaaccacatgtacagctgccggttcagccggcagtgcgtggtggacaaggataagcggaaccagtgccggtactgcagactgaagaagtgcttcagagccggcatgaagaaagaagccgtgcagaacgagcgggaccggatcagcaccagaagaagcagctacgaggacagcgccctgcccagcatcaacgccctgctgcaggccgaggtgctgagcagacagatcaccagcccagtgtccggcatcaacggcgacatccgggccaagaagatcgccagcattgccgacgtgtgcgagagcatgaaggaacagctgctggtgctggtggaatgggccaagtacatccccgccttttgcgagctgcccctggacgatcaggtggccctgctgagagcacacgccggcgaacatctgctgctgggagccaccaagcggagcatggtgttcaaggacgtgctgctgctgggcaacgactacatcgtgcccagacactgccctgagctggccgagatgagccgggtgtccatcagaatcctggacgaactggtgctgccgtttcaggaactgcagatcgacgacaacgagtacgcctacctgaaggccatcatctttttcgaccccgacgccaagggcctgagcgaccctggcaagatcaagcggctgagaagccaggtgcaagtgtccctggaagattacatcaacgaccggcagtacgacagccggggcagatttggcgaactgctcctgctgctgcccaccctgcagagcatcacctggcagatgatcgagcagatccagttcatcaagctgttcggcatggccaagatcgacaatctgctgcaggaaatgctgctcgggggcagcccttctgatgcccctcatgcccaccaccctctgcaccctcacctgatgcaagaacacatgggcaccaatgtgatcgtggccaacacaatgcccacccacctgagcaacggccagatgtgcgagtggcccagacctagaggacaggccgccacacctgagacacctcagccttctccacctggcggctctggcagcgagccttacaaactgctgcctggcgctgtggccaccatcgtgaaacctctgagcgccatcccccagcccaccatcaccaagcaggaagtgatctgaggactagttataagactgactagcccgatgggcctcccaacgggccctcctcccctccttgcaccgagattaataaaaaaaaaaaaaaaaaaaaaaaaaaaaaaaaaaaaaaaaaaaaaaaaaaaaaaaaaaaaaaaatgcatcccccccccccccccccccccccccccccccaaaggctcttttcagagccaccagaatt

SEQ ID NO: 2881 - RNA, 1531 nt, synthetic construct
  misc_feature 1..1531: note = mRNA i-3 (A64-N5-C30-hSL-N5) (opt29) from Homo sapiens__NP_000448.3__HNF4A(39-474)(S148E)
  source 1..1531: mol_type = other RNA
aggagaaagcttaccatggacaccagccctagcgagggcaccaacctgaacgcccctaatagcctgggagtgtccgccctgtgtgccatctgtggcgatagagccaccggcaagcactacggcgccagctcttgtgatggctgcaagggcttcttccggcggagcgtgcggaagaaccacatgtacagctgccggttcagccggcagtgcgtggtggacaaggataagcggaaccagtgccggtactgcagactgaagaagtgcttcagagccggcatgaagaaagaagccgtgcagaacgagcgggaccggatcagcaccagaagaagcagctacgaggacagcgaactgcccagcatcaacgccctgctgcaggccgaggtgctgagcagacagatcaccagcccagtgtccggcatcaacggcgacatccgggccaagaagatcgccagcattgccgacgtgtgcgagagcatgaaggaacagctgctggtgctggtggaatgggccaagtacatccccgccttttgcgagctgcccctggacgatcaggtggccctgctgagagcacacgccggcgaacatctgctgctgggagccaccaagcggagcatggtgttcaaggacgtgctgctgctgggcaacgactacatcgtgcccagacactgccctgagctggccgagatgagccgggtgtccatcagaatcctggacgaactggtgctgccgtttcaggaactgcagatcgacgacaacgagtacgcctacctgaaggccatcatctttttcgaccccgacgccaagggcctgagcgaccctggcaagatcaagcggctgagaagccaggtgcaagtgtccctggaagattacatcaacgaccggcagtacgacagccggggcagatttggcgaactgctcctgctgctgcccaccctgcagagcatcacctggcagatgatcgagcagatccagttcatcaagctgttcggcatggccaagatcgacaatctgctgcaggaaatgctgctcgggggcagcccttctgatgcccctcatgcccaccaccctctgcaccctcacctgatgcaagaacacatgggcaccaatgtgatcgtggccaacacaatgcccacccacctgagcaacggccagatgtgcgagtggcccagacctagaggacaggccgccacacctgagacacctcagccttctccacctggcggctctggcagcgagccttacaaactgctgcctggcgctgtggccaccatcgtgaaacctctgagcgccatcccccagcccaccatcaccaagcaggaagtgatctgaggactagttataagactgactagcccgatgggcctcccaacgggccctcctcccctccttgcaccgagattaataaaaaaaaaaaaaaaaaaaaaaaaaaaaaaaaaaaaaaaaaaaaaaaaaaaaaaaaaaaaaaaatgcatcccccccccccccccccccccccccccccccaaaggctcttttcagagccaccagaatt

SEQ ID NO: 2882 - RNA, 1531 nt, synthetic construct
  misc_feature 1..1531: note = mRNA i-3 (A64-N5-C30-hSL-N5) (opt29) from Homo sapiens__NP_000448.3__HNF4A(39-474)(S183A)
  source 1..1531: mol_type = other RNA
aggagaaagcttaccatggacaccagccctagcgagggcaccaacctgaacgcccctaatagcctgggagtgtccgccctgtgtgccatctgtggcgatagagccaccggcaagcactacggcgccagctcttgtgatggctgcaagggcttcttccggcggagcgtgcggaagaaccacatgtacagctgccggttcagccggcagtgcgtggtggacaaggataagcggaaccagtgccggtactgcagactgaagaagtgcttcagagccggcatgaagaaagaagccgtgcagaacgagcgggaccggatcagcaccagaagaagcagctacgaggacagcagcctgcccagcatcaacgccctgctgcaggccgaggtgctgagcagacagatcaccagcccagtgtccggcatcaacggcgacatccgggccaagaagatcgccgccattgccgacgtgtgcgagagcatgaaggaacagctgctggtgctggtggaatgggccaagtacatccccgccttttgcgagctgcccctggacgatcaggtggccctgctgagagcacacgccggcgaacatctgctgctgggagccaccaagcggagcatggtgttcaaggacgtgctgctgctgggcaacgactacatcgtgcccagacactgccctgagctggccgagatgagccgggtgtccatcagaatcctggacgaactggtgctgccgtttcaggaactgcagatcgacgacaacgagtacgcctacctgaaggccatcatctttttcgaccccgacgccaagggcctgagcgaccctggcaagatcaagcggctgagaagccaggtgcaagtgtccctggaagattacatcaacgaccggcagtacgacagccggggcagatttggcgaactgctcctgctgctgcccaccctgcagagcatcacctggcagatgatcgagcagatccagttcatcaagctgttcggcatggccaagatcgacaatctgctgcaggaaatgctgctcgggggcagcccttctgatgcccctcatgcccaccaccctctgcaccctcacctgatgcaagaacacatgggcaccaatgtgatcgtggccaacacaatgcccacccacctgagcaacggccagatgtgcgagtggcccagacctagaggacaggccgccacacctgagacacctcagccttctccacctggcggctctggcagcgagccttacaaactgctgcctggcgctgtggccaccatcgtgaaacctctgagcgccatcccccagcccaccatcaccaagcaggaagtgatctgaggactagttataagactgactagcccgatgggcctcccaacgggccctcctcccctccttgcaccgagattaataaaaaaaaaaaaaaaaaaaaaaaaaaaaaaaaaaaaaaaaaaaaaaaaaaaaaaaaaaaaaaaatgcatcccccccccccccccccccccccccccccccaaaggctcttttcagagccaccagaatt

SEQ ID NO: 2883 - RNA, 1531 nt, synthetic construct
  misc_feature 1..1531: note = mRNA i-3 (A64-N5-C30-hSL-N5) (opt29) from Homo sapiens__NP_000448.3__HNF4A(39-474)(S183E)
  source 1..1531: mol_type = other RNA
aggagaaagcttaccatggacaccagccctagcgagggcaccaacctgaacgcccctaatagcctgggagtgtccgccctgtgtgccatctgtggcgatagagccaccggcaagcactacggcgccagctcttgtgatggctgcaagggcttcttccggcggagcgtgcggaagaaccacatgtacagctgccggttcagccggcagtgcgtggtggacaaggataagcggaaccagtgccggtactgcagactgaagaagtgcttcagagccggcatgaagaaagaagccgtgcagaacgagcgggaccggatcagcaccagaagaagcagctacgaggacagcagcctgcccagcatcaacgccctgctgcaggccgaggtgctgagcagacagatcaccagcccagtgtccggcatcaacggcgacatccgggccaagaagatcgccgagattgccgacgtgtgcgagagcatgaaggaacagctgctggtgctggtggaatgggccaagtacatccccgccttttgcgagctgcccctggacgatcaggtggccctgctgagagcacacgccggcgaacatctgctgctgggagccaccaagcggagcatggtgttcaaggacgtgctgctgctgggcaacgactacatcgtgcccagacactgccctgagctggccgagatgagccgggtgtccatcagaatcctggacgaactggtgctgccgtttcaggaactgcagatcgacgacaacgagtacgcctacctgaaggccatcatctttttcgaccccgacgccaagggcctgagcgaccctggcaagatcaagcggctgagaagccaggtgcaagtgtccctggaagattacatcaacgaccggcagtacgacagccggggcagatttggcgaactgctcctgctgctgcccaccctgcagagcatcacctggcagatgatcgagcagatccagttcatcaagctgttcggcatggccaagatcgacaatctgctgcaggaaatgctgctcgggggcagcccttctgatgcccctcatgcccaccaccctctgcaccctcacctgatgcaagaacacatgggcaccaatgtgatcgtggccaacacaatgcccacccacctgagcaacggccagatgtgcgagtggcccagacctagaggacaggccgccacacctgagacacctcagccttctccacctggcggctctggcagcgagccttacaaactgctgcctggcgctgtggccaccatcgtgaaacctctgagcgccatcccccagcccaccatcaccaagcaggaagtgatctgaggactagttataagactgactagcccgatgggcctcccaacgggccctcctcccctccttgcaccgagattaataaaaaaaaaaaaaaaaaaaaaaaaaaaaaaaaaaaaaaaaaaaaaaaaaaaaaaaaaaaaaaaatgcatcccccccccccccccccccccccccccccccaaaggctcttttcagagccaccagaatt

SEQ ID NO: 2884 - RNA, 1531 nt, synthetic construct
  misc_feature 1..1531: note = mRNA i-3 (A64-N5-C30-hSL-N5) (opt29) from Homo sapiens__NP_000448.3__HNF4A(39-474)(S461A)
  source 1..1531: mol_type = other RNA
aggagaaagcttaccatggacaccagccctagcgagggcaccaacctgaacgcccctaatagcctgggagtgtccgccctgtgtgccatctgtggcgatagagccaccggcaagcactacggcgccagctcttgtgatggctgcaagggcttcttccggcggagcgtgcggaagaaccacatgtacagctgccggttcagccggcagtgcgtggtggacaaggataagcggaaccagtgccggtactgcagactgaagaagtgcttcagagccggcatgaagaaagaagccgtgcagaacgagcgggaccggatcagcaccagaagaagcagctacgaggacagcagcctgcccagcatcaacgccctgctgcaggccgaggtgctgagcagacagatcaccagcccagtgtccggcatcaacggcgacatccgggccaagaagatcgccagcattgccgacgtgtgcgagagcatgaaggaacagctgctggtgctggtggaatgggccaagtacatccccgccttttgcgagctgcccctggacgatcaggtggccctgctgagagcacacgccggcgaacatctgctgctgggagccaccaagcggagcatggtgttcaaggacgtgctgctgctgggcaacgactacatcgtgcccagacactgccctgagctggccgagatgagccgggtgtccatcagaatcctggacgaactggtgctgccgtttcaggaactgcagatcgacgacaacgagtacgcctacctgaaggccatcatctttttcgaccccgacgccaagggcctgagcgaccctggcaagatcaagcggctgagaagccaggtgcaagtgtccctggaagattacatcaacgaccggcagtacgacagccggggcagatttggcgaactgctcctgctgctgcccaccctgcagagcatcacctggcagatgatcgagcagatccagttcatcaagctgttcggcatggccaagatcgacaatctgctgcaggaaatgctgctcgggggcagcccttctgatgcccctcatgcccaccaccctctgcaccctcacctgatgcaagaacacatgggcaccaatgtgatcgtggccaacacaatgcccacccacctgagcaacggccagatgtgcgagtggcccagacctagaggacaggccgccacacctgagacacctcagccttctccacctggcggctctggcagcgagccttacaaactgctgcctggcgctgtggccaccatcgtgaaacctctggccgccatcccccagcccaccatcaccaagcaggaagtgatctgaggactagttataagactgactagcccgatgggcctcccaacgggccctcctcccctccttgcaccgagattaataaaaaaaaaaaaaaaaaaaaaaaaaaaaaaaaaaaaaaaaaaaaaaaaaaaaaaaaaaaaaaaatgcatcccccccccccccccccccccccccccccccaaaggctcttttcagagccaccagaatt

SEQ ID NO: 2885 - RNA, 1531 nt, synthetic construct
  misc_feature 1..1531: note = mRNA i-3 (A64-N5-C30-hSL-N5) (opt29) from Homo sapiens__NP_000448.3__HNF4A(39-474)(S461E)
  source 1..1531: mol_type = other RNA
aggagaaagcttaccatggacaccagccctagcgagggcaccaacctgaacgcccctaatagcctgggagtgtccgccctgtgtgccatctgtggcgatagagccaccggcaagcactacggcgccagctcttgtgatggctgcaagggcttcttccggcggagcgtgcggaagaaccacatgtacagctgccggttcagccggcagtgcgtggtggacaaggataagcggaaccagtgccggtactgcagactgaagaagtgcttcagagccggcatgaagaaagaagccgtgcagaacgagcgggaccggatcagcaccagaagaagcagctacgaggacagcagcctgcccagcatcaacgccctgctgcaggccgaggtgctgagcagacagatcaccagcccagtgtccggcatcaacggcgacatccgggccaagaagatcgccagcattgccgacgtgtgcgagagcatgaaggaacagctgctggtgctggtggaatgggccaagtacatccccgccttttgcgagctgcccctggacgatcaggtggccctgctgagagcacacgccggcgaacatctgctgctgggagccaccaagcggagcatggtgttcaaggacgtgctgctgctgggcaacgactacatcgtgcccagacactgccctgagctggccgagatgagccgggtgtccatcagaatcctggacgaactggtgctgccgtttcaggaactgcagatcgacgacaacgagtacgcctacctgaaggccatcatctttttcgaccccgacgccaagggcctgagcgaccctggcaagatcaagcggctgagaagccaggtgcaagtgtccctggaagattacatcaacgaccggcagtacgacagccggggcagatttggcgaactgctcctgctgctgcccaccctgcagagcatcacctggcagatgatcgagcagatccagttcatcaagctgttcggcatggccaagatcgacaatctgctgcaggaaatgctgctcgggggcagcccttctgatgcccctcatgcccaccaccctctgcaccctcacctgatgcaagaacacatgggcaccaatgtgatcgtggccaacacaatgcccacccacctgagcaacggccagatgtgcgagtggcccagacctagaggacaggccgccacacctgagacacctcagccttctccacctggcggctctggcagcgagccttacaaactgctgcctggcgctgtggccaccatcgtgaaacctctggaggccatcccccagcccaccatcaccaagcaggaagtgatctgaggactagttataagactgactagcccgatgggcctcccaacgggccctcctcccctccttgcaccgagattaataaaaaaaaaaaaaaaaaaaaaaaaaaaaaaaaaaaaaaaaaaaaaaaaaaaaaaaaaaaaaaaatgcatcccccccccccccccccccccccccccccccaaaggctcttttcagagccaccagaatt

SEQ ID NO: 2886 - RNA, 1531 nt, synthetic construct
  misc_feature 1..1531: note = mRNA i-3 (A64-N5-C30-hSL-N5) (opt29) from Homo sapiens__NP_000448.3__HNF4A(39-474)(S142A_S143A_S313A)
  source 1..1531: mol_type = other RNA
aggagaaagcttaccatggacaccagccctagcgagggcaccaacctgaacgcccctaatagcctgggagtgtccgccctgtgtgccatctgtggcgatagagccaccggcaagcactacggcgccagctcttgtgatggctgcaagggcttcttccggcggagcgtgcggaagaaccacatgtacagctgccggttcagccggcagtgcgtggtggacaaggataagcggaaccagtgccggtactgcagactgaagaagtgcttcagagccggcatgaagaaagaagccgtgcagaacgagcgggaccggatcagcaccagaagagccgcctacgaggacagcagcctgcccagcatcaacgccctgctgcaggccgaggtgctgagcagacagatcaccagcccagtgtccggcatcaacggcgacatccgggccaagaagatcgccagcattgccgacgtgtgcgagagcatgaaggaacagctgctggtgctggtggaatgggccaagtacatccccgccttttgcgagctgcccctggacgatcaggtggccctgctgagagcacacgccggcgaacatctgctgctgggagccaccaagcggagcatggtgttcaaggacgtgctgctgctgggcaacgactacatcgtgcccagacactgccctgagctggccgagatgagccgggtgtccatcagaatcctggacgaactggtgctgccgtttcaggaactgcagatcgacgacaacgagtacgcctacctgaaggccatcatctttttcgaccccgacgccaagggcctgagcgaccctggcaagatcaagcggctgagagcccaggtgcaagtgtccctggaagattacatcaacgaccggcagtacgacagccggggcagatttggcgaactgctcctgctgctgcccaccctgcagagcatcacctggcagatgatcgagcagatccagttcatcaagctgttcggcatggccaagatcgacaatctgctgcaggaaatgctgctcgggggcagcccttctgatgcccctcatgcccaccaccctctgcaccctcacctgatgcaagaacacatgggcaccaatgtgatcgtggccaacacaatgcccacccacctgagcaacggccagatgtgcgagtggcccagacctagaggacaggccgccacacctgagacacctcagccttctccacctggcggctctggcagcgagccttacaaactgctgcctggcgctgtggccaccatcgtgaaacctctgagcgccatcccccagcccaccatcaccaagcaggaagtgatctgaggactagttataagactgactagcccgatgggcctcccaacgggccctcctcccctccttgcaccgagattaataaaaaaaaaaaaaaaaaaaaaaaaaaaaaaaaaaaaaaaaaaaaaaaaaaaaaaaaaaaaaaaatgcatcccccccccccccccccccccccccccccccaaaggctcttttcagagccaccagaatt

SEQ ID NO: 2887 - RNA, 1531 nt, synthetic construct
  misc_feature 1..1531: note = mRNA i-3 (A64-N5-C30-hSL-N5) (opt29) from Homo sapiens__NP_000448.3__HNF4A(39-474)(S142A_S143A_S313A_K458R )
  source 1..1531: mol_type = other RNA
aggagaaagcttaccatggacaccagccctagcgagggcaccaacctgaacgcccctaatagcctgggagtgtccgccctgtgtgccatctgtggcgatagagccaccggcaagcactacggcgccagctcttgtgatggctgcaagggcttcttccggcggagcgtgcggaagaaccacatgtacagctgccggttcagccggcagtgcgtggtggacaaggataagcggaaccagtgccggtactgcagactgaagaagtgcttcagagccggcatgaagaaagaagccgtgcagaacgagcgggaccggatcagcaccagaagagccgcctacgaggacagcagcctgcccagcatcaacgccctgctgcaggccgaggtgctgagcagacagatcaccagcccagtgtccggcatcaacggcgacatccgggccaagaagatcgccagcattgccgacgtgtgcgagagcatgaaggaacagctgctggtgctggtggaatgggccaagtacatccccgccttttgcgagctgcccctggacgatcaggtggccctgctgagagcacacgccggcgaacatctgctgctgggagccaccaagcggagcatggtgttcaaggacgtgctgctgctgggcaacgactacatcgtgcccagacactgccctgagctggccgagatgagccgggtgtccatcagaatcctggacgaactggtgctgccgtttcaggaactgcagatcgacgacaacgagtacgcctacctgaaggccatcatctttttcgaccccgacgccaagggcctgagcgaccctggcaagatcaagcggctgagagcccaggtgcaagtgtccctggaagattacatcaacgaccggcagtacgacagccggggcagatttggcgaactgctcctgctgctgcccaccctgcagagcatcacctggcagatgatcgagcagatccagttcatcaagctgttcggcatggccaagatcgacaatctgctgcaggaaatgctgctcgggggcagcccttctgatgcccctcatgcccaccaccctctgcaccctcacctgatgcaagaacacatgggcaccaatgtgatcgtggccaacacaatgcccacccacctgagcaacggccagatgtgcgagtggcccagacctagaggacaggccgccacacctgagacacctcagccttctccacctggcggctctggcagcgagccttacaaactgctgcctggcgctgtggccaccatcgtgagacctctgagcgccatcccccagcccaccatcaccaagcaggaagtgatctgaggactagttataagactgactagcccgatgggcctcccaacgggccctcctcccctccttgcaccgagattaataaaaaaaaaaaaaaaaaaaaaaaaaaaaaaaaaaaaaaaaaaaaaaaaaaaaaaaaaaaaaaaatgcatcccccccccccccccccccccccccccccccaaaggctcttttcagagccaccagaatt

SEQ ID NO: 2888 - RNA, 1531 nt, synthetic construct
  misc_feature 1..1531: note = mRNA i-3 (A64-N5-C30-hSL-N5) (opt29) from Homo sapiens__NP_000448.3__HNF4A(39-474)(S142A_S143A_S167A_S313A _S378A_T429A_T432A_S436A_K458R)
  source 1..1531: mol_type = other RNA
aggagaaagcttaccatggacaccagccctagcgagggcaccaacctgaacgcccctaatagcctgggagtgtccgccctgtgtgccatctgtggcgatagagccaccggcaagcactacggcgccagctcttgtgatggctgcaagggcttcttccggcggagcgtgcggaagaaccacatgtacagctgccggttcagccggcagtgcgtggtggacaaggataagcggaaccagtgccggtactgcagactgaagaagtgcttcagagccggcatgaagaaagaagccgtgcagaacgagcgggaccggatcagcaccagaagagccgcctacgaggacagcagcctgcccagcatcaacgccctgctgcaggccgaggtgctgagcagacagatcaccgccccagtgtccggcatcaacggcgacatccgggccaagaagatcgccagcattgccgacgtgtgcgagagcatgaaggaacagctgctggtgctggtggaatgggccaagtacatccccgccttttgcgagctgcccctggacgatcaggtggccctgctgagagcacacgccggcgaacatctgctgctgggagccaccaagcggagcatggtgttcaaggacgtgctgctgctgggcaacgactacatcgtgcccagacactgccctgagctggccgagatgagccgggtgtccatcagaatcctggacgaactggtgctgccgtttcaggaactgcagatcgacgacaacgagtacgcctacctgaaggccatcatctttttcgaccccgacgccaagggcctgagcgaccctggcaagatcaagcggctgagagcccaggtgcaagtgtccctggaagattacatcaacgaccggcagtacgacagccggggcagatttggcgaactgctcctgctgctgcccaccctgcagagcatcacctggcagatgatcgagcagatccagttcatcaagctgttcggcatggccaagatcgacaatctgctgcaggaaatgctgctcgggggcgccccttctgatgcccctcatgcccaccaccctctgcaccctcacctgatgcaagaacacatgggcaccaatgtgatcgtggccaacacaatgcccacccacctgagcaacggccagatgtgcgagtggcccagacctagaggacaggccgccgcccctgaggcccctcagcctgccccacctggcggctctggcagcgagccttacaaactgctgcctggcgctgtggccaccatcgtgagacctctgagcgccatcccccagcccaccatcaccaagcaggaagtgatctgaggactagttataagactgactagcccgatgggcctcccaacgggccctcctcccctccttgcaccgagattaataaaaaaaaaaaaaaaaaaaaaaaaaaaaaaaaaaaaaaaaaaaaaaaaaaaaaaaaaaaaaaaatgcatcccccccccccccccccccccccccccccccaaaggctcttttcagagccaccagaatt

SEQ ID NO: 2889 - RNA, 1531 nt, synthetic construct
  misc_feature 1..1531: note = mRNA i-3 (A64-N5-C30-hSL-N5) (opt29) from Homo sapiens__NP_000448.3__HNF4A(39-474)(S142A_S143A_S148A_S167A _S313A_S378A_T429A_T432A_S436A_K458R)
  source 1..1531: mol_type = other RNA
aggagaaagcttaccatggacaccagccctagcgagggcaccaacctgaacgcccctaatagcctgggagtgtccgccctgtgtgccatctgtggcgatagagccaccggcaagcactacggcgccagctcttgtgatggctgcaagggcttcttccggcggagcgtgcggaagaaccacatgtacagctgccggttcagccggcagtgcgtggtggacaaggataagcggaaccagtgccggtactgcagactgaagaagtgcttcagagccggcatgaagaaagaagccgtgcagaacgagcgggaccggatcagcaccagaagagccgcctacgaggacagcgccctgcccagcatcaacgccctgctgcaggccgaggtgctgagcagacagatcaccgccccagtgtccggcatcaacggcgacatccgggccaagaagatcgccagcattgccgacgtgtgcgagagcatgaaggaacagctgctggtgctggtggaatgggccaagtacatccccgccttttgcgagctgcccctggacgatcaggtggccctgctgagagcacacgccggcgaacatctgctgctgggagccaccaagcggagcatggtgttcaaggacgtgctgctgctgggcaacgactacatcgtgcccagacactgccctgagctggccgagatgagccgggtgtccatcagaatcctggacgaactggtgctgccgtttcaggaactgcagatcgacgacaacgagtacgcctacctgaaggccatcatctttttcgaccccgacgccaagggcctgagcgaccctggcaagatcaagcggctgagagcccaggtgcaagtgtccctggaagattacatcaacgaccggcagtacgacagccggggcagatttggcgaactgctcctgctgctgcccaccctgcagagcatcacctggcagatgatcgagcagatccagttcatcaagctgttcggcatggccaagatcgacaatctgctgcaggaaatgctgctcgggggcgccccttctgatgcccctcatgcccaccaccctctgcaccctcacctgatgcaagaacacatgggcaccaatgtgatcgtggccaacacaatgcccacccacctgagcaacggccagatgtgcgagtggcccagacctagaggacaggccgccgcccctgaggcccctcagcctgccccacctggcggctctggcagcgagccttacaaactgctgcctggcgctgtggccaccatcgtgagacctctgagcgccatcccccagcccaccatcaccaagcaggaagtgatctgaggactagttataagactgactagcccgatgggcctcccaacgggccctcctcccctccttgcaccgagattaataaaaaaaaaaaaaaaaaaaaaaaaaaaaaaaaaaaaaaaaaaaaaaaaaaaaaaaaaaaaaaaatgcatcccccccccccccccccccccccccccccccaaaggctcttttcagagccaccagaatt

SEQ ID NO: 2890 - RNA, 1531 nt, synthetic construct
  misc_feature 1..1531: note = mRNA i-3 (A64-N5-C30-hSL-N5) (opt29) from Homo sapiens__NP_000448.3__HNF4A(39-474)(K106R_K108R_K126R_K127R _S142A_S143A_S148A_S167A_S313A_S378A_T429A_T432A_S436A_K458 R)
  source 1..1531: mol_type = other RNA
aggagaaagcttaccatggacaccagccctagcgagggcaccaacctgaacgcccctaatagcctgggagtgtccgccctgtgtgccatctgtggcgatagagccaccggcaagcactacggcgccagctcttgtgatggctgcaagggcttcttccggcggagcgtgcggaagaaccacatgtacagctgccggttcagccggcagtgcgtggtggaccgggatagacggaaccagtgccggtactgcagactgaagaagtgcttcagagccggcatgcggagagaagccgtgcagaacgagcgggaccggatcagcaccagaagagccgcctacgaggacagcgccctgcccagcatcaacgccctgctgcaggccgaggtgctgagcagacagatcaccgccccagtgtccggcatcaacggcgacatccgggccaagaagatcgccagcattgccgacgtgtgcgagagcatgaaggaacagctgctggtgctggtggaatgggccaagtacatccccgccttttgcgagctgcccctggacgatcaggtggccctgctgagagcacacgccggcgaacatctgctgctgggagccaccaagcggagcatggtgttcaaggacgtgctgctgctgggcaacgactacatcgtgcccagacactgccctgagctggccgagatgagccgggtgtccatcagaatcctggacgaactggtgctgccgtttcaggaactgcagatcgacgacaacgagtacgcctacctgaaggccatcatctttttcgaccccgacgccaagggcctgagcgaccctggcaagatcaagcggctgagagcccaggtgcaagtgtccctggaagattacatcaacgaccggcagtacgacagccggggcagatttggcgaactgctcctgctgctgcccaccctgcagagcatcacctggcagatgatcgagcagatccagttcatcaagctgttcggcatggccaagatcgacaatctgctgcaggaaatgctgctcgggggcgccccttctgatgcccctcatgcccaccaccctctgcaccctcacctgatgcaagaacacatgggcaccaatgtgatcgtggccaacacaatgcccacccacctgagcaacggccagatgtgcgagtggcccagacctagaggacaggccgccgcccctgaggcccctcagcctgccccacctggcggctctggcagcgagccttacaaactgctgcctggcgctgtggccaccatcgtgagacctctgagcgccatcccccagcccaccatcaccaagcaggaagtgatctgaggactagttataagactgactagcccgatgggcctcccaacgggccctcctcccctccttgcaccgagattaataaaaaaaaaaaaaaaaaaaaaaaaaaaaaaaaaaaaaaaaaaaaaaaaaaaaaaaaaaaaaaaatgcatcccccccccccccccccccccccccccccccaaaggctcttttcagagccaccagaatt

SEQ ID NO: 2891 - RNA, 1531 nt, synthetic construct
  misc_feature 1..1531: note = mRNA i-3 (A64-N5-C30-hSL-N5) (opt29) from Homo sapiens__NP_000448.3__HNF4A(39-474)(S142A_S143A_S148A_T166A _S167A_S313A_S378A_T429A_T432A_S436A_K458R)
  source 1..1531: mol_type = other RNA
aggagaaagcttaccatggacaccagccctagcgagggcaccaacctgaacgcccctaatagcctgggagtgtccgccctgtgtgccatctgtggcgatagagccaccggcaagcactacggcgccagctcttgtgatggctgcaagggcttcttccggcggagcgtgcggaagaaccacatgtacagctgccggttcagccggcagtgcgtggtggacaaggataagcggaaccagtgccggtactgcagactgaagaagtgcttcagagccggcatgaagaaagaagccgtgcagaacgagcgggaccggatcagcaccagaagagccgcctacgaggacagcgccctgcccagcatcaacgccctgctgcaggccgaggtgctgagcagacagatcgccgccccagtgtccggcatcaacggcgacatccgggccaagaagatcgccagcattgccgacgtgtgcgagagcatgaaggaacagctgctggtgctggtggaatgggccaagtacatccccgccttttgcgagctgcccctggacgatcaggtggccctgctgagagcacacgccggcgaacatctgctgctgggagccaccaagcggagcatggtgttcaaggacgtgctgctgctgggcaacgactacatcgtgcccagacactgccctgagctggccgagatgagccgggtgtccatcagaatcctggacgaactggtgctgccgtttcaggaactgcagatcgacgacaacgagtacgcctacctgaaggccatcatctttttcgaccccgacgccaagggcctgagcgaccctggcaagatcaagcggctgagagcccaggtgcaagtgtccctggaagattacatcaacgaccggcagtacgacagccggggcagatttggcgaactgctcctgctgctgcccaccctgcagagcatcacctggcagatgatcgagcagatccagttcatcaagctgttcggcatggccaagatcgacaatctgctgcaggaaatgctgctcgggggcgccccttctgatgcccctcatgcccaccaccctctgcaccctcacctgatgcaagaacacatgggcaccaatgtgatcgtggccaacacaatgcccacccacctgagcaacggccagatgtgcgagtggcccagacctagaggacaggccgccgcccctgaggcccctcagcctgccccacctggcggctctggcagcgagccttacaaactgctgcctggcgctgtggccaccatcgtgagacctctgagcgccatcccccagcccaccatcaccaagcaggaagtgatctgaggactagttataagactgactagcccgatgggcctcccaacgggccctcctcccctccttgcaccgagattaataaaaaaaaaaaaaaaaaaaaaaaaaaaaaaaaaaaaaaaaaaaaaaaaaaaaaaaaaaaaaaaatgcatcccccccccccccccccccccccccccccccaaaggctcttttcagagccaccagaatt

SEQ ID NO: 2892 - RNA, 1531 nt, synthetic construct
  misc_feature 1..1531: note = mRNA i-3 (A64-N5-C30-hSL-N5) (opt29) from Homo sapiens__NP_000448.3__HNF4A(39-474)(S87A_S142A_S143A_S148A_ T166A_S167A_S313A_S378A_T429A_T432A_S436A_K458R)
  source 1..1531: mol_type = other RNA
aggagaaagcttaccatggacaccagccctagcgagggcaccaacctgaacgcccctaatagcctgggagtgtccgccctgtgtgccatctgtggcgatagagccaccggcaagcactacggcgccagctcttgtgatggctgcaagggcttcttccggcgggccgtgcggaagaaccacatgtacagctgccggttcagccggcagtgcgtggtggacaaggataagcggaaccagtgccggtactgcagactgaagaagtgcttcagagccggcatgaagaaagaagccgtgcagaacgagcgggaccggatcagcaccagaagagccgcctacgaggacagcgccctgcccagcatcaacgccctgctgcaggccgaggtgctgagcagacagatcgccgccccagtgtccggcatcaacggcgacatccgggccaagaagatcgccagcattgccgacgtgtgcgagagcatgaaggaacagctgctggtgctggtggaatgggccaagtacatccccgccttttgcgagctgcccctggacgatcaggtggccctgctgagagcacacgccggcgaacatctgctgctgggagccaccaagcggagcatggtgttcaaggacgtgctgctgctgggcaacgactacatcgtgcccagacactgccctgagctggccgagatgagccgggtgtccatcagaatcctggacgaactggtgctgccgtttcaggaactgcagatcgacgacaacgagtacgcctacctgaaggccatcatctttttcgaccccgacgccaagggcctgagcgaccctggcaagatcaagcggctgagagcccaggtgcaagtgtccctggaagattacatcaacgaccggcagtacgacagccggggcagatttggcgaactgctcctgctgctgcccaccctgcagagcatcacctggcagatgatcgagcagatccagttcatcaagctgttcggcatggccaagatcgacaatctgctgcaggaaatgctgctcgggggcgccccttctgatgcccctcatgcccaccaccctctgcaccctcacctgatgcaagaacacatgggcaccaatgtgatcgtggccaacacaatgcccacccacctgagcaacggccagatgtgcgagtggcccagacctagaggacaggccgccgcccctgaggcccctcagcctgccccacctggcggctctggcagcgagccttacaaactgctgcctggcgctgtggccaccatcgtgagacctctgagcgccatcccccagcccaccatcaccaagcaggaagtgatctgaggactagttataagactgactagcccgatgggcctcccaacgggccctcctcccctccttgcaccgagattaataaaaaaaaaaaaaaaaaaaaaaaaaaaaaaaaaaaaaaaaaaaaaaaaaaaaaaaaaaaaaaaatgcatcccccccccccccccccccccccccccccccaaaggctcttttcagagccaccagaatt

SEQ ID NO: 2893 - RNA, 1531 nt, synthetic construct
  misc_feature 1..1531: note = mRNA i-3 (A64-N5-C30-hSL-N5) (opt29) from Homo sapiens__NP_000448.3__HNF4A(39-474)(S87A_K106R_K108R_K126R_ K127R_S142A_S143A_S148A_T166A_S167A_S313A_S378A_T429A_T432A _S436A_K458R)
  source 1..1531: mol_type = other RNA
aggagaaagcttaccatggacaccagccctagcgagggcaccaacctgaacgcccctaatagcctgggagtgtccgccctgtgtgccatctgtggcgatagagccaccggcaagcactacggcgccagctcttgtgatggctgcaagggcttcttccggcgggccgtgcggaagaaccacatgtacagctgccggttcagccggcagtgcgtggtggaccgggatagacggaaccagtgccggtactgcagactgaagaagtgcttcagagccggcatgcggagagaagccgtgcagaacgagcgggaccggatcagcaccagaagagccgcctacgaggacagcgccctgcccagcatcaacgccctgctgcaggccgaggtgctgagcagacagatcgccgccccagtgtccggcatcaacggcgacatccgggccaagaagatcgccagcattgccgacgtgtgcgagagcatgaaggaacagctgctggtgctggtggaatgggccaagtacatccccgccttttgcgagctgcccctggacgatcaggtggccctgctgagagcacacgccggcgaacatctgctgctgggagccaccaagcggagcatggtgttcaaggacgtgctgctgctgggcaacgactacatcgtgcccagacactgccctgagctggccgagatgagccgggtgtccatcagaatcctggacgaactggtgctgccgtttcaggaactgcagatcgacgacaacgagtacgcctacctgaaggccatcatctttttcgaccccgacgccaagggcctgagcgaccctggcaagatcaagcggctgagagcccaggtgcaagtgtccctggaagattacatcaacgaccggcagtacgacagccggggcagatttggcgaactgctcctgctgctgcccaccctgcagagcatcacctggcagatgatcgagcagatccagttcatcaagctgttcggcatggccaagatcgacaatctgctgcaggaaatgctgctcgggggcgccccttctgatgcccctcatgcccaccaccctctgcaccctcacctgatgcaagaacacatgggcaccaatgtgatcgtggccaacacaatgcccacccacctgagcaacggccagatgtgcgagtggcccagacctagaggacaggccgccgcccctgaggcccctcagcctgccccacctggcggctctggcagcgagccttacaaactgctgcctggcgctgtggccaccatcgtgagacctctgagcgccatcccccagcccaccatcaccaagcaggaagtgatctgaggactagttataagactgactagcccgatgggcctcccaacgggccctcctcccctccttgcaccgagattaataaaaaaaaaaaaaaaaaaaaaaaaaaaaaaaaaaaaaaaaaaaaaaaaaaaaaaaaaaaaaaaatgcatcccccccccccccccccccccccccccccccaaaggctcttttcagagccaccagaatt

SEQ ID NO: 2894 - RNA, 1531 nt, synthetic construct
  misc_feature 1..1531: note = mRNA i-3 (A64-N5-C30-hSL-N5) (opt29) from Homo sapiens__NP_000448.3__HNF4A(39-474)(S87A_K106R_K108R_K126R_ K127R)
  source 1..1531: mol_type = other RNA
aggagaaagcttaccatggacaccagccctagcgagggcaccaacctgaacgcccctaatagcctgggagtgtccgccctgtgtgccatctgtggcgatagagccaccggcaagcactacggcgccagctcttgtgatggctgcaagggcttcttccggcgggccgtgcggaagaaccacatgtacagctgccggttcagccggcagtgcgtggtggaccgggatagacggaaccagtgccggtactgcagactgaagaagtgcttcagagccggcatgcggagagaagccgtgcagaacgagcgggaccggatcagcaccagaagaagcagctacgaggacagcagcctgcccagcatcaacgccctgctgcaggccgaggtgctgagcagacagatcaccagcccagtgtccggcatcaacggcgacatccgggccaagaagatcgccagcattgccgacgtgtgcgagagcatgaaggaacagctgctggtgctggtggaatgggccaagtacatccccgccttttgcgagctgcccctggacgatcaggtggccctgctgagagcacacgccggcgaacatctgctgctgggagccaccaagcggagcatggtgttcaaggacgtgctgctgctgggcaacgactacatcgtgcccagacactgccctgagctggccgagatgagccgggtgtccatcagaatcctggacgaactggtgctgccgtttcaggaactgcagatcgacgacaacgagtacgcctacctgaaggccatcatctttttcgaccccgacgccaagggcctgagcgaccctggcaagatcaagcggctgagaagccaggtgcaagtgtccctggaagattacatcaacgaccggcagtacgacagccggggcagatttggcgaactgctcctgctgctgcccaccctgcagagcatcacctggcagatgatcgagcagatccagttcatcaagctgttcggcatggccaagatcgacaatctgctgcaggaaatgctgctcgggggcagcccttctgatgcccctcatgcccaccaccctctgcaccctcacctgatgcaagaacacatgggcaccaatgtgatcgtggccaacacaatgcccacccacctgagcaacggccagatgtgcgagtggcccagacctagaggacaggccgccacacctgagacacctcagccttctccacctggcggctctggcagcgagccttacaaactgctgcctggcgctgtggccaccatcgtgaaacctctgagcgccatcccccagcccaccatcaccaagcaggaagtgatctgaggactagttataagactgactagcccgatgggcctcccaacgggccctcctcccctccttgcaccgagattaataaaaaaaaaaaaaaaaaaaaaaaaaaaaaaaaaaaaaaaaaaaaaaaaaaaaaaaaaaaaaaaatgcatcccccccccccccccccccccccccccccccaaaggctcttttcagagccaccagaatt

SEQ ID NO: 2895 - RNA, 1531 nt, synthetic construct
  misc_feature 1..1531: note = mRNA i-3 (A64-N5-C30-hSL-N5) (opt29) from Homo sapiens__NP_000448.3__HNF4A(39-474)(S87A_K106R_K108R_K126R_ K127R_S142A_S143A_S148A_T166A_S167A_S313A_S378A_T429A_T432A _S436A_K458R_S461A)
  source 1..1531: mol_type = other RNA
aggagaaagcttaccatggacaccagccctagcgagggcaccaacctgaacgcccctaatagcctgggagtgtccgccctgtgtgccatctgtggcgatagagccaccggcaagcactacggcgccagctcttgtgatggctgcaagggcttcttccggcgggccgtgcggaagaaccacatgtacagctgccggttcagccggcagtgcgtggtggaccgggatagacggaaccagtgccggtactgcagactgaagaagtgcttcagagccggcatgcggagagaagccgtgcagaacgagcgggaccggatcagcaccagaagagccgcctacgaggacagcgccctgcccagcatcaacgccctgctgcaggccgaggtgctgagcagacagatcgccgccccagtgtccggcatcaacggcgacatccgggccaagaagatcgccagcattgccgacgtgtgcgagagcatgaaggaacagctgctggtgctggtggaatgggccaagtacatccccgccttttgcgagctgcccctggacgatcaggtggccctgctgagagcacacgccggcgaacatctgctgctgggagccaccaagcggagcatggtgttcaaggacgtgctgctgctgggcaacgactacatcgtgcccagacactgccctgagctggccgagatgagccgggtgtccatcagaatcctggacgaactggtgctgccgtttcaggaactgcagatcgacgacaacgagtacgcctacctgaaggccatcatctttttcgaccccgacgccaagggcctgagcgaccctggcaagatcaagcggctgagagcccaggtgcaagtgtccctggaagattacatcaacgaccggcagtacgacagccggggcagatttggcgaactgctcctgctgctgcccaccctgcagagcatcacctggcagatgatcgagcagatccagttcatcaagctgttcggcatggccaagatcgacaatctgctgcaggaaatgctgctcgggggcgccccttctgatgcccctcatgcccaccaccctctgcaccctcacctgatgcaagaacacatgggcaccaatgtgatcgtggccaacacaatgcccacccacctgagcaacggccagatgtgcgagtggcccagacctagaggacaggccgccgcccctgaggcccctcagcctgccccacctggcggctctggcagcgagccttacaaactgctgcctggcgctgtggccaccatcgtgagacctctggccgccatcccccagcccaccatcaccaagcaggaagtgatctgaggactagttataagactgactagcccgatgggcctcccaacgggccctcctcccctccttgcaccgagattaataaaaaaaaaaaaaaaaaaaaaaaaaaaaaaaaaaaaaaaaaaaaaaaaaaaaaaaaaaaaaaaatgcatcccccccccccccccccccccccccccccccaaaggctcttttcagagccaccagaatt

SEQ ID NO: 2896 - RNA, 1531 nt, synthetic construct
  misc_feature 1..1531: note = mRNA i-3 (A64-N5-C30-hSL-N5) (opt29) from Homo sapiens__NP_000448.3__HNF4A(39-474)(S87A_K106R_K108R_K126R_ K127R_S142A_S143A_S148A_T166A_S167A_S313A_S378A_T429A_T432A _S436A_K458R_S461E)
  source 1..1531: mol_type = other RNA
aggagaaagcttaccatggacaccagccctagcgagggcaccaacctgaacgcccctaatagcctgggagtgtccgccctgtgtgccatctgtggcgatagagccaccggcaagcactacggcgccagctcttgtgatggctgcaagggcttcttccggcgggccgtgcggaagaaccacatgtacagctgccggttcagccggcagtgcgtggtggaccgggatagacggaaccagtgccggtactgcagactgaagaagtgcttcagagccggcatgcggagagaagccgtgcagaacgagcgggaccggatcagcaccagaagagccgcctacgaggacagcgccctgcccagcatcaacgccctgctgcaggccgaggtgctgagcagacagatcgccgccccagtgtccggcatcaacggcgacatccgggccaagaagatcgccagcattgccgacgtgtgcgagagcatgaaggaacagctgctggtgctggtggaatgggccaagtacatccccgccttttgcgagctgcccctggacgatcaggtggccctgctgagagcacacgccggcgaacatctgctgctgggagccaccaagcggagcatggtgttcaaggacgtgctgctgctgggcaacgactacatcgtgcccagacactgccctgagctggccgagatgagccgggtgtccatcagaatcctggacgaactggtgctgccgtttcaggaactgcagatcgacgacaacgagtacgcctacctgaaggccatcatctttttcgaccccgacgccaagggcctgagcgaccctggcaagatcaagcggctgagagcccaggtgcaagtgtccctggaagattacatcaacgaccggcagtacgacagccggggcagatttggcgaactgctcctgctgctgcccaccctgcagagcatcacctggcagatgatcgagcagatccagttcatcaagctgttcggcatggccaagatcgacaatctgctgcaggaaatgctgctcgggggcgccccttctgatgcccctcatgcccaccaccctctgcaccctcacctgatgcaagaacacatgggcaccaatgtgatcgtggccaacacaatgcccacccacctgagcaacggccagatgtgcgagtggcccagacctagaggacaggccgccgcccctgaggcccctcagcctgccccacctggcggctctggcagcgagccttacaaactgctgcctggcgctgtggccaccatcgtgagacctctggaggccatcccccagcccaccatcaccaagcaggaagtgatctgaggactagttataagactgactagcccgatgggcctcccaacgggccctcctcccctccttgcaccgagattaataaaaaaaaaaaaaaaaaaaaaaaaaaaaaaaaaaaaaaaaaaaaaaaaaaaaaaaaaaaaaaaatgcatcccccccccccccccccccccccccccccccaaaggctcttttcagagccaccagaatt

SEQ ID NO: 2897 - RNA, 1531 nt, synthetic construct
  misc_feature 1..1531: note = mRNA i-3 (A64-N5-C30-hSL-N5) (opt29) from Homo sapiens__NP_000448.3__HNF4A(39-474)(S87A_K106R_K108R_K126R_ K127R_S142A_S143A_S148E_T166A_S167E_S313A_S378E_T429E_T432E _S436E_K458R_S461E)
  source 1..1531: mol_type = other RNA
aggagaaagcttaccatggacaccagccctagcgagggcaccaacctgaacgcccctaatagcctgggagtgtccgccctgtgtgccatctgtggcgatagagccaccggcaagcactacggcgccagctcttgtgatggctgcaagggcttcttccggcgggccgtgcggaagaaccacatgtacagctgccggttcagccggcagtgcgtggtggaccgggatagacggaaccagtgccggtactgcagactgaagaagtgcttcagagccggcatgcggagagaagccgtgcagaacgagcgggaccggatcagcaccagaagagccgcctacgaggacagcgaactgcccagcatcaacgccctgctgcaggccgaggtgctgagcagacagatcgccgaaccagtgtccggcatcaacggcgacatccgggccaagaagatcgccagcattgccgacgtgtgcgagagcatgaaggaacagctgctggtgctggtggaatgggccaagtacatccccgccttttgcgagctgcccctggacgatcaggtggccctgctgagagcacacgccggcgaacatctgctgctgggagccaccaagcggagcatggtgttcaaggacgtgctgctgctgggcaacgactacatcgtgcccagacactgccctgagctggccgagatgagccgggtgtccatcagaatcctggacgaactggtgctgccgtttcaggaactgcagatcgacgacaacgagtacgcctacctgaaggccatcatctttttcgaccccgacgccaagggcctgagcgaccctggcaagatcaagcggctgagagcccaggtgcaagtgtccctggaagattacatcaacgaccggcagtacgacagccggggcagatttggcgaactgctcctgctgctgcccaccctgcagagcatcacctggcagatgatcgagcagatccagttcatcaagctgttcggcatggccaagatcgacaatctgctgcaggaaatgctgctcgggggcgagccttctgatgcccctcatgcccaccaccctctgcaccctcacctgatgcaagaacacatgggcaccaatgtgatcgtggccaacacaatgcccacccacctgagcaacggccagatgtgcgagtggcccagacctagaggacaggccgccgaacctgaggagcctcagcctgaaccacctggcggctctggcagcgagccttacaaactgctgcctggcgctgtggccaccatcgtgagacctctggaggccatcccccagcccaccatcaccaagcaggaagtgatctgaggactagttataagactgactagcccgatgggcctcccaacgggccctcctcccctccttgcaccgagattaataaaaaaaaaaaaaaaaaaaaaaaaaaaaaaaaaaaaaaaaaaaaaaaaaaaaaaaaaaaaaaaatgcatcccccccccccccccccccccccccccccccaaaggctcttttcagagccaccagaatt

SEQ ID NO: 2898 - RNA, 1531 nt, synthetic construct
  misc_feature 1..1531: note = mRNA i-3 (A64-N5-C30-hSL-N5) (opt29) from Homo sapiens__NP_000448.3__HNF4A(39-474)(S87A_K106R_K108R_K126R_ K127R_S142A_S143A_S148A_T166A_S167A_K179R_K180R_S313A_S378A _T429A_T432A_S436A_K458R_S461E)
  source 1..1531: mol_type = other RNA
aggagaaagcttaccatggacaccagccctagcgagggcaccaacctgaacgcccctaatagcctgggagtgtccgccctgtgtgccatctgtggcgatagagccaccggcaagcactacggcgccagctcttgtgatggctgcaagggcttcttccggcgggccgtgcggaagaaccacatgtacagctgccggttcagccggcagtgcgtggtggaccgggatagacggaaccagtgccggtactgcagactgaagaagtgcttcagagccggcatgcggagagaagccgtgcagaacgagcgggaccggatcagcaccagaagagccgcctacgaggacagcgccctgcccagcatcaacgccctgctgcaggccgaggtgctgagcagacagatcgccgccccagtgtccggcatcaacggcgacatccgggcccggagaatcgccagcattgccgacgtgtgcgagagcatgaaggaacagctgctggtgctggtggaatgggccaagtacatccccgccttttgcgagctgcccctggacgatcaggtggccctgctgagagcacacgccggcgaacatctgctgctgggagccaccaagcggagcatggtgttcaaggacgtgctgctgctgggcaacgactacatcgtgcccagacactgccctgagctggccgagatgagccgggtgtccatcagaatcctggacgaactggtgctgccgtttcaggaactgcagatcgacgacaacgagtacgcctacctgaaggccatcatctttttcgaccccgacgccaagggcctgagcgaccctggcaagatcaagcggctgagagcccaggtgcaagtgtccctggaagattacatcaacgaccggcagtacgacagccggggcagatttggcgaactgctcctgctgctgcccaccctgcagagcatcacctggcagatgatcgagcagatccagttcatcaagctgttcggcatggccaagatcgacaatctgctgcaggaaatgctgctcgggggcgccccttctgatgcccctcatgcccaccaccctctgcaccctcacctgatgcaagaacacatgggcaccaatgtgatcgtggccaacacaatgcccacccacctgagcaacggccagatgtgcgagtggcccagacctagaggacaggccgccgcccctgaggcccctcagcctgccccacctggcggctctggcagcgagccttacaaactgctgcctggcgctgtggccaccatcgtgagacctctggaggccatcccccagcccaccatcaccaagcaggaagtgatctgaggactagttataagactgactagcccgatgggcctcccaacgggccctcctcccctccttgcaccgagattaataaaaaaaaaaaaaaaaaaaaaaaaaaaaaaaaaaaaaaaaaaaaaaaaaaaaaaaaaaaaaaaatgcatcccccccccccccccccccccccccccccccaaaggctcttttcagagccaccagaatt

SEQ ID NO: 2899 - RNA, 1531 nt, synthetic construct
  misc_feature 1..1531: note = mRNA i-3 (A64-N5-C30-hSL-N5) (opt29) from Homo sapiens__NP_000448.3__HNF4A(39-474)(S87A_K106R_K108R_K126R_ K127R_S142A_S143A_S148A_T166A_S167A_K300R_K307R_K309R_S313A _S378A_T429A_T432A_S436A_K458R_S461E)
  source 1..1531: mol_type = other RNA
aggagaaagcttaccatggacaccagccctagcgagggcaccaacctgaacgcccctaatagcctgggagtgtccgccctgtgtgccatctgtggcgatagagccaccggcaagcactacggcgccagctcttgtgatggctgcaagggcttcttccggcgggccgtgcggaagaaccacatgtacagctgccggttcagccggcagtgcgtggtggaccgggatagacggaaccagtgccggtactgcagactgaagaagtgcttcagagccggcatgcggagagaagccgtgcagaacgagcgggaccggatcagcaccagaagagccgcctacgaggacagcgccctgcccagcatcaacgccctgctgcaggccgaggtgctgagcagacagatcgccgccccagtgtccggcatcaacggcgacatccgggccaagaagatcgccagcattgccgacgtgtgcgagagcatgaaggaacagctgctggtgctggtggaatgggccaagtacatccccgccttttgcgagctgcccctggacgatcaggtggccctgctgagagcacacgccggcgaacatctgctgctgggagccaccaagcggagcatggtgttcaaggacgtgctgctgctgggcaacgactacatcgtgcccagacactgccctgagctggccgagatgagccgggtgtccatcagaatcctggacgaactggtgctgccgtttcaggaactgcagatcgacgacaacgagtacgcctacctgaaggccatcatctttttcgaccccgacgccagaggcctgagcgaccctggccggatcagacggctgagagcccaggtgcaagtgtccctggaagattacatcaacgaccggcagtacgacagccggggcagatttggcgaactgctcctgctgctgcccaccctgcagagcatcacctggcagatgatcgagcagatccagttcatcaagctgttcggcatggccaagatcgacaatctgctgcaggaaatgctgctcgggggcgccccttctgatgcccctcatgcccaccaccctctgcaccctcacctgatgcaagaacacatgggcaccaatgtgatcgtggccaacacaatgcccacccacctgagcaacggccagatgtgcgagtggcccagacctagaggacaggccgccgcccctgaggcccctcagcctgccccacctggcggctctggcagcgagccttacaaactgctgcctggcgctgtggccaccatcgtgagacctctggaggccatcccccagcccaccatcaccaagcaggaagtgatctgaggactagttataagactgactagcccgatgggcctcccaacgggccctcctcccctccttgcaccgagattaataaaaaaaaaaaaaaaaaaaaaaaaaaaaaaaaaaaaaaaaaaaaaaaaaaaaaaaaaaaaaaaatgcatcccccccccccccccccccccccccccccccaaaggctcttttcagagccaccagaatt

SEQ ID NO: 2900 - RNA, 1531 nt, synthetic construct
  misc_feature 1..1531: note = mRNA i-3 (A64-N5-C30-hSL-N5) (opt29) from Homo sapiens__NP_000448.3__HNF4A(39-474)(S87A_K106R_K108R_K126R_ K127R_S142A_S143A_S148A_T166A_S167A_S313A_S378A_T429A_T432A _S436A_K447R_K458R_S461E_K470R)
  source 1..1531: mol_type = other RNA
aggagaaagcttaccatggacaccagccctagcgagggcaccaacctgaacgcccctaatagcctgggagtgtccgccctgtgtgccatctgtggcgatagagccaccggcaagcactacggcgccagctcttgtgatggctgcaagggcttcttccggcgggccgtgcggaagaaccacatgtacagctgccggttcagccggcagtgcgtggtggaccgggatagacggaaccagtgccggtactgcagactgaagaagtgcttcagagccggcatgcggagagaagccgtgcagaacgagcgggaccggatcagcaccagaagagccgcctacgaggacagcgccctgcccagcatcaacgccctgctgcaggccgaggtgctgagcagacagatcgccgccccagtgtccggcatcaacggcgacatccgggccaagaagatcgccagcattgccgacgtgtgcgagagcatgaaggaacagctgctggtgctggtggaatgggccaagtacatccccgccttttgcgagctgcccctggacgatcaggtggccctgctgagagcacacgccggcgaacatctgctgctgggagccaccaagcggagcatggtgttcaaggacgtgctgctgctgggcaacgactacatcgtgcccagacactgccctgagctggccgagatgagccgggtgtccatcagaatcctggacgaactggtgctgccgtttcaggaactgcagatcgacgacaacgagtacgcctacctgaaggccatcatctttttcgaccccgacgccaagggcctgagcgaccctggcaagatcaagcggctgagagcccaggtgcaagtgtccctggaagattacatcaacgaccggcagtacgacagccggggcagatttggcgaactgctcctgctgctgcccaccctgcagagcatcacctggcagatgatcgagcagatccagttcatcaagctgttcggcatggccaagatcgacaatctgctgcaggaaatgctgctcgggggcgccccttctgatgcccctcatgcccaccaccctctgcaccctcacctgatgcaagaacacatgggcaccaatgtgatcgtggccaacacaatgcccacccacctgagcaacggccagatgtgcgagtggcccagacctagaggacaggccgccgcccctgaggcccctcagcctgccccacctggcggctctggcagcgagccttaccggctgctgcctggcgctgtggccaccatcgtgagacctctggaggccatcccccagcccaccatcacccggcaggaagtgatctgaggactagttataagactgactagcccgatgggcctcccaacgggccctcctcccctccttgcaccgagattaataaaaaaaaaaaaaaaaaaaaaaaaaaaaaaaaaaaaaaaaaaaaaaaaaaaaaaaaaaaaaaaatgcatcccccccccccccccccccccccccccccccaaaggctcttttcagagccaccagaatt

SEQ ID NO: 2901 - RNA, 1531 nt, synthetic construct
  misc_feature 1..1531: note = mRNA i-3 (A64-N5-C30-hSL-N5) (opt29) from Homo sapiens__NP_000448.3__HNF4A(39-474)(S87A_K106R_K108R_K126R_ K127R_S142A_S143A_S148A_T166A_S167A_K179R_K180R_K234R_K300R _K307R_K309R_S313A_S378A_T429A_T432A_S436A_K447R_K458R_S461 E_K470R)
  source 1..1531: mol_type = other RNA
aggagaaagcttaccatggacaccagccctagcgagggcaccaacctgaacgcccctaatagcctgggagtgtccgccctgtgtgccatctgtggcgatagagccaccggcaagcactacggcgccagctcttgtgatggctgcaagggcttcttccggcgggccgtgcggaagaaccacatgtacagctgccggttcagccggcagtgcgtggtggaccgggatagacggaaccagtgccggtactgcagactgaagaagtgcttcagagccggcatgcggagagaagccgtgcagaacgagcgggaccggatcagcaccagaagagccgcctacgaggacagcgccctgcccagcatcaacgccctgctgcaggccgaggtgctgagcagacagatcgccgccccagtgtccggcatcaacggcgacatccgggcccggagaatcgccagcattgccgacgtgtgcgagagcatgaaggaacagctgctggtgctggtggaatgggccaagtacatccccgccttttgcgagctgcccctggacgatcaggtggccctgctgagagcacacgccggcgaacatctgctgctgggagccacccggcggagcatggtgttcaaggacgtgctgctgctgggcaacgactacatcgtgcccagacactgccctgagctggccgagatgagccgggtgtccatcagaatcctggacgaactggtgctgccgtttcaggaactgcagatcgacgacaacgagtacgcctacctgaaggccatcatctttttcgaccccgacgccagaggcctgagcgaccctggccggatcagacggctgagagcccaggtgcaagtgtccctggaagattacatcaacgaccggcagtacgacagccggggcagatttggcgaactgctcctgctgctgcccaccctgcagagcatcacctggcagatgatcgagcagatccagttcatcaagctgttcggcatggccaagatcgacaatctgctgcaggaaatgctgctcgggggcgccccttctgatgcccctcatgcccaccaccctctgcaccctcacctgatgcaagaacacatgggcaccaatgtgatcgtggccaacacaatgcccacccacctgagcaacggccagatgtgcgagtggcccagacctagaggacaggccgccgcccctgaggcccctcagcctgccccacctggcggctctggcagcgagccttaccggctgctgcctggcgctgtggccaccatcgtgagacctctggaggccatcccccagcccaccatcacccggcaggaagtgatctgaggactagttataagactgactagcccgatgggcctcccaacgggccctcctcccctccttgcaccgagattaataaaaaaaaaaaaaaaaaaaaaaaaaaaaaaaaaaaaaaaaaaaaaaaaaaaaaaaaaaaaaaaatgcatcccccccccccccccccccccccccccccccaaaggctcttttcagagccaccagaatt

SEQ ID NO: 2902 - RNA, 1531 nt, synthetic construct
  misc_feature 1..1531: note = mRNA i-3 (A64-N5-C30-hSL-N5) (opt29) from Homo sapiens__NP_000448.3__HNF4A(39-474)(S87A_S95A_S99A_K106R_K1 08R_K126R_K127R_S142A_S143A_S148A_T166A_S167A_S313A_S378A_T 429A_T432A_S436A_K458R_S461E)
  source 1..1531: mol_type = other RNA
aggagaaagcttaccatggacaccagccctagcgagggcaccaacctgaacgcccctaatagcctgggagtgtccgccctgtgtgccatctgtggcgatagagccaccggcaagcactacggcgccagctcttgtgatggctgcaagggcttcttccggcgggccgtgcggaagaaccacatgtacgcctgccggttcgcccggcagtgcgtggtggaccgggatagacggaaccagtgccggtactgcagactgaagaagtgcttcagagccggcatgcggagagaagccgtgcagaacgagcgggaccggatcagcaccagaagagccgcctacgaggacagcgccctgcccagcatcaacgccctgctgcaggccgaggtgctgagcagacagatcgccgccccagtgtccggcatcaacggcgacatccgggccaagaagatcgccagcattgccgacgtgtgcgagagcatgaaggaacagctgctggtgctggtggaatgggccaagtacatccccgccttttgcgagctgcccctggacgatcaggtggccctgctgagagcacacgccggcgaacatctgctgctgggagccaccaagcggagcatggtgttcaaggacgtgctgctgctgggcaacgactacatcgtgcccagacactgccctgagctggccgagatgagccgggtgtccatcagaatcctggacgaactggtgctgccgtttcaggaactgcagatcgacgacaacgagtacgcctacctgaaggccatcatctttttcgaccccgacgccaagggcctgagcgaccctggcaagatcaagcggctgagagcccaggtgcaagtgtccctggaagattacatcaacgaccggcagtacgacagccggggcagatttggcgaactgctcctgctgctgcccaccctgcagagcatcacctggcagatgatcgagcagatccagttcatcaagctgttcggcatggccaagatcgacaatctgctgcaggaaatgctgctcgggggcgccccttctgatgcccctcatgcccaccaccctctgcaccctcacctgatgcaagaacacatgggcaccaatgtgatcgtggccaacacaatgcccacccacctgagcaacggccagatgtgcgagtggcccagacctagaggacaggccgccgcccctgaggcccctcagcctgccccacctggcggctctggcagcgagccttacaaactgctgcctggcgctgtggccaccatcgtgagacctctggaggccatcccccagcccaccatcaccaagcaggaagtgatctgaggactagttataagactgactagcccgatgggcctcccaacgggccctcctcccctccttgcaccgagattaataaaaaaaaaaaaaaaaaaaaaaaaaaaaaaaaaaaaaaaaaaaaaaaaaaaaaaaaaaaaaaaatgcatcccccccccccccccccccccccccccccccaaaggctcttttcagagccaccagaatt

SEQ ID NO: 2903 - RNA, 1531 nt, synthetic construct
  misc_feature 1..1531: note = mRNA i-3 (A64-N5-C30-hSL-N5) (opt29) from Homo sapiens__NP_000448.3__HNF4A(39-474)(S87A_K106R_K108R_K126R_ K127R_S138A_T139A_S142A_S143A_S148A_T166A_S167A_S313A_S378A _T429A_T432A_S436A_K458R_S461E)
  source 1..1531: mol_type = other RNA
aggagaaagcttaccatggacaccagccctagcgagggcaccaacctgaacgcccctaatagcctgggagtgtccgccctgtgtgccatctgtggcgatagagccaccggcaagcactacggcgccagctcttgtgatggctgcaagggcttcttccggcgggccgtgcggaagaaccacatgtacagctgccggttcagccggcagtgcgtggtggaccgggatagacggaaccagtgccggtactgcagactgaagaagtgcttcagagccggcatgcggagagaagccgtgcagaacgagcgggaccggatcgccgccagaagagccgcctacgaggacagcgccctgcccagcatcaacgccctgctgcaggccgaggtgctgagcagacagatcgccgccccagtgtccggcatcaacggcgacatccgggccaagaagatcgccagcattgccgacgtgtgcgagagcatgaaggaacagctgctggtgctggtggaatgggccaagtacatccccgccttttgcgagctgcccctggacgatcaggtggccctgctgagagcacacgccggcgaacatctgctgctgggagccaccaagcggagcatggtgttcaaggacgtgctgctgctgggcaacgactacatcgtgcccagacactgccctgagctggccgagatgagccgggtgtccatcagaatcctggacgaactggtgctgccgtttcaggaactgcagatcgacgacaacgagtacgcctacctgaaggccatcatctttttcgaccccgacgccaagggcctgagcgaccctggcaagatcaagcggctgagagcccaggtgcaagtgtccctggaagattacatcaacgaccggcagtacgacagccggggcagatttggcgaactgctcctgctgctgcccaccctgcagagcatcacctggcagatgatcgagcagatccagttcatcaagctgttcggcatggccaagatcgacaatctgctgcaggaaatgctgctcgggggcgccccttctgatgcccctcatgcccaccaccctctgcaccctcacctgatgcaagaacacatgggcaccaatgtgatcgtggccaacacaatgcccacccacctgagcaacggccagatgtgcgagtggcccagacctagaggacaggccgccgcccctgaggcccctcagcctgccccacctggcggctctggcagcgagccttacaaactgctgcctggcgctgtggccaccatcgtgagacctctggaggccatcccccagcccaccatcaccaagcaggaagtgatctgaggactagttataagactgactagcccgatgggcctcccaacgggccctcctcccctccttgcaccgagattaataaaaaaaaaaaaaaaaaaaaaaaaaaaaaaaaaaaaaaaaaaaaaaaaaaaaaaaaaaaaaaaatgcatcccccccccccccccccccccccccccccccaaaggctcttttcagagccaccagaatt

SEQ ID NO: 2904 - RNA, 1531 nt, synthetic construct
  misc_feature 1..1531: note = mRNA i-3 (A64-N5-C30-hSL-N5) (opt29) from Homo sapiens__NP_000448.3__HNF4A(39-474)(S87A_S95A_S99A_K106R_K1 08R_K126R_K127R_S138A_T139A_S142A_S143A_S148A_T166A_S167A_S 313A_S378A_T429A_T432A_S436A_K458R_S461E)
  source 1..1531: mol_type = other RNA
aggagaaagcttaccatggacaccagccctagcgagggcaccaacctgaacgcccctaatagcctgggagtgtccgccctgtgtgccatctgtggcgatagagccaccggcaagcactacggcgccagctcttgtgatggctgcaagggcttcttccggcgggccgtgcggaagaaccacatgtacgcctgccggttcgcccggcagtgcgtggtggaccgggatagacggaaccagtgccggtactgcagactgaagaagtgcttcagagccggcatgcggagagaagccgtgcagaacgagcgggaccggatcgccgccagaagagccgcctacgaggacagcgccctgcccagcatcaacgccctgctgcaggccgaggtgctgagcagacagatcgccgccccagtgtccggcatcaacggcgacatccgggccaagaagatcgccagcattgccgacgtgtgcgagagcatgaaggaacagctgctggtgctggtggaatgggccaagtacatccccgccttttgcgagctgcccctggacgatcaggtggccctgctgagagcacacgccggcgaacatctgctgctgggagccaccaagcggagcatggtgttcaaggacgtgctgctgctgggcaacgactacatcgtgcccagacactgccctgagctggccgagatgagccgggtgtccatcagaatcctggacgaactggtgctgccgtttcaggaactgcagatcgacgacaacgagtacgcctacctgaaggccatcatctttttcgaccccgacgccaagggcctgagcgaccctggcaagatcaagcggctgagagcccaggtgcaagtgtccctggaagattacatcaacgaccggcagtacgacagccggggcagatttggcgaactgctcctgctgctgcccaccctgcagagcatcacctggcagatgatcgagcagatccagttcatcaagctgttcggcatggccaagatcgacaatctgctgcaggaaatgctgctcgggggcgccccttctgatgcccctcatgcccaccaccctctgcaccctcacctgatgcaagaacacatgggcaccaatgtgatcgtggccaacacaatgcccacccacctgagcaacggccagatgtgcgagtggcccagacctagaggacaggccgccgcccctgaggcccctcagcctgccccacctggcggctctggcagcgagccttacaaactgctgcctggcgctgtggccaccatcgtgagacctctggaggccatcccccagcccaccatcaccaagcaggaagtgatctgaggactagttataagactgactagcccgatgggcctcccaacgggccctcctcccctccttgcaccgagattaataaaaaaaaaaaaaaaaaaaaaaaaaaaaaaaaaaaaaaaaaaaaaaaaaaaaaaaaaaaaaaaatgcatcccccccccccccccccccccccccccccccaaaggctcttttcagagccaccagaatt

SEQ ID NO: 2905 - RNA, 1697 nt, synthetic construct
  misc_feature 1..1697: note = mRNA a-1 (hSL-A100) (wt) from Homo sapiens__NP_000448.3__HNF4A(1-474)
  source 1..1697: mol_type = other RNA
aggagagtcccgcagtcggcgtccagcggctctgcttgttcgtgtgtgtgtcgttgcaggccttattcaagcttaccatgcgactctccaaaaccctcgtcgacatggacatggccgactacagtgctgcactggacccagcctacaccaccctggaatttgagaatgtgcaggtgttgacgatgggcaatgacacgtccccatcagaaggcaccaacctcaacgcgcccaacagcctgggtgtcagcgccctgtgtgccatctgcggggaccgggccacgggcaaacactacggtgcctcgagctgtgacggctgcaagggcttcttccggaggagcgtgcggaagaaccacatgtactcctgcagatttagccggcagtgcgtggtggacaaagacaagaggaaccagtgccgctactgcaggctcaagaaatgcttccgggctggcatgaagaaggaagccgtccagaatgagcgggaccggatcagcactcgaaggtcaagctatgaggacagcagcctgccctccatcaatgcgctcctgcaggcggaggtcctgtcccgacagatcacctcccccgtctccgggatcaacggcgacattcgggcgaagaagattgccagcatcgcagatgtgtgtgagtccatgaaggagcagctgctggttctcgttgagtgggccaagtacatcccagctttctgcgagctccccctggacgaccaggtggccctgctcagagcccatgctggcgagcacctgctgctcggagccaccaagagatccatggtgttcaaggacgtgctgctcctaggcaatgactacattgtccctcggcactgcccggagctggcggagatgagccgggtgtccatacgcatccttgacgagctggtgctgcccttccaggagctgcagatcgatgacaatgagtatgcctacctcaaagccatcatcttctttgacccagatgccaaggggctgagcgatccagggaagatcaagcggctgcgttcccaggtgcaggtgagcttggaggactacatcaacgaccgccagtatgactcgcgtggccgctttggagagctgctgctgctgctgcccaccttgcagagcatcacctggcagatgatcgagcagatccagttcatcaagctcttcggcatggccaagattgacaacctgttgcaggagatgctgctgggagggtcccccagcgatgcaccccatgcccaccaccccctgcaccctcacctgatgcaggaacatatgggaaccaacgtcatcgttgccaacacaatgcccactcacctcagcaacggacagatgtgtgagtggccccgacccaggggacaggcagccacccctgagaccccacagccctcaccgccaggtggctcagggtctgagccctataagctcctgccgggagccgtcgccacaatcgtcaagcccctctctgccatcccccagccgaccatcaccaagcaggaagttatctagggactagtccctgttcccagagcccacttttttttctttttttgaaataaaatagcctgtctttcagatctcaaaggctcttttcagagccaccaaaaaaaaaaaaaaaaaaaaaaaaaaaaaaaaaaaaaaaaaaaaaaaaaaaaaaaaaaaaaaaaaaaaaaaaaaaaaaaaaaaaaaaaaaaaaaaaaaaaa

SEQ ID NO: 2906 - RNA, 1697 nt, synthetic construct
  misc_feature 1..1697: note = mRNA a-1 (hSL-A100) (wt mod) from Homo sapiens__NP_000448.3__HNF4A(1-474) R9821
  source 1..1697: mol_type = other RNA
aggagagtcccgcagtcggcgtccagcggctctgcttgttcgtgtgtgtgtcgttgcaggccttattcaagcttaccatgcgactctccaaaaccctcgtcgacatggacatggccgactacagtgctgcactggacccagcctacaccaccctggaatttgagaatgtccaggtgttgacgatgggcaatgacacgtccccatcagaaggcaccaacctcaacgcgcccaacagcctgggtgtgagcgccctgtgtgccatctgcggggaccgggccacgggcaaacactacggtgcctcgagctgtgacggctgcaagggcttcttccggaggagcgtgcggaagaaccacatgtactcctgcagatttagccggcagtgcgtggtggacaaagacaagaggaaccagtgccgctactgcaggctcaagaaatgcttccgggctggcatgaagaaggaagccgtccagaatgagcgggaccggatcagcactcgaaggtcaagctatgaggacagcagcctgccctccatcaatgcgctcctgcaggcggaggtcctgtcccgacagatcacctcccccgtctccgggatcaacggcgacattcgggcgaagaagattgccagcatcgcagatgtgtgtgagtccatgaaggagcagctgctggttctcgttgagtgggccaagtacatcccagctttctgcgagctccccctggacgaccaggtggccctgctcagagcccatgctggcgagcacctcctgctcggagccaccaagagatccatggtgttcaaggacgtgctgctcctaggcaatgactacattgtccctcggcactgcccggagctggcggagatgagccgggtgtccatacgcatccttgacgagctggtgctgcccttccaggagctgcagatcgatgacaatgagtatgcctacctcaaagccatcatcttctttgacccagatgccaaggggctgagcgatccagggaagatcaagcggctgcgttcccaggtccaggtgagcttggaggactacatcaacgaccgccagtatgactcgcgtggccgctttggagagctgctgctgctgctgcccaccttgcagagcatcacctggcagatgatcgagcagatccagttcatcaagctgttcggcatggccaagattgacaacctgttgcaggagatgctgctgggagggtcccccagcgatgcaccccatgcccaccaccccctgcaccctcacctgatgcaggaacatatgggaaccaacgtgatcgttgccaacacaatgcccactcacctcagcaacggacagatgtgtgagtggccccgacccaggggacaggcagccacccctgagaccccacagccctcaccgccaggtggctcagggtctgagccctataagctcctgccgggagccgtcgccacaatcgtcaagcccctctctgccatcccccagccgaccatcaccaagcaggaagttatctgaggactagtccctgttcccagagcccacttttttttctttttttgaaataaaatagcctgtctttcagatctcaaaggctcttttcagagccaccaaaaaaaaaaaaaaaaaaaaaaaaaaaaaaaaaaaaaaaaaaaaaaaaaaaaaaaaaaaaaaaaaaaaaaaaaaaaaaaaaaaaaaaaaaaaaaaaaaaaa

SEQ ID NO: 2907 - RNA, 1697 nt, synthetic construct
  misc_feature 1..1697: note = mRNA a-1 (hSL-A100) (opt1) from Homo sapiens__NP_000448.3__HNF4A(1-474) R10692
  source 1..1697: mol_type = other RNA
aggagagtcccgcagtcggcgtccagcggctctgcttgttcgtgtgtgtgtcgttgcaggccttattcaagcttaccatgcgcctgagcaagaccctcgtggacatggacatggccgactactccgccgcgctggaccccgcctacaccacgctggagttcgagaacgtccaggtgctcaccatgggcaacgacaccagcccgtccgaggggaccaacctgaacgcccccaacagcctgggcgtgtccgccctctgcgccatctgcggggaccgggcgacgggcaagcactacggggccagctcctgcgacggctgcaagggcttcttccgccggagcgtccgcaagaaccacatgtactcctgccggttcagccgccagtgcgtggtggacaaggacaagcggaaccagtgccgctactgccggctgaagaagtgcttccgcgccgggatgaagaaggaggccgtccagaacgagcgggaccgcatctccacccggcgcagctcctacgaggacagctccctgcccagcatcaacgcgctcctgcaggccgaggtgctgtcccggcagatcaccagccccgtgtccggcatcaacggggacatccgcgccaagaagatcgccagcatcgccgacgtctgcgagagcatgaaggagcagctcctggtgctggtggagtgggcgaagtacatcccggccttctgcgagctccccctggacgaccaggtcgccctgctccgggcccacgccggcgagcacctcctgctgggggcgaccaagcgctccatggtgttcaaggacgtgctgctgctcggcaacgactacatcgtcccccggcactgccccgagctggccgagatgagccgcgtgtccatccggatcctggacgagctcgtgctgccgttccaggagctgcagatcgacgacaacgagtacgcctacctcaaggccatcatcttcttcgaccccgacgccaagggcctgagcgaccccgggaagatcaagcgcctgcgctcccaggtccaggtgagcctcgaggactacatcaacgaccggcagtacgactcccgcggccggttcggggagctgctgctcctgctgcccacgctccagagcatcacctggcagatgatcgagcagatccagttcatcaagctgttcggcatggcgaagatcgacaacctgctccaggagatgctgctgggcgggtccccgagcgacgcgccccacgcccaccaccccctccacccccacctgatgcaggagcacatgggcaccaacgtgatcgtcgccaacaccatgccgacgcacctgtccaacgggcagatgtgcgagtggccccgcccccggggccaggccgccacccccgagaccccgcagcccagcccgcccgggggctccggcagcgagccctacaagctgctccccggggccgtggccaccatcgtgaagcccctgtccgccatcccccagccgacgatcaccaagcaggaggtcatctgaggactagtccctgttcccagagcccacttttttttctttttttgaaataaaatagcctgtctttcagatctcaaaggctcttttcagagccaccaaaaaaaaaaaaaaaaaaaaaaaaaaaaaaaaaaaaaaaaaaaaaaaaaaaaaaaaaaaaaaaaaaaaaaaaaaaaaaaaaaaaaaaaaaaaaaaaaaaaa

SEQ ID NO: 2908 - RNA, 1697 nt, synthetic construct
  misc_feature 1..1697: note = mRNA a-1 (hSL-A100) (opt1) from Homo sapiens__NP_000448.3__HNF4A(1-474)(S313A)
  source 1..1697: mol_type = other RNA
aggagagtcccgcagtcggcgtccagcggctctgcttgttcgtgtgtgtgtcgttgcaggccttattcaagcttaccatgcgcctgagcaagaccctcgtggacatggacatggccgactactccgccgcgctggaccccgcctacaccacgctggagttcgagaacgtccaggtgctcaccatgggcaacgacaccagcccgtccgaggggaccaacctgaacgcccccaacagcctgggcgtgtccgccctctgcgccatctgcggggaccgggcgacgggcaagcactacggggccagctcctgcgacggctgcaagggcttcttccgccggagcgtccgcaagaaccacatgtactcctgccggttcagccgccagtgcgtggtggacaaggacaagcggaaccagtgccgctactgccggctgaagaagtgcttccgcgccgggatgaagaaggaggccgtccagaacgagcgggaccgcatctccacccggcgcagctcctacgaggacagctccctgcccagcatcaacgcgctcctgcaggccgaggtgctgtcccggcagatcaccagccccgtgtccggcatcaacggggacatccgcgccaagaagatcgccagcatcgccgacgtctgcgagagcatgaaggagcagctcctggtgctggtggagtgggcgaagtacatcccggccttctgcgagctccccctggacgaccaggtcgccctgctccgggcccacgccggcgagcacctcctgctgggggcgaccaagcgctccatggtgttcaaggacgtgctgctgctcggcaacgactacatcgtcccccggcactgccccgagctggccgagatgagccgcgtgtccatccggatcctggacgagctcgtgctgccgttccaggagctgcagatcgacgacaacgagtacgcctacctcaaggccatcatcttcttcgaccccgacgccaagggcctgagcgaccccgggaagatcaagcgcctgcgcgcgcaggtccaggtgagcctcgaggactacatcaacgaccggcagtacgactcccgcggccggttcggggagctgctgctcctgctgcccacgctccagagcatcacctggcagatgatcgagcagatccagttcatcaagctgttcggcatggcgaagatcgacaacctgctccaggagatgctgctgggcgggtccccgagcgacgcgccccacgcccaccaccccctccacccccacctgatgcaggagcacatgggcaccaacgtgatcgtcgccaacaccatgccgacgcacctgtccaacgggcagatgtgcgagtggccccgcccccggggccaggccgccacccccgagaccccgcagcccagcccgcccgggggctccggcagcgagccctacaagctgctccccggggccgtggccaccatcgtgaagcccctgtccgccatcccccagccgacgatcaccaagcaggaggtcatctgaggactagtccctgttcccagagcccacttttttttctttttttgaaataaaatagcctgtctttcagatctcaaaggctcttttcagagccaccaaaaaaaaaaaaaaaaaaaaaaaaaaaaaaaaaaaaaaaaaaaaaaaaaaaaaaaaaaaaaaaaaaaaaaaaaaaaaaaaaaaaaaaaaaaaaaaaaaaaa

SEQ ID NO: 2909 - RNA, 1697 nt, synthetic construct
  misc_feature 1..1697: note = mRNA a-1 (hSL-A100) (opt1) from Homo sapiens__NP_000448.3__HNF4A(1-474)(S313E)
  source 1..1697: mol_type = other RNA
aggagagtcccgcagtcggcgtccagcggctctgcttgttcgtgtgtgtgtcgttgcaggccttattcaagcttaccatgcgcctgagcaagaccctcgtggacatggacatggccgactactccgccgcgctggaccccgcctacaccacgctggagttcgagaacgtccaggtgctcaccatgggcaacgacaccagcccgtccgaggggaccaacctgaacgcccccaacagcctgggcgtgtccgccctctgcgccatctgcggggaccgggcgacgggcaagcactacggggccagctcctgcgacggctgcaagggcttcttccgccggagcgtccgcaagaaccacatgtactcctgccggttcagccgccagtgcgtggtggacaaggacaagcggaaccagtgccgctactgccggctgaagaagtgcttccgcgccgggatgaagaaggaggccgtccagaacgagcgggaccgcatctccacccggcgcagctcctacgaggacagctccctgcccagcatcaacgcgctcctgcaggccgaggtgctgtcccggcagatcaccagccccgtgtccggcatcaacggggacatccgcgccaagaagatcgccagcatcgccgacgtctgcgagagcatgaaggagcagctcctggtgctggtggagtgggcgaagtacatcccggccttctgcgagctccccctggacgaccaggtcgccctgctccgggcccacgccggcgagcacctcctgctgggggcgaccaagcgctccatggtgttcaaggacgtgctgctgctcggcaacgactacatcgtcccccggcactgccccgagctggccgagatgagccgcgtgtccatccggatcctggacgagctcgtgctgccgttccaggagctgcagatcgacgacaacgagtacgcctacctcaaggccatcatcttcttcgaccccgacgccaagggcctgagcgaccccgggaagatcaagcgcctgcgcgagcaggtccaggtgagcctcgaggactacatcaacgaccggcagtacgactcccgcggccggttcggggagctgctgctcctgctgcccacgctccagagcatcacctggcagatgatcgagcagatccagttcatcaagctgttcggcatggcgaagatcgacaacctgctccaggagatgctgctgggcgggtccccgagcgacgcgccccacgcccaccaccccctccacccccacctgatgcaggagcacatgggcaccaacgtgatcgtcgccaacaccatgccgacgcacctgtccaacgggcagatgtgcgagtggccccgcccccggggccaggccgccacccccgagaccccgcagcccagcccgcccgggggctccggcagcgagccctacaagctgctccccggggccgtggccaccatcgtgaagcccctgtccgccatcccccagccgacgatcaccaagcaggaggtcatctgaggactagtccctgttcccagagcccacttttttttctttttttgaaataaaatagcctgtctttcagatctcaaaggctcttttcagagccaccaaaaaaaaaaaaaaaaaaaaaaaaaaaaaaaaaaaaaaaaaaaaaaaaaaaaaaaaaaaaaaaaaaaaaaaaaaaaaaaaaaaaaaaaaaaaaaaaaaaaa

SEQ ID NO: 2910 - RNA, 1697 nt, synthetic construct
  misc_feature 1..1697: note = mRNA a-1 (hSL-A100) (opt1) from Homo sapiens__NP_000448.3__HNF4A(1-474)(S142A_S143A)
  source 1..1697: mol_type = other RNA
aggagagtcccgcagtcggcgtccagcggctctgcttgttcgtgtgtgtgtcgttgcaggccttattcaagcttaccatgcgcctgagcaagaccctcgtggacatggacatggccgactactccgccgcgctggaccccgcctacaccacgctggagttcgagaacgtccaggtgctcaccatgggcaacgacaccagcccgtccgaggggaccaacctgaacgcccccaacagcctgggcgtgtccgccctctgcgccatctgcggggaccgggcgacgggcaagcactacggggccagctcctgcgacggctgcaagggcttcttccgccggagcgtccgcaagaaccacatgtactcctgccggttcagccgccagtgcgtggtggacaaggacaagcggaaccagtgccgctactgccggctgaagaagtgcttccgcgccgggatgaagaaggaggccgtccagaacgagcgggaccgcatctccacccggcgcgcggcctacgaggacagctccctgcccagcatcaacgcgctcctgcaggccgaggtgctgtcccggcagatcaccagccccgtgtccggcatcaacggggacatccgcgccaagaagatcgccagcatcgccgacgtctgcgagagcatgaaggagcagctcctggtgctggtggagtgggcgaagtacatcccggccttctgcgagctccccctggacgaccaggtcgccctgctccgggcccacgccggcgagcacctcctgctgggggcgaccaagcgctccatggtgttcaaggacgtgctgctgctcggcaacgactacatcgtcccccggcactgccccgagctggccgagatgagccgcgtgtccatccggatcctggacgagctcgtgctgccgttccaggagctgcagatcgacgacaacgagtacgcctacctcaaggccatcatcttcttcgaccccgacgccaagggcctgagcgaccccgggaagatcaagcgcctgcgctcccaggtccaggtgagcctcgaggactacatcaacgaccggcagtacgactcccgcggccggttcggggagctgctgctcctgctgcccacgctccagagcatcacctggcagatgatcgagcagatccagttcatcaagctgttcggcatggcgaagatcgacaacctgctccaggagatgctgctgggcgggtccccgagcgacgcgccccacgcccaccaccccctccacccccacctgatgcaggagcacatgggcaccaacgtgatcgtcgccaacaccatgccgacgcacctgtccaacgggcagatgtgcgagtggccccgcccccggggccaggccgccacccccgagaccccgcagcccagcccgcccgggggctccggcagcgagccctacaagctgctccccggggccgtggccaccatcgtgaagcccctgtccgccatcccccagccgacgatcaccaagcaggaggtcatctgaggactagtccctgttcccagagcccacttttttttctttttttgaaataaaatagcctgtctttcagatctcaaaggctcttttcagagccaccaaaaaaaaaaaaaaaaaaaaaaaaaaaaaaaaaaaaaaaaaaaaaaaaaaaaaaaaaaaaaaaaaaaaaaaaaaaaaaaaaaaaaaaaaaaaaaaaaaaaa

SEQ ID NO: 2911 - RNA, 1697 nt, synthetic construct
  misc_feature 1..1697: note = mRNA a-1 (hSL-A100) (opt1) from Homo sapiens__NP_000448.3__HNF4A(1-474)(S142E_S143E)
  source 1..1697: mol_type = other RNA
aggagagtcccgcagtcggcgtccagcggctctgcttgttcgtgtgtgtgtcgttgcaggccttattcaagcttaccatgcgcctgagcaagaccctcgtggacatggacatggccgactactccgccgcgctggaccccgcctacaccacgctggagttcgagaacgtccaggtgctcaccatgggcaacgacaccagcccgtccgaggggaccaacctgaacgcccccaacagcctgggcgtgtccgccctctgcgccatctgcggggaccgggcgacgggcaagcactacggggccagctcctgcgacggctgcaagggcttcttccgccggagcgtccgcaagaaccacatgtactcctgccggttcagccgccagtgcgtggtggacaaggacaagcggaaccagtgccgctactgccggctgaagaagtgcttccgcgccgggatgaagaaggaggccgtccagaacgagcgggaccgcatctccacccggcgcgaggagtacgaggacagctccctgcccagcatcaacgcgctcctgcaggccgaggtgctgtcccggcagatcaccagccccgtgtccggcatcaacggggacatccgcgccaagaagatcgccagcatcgccgacgtctgcgagagcatgaaggagcagctcctggtgctggtggagtgggcgaagtacatcccggccttctgcgagctccccctggacgaccaggtcgccctgctccgggcccacgccggcgagcacctcctgctgggggcgaccaagcgctccatggtgttcaaggacgtgctgctgctcggcaacgactacatcgtcccccggcactgccccgagctggccgagatgagccgcgtgtccatccggatcctggacgagctcgtgctgccgttccaggagctgcagatcgacgacaacgagtacgcctacctcaaggccatcatcttcttcgaccccgacgccaagggcctgagcgaccccgggaagatcaagcgcctgcgctcccaggtccaggtgagcctcgaggactacatcaacgaccggcagtacgactcccgcggccggttcggggagctgctgctcctgctgcccacgctccagagcatcacctggcagatgatcgagcagatccagttcatcaagctgttcggcatggcgaagatcgacaacctgctccaggagatgctgctgggcgggtccccgagcgacgcgccccacgcccaccaccccctccacccccacctgatgcaggagcacatgggcaccaacgtgatcgtcgccaacaccatgccgacgcacctgtccaacgggcagatgtgcgagtggccccgcccccggggccaggccgccacccccgagaccccgcagcccagcccgcccgggggctccggcagcgagccctacaagctgctccccggggccgtggccaccatcgtgaagcccctgtccgccatcccccagccgacgatcaccaagcaggaggtcatctgaggactagtccctgttcccagagcccacttttttttctttttttgaaataaaatagcctgtctttcagatctcaaaggctcttttcagagccaccaaaaaaaaaaaaaaaaaaaaaaaaaaaaaaaaaaaaaaaaaaaaaaaaaaaaaaaaaaaaaaaaaaaaaaaaaaaaaaaaaaaaaaaaaaaaaaaaaaaaa

SEQ ID NO: 2912 - RNA, 1697 nt, synthetic construct
  misc_feature 1..1697: note = mRNA a-1 (hSL-A100) (opt1) from Homo sapiens__NP_000448.3__HNF4A(1-474)(S143A)
  source 1..1697: mol_type = other RNA
aggagagtcccgcagtcggcgtccagcggctctgcttgttcgtgtgtgtgtcgttgcaggccttattcaagcttaccatgcgcctgagcaagaccctcgtggacatggacatggccgactactccgccgcgctggaccccgcctacaccacgctggagttcgagaacgtccaggtgctcaccatgggcaacgacaccagcccgtccgaggggaccaacctgaacgcccccaacagcctgggcgtgtccgccctctgcgccatctgcggggaccgggcgacgggcaagcactacggggccagctcctgcgacggctgcaagggcttcttccgccggagcgtccgcaagaaccacatgtactcctgccggttcagccgccagtgcgtggtggacaaggacaagcggaaccagtgccgctactgccggctgaagaagtgcttccgcgccgggatgaagaaggaggccgtccagaacgagcgggaccgcatctccacccggcgcagcgcgtacgaggacagctccctgcccagcatcaacgcgctcctgcaggccgaggtgctgtcccggcagatcaccagccccgtgtccggcatcaacggggacatccgcgccaagaagatcgccagcatcgccgacgtctgcgagagcatgaaggagcagctcctggtgctggtggagtgggcgaagtacatcccggccttctgcgagctccccctggacgaccaggtcgccctgctccgggcccacgccggcgagcacctcctgctgggggcgaccaagcgctccatggtgttcaaggacgtgctgctgctcggcaacgactacatcgtcccccggcactgccccgagctggccgagatgagccgcgtgtccatccggatcctggacgagctcgtgctgccgttccaggagctgcagatcgacgacaacgagtacgcctacctcaaggccatcatcttcttcgaccccgacgccaagggcctgagcgaccccgggaagatcaagcgcctgcgctcccaggtccaggtgagcctcgaggactacatcaacgaccggcagtacgactcccgcggccggttcggggagctgctgctcctgctgcccacgctccagagcatcacctggcagatgatcgagcagatccagttcatcaagctgttcggcatggcgaagatcgacaacctgctccaggagatgctgctgggcgggtccccgagcgacgcgccccacgcccaccaccccctccacccccacctgatgcaggagcacatgggcaccaacgtgatcgtcgccaacaccatgccgacgcacctgtccaacgggcagatgtgcgagtggccccgcccccggggccaggccgccacccccgagaccccgcagcccagcccgcccgggggctccggcagcgagccctacaagctgctccccggggccgtggccaccatcgtgaagcccctgtccgccatcccccagccgacgatcaccaagcaggaggtcatctgaggactagtccctgttcccagagcccacttttttttctttttttgaaataaaatagcctgtctttcagatctcaaaggctcttttcagagccaccaaaaaaaaaaaaaaaaaaaaaaaaaaaaaaaaaaaaaaaaaaaaaaaaaaaaaaaaaaaaaaaaaaaaaaaaaaaaaaaaaaaaaaaaaaaaaaaaaaaaa

SEQ ID NO: 2913 - RNA, 1697 nt, synthetic construct
  misc_feature 1..1697: note = mRNA a-1 (hSL-A100) (opt1) from Homo sapiens__NP_000448.3__HNF4A(1-474)(T166A)
  source 1..1697: mol_type = other RNA
aggagagtcccgcagtcggcgtccagcggctctgcttgttcgtgtgtgtgtcgttgcaggccttattcaagcttaccatgcgcctgagcaagaccctcgtggacatggacatggccgactactccgccgcgctggaccccgcctacaccacgctggagttcgagaacgtccaggtgctcaccatgggcaacgacaccagcccgtccgaggggaccaacctgaacgcccccaacagcctgggcgtgtccgccctctgcgccatctgcggggaccgggcgacgggcaagcactacggggccagctcctgcgacggctgcaagggcttcttccgccggagcgtccgcaagaaccacatgtactcctgccggttcagccgccagtgcgtggtggacaaggacaagcggaaccagtgccgctactgccggctgaagaagtgcttccgcgccgggatgaagaaggaggccgtccagaacgagcgggaccgcatctccacccggcgcagctcctacgaggacagctccctgcccagcatcaacgcgctcctgcaggccgaggtgctgtcccggcagatcgcgagccccgtgtccggcatcaacggggacatccgcgccaagaagatcgccagcatcgccgacgtctgcgagagcatgaaggagcagctcctggtgctggtggagtgggcgaagtacatcccggccttctgcgagctccccctggacgaccaggtcgccctgctccgggcccacgccggcgagcacctcctgctgggggcgaccaagcgctccatggtgttcaaggacgtgctgctgctcggcaacgactacatcgtcccccggcactgccccgagctggccgagatgagccgcgtgtccatccggatcctggacgagctcgtgctgccgttccaggagctgcagatcgacgacaacgagtacgcctacctcaaggccatcatcttcttcgaccccgacgccaagggcctgagcgaccccgggaagatcaagcgcctgcgctcccaggtccaggtgagcctcgaggactacatcaacgaccggcagtacgactcccgcggccggttcggggagctgctgctcctgctgcccacgctccagagcatcacctggcagatgatcgagcagatccagttcatcaagctgttcggcatggcgaagatcgacaacctgctccaggagatgctgctgggcgggtccccgagcgacgcgccccacgcccaccaccccctccacccccacctgatgcaggagcacatgggcaccaacgtgatcgtcgccaacaccatgccgacgcacctgtccaacgggcagatgtgcgagtggccccgcccccggggccaggccgccacccccgagaccccgcagcccagcccgcccgggggctccggcagcgagccctacaagctgctccccggggccgtggccaccatcgtgaagcccctgtccgccatcccccagccgacgatcaccaagcaggaggtcatctgaggactagtccctgttcccagagcccacttttttttctttttttgaaataaaatagcctgtctttcagatctcaaaggctcttttcagagccaccaaaaaaaaaaaaaaaaaaaaaaaaaaaaaaaaaaaaaaaaaaaaaaaaaaaaaaaaaaaaaaaaaaaaaaaaaaaaaaaaaaaaaaaaaaaaaaaaaaaaa

SEQ ID NO: 2914 - RNA, 1697 nt, synthetic construct
  misc_feature 1..1697: note = mRNA a-1 (hSL-A100) (opt1) from Homo sapiens__NP_000448.3__HNF4A(1-474)(S167E)
  source 1..1697: mol_type = other RNA
aggagagtcccgcagtcggcgtccagcggctctgcttgttcgtgtgtgtgtcgttgcaggccttattcaagcttaccatgcgcctgagcaagaccctcgtggacatggacatggccgactactccgccgcgctggaccccgcctacaccacgctggagttcgagaacgtccaggtgctcaccatgggcaacgacaccagcccgtccgaggggaccaacctgaacgcccccaacagcctgggcgtgtccgccctctgcgccatctgcggggaccgggcgacgggcaagcactacggggccagctcctgcgacggctgcaagggcttcttccgccggagcgtccgcaagaaccacatgtactcctgccggttcagccgccagtgcgtggtggacaaggacaagcggaaccagtgccgctactgccggctgaagaagtgcttccgcgccgggatgaagaaggaggccgtccagaacgagcgggaccgcatctccacccggcgcagctcctacgaggacagctccctgcccagcatcaacgcgctcctgcaggccgaggtgctgtcccggcagatcaccgagcccgtgtccggcatcaacggggacatccgcgccaagaagatcgccagcatcgccgacgtctgcgagagcatgaaggagcagctcctggtgctggtggagtgggcgaagtacatcccggccttctgcgagctccccctggacgaccaggtcgccctgctccgggcccacgccggcgagcacctcctgctgggggcgaccaagcgctccatggtgttcaaggacgtgctgctgctcggcaacgactacatcgtcccccggcactgccccgagctggccgagatgagccgcgtgtccatccggatcctggacgagctcgtgctgccgttccaggagctgcagatcgacgacaacgagtacgcctacctcaaggccatcatcttcttcgaccccgacgccaagggcctgagcgaccccgggaagatcaagcgcctgcgctcccaggtccaggtgagcctcgaggactacatcaacgaccggcagtacgactcccgcggccggttcggggagctgctgctcctgctgcccacgctccagagcatcacctggcagatgatcgagcagatccagttcatcaagctgttcggcatggcgaagatcgacaacctgctccaggagatgctgctgggcgggtccccgagcgacgcgccccacgcccaccaccccctccacccccacctgatgcaggagcacatgggcaccaacgtgatcgtcgccaacaccatgccgacgcacctgtccaacgggcagatgtgcgagtggccccgcccccggggccaggccgccacccccgagaccccgcagcccagcccgcccgggggctccggcagcgagccctacaagctgctccccggggccgtggccaccatcgtgaagcccctgtccgccatcccccagccgacgatcaccaagcaggaggtcatctgaggactagtccctgttcccagagcccacttttttttctttttttgaaataaaatagcctgtctttcagatctcaaaggctcttttcagagccaccaaaaaaaaaaaaaaaaaaaaaaaaaaaaaaaaaaaaaaaaaaaaaaaaaaaaaaaaaaaaaaaaaaaaaaaaaaaaaaaaaaaaaaaaaaaaaaaaaaaaa

SEQ ID NO: 2915 - RNA, 1697 nt, synthetic construct
  misc_feature 1..1697: note = mRNA a-1 (hSL-A100) (opt1) from Homo sapiens__NP_000448.3__HNF4A(1-474)(S167A)
  source 1..1697: mol_type = other RNA
aggagagtcccgcagtcggcgtccagcggctctgcttgttcgtgtgtgtgtcgttgcaggccttattcaagcttaccatgcgcctgagcaagaccctcgtggacatggacatggccgactactccgccgcgctggaccccgcctacaccacgctggagttcgagaacgtccaggtgctcaccatgggcaacgacaccagcccgtccgaggggaccaacctgaacgcccccaacagcctgggcgtgtccgccctctgcgccatctgcggggaccgggcgacgggcaagcactacggggccagctcctgcgacggctgcaagggcttcttccgccggagcgtccgcaagaaccacatgtactcctgccggttcagccgccagtgcgtggtggacaaggacaagcggaaccagtgccgctactgccggctgaagaagtgcttccgcgccgggatgaagaaggaggccgtccagaacgagcgggaccgcatctccacccggcgcagctcctacgaggacagctccctgcccagcatcaacgcgctcctgcaggccgaggtgctgtcccggcagatcaccgcgcccgtgtccggcatcaacggggacatccgcgccaagaagatcgccagcatcgccgacgtctgcgagagcatgaaggagcagctcctggtgctggtggagtgggcgaagtacatcccggccttctgcgagctccccctggacgaccaggtcgccctgctccgggcccacgccggcgagcacctcctgctgggggcgaccaagcgctccatggtgttcaaggacgtgctgctgctcggcaacgactacatcgtcccccggcactgccccgagctggccgagatgagccgcgtgtccatccggatcctggacgagctcgtgctgccgttccaggagctgcagatcgacgacaacgagtacgcctacctcaaggccatcatcttcttcgaccccgacgccaagggcctgagcgaccccgggaagatcaagcgcctgcgctcccaggtccaggtgagcctcgaggactacatcaacgaccggcagtacgactcccgcggccggttcggggagctgctgctcctgctgcccacgctccagagcatcacctggcagatgatcgagcagatccagttcatcaagctgttcggcatggcgaagatcgacaacctgctccaggagatgctgctgggcgggtccccgagcgacgcgccccacgcccaccaccccctccacccccacctgatgcaggagcacatgggcaccaacgtgatcgtcgccaacaccatgccgacgcacctgtccaacgggcagatgtgcgagtggccccgcccccggggccaggccgccacccccgagaccccgcagcccagcccgcccgggggctccggcagcgagccctacaagctgctccccggggccgtggccaccatcgtgaagcccctgtccgccatcccccagccgacgatcaccaagcaggaggtcatctgaggactagtccctgttcccagagcccacttttttttctttttttgaaataaaatagcctgtctttcagatctcaaaggctcttttcagagccaccaaaaaaaaaaaaaaaaaaaaaaaaaaaaaaaaaaaaaaaaaaaaaaaaaaaaaaaaaaaaaaaaaaaaaaaaaaaaaaaaaaaaaaaaaaaaaaaaaaaaa

SEQ ID NO: 2916 - RNA, 1697 nt, synthetic construct
  misc_feature 1..1697: note = mRNA a-1 (hSL-A100) (opt1) from Homo sapiens__NP_000448.3__HNF4A(1-474)(S167A_S378A_T429A_T432A_ S436A)
  source 1..1697: mol_type = other RNA
aggagagtcccgcagtcggcgtccagcggctctgcttgttcgtgtgtgtgtcgttgcaggccttattcaagcttaccatgcgcctgagcaagaccctcgtggacatggacatggccgactactccgccgcgctggaccccgcctacaccacgctggagttcgagaacgtccaggtgctcaccatgggcaacgacaccagcccgtccgaggggaccaacctgaacgcccccaacagcctgggcgtgtccgccctctgcgccatctgcggggaccgggcgacgggcaagcactacggggccagctcctgcgacggctgcaagggcttcttccgccggagcgtccgcaagaaccacatgtactcctgccggttcagccgccagtgcgtggtggacaaggacaagcggaaccagtgccgctactgccggctgaagaagtgcttccgcgccgggatgaagaaggaggccgtccagaacgagcgggaccgcatctccacccggcgcagctcctacgaggacagctccctgcccagcatcaacgcgctcctgcaggccgaggtgctgtcccggcagatcaccgcgcccgtgtccggcatcaacggggacatccgcgccaagaagatcgccagcatcgccgacgtctgcgagagcatgaaggagcagctcctggtgctggtggagtgggcgaagtacatcccggccttctgcgagctccccctggacgaccaggtcgccctgctccgggcccacgccggcgagcacctcctgctgggggcgaccaagcgctccatggtgttcaaggacgtgctgctgctcggcaacgactacatcgtcccccggcactgccccgagctggccgagatgagccgcgtgtccatccggatcctggacgagctcgtgctgccgttccaggagctgcagatcgacgacaacgagtacgcctacctcaaggccatcatcttcttcgaccccgacgccaagggcctgagcgaccccgggaagatcaagcgcctgcgctcccaggtccaggtgagcctcgaggactacatcaacgaccggcagtacgactcccgcggccggttcggggagctgctgctcctgctgcccacgctccagagcatcacctggcagatgatcgagcagatccagttcatcaagctgttcggcatggcgaagatcgacaacctgctccaggagatgctgctgggcggggcgccgagcgacgcgccccacgcccaccaccccctccacccccacctgatgcaggagcacatgggcaccaacgtgatcgtcgccaacaccatgccgacgcacctgtccaacgggcagatgtgcgagtggccccgcccccggggccaggccgccgcgcccgaggcgccgcagcccgcgccgcccgggggctccggcagcgagccctacaagctgctccccggggccgtggccaccatcgtgaagcccctgtccgccatcccccagccgacgatcaccaagcaggaggtcatctgaggactagtccctgttcccagagcccacttttttttctttttttgaaataaaatagcctgtctttcagatctcaaaggctcttttcagagccaccaaaaaaaaaaaaaaaaaaaaaaaaaaaaaaaaaaaaaaaaaaaaaaaaaaaaaaaaaaaaaaaaaaaaaaaaaaaaaaaaaaaaaaaaaaaaaaaaaaaaa

SEQ ID NO: 2917 - RNA, 1697 nt, synthetic construct
  misc_feature 1..1697: note = mRNA a-1 (hSL-A100) (opt1) from Homo sapiens__NP_000448.3__HNF4A(1-474)(S167E_S378E_T429E_T432E_ S436E)
  source 1..1697: mol_type = other RNA
aggagagtcccgcagtcggcgtccagcggctctgcttgttcgtgtgtgtgtcgttgcaggccttattcaagcttaccatgcgcctgagcaagaccctcgtggacatggacatggccgactactccgccgcgctggaccccgcctacaccacgctggagttcgagaacgtccaggtgctcaccatgggcaacgacaccagcccgtccgaggggaccaacctgaacgcccccaacagcctgggcgtgtccgccctctgcgccatctgcggggaccgggcgacgggcaagcactacggggccagctcctgcgacggctgcaagggcttcttccgccggagcgtccgcaagaaccacatgtactcctgccggttcagccgccagtgcgtggtggacaaggacaagcggaaccagtgccgctactgccggctgaagaagtgcttccgcgccgggatgaagaaggaggccgtccagaacgagcgggaccgcatctccacccggcgcagctcctacgaggacagctccctgcccagcatcaacgcgctcctgcaggccgaggtgctgtcccggcagatcaccgagcccgtgtccggcatcaacggggacatccgcgccaagaagatcgccagcatcgccgacgtctgcgagagcatgaaggagcagctcctggtgctggtggagtgggcgaagtacatcccggccttctgcgagctccccctggacgaccaggtcgccctgctccgggcccacgccggcgagcacctcctgctgggggcgaccaagcgctccatggtgttcaaggacgtgctgctgctcggcaacgactacatcgtcccccggcactgccccgagctggccgagatgagccgcgtgtccatccggatcctggacgagctcgtgctgccgttccaggagctgcagatcgacgacaacgagtacgcctacctcaaggccatcatcttcttcgaccccgacgccaagggcctgagcgaccccgggaagatcaagcgcctgcgctcccaggtccaggtgagcctcgaggactacatcaacgaccggcagtacgactcccgcggccggttcggggagctgctgctcctgctgcccacgctccagagcatcacctggcagatgatcgagcagatccagttcatcaagctgttcggcatggcgaagatcgacaacctgctccaggagatgctgctgggcggggagccgagcgacgcgccccacgcccaccaccccctccacccccacctgatgcaggagcacatgggcaccaacgtgatcgtcgccaacaccatgccgacgcacctgtccaacgggcagatgtgcgagtggccccgcccccggggccaggccgccgagcccgaggagccgcagcccgagccgcccgggggctccggcagcgagccctacaagctgctccccggggccgtggccaccatcgtgaagcccctgtccgccatcccccagccgacgatcaccaagcaggaggtcatctgaggactagtccctgttcccagagcccacttttttttctttttttgaaataaaatagcctgtctttcagatctcaaaggctcttttcagagccaccaaaaaaaaaaaaaaaaaaaaaaaaaaaaaaaaaaaaaaaaaaaaaaaaaaaaaaaaaaaaaaaaaaaaaaaaaaaaaaaaaaaaaaaaaaaaaaaaaaaaa

SEQ ID NO: 2918 - RNA, 1697 nt, synthetic construct
  misc_feature 1..1697: note = mRNA a-1 (hSL-A100) (opt1) from Homo sapiens__NP_000448.3__HNF4A(1-474)(S87A)
  source 1..1697: mol_type = other RNA
aggagagtcccgcagtcggcgtccagcggctctgcttgttcgtgtgtgtgtcgttgcaggccttattcaagcttaccatgcgcctgagcaagaccctcgtggacatggacatggccgactactccgccgcgctggaccccgcctacaccacgctggagttcgagaacgtccaggtgctcaccatgggcaacgacaccagcccgtccgaggggaccaacctgaacgcccccaacagcctgggcgtgtccgccctctgcgccatctgcggggaccgggcgacgggcaagcactacggggccagctcctgcgacggctgcaagggcttcttccgccgggcggtccgcaagaaccacatgtactcctgccggttcagccgccagtgcgtggtggacaaggacaagcggaaccagtgccgctactgccggctgaagaagtgcttccgcgccgggatgaagaaggaggccgtccagaacgagcgggaccgcatctccacccggcgcagctcctacgaggacagctccctgcccagcatcaacgcgctcctgcaggccgaggtgctgtcccggcagatcaccagccccgtgtccggcatcaacggggacatccgcgccaagaagatcgccagcatcgccgacgtctgcgagagcatgaaggagcagctcctggtgctggtggagtgggcgaagtacatcccggccttctgcgagctccccctggacgaccaggtcgccctgctccgggcccacgccggcgagcacctcctgctgggggcgaccaagcgctccatggtgttcaaggacgtgctgctgctcggcaacgactacatcgtcccccggcactgccccgagctggccgagatgagccgcgtgtccatccggatcctggacgagctcgtgctgccgttccaggagctgcagatcgacgacaacgagtacgcctacctcaaggccatcatcttcttcgaccccgacgccaagggcctgagcgaccccgggaagatcaagcgcctgcgctcccaggtccaggtgagcctcgaggactacatcaacgaccggcagtacgactcccgcggccggttcggggagctgctgctcctgctgcccacgctccagagcatcacctggcagatgatcgagcagatccagttcatcaagctgttcggcatggcgaagatcgacaacctgctccaggagatgctgctgggcgggtccccgagcgacgcgccccacgcccaccaccccctccacccccacctgatgcaggagcacatgggcaccaacgtgatcgtcgccaacaccatgccgacgcacctgtccaacgggcagatgtgcgagtggccccgcccccggggccaggccgccacccccgagaccccgcagcccagcccgcccgggggctccggcagcgagccctacaagctgctccccggggccgtggccaccatcgtgaagcccctgtccgccatcccccagccgacgatcaccaagcaggaggtcatctgaggactagtccctgttcccagagcccacttttttttctttttttgaaataaaatagcctgtctttcagatctcaaaggctcttttcagagccaccaaaaaaaaaaaaaaaaaaaaaaaaaaaaaaaaaaaaaaaaaaaaaaaaaaaaaaaaaaaaaaaaaaaaaaaaaaaaaaaaaaaaaaaaaaaaaaaaaaaaa

SEQ ID NO: 2919 - RNA, 1697 nt, synthetic construct
  misc_feature 1..1697: note = mRNA a-1 (hSL-A100) (opt1) from Homo sapiens__NP_000448.3__HNF4A(1-474)(S87E)
  source 1..1697: mol_type = other RNA
aggagagtcccgcagtcggcgtccagcggctctgcttgttcgtgtgtgtgtcgttgcaggccttattcaagcttaccatgcgcctgagcaagaccctcgtggacatggacatggccgactactccgccgcgctggaccccgcctacaccacgctggagttcgagaacgtccaggtgctcaccatgggcaacgacaccagcccgtccgaggggaccaacctgaacgcccccaacagcctgggcgtgtccgccctctgcgccatctgcggggaccgggcgacgggcaagcactacggggccagctcctgcgacggctgcaagggcttcttccgccgggaggtccgcaagaaccacatgtactcctgccggttcagccgccagtgcgtggtggacaaggacaagcggaaccagtgccgctactgccggctgaagaagtgcttccgcgccgggatgaagaaggaggccgtccagaacgagcgggaccgcatctccacccggcgcagctcctacgaggacagctccctgcccagcatcaacgcgctcctgcaggccgaggtgctgtcccggcagatcaccagccccgtgtccggcatcaacggggacatccgcgccaagaagatcgccagcatcgccgacgtctgcgagagcatgaaggagcagctcctggtgctggtggagtgggcgaagtacatcccggccttctgcgagctccccctggacgaccaggtcgccctgctccgggcccacgccggcgagcacctcctgctgggggcgaccaagcgctccatggtgttcaaggacgtgctgctgctcggcaacgactacatcgtcccccggcactgccccgagctggccgagatgagccgcgtgtccatccggatcctggacgagctcgtgctgccgttccaggagctgcagatcgacgacaacgagtacgcctacctcaaggccatcatcttcttcgaccccgacgccaagggcctgagcgaccccgggaagatcaagcgcctgcgctcccaggtccaggtgagcctcgaggactacatcaacgaccggcagtacgactcccgcggccggttcggggagctgctgctcctgctgcccacgctccagagcatcacctggcagatgatcgagcagatccagttcatcaagctgttcggcatggcgaagatcgacaacctgctccaggagatgctgctgggcgggtccccgagcgacgcgccccacgcccaccaccccctccacccccacctgatgcaggagcacatgggcaccaacgtgatcgtcgccaacaccatgccgacgcacctgtccaacgggcagatgtgcgagtggccccgcccccggggccaggccgccacccccgagaccccgcagcccagcccgcccgggggctccggcagcgagccctacaagctgctccccggggccgtggccaccatcgtgaagcccctgtccgccatcccccagccgacgatcaccaagcaggaggtcatctgaggactagtccctgttcccagagcccacttttttttctttttttgaaataaaatagcctgtctttcagatctcaaaggctcttttcagagccaccaaaaaaaaaaaaaaaaaaaaaaaaaaaaaaaaaaaaaaaaaaaaaaaaaaaaaaaaaaaaaaaaaaaaaaaaaaaaaaaaaaaaaaaaaaaaaaaaaaaaa

SEQ ID NO: 2920 - RNA, 1697 nt, synthetic construct
  misc_feature 1..1697: note = mRNA a-1 (hSL-A100) (opt1) from Homo sapiens__NP_000448.3__HNF4A(1-474)(R2V)
  source 1..1697: mol_type = other RNA
aggagagtcccgcagtcggcgtccagcggctctgcttgttcgtgtgtgtgtcgttgcaggccttattcaagcttaccatggtgctgagcaagaccctcgtggacatggacatggccgactactccgccgcgctggaccccgcctacaccacgctggagttcgagaacgtccaggtgctcaccatgggcaacgacaccagcccgtccgaggggaccaacctgaacgcccccaacagcctgggcgtgtccgccctctgcgccatctgcggggaccgggcgacgggcaagcactacggggccagctcctgcgacggctgcaagggcttcttccgccggagcgtccgcaagaaccacatgtactcctgccggttcagccgccagtgcgtggtggacaaggacaagcggaaccagtgccgctactgccggctgaagaagtgcttccgcgccgggatgaagaaggaggccgtccagaacgagcgggaccgcatctccacccggcgcagctcctacgaggacagctccctgcccagcatcaacgcgctcctgcaggccgaggtgctgtcccggcagatcaccagccccgtgtccggcatcaacggggacatccgcgccaagaagatcgccagcatcgccgacgtctgcgagagcatgaaggagcagctcctggtgctggtggagtgggcgaagtacatcccggccttctgcgagctccccctggacgaccaggtcgccctgctccgggcccacgccggcgagcacctcctgctgggggcgaccaagcgctccatggtgttcaaggacgtgctgctgctcggcaacgactacatcgtcccccggcactgccccgagctggccgagatgagccgcgtgtccatccggatcctggacgagctcgtgctgccgttccaggagctgcagatcgacgacaacgagtacgcctacctcaaggccatcatcttcttcgaccccgacgccaagggcctgagcgaccccgggaagatcaagcgcctgcgctcccaggtccaggtgagcctcgaggactacatcaacgaccggcagtacgactcccgcggccggttcggggagctgctgctcctgctgcccacgctccagagcatcacctggcagatgatcgagcagatccagttcatcaagctgttcggcatggcgaagatcgacaacctgctccaggagatgctgctgggcgggtccccgagcgacgcgccccacgcccaccaccccctccacccccacctgatgcaggagcacatgggcaccaacgtgatcgtcgccaacaccatgccgacgcacctgtccaacgggcagatgtgcgagtggccccgcccccggggccaggccgccacccccgagaccccgcagcccagcccgcccgggggctccggcagcgagccctacaagctgctccccggggccgtggccaccatcgtgaagcccctgtccgccatcccccagccgacgatcaccaagcaggaggtcatctgaggactagtccctgttcccagagcccacttttttttctttttttgaaataaaatagcctgtctttcagatctcaaaggctcttttcagagccaccaaaaaaaaaaaaaaaaaaaaaaaaaaaaaaaaaaaaaaaaaaaaaaaaaaaaaaaaaaaaaaaaaaaaaaaaaaaaaaaaaaaaaaaaaaaaaaaaaaaaa

SEQ ID NO: 2921 - RNA, 1697 nt, synthetic construct
  misc_feature 1..1697: note = mRNA a-1 (hSL-A100) (opt1) from Homo sapiens__NP_000448.3__HNF4A(1-474)(R2V_K5V)
  source 1..1697: mol_type = other RNA
aggagagtcccgcagtcggcgtccagcggctctgcttgttcgtgtgtgtgtcgttgcaggccttattcaagcttaccatggtgctgagcgtgaccctcgtggacatggacatggccgactactccgccgcgctggaccccgcctacaccacgctggagttcgagaacgtccaggtgctcaccatgggcaacgacaccagcccgtccgaggggaccaacctgaacgcccccaacagcctgggcgtgtccgccctctgcgccatctgcggggaccgggcgacgggcaagcactacggggccagctcctgcgacggctgcaagggcttcttccgccggagcgtccgcaagaaccacatgtactcctgccggttcagccgccagtgcgtggtggacaaggacaagcggaaccagtgccgctactgccggctgaagaagtgcttccgcgccgggatgaagaaggaggccgtccagaacgagcgggaccgcatctccacccggcgcagctcctacgaggacagctccctgcccagcatcaacgcgctcctgcaggccgaggtgctgtcccggcagatcaccagccccgtgtccggcatcaacggggacatccgcgccaagaagatcgccagcatcgccgacgtctgcgagagcatgaaggagcagctcctggtgctggtggagtgggcgaagtacatcccggccttctgcgagctccccctggacgaccaggtcgccctgctccgggcccacgccggcgagcacctcctgctgggggcgaccaagcgctccatggtgttcaaggacgtgctgctgctcggcaacgactacatcgtcccccggcactgccccgagctggccgagatgagccgcgtgtccatccggatcctggacgagctcgtgctgccgttccaggagctgcagatcgacgacaacgagtacgcctacctcaaggccatcatcttcttcgaccccgacgccaagggcctgagcgaccccgggaagatcaagcgcctgcgctcccaggtccaggtgagcctcgaggactacatcaacgaccggcagtacgactcccgcggccggttcggggagctgctgctcctgctgcccacgctccagagcatcacctggcagatgatcgagcagatccagttcatcaagctgttcggcatggcgaagatcgacaacctgctccaggagatgctgctgggcgggtccccgagcgacgcgccccacgcccaccaccccctccacccccacctgatgcaggagcacatgggcaccaacgtgatcgtcgccaacaccatgccgacgcacctgtccaacgggcagatgtgcgagtggccccgcccccggggccaggccgccacccccgagaccccgcagcccagcccgcccgggggctccggcagcgagccctacaagctgctccccggggccgtggccaccatcgtgaagcccctgtccgccatcccccagccgacgatcaccaagcaggaggtcatctgaggactagtccctgttcccagagcccacttttttttctttttttgaaataaaatagcctgtctttcagatctcaaaggctcttttcagagccaccaaaaaaaaaaaaaaaaaaaaaaaaaaaaaaaaaaaaaaaaaaaaaaaaaaaaaaaaaaaaaaaaaaaaaaaaaaaaaaaaaaaaaaaaaaaaaaaaaaaaa

SEQ ID NO: 2922 - RNA, 1697 nt, synthetic construct
  misc_feature 1..1697: note = mRNA a-1 (hSL-A100) (opt1) from Homo sapiens__NP_000448.3__HNF4A(1-474)(K179R_K180R)
  source 1..1697: mol_type = other RNA
aggagagtcccgcagtcggcgtccagcggctctgcttgttcgtgtgtgtgtcgttgcaggccttattcaagcttaccatgcgcctgagcaagaccctcgtggacatggacatggccgactactccgccgcgctggaccccgcctacaccacgctggagttcgagaacgtccaggtgctcaccatgggcaacgacaccagcccgtccgaggggaccaacctgaacgcccccaacagcctgggcgtgtccgccctctgcgccatctgcggggaccgggcgacgggcaagcactacggggccagctcctgcgacggctgcaagggcttcttccgccggagcgtccgcaagaaccacatgtactcctgccggttcagccgccagtgcgtggtggacaaggacaagcggaaccagtgccgctactgccggctgaagaagtgcttccgcgccgggatgaagaaggaggccgtccagaacgagcgggaccgcatctccacccggcgcagctcctacgaggacagctccctgcccagcatcaacgcgctcctgcaggccgaggtgctgtcccggcagatcaccagccccgtgtccggcatcaacggggacatccgcgcccggcgcatcgccagcatcgccgacgtctgcgagagcatgaaggagcagctcctggtgctggtggagtgggcgaagtacatcccggccttctgcgagctccccctggacgaccaggtcgccctgctccgggcccacgccggcgagcacctcctgctgggggcgaccaagcgctccatggtgttcaaggacgtgctgctgctcggcaacgactacatcgtcccccggcactgccccgagctggccgagatgagccgcgtgtccatccggatcctggacgagctcgtgctgccgttccaggagctgcagatcgacgacaacgagtacgcctacctcaaggccatcatcttcttcgaccccgacgccaagggcctgagcgaccccgggaagatcaagcgcctgcgctcccaggtccaggtgagcctcgaggactacatcaacgaccggcagtacgactcccgcggccggttcggggagctgctgctcctgctgcccacgctccagagcatcacctggcagatgatcgagcagatccagttcatcaagctgttcggcatggcgaagatcgacaacctgctccaggagatgctgctgggcgggtccccgagcgacgcgccccacgcccaccaccccctccacccccacctgatgcaggagcacatgggcaccaacgtgatcgtcgccaacaccatgccgacgcacctgtccaacgggcagatgtgcgagtggccccgcccccggggccaggccgccacccccgagaccccgcagcccagcccgcccgggggctccggcagcgagccctacaagctgctccccggggccgtggccaccatcgtgaagcccctgtccgccatcccccagccgacgatcaccaagcaggaggtcatctgaggactagtccctgttcccagagcccacttttttttctttttttgaaataaaatagcctgtctttcagatctcaaaggctcttttcagagccaccaaaaaaaaaaaaaaaaaaaaaaaaaaaaaaaaaaaaaaaaaaaaaaaaaaaaaaaaaaaaaaaaaaaaaaaaaaaaaaaaaaaaaaaaaaaaaaaaaaaaa

SEQ ID NO: 2923 - RNA, 1697 nt, synthetic construct
  misc_feature 1..1697: note = mRNA a-1 (hSL-A100) (opt1) from Homo sapiens__NP_000448.3__HNF4A(1-474)(K234R)
  source 1..1697: mol_type = other RNA
aggagagtcccgcagtcggcgtccagcggctctgcttgttcgtgtgtgtgtcgttgcaggccttattcaagcttaccatgcgcctgagcaagaccctcgtggacatggacatggccgactactccgccgcgctggaccccgcctacaccacgctggagttcgagaacgtccaggtgctcaccatgggcaacgacaccagcccgtccgaggggaccaacctgaacgcccccaacagcctgggcgtgtccgccctctgcgccatctgcggggaccgggcgacgggcaagcactacggggccagctcctgcgacggctgcaagggcttcttccgccggagcgtccgcaagaaccacatgtactcctgccggttcagccgccagtgcgtggtggacaaggacaagcggaaccagtgccgctactgccggctgaagaagtgcttccgcgccgggatgaagaaggaggccgtccagaacgagcgggaccgcatctccacccggcgcagctcctacgaggacagctccctgcccagcatcaacgcgctcctgcaggccgaggtgctgtcccggcagatcaccagccccgtgtccggcatcaacggggacatccgcgccaagaagatcgccagcatcgccgacgtctgcgagagcatgaaggagcagctcctggtgctggtggagtgggcgaagtacatcccggccttctgcgagctccccctggacgaccaggtcgccctgctccgggcccacgccggcgagcacctcctgctgggggcgacccgccgctccatggtgttcaaggacgtgctgctgctcggcaacgactacatcgtcccccggcactgccccgagctggccgagatgagccgcgtgtccatccggatcctggacgagctcgtgctgccgttccaggagctgcagatcgacgacaacgagtacgcctacctcaaggccatcatcttcttcgaccccgacgccaagggcctgagcgaccccgggaagatcaagcgcctgcgctcccaggtccaggtgagcctcgaggactacatcaacgaccggcagtacgactcccgcggccggttcggggagctgctgctcctgctgcccacgctccagagcatcacctggcagatgatcgagcagatccagttcatcaagctgttcggcatggcgaagatcgacaacctgctccaggagatgctgctgggcgggtccccgagcgacgcgccccacgcccaccaccccctccacccccacctgatgcaggagcacatgggcaccaacgtgatcgtcgccaacaccatgccgacgcacctgtccaacgggcagatgtgcgagtggccccgcccccggggccaggccgccacccccgagaccccgcagcccagcccgcccgggggctccggcagcgagccctacaagctgctccccggggccgtggccaccatcgtgaagcccctgtccgccatcccccagccgacgatcaccaagcaggaggtcatctgaggactagtccctgttcccagagcccacttttttttctttttttgaaataaaatagcctgtctttcagatctcaaaggctcttttcagagccaccaaaaaaaaaaaaaaaaaaaaaaaaaaaaaaaaaaaaaaaaaaaaaaaaaaaaaaaaaaaaaaaaaaaaaaaaaaaaaaaaaaaaaaaaaaaaaaaaaaaaa

SEQ ID NO: 2924 - RNA, 1697 nt, synthetic construct
  misc_feature 1..1697: note = mRNA a-1 (hSL-A100) (opt1) from Homo sapiens__NP_000448.3__HNF4A(1-474)(K300R)
  source 1..1697: mol_type = other RNA
aggagagtcccgcagtcggcgtccagcggctctgcttgttcgtgtgtgtgtcgttgcaggccttattcaagcttaccatgcgcctgagcaagaccctcgtggacatggacatggccgactactccgccgcgctggaccccgcctacaccacgctggagttcgagaacgtccaggtgctcaccatgggcaacgacaccagcccgtccgaggggaccaacctgaacgcccccaacagcctgggcgtgtccgccctctgcgccatctgcggggaccgggcgacgggcaagcactacggggccagctcctgcgacggctgcaagggcttcttccgccggagcgtccgcaagaaccacatgtactcctgccggttcagccgccagtgcgtggtggacaaggacaagcggaaccagtgccgctactgccggctgaagaagtgcttccgcgccgggatgaagaaggaggccgtccagaacgagcgggaccgcatctccacccggcgcagctcctacgaggacagctccctgcccagcatcaacgcgctcctgcaggccgaggtgctgtcccggcagatcaccagccccgtgtccggcatcaacggggacatccgcgccaagaagatcgccagcatcgccgacgtctgcgagagcatgaaggagcagctcctggtgctggtggagtgggcgaagtacatcccggccttctgcgagctccccctggacgaccaggtcgccctgctccgggcccacgccggcgagcacctcctgctgggggcgaccaagcgctccatggtgttcaaggacgtgctgctgctcggcaacgactacatcgtcccccggcactgccccgagctggccgagatgagccgcgtgtccatccggatcctggacgagctcgtgctgccgttccaggagctgcagatcgacgacaacgagtacgcctacctcaaggccatcatcttcttcgaccccgacgcccgcggcctgagcgaccccgggaagatcaagcgcctgcgctcccaggtccaggtgagcctcgaggactacatcaacgaccggcagtacgactcccgcggccggttcggggagctgctgctcctgctgcccacgctccagagcatcacctggcagatgatcgagcagatccagttcatcaagctgttcggcatggcgaagatcgacaacctgctccaggagatgctgctgggcgggtccccgagcgacgcgccccacgcccaccaccccctccacccccacctgatgcaggagcacatgggcaccaacgtgatcgtcgccaacaccatgccgacgcacctgtccaacgggcagatgtgcgagtggccccgcccccggggccaggccgccacccccgagaccccgcagcccagcccgcccgggggctccggcagcgagccctacaagctgctccccggggccgtggccaccatcgtgaagcccctgtccgccatcccccagccgacgatcaccaagcaggaggtcatctgaggactagtccctgttcccagagcccacttttttttctttttttgaaataaaatagcctgtctttcagatctcaaaggctcttttcagagccaccaaaaaaaaaaaaaaaaaaaaaaaaaaaaaaaaaaaaaaaaaaaaaaaaaaaaaaaaaaaaaaaaaaaaaaaaaaaaaaaaaaaaaaaaaaaaaaaaaaaaa

SEQ ID NO: 2925 - RNA, 1697 nt, synthetic construct
  misc_feature 1..1697: note = mRNA a-1 (hSL-A100) (opt1) from Homo sapiens__NP_000448.3__HNF4A(1-474)(K300R_K307R_K309R)
  source 1..1697: mol_type = other RNA
aggagagtcccgcagtcggcgtccagcggctctgcttgttcgtgtgtgtgtcgttgcaggccttattcaagcttaccatgcgcctgagcaagaccctcgtggacatggacatggccgactactccgccgcgctggaccccgcctacaccacgctggagttcgagaacgtccaggtgctcaccatgggcaacgacaccagcccgtccgaggggaccaacctgaacgcccccaacagcctgggcgtgtccgccctctgcgccatctgcggggaccgggcgacgggcaagcactacggggccagctcctgcgacggctgcaagggcttcttccgccggagcgtccgcaagaaccacatgtactcctgccggttcagccgccagtgcgtggtggacaaggacaagcggaaccagtgccgctactgccggctgaagaagtgcttccgcgccgggatgaagaaggaggccgtccagaacgagcgggaccgcatctccacccggcgcagctcctacgaggacagctccctgcccagcatcaacgcgctcctgcaggccgaggtgctgtcccggcagatcaccagccccgtgtccggcatcaacggggacatccgcgccaagaagatcgccagcatcgccgacgtctgcgagagcatgaaggagcagctcctggtgctggtggagtgggcgaagtacatcccggccttctgcgagctccccctggacgaccaggtcgccctgctccgggcccacgccggcgagcacctcctgctgggggcgaccaagcgctccatggtgttcaaggacgtgctgctgctcggcaacgactacatcgtcccccggcactgccccgagctggccgagatgagccgcgtgtccatccggatcctggacgagctcgtgctgccgttccaggagctgcagatcgacgacaacgagtacgcctacctcaaggccatcatcttcttcgaccccgacgcccgcggcctgagcgaccccgggcgcatccggcgcctgcgctcccaggtccaggtgagcctcgaggactacatcaacgaccggcagtacgactcccgcggccggttcggggagctgctgctcctgctgcccacgctccagagcatcacctggcagatgatcgagcagatccagttcatcaagctgttcggcatggcgaagatcgacaacctgctccaggagatgctgctgggcgggtccccgagcgacgcgccccacgcccaccaccccctccacccccacctgatgcaggagcacatgggcaccaacgtgatcgtcgccaacaccatgccgacgcacctgtccaacgggcagatgtgcgagtggccccgcccccggggccaggccgccacccccgagaccccgcagcccagcccgcccgggggctccggcagcgagccctacaagctgctccccggggccgtggccaccatcgtgaagcccctgtccgccatcccccagccgacgatcaccaagcaggaggtcatctgaggactagtccctgttcccagagcccacttttttttctttttttgaaataaaatagcctgtctttcagatctcaaaggctcttttcagagccaccaaaaaaaaaaaaaaaaaaaaaaaaaaaaaaaaaaaaaaaaaaaaaaaaaaaaaaaaaaaaaaaaaaaaaaaaaaaaaaaaaaaaaaaaaaaaaaaaaaaaa

SEQ ID NO: 2926 - RNA, 1697 nt, synthetic construct
  misc_feature 1..1697: note = mRNA a-1 (hSL-A100) (opt1) from Homo sapiens__NP_000448.3__HNF4A(1-474)(K447R_K470R)
  source 1..1697: mol_type = other RNA
aggagagtcccgcagtcggcgtccagcggctctgcttgttcgtgtgtgtgtcgttgcaggccttattcaagcttaccatgcgcctgagcaagaccctcgtggacatggacatggccgactactccgccgcgctggaccccgcctacaccacgctggagttcgagaacgtccaggtgctcaccatgggcaacgacaccagcccgtccgaggggaccaacctgaacgcccccaacagcctgggcgtgtccgccctctgcgccatctgcggggaccgggcgacgggcaagcactacggggccagctcctgcgacggctgcaagggcttcttccgccggagcgtccgcaagaaccacatgtactcctgccggttcagccgccagtgcgtggtggacaaggacaagcggaaccagtgccgctactgccggctgaagaagtgcttccgcgccgggatgaagaaggaggccgtccagaacgagcgggaccgcatctccacccggcgcagctcctacgaggacagctccctgcccagcatcaacgcgctcctgcaggccgaggtgctgtcccggcagatcaccagccccgtgtccggcatcaacggggacatccgcgccaagaagatcgccagcatcgccgacgtctgcgagagcatgaaggagcagctcctggtgctggtggagtgggcgaagtacatcccggccttctgcgagctccccctggacgaccaggtcgccctgctccgggcccacgccggcgagcacctcctgctgggggcgaccaagcgctccatggtgttcaaggacgtgctgctgctcggcaacgactacatcgtcccccggcactgccccgagctggccgagatgagccgcgtgtccatccggatcctggacgagctcgtgctgccgttccaggagctgcagatcgacgacaacgagtacgcctacctcaaggccatcatcttcttcgaccccgacgccaagggcctgagcgaccccgggaagatcaagcgcctgcgctcccaggtccaggtgagcctcgaggactacatcaacgaccggcagtacgactcccgcggccggttcggggagctgctgctcctgctgcccacgctccagagcatcacctggcagatgatcgagcagatccagttcatcaagctgttcggcatggcgaagatcgacaacctgctccaggagatgctgctgggcgggtccccgagcgacgcgccccacgcccaccaccccctccacccccacctgatgcaggagcacatgggcaccaacgtgatcgtcgccaacaccatgccgacgcacctgtccaacgggcagatgtgcgagtggccccgcccccggggccaggccgccacccccgagaccccgcagcccagcccgcccgggggctccggcagcgagccctaccggctgctccccggggccgtggccaccatcgtgaagcccctgtccgccatcccccagccgacgatcacccggcaggaggtcatctgaggactagtccctgttcccagagcccacttttttttctttttttgaaataaaatagcctgtctttcagatctcaaaggctcttttcagagccaccaaaaaaaaaaaaaaaaaaaaaaaaaaaaaaaaaaaaaaaaaaaaaaaaaaaaaaaaaaaaaaaaaaaaaaaaaaaaaaaaaaaaaaaaaaaaaaaaaaaaa

SEQ ID NO: 2927 - RNA, 1697 nt, synthetic construct
  misc_feature 1..1697: note = mRNA a-1 (hSL-A100) (opt1) from Homo sapiens__NP_000448.3__HNF4A(1-474)(K458R)
  source 1..1697: mol_type = other RNA
aggagagtcccgcagtcggcgtccagcggctctgcttgttcgtgtgtgtgtcgttgcaggccttattcaagcttaccatgcgcctgagcaagaccctcgtggacatggacatggccgactactccgccgcgctggaccccgcctacaccacgctggagttcgagaacgtccaggtgctcaccatgggcaacgacaccagcccgtccgaggggaccaacctgaacgcccccaacagcctgggcgtgtccgccctctgcgccatctgcggggaccgggcgacgggcaagcactacggggccagctcctgcgacggctgcaagggcttcttccgccggagcgtccgcaagaaccacatgtactcctgccggttcagccgccagtgcgtggtggacaaggacaagcggaaccagtgccgctactgccggctgaagaagtgcttccgcgccgggatgaagaaggaggccgtccagaacgagcgggaccgcatctccacccggcgcagctcctacgaggacagctccctgcccagcatcaacgcgctcctgcaggccgaggtgctgtcccggcagatcaccagccccgtgtccggcatcaacggggacatccgcgccaagaagatcgccagcatcgccgacgtctgcgagagcatgaaggagcagctcctggtgctggtggagtgggcgaagtacatcccggccttctgcgagctccccctggacgaccaggtcgccctgctccgggcccacgccggcgagcacctcctgctgggggcgaccaagcgctccatggtgttcaaggacgtgctgctgctcggcaacgactacatcgtcccccggcactgccccgagctggccgagatgagccgcgtgtccatccggatcctggacgagctcgtgctgccgttccaggagctgcagatcgacgacaacgagtacgcctacctcaaggccatcatcttcttcgaccccgacgccaagggcctgagcgaccccgggaagatcaagcgcctgcgctcccaggtccaggtgagcctcgaggactacatcaacgaccggcagtacgactcccgcggccggttcggggagctgctgctcctgctgcccacgctccagagcatcacctggcagatgatcgagcagatccagttcatcaagctgttcggcatggcgaagatcgacaacctgctccaggagatgctgctgggcgggtccccgagcgacgcgccccacgcccaccaccccctccacccccacctgatgcaggagcacatgggcaccaacgtgatcgtcgccaacaccatgccgacgcacctgtccaacgggcagatgtgcgagtggccccgcccccggggccaggccgccacccccgagaccccgcagcccagcccgcccgggggctccggcagcgagccctacaagctgctccccggggccgtggccaccatcgtgcggcccctgtccgccatcccccagccgacgatcaccaagcaggaggtcatctgaggactagtccctgttcccagagcccacttttttttctttttttgaaataaaatagcctgtctttcagatctcaaaggctcttttcagagccaccaaaaaaaaaaaaaaaaaaaaaaaaaaaaaaaaaaaaaaaaaaaaaaaaaaaaaaaaaaaaaaaaaaaaaaaaaaaaaaaaaaaaaaaaaaaaaaaaaaaaa

SEQ ID NO: 2928 - RNA, 1697 nt, synthetic construct
  misc_feature 1..1697: note = mRNA a-1 (hSL-A100) (opt1) from Homo sapiens__NP_000448.3__HNF4A(1-474)(K106R_K108R_K126R_K127R)
  source 1..1697: mol_type = other RNA
aggagagtcccgcagtcggcgtccagcggctctgcttgttcgtgtgtgtgtcgttgcaggccttattcaagcttaccatgcgcctgagcaagaccctcgtggacatggacatggccgactactccgccgcgctggaccccgcctacaccacgctggagttcgagaacgtccaggtgctcaccatgggcaacgacaccagcccgtccgaggggaccaacctgaacgcccccaacagcctgggcgtgtccgccctctgcgccatctgcggggaccgggcgacgggcaagcactacggggccagctcctgcgacggctgcaagggcttcttccgccggagcgtccgcaagaaccacatgtactcctgccggttcagccgccagtgcgtggtggaccgcgaccggcggaaccagtgccgctactgccggctgaagaagtgcttccgcgccgggatgcgccgcgaggccgtccagaacgagcgggaccgcatctccacccggcgcagctcctacgaggacagctccctgcccagcatcaacgcgctcctgcaggccgaggtgctgtcccggcagatcaccagccccgtgtccggcatcaacggggacatccgcgccaagaagatcgccagcatcgccgacgtctgcgagagcatgaaggagcagctcctggtgctggtggagtgggcgaagtacatcccggccttctgcgagctccccctggacgaccaggtcgccctgctccgggcccacgccggcgagcacctcctgctgggggcgaccaagcgctccatggtgttcaaggacgtgctgctgctcggcaacgactacatcgtcccccggcactgccccgagctggccgagatgagccgcgtgtccatccggatcctggacgagctcgtgctgccgttccaggagctgcagatcgacgacaacgagtacgcctacctcaaggccatcatcttcttcgaccccgacgccaagggcctgagcgaccccgggaagatcaagcgcctgcgctcccaggtccaggtgagcctcgaggactacatcaacgaccggcagtacgactcccgcggccggttcggggagctgctgctcctgctgcccacgctccagagcatcacctggcagatgatcgagcagatccagttcatcaagctgttcggcatggcgaagatcgacaacctgctccaggagatgctgctgggcgggtccccgagcgacgcgccccacgcccaccaccccctccacccccacctgatgcaggagcacatgggcaccaacgtgatcgtcgccaacaccatgccgacgcacctgtccaacgggcagatgtgcgagtggccccgcccccggggccaggccgccacccccgagaccccgcagcccagcccgcccgggggctccggcagcgagccctacaagctgctccccggggccgtggccaccatcgtgaagcccctgtccgccatcccccagccgacgatcaccaagcaggaggtcatctgaggactagtccctgttcccagagcccacttttttttctttttttgaaataaaatagcctgtctttcagatctcaaaggctcttttcagagccaccaaaaaaaaaaaaaaaaaaaaaaaaaaaaaaaaaaaaaaaaaaaaaaaaaaaaaaaaaaaaaaaaaaaaaaaaaaaaaaaaaaaaaaaaaaaaaaaaaaaaa

SEQ ID NO: 2929 - RNA, 1697 nt, synthetic construct
  misc_feature 1..1697: note = mRNA a-1 (hSL-A100) (opt1) from Homo sapiens__NP_000448.3__HNF4A(1-474)(E285Q)
  source 1..1697: mol_type = other RNA
aggagagtcccgcagtcggcgtccagcggctctgcttgttcgtgtgtgtgtcgttgcaggccttattcaagcttaccatgcgcctgagcaagaccctcgtggacatggacatggccgactactccgccgcgctggaccccgcctacaccacgctggagttcgagaacgtccaggtgctcaccatgggcaacgacaccagcccgtccgaggggaccaacctgaacgcccccaacagcctgggcgtgtccgccctctgcgccatctgcggggaccgggcgacgggcaagcactacggggccagctcctgcgacggctgcaagggcttcttccgccggagcgtccgcaagaaccacatgtactcctgccggttcagccgccagtgcgtggtggacaaggacaagcggaaccagtgccgctactgccggctgaagaagtgcttccgcgccgggatgaagaaggaggccgtccagaacgagcgggaccgcatctccacccggcgcagctcctacgaggacagctccctgcccagcatcaacgcgctcctgcaggccgaggtgctgtcccggcagatcaccagccccgtgtccggcatcaacggggacatccgcgccaagaagatcgccagcatcgccgacgtctgcgagagcatgaaggagcagctcctggtgctggtggagtgggcgaagtacatcccggccttctgcgagctccccctggacgaccaggtcgccctgctccgggcccacgccggcgagcacctcctgctgggggcgaccaagcgctccatggtgttcaaggacgtgctgctgctcggcaacgactacatcgtcccccggcactgccccgagctggccgagatgagccgcgtgtccatccggatcctggacgagctcgtgctgccgttccaggagctgcagatcgacgacaaccagtacgcctacctcaaggccatcatcttcttcgaccccgacgccaagggcctgagcgaccccgggaagatcaagcgcctgcgctcccaggtccaggtgagcctcgaggactacatcaacgaccggcagtacgactcccgcggccggttcggggagctgctgctcctgctgcccacgctccagagcatcacctggcagatgatcgagcagatccagttcatcaagctgttcggcatggcgaagatcgacaacctgctccaggagatgctgctgggcgggtccccgagcgacgcgccccacgcccaccaccccctccacccccacctgatgcaggagcacatgggcaccaacgtgatcgtcgccaacaccatgccgacgcacctgtccaacgggcagatgtgcgagtggccccgcccccggggccaggccgccacccccgagaccccgcagcccagcccgcccgggggctccggcagcgagccctacaagctgctccccggggccgtggccaccatcgtgaagcccctgtccgccatcccccagccgacgatcaccaagcaggaggtcatctgaggactagtccctgttcccagagcccacttttttttctttttttgaaataaaatagcctgtctttcagatctcaaaggctcttttcagagccaccaaaaaaaaaaaaaaaaaaaaaaaaaaaaaaaaaaaaaaaaaaaaaaaaaaaaaaaaaaaaaaaaaaaaaaaaaaaaaaaaaaaaaaaaaaaaaaaaaaaaa

SEQ ID NO: 2930 - RNA, 1697 nt, synthetic construct
  misc_feature 1..1697: note = mRNA a-1 (hSL-A100) (opt1) from Homo sapiens__NP_000448.3__HNF4A(1-474)(T166E)
  source 1..1697: mol_type = other RNA
aggagagtcccgcagtcggcgtccagcggctctgcttgttcgtgtgtgtgtcgttgcaggccttattcaagcttaccatgcgcctgagcaagaccctcgtggacatggacatggccgactactccgccgcgctggaccccgcctacaccacgctggagttcgagaacgtccaggtgctcaccatgggcaacgacaccagcccgtccgaggggaccaacctgaacgcccccaacagcctgggcgtgtccgccctctgcgccatctgcggggaccgggcgacgggcaagcactacggggccagctcctgcgacggctgcaagggcttcttccgccggagcgtccgcaagaaccacatgtactcctgccggttcagccgccagtgcgtggtggacaaggacaagcggaaccagtgccgctactgccggctgaagaagtgcttccgcgccgggatgaagaaggaggccgtccagaacgagcgggaccgcatctccacccggcgcagctcctacgaggacagctccctgcccagcatcaacgcgctcctgcaggccgaggtgctgtcccggcagatcgagagccccgtgtccggcatcaacggggacatccgcgccaagaagatcgccagcatcgccgacgtctgcgagagcatgaaggagcagctcctggtgctggtggagtgggcgaagtacatcccggccttctgcgagctccccctggacgaccaggtcgccctgctccgggcccacgccggcgagcacctcctgctgggggcgaccaagcgctccatggtgttcaaggacgtgctgctgctcggcaacgactacatcgtcccccggcactgccccgagctggccgagatgagccgcgtgtccatccggatcctggacgagctcgtgctgccgttccaggagctgcagatcgacgacaacgagtacgcctacctcaaggccatcatcttcttcgaccccgacgccaagggcctgagcgaccccgggaagatcaagcgcctgcgctcccaggtccaggtgagcctcgaggactacatcaacgaccggcagtacgactcccgcggccggttcggggagctgctgctcctgctgcccacgctccagagcatcacctggcagatgatcgagcagatccagttcatcaagctgttcggcatggcgaagatcgacaacctgctccaggagatgctgctgggcgggtccccgagcgacgcgccccacgcccaccaccccctccacccccacctgatgcaggagcacatgggcaccaacgtgatcgtcgccaacaccatgccgacgcacctgtccaacgggcagatgtgcgagtggccccgcccccggggccaggccgccacccccgagaccccgcagcccagcccgcccgggggctccggcagcgagccctacaagctgctccccggggccgtggccaccatcgtgaagcccctgtccgccatcccccagccgacgatcaccaagcaggaggtcatctgaggactagtccctgttcccagagcccacttttttttctttttttgaaataaaatagcctgtctttcagatctcaaaggctcttttcagagccaccaaaaaaaaaaaaaaaaaaaaaaaaaaaaaaaaaaaaaaaaaaaaaaaaaaaaaaaaaaaaaaaaaaaaaaaaaaaaaaaaaaaaaaaaaaaaaaaaaaaaa

SEQ ID NO: 2931 - RNA, 1697 nt, synthetic construct
  misc_feature 1..1697: note = mRNA a-1 (hSL-A100) (opt1) from Homo sapiens__NP_000448.3__HNF4A(1-474)(S148A)
  source 1..1697: mol_type = other RNA
aggagagtcccgcagtcggcgtccagcggctctgcttgttcgtgtgtgtgtcgttgcaggccttattcaagcttaccatgcgcctgagcaagaccctcgtggacatggacatggccgactactccgccgcgctggaccccgcctacaccacgctggagttcgagaacgtccaggtgctcaccatgggcaacgacaccagcccgtccgaggggaccaacctgaacgcccccaacagcctgggcgtgtccgccctctgcgccatctgcggggaccgggcgacgggcaagcactacggggccagctcctgcgacggctgcaagggcttcttccgccggagcgtccgcaagaaccacatgtactcctgccggttcagccgccagtgcgtggtggacaaggacaagcggaaccagtgccgctactgccggctgaagaagtgcttccgcgccgggatgaagaaggaggccgtccagaacgagcgggaccgcatctccacccggcgcagctcctacgaggacagcgcgctgcccagcatcaacgcgctcctgcaggccgaggtgctgtcccggcagatcaccagccccgtgtccggcatcaacggggacatccgcgccaagaagatcgccagcatcgccgacgtctgcgagagcatgaaggagcagctcctggtgctggtggagtgggcgaagtacatcccggccttctgcgagctccccctggacgaccaggtcgccctgctccgggcccacgccggcgagcacctcctgctgggggcgaccaagcgctccatggtgttcaaggacgtgctgctgctcggcaacgactacatcgtcccccggcactgccccgagctggccgagatgagccgcgtgtccatccggatcctggacgagctcgtgctgccgttccaggagctgcagatcgacgacaacgagtacgcctacctcaaggccatcatcttcttcgaccccgacgccaagggcctgagcgaccccgggaagatcaagcgcctgcgctcccaggtccaggtgagcctcgaggactacatcaacgaccggcagtacgactcccgcggccggttcggggagctgctgctcctgctgcccacgctccagagcatcacctggcagatgatcgagcagatccagttcatcaagctgttcggcatggcgaagatcgacaacctgctccaggagatgctgctgggcgggtccccgagcgacgcgccccacgcccaccaccccctccacccccacctgatgcaggagcacatgggcaccaacgtgatcgtcgccaacaccatgccgacgcacctgtccaacgggcagatgtgcgagtggccccgcccccggggccaggccgccacccccgagaccccgcagcccagcccgcccgggggctccggcagcgagccctacaagctgctccccggggccgtggccaccatcgtgaagcccctgtccgccatcccccagccgacgatcaccaagcaggaggtcatctgaggactagtccctgttcccagagcccacttttttttctttttttgaaataaaatagcctgtctttcagatctcaaaggctcttttcagagccaccaaaaaaaaaaaaaaaaaaaaaaaaaaaaaaaaaaaaaaaaaaaaaaaaaaaaaaaaaaaaaaaaaaaaaaaaaaaaaaaaaaaaaaaaaaaaaaaaaaaaa

SEQ ID NO: 2932 - RNA, 1697 nt, synthetic construct
  misc_feature 1..1697: note = mRNA a-1 (hSL-A100) (opt1) from Homo sapiens__NP_000448.3__HNF4A(1-474)(S148E)
  source 1..1697: mol_type = other RNA
aggagagtcccgcagtcggcgtccagcggctctgcttgttcgtgtgtgtgtcgttgcaggccttattcaagcttaccatgcgcctgagcaagaccctcgtggacatggacatggccgactactccgccgcgctggaccccgcctacaccacgctggagttcgagaacgtccaggtgctcaccatgggcaacgacaccagcccgtccgaggggaccaacctgaacgcccccaacagcctgggcgtgtccgccctctgcgccatctgcggggaccgggcgacgggcaagcactacggggccagctcctgcgacggctgcaagggcttcttccgccggagcgtccgcaagaaccacatgtactcctgccggttcagccgccagtgcgtggtggacaaggacaagcggaaccagtgccgctactgccggctgaagaagtgcttccgcgccgggatgaagaaggaggccgtccagaacgagcgggaccgcatctccacccggcgcagctcctacgaggacagcgagctgcccagcatcaacgcgctcctgcaggccgaggtgctgtcccggcagatcaccagccccgtgtccggcatcaacggggacatccgcgccaagaagatcgccagcatcgccgacgtctgcgagagcatgaaggagcagctcctggtgctggtggagtgggcgaagtacatcccggccttctgcgagctccccctggacgaccaggtcgccctgctccgggcccacgccggcgagcacctcctgctgggggcgaccaagcgctccatggtgttcaaggacgtgctgctgctcggcaacgactacatcgtcccccggcactgccccgagctggccgagatgagccgcgtgtccatccggatcctggacgagctcgtgctgccgttccaggagctgcagatcgacgacaacgagtacgcctacctcaaggccatcatcttcttcgaccccgacgccaagggcctgagcgaccccgggaagatcaagcgcctgcgctcccaggtccaggtgagcctcgaggactacatcaacgaccggcagtacgactcccgcggccggttcggggagctgctgctcctgctgcccacgctccagagcatcacctggcagatgatcgagcagatccagttcatcaagctgttcggcatggcgaagatcgacaacctgctccaggagatgctgctgggcgggtccccgagcgacgcgccccacgcccaccaccccctccacccccacctgatgcaggagcacatgggcaccaacgtgatcgtcgccaacaccatgccgacgcacctgtccaacgggcagatgtgcgagtggccccgcccccggggccaggccgccacccccgagaccccgcagcccagcccgcccgggggctccggcagcgagccctacaagctgctccccggggccgtggccaccatcgtgaagcccctgtccgccatcccccagccgacgatcaccaagcaggaggtcatctgaggactagtccctgttcccagagcccacttttttttctttttttgaaataaaatagcctgtctttcagatctcaaaggctcttttcagagccaccaaaaaaaaaaaaaaaaaaaaaaaaaaaaaaaaaaaaaaaaaaaaaaaaaaaaaaaaaaaaaaaaaaaaaaaaaaaaaaaaaaaaaaaaaaaaaaaaaaaaa

SEQ ID NO: 2933 - RNA, 1697 nt, synthetic construct
  misc_feature 1..1697: note = mRNA a-1 (hSL-A100) (opt1) from Homo sapiens__NP_000448.3__HNF4A(1-474)(S183A)
  source 1..1697: mol_type = other RNA
aggagagtcccgcagtcggcgtccagcggctctgcttgttcgtgtgtgtgtcgttgcaggccttattcaagcttaccatgcgcctgagcaagaccctcgtggacatggacatggccgactactccgccgcgctggaccccgcctacaccacgctggagttcgagaacgtccaggtgctcaccatgggcaacgacaccagcccgtccgaggggaccaacctgaacgcccccaacagcctgggcgtgtccgccctctgcgccatctgcggggaccgggcgacgggcaagcactacggggccagctcctgcgacggctgcaagggcttcttccgccggagcgtccgcaagaaccacatgtactcctgccggttcagccgccagtgcgtggtggacaaggacaagcggaaccagtgccgctactgccggctgaagaagtgcttccgcgccgggatgaagaaggaggccgtccagaacgagcgggaccgcatctccacccggcgcagctcctacgaggacagctccctgcccagcatcaacgcgctcctgcaggccgaggtgctgtcccggcagatcaccagccccgtgtccggcatcaacggggacatccgcgccaagaagatcgccgcgatcgccgacgtctgcgagagcatgaaggagcagctcctggtgctggtggagtgggcgaagtacatcccggccttctgcgagctccccctggacgaccaggtcgccctgctccgggcccacgccggcgagcacctcctgctgggggcgaccaagcgctccatggtgttcaaggacgtgctgctgctcggcaacgactacatcgtcccccggcactgccccgagctggccgagatgagccgcgtgtccatccggatcctggacgagctcgtgctgccgttccaggagctgcagatcgacgacaacgagtacgcctacctcaaggccatcatcttcttcgaccccgacgccaagggcctgagcgaccccgggaagatcaagcgcctgcgctcccaggtccaggtgagcctcgaggactacatcaacgaccggcagtacgactcccgcggccggttcggggagctgctgctcctgctgcccacgctccagagcatcacctggcagatgatcgagcagatccagttcatcaagctgttcggcatggcgaagatcgacaacctgctccaggagatgctgctgggcgggtccccgagcgacgcgccccacgcccaccaccccctccacccccacctgatgcaggagcacatgggcaccaacgtgatcgtcgccaacaccatgccgacgcacctgtccaacgggcagatgtgcgagtggccccgcccccggggccaggccgccacccccgagaccccgcagcccagcccgcccgggggctccggcagcgagccctacaagctgctccccggggccgtggccaccatcgtgaagcccctgtccgccatcccccagccgacgatcaccaagcaggaggtcatctgaggactagtccctgttcccagagcccacttttttttctttttttgaaataaaatagcctgtctttcagatctcaaaggctcttttcagagccaccaaaaaaaaaaaaaaaaaaaaaaaaaaaaaaaaaaaaaaaaaaaaaaaaaaaaaaaaaaaaaaaaaaaaaaaaaaaaaaaaaaaaaaaaaaaaaaaaaaaaa

SEQ ID NO: 2934 - RNA, 1697 nt, synthetic construct
  misc_feature 1..1697: note = mRNA a-1 (hSL-A100) (opt1) from Homo sapiens__NP_000448.3__HNF4A(1-474)(S183E)
  source 1..1697: mol_type = other RNA
aggagagtcccgcagtcggcgtccagcggctctgcttgttcgtgtgtgtgtcgttgcaggccttattcaagcttaccatgcgcctgagcaagaccctcgtggacatggacatggccgactactccgccgcgctggaccccgcctacaccacgctggagttcgagaacgtccaggtgctcaccatgggcaacgacaccagcccgtccgaggggaccaacctgaacgcccccaacagcctgggcgtgtccgccctctgcgccatctgcggggaccgggcgacgggcaagcactacggggccagctcctgcgacggctgcaagggcttcttccgccggagcgtccgcaagaaccacatgtactcctgccggttcagccgccagtgcgtggtggacaaggacaagcggaaccagtgccgctactgccggctgaagaagtgcttccgcgccgggatgaagaaggaggccgtccagaacgagcgggaccgcatctccacccggcgcagctcctacgaggacagctccctgcccagcatcaacgcgctcctgcaggccgaggtgctgtcccggcagatcaccagccccgtgtccggcatcaacggggacatccgcgccaagaagatcgccgagatcgccgacgtctgcgagagcatgaaggagcagctcctggtgctggtggagtgggcgaagtacatcccggccttctgcgagctccccctggacgaccaggtcgccctgctccgggcccacgccggcgagcacctcctgctgggggcgaccaagcgctccatggtgttcaaggacgtgctgctgctcggcaacgactacatcgtcccccggcactgccccgagctggccgagatgagccgcgtgtccatccggatcctggacgagctcgtgctgccgttccaggagctgcagatcgacgacaacgagtacgcctacctcaaggccatcatcttcttcgaccccgacgccaagggcctgagcgaccccgggaagatcaagcgcctgcgctcccaggtccaggtgagcctcgaggactacatcaacgaccggcagtacgactcccgcggccggttcggggagctgctgctcctgctgcccacgctccagagcatcacctggcagatgatcgagcagatccagttcatcaagctgttcggcatggcgaagatcgacaacctgctccaggagatgctgctgggcgggtccccgagcgacgcgccccacgcccaccaccccctccacccccacctgatgcaggagcacatgggcaccaacgtgatcgtcgccaacaccatgccgacgcacctgtccaacgggcagatgtgcgagtggccccgcccccggggccaggccgccacccccgagaccccgcagcccagcccgcccgggggctccggcagcgagccctacaagctgctccccggggccgtggccaccatcgtgaagcccctgtccgccatcccccagccgacgatcaccaagcaggaggtcatctgaggactagtccctgttcccagagcccacttttttttctttttttgaaataaaatagcctgtctttcagatctcaaaggctcttttcagagccaccaaaaaaaaaaaaaaaaaaaaaaaaaaaaaaaaaaaaaaaaaaaaaaaaaaaaaaaaaaaaaaaaaaaaaaaaaaaaaaaaaaaaaaaaaaaaaaaaaaaaa

SEQ ID NO: 2935 - RNA, 1697 nt, synthetic construct
  misc_feature 1..1697: note = mRNA a-1 (hSL-A100) (opt1) from Homo sapiens__NP_000448.3__HNF4A(1-474)(S461A)
  source 1..1697: mol_type = other RNA
aggagagtcccgcagtcggcgtccagcggctctgcttgttcgtgtgtgtgtcgttgcaggccttattcaagcttaccatgcgcctgagcaagaccctcgtggacatggacatggccgactactccgccgcgctggaccccgcctacaccacgctggagttcgagaacgtccaggtgctcaccatgggcaacgacaccagcccgtccgaggggaccaacctgaacgcccccaacagcctgggcgtgtccgccctctgcgccatctgcggggaccgggcgacgggcaagcactacggggccagctcctgcgacggctgcaagggcttcttccgccggagcgtccgcaagaaccacatgtactcctgccggttcagccgccagtgcgtggtggacaaggacaagcggaaccagtgccgctactgccggctgaagaagtgcttccgcgccgggatgaagaaggaggccgtccagaacgagcgggaccgcatctccacccggcgcagctcctacgaggacagctccctgcccagcatcaacgcgctcctgcaggccgaggtgctgtcccggcagatcaccagccccgtgtccggcatcaacggggacatccgcgccaagaagatcgccagcatcgccgacgtctgcgagagcatgaaggagcagctcctggtgctggtggagtgggcgaagtacatcccggccttctgcgagctccccctggacgaccaggtcgccctgctccgggcccacgccggcgagcacctcctgctgggggcgaccaagcgctccatggtgttcaaggacgtgctgctgctcggcaacgactacatcgtcccccggcactgccccgagctggccgagatgagccgcgtgtccatccggatcctggacgagctcgtgctgccgttccaggagctgcagatcgacgacaacgagtacgcctacctcaaggccatcatcttcttcgaccccgacgccaagggcctgagcgaccccgggaagatcaagcgcctgcgctcccaggtccaggtgagcctcgaggactacatcaacgaccggcagtacgactcccgcggccggttcggggagctgctgctcctgctgcccacgctccagagcatcacctggcagatgatcgagcagatccagttcatcaagctgttcggcatggcgaagatcgacaacctgctccaggagatgctgctgggcgggtccccgagcgacgcgccccacgcccaccaccccctccacccccacctgatgcaggagcacatgggcaccaacgtgatcgtcgccaacaccatgccgacgcacctgtccaacgggcagatgtgcgagtggccccgcccccggggccaggccgccacccccgagaccccgcagcccagcccgcccgggggctccggcagcgagccctacaagctgctccccggggccgtggccaccatcgtgaagcccctggcggccatcccccagccgacgatcaccaagcaggaggtcatctgaggactagtccctgttcccagagcccacttttttttctttttttgaaataaaatagcctgtctttcagatctcaaaggctcttttcagagccaccaaaaaaaaaaaaaaaaaaaaaaaaaaaaaaaaaaaaaaaaaaaaaaaaaaaaaaaaaaaaaaaaaaaaaaaaaaaaaaaaaaaaaaaaaaaaaaaaaaaaa

SEQ ID NO: 2936 - RNA, 1697 nt, synthetic construct
  misc_feature 1..1697: note = mRNA a-1 (hSL-A100) (opt1) from Homo sapiens__NP_000448.3__HNF4A(1-474)(S461E) R11470
  source 1..1697: mol_type = other RNA
aggagagtcccgcagtcggcgtccagcggctctgcttgttcgtgtgtgtgtcgttgcaggccttattcaagcttaccatgcgcctgagcaagaccctcgtggacatggacatggccgactactccgccgcgctggaccccgcctacaccacgctggagttcgagaacgtccaggtgctcaccatgggcaacgacaccagcccgtccgaggggaccaacctgaacgcccccaacagcctgggcgtgtccgccctctgcgccatctgcggggaccgggcgacgggcaagcactacggggccagctcctgcgacggctgcaagggcttcttccgccggagcgtccgcaagaaccacatgtactcctgccggttcagccgccagtgcgtggtggacaaggacaagcggaaccagtgccgctactgccggctgaagaagtgcttccgcgccgggatgaagaaggaggccgtccagaacgagcgggaccgcatctccacccggcgcagctcctacgaggacagctccctgcccagcatcaacgcgctcctgcaggccgaggtgctgtcccggcagatcaccagccccgtgtccggcatcaacggggacatccgcgccaagaagatcgccagcatcgccgacgtctgcgagagcatgaaggagcagctcctggtgctggtggagtgggcgaagtacatcccggccttctgcgagctccccctggacgaccaggtcgccctgctccgggcccacgccggcgagcacctcctgctgggggcgaccaagcgctccatggtgttcaaggacgtgctgctgctcggcaacgactacatcgtcccccggcactgccccgagctggccgagatgagccgcgtgtccatccggatcctggacgagctcgtgctgccgttccaggagctgcagatcgacgacaacgagtacgcctacctcaaggccatcatcttcttcgaccccgacgccaagggcctgagcgaccccgggaagatcaagcgcctgcgctcccaggtccaggtgagcctcgaggactacatcaacgaccggcagtacgactcccgcggccggttcggggagctgctgctcctgctgcccacgctccagagcatcacctggcagatgatcgagcagatccagttcatcaagctgttcggcatggcgaagatcgacaacctgctccaggagatgctgctgggcgggtccccgagcgacgcgccccacgcccaccaccccctccacccccacctgatgcaggagcacatgggcaccaacgtgatcgtcgccaacaccatgccgacgcacctgtccaacgggcagatgtgcgagtggccccgcccccggggccaggccgccacccccgagaccccgcagcccagcccgcccgggggctccggcagcgagccctacaagctgctccccggggccgtggccaccatcgtgaagcccctggaggccatcccccagccgacgatcaccaagcaggaggtcatctgaggactagtccctgttcccagagcccacttttttttctttttttgaaataaaatagcctgtctttcagatctcaaaggctcttttcagagccaccaaaaaaaaaaaaaaaaaaaaaaaaaaaaaaaaaaaaaaaaaaaaaaaaaaaaaaaaaaaaaaaaaaaaaaaaaaaaaaaaaaaaaaaaaaaaaaaaaaaaa

SEQ ID NO: 2937 - RNA, 1697 nt, synthetic construct
  misc_feature 1..1697: note = mRNA a-1 (hSL-A100) (opt1) from Homo sapiens__NP_000448.3__HNF4A(1-474)(S142A_S143A_S313A)
  source 1..1697: mol_type = other RNA
aggagagtcccgcagtcggcgtccagcggctctgcttgttcgtgtgtgtgtcgttgcaggccttattcaagcttaccatgcgcctgagcaagaccctcgtggacatggacatggccgactactccgccgcgctggaccccgcctacaccacgctggagttcgagaacgtccaggtgctcaccatgggcaacgacaccagcccgtccgaggggaccaacctgaacgcccccaacagcctgggcgtgtccgccctctgcgccatctgcggggaccgggcgacgggcaagcactacggggccagctcctgcgacggctgcaagggcttcttccgccggagcgtccgcaagaaccacatgtactcctgccggttcagccgccagtgcgtggtggacaaggacaagcggaaccagtgccgctactgccggctgaagaagtgcttccgcgccgggatgaagaaggaggccgtccagaacgagcgggaccgcatctccacccggcgcgcggcctacgaggacagctccctgcccagcatcaacgcgctcctgcaggccgaggtgctgtcccggcagatcaccagccccgtgtccggcatcaacggggacatccgcgccaagaagatcgccagcatcgccgacgtctgcgagagcatgaaggagcagctcctggtgctggtggagtgggcgaagtacatcccggccttctgcgagctccccctggacgaccaggtcgccctgctccgggcccacgccggcgagcacctcctgctgggggcgaccaagcgctccatggtgttcaaggacgtgctgctgctcggcaacgactacatcgtcccccggcactgccccgagctggccgagatgagccgcgtgtccatccggatcctggacgagctcgtgctgccgttccaggagctgcagatcgacgacaacgagtacgcctacctcaaggccatcatcttcttcgaccccgacgccaagggcctgagcgaccccgggaagatcaagcgcctgcgcgcgcaggtccaggtgagcctcgaggactacatcaacgaccggcagtacgactcccgcggccggttcggggagctgctgctcctgctgcccacgctccagagcatcacctggcagatgatcgagcagatccagttcatcaagctgttcggcatggcgaagatcgacaacctgctccaggagatgctgctgggcgggtccccgagcgacgcgccccacgcccaccaccccctccacccccacctgatgcaggagcacatgggcaccaacgtgatcgtcgccaacaccatgccgacgcacctgtccaacgggcagatgtgcgagtggccccgcccccggggccaggccgccacccccgagaccccgcagcccagcccgcccgggggctccggcagcgagccctacaagctgctccccggggccgtggccaccatcgtgaagcccctgtccgccatcccccagccgacgatcaccaagcaggaggtcatctgaggactagtccctgttcccagagcccacttttttttctttttttgaaataaaatagcctgtctttcagatctcaaaggctcttttcagagccaccaaaaaaaaaaaaaaaaaaaaaaaaaaaaaaaaaaaaaaaaaaaaaaaaaaaaaaaaaaaaaaaaaaaaaaaaaaaaaaaaaaaaaaaaaaaaaaaaaaaaa

SEQ ID NO: 2938 - RNA, 1697 nt, synthetic construct
  misc_feature 1..1697: note = mRNA a-1 (hSL-A100) (opt1) from Homo sapiens__NP_000448.3__HNF4A(1-474)(S142A_S143A_S313A_K458R)
  source 1..1697: mol_type = other RNA
aggagagtcccgcagtcggcgtccagcggctctgcttgttcgtgtgtgtgtcgttgcaggccttattcaagcttaccatgcgcctgagcaagaccctcgtggacatggacatggccgactactccgccgcgctggaccccgcctacaccacgctggagttcgagaacgtccaggtgctcaccatgggcaacgacaccagcccgtccgaggggaccaacctgaacgcccccaacagcctgggcgtgtccgccctctgcgccatctgcggggaccgggcgacgggcaagcactacggggccagctcctgcgacggctgcaagggcttcttccgccggagcgtccgcaagaaccacatgtactcctgccggttcagccgccagtgcgtggtggacaaggacaagcggaaccagtgccgctactgccggctgaagaagtgcttccgcgccgggatgaagaaggaggccgtccagaacgagcgggaccgcatctccacccggcgcgcggcctacgaggacagctccctgcccagcatcaacgcgctcctgcaggccgaggtgctgtcccggcagatcaccagccccgtgtccggcatcaacggggacatccgcgccaagaagatcgccagcatcgccgacgtctgcgagagcatgaaggagcagctcctggtgctggtggagtgggcgaagtacatcccggccttctgcgagctccccctggacgaccaggtcgccctgctccgggcccacgccggcgagcacctcctgctgggggcgaccaagcgctccatggtgttcaaggacgtgctgctgctcggcaacgactacatcgtcccccggcactgccccgagctggccgagatgagccgcgtgtccatccggatcctggacgagctcgtgctgccgttccaggagctgcagatcgacgacaacgagtacgcctacctcaaggccatcatcttcttcgaccccgacgccaagggcctgagcgaccccgggaagatcaagcgcctgcgcgcgcaggtccaggtgagcctcgaggactacatcaacgaccggcagtacgactcccgcggccggttcggggagctgctgctcctgctgcccacgctccagagcatcacctggcagatgatcgagcagatccagttcatcaagctgttcggcatggcgaagatcgacaacctgctccaggagatgctgctgggcgggtccccgagcgacgcgccccacgcccaccaccccctccacccccacctgatgcaggagcacatgggcaccaacgtgatcgtcgccaacaccatgccgacgcacctgtccaacgggcagatgtgcgagtggccccgcccccggggccaggccgccacccccgagaccccgcagcccagcccgcccgggggctccggcagcgagccctacaagctgctccccggggccgtggccaccatcgtgcggcccctgtccgccatcccccagccgacgatcaccaagcaggaggtcatctgaggactagtccctgttcccagagcccacttttttttctttttttgaaataaaatagcctgtctttcagatctcaaaggctcttttcagagccaccaaaaaaaaaaaaaaaaaaaaaaaaaaaaaaaaaaaaaaaaaaaaaaaaaaaaaaaaaaaaaaaaaaaaaaaaaaaaaaaaaaaaaaaaaaaaaaaaaaaaa

SEQ ID NO: 2939 - RNA, 1697 nt, synthetic construct
  misc_feature 1..1697: note = mRNA a-1 (hSL-A100) (opt1) from Homo sapiens__NP_000448.3__HNF4A(1-474)(S142A_S143A_S167A_S313A_ S378A_T429A_T432A_S436A_K458R)
  source 1..1697: mol_type = other RNA
aggagagtcccgcagtcggcgtccagcggctctgcttgttcgtgtgtgtgtcgttgcaggccttattcaagcttaccatgcgcctgagcaagaccctcgtggacatggacatggccgactactccgccgcgctggaccccgcctacaccacgctggagttcgagaacgtccaggtgctcaccatgggcaacgacaccagcccgtccgaggggaccaacctgaacgcccccaacagcctgggcgtgtccgccctctgcgccatctgcggggaccgggcgacgggcaagcactacggggccagctcctgcgacggctgcaagggcttcttccgccggagcgtccgcaagaaccacatgtactcctgccggttcagccgccagtgcgtggtggacaaggacaagcggaaccagtgccgctactgccggctgaagaagtgcttccgcgccgggatgaagaaggaggccgtccagaacgagcgggaccgcatctccacccggcgcgcggcctacgaggacagctccctgcccagcatcaacgcgctcctgcaggccgaggtgctgtcccggcagatcaccgcgcccgtgtccggcatcaacggggacatccgcgccaagaagatcgccagcatcgccgacgtctgcgagagcatgaaggagcagctcctggtgctggtggagtgggcgaagtacatcccggccttctgcgagctccccctggacgaccaggtcgccctgctccgggcccacgccggcgagcacctcctgctgggggcgaccaagcgctccatggtgttcaaggacgtgctgctgctcggcaacgactacatcgtcccccggcactgccccgagctggccgagatgagccgcgtgtccatccggatcctggacgagctcgtgctgccgttccaggagctgcagatcgacgacaacgagtacgcctacctcaaggccatcatcttcttcgaccccgacgccaagggcctgagcgaccccgggaagatcaagcgcctgcgcgcgcaggtccaggtgagcctcgaggactacatcaacgaccggcagtacgactcccgcggccggttcggggagctgctgctcctgctgcccacgctccagagcatcacctggcagatgatcgagcagatccagttcatcaagctgttcggcatggcgaagatcgacaacctgctccaggagatgctgctgggcggggcgccgagcgacgcgccccacgcccaccaccccctccacccccacctgatgcaggagcacatgggcaccaacgtgatcgtcgccaacaccatgccgacgcacctgtccaacgggcagatgtgcgagtggccccgcccccggggccaggccgccgcgcccgaggcgccgcagcccgcgccgcccgggggctccggcagcgagccctacaagctgctccccggggccgtggccaccatcgtgcggcccctgtccgccatcccccagccgacgatcaccaagcaggaggtcatctgaggactagtccctgttcccagagcccacttttttttctttttttgaaataaaatagcctgtctttcagatctcaaaggctcttttcagagccaccaaaaaaaaaaaaaaaaaaaaaaaaaaaaaaaaaaaaaaaaaaaaaaaaaaaaaaaaaaaaaaaaaaaaaaaaaaaaaaaaaaaaaaaaaaaaaaaaaaaaa

SEQ ID NO: 2940 - RNA, 1697 nt, synthetic construct
  misc_feature 1..1697: note = mRNA a-1 (hSL-A100) (opt1) from Homo sapiens__NP_000448.3__HNF4A(1-474)(S142A_S143A_S148A_S167A_ S313A_S378A_T429A_T432A_S436A_K458R)
  source 1..1697: mol_type = other RNA
aggagagtcccgcagtcggcgtccagcggctctgcttgttcgtgtgtgtgtcgttgcaggccttattcaagcttaccatgcgcctgagcaagaccctcgtggacatggacatggccgactactccgccgcgctggaccccgcctacaccacgctggagttcgagaacgtccaggtgctcaccatgggcaacgacaccagcccgtccgaggggaccaacctgaacgcccccaacagcctgggcgtgtccgccctctgcgccatctgcggggaccgggcgacgggcaagcactacggggccagctcctgcgacggctgcaagggcttcttccgccggagcgtccgcaagaaccacatgtactcctgccggttcagccgccagtgcgtggtggacaaggacaagcggaaccagtgccgctactgccggctgaagaagtgcttccgcgccgggatgaagaaggaggccgtccagaacgagcgggaccgcatctccacccggcgcgcggcctacgaggacagcgcgctgcccagcatcaacgcgctcctgcaggccgaggtgctgtcccggcagatcaccgcgcccgtgtccggcatcaacggggacatccgcgccaagaagatcgccagcatcgccgacgtctgcgagagcatgaaggagcagctcctggtgctggtggagtgggcgaagtacatcccggccttctgcgagctccccctggacgaccaggtcgccctgctccgggcccacgccggcgagcacctcctgctgggggcgaccaagcgctccatggtgttcaaggacgtgctgctgctcggcaacgactacatcgtcccccggcactgccccgagctggccgagatgagccgcgtgtccatccggatcctggacgagctcgtgctgccgttccaggagctgcagatcgacgacaacgagtacgcctacctcaaggccatcatcttcttcgaccccgacgccaagggcctgagcgaccccgggaagatcaagcgcctgcgcgcgcaggtccaggtgagcctcgaggactacatcaacgaccggcagtacgactcccgcggccggttcggggagctgctgctcctgctgcccacgctccagagcatcacctggcagatgatcgagcagatccagttcatcaagctgttcggcatggcgaagatcgacaacctgctccaggagatgctgctgggcggggcgccgagcgacgcgccccacgcccaccaccccctccacccccacctgatgcaggagcacatgggcaccaacgtgatcgtcgccaacaccatgccgacgcacctgtccaacgggcagatgtgcgagtggccccgcccccggggccaggccgccgcgcccgaggcgccgcagcccgcgccgcccgggggctccggcagcgagccctacaagctgctccccggggccgtggccaccatcgtgcggcccctgtccgccatcccccagccgacgatcaccaagcaggaggtcatctgaggactagtccctgttcccagagcccacttttttttctttttttgaaataaaatagcctgtctttcagatctcaaaggctcttttcagagccaccaaaaaaaaaaaaaaaaaaaaaaaaaaaaaaaaaaaaaaaaaaaaaaaaaaaaaaaaaaaaaaaaaaaaaaaaaaaaaaaaaaaaaaaaaaaaaaaaaaaaa

SEQ ID NO: 2941 - RNA, 1697 nt, synthetic construct
  misc_feature 1..1697: note = mRNA a-1 (hSL-A100) (opt1) from Homo sapiens__NP_000448.3__HNF4A(1-474)(K106R_K108R_K126R_K127R_ S142A_S143A_S148A_S167A_S313A_S378A_T429A_T432A_S436A_K458R )
  source 1..1697: mol_type = other RNA
aggagagtcccgcagtcggcgtccagcggctctgcttgttcgtgtgtgtgtcgttgcaggccttattcaagcttaccatgcgcctgagcaagaccctcgtggacatggacatggccgactactccgccgcgctggaccccgcctacaccacgctggagttcgagaacgtccaggtgctcaccatgggcaacgacaccagcccgtccgaggggaccaacctgaacgcccccaacagcctgggcgtgtccgccctctgcgccatctgcggggaccgggcgacgggcaagcactacggggccagctcctgcgacggctgcaagggcttcttccgccggagcgtccgcaagaaccacatgtactcctgccggttcagccgccagtgcgtggtggaccgcgaccggcggaaccagtgccgctactgccggctgaagaagtgcttccgcgccgggatgcgccgcgaggccgtccagaacgagcgggaccgcatctccacccggcgcgcggcctacgaggacagcgcgctgcccagcatcaacgcgctcctgcaggccgaggtgctgtcccggcagatcaccgcgcccgtgtccggcatcaacggggacatccgcgccaagaagatcgccagcatcgccgacgtctgcgagagcatgaaggagcagctcctggtgctggtggagtgggcgaagtacatcccggccttctgcgagctccccctggacgaccaggtcgccctgctccgggcccacgccggcgagcacctcctgctgggggcgaccaagcgctccatggtgttcaaggacgtgctgctgctcggcaacgactacatcgtcccccggcactgccccgagctggccgagatgagccgcgtgtccatccggatcctggacgagctcgtgctgccgttccaggagctgcagatcgacgacaacgagtacgcctacctcaaggccatcatcttcttcgaccccgacgccaagggcctgagcgaccccgggaagatcaagcgcctgcgcgcgcaggtccaggtgagcctcgaggactacatcaacgaccggcagtacgactcccgcggccggttcggggagctgctgctcctgctgcccacgctccagagcatcacctggcagatgatcgagcagatccagttcatcaagctgttcggcatggcgaagatcgacaacctgctccaggagatgctgctgggcggggcgccgagcgacgcgccccacgcccaccaccccctccacccccacctgatgcaggagcacatgggcaccaacgtgatcgtcgccaacaccatgccgacgcacctgtccaacgggcagatgtgcgagtggccccgcccccggggccaggccgccgcgcccgaggcgccgcagcccgcgccgcccgggggctccggcagcgagccctacaagctgctccccggggccgtggccaccatcgtgcggcccctgtccgccatcccccagccgacgatcaccaagcaggaggtcatctgaggactagtccctgttcccagagcccacttttttttctttttttgaaataaaatagcctgtctttcagatctcaaaggctcttttcagagccaccaaaaaaaaaaaaaaaaaaaaaaaaaaaaaaaaaaaaaaaaaaaaaaaaaaaaaaaaaaaaaaaaaaaaaaaaaaaaaaaaaaaaaaaaaaaaaaaaaaaaa

SEQ ID NO: 2942 - RNA, 1697 nt, synthetic construct
  misc_feature 1..1697: note = mRNA a-1 (hSL-A100) (opt1) from Homo sapiens__NP_000448.3__HNF4A(1-474)(S142A_S143A_S148A_T166A_ S167A_S313A_S378A_T429A_T432A_S436A_K458R)
  source 1..1697: mol_type = other RNA
aggagagtcccgcagtcggcgtccagcggctctgcttgttcgtgtgtgtgtcgttgcaggccttattcaagcttaccatgcgcctgagcaagaccctcgtggacatggacatggccgactactccgccgcgctggaccccgcctacaccacgctggagttcgagaacgtccaggtgctcaccatgggcaacgacaccagcccgtccgaggggaccaacctgaacgcccccaacagcctgggcgtgtccgccctctgcgccatctgcggggaccgggcgacgggcaagcactacggggccagctcctgcgacggctgcaagggcttcttccgccggagcgtccgcaagaaccacatgtactcctgccggttcagccgccagtgcgtggtggacaaggacaagcggaaccagtgccgctactgccggctgaagaagtgcttccgcgccgggatgaagaaggaggccgtccagaacgagcgggaccgcatctccacccggcgcgcggcctacgaggacagcgcgctgcccagcatcaacgcgctcctgcaggccgaggtgctgtcccggcagatcgcggcgcccgtgtccggcatcaacggggacatccgcgccaagaagatcgccagcatcgccgacgtctgcgagagcatgaaggagcagctcctggtgctggtggagtgggcgaagtacatcccggccttctgcgagctccccctggacgaccaggtcgccctgctccgggcccacgccggcgagcacctcctgctgggggcgaccaagcgctccatggtgttcaaggacgtgctgctgctcggcaacgactacatcgtcccccggcactgccccgagctggccgagatgagccgcgtgtccatccggatcctggacgagctcgtgctgccgttccaggagctgcagatcgacgacaacgagtacgcctacctcaaggccatcatcttcttcgaccccgacgccaagggcctgagcgaccccgggaagatcaagcgcctgcgcgcgcaggtccaggtgagcctcgaggactacatcaacgaccggcagtacgactcccgcggccggttcggggagctgctgctcctgctgcccacgctccagagcatcacctggcagatgatcgagcagatccagttcatcaagctgttcggcatggcgaagatcgacaacctgctccaggagatgctgctgggcggggcgccgagcgacgcgccccacgcccaccaccccctccacccccacctgatgcaggagcacatgggcaccaacgtgatcgtcgccaacaccatgccgacgcacctgtccaacgggcagatgtgcgagtggccccgcccccggggccaggccgccgcgcccgaggcgccgcagcccgcgccgcccgggggctccggcagcgagccctacaagctgctccccggggccgtggccaccatcgtgcggcccctgtccgccatcccccagccgacgatcaccaagcaggaggtcatctgaggactagtccctgttcccagagcccacttttttttctttttttgaaataaaatagcctgtctttcagatctcaaaggctcttttcagagccaccaaaaaaaaaaaaaaaaaaaaaaaaaaaaaaaaaaaaaaaaaaaaaaaaaaaaaaaaaaaaaaaaaaaaaaaaaaaaaaaaaaaaaaaaaaaaaaaaaaaaa

SEQ ID NO: 2943 - RNA, 1697 nt, synthetic construct
  misc_feature 1..1697: note = mRNA a-1 (hSL-A100) (opt1) from Homo sapiens__NP_000448.3__HNF4A(1-474)(S87A_S142A_S143A_S148A_T 166A_S167A_S313A_S378A_T429A_T432A_S436A_K458R)
  source 1..1697: mol_type = other RNA
aggagagtcccgcagtcggcgtccagcggctctgcttgttcgtgtgtgtgtcgttgcaggccttattcaagcttaccatgcgcctgagcaagaccctcgtggacatggacatggccgactactccgccgcgctggaccccgcctacaccacgctggagttcgagaacgtccaggtgctcaccatgggcaacgacaccagcccgtccgaggggaccaacctgaacgcccccaacagcctgggcgtgtccgccctctgcgccatctgcggggaccgggcgacgggcaagcactacggggccagctcctgcgacggctgcaagggcttcttccgccgggcggtccgcaagaaccacatgtactcctgccggttcagccgccagtgcgtggtggacaaggacaagcggaaccagtgccgctactgccggctgaagaagtgcttccgcgccgggatgaagaaggaggccgtccagaacgagcgggaccgcatctccacccggcgcgcggcctacgaggacagcgcgctgcccagcatcaacgcgctcctgcaggccgaggtgctgtcccggcagatcgcggcgcccgtgtccggcatcaacggggacatccgcgccaagaagatcgccagcatcgccgacgtctgcgagagcatgaaggagcagctcctggtgctggtggagtgggcgaagtacatcccggccttctgcgagctccccctggacgaccaggtcgccctgctccgggcccacgccggcgagcacctcctgctgggggcgaccaagcgctccatggtgttcaaggacgtgctgctgctcggcaacgactacatcgtcccccggcactgccccgagctggccgagatgagccgcgtgtccatccggatcctggacgagctcgtgctgccgttccaggagctgcagatcgacgacaacgagtacgcctacctcaaggccatcatcttcttcgaccccgacgccaagggcctgagcgaccccgggaagatcaagcgcctgcgcgcgcaggtccaggtgagcctcgaggactacatcaacgaccggcagtacgactcccgcggccggttcggggagctgctgctcctgctgcccacgctccagagcatcacctggcagatgatcgagcagatccagttcatcaagctgttcggcatggcgaagatcgacaacctgctccaggagatgctgctgggcggggcgccgagcgacgcgccccacgcccaccaccccctccacccccacctgatgcaggagcacatgggcaccaacgtgatcgtcgccaacaccatgccgacgcacctgtccaacgggcagatgtgcgagtggccccgcccccggggccaggccgccgcgcccgaggcgccgcagcccgcgccgcccgggggctccggcagcgagccctacaagctgctccccggggccgtggccaccatcgtgcggcccctgtccgccatcccccagccgacgatcaccaagcaggaggtcatctgaggactagtccctgttcccagagcccacttttttttctttttttgaaataaaatagcctgtctttcagatctcaaaggctcttttcagagccaccaaaaaaaaaaaaaaaaaaaaaaaaaaaaaaaaaaaaaaaaaaaaaaaaaaaaaaaaaaaaaaaaaaaaaaaaaaaaaaaaaaaaaaaaaaaaaaaaaaaaa

SEQ ID NO: 2944 - RNA, 1697 nt, synthetic construct
  misc_feature 1..1697: note = mRNA a-1 (hSL-A100) (opt1) from Homo sapiens__NP_000448.3__HNF4A(1-474)(S87A_K106R_K108R_K126R_K 127R_S142A_S143A_S148A_T166A_S167A_S313A_S378A_T429A_T432A_ S436A_K458R) R10596
  source 1..1697: mol_type = other RNA
aggagagtcccgcagtcggcgtccagcggctctgcttgttcgtgtgtgtgtcgttgcaggccttattcaagcttaccatgcgcctgagcaagaccctcgtggacatggacatggccgactactccgccgcgctggaccccgcctacaccacgctggagttcgagaacgtccaggtgctcaccatgggcaacgacaccagcccgtccgaggggaccaacctgaacgcccccaacagcctgggcgtgtccgccctctgcgccatctgcggggaccgggcgacgggcaagcactacggggccagctcctgcgacggctgcaagggcttcttccgccgggcggtccgcaagaaccacatgtactcctgccggttcagccgccagtgcgtggtggaccgcgaccggcggaaccagtgccgctactgccggctgaagaagtgcttccgcgccgggatgcgccgcgaggccgtccagaacgagcgggaccgcatctccacccggcgcgcggcctacgaggacagcgcgctgcccagcatcaacgcgctcctgcaggccgaggtgctgtcccggcagatcgcggcgcccgtgtccggcatcaacggggacatccgcgccaagaagatcgccagcatcgccgacgtctgcgagagcatgaaggagcagctcctggtgctggtggagtgggcgaagtacatcccggccttctgcgagctccccctggacgaccaggtcgccctgctccgggcccacgccggcgagcacctcctgctgggggcgaccaagcgctccatggtgttcaaggacgtgctgctgctcggcaacgactacatcgtcccccggcactgccccgagctggccgagatgagccgcgtgtccatccggatcctggacgagctcgtgctgccgttccaggagctgcagatcgacgacaacgagtacgcctacctcaaggccatcatcttcttcgaccccgacgccaagggcctgagcgaccccgggaagatcaagcgcctgcgcgcgcaggtccaggtgagcctcgaggactacatcaacgaccggcagtacgactcccgcggccggttcggggagctgctgctcctgctgcccacgctccagagcatcacctggcagatgatcgagcagatccagttcatcaagctgttcggcatggcgaagatcgacaacctgctccaggagatgctgctgggcggggcgccgagcgacgcgccccacgcccaccaccccctccacccccacctgatgcaggagcacatgggcaccaacgtgatcgtcgccaacaccatgccgacgcacctgtccaacgggcagatgtgcgagtggccccgcccccggggccaggccgccgcgcccgaggcgccgcagcccgcgccgcccgggggctccggcagcgagccctacaagctgctccccggggccgtggccaccatcgtgcggcccctgtccgccatcccccagccgacgatcaccaagcaggaggtcatctgaggactagtccctgttcccagagcccacttttttttctttttttgaaataaaatagcctgtctttcagatctcaaaggctcttttcagagccaccaaaaaaaaaaaaaaaaaaaaaaaaaaaaaaaaaaaaaaaaaaaaaaaaaaaaaaaaaaaaaaaaaaaaaaaaaaaaaaaaaaaaaaaaaaaaaaaaaaaaa

SEQ ID NO: 2945 - RNA, 1697 nt, synthetic construct
  misc_feature 1..1697: note = mRNA a-1 (hSL-A100) (opt1) from Homo sapiens__NP_000448.3__HNF4A(1-474)(S87A_K106R_K108R_K126R_K 127R) R10664
  source 1..1697: mol_type = other RNA
aggagagtcccgcagtcggcgtccagcggctctgcttgttcgtgtgtgtgtcgttgcaggccttattcaagcttaccatgcgcctgagcaagaccctcgtggacatggacatggccgactactccgccgcgctggaccccgcctacaccacgctggagttcgagaacgtccaggtgctcaccatgggcaacgacaccagcccgtccgaggggaccaacctgaacgcccccaacagcctgggcgtgtccgccctctgcgccatctgcggggaccgggcgacgggcaagcactacggggccagctcctgcgacggctgcaagggcttcttccgccgggcggtccgcaagaaccacatgtactcctgccggttcagccgccagtgcgtggtggaccgcgaccggcggaaccagtgccgctactgccggctgaagaagtgcttccgcgccgggatgcgccgggaggccgtccagaacgagcgggaccgcatctccacccggcgcagctcctacgaggacagctccctgcccagcatcaacgcgctcctgcaggccgaggtgctgtcccggcagatcaccagccccgtgtccggcatcaacggggacatccgcgccaagaagatcgccagcatcgccgacgtctgcgagagcatgaaggagcagctcctggtgctggtggagtgggcgaagtacatcccggccttctgcgagctccccctggacgaccaggtcgccctgctccgggcccacgccggcgagcacctcctgctgggggcgaccaagcgctccatggtgttcaaggacgtgctgctgctcggcaacgactacatcgtcccccggcactgccccgagctggccgagatgagccgcgtgtccatccggatcctggacgagctcgtgctgccgttccaggagctgcagatcgacgacaacgagtacgcctacctcaaggccatcatcttcttcgaccccgacgccaagggcctgagcgaccccgggaagatcaagcgcctgcgctcccaggtccaggtgagcctcgaggactacatcaacgaccggcagtacgactcccgcggccggttcggggagctgctgctcctgctgcccacgctccagagcatcacctggcagatgatcgagcagatccagttcatcaagctgttcggcatggcgaagatcgacaacctgctccaggagatgctgctgggcgggtccccgagcgacgcgccccacgcccaccaccccctccacccccacctgatgcaggagcacatgggcaccaacgtgatcgtcgccaacaccatgccgacgcacctgtccaacgggcagatgtgcgagtggccccgcccccggggccaggccgccacccccgagaccccgcagcccagcccgcccgggggctccggcagcgagccctacaagctgctccccggggccgtggccaccatcgtgaagcccctgtccgccatcccccagccgacgatcaccaagcaggaggtcatctgaggactagtccctgttcccagagcccacttttttttctttttttgaaataaaatagcctgtctttcagatctcaaaggctcttttcagagccaccaaaaaaaaaaaaaaaaaaaaaaaaaaaaaaaaaaaaaaaaaaaaaaaaaaaaaaaaaaaaaaaaaaaaaaaaaaaaaaaaaaaaaaaaaaaaaaaaaaaaa

SEQ ID NO: 2946 - RNA, 1697 nt, synthetic construct
  misc_feature 1..1697: note = mRNA a-1 (hSL-A100) (opt1) from Homo sapiens__NP_000448.3__HNF4A(1-474)(S87A_K106R_K108R_K126R_K 127R_S142A_S143A_S148A_T166A_S167A_S313A_S378A_T429A_T432A_ S436A_K458R_S461A)
  source 1..1697: mol_type = other RNA
aggagagtcccgcagtcggcgtccagcggctctgcttgttcgtgtgtgtgtcgttgcaggccttattcaagcttaccatgcgcctgagcaagaccctcgtggacatggacatggccgactactccgccgcgctggaccccgcctacaccacgctggagttcgagaacgtccaggtgctcaccatgggcaacgacaccagcccgtccgaggggaccaacctgaacgcccccaacagcctgggcgtgtccgccctctgcgccatctgcggggaccgggcgacgggcaagcactacggggccagctcctgcgacggctgcaagggcttcttccgccgggcggtccgcaagaaccacatgtactcctgccggttcagccgccagtgcgtggtggaccgcgaccggcggaaccagtgccgctactgccggctgaagaagtgcttccgcgccgggatgcgccgggaggccgtccagaacgagcgggaccgcatctccacccggcgcgccgcctacgaggacagcgccctgcccagcatcaacgcgctcctgcaggccgaggtgctgtcccggcagatcgccgcgcccgtgtccggcatcaacggggacatccgcgccaagaagatcgccagcatcgccgacgtctgcgagagcatgaaggagcagctcctggtgctggtggagtgggcgaagtacatcccggccttctgcgagctccccctggacgaccaggtcgccctgctccgggcccacgccggcgagcacctcctgctgggggcgaccaagcgctccatggtgttcaaggacgtgctgctgctcggcaacgactacatcgtcccccggcactgccccgagctggccgagatgagccgcgtgtccatccggatcctggacgagctcgtgctgccgttccaggagctgcagatcgacgacaacgagtacgcctacctcaaggccatcatcttcttcgaccccgacgccaagggcctgagcgaccccgggaagatcaagcgcctgcgcgcccaggtccaggtgagcctcgaggactacatcaacgaccggcagtacgactcccgcggccggttcggggagctgctgctcctgctgcccacgctccagagcatcacctggcagatgatcgagcagatccagttcatcaagctgttcggcatggcgaagatcgacaacctgctccaggagatgctgctgggcggggccccgagcgacgcgccccacgcccaccaccccctccacccccacctgatgcaggagcacatgggcaccaacgtgatcgtcgccaacaccatgccgacgcacctgtccaacgggcagatgtgcgagtggccccgcccccggggccaggccgccgcccccgaggccccgcagcccgcgccgcccgggggctccggcagcgagccctacaagctgctccccggggccgtggccaccatcgtgcggcccctggccgccatcccccagccgacgatcaccaagcaggaggtcatctgaggactagtccctgttcccagagcccacttttttttctttttttgaaataaaatagcctgtctttcagatctcaaaggctcttttcagagccaccaaaaaaaaaaaaaaaaaaaaaaaaaaaaaaaaaaaaaaaaaaaaaaaaaaaaaaaaaaaaaaaaaaaaaaaaaaaaaaaaaaaaaaaaaaaaaaaaaaaaa

SEQ ID NO: 2947 - RNA, 1697 nt, synthetic construct
  misc_feature 1..1697: note = mRNA a-1 (hSL-A100) (opt1) from Homo sapiens__NP_000448.3__HNF4A(1-474)(S87A_K106R_K108R_K126R_K 127R_S142A_S143A_S148A_T166A_S167A_S313A_S378A_T429A_T432A_ S436A_K458R_S461E) R10665
  source 1..1697: mol_type = other RNA
aggagagtcccgcagtcggcgtccagcggctctgcttgttcgtgtgtgtgtcgttgcaggccttattcaagcttaccatgcgcctgagcaagaccctcgtggacatggacatggccgactactccgccgcgctggaccccgcctacaccacgctggagttcgagaacgtccaggtgctcaccatgggcaacgacaccagcccgtccgaggggaccaacctgaacgcccccaacagcctgggcgtgtccgccctctgcgccatctgcggggaccgggcgacgggcaagcactacggggccagctcctgcgacggctgcaagggcttcttccgccgggcggtccgcaagaaccacatgtactcctgccggttcagccgccagtgcgtggtggaccgcgaccggcggaaccagtgccgctactgccggctgaagaagtgcttccgcgccgggatgcgccgggaggccgtccagaacgagcgggaccgcatctccacccggcgcgccgcctacgaggacagcgccctgcccagcatcaacgcgctcctgcaggccgaggtgctgtcccggcagatcgccgcgcccgtgtccggcatcaacggggacatccgcgccaagaagatcgccagcatcgccgacgtctgcgagagcatgaaggagcagctcctggtgctggtggagtgggcgaagtacatcccggccttctgcgagctccccctggacgaccaggtcgccctgctccgggcccacgccggcgagcacctcctgctgggggcgaccaagcgctccatggtgttcaaggacgtgctgctgctcggcaacgactacatcgtcccccggcactgccccgagctggccgagatgagccgcgtgtccatccggatcctggacgagctcgtgctgccgttccaggagctgcagatcgacgacaacgagtacgcctacctcaaggccatcatcttcttcgaccccgacgccaagggcctgagcgaccccgggaagatcaagcgcctgcgcgcccaggtccaggtgagcctcgaggactacatcaacgaccggcagtacgactcccgcggccggttcggggagctgctgctcctgctgcccacgctccagagcatcacctggcagatgatcgagcagatccagttcatcaagctgttcggcatggcgaagatcgacaacctgctccaggagatgctgctgggcggggccccgagcgacgcgccccacgcccaccaccccctccacccccacctgatgcaggagcacatgggcaccaacgtgatcgtcgccaacaccatgccgacgcacctgtccaacgggcagatgtgcgagtggccccgcccccggggccaggccgccgcccccgaggccccgcagcccgcgccgcccgggggctccggcagcgagccctacaagctgctccccggggccgtggccaccatcgtgcggcccctggaggccatcccccagccgacgatcaccaagcaggaggtcatctgaggactagtccctgttcccagagcccacttttttttctttttttgaaataaaatagcctgtctttcagatctcaaaggctcttttcagagccaccaaaaaaaaaaaaaaaaaaaaaaaaaaaaaaaaaaaaaaaaaaaaaaaaaaaaaaaaaaaaaaaaaaaaaaaaaaaaaaaaaaaaaaaaaaaaaaaaaaaaa

SEQ ID NO: 2948 - RNA, 1697 nt, synthetic construct
  misc_feature 1..1697: note = mRNA a-1 (hSL-A100) (opt1) from Homo sapiens__NP_000448.3__HNF4A(1-474)(S87A_K106R_K108R_K126R_K 127R_S142A_S143A_S148E_T166A_S167E_S313A_S378E_T429E_T432E_ S436E_K458R_S461E)
  source 1..1697: mol_type = other RNA
aggagagtcccgcagtcggcgtccagcggctctgcttgttcgtgtgtgtgtcgttgcaggccttattcaagcttaccatgcgcctgagcaagaccctcgtggacatggacatggccgactactccgccgcgctggaccccgcctacaccacgctggagttcgagaacgtccaggtgctcaccatgggcaacgacaccagcccgtccgaggggaccaacctgaacgcccccaacagcctgggcgtgtccgccctctgcgccatctgcggggaccgggcgacgggcaagcactacggggccagctcctgcgacggctgcaagggcttcttccgccgggcggtccgcaagaaccacatgtactcctgccggttcagccgccagtgcgtggtggaccgcgaccggcggaaccagtgccgctactgccggctgaagaagtgcttccgcgccgggatgcgccgggaggccgtccagaacgagcgggaccgcatctccacccggcgcgccgcctacgaggacagcgagctgcccagcatcaacgcgctcctgcaggccgaggtgctgtcccggcagatcgccgagcccgtgtccggcatcaacggggacatccgcgccaagaagatcgccagcatcgccgacgtctgcgagagcatgaaggagcagctcctggtgctggtggagtgggcgaagtacatcccggccttctgcgagctccccctggacgaccaggtcgccctgctccgggcccacgccggcgagcacctcctgctgggggcgaccaagcgctccatggtgttcaaggacgtgctgctgctcggcaacgactacatcgtcccccggcactgccccgagctggccgagatgagccgcgtgtccatccggatcctggacgagctcgtgctgccgttccaggagctgcagatcgacgacaacgagtacgcctacctcaaggccatcatcttcttcgaccccgacgccaagggcctgagcgaccccgggaagatcaagcgcctgcgcgcccaggtccaggtgagcctcgaggactacatcaacgaccggcagtacgactcccgcggccggttcggggagctgctgctcctgctgcccacgctccagagcatcacctggcagatgatcgagcagatccagttcatcaagctgttcggcatggcgaagatcgacaacctgctccaggagatgctgctgggcggggagccgagcgacgcgccccacgcccaccaccccctccacccccacctgatgcaggagcacatgggcaccaacgtgatcgtcgccaacaccatgccgacgcacctgtccaacgggcagatgtgcgagtggccccgcccccggggccaggccgccgagcccgaggagccgcagcccgagccgcccgggggctccggcagcgagccctacaagctgctccccggggccgtggccaccatcgtgcggcccctggaggccatcccccagccgacgatcaccaagcaggaggtcatctgaggactagtccctgttcccagagcccacttttttttctttttttgaaataaaatagcctgtctttcagatctcaaaggctcttttcagagccaccaaaaaaaaaaaaaaaaaaaaaaaaaaaaaaaaaaaaaaaaaaaaaaaaaaaaaaaaaaaaaaaaaaaaaaaaaaaaaaaaaaaaaaaaaaaaaaaaaaaaa

SEQ ID NO: 2949 - RNA, 1697 nt, synthetic construct
  misc_feature 1..1697: note = mRNA a-1 (hSL-A100) (opt1) from Homo sapiens__NP_000448.3__HNF4A(1-474)(S87A_K106R_K108R_K126R_K 127R_S142A_S143A_S148A_T166A_S167A_K179R_K180R_S313A_S378A_ T429A_T432A_S436A_K458R_S461E)
  source 1..1697: mol_type = other RNA
aggagagtcccgcagtcggcgtccagcggctctgcttgttcgtgtgtgtgtcgttgcaggccttattcaagcttaccatgcgcctgagcaagaccctcgtggacatggacatggccgactactccgccgcgctggaccccgcctacaccacgctggagttcgagaacgtccaggtgctcaccatgggcaacgacaccagcccgtccgaggggaccaacctgaacgcccccaacagcctgggcgtgtccgccctctgcgccatctgcggggaccgggcgacgggcaagcactacggggccagctcctgcgacggctgcaagggcttcttccgccgggcggtccgcaagaaccacatgtactcctgccggttcagccgccagtgcgtggtggaccgcgaccggcggaaccagtgccgctactgccggctgaagaagtgcttccgcgccgggatgcgccgggaggccgtccagaacgagcgggaccgcatctccacccggcgcgccgcctacgaggacagcgccctgcccagcatcaacgcgctcctgcaggccgaggtgctgtcccggcagatcgccgcgcccgtgtccggcatcaacggggacatccgcgcccgccggatcgccagcatcgccgacgtctgcgagagcatgaaggagcagctcctggtgctggtggagtgggcgaagtacatcccggccttctgcgagctccccctggacgaccaggtcgccctgctccgggcccacgccggcgagcacctcctgctgggggcgaccaagcgctccatggtgttcaaggacgtgctgctgctcggcaacgactacatcgtcccccggcactgccccgagctggccgagatgagccgcgtgtccatccggatcctggacgagctcgtgctgccgttccaggagctgcagatcgacgacaacgagtacgcctacctcaaggccatcatcttcttcgaccccgacgccaagggcctgagcgaccccgggaagatcaagcgcctgcgcgcccaggtccaggtgagcctcgaggactacatcaacgaccggcagtacgactcccgcggccggttcggggagctgctgctcctgctgcccacgctccagagcatcacctggcagatgatcgagcagatccagttcatcaagctgttcggcatggcgaagatcgacaacctgctccaggagatgctgctgggcggggccccgagcgacgcgccccacgcccaccaccccctccacccccacctgatgcaggagcacatgggcaccaacgtgatcgtcgccaacaccatgccgacgcacctgtccaacgggcagatgtgcgagtggccccgcccccggggccaggccgccgcccccgaggccccgcagcccgcgccgcccgggggctccggcagcgagccctacaagctgctccccggggccgtggccaccatcgtgcggcccctggaggccatcccccagccgacgatcaccaagcaggaggtcatctgaggactagtccctgttcccagagcccacttttttttctttttttgaaataaaatagcctgtctttcagatctcaaaggctcttttcagagccaccaaaaaaaaaaaaaaaaaaaaaaaaaaaaaaaaaaaaaaaaaaaaaaaaaaaaaaaaaaaaaaaaaaaaaaaaaaaaaaaaaaaaaaaaaaaaaaaaaaaaa

SEQ ID NO: 2950 - RNA, 1697 nt, synthetic construct
  misc_feature 1..1697: note = mRNA a-1 (hSL-A100) (opt1) from Homo sapiens__NP_000448.3__HNF4A(1-474)(S87A_K106R_K108R_K126R_K 127R_S142A_S143A_S148A_T166A_S167A_K300R_K307R_K309R_S313A_ S378A_T429A_T432A_S436A_K458R_S461E)
  source 1..1697: mol_type = other RNA
aggagagtcccgcagtcggcgtccagcggctctgcttgttcgtgtgtgtgtcgttgcaggccttattcaagcttaccatgcgcctgagcaagaccctcgtggacatggacatggccgactactccgccgcgctggaccccgcctacaccacgctggagttcgagaacgtccaggtgctcaccatgggcaacgacaccagcccgtccgaggggaccaacctgaacgcccccaacagcctgggcgtgtccgccctctgcgccatctgcggggaccgggcgacgggcaagcactacggggccagctcctgcgacggctgcaagggcttcttccgccgggcggtccgcaagaaccacatgtactcctgccggttcagccgccagtgcgtggtggaccgcgaccggcggaaccagtgccgctactgccggctgaagaagtgcttccgcgccgggatgcgccgggaggccgtccagaacgagcgggaccgcatctccacccggcgcgccgcctacgaggacagcgccctgcccagcatcaacgcgctcctgcaggccgaggtgctgtcccggcagatcgccgcgcccgtgtccggcatcaacggggacatccgcgccaagaagatcgccagcatcgccgacgtctgcgagagcatgaaggagcagctcctggtgctggtggagtgggcgaagtacatcccggccttctgcgagctccccctggacgaccaggtcgccctgctccgggcccacgccggcgagcacctcctgctgggggcgaccaagcgctccatggtgttcaaggacgtgctgctgctcggcaacgactacatcgtcccccggcactgccccgagctggccgagatgagccgcgtgtccatccggatcctggacgagctcgtgctgccgttccaggagctgcagatcgacgacaacgagtacgcctacctcaaggccatcatcttcttcgaccccgacgcccgcggcctgagcgaccccgggcggatccgccgcctgcgcgcccaggtccaggtgagcctcgaggactacatcaacgaccggcagtacgactcccgcggccggttcggggagctgctgctcctgctgcccacgctccagagcatcacctggcagatgatcgagcagatccagttcatcaagctgttcggcatggcgaagatcgacaacctgctccaggagatgctgctgggcggggccccgagcgacgcgccccacgcccaccaccccctccacccccacctgatgcaggagcacatgggcaccaacgtgatcgtcgccaacaccatgccgacgcacctgtccaacgggcagatgtgcgagtggccccgcccccggggccaggccgccgcccccgaggccccgcagcccgcgccgcccgggggctccggcagcgagccctacaagctgctccccggggccgtggccaccatcgtgcggcccctggaggccatcccccagccgacgatcaccaagcaggaggtcatctgaggactagtccctgttcccagagcccacttttttttctttttttgaaataaaatagcctgtctttcagatctcaaaggctcttttcagagccaccaaaaaaaaaaaaaaaaaaaaaaaaaaaaaaaaaaaaaaaaaaaaaaaaaaaaaaaaaaaaaaaaaaaaaaaaaaaaaaaaaaaaaaaaaaaaaaaaaaaaa

SEQ ID NO: 2951 - RNA, 1697 nt, synthetic construct
  misc_feature 1..1697: note = mRNA a-1 (hSL-A100) (opt1) from Homo sapiens__NP_000448.3__HNF4A(1-474)(S87A_K106R_K108R_K126R_K 127R_S142A_S143A_S148A_T166A_S167A_S313A_S378A_T429A_T432A_ S436A_K447R_K458R_S461E_K470R)
  source 1..1697: mol_type = other RNA
aggagagtcccgcagtcggcgtccagcggctctgcttgttcgtgtgtgtgtcgttgcaggccttattcaagcttaccatgcgcctgagcaagaccctcgtggacatggacatggccgactactccgccgcgctggaccccgcctacaccacgctggagttcgagaacgtccaggtgctcaccatgggcaacgacaccagcccgtccgaggggaccaacctgaacgcccccaacagcctgggcgtgtccgccctctgcgccatctgcggggaccgggcgacgggcaagcactacggggccagctcctgcgacggctgcaagggcttcttccgccgggcggtccgcaagaaccacatgtactcctgccggttcagccgccagtgcgtggtggaccgcgaccggcggaaccagtgccgctactgccggctgaagaagtgcttccgcgccgggatgcgccgggaggccgtccagaacgagcgggaccgcatctccacccggcgcgccgcctacgaggacagcgccctgcccagcatcaacgcgctcctgcaggccgaggtgctgtcccggcagatcgccgcgcccgtgtccggcatcaacggggacatccgcgccaagaagatcgccagcatcgccgacgtctgcgagagcatgaaggagcagctcctggtgctggtggagtgggcgaagtacatcccggccttctgcgagctccccctggacgaccaggtcgccctgctccgggcccacgccggcgagcacctcctgctgggggcgaccaagcgctccatggtgttcaaggacgtgctgctgctcggcaacgactacatcgtcccccggcactgccccgagctggccgagatgagccgcgtgtccatccggatcctggacgagctcgtgctgccgttccaggagctgcagatcgacgacaacgagtacgcctacctcaaggccatcatcttcttcgaccccgacgccaagggcctgagcgaccccgggaagatcaagcgcctgcgcgcccaggtccaggtgagcctcgaggactacatcaacgaccggcagtacgactcccgcggccggttcggggagctgctgctcctgctgcccacgctccagagcatcacctggcagatgatcgagcagatccagttcatcaagctgttcggcatggcgaagatcgacaacctgctccaggagatgctgctgggcggggccccgagcgacgcgccccacgcccaccaccccctccacccccacctgatgcaggagcacatgggcaccaacgtgatcgtcgccaacaccatgccgacgcacctgtccaacgggcagatgtgcgagtggccccgcccccggggccaggccgccgcccccgaggccccgcagcccgcgccgcccgggggctccggcagcgagccctaccgcctgctccccggggccgtggccaccatcgtgcggcccctggaggccatcccccagccgacgatcacccggcaggaggtcatctgaggactagtccctgttcccagagcccacttttttttctttttttgaaataaaatagcctgtctttcagatctcaaaggctcttttcagagccaccaaaaaaaaaaaaaaaaaaaaaaaaaaaaaaaaaaaaaaaaaaaaaaaaaaaaaaaaaaaaaaaaaaaaaaaaaaaaaaaaaaaaaaaaaaaaaaaaaaaaa

SEQ ID NO: 2952 - RNA, 1697 nt, synthetic construct
  misc_feature 1..1697: note = mRNA a-1 (hSL-A100) (opt1) from Homo sapiens__NP_000448.3__HNF4A(1-474)(S87A_K106R_K108R_K126R_K 127R_S142A_S143A_S148A_T166A_S167A_K179R_K180R_K234R_K300R_ K307R_K309R_S313A_S378A_T429A_T432A_S436A_K447R_K458R_S461E _K470R)
  source 1..1697: mol_type = other RNA
aggagagtcccgcagtcggcgtccagcggctctgcttgttcgtgtgtgtgtcgttgcaggccttattcaagcttaccatgcgcctgagcaagaccctcgtggacatggacatggccgactactccgccgcgctggaccccgcctacaccacgctggagttcgagaacgtccaggtgctcaccatgggcaacgacaccagcccgtccgaggggaccaacctgaacgcccccaacagcctgggcgtgtccgccctctgcgccatctgcggggaccgggcgacgggcaagcactacggggccagctcctgcgacggctgcaagggcttcttccgccgggcggtccgcaagaaccacatgtactcctgccggttcagccgccagtgcgtggtggaccgcgaccggcggaaccagtgccgctactgccggctgaagaagtgcttccgcgccgggatgcgccgggaggccgtccagaacgagcgggaccgcatctccacccggcgcgccgcctacgaggacagcgccctgcccagcatcaacgcgctcctgcaggccgaggtgctgtcccggcagatcgccgcgcccgtgtccggcatcaacggggacatccgcgcccgccggatcgccagcatcgccgacgtctgcgagagcatgaaggagcagctcctggtgctggtggagtgggcgaagtacatcccggccttctgcgagctccccctggacgaccaggtcgccctgctccgggcccacgccggcgagcacctcctgctgggggcgacccggcgctccatggtgttcaaggacgtgctgctgctcggcaacgactacatcgtcccccggcactgccccgagctggccgagatgagccgcgtgtccatccggatcctggacgagctcgtgctgccgttccaggagctgcagatcgacgacaacgagtacgcctacctcaaggccatcatcttcttcgaccccgacgcccgcggcctgagcgaccccgggcggatccgccgcctgcgcgcccaggtccaggtgagcctcgaggactacatcaacgaccggcagtacgactcccgcggccggttcggggagctgctgctcctgctgcccacgctccagagcatcacctggcagatgatcgagcagatccagttcatcaagctgttcggcatggcgaagatcgacaacctgctccaggagatgctgctgggcggggccccgagcgacgcgccccacgcccaccaccccctccacccccacctgatgcaggagcacatgggcaccaacgtgatcgtcgccaacaccatgccgacgcacctgtccaacgggcagatgtgcgagtggccccgcccccggggccaggccgccgcccccgaggccccgcagcccgcgccgcccgggggctccggcagcgagccctaccgcctgctccccggggccgtggccaccatcgtgcggcccctggaggccatcccccagccgacgatcacccggcaggaggtcatctgaggactagtccctgttcccagagcccacttttttttctttttttgaaataaaatagcctgtctttcagatctcaaaggctcttttcagagccaccaaaaaaaaaaaaaaaaaaaaaaaaaaaaaaaaaaaaaaaaaaaaaaaaaaaaaaaaaaaaaaaaaaaaaaaaaaaaaaaaaaaaaaaaaaaaaaaaaaaaa

SEQ ID NO: 2953 - RNA, 1697 nt, synthetic construct
  misc_feature 1..1697: note = mRNA a-1 (hSL-A100) (opt1) from Homo sapiens__NP_000448.3__HNF4A(1-474)(S87A_S95A_S99A_K106R_K10 8R_K126R_K127R_S142A_S143A_S148A_T166A_S167A_S313A_S378A_T4 29A_T432A_S436A_K458R_S461E)
  source 1..1697: mol_type = other RNA
aggagagtcccgcagtcggcgtccagcggctctgcttgttcgtgtgtgtgtcgttgcaggccttattcaagcttaccatgcgcctgagcaagaccctcgtggacatggacatggccgactactccgccgcgctggaccccgcctacaccacgctggagttcgagaacgtccaggtgctcaccatgggcaacgacaccagcccgtccgaggggaccaacctgaacgcccccaacagcctgggcgtgtccgccctctgcgccatctgcggggaccgggcgacgggcaagcactacggggccagctcctgcgacggctgcaagggcttcttccgccgggcggtccgcaagaaccacatgtacgcctgccggttcgcccgccagtgcgtggtggaccgcgaccggcggaaccagtgccgctactgccggctgaagaagtgcttccgcgccgggatgcgccgggaggccgtccagaacgagcgggaccgcatctccacccggcgcgccgcctacgaggacagcgccctgcccagcatcaacgcgctcctgcaggccgaggtgctgtcccggcagatcgccgcgcccgtgtccggcatcaacggggacatccgcgccaagaagatcgccagcatcgccgacgtctgcgagagcatgaaggagcagctcctggtgctggtggagtgggcgaagtacatcccggccttctgcgagctccccctggacgaccaggtcgccctgctccgggcccacgccggcgagcacctcctgctgggggcgaccaagcgctccatggtgttcaaggacgtgctgctgctcggcaacgactacatcgtcccccggcactgccccgagctggccgagatgagccgcgtgtccatccggatcctggacgagctcgtgctgccgttccaggagctgcagatcgacgacaacgagtacgcctacctcaaggccatcatcttcttcgaccccgacgccaagggcctgagcgaccccgggaagatcaagcgcctgcgcgcccaggtccaggtgagcctcgaggactacatcaacgaccggcagtacgactcccgcggccggttcggggagctgctgctcctgctgcccacgctccagagcatcacctggcagatgatcgagcagatccagttcatcaagctgttcggcatggcgaagatcgacaacctgctccaggagatgctgctgggcggggccccgagcgacgcgccccacgcccaccaccccctccacccccacctgatgcaggagcacatgggcaccaacgtgatcgtcgccaacaccatgccgacgcacctgtccaacgggcagatgtgcgagtggccccgcccccggggccaggccgccgcccccgaggccccgcagcccgcgccgcccgggggctccggcagcgagccctacaagctgctccccggggccgtggccaccatcgtgcggcccctggaggccatcccccagccgacgatcaccaagcaggaggtcatctgaggactagtccctgttcccagagcccacttttttttctttttttgaaataaaatagcctgtctttcagatctcaaaggctcttttcagagccaccaaaaaaaaaaaaaaaaaaaaaaaaaaaaaaaaaaaaaaaaaaaaaaaaaaaaaaaaaaaaaaaaaaaaaaaaaaaaaaaaaaaaaaaaaaaaaaaaaaaaa

SEQ ID NO: 2954 - RNA, 1697 nt, synthetic construct
  misc_feature 1..1697: note = mRNA a-1 (hSL-A100) (opt1) from Homo sapiens__NP_000448.3__HNF4A(1-474)(S87A_K106R_K108R_K126R_K 127R_S138A_T139A_S142A_S143A_S148A_T166A_S167A_S313A_S378A_ T429A_T432A_S436A_K458R_S461E)
  source 1..1697: mol_type = other RNA
aggagagtcccgcagtcggcgtccagcggctctgcttgttcgtgtgtgtgtcgttgcaggccttattcaagcttaccatgcgcctgagcaagaccctcgtggacatggacatggccgactactccgccgcgctggaccccgcctacaccacgctggagttcgagaacgtccaggtgctcaccatgggcaacgacaccagcccgtccgaggggaccaacctgaacgcccccaacagcctgggcgtgtccgccctctgcgccatctgcggggaccgggcgacgggcaagcactacggggccagctcctgcgacggctgcaagggcttcttccgccgggcggtccgcaagaaccacatgtactcctgccggttcagccgccagtgcgtggtggaccgcgaccggcggaaccagtgccgctactgccggctgaagaagtgcttccgcgccgggatgcgccgggaggccgtccagaacgagcgggaccgcatcgccgcccggcgcgccgcctacgaggacagcgccctgcccagcatcaacgcgctcctgcaggccgaggtgctgtcccggcagatcgccgcgcccgtgtccggcatcaacggggacatccgcgccaagaagatcgccagcatcgccgacgtctgcgagagcatgaaggagcagctcctggtgctggtggagtgggcgaagtacatcccggccttctgcgagctccccctggacgaccaggtcgccctgctccgggcccacgccggcgagcacctcctgctgggggcgaccaagcgctccatggtgttcaaggacgtgctgctgctcggcaacgactacatcgtcccccggcactgccccgagctggccgagatgagccgcgtgtccatccggatcctggacgagctcgtgctgccgttccaggagctgcagatcgacgacaacgagtacgcctacctcaaggccatcatcttcttcgaccccgacgccaagggcctgagcgaccccgggaagatcaagcgcctgcgcgcccaggtccaggtgagcctcgaggactacatcaacgaccggcagtacgactcccgcggccggttcggggagctgctgctcctgctgcccacgctccagagcatcacctggcagatgatcgagcagatccagttcatcaagctgttcggcatggcgaagatcgacaacctgctccaggagatgctgctgggcggggccccgagcgacgcgccccacgcccaccaccccctccacccccacctgatgcaggagcacatgggcaccaacgtgatcgtcgccaacaccatgccgacgcacctgtccaacgggcagatgtgcgagtggccccgcccccggggccaggccgccgcccccgaggccccgcagcccgcgccgcccgggggctccggcagcgagccctacaagctgctccccggggccgtggccaccatcgtgcggcccctggaggccatcccccagccgacgatcaccaagcaggaggtcatctgaggactagtccctgttcccagagcccacttttttttctttttttgaaataaaatagcctgtctttcagatctcaaaggctcttttcagagccaccaaaaaaaaaaaaaaaaaaaaaaaaaaaaaaaaaaaaaaaaaaaaaaaaaaaaaaaaaaaaaaaaaaaaaaaaaaaaaaaaaaaaaaaaaaaaaaaaaaaaa

SEQ ID NO: 2955 - RNA, 1697 nt, synthetic construct
  misc_feature 1..1697: note = mRNA a-1 (hSL-A100) (opt1) from Homo sapiens__NP_000448.3__HNF4A(1-474)(S87A_S95A_S99A_K106R_K10 8R_K126R_K127R_S138A_T139A_S142A_S143A_S148A_T166A_S167A_S3 13A_S378A_T429A_T432A_S436A_K458R_S461E)
  source 1..1697: mol_type = other RNA
aggagagtcccgcagtcggcgtccagcggctctgcttgttcgtgtgtgtgtcgttgcaggccttattcaagcttaccatgcgcctgagcaagaccctcgtggacatggacatggccgactactccgccgcgctggaccccgcctacaccacgctggagttcgagaacgtccaggtgctcaccatgggcaacgacaccagcccgtccgaggggaccaacctgaacgcccccaacagcctgggcgtgtccgccctctgcgccatctgcggggaccgggcgacgggcaagcactacggggccagctcctgcgacggctgcaagggcttcttccgccgggcggtccgcaagaaccacatgtacgcctgccggttcgcccgccagtgcgtggtggaccgcgaccggcggaaccagtgccgctactgccggctgaagaagtgcttccgcgccgggatgcgccgggaggccgtccagaacgagcgggaccgcatcgccgcccggcgcgccgcctacgaggacagcgccctgcccagcatcaacgcgctcctgcaggccgaggtgctgtcccggcagatcgccgcgcccgtgtccggcatcaacggggacatccgcgccaagaagatcgccagcatcgccgacgtctgcgagagcatgaaggagcagctcctggtgctggtggagtgggcgaagtacatcccggccttctgcgagctccccctggacgaccaggtcgccctgctccgggcccacgccggcgagcacctcctgctgggggcgaccaagcgctccatggtgttcaaggacgtgctgctgctcggcaacgactacatcgtcccccggcactgccccgagctggccgagatgagccgcgtgtccatccggatcctggacgagctcgtgctgccgttccaggagctgcagatcgacgacaacgagtacgcctacctcaaggccatcatcttcttcgaccccgacgccaagggcctgagcgaccccgggaagatcaagcgcctgcgcgcccaggtccaggtgagcctcgaggactacatcaacgaccggcagtacgactcccgcggccggttcggggagctgctgctcctgctgcccacgctccagagcatcacctggcagatgatcgagcagatccagttcatcaagctgttcggcatggcgaagatcgacaacctgctccaggagatgctgctgggcggggccccgagcgacgcgccccacgcccaccaccccctccacccccacctgatgcaggagcacatgggcaccaacgtgatcgtcgccaacaccatgccgacgcacctgtccaacgggcagatgtgcgagtggccccgcccccggggccaggccgccgcccccgaggccccgcagcccgcgccgcccgggggctccggcagcgagccctacaagctgctccccggggccgtggccaccatcgtgcggcccctggaggccatcccccagccgacgatcaccaagcaggaggtcatctgaggactagtccctgttcccagagcccacttttttttctttttttgaaataaaatagcctgtctttcagatctcaaaggctcttttcagagccaccaaaaaaaaaaaaaaaaaaaaaaaaaaaaaaaaaaaaaaaaaaaaaaaaaaaaaaaaaaaaaaaaaaaaaaaaaaaaaaaaaaaaaaaaaaaaaaaaaaaaa

SEQ ID NO: 2956 - RNA, 1697 nt, synthetic construct
  misc_feature 1..1697: note = mRNA a-1 (hSL-A100) (opt1) from Homo sapiens__NP_000448.3__HNF4A(1-474) R9823, R10103
  source 1..1697: mol_type = other RNA
aggagagtcccgcagtcggcgtccagcggctctgcttgttcgtgtgtgtgtcgttgcaggccttattcaagcttaccatgcgcctgagcaagaccctcgtggacatggacatggccgactactccgccgcgctggaccccgcctacaccacgctggagttcgagaacgtccaggtgctcaccatgggcaacgacaccagcccgtccgaggggaccaacctgaacgcccccaacagcctgggcgtgtccgccctctgcgccatctgcggggaccgggcgacgggcaagcactacggggccagctcctgcgacggctgcaagggcttcttccgccggagcgtccgcaagaaccacatgtactcctgccggttcagccgccagtgcgtggtggacaaggacaagcggaaccagtgccgctactgccggctgaagaagtgcttccgcgccgggatgaagaaggaggccgtccagaacgagcgggaccgcatctccacccggcgcagctcctacgaggacagctccctgcccagcatcaacgcgctcctgcaggccgaggtgctgtcccggcagatcaccagccccgtgtccggcatcaacggggacatccgcgccaagaagatcgccagcatcgccgacgtctgcgagagcatgaaggagcagctcctggtgctggtggagtgggcgaagtacatcccggccttctgcgagctccccctggacgaccaggtcgccctgctccgggcccacgccggcgagcacctcctgctgggggcgaccaagcgctccatggtgttcaaggacgtgctgctgctcggcaacgactacatcgtcccccggcactgccccgagctggccgagatgagccgcgtgtccatccggatcctggacgagctcgtgctgccgttccaggagctgcagatcgacgacaacgagtacgcctacctcaaggccatcatcttcttcgaccccgacgccaagggcctgagcgaccccgggaagatcaagcgcctgcgctcccaggtccaggtgagcctcgaggactacatcaacgaccggcagtacgactcccgcggccggttcggggagctgctgctcctgctgcccacgctccagagcatcacctggcagatgatcgagcagatccagttcatcaagctgttcggcatggcgaagatcgacaacctgctccaggagatgctgctgggcgggtccccgagcgacgcgccccacgcccaccaccccctccacccccacctgatgcaggagcacatgggcaccaacgtgatcgtcgccaacaccatgccgacgcacctgtccaacgggcagatgtgcgagtggccccgcccccggggccaggccgccacccccgagaccccgcagcccagcccgcccgggggctccggcagcgagccctacaagctcctgcccggggccgtggccaccatcgtgaagcccctgtccgccatcccccagccgacgatcaccaagcaggaggtcatctgaggactagtccctgttcccagagcccacttttttttctttttttgaaataaaatagcctgtctttcagatctcaaaggctcttttcagagccaccaaaaaaaaaaaaaaaaaaaaaaaaaaaaaaaaaaaaaaaaaaaaaaaaaaaaaaaaaaaaaaaaaaaaaaaaaaaaaaaaaaaaaaaaaaaaaaaaaaaaa

SEQ ID NO: 2957 - RNA, 1697 nt, synthetic construct
  misc_feature 1..1697: note = mRNA a-1 (hSL-A100) (opt1) from Homo sapiens__NP_000448.3__HNF4A(1-474)(S313A)
  source 1..1697: mol_type = other RNA
aggagagtcccgcagtcggcgtccagcggctctgcttgttcgtgtgtgtgtcgttgcaggccttattcaagcttaccatgcgcctgagcaagaccctcgtggacatggacatggccgactactccgccgcgctggaccccgcctacaccacgctggagttcgagaacgtccaggtgctcaccatgggcaacgacaccagcccgtccgaggggaccaacctgaacgcccccaacagcctgggcgtgtccgccctctgcgccatctgcggggaccgggcgacgggcaagcactacggggccagctcctgcgacggctgcaagggcttcttccgccggagcgtccgcaagaaccacatgtactcctgccggttcagccgccagtgcgtggtggacaaggacaagcggaaccagtgccgctactgccggctgaagaagtgcttccgcgccgggatgaagaaggaggccgtccagaacgagcgggaccgcatctccacccggcgcagctcctacgaggacagctccctgcccagcatcaacgcgctcctgcaggccgaggtgctgtcccggcagatcaccagccccgtgtccggcatcaacggggacatccgcgccaagaagatcgccagcatcgccgacgtctgcgagagcatgaaggagcagctcctggtgctggtggagtgggcgaagtacatcccggccttctgcgagctccccctggacgaccaggtcgccctgctccgggcccacgccggcgagcacctcctgctgggggcgaccaagcgctccatggtgttcaaggacgtgctgctgctcggcaacgactacatcgtcccccggcactgccccgagctggccgagatgagccgcgtgtccatccggatcctggacgagctcgtgctgccgttccaggagctgcagatcgacgacaacgagtacgcctacctcaaggccatcatcttcttcgaccccgacgccaagggcctgagcgaccccgggaagatcaagcgcctgcgcgcgcaggtccaggtgtccctcgaggactacatcaacgaccggcagtacgacagccgcggccggttcggggagctgctgctcctgctgcccacgctccagtccatcacctggcagatgatcgagcagatccagttcatcaagctgttcggcatggccaagatcgacaacctgctccaggagatgctgctgggcgggagcccgtccgacgcgccccacgcccaccaccccctccacccccacctgatgcaggagcacatgggcaccaacgtgatcgtcgccaacaccatgccgacgcacctgagcaacgggcagatgtgcgagtggccccgcccccggggccaggccgccacccccgagaccccgcagccctccccgcccgggggcagcggctccgagccctacaagctgctccccggggccgtggccaccatcgtgaagcccctgagcgcgatcccccagccgacgatcaccaagcaggaggtcatctgaggactagtccctgttcccagagcccacttttttttctttttttgaaataaaatagcctgtctttcagatctcaaaggctcttttcagagccaccaaaaaaaaaaaaaaaaaaaaaaaaaaaaaaaaaaaaaaaaaaaaaaaaaaaaaaaaaaaaaaaaaaaaaaaaaaaaaaaaaaaaaaaaaaaaaaaaaaaaa

SEQ ID NO: 2958 - RNA, 1697 nt, synthetic construct
  misc_feature 1..1697: note = mRNA a-1 (hSL-A100) (opt1) from Homo sapiens__NP_000448.3__HNF4A(1-474)(S313E)
  source 1..1697: mol_type = other RNA
aggagagtcccgcagtcggcgtccagcggctctgcttgttcgtgtgtgtgtcgttgcaggccttattcaagcttaccatgcgcctgagcaagaccctcgtggacatggacatggccgactactccgccgcgctggaccccgcctacaccacgctggagttcgagaacgtccaggtgctcaccatgggcaacgacaccagcccgtccgaggggaccaacctgaacgcccccaacagcctgggcgtgtccgccctctgcgccatctgcggggaccgggcgacgggcaagcactacggggccagctcctgcgacggctgcaagggcttcttccgccggagcgtccgcaagaaccacatgtactcctgccggttcagccgccagtgcgtggtggacaaggacaagcggaaccagtgccgctactgccggctgaagaagtgcttccgcgccgggatgaagaaggaggccgtccagaacgagcgggaccgcatctccacccggcgcagctcctacgaggacagctccctgcccagcatcaacgcgctcctgcaggccgaggtgctgtcccggcagatcaccagccccgtgtccggcatcaacggggacatccgcgccaagaagatcgccagcatcgccgacgtctgcgagagcatgaaggagcagctcctggtgctggtggagtgggcgaagtacatcccggccttctgcgagctccccctggacgaccaggtcgccctgctccgggcccacgccggcgagcacctcctgctgggggcgaccaagcgctccatggtgttcaaggacgtgctgctgctcggcaacgactacatcgtcccccggcactgccccgagctggccgagatgagccgcgtgtccatccggatcctggacgagctcgtgctgccgttccaggagctgcagatcgacgacaacgagtacgcctacctcaaggccatcatcttcttcgaccccgacgccaagggcctgagcgaccccgggaagatcaagcgcctgcgcgagcaggtccaggtgtccctcgaggactacatcaacgaccggcagtacgacagccgcggccggttcggggagctgctgctcctgctgcccacgctccagtccatcacctggcagatgatcgagcagatccagttcatcaagctgttcggcatggcgaagatcgacaacctgctccaggagatgctgctgggcgggagcccgtccgacgcgccccacgcccaccaccccctccacccccacctgatgcaggagcacatgggcaccaacgtgatcgtcgccaacaccatgccgacgcacctgagcaacgggcagatgtgcgagtggccccgcccccggggccaggccgccacccccgagaccccgcagccctccccgcccgggggcagcggctccgagccctacaagctgctccccggggccgtggccaccatcgtgaagcccctgagcgccatcccccagccgacgatcaccaagcaggaggtcatctgaggactagtccctgttcccagagcccacttttttttctttttttgaaataaaatagcctgtctttcagatctcaaaggctcttttcagagccaccaaaaaaaaaaaaaaaaaaaaaaaaaaaaaaaaaaaaaaaaaaaaaaaaaaaaaaaaaaaaaaaaaaaaaaaaaaaaaaaaaaaaaaaaaaaaaaaaaaaaa

SEQ ID NO: 2959 - RNA, 1697 nt, synthetic construct
  misc_feature 1..1697: note = mRNA a-1 (hSL-A100) (opt1) from Homo sapiens__NP_000448.3__HNF4A(1-474)(S142A_S143A)
  source 1..1697: mol_type = other RNA
aggagagtcccgcagtcggcgtccagcggctctgcttgttcgtgtgtgtgtcgttgcaggccttattcaagcttaccatgcgcctgagcaagaccctcgtggacatggacatggccgactactccgccgcgctggaccccgcctacaccacgctggagttcgagaacgtccaggtgctcaccatgggcaacgacaccagcccgtccgaggggaccaacctgaacgcccccaacagcctgggcgtgtccgccctctgcgccatctgcggggaccgggcgacgggcaagcactacggggccagctcctgcgacggctgcaagggcttcttccgccggagcgtccgcaagaaccacatgtactcctgccggttcagccgccagtgcgtggtggacaaggacaagcggaaccagtgccgctactgccggctgaagaagtgcttccgcgccgggatgaagaaggaggccgtccagaacgagcgggaccgcatctccacccggcgcgcggcctacgaggacagctccctgcccagcatcaacgccctcctgcaggccgaggtgctgtcccggcagatcaccagccccgtgtccggcatcaacggggacatccgcgccaagaagatcgcgagcatcgccgacgtctgcgagtccatgaaggagcagctcctggtgctggtggagtgggccaagtacatcccggccttctgcgagctccccctggacgaccaggtcgccctgctccgggcgcacgccggcgagcacctcctgctgggggccaccaagcgcagcatggtgttcaaggacgtgctgctgctcggcaacgactacatcgtcccccggcactgccccgagctggccgagatgagccgcgtgtccatccggatcctggacgagctcgtgctgccgttccaggagctgcagatcgacgacaacgagtacgcctacctcaaggcgatcatcttcttcgaccccgacgccaagggcctgagcgaccccgggaagatcaagcgcctgcgctcccaggtccaggtgagcctcgaggactacatcaacgaccggcagtacgactcccgcggccggttcggggagctgctgctcctgctgcccacgctccagagcatcacctggcagatgatcgagcagatccagttcatcaagctgttcggcatggccaagatcgacaacctgctccaggagatgctgctgggcgggtccccgagcgacgcgccccacgcccaccaccccctccacccccacctgatgcaggagcacatgggcaccaacgtgatcgtcgccaacaccatgccgacgcacctgtccaacgggcagatgtgcgagtggccccgcccccggggccaggccgccacccccgagaccccgcagcccagcccgcccgggggctccggcagcgagccctacaagctgctccccggggccgtggcgaccatcgtgaagcccctgtccgccatcccccagccgacgatcaccaagcaggaggtcatctgaggactagtccctgttcccagagcccacttttttttctttttttgaaataaaatagcctgtctttcagatctcaaaggctcttttcagagccaccaaaaaaaaaaaaaaaaaaaaaaaaaaaaaaaaaaaaaaaaaaaaaaaaaaaaaaaaaaaaaaaaaaaaaaaaaaaaaaaaaaaaaaaaaaaaaaaaaaaaa

SEQ ID NO: 2960 - RNA, 1697 nt, synthetic construct
  misc_feature 1..1697: note = mRNA a-1 (hSL-A100) (opt1) from Homo sapiens__NP_000448.3__HNF4A(1-474)(S142E_S143E)
  source 1..1697: mol_type = other RNA
aggagagtcccgcagtcggcgtccagcggctctgcttgttcgtgtgtgtgtcgttgcaggccttattcaagcttaccatgcgcctgagcaagaccctcgtggacatggacatggccgactactccgccgcgctggaccccgcctacaccacgctggagttcgagaacgtccaggtgctcaccatgggcaacgacaccagcccgtccgaggggaccaacctgaacgcccccaacagcctgggcgtgtccgccctctgcgccatctgcggggaccgggcgacgggcaagcactacggggccagctcctgcgacggctgcaagggcttcttccgccggagcgtccgcaagaaccacatgtactcctgccggttcagccgccagtgcgtggtggacaaggacaagcggaaccagtgccgctactgccggctgaagaagtgcttccgcgccgggatgaagaaggaggccgtccagaacgagcgggaccgcatctccacccggcgcgaggagtacgaggacagctccctgcccagcatcaacgcgctcctgcaggccgaggtgctgtcccggcagatcaccagccccgtgtccggcatcaacggggacatccgcgccaagaagatcgccagcatcgccgacgtctgcgagtccatgaaggagcagctcctggtgctggtggagtgggcgaagtacatcccggccttctgcgagctccccctggacgaccaggtcgccctgctccgggcccacgccggcgagcacctcctgctgggggcgaccaagcgcagcatggtgttcaaggacgtgctgctgctcggcaacgactacatcgtcccccggcactgccccgagctggccgagatgagccgcgtgtccatccggatcctggacgagctcgtgctgccgttccaggagctgcagatcgacgacaacgagtacgcctacctcaaggccatcatcttcttcgaccccgacgccaagggcctgagcgaccccgggaagatcaagcgcctgcgctcccaggtccaggtgagcctcgaggactacatcaacgaccggcagtacgactcccgcggccggttcggggagctgctgctcctgctgcccacgctccagagcatcacctggcagatgatcgagcagatccagttcatcaagctgttcggcatggcgaagatcgacaacctgctccaggagatgctgctgggcgggtccccgagcgacgcgccccacgcccaccaccccctccacccccacctgatgcaggagcacatgggcaccaacgtgatcgtcgccaacaccatgccgacgcacctgtccaacgggcagatgtgcgagtggccccgcccccggggccaggccgccacccccgagaccccgcagcccagcccgcccgggggctccggcagcgagccctacaagctgctccccggggccgtggccaccatcgtgaagcccctgtccgccatcccccagccgacgatcaccaagcaggaggtcatctgaggactagtccctgttcccagagcccacttttttttctttttttgaaataaaatagcctgtctttcagatctcaaaggctcttttcagagccaccaaaaaaaaaaaaaaaaaaaaaaaaaaaaaaaaaaaaaaaaaaaaaaaaaaaaaaaaaaaaaaaaaaaaaaaaaaaaaaaaaaaaaaaaaaaaaaaaaaaaa

SEQ ID NO: 2961 - RNA, 1697 nt, synthetic construct
  misc_feature 1..1697: note = mRNA a-1 (hSL-A100) (opt1) from Homo sapiens__NP_000448.3__HNF4A(1-474)(S143A)
  source 1..1697: mol_type = other RNA
aggagagtcccgcagtcggcgtccagcggctctgcttgttcgtgtgtgtgtcgttgcaggccttattcaagcttaccatgcgcctgagcaagaccctcgtggacatggacatggccgactactccgccgcgctggaccccgcctacaccacgctggagttcgagaacgtccaggtgctcaccatgggcaacgacaccagcccgtccgaggggaccaacctgaacgcccccaacagcctgggcgtgtccgccctctgcgccatctgcggggaccgggcgacgggcaagcactacggggccagctcctgcgacggctgcaagggcttcttccgccggagcgtccgcaagaaccacatgtactcctgccggttcagccgccagtgcgtggtggacaaggacaagcggaaccagtgccgctactgccggctgaagaagtgcttccgcgccgggatgaagaaggaggccgtccagaacgagcgggaccgcatctccacccggcgcagcgcgtacgaggactccagcctgccctccatcaacgccctcctgcaggccgaggtgctgagccggcagatcacctcccccgtgagcggcatcaacggggacatccgcgccaagaagatcgcctccatcgcggacgtctgcgagagcatgaaggagcagctcctggtgctggtggagtgggccaagtacatcccggccttctgcgagctccccctggacgaccaggtcgccctgctccgggcccacgcgggcgagcacctcctgctgggggccaccaagcgcagcatggtgttcaaggacgtgctgctgctcggcaacgactacatcgtcccccggcactgccccgagctggccgagatgtcccgcgtgagcatccggatcctggacgagctcgtgctgccgttccaggagctgcagatcgacgacaacgagtacgcctacctcaaggccatcatcttcttcgaccccgacgcgaagggcctgtccgaccccgggaagatcaagcgcctgcgcagccaggtccaggtgtccctcgaggactacatcaacgaccggcagtacgacagccgcggccggttcggggagctgctgctcctgctgcccacgctccagtccatcacctggcagatgatcgagcagatccagttcatcaagctgttcggcatggccaagatcgacaacctgctccaggagatgctgctgggcgggagcccgtccgacgcgccccacgcccaccaccccctccacccccacctgatgcaggagcacatgggcaccaacgtgatcgtcgccaacaccatgccgacgcacctgagcaacgggcagatgtgcgagtggccccgcccccggggccaggccgccacccccgagaccccgcagccctccccgcccgggggcagcggctccgagccctacaagctgctccccggggccgtggccaccatcgtgaagcccctgagcgcgatcccccagccgacgatcaccaagcaggaggtcatctgaggactagtccctgttcccagagcccacttttttttctttttttgaaataaaatagcctgtctttcagatctcaaaggctcttttcagagccaccaaaaaaaaaaaaaaaaaaaaaaaaaaaaaaaaaaaaaaaaaaaaaaaaaaaaaaaaaaaaaaaaaaaaaaaaaaaaaaaaaaaaaaaaaaaaaaaaaaaaa

SEQ ID NO: 2962 - RNA, 1697 nt, synthetic construct
  misc_feature 1..1697: note = mRNA a-1 (hSL-A100) (opt1) from Homo sapiens__NP_000448.3__HNF4A(1-474)(T166A)
  source 1..1697: mol_type = other RNA
aggagagtcccgcagtcggcgtccagcggctctgcttgttcgtgtgtgtgtcgttgcaggccttattcaagcttaccatgcgcctgagcaagaccctcgtggacatggacatggccgactactccgccgcgctggaccccgcctacaccacgctggagttcgagaacgtccaggtgctcaccatgggcaacgacaccagcccgtccgaggggaccaacctgaacgcccccaacagcctgggcgtgtccgccctctgcgccatctgcggggaccgggcgacgggcaagcactacggggccagctcctgcgacggctgcaagggcttcttccgccggagcgtccgcaagaaccacatgtactcctgccggttcagccgccagtgcgtggtggacaaggacaagcggaaccagtgccgctactgccggctgaagaagtgcttccgcgccgggatgaagaaggaggccgtccagaacgagcgggaccgcatctccacccggcgcagctcctacgaggacagctccctgcccagcatcaacgcgctcctgcaggccgaggtgctgtcccggcagatcgccagccccgtgtccggcatcaacggggacatccgcgccaagaagatcgccagcatcgcggacgtctgcgagagcatgaaggagcagctcctggtgctggtggagtgggccaagtacatcccggccttctgcgagctccccctggacgaccaggtcgccctgctccgggcccacgcgggcgagcacctcctgctgggggccaccaagcgctccatggtgttcaaggacgtgctgctgctcggcaacgactacatcgtcccccggcactgccccgagctggccgagatgagccgcgtgtccatccggatcctggacgagctcgtgctgccgttccaggagctgcagatcgacgacaacgagtacgcctacctcaaggccatcatcttcttcgaccccgacgcgaagggcctgagcgaccccgggaagatcaagcgcctgcgctcccaggtccaggtgagcctcgaggactacatcaacgaccggcagtacgactcccgcggccggttcggggagctgctgctcctgctgcccaccctccagagcatcacgtggcagatgatcgagcagatccagttcatcaagctgttcggcatggccaagatcgacaacctgctccaggagatgctgctgggcgggtccccgagcgacgcgccccacgcccaccaccccctccacccccacctgatgcaggagcacatgggcaccaacgtgatcgtcgccaacaccatgccgacccacctgtccaacgggcagatgtgcgagtggccccgcccccggggccaggccgccacgcccgagaccccgcagcccagcccgcccgggggctccggcagcgagccctacaagctgctccccggggccgtggccaccatcgtgaagcccctgtccgcgatcccccagccgaccatcacgaagcaggaggtcatctgaggactagtccctgttcccagagcccacttttttttctttttttgaaataaaatagcctgtctttcagatctcaaaggctcttttcagagccaccaaaaaaaaaaaaaaaaaaaaaaaaaaaaaaaaaaaaaaaaaaaaaaaaaaaaaaaaaaaaaaaaaaaaaaaaaaaaaaaaaaaaaaaaaaaaaaaaaaaaa

SEQ ID NO: 2963 - RNA, 1697 nt, synthetic construct
  misc_feature 1..1697: note = mRNA a-1 (hSL-A100) (opt1) from Homo sapiens__NP_000448.3__HNF4A(1-474)(S167E)
  source 1..1697: mol_type = other RNA
aggagagtcccgcagtcggcgtccagcggctctgcttgttcgtgtgtgtgtcgttgcaggccttattcaagcttaccatgcgcctgagcaagaccctcgtggacatggacatggccgactactccgccgcgctggaccccgcctacaccacgctggagttcgagaacgtccaggtgctcaccatgggcaacgacaccagcccgtccgaggggaccaacctgaacgcccccaacagcctgggcgtgtccgccctctgcgccatctgcggggaccgggcgacgggcaagcactacggggccagctcctgcgacggctgcaagggcttcttccgccggagcgtccgcaagaaccacatgtactcctgccggttcagccgccagtgcgtggtggacaaggacaagcggaaccagtgccgctactgccggctgaagaagtgcttccgcgccgggatgaagaaggaggccgtccagaacgagcgggaccgcatctccacccggcgcagctcctacgaggacagctccctgcccagcatcaacgcgctcctgcaggccgaggtgctgtcccggcagatcaccgagcccgtgagcggcatcaacggggacatccgcgccaagaagatcgcctccatcgccgacgtctgcgagagcatgaaggagcagctcctggtgctggtggagtgggcgaagtacatcccggccttctgcgagctccccctggacgaccaggtcgccctgctccgggcccacgccggcgagcacctcctgctgggggcgaccaagcgcagcatggtgttcaaggacgtgctgctgctcggcaacgactacatcgtcccccggcactgccccgagctggccgagatgtcccgcgtgagcatccggatcctggacgagctcgtgctgccgttccaggagctgcagatcgacgacaacgagtacgcctacctcaaggccatcatcttcttcgaccccgacgccaagggcctgtccgaccccgggaagatcaagcgcctgcgcagccaggtccaggtgtccctcgaggactacatcaacgaccggcagtacgacagccgcggccggttcggggagctgctgctcctgctgcccacgctccagtccatcacctggcagatgatcgagcagatccagttcatcaagctgttcggcatggcgaagatcgacaacctgctccaggagatgctgctgggcgggagcccgtccgacgcgccccacgcccaccaccccctccacccccacctgatgcaggagcacatgggcaccaacgtgatcgtcgccaacaccatgccgacgcacctgagcaacgggcagatgtgcgagtggccccgcccccggggccaggccgccacccccgagaccccgcagccctccccgcccgggggcagcggctccgagccctacaagctgctccccggggccgtggccaccatcgtgaagcccctgagcgccatcccccagccgacgatcaccaagcaggaggtcatctgaggactagtccctgttcccagagcccacttttttttctttttttgaaataaaatagcctgtctttcagatctcaaaggctcttttcagagccaccaaaaaaaaaaaaaaaaaaaaaaaaaaaaaaaaaaaaaaaaaaaaaaaaaaaaaaaaaaaaaaaaaaaaaaaaaaaaaaaaaaaaaaaaaaaaaaaaaaaaa

SEQ ID NO: 2964 - RNA, 1697 nt, synthetic construct
  misc_feature 1..1697: note = mRNA a-1 (hSL-A100) (opt1) from Homo sapiens__NP_000448.3__HNF4A(1-474)(S167A)
  source 1..1697: mol_type = other RNA
aggagagtcccgcagtcggcgtccagcggctctgcttgttcgtgtgtgtgtcgttgcaggccttattcaagcttaccatgcgcctgagcaagaccctcgtggacatggacatggccgactactccgccgcgctggaccccgcctacaccacgctggagttcgagaacgtccaggtgctcaccatgggcaacgacaccagcccgtccgaggggaccaacctgaacgcccccaacagcctgggcgtgtccgccctctgcgccatctgcggggaccgggcgacgggcaagcactacggggccagctcctgcgacggctgcaagggcttcttccgccggagcgtccgcaagaaccacatgtactcctgccggttcagccgccagtgcgtggtggacaaggacaagcggaaccagtgccgctactgccggctgaagaagtgcttccgcgccgggatgaagaaggaggccgtccagaacgagcgggaccgcatctccacccggcgcagctcctacgaggacagctccctgcccagcatcaacgcgctcctgcaggccgaggtgctgtcccggcagatcaccgcccccgtgagcggcatcaacggggacatccgcgccaagaagatcgcctccatcgcggacgtctgcgagagcatgaaggagcagctcctggtgctggtggagtgggccaagtacatcccggccttctgcgagctccccctggacgaccaggtcgccctgctccgggcccacgcgggcgagcacctcctgctgggggccaccaagcgcagcatggtgttcaaggacgtgctgctgctcggcaacgactacatcgtcccccggcactgccccgagctggccgagatgtcccgcgtgagcatccggatcctggacgagctcgtgctgccgttccaggagctgcagatcgacgacaacgagtacgcctacctcaaggccatcatcttcttcgaccccgacgcgaagggcctgtccgaccccgggaagatcaagcgcctgcgcagccaggtccaggtgtccctcgaggactacatcaacgaccggcagtacgacagccgcggccggttcggggagctgctgctcctgctgcccacgctccagtccatcacctggcagatgatcgagcagatccagttcatcaagctgttcggcatggccaagatcgacaacctgctccaggagatgctgctgggcgggagcccgtccgacgcgccccacgcccaccaccccctccacccccacctgatgcaggagcacatgggcaccaacgtgatcgtcgccaacaccatgccgacgcacctgagcaacgggcagatgtgcgagtggccccgcccccggggccaggccgccacccccgagaccccgcagccctccccgcccgggggcagcggctccgagccctacaagctgctccccggggccgtggccaccatcgtgaagcccctgagcgcgatcccccagccgacgatcaccaagcaggaggtcatctgaggactagtccctgttcccagagcccacttttttttctttttttgaaataaaatagcctgtctttcagatctcaaaggctcttttcagagccaccaaaaaaaaaaaaaaaaaaaaaaaaaaaaaaaaaaaaaaaaaaaaaaaaaaaaaaaaaaaaaaaaaaaaaaaaaaaaaaaaaaaaaaaaaaaaaaaaaaaaa

SEQ ID NO: 2965 - RNA, 1697 nt, synthetic construct
  misc_feature 1..1697: note = mRNA a-1 (hSL-A100) (opt1) from Homo sapiens__NP_000448.3__HNF4A(1-474)(S167A_S378A_T429A_T432A_ S436A)
  source 1..1697: mol_type = other RNA
aggagagtcccgcagtcggcgtccagcggctctgcttgttcgtgtgtgtgtcgttgcaggccttattcaagcttaccatgcgcctgagcaagaccctcgtggacatggacatggccgactactccgccgcgctggaccccgcctacaccacgctggagttcgagaacgtccaggtgctcaccatgggcaacgacaccagcccgtccgaggggaccaacctgaacgcccccaacagcctgggcgtgtccgccctctgcgccatctgcggggaccgggcgacgggcaagcactacggggccagctcctgcgacggctgcaagggcttcttccgccggagcgtccgcaagaaccacatgtactcctgccggttcagccgccagtgcgtggtggacaaggacaagcggaaccagtgccgctactgccggctgaagaagtgcttccgcgccgggatgaagaaggaggccgtccagaacgagcgggaccgcatctccacccggcgcagctcctacgaggacagctccctgcccagcatcaacgcgctcctgcaggccgaggtgctgtcccggcagatcaccgcccccgtgagcggcatcaacggggacatccgcgccaagaagatcgcctccatcgcggacgtctgcgagagcatgaaggagcagctcctggtgctggtggagtgggccaagtacatcccggccttctgcgagctccccctggacgaccaggtcgccctgctccgggcccacgcgggcgagcacctcctgctgggggccaccaagcgcagcatggtgttcaaggacgtgctgctgctcggcaacgactacatcgtcccccggcactgccccgagctggccgagatgtcccgcgtgagcatccggatcctggacgagctcgtgctgccgttccaggagctgcagatcgacgacaacgagtacgcctacctcaaggccatcatcttcttcgaccccgacgcgaagggcctgtccgaccccgggaagatcaagcgcctgcgcagccaggtccaggtgtccctcgaggactacatcaacgaccggcagtacgacagccgcggccggttcggggagctgctgctcctgctgcccacgctccagtccatcacctggcagatgatcgagcagatccagttcatcaagctgttcggcatggccaagatcgacaacctgctccaggagatgctgctgggcggggccccgagcgacgcgccccacgcccaccaccccctccacccccacctgatgcaggagcacatgggcaccaacgtgatcgtcgccaacaccatgccgacgcacctgtccaacgggcagatgtgcgagtggccccgcccccggggccaggccgccgcccccgaggcgccgcagcccgccccgcccgggggcagcggctccgagccctacaagctgctccccggggccgtggccaccatcgtgaagcccctgagcgccatcccccagccgaccatcaccaagcaggaggtcatctgaggactagtccctgttcccagagcccacttttttttctttttttgaaataaaatagcctgtctttcagatctcaaaggctcttttcagagccaccaaaaaaaaaaaaaaaaaaaaaaaaaaaaaaaaaaaaaaaaaaaaaaaaaaaaaaaaaaaaaaaaaaaaaaaaaaaaaaaaaaaaaaaaaaaaaaaaaaaaa

SEQ ID NO: 2966 - RNA, 1697 nt, synthetic construct
  misc_feature 1..1697: note = mRNA a-1 (hSL-A100) (opt1) from Homo sapiens__NP_000448.3__HNF4A(1-474)(S167E_S378E_T429E_T432E_ S436E)
  source 1..1697: mol_type = other RNA
aggagagtcccgcagtcggcgtccagcggctctgcttgttcgtgtgtgtgtcgttgcaggccttattcaagcttaccatgcgcctgagcaagaccctcgtggacatggacatggccgactactccgccgcgctggaccccgcctacaccacgctggagttcgagaacgtccaggtgctcaccatgggcaacgacaccagcccgtccgaggggaccaacctgaacgcccccaacagcctgggcgtgtccgccctctgcgccatctgcggggaccgggcgacgggcaagcactacggggccagctcctgcgacggctgcaagggcttcttccgccggagcgtccgcaagaaccacatgtactcctgccggttcagccgccagtgcgtggtggacaaggacaagcggaaccagtgccgctactgccggctgaagaagtgcttccgcgccgggatgaagaaggaggccgtccagaacgagcgggaccgcatctccacccggcgcagctcctacgaggacagctccctgcccagcatcaacgcgctcctgcaggccgaggtgctgtcccggcagatcaccgagcccgtgagcggcatcaacggggacatccgcgccaagaagatcgcctccatcgccgacgtctgcgagagcatgaaggagcagctcctggtgctggtggagtgggcgaagtacatcccggccttctgcgagctccccctggacgaccaggtcgccctgctccgggcccacgccggcgagcacctcctgctgggggcgaccaagcgcagcatggtgttcaaggacgtgctgctgctcggcaacgactacatcgtcccccggcactgccccgagctggccgagatgtcccgcgtgagcatccggatcctggacgagctcgtgctgccgttccaggagctgcagatcgacgacaacgagtacgcctacctcaaggccatcatcttcttcgaccccgacgccaagggcctgtccgaccccgggaagatcaagcgcctgcgcagccaggtccaggtgtccctcgaggactacatcaacgaccggcagtacgacagccgcggccggttcggggagctgctgctcctgctgcccacgctccagtccatcacctggcagatgatcgagcagatccagttcatcaagctgttcggcatggcgaagatcgacaacctgctccaggagatgctgctgggcggggagccgagcgacgcgccccacgcccaccaccccctccacccccacctgatgcaggagcacatgggcaccaacgtgatcgtcgccaacaccatgccgacgcacctgtccaacgggcagatgtgcgagtggccccgcccccggggccaggccgccgagcccgaggagccgcagcccgagccgcccgggggcagcggctccgagccctacaagctgctccccggggccgtggccaccatcgtgaagcccctgagcgccatcccccagccgaccatcaccaagcaggaggtcatctgaggactagtccctgttcccagagcccacttttttttctttttttgaaataaaatagcctgtctttcagatctcaaaggctcttttcagagccaccaaaaaaaaaaaaaaaaaaaaaaaaaaaaaaaaaaaaaaaaaaaaaaaaaaaaaaaaaaaaaaaaaaaaaaaaaaaaaaaaaaaaaaaaaaaaaaaaaaaaa

SEQ ID NO: 2967 - RNA, 1697 nt, synthetic construct
  misc_feature 1..1697: note = mRNA a-1 (hSL-A100) (opt1) from Homo sapiens__NP_000448.3__HNF4A(1-474)(S87A)
  source 1..1697: mol_type = other RNA
aggagagtcccgcagtcggcgtccagcggctctgcttgttcgtgtgtgtgtcgttgcaggccttattcaagcttaccatgcgcctgagcaagaccctcgtggacatggacatggccgactactccgccgcgctggaccccgcctacaccacgctggagttcgagaacgtccaggtgctcaccatgggcaacgacaccagcccgtccgaggggaccaacctgaacgcccccaacagcctgggcgtgtccgccctctgcgccatctgcggggaccgggcgacgggcaagcactacggggccagctcctgcgacggctgcaagggcttcttccgccgggccgtccgcaagaaccacatgtacagctgccggttctcccgccagtgcgtggtggacaaggacaagcggaaccagtgccgctactgccggctgaagaagtgcttccgcgccgggatgaagaaggaggcggtccagaacgagcgggaccgcatcagcacccggcgctccagctacgaggactccagcctgccctccatcaacgccctcctgcaggccgaggtgctgagccggcagatcacctcccccgtgagcggcatcaacggggacatccgcgccaagaagatcgcctccatcgcggacgtctgcgagagcatgaaggagcagctcctggtgctggtggagtgggccaagtacatcccggccttctgcgagctccccctggacgaccaggtcgccctgctccgggcccacgcgggcgagcacctcctgctgggggccaccaagcgcagcatggtgttcaaggacgtgctgctgctcggcaacgactacatcgtcccccggcactgccccgagctggccgagatgtcccgcgtgagcatccggatcctggacgagctcgtgctgccgttccaggagctgcagatcgacgacaacgagtacgcctacctcaaggccatcatcttcttcgaccccgacgcgaagggcctgtccgaccccgggaagatcaagcgcctgcgcagccaggtccaggtgtccctcgaggactacatcaacgaccggcagtacgacagccgcggccggttcggggagctgctgctcctgctgcccacgctccagtccatcacctggcagatgatcgagcagatccagttcatcaagctgttcggcatggccaagatcgacaacctgctccaggagatgctgctgggcgggagcccgtccgacgcgccccacgcccaccaccccctccacccccacctgatgcaggagcacatgggcaccaacgtgatcgtcgccaacaccatgccgacgcacctgagcaacgggcagatgtgcgagtggccccgcccccggggccaggccgccacccccgagaccccgcagccctccccgcccgggggcagcggctccgagccctacaagctgctccccggggccgtggccaccatcgtgaagcccctgagcgcgatcccccagccgacgatcaccaagcaggaggtcatctgaggactagtccctgttcccagagcccacttttttttctttttttgaaataaaatagcctgtctttcagatctcaaaggctcttttcagagccaccaaaaaaaaaaaaaaaaaaaaaaaaaaaaaaaaaaaaaaaaaaaaaaaaaaaaaaaaaaaaaaaaaaaaaaaaaaaaaaaaaaaaaaaaaaaaaaaaaaaaa

SEQ ID NO: 2968 - RNA, 1697 nt, synthetic construct
  misc_feature 1..1697: note = mRNA a-1 (hSL-A100) (opt1) from Homo sapiens__NP_000448.3__HNF4A(1-474)(S87E)
  source 1..1697: mol_type = other RNA
aggagagtcccgcagtcggcgtccagcggctctgcttgttcgtgtgtgtgtcgttgcaggccttattcaagcttaccatgcgcctgagcaagaccctcgtggacatggacatggccgactactccgccgcgctggaccccgcctacaccacgctggagttcgagaacgtccaggtgctcaccatgggcaacgacaccagcccgtccgaggggaccaacctgaacgcccccaacagcctgggcgtgtccgccctctgcgccatctgcggggaccgggcgacgggcaagcactacggggccagctcctgcgacggctgcaagggcttcttccgccgggaggtccgcaagaaccacatgtacagctgccggttctcccgccagtgcgtggtggacaaggacaagcggaaccagtgccgctactgccggctgaagaagtgcttccgcgccgggatgaagaaggaggccgtccagaacgagcgggaccgcatcagcacccggcgctccagctacgaggactccagcctgccctccatcaacgcgctcctgcaggccgaggtgctgagccggcagatcacctcccccgtgagcggcatcaacggggacatccgcgccaagaagatcgcctccatcgccgacgtctgcgagagcatgaaggagcagctcctggtgctggtggagtgggcgaagtacatcccggccttctgcgagctccccctggacgaccaggtcgccctgctccgggcccacgccggcgagcacctcctgctgggggcgaccaagcgcagcatggtgttcaaggacgtgctgctgctcggcaacgactacatcgtcccccggcactgccccgagctggccgagatgtcccgcgtgagcatccggatcctggacgagctcgtgctgccgttccaggagctgcagatcgacgacaacgagtacgcctacctcaaggccatcatcttcttcgaccccgacgccaagggcctgtccgaccccgggaagatcaagcgcctgcgcagccaggtccaggtgtccctcgaggactacatcaacgaccggcagtacgacagccgcggccggttcggggagctgctgctcctgctgcccacgctccagtccatcacctggcagatgatcgagcagatccagttcatcaagctgttcggcatggcgaagatcgacaacctgctccaggagatgctgctgggcgggagcccgtccgacgcgccccacgcccaccaccccctccacccccacctgatgcaggagcacatgggcaccaacgtgatcgtcgccaacaccatgccgacgcacctgagcaacgggcagatgtgcgagtggccccgcccccggggccaggccgccacccccgagaccccgcagccctccccgcccgggggcagcggctccgagccctacaagctgctccccggggccgtggccaccatcgtgaagcccctgagcgccatcccccagccgacgatcaccaagcaggaggtcatctgaggactagtccctgttcccagagcccacttttttttctttttttgaaataaaatagcctgtctttcagatctcaaaggctcttttcagagccaccaaaaaaaaaaaaaaaaaaaaaaaaaaaaaaaaaaaaaaaaaaaaaaaaaaaaaaaaaaaaaaaaaaaaaaaaaaaaaaaaaaaaaaaaaaaaaaaaaaaaa

SEQ ID NO: 2969 - RNA, 1697 nt, synthetic construct
  misc_feature 1..1697: note = mRNA a-1 (hSL-A100) (opt1) from Homo sapiens__NP_000448.3__HNF4A(1-474)(R2V)
  source 1..1697: mol_type = other RNA
aggagagtcccgcagtcggcgtccagcggctctgcttgttcgtgtgtgtgtcgttgcaggccttattcaagcttaccatggtgctgagcaagaccctcgtcgacatggacatggccgactactccgccgcgctggaccccgcctacaccacgctggagttcgagaacgtccaggtgctcaccatgggcaacgacaccagcccgtccgaggggaccaacctgaacgcccccaacagcctgggcgtgtccgccctctgcgccatctgcggggaccgcgcgacgggcaagcactacggggccagctcctgcgacggctgcaagggcttcttccggcgcagcgtgcggaagaaccacatgtactcctgccgcttcagccggcagtgcgtggtcgacaaggacaagcgcaaccagtgccggtactgccgcctgaagaagtgcttccgggccgggatgaagaaggaggccgtgcagaacgagcgcgaccggatctccacccgccggagctcctacgaggacagctccctgcccagcatcaacgcgctcctgcaggccgaggtgctgtcccgccagatcaccagccccgtctccggcatcaacggggacatccgggccaagaagatcgccagcatcgccgacgtgtgcgagagcatgaaggagcagctcctggtgctggtcgagtgggcgaagtacatcccggccttctgcgagctccccctggacgaccaggtggccctgctccgcgcccacgccggcgagcacctcctgctgggggcgaccaagcggtccatggtgttcaaggacgtcctgctgctcggcaacgactacatcgtgccccgccactgccccgagctggccgagatgagccgggtgtccatccgcatcctggacgagctcgtcctgccgttccaggagctgcagatcgacgacaacgagtacgcctacctcaaggccatcatcttcttcgaccccgacgccaagggcctgagcgaccccgggaagatcaagcggctgcgctcccaggtccaggtgagcctcgaggactacatcaacgaccgccagtacgactcccggggccgcttcggggagctgctgctcctgctgcccacgctccagagcatcacctggcagatgatcgagcagatccagttcatcaagctgttcggcatggcgaagatcgacaacctgctccaggagatgctgctgggcgggtccccgagcgacgcgccccacgcccaccaccccctccacccccacctgatgcaggagcacatgggcaccaacgtgatcgtggccaacaccatgccgacgcacctgtccaacgggcagatgtgcgagtggccccggccccgcggccaggccgccacccccgagaccccgcagcccagcccgcccgggggctccggcagcgagccctacaagctgctccccggggccgtggccaccatcgtcaagcccctgtccgccatcccccagccgacgatcaccaagcaggaggtgatctgaggactagtccctgttcccagagcccacttttttttctttttttgaaataaaatagcctgtctttcagatctcaaaggctcttttcagagccaccaaaaaaaaaaaaaaaaaaaaaaaaaaaaaaaaaaaaaaaaaaaaaaaaaaaaaaaaaaaaaaaaaaaaaaaaaaaaaaaaaaaaaaaaaaaaaaaaaaaaa

SEQ ID NO: 2970 - RNA, 1697 nt, synthetic construct
  misc_feature 1..1697: note = mRNA a-1 (hSL-A100) (opt1) from Homo sapiens__NP_000448.3__HNF4A(1-474)(R2V_K5V)
  source 1..1697: mol_type = other RNA
aggagagtcccgcagtcggcgtccagcggctctgcttgttcgtgtgtgtgtcgttgcaggccttattcaagcttaccatggtgctgagcgtcaccctcgtggacatggacatggccgactactccgccgcgctggaccccgcctacaccacgctggagttcgagaacgtgcaggtcctcaccatgggcaacgacaccagcccgtccgaggggaccaacctgaacgcccccaacagcctgggcgtgtccgccctctgcgccatctgcggggaccgcgcgacgggcaagcactacggggccagctcctgcgacggctgcaagggcttcttccggcgcagcgtgcggaagaaccacatgtactcctgccgcttcagccggcagtgcgtcgtggacaaggacaagcgcaaccagtgccggtactgccgcctgaagaagtgcttccgggccgggatgaagaaggaggccgtgcagaacgagcgcgaccggatctccacccgccggagctcctacgaggacagctccctgcccagcatcaacgcgctcctgcaggccgaggtcctgtcccgccagatcaccagccccgtgtccggcatcaacggggacatccgggccaagaagatcgccagcatcgccgacgtgtgcgagagcatgaaggagcagctcctggtcctggtggagtgggcgaagtacatcccggccttctgcgagctccccctggacgaccaggtggccctgctccgcgcccacgccggcgagcacctcctgctgggggcgaccaagcggtccatggtcttcaaggacgtgctgctgctcggcaacgactacatcgtgccccgccactgccccgagctggccgagatgagccgggtctccatccgcatcctggacgagctcgtgctgccgttccaggagctgcagatcgacgacaacgagtacgcctacctcaaggccatcatcttcttcgaccccgacgccaagggcctgagcgaccccgggaagatcaagcggctgcgctcccaggtgcaggtcagcctcgaggactacatcaacgaccgccagtacgactcccggggccgcttcggggagctgctgctcctgctgcccacgctccagagcatcacctggcagatgatcgagcagatccagttcatcaagctgttcggcatggcgaagatcgacaacctgctccaggagatgctgctgggcgggtccccgagcgacgcgccccacgcccaccaccccctccacccccacctgatgcaggagcacatgggcaccaacgtgatcgtggccaacaccatgccgacgcacctgtccaacgggcagatgtgcgagtggccccggccccgcggccaggccgccacccccgagaccccgcagcccagcccgcccgggggctccggcagcgagccctacaagctgctccccggggccgtcgccaccatcgtgaagcccctgtccgccatcccccagccgacgatcaccaagcaggaggtcatctgaggactagtccctgttcccagagcccacttttttttctttttttgaaataaaatagcctgtctttcagatctcaaaggctcttttcagagccaccaaaaaaaaaaaaaaaaaaaaaaaaaaaaaaaaaaaaaaaaaaaaaaaaaaaaaaaaaaaaaaaaaaaaaaaaaaaaaaaaaaaaaaaaaaaaaaaaaaaaa

SEQ ID NO: 2971 - RNA, 1697 nt, synthetic construct
  misc_feature 1..1697: note = mRNA a-1 (hSL-A100) (opt1) from Homo sapiens__NP_000448.3__HNF4A(1-474)(K179R_K180R)
  source 1..1697: mol_type = other RNA
aggagagtcccgcagtcggcgtccagcggctctgcttgttcgtgtgtgtgtcgttgcaggccttattcaagcttaccatgcgcctgagcaagaccctcgtggacatggacatggccgactactccgccgcgctggaccccgcctacaccacgctggagttcgagaacgtccaggtgctcaccatgggcaacgacaccagcccgtccgaggggaccaacctgaacgcccccaacagcctgggcgtgtccgccctctgcgccatctgcggggaccgggcgacgggcaagcactacggggccagctcctgcgacggctgcaagggcttcttccgccggagcgtccgcaagaaccacatgtactcctgccggttcagccgccagtgcgtggtggacaaggacaagcggaaccagtgccgctactgccggctgaagaagtgcttccgcgccgggatgaagaaggaggccgtccagaacgagcgggaccgcatctccacccggcgcagctcctacgaggacagctccctgcccagcatcaacgcgctcctgcaggccgaggtgctgtcccggcagatcaccagccccgtgtccggcatcaacggggacatccgcgcccggcgcatcgccagcatcgccgacgtctgcgagagcatgaaggagcagctcctggtgctggtggagtgggcgaagtacatcccggccttctgcgagctccccctggacgaccaggtcgccctgctccgggcccacgccggcgagcacctcctgctgggggcgaccaagcgctccatggtgttcaaggacgtgctgctgctcggcaacgactacatcgtcccccggcactgccccgagctggccgagatgagccgcgtgtccatccgcatcctggacgagctcgtgctgccgttccaggagctgcagatcgacgacaacgagtacgcctacctcaaggccatcatcttcttcgaccccgacgccaagggcctgagcgaccccgggaagatcaagcggctgcgctcccaggtccaggtgagcctcgaggactacatcaacgaccggcagtacgactcccgcggccggttcggggagctgctgctcctgctgcccacgctccagagcatcacctggcagatgatcgagcagatccagttcatcaagctgttcggcatggcgaagatcgacaacctgctccaggagatgctgctgggcgggtccccgagcgacgcgccccacgcccaccaccccctccacccccacctgatgcaggagcacatgggcaccaacgtgatcgtcgccaacaccatgccgacgcacctgtccaacgggcagatgtgcgagtggccccgcccccggggccaggccgccacccccgagaccccgcagcccagcccgcccgggggctccggcagcgagccctacaagctgctccccggggccgtggccaccatcgtgaagcccctgtccgccatcccccagccgacgatcaccaagcaggaggtcatctgaggactagtccctgttcccagagcccacttttttttctttttttgaaataaaatagcctgtctttcagatctcaaaggctcttttcagagccaccaaaaaaaaaaaaaaaaaaaaaaaaaaaaaaaaaaaaaaaaaaaaaaaaaaaaaaaaaaaaaaaaaaaaaaaaaaaaaaaaaaaaaaaaaaaaaaaaaaaaa

SEQ ID NO: 2972 - RNA, 1697 nt, synthetic construct
  misc_feature 1..1697: note = mRNA a-1 (hSL-A100) (opt1) from Homo sapiens__NP_000448.3__HNF4A(1-474)(K234R)
  source 1..1697: mol_type = other RNA
aggagagtcccgcagtcggcgtccagcggctctgcttgttcgtgtgtgtgtcgttgcaggccttattcaagcttaccatgcgcctgagcaagaccctcgtggacatggacatggccgactactccgccgcgctggaccccgcctacaccacgctggagttcgagaacgtccaggtgctcaccatgggcaacgacaccagcccgtccgaggggaccaacctgaacgcccccaacagcctgggcgtgtccgccctctgcgccatctgcggggaccgggcgacgggcaagcactacggggccagctcctgcgacggctgcaagggcttcttccgccggagcgtccgcaagaaccacatgtactcctgccggttcagccgccagtgcgtggtggacaaggacaagcggaaccagtgccgctactgccggctgaagaagtgcttccgcgccgggatgaagaaggaggccgtccagaacgagcgggaccgcatctccacccggcgcagctcctacgaggacagctccctgcccagcatcaacgcgctcctgcaggccgaggtgctgtcccggcagatcaccagccccgtgtccggcatcaacggggacatccgcgccaagaagatcgccagcatcgccgacgtctgcgagagcatgaaggagcagctcctggtgctggtggagtgggcgaagtacatcccggccttctgcgagctccccctggacgaccaggtcgccctgctccgggcccacgccggcgagcacctcctgctgggggcgacccgccggtccatggtgttcaaggacgtgctgctgctcggcaacgactacatcgtcccccgccactgccccgagctggccgagatgagccgggtgtccatccgcatcctggacgagctcgtgctgccgttccaggagctgcagatcgacgacaacgagtacgcctacctcaaggccatcatcttcttcgaccccgacgccaagggcctgagcgaccccgggaagatcaagcgcctgcggtcccaggtccaggtgagcctcgaggactacatcaacgaccgccagtacgactcccggggccgcttcggggagctgctgctcctgctgcccacgctccagagcatcacctggcagatgatcgagcagatccagttcatcaagctgttcggcatggcgaagatcgacaacctgctccaggagatgctgctgggcgggtccccgagcgacgcgccccacgcccaccaccccctccacccccacctgatgcaggagcacatgggcaccaacgtgatcgtcgccaacaccatgccgacgcacctgtccaacgggcagatgtgcgagtggccccggccccgcggccaggccgccacccccgagaccccgcagcccagcccgcccgggggctccggcagcgagccctacaagctgctccccggggccgtggccaccatcgtgaagcccctgtccgccatcccccagccgacgatcaccaagcaggaggtcatctgaggactagtccctgttcccagagcccacttttttttctttttttgaaataaaatagcctgtctttcagatctcaaaggctcttttcagagccaccaaaaaaaaaaaaaaaaaaaaaaaaaaaaaaaaaaaaaaaaaaaaaaaaaaaaaaaaaaaaaaaaaaaaaaaaaaaaaaaaaaaaaaaaaaaaaaaaaaaaa

SEQ ID NO: 2973 - RNA, 1697 nt, synthetic construct
  misc_feature 1..1697: note = mRNA a-1 (hSL-A100) (opt1) from Homo sapiens__NP_000448.3__HNF4A(1-474)(K300R)
  source 1..1697: mol_type = other RNA
aggagagtcccgcagtcggcgtccagcggctctgcttgttcgtgtgtgtgtcgttgcaggccttattcaagcttaccatgcgcctgagcaagaccctcgtggacatggacatggccgactactccgccgcgctggaccccgcctacaccacgctggagttcgagaacgtccaggtgctcaccatgggcaacgacaccagcccgtccgaggggaccaacctgaacgcccccaacagcctgggcgtgtccgccctctgcgccatctgcggggaccgggcgacgggcaagcactacggggccagctcctgcgacggctgcaagggcttcttccgccggagcgtccgcaagaaccacatgtactcctgccggttcagccgccagtgcgtggtggacaaggacaagcggaaccagtgccgctactgccggctgaagaagtgcttccgcgccgggatgaagaaggaggccgtccagaacgagcgggaccgcatctccacccggcgcagctcctacgaggacagctccctgcccagcatcaacgcgctcctgcaggccgaggtgctgtcccggcagatcaccagccccgtgtccggcatcaacggggacatccgcgccaagaagatcgccagcatcgccgacgtctgcgagagcatgaaggagcagctcctggtgctggtggagtgggcgaagtacatcccggccttctgcgagctccccctggacgaccaggtcgccctgctccgggcccacgccggcgagcacctcctgctgggggcgaccaagcgctccatggtgttcaaggacgtgctgctgctcggcaacgactacatcgtcccccggcactgccccgagctggccgagatgagccgcgtgtccatccggatcctggacgagctcgtgctgccgttccaggagctgcagatcgacgacaacgagtacgcctacctcaaggccatcatcttcttcgaccccgacgcccgcggcctgagcgaccccgggaagatcaagcgcctgcggtcccaggtccaggtgagcctcgaggactacatcaacgaccgccagtacgactcccggggccgcttcggggagctgctgctcctgctgcccacgctccagagcatcacctggcagatgatcgagcagatccagttcatcaagctgttcggcatggcgaagatcgacaacctgctccaggagatgctgctgggcgggtccccgagcgacgcgccccacgcccaccaccccctccacccccacctgatgcaggagcacatgggcaccaacgtgatcgtcgccaacaccatgccgacgcacctgtccaacgggcagatgtgcgagtggccccggccccgcggccaggccgccacccccgagaccccgcagcccagcccgcccgggggctccggcagcgagccctacaagctgctccccggggccgtggccaccatcgtgaagcccctgtccgccatcccccagccgacgatcaccaagcaggaggtcatctgaggactagtccctgttcccagagcccacttttttttctttttttgaaataaaatagcctgtctttcagatctcaaaggctcttttcagagccaccaaaaaaaaaaaaaaaaaaaaaaaaaaaaaaaaaaaaaaaaaaaaaaaaaaaaaaaaaaaaaaaaaaaaaaaaaaaaaaaaaaaaaaaaaaaaaaaaaaaaa

SEQ ID NO: 2974 - RNA, 1697 nt, synthetic construct
  misc_feature 1..1697: note = mRNA a-1 (hSL-A100) (opt1) from Homo sapiens__NP_000448.3__HNF4A(1-474)(K300R_K307R_K309R)
  source 1..1697: mol_type = other RNA
aggagagtcccgcagtcggcgtccagcggctctgcttgttcgtgtgtgtgtcgttgcaggccttattcaagcttaccatgcgcctgagcaagaccctcgtggacatggacatggccgactactccgccgcgctggaccccgcctacaccacgctggagttcgagaacgtccaggtgctcaccatgggcaacgacaccagcccgtccgaggggaccaacctgaacgcccccaacagcctgggcgtgtccgccctctgcgccatctgcggggaccgggcgacgggcaagcactacggggccagctcctgcgacggctgcaagggcttcttccgccggagcgtccgcaagaaccacatgtactcctgccggttcagccgccagtgcgtggtggacaaggacaagcggaaccagtgccgctactgccggctgaagaagtgcttccgcgccgggatgaagaaggaggccgtccagaacgagcgggaccgcatctccacccggcgcagctcctacgaggacagctccctgcccagcatcaacgcgctcctgcaggccgaggtgctgtcccggcagatcaccagccccgtgtccggcatcaacggggacatccgcgccaagaagatcgccagcatcgccgacgtctgcgagagcatgaaggagcagctcctggtgctggtggagtgggcgaagtacatcccggccttctgcgagctccccctggacgaccaggtcgccctgctccgggcccacgccggcgagcacctcctgctgggggcgaccaagcgctccatggtgttcaaggacgtgctgctgctcggcaacgactacatcgtcccccggcactgccccgagctggccgagatgagccgcgtgtccatccggatcctggacgagctcgtgctgccgttccaggagctgcagatcgacgacaacgagtacgcctacctcaaggccatcatcttcttcgaccccgacgcccgcggcctgagcgaccccgggcgcatccggcgcctgcggtcccaggtccaggtgagcctcgaggactacatcaacgaccgccagtacgactcccggggccgcttcggggagctgctgctcctgctgcccacgctccagagcatcacctggcagatgatcgagcagatccagttcatcaagctgttcggcatggcgaagatcgacaacctgctccaggagatgctgctgggcgggtccccgagcgacgcgccccacgcccaccaccccctccacccccacctgatgcaggagcacatgggcaccaacgtgatcgtcgccaacaccatgccgacgcacctgtccaacgggcagatgtgcgagtggccccggccccgcggccaggccgccacccccgagaccccgcagcccagcccgcccgggggctccggcagcgagccctacaagctgctccccggggccgtggccaccatcgtgaagcccctgtccgccatcccccagccgacgatcaccaagcaggaggtcatctgaggactagtccctgttcccagagcccacttttttttctttttttgaaataaaatagcctgtctttcagatctcaaaggctcttttcagagccaccaaaaaaaaaaaaaaaaaaaaaaaaaaaaaaaaaaaaaaaaaaaaaaaaaaaaaaaaaaaaaaaaaaaaaaaaaaaaaaaaaaaaaaaaaaaaaaaaaaaaa

SEQ ID NO: 2975 - RNA, 1697 nt, synthetic construct
  misc_feature 1..1697: note = mRNA a-1 (hSL-A100) (opt1) from Homo sapiens__NP_000448.3__HNF4A(1-474)(K447R_K470R)
  source 1..1697: mol_type = other RNA
aggagagtcccgcagtcggcgtccagcggctctgcttgttcgtgtgtgtgtcgttgcaggccttattcaagcttaccatgcgcctgagcaagaccctcgtggacatggacatggccgactactccgccgcgctggaccccgcctacaccacgctggagttcgagaacgtccaggtgctcaccatgggcaacgacaccagcccgtccgaggggaccaacctgaacgcccccaacagcctgggcgtgtccgccctctgcgccatctgcggggaccgggcgacgggcaagcactacggggccagctcctgcgacggctgcaagggcttcttccgccggagcgtccgcaagaaccacatgtactcctgccggttcagccgccagtgcgtggtggacaaggacaagcggaaccagtgccgctactgccggctgaagaagtgcttccgcgccgggatgaagaaggaggccgtccagaacgagcgggaccgcatctccacccggcgcagctcctacgaggacagctccctgcccagcatcaacgcgctcctgcaggccgaggtgctgtcccggcagatcaccagccccgtgtccggcatcaacggggacatccgcgccaagaagatcgccagcatcgccgacgtctgcgagagcatgaaggagcagctcctggtgctggtggagtgggcgaagtacatcccggccttctgcgagctccccctggacgaccaggtcgccctgctccgggcccacgccggcgagcacctcctgctgggggcgaccaagcgctccatggtgttcaaggacgtgctgctgctcggcaacgactacatcgtcccccggcactgccccgagctggccgagatgagccgcgtgtccatccggatcctggacgagctcgtgctgccgttccaggagctgcagatcgacgacaacgagtacgcctacctcaaggccatcatcttcttcgaccccgacgccaagggcctgagcgaccccgggaagatcaagcgcctgcgctcccaggtccaggtgagcctcgaggactacatcaacgaccggcagtacgactcccgcggccggttcggggagctgctgctcctgctgcccacgctccagagcatcacctggcagatgatcgagcagatccagttcatcaagctgttcggcatggcgaagatcgacaacctgctccaggagatgctgctgggcgggtccccgagcgacgcgccccacgcccaccaccccctccacccccacctgatgcaggagcacatgggcaccaacgtgatcgtcgccaacaccatgccgacgcacctgtccaacgggcagatgtgcgagtggccccgcccccggggccaggccgccacccccgagaccccgcagcccagcccgcccgggggctccggcagcgagccctaccgcctgctccccggggccgtggccaccatcgtgaagcccctgtccgccatcccccagccgacgatcacccggcaggaggtcatctgaggactagtccctgttcccagagcccacttttttttctttttttgaaataaaatagcctgtctttcagatctcaaaggctcttttcagagccaccaaaaaaaaaaaaaaaaaaaaaaaaaaaaaaaaaaaaaaaaaaaaaaaaaaaaaaaaaaaaaaaaaaaaaaaaaaaaaaaaaaaaaaaaaaaaaaaaaaaaa

SEQ ID NO: 2976 - RNA, 1697 nt, synthetic construct
  misc_feature 1..1697: note = mRNA a-1 (hSL-A100) (opt1) from Homo sapiens__NP_000448.3__HNF4A(1-474)(K458R)
  source 1..1697: mol_type = other RNA
aggagagtcccgcagtcggcgtccagcggctctgcttgttcgtgtgtgtgtcgttgcaggccttattcaagcttaccatgcgcctgagcaagaccctcgtggacatggacatggccgactactccgccgcgctggaccccgcctacaccacgctggagttcgagaacgtccaggtgctcaccatgggcaacgacaccagcccgtccgaggggaccaacctgaacgcccccaacagcctgggcgtgtccgccctctgcgccatctgcggggaccgggcgacgggcaagcactacggggccagctcctgcgacggctgcaagggcttcttccgccggagcgtccgcaagaaccacatgtactcctgccggttcagccgccagtgcgtggtggacaaggacaagcggaaccagtgccgctactgccggctgaagaagtgcttccgcgccgggatgaagaaggaggccgtccagaacgagcgggaccgcatctccacccggcgcagctcctacgaggacagctccctgcccagcatcaacgcgctcctgcaggccgaggtgctgtcccggcagatcaccagccccgtgtccggcatcaacggggacatccgcgccaagaagatcgccagcatcgccgacgtctgcgagagcatgaaggagcagctcctggtgctggtggagtgggcgaagtacatcccggccttctgcgagctccccctggacgaccaggtcgccctgctccgggcccacgccggcgagcacctcctgctgggggcgaccaagcgctccatggtgttcaaggacgtgctgctgctcggcaacgactacatcgtcccccggcactgccccgagctggccgagatgagccgcgtgtccatccggatcctggacgagctcgtgctgccgttccaggagctgcagatcgacgacaacgagtacgcctacctcaaggccatcatcttcttcgaccccgacgccaagggcctgagcgaccccgggaagatcaagcgcctgcgctcccaggtccaggtgagcctcgaggactacatcaacgaccggcagtacgactcccgcggccggttcggggagctgctgctcctgctgcccacgctccagagcatcacctggcagatgatcgagcagatccagttcatcaagctgttcggcatggcgaagatcgacaacctgctccaggagatgctgctgggcgggtccccgagcgacgcgccccacgcccaccaccccctccacccccacctgatgcaggagcacatgggcaccaacgtgatcgtcgccaacaccatgccgacgcacctgtccaacgggcagatgtgcgagtggccccgcccccggggccaggccgccacccccgagaccccgcagcccagcccgcccgggggctccggcagcgagccctacaagctgctccccggggccgtggccaccatcgtgcgccccctgtccgccatcccccagccgacgatcaccaagcaggaggtcatctgaggactagtccctgttcccagagcccacttttttttctttttttgaaataaaatagcctgtctttcagatctcaaaggctcttttcagagccaccaaaaaaaaaaaaaaaaaaaaaaaaaaaaaaaaaaaaaaaaaaaaaaaaaaaaaaaaaaaaaaaaaaaaaaaaaaaaaaaaaaaaaaaaaaaaaaaaaaaaa

SEQ ID NO: 2977 - RNA, 1697 nt, synthetic construct
  misc_feature 1..1697: note = mRNA a-1 (hSL-A100) (opt1) from Homo sapiens__NP_000448.3__HNF4A(1-474)(K106R_K108R_K126R_K127R)
  source 1..1697: mol_type = other RNA
aggagagtcccgcagtcggcgtccagcggctctgcttgttcgtgtgtgtgtcgttgcaggccttattcaagcttaccatgcgcctgagcaagaccctcgtggacatggacatggccgactactccgccgcgctggaccccgcctacaccacgctggagttcgagaacgtccaggtgctcaccatgggcaacgacaccagcccgtccgaggggaccaacctgaacgcccccaacagcctgggcgtgtccgccctctgcgccatctgcggggaccgggcgacgggcaagcactacggggccagctcctgcgacggctgcaagggcttcttccgccggagcgtccgcaagaaccacatgtactcctgccggttcagccgccagtgcgtggtggaccgggaccgccggaaccagtgccgctactgccggctgaagaagtgcttccgcgccgggatgcggcgcgaggccgtccagaacgagcgggaccgcatctccacccggcgcagctcctacgaggacagctccctgcccagcatcaacgcgctcctgcaggccgaggtgctgtcccggcagatcaccagccccgtgtccggcatcaacggggacatccgcgccaagaagatcgccagcatcgccgacgtctgcgagagcatgaaggagcagctcctggtgctggtggagtgggcgaagtacatcccggccttctgcgagctccccctggacgaccaggtcgccctgctccgggcccacgccggcgagcacctcctgctgggggcgaccaagcgctccatggtgttcaaggacgtgctgctgctcggcaacgactacatcgtcccccgccactgccccgagctggccgagatgagccgggtgtccatccgcatcctggacgagctcgtgctgccgttccaggagctgcagatcgacgacaacgagtacgcctacctcaaggccatcatcttcttcgaccccgacgccaagggcctgagcgaccccgggaagatcaagcggctgcgctcccaggtccaggtgagcctcgaggactacatcaacgaccggcagtacgactcccgcggccggttcggggagctgctgctcctgctgcccacgctccagagcatcacctggcagatgatcgagcagatccagttcatcaagctgttcggcatggcgaagatcgacaacctgctccaggagatgctgctgggcgggtccccgagcgacgcgccccacgcccaccaccccctccacccccacctgatgcaggagcacatgggcaccaacgtgatcgtcgccaacaccatgccgacgcacctgtccaacgggcagatgtgcgagtggccccgcccccggggccaggccgccacccccgagaccccgcagcccagcccgcccgggggctccggcagcgagccctacaagctgctccccggggccgtggccaccatcgtgaagcccctgtccgccatcccccagccgacgatcaccaagcaggaggtcatctgaggactagtccctgttcccagagcccacttttttttctttttttgaaataaaatagcctgtctttcagatctcaaaggctcttttcagagccaccaaaaaaaaaaaaaaaaaaaaaaaaaaaaaaaaaaaaaaaaaaaaaaaaaaaaaaaaaaaaaaaaaaaaaaaaaaaaaaaaaaaaaaaaaaaaaaaaaaaaa

SEQ ID NO: 2978 - RNA, 1697 nt, synthetic construct; identical to SEQ ID NO: 2929
  misc_feature 1..1697: note = mRNA a-1 (hSL-A100) (opt1) from Homo sapiens__NP_000448.3__HNF4A(1-474)(E285Q)
  source 1..1697: mol_type = other RNA

SEQ ID NO: 2979 - RNA, 1697 nt, synthetic construct
  misc_feature 1..1697: note = mRNA a-1 (hSL-A100) (opt1) from Homo sapiens__NP_000448.3__HNF4A(1-474)(T166E)
  source 1..1697: mol_type = other RNA
aggagagtcccgcagtcggcgtccagcggctctgcttgttcgtgtgtgtgtcgttgcaggccttattcaagcttaccatgcgcctgagcaagaccctcgtggacatggacatggccgactactccgccgcgctggaccccgcctacaccacgctggagttcgagaacgtccaggtgctcaccatgggcaacgacaccagcccgtccgaggggaccaacctgaacgcccccaacagcctgggcgtgtccgccctctgcgccatctgcggggaccgggcgacgggcaagcactacggggccagctcctgcgacggctgcaagggcttcttccgccggagcgtccgcaagaaccacatgtactcctgccggttcagccgccagtgcgtggtggacaaggacaagcggaaccagtgccgctactgccggctgaagaagtgcttccgcgccgggatgaagaaggaggccgtccagaacgagcgggaccgcatctccacccggcgcagctcctacgaggacagctccctgcccagcatcaacgcgctcctgcaggccgaggtgctgtcccggcagatcgagagccccgtgtccggcatcaacggggacatccgcgccaagaagatcgccagcatcgccgacgtctgcgagagcatgaaggagcagctcctggtgctggtggagtgggcgaagtacatcccggccttctgcgagctccccctggacgaccaggtcgccctgctccgggcccacgccggcgagcacctcctgctgggggcgaccaagcgctccatggtgttcaaggacgtgctgctgctcggcaacgactacatcgtcccccggcactgccccgagctggccgagatgagccgcgtgtccatccggatcctggacgagctcgtgctgccgttccaggagctgcagatcgacgacaacgagtacgcctacctcaaggccatcatcttcttcgaccccgacgccaagggcctgagcgaccccgggaagatcaagcgcctgcgctcccaggtccaggtgagcctcgaggactacatcaacgaccggcagtacgactcccgcggccggttcggggagctgctgctcctgctgcccaccctccagagcatcacgtggcagatgatcgagcagatccagttcatcaagctgttcggcatggcgaagatcgacaacctgctccaggagatgctgctgggcgggtccccgagcgacgcgccccacgcccaccaccccctccacccccacctgatgcaggagcacatgggcaccaacgtgatcgtcgccaacaccatgccgacccacctgtccaacgggcagatgtgcgagtggccccgcccccggggccaggccgccacgcccgagaccccgcagcccagcccgcccgggggctccggcagcgagccctacaagctgctccccggggccgtggccaccatcgtgaagcccctgtccgccatcccccagccgaccatcacgaagcaggaggtcatctgaggactagtccctgttcccagagcccacttttttttctttttttgaaataaaatagcctgtctttcagatctcaaaggctcttttcagagccaccaaaaaaaaaaaaaaaaaaaaaaaaaaaaaaaaaaaaaaaaaaaaaaaaaaaaaaaaaaaaaaaaaaaaaaaaaaaaaaaaaaaaaaaaaaaaaaaaaaaaa

SEQ ID NO: 2980 - RNA, 1697 nt, synthetic construct
  misc_feature 1..1697: note = mRNA a-1 (hSL-A100) (opt1) from Homo sapiens__NP_000448.3__HNF4A(1-474)(S148A)
  source 1..1697: mol_type = other RNA
aggagagtcccgcagtcggcgtccagcggctctgcttgttcgtgtgtgtgtcgttgcaggccttattcaagcttaccatgcgcctgagcaagaccctcgtggacatggacatggccgactactccgccgcgctggaccccgcctacaccacgctggagttcgagaacgtccaggtgctcaccatgggcaacgacaccagcccgtccgaggggaccaacctgaacgcccccaacagcctgggcgtgtccgccctctgcgccatctgcggggaccgggcgacgggcaagcactacggggccagctcctgcgacggctgcaagggcttcttccgccggagcgtccgcaagaaccacatgtactcctgccggttcagccgccagtgcgtggtggacaaggacaagcggaaccagtgccgctactgccggctgaagaagtgcttccgcgccgggatgaagaaggaggccgtccagaacgagcgggaccgcatctccacccggcgcagctcctacgaggacagcgcgctgccctccatcaacgccctcctgcaggccgaggtgctgagccggcagatcacctcccccgtgagcggcatcaacggggacatccgcgccaagaagatcgcctccatcgcggacgtctgcgagagcatgaaggagcagctcctggtgctggtggagtgggccaagtacatcccggccttctgcgagctccccctggacgaccaggtcgccctgctccgggcccacgcgggcgagcacctcctgctgggggccaccaagcgcagcatggtgttcaaggacgtgctgctgctcggcaacgactacatcgtcccccggcactgccccgagctggccgagatgtcccgcgtgagcatccggatcctggacgagctcgtgctgccgttccaggagctgcagatcgacgacaacgagtacgcctacctcaaggccatcatcttcttcgaccccgacgcgaagggcctgtccgaccccgggaagatcaagcgcctgcgcagccaggtccaggtgtccctcgaggactacatcaacgaccggcagtacgacagccgcggccggttcggggagctgctgctcctgctgcccacgctccagtccatcacctggcagatgatcgagcagatccagttcatcaagctgttcggcatggccaagatcgacaacctgctccaggagatgctgctgggcgggagcccgtccgacgcgccccacgcccaccaccccctccacccccacctgatgcaggagcacatgggcaccaacgtgatcgtcgccaacaccatgccgacgcacctgagcaacgggcagatgtgcgagtggccccgcccccggggccaggccgccacccccgagaccccgcagccctccccgcccgggggcagcggctccgagccctacaagctgctccccggggccgtggccaccatcgtgaagcccctgagcgcgatcccccagccgacgatcaccaagcaggaggtcatctgaggactagtccctgttcccagagcccacttttttttctttttttgaaataaaatagcctgtctttcagatctcaaaggctcttttcagagccaccaaaaaaaaaaaaaaaaaaaaaaaaaaaaaaaaaaaaaaaaaaaaaaaaaaaaaaaaaaaaaaaaaaaaaaaaaaaaaaaaaaaaaaaaaaaaaaaaaaaaa

SEQ ID NO: 2981 - RNA, 1697 nt, synthetic construct
  misc_feature 1..1697: note = mRNA a-1 (hSL-A100) (opt1) from Homo sapiens__NP_000448.3__HNF4A(1-474)(S148E)
  source 1..1697: mol_type = other RNA
aggagagtcccgcagtcggcgtccagcggctctgcttgttcgtgtgtgtgtcgttgcaggccttattcaagcttaccatgcgcctgagcaagaccctcgtggacatggacatggccgactactccgccgcgctggaccccgcctacaccacgctggagttcgagaacgtccaggtgctcaccatgggcaacgacaccagcccgtccgaggggaccaacctgaacgcccccaacagcctgggcgtgtccgccctctgcgccatctgcggggaccgggcgacgggcaagcactacggggccagctcctgcgacggctgcaagggcttcttccgccggagcgtccgcaagaaccacatgtactcctgccggttcagccgccagtgcgtggtggacaaggacaagcggaaccagtgccgctactgccggctgaagaagtgcttccgcgccgggatgaagaaggaggccgtccagaacgagcgggaccgcatctccacccggcgcagctcctacgaggacagcgagctgccctccatcaacgcgctcctgcaggccgaggtgctgagccggcagatcacctcccccgtgagcggcatcaacggggacatccgcgccaagaagatcgcctccatcgccgacgtctgcgagagcatgaaggagcagctcctggtgctggtggagtgggcgaagtacatcccggccttctgcgagctccccctggacgaccaggtcgccctgctccgggcccacgccggcgagcacctcctgctgggggcgaccaagcgcagcatggtgttcaaggacgtgctgctgctcggcaacgactacatcgtcccccggcactgccccgagctggccgagatgtcccgcgtgagcatccggatcctggacgagctcgtgctgccgttccaggagctgcagatcgacgacaacgagtacgcctacctcaaggccatcatcttcttcgaccccgacgccaagggcctgtccgaccccgggaagatcaagcgcctgcgcagccaggtccaggtgtccctcgaggactacatcaacgaccggcagtacgacagccgcggccggttcggggagctgctgctcctgctgcccacgctccagtccatcacctggcagatgatcgagcagatccagttcatcaagctgttcggcatggcgaagatcgacaacctgctccaggagatgctgctgggcgggagcccgtccgacgcgccccacgcccaccaccccctccacccccacctgatgcaggagcacatgggcaccaacgtgatcgtcgccaacaccatgccgacgcacctgagcaacgggcagatgtgcgagtggccccgcccccggggccaggccgccacccccgagaccccgcagccctccccgcccgggggcagcggctccgagccctacaagctgctccccggggccgtggccaccatcgtgaagcccctgagcgccatcccccagccgacgatcaccaagcaggaggtcatctgaggactagtccctgttcccagagcccacttttttttctttttttgaaataaaatagcctgtctttcagatctcaaaggctcttttcagagccaccaaaaaaaaaaaaaaaaaaaaaaaaaaaaaaaaaaaaaaaaaaaaaaaaaaaaaaaaaaaaaaaaaaaaaaaaaaaaaaaaaaaaaaaaaaaaaaaaaaaaa

SEQ ID NO: 2982 - RNA, 1697 nt, synthetic construct
  misc_feature 1..1697: note = mRNA a-1 (hSL-A100) (opt1) from Homo sapiens__NP_000448.3__HNF4A(1-474)(S183A)
  source 1..1697: mol_type = other RNA
aggagagtcccgcagtcggcgtccagcggctctgcttgttcgtgtgtgtgtcgttgcaggccttattcaagcttaccatgcgcctgagcaagaccctcgtggacatggacatggccgactactccgccgcgctggaccccgcctacaccacgctggagttcgagaacgtccaggtgctcaccatgggcaacgacaccagcccgtccgaggggaccaacctgaacgcccccaacagcctgggcgtgtccgccctctgcgccatctgcggggaccgggcgacgggcaagcactacggggccagctcctgcgacggctgcaagggcttcttccgccggagcgtccgcaagaaccacatgtactcctgccggttcagccgccagtgcgtggtggacaaggacaagcggaaccagtgccgctactgccggctgaagaagtgcttccgcgccgggatgaagaaggaggccgtccagaacgagcgggaccgcatctccacccggcgcagctcctacgaggacagctccctgcccagcatcaacgcgctcctgcaggccgaggtgctgtcccggcagatcaccagccccgtgtccggcatcaacggggacatccgcgccaagaagatcgccgccatcgcggacgtctgcgagagcatgaaggagcagctcctggtgctggtggagtgggccaagtacatcccggccttctgcgagctccccctggacgaccaggtcgccctgctccgggcccacgcgggcgagcacctcctgctgggggccaccaagcgcagcatggtgttcaaggacgtgctgctgctcggcaacgactacatcgtcccccggcactgccccgagctggccgagatgtcccgcgtgagcatccggatcctggacgagctcgtgctgccgttccaggagctgcagatcgacgacaacgagtacgcctacctcaaggccatcatcttcttcgaccccgacgcgaagggcctgtccgaccccgggaagatcaagcgcctgcgcagccaggtccaggtgtccctcgaggactacatcaacgaccggcagtacgacagccgcggccggttcggggagctgctgctcctgctgcccacgctccagtccatcacctggcagatgatcgagcagatccagttcatcaagctgttcggcatggccaagatcgacaacctgctccaggagatgctgctgggcgggagcccgtccgacgcgccccacgcccaccaccccctccacccccacctgatgcaggagcacatgggcaccaacgtgatcgtcgccaacaccatgccgacgcacctgagcaacgggcagatgtgcgagtggccccgcccccggggccaggccgccacccccgagaccccgcagccctccccgcccgggggcagcggctccgagccctacaagctgctccccggggccgtggccaccatcgtgaagcccctgagcgcgatcccccagccgacgatcaccaagcaggaggtcatctgaggactagtccctgttcccagagcccacttttttttctttttttgaaataaaatagcctgtctttcagatctcaaaggctcttttcagagccaccaaaaaaaaaaaaaaaaaaaaaaaaaaaaaaaaaaaaaaaaaaaaaaaaaaaaaaaaaaaaaaaaaaaaaaaaaaaaaaaaaaaaaaaaaaaaaaaaaaaaa

SEQ ID NO: 2983 - RNA, 1697 nt, synthetic construct
  misc_feature 1..1697: note = mRNA a-1 (hSL-A100) (opt1) from Homo sapiens__NP_000448.3__HNF4A(1-474)(S183E)
  source 1..1697: mol_type = other RNA
aggagagtcccgcagtcggcgtccagcggctctgcttgttcgtgtgtgtgtcgttgcaggccttattcaagcttaccatgcgcctgagcaagaccctcgtggacatggacatggccgactactccgccgcgctggaccccgcctacaccacgctggagttcgagaacgtccaggtgctcaccatgggcaacgacaccagcccgtccgaggggaccaacctgaacgcccccaacagcctgggcgtgtccgccctctgcgccatctgcggggaccgggcgacgggcaagcactacggggccagctcctgcgacggctgcaagggcttcttccgccggagcgtccgcaagaaccacatgtactcctgccggttcagccgccagtgcgtggtggacaaggacaagcggaaccagtgccgctactgccggctgaagaagtgcttccgcgccgggatgaagaaggaggccgtccagaacgagcgggaccgcatctccacccggcgcagctcctacgaggacagctccctgcccagcatcaacgcgctcctgcaggccgaggtgctgtcccggcagatcaccagccccgtgtccggcatcaacggggacatccgcgccaagaagatcgccgagatcgccgacgtctgcgagagcatgaaggagcagctcctggtgctggtggagtgggcgaagtacatcccggccttctgcgagctccccctggacgaccaggtcgccctgctccgggcccacgccggcgagcacctcctgctgggggcgaccaagcgcagcatggtgttcaaggacgtgctgctgctcggcaacgactacatcgtcccccggcactgccccgagctggccgagatgtcccgcgtgagcatccggatcctggacgagctcgtgctgccgttccaggagctgcagatcgacgacaacgagtacgcctacctcaaggccatcatcttcttcgaccccgacgccaagggcctgtccgaccccgggaagatcaagcgcctgcgcagccaggtccaggtgtccctcgaggactacatcaacgaccggcagtacgacagccgcggccggttcggggagctgctgctcctgctgcccacgctccagtccatcacctggcagatgatcgagcagatccagttcatcaagctgttcggcatggcgaagatcgacaacctgctccaggagatgctgctgggcgggagcccgtccgacgcgccccacgcccaccaccccctccacccccacctgatgcaggagcacatgggcaccaacgtgatcgtcgccaacaccatgccgacgcacctgagcaacgggcagatgtgcgagtggccccgcccccggggccaggccgccacccccgagaccccgcagccctccccgcccgggggcagcggctccgagccctacaagctgctccccggggccgtggccaccatcgtgaagcccctgagcgccatcccccagccgacgatcaccaagcaggaggtcatctgaggactagtccctgttcccagagcccacttttttttctttttttgaaataaaatagcctgtctttcagatctcaaaggctcttttcagagccaccaaaaaaaaaaaaaaaaaaaaaaaaaaaaaaaaaaaaaaaaaaaaaaaaaaaaaaaaaaaaaaaaaaaaaaaaaaaaaaaaaaaaaaaaaaaaaaaaaaaaa

SEQ ID NO: 2984 - RNA, 1697 nt, synthetic construct
  misc_feature 1..1697: note = mRNA a-1 (hSL-A100) (opt1) from Homo sapiens__NP_000448.3__HNF4A(1-474)(S461A)
  source 1..1697: mol_type = other RNA
aggagagtcccgcagtcggcgtccagcggctctgcttgttcgtgtgtgtgtcgttgcaggccttattcaagcttaccatgcgcctgagcaagaccctcgtggacatggacatggccgactactccgccgcgctggaccccgcctacaccacgctggagttcgagaacgtccaggtgctcaccatgggcaacgacaccagcccgtccgaggggaccaacctgaacgcccccaacagcctgggcgtgtccgccctctgcgccatctgcggggaccgggcgacgggcaagcactacggggccagctcctgcgacggctgcaagggcttcttccgccggagcgtccgcaagaaccacatgtactcctgccggttcagccgccagtgcgtggtggacaaggacaagcggaaccagtgccgctactgccggctgaagaagtgcttccgcgccgggatgaagaaggaggccgtccagaacgagcgggaccgcatctccacccggcgcagctcctacgaggacagctccctgcccagcatcaacgcgctcctgcaggccgaggtgctgtcccggcagatcaccagccccgtgtccggcatcaacggggacatccgcgccaagaagatcgccagcatcgccgacgtctgcgagagcatgaaggagcagctcctggtgctggtggagtgggcgaagtacatcccggccttctgcgagctccccctggacgaccaggtcgccctgctccgggcccacgccggcgagcacctcctgctgggggcgaccaagcgctccatggtgttcaaggacgtgctgctgctcggcaacgactacatcgtcccccggcactgccccgagctggccgagatgagccgcgtgtccatccggatcctggacgagctcgtgctgccgttccaggagctgcagatcgacgacaacgagtacgcctacctcaaggccatcatcttcttcgaccccgacgccaagggcctgagcgaccccgggaagatcaagcgcctgcgctcccaggtccaggtgagcctcgaggactacatcaacgaccggcagtacgactcccgcggccggttcggggagctgctgctcctgctgcccacgctccagagcatcacctggcagatgatcgagcagatccagttcatcaagctgttcggcatggcgaagatcgacaacctgctccaggagatgctgctgggcgggtccccgagcgacgcgccccacgcccaccaccccctccacccccacctgatgcaggagcacatgggcaccaacgtgatcgtcgccaacaccatgccgacgcacctgtccaacgggcagatgtgcgagtggccccgcccccggggccaggccgccacccccgagaccccgcagcccagcccgcccgggggctccggcagcgagccctacaagctgctccccggggccgtggccaccatcgtgaagcccctggccgcgatcccccagccgacgatcaccaagcaggaggtcatctgaggactagtccctgttcccagagcccacttttttttctttttttgaaataaaatagcctgtctttcagatctcaaaggctcttttcagagccaccaaaaaaaaaaaaaaaaaaaaaaaaaaaaaaaaaaaaaaaaaaaaaaaaaaaaaaaaaaaaaaaaaaaaaaaaaaaaaaaaaaaaaaaaaaaaaaaaaaaaa

SEQ ID NO: 2985 - RNA, 1697 nt, synthetic construct; identical to SEQ ID NO: 2936
  misc_feature 1..1697: note = mRNA a-1 (hSL-A100) (opt1) from Homo sapiens__NP_000448.3__HNF4A(1-474)(S461E) R11470
  source 1..1697: mol_type = other RNA

SEQ ID NO: 2986 - RNA, 1697 nt, synthetic construct
  misc_feature 1..1697: note = mRNA a-1 (hSL-A100) (opt1) from Homo sapiens__NP_000448.3__HNF4A(1-474)(S142A_S143A_S313A)
  source 1..1697: mol_type = other RNA
aggagagtcccgcagtcggcgtccagcggctctgcttgttcgtgtgtgtgtcgttgcaggccttattcaagcttaccatgcgcctgagcaagaccctcgtggacatggacatggccgactactccgccgcgctggaccccgcctacaccacgctggagttcgagaacgtccaggtgctcaccatgggcaacgacaccagcccgtccgaggggaccaacctgaacgcccccaacagcctgggcgtgtccgccctctgcgccatctgcggggaccgggcgacgggcaagcactacggggccagctcctgcgacggctgcaagggcttcttccgccggagcgtccgcaagaaccacatgtactcctgccggttcagccgccagtgcgtggtggacaaggacaagcggaaccagtgccgctactgccggctgaagaagtgcttccgcgccgggatgaagaaggaggccgtccagaacgagcgggaccgcatctccacccggcgcgcggcctacgaggacagctccctgcccagcatcaacgccctcctgcaggccgaggtgctgtcccggcagatcaccagccccgtgtccggcatcaacggggacatccgcgccaagaagatcgcgagcatcgccgacgtctgcgagtccatgaaggagcagctcctggtgctggtggagtgggccaagtacatcccggccttctgcgagctccccctggacgaccaggtcgccctgctccgggcgcacgccggcgagcacctcctgctgggggccaccaagcgcagcatggtgttcaaggacgtgctgctgctcggcaacgactacatcgtcccccggcactgccccgagctggccgagatgagccgcgtgtccatccggatcctggacgagctcgtgctgccgttccaggagctgcagatcgacgacaacgagtacgcctacctcaaggcgatcatcttcttcgaccccgacgccaagggcctgagcgaccccgggaagatcaagcgcctgcgcgcccaggtccaggtgtccctcgaggactacatcaacgaccggcagtacgacagccgcggccggttcggggagctgctgctcctgctgcccacgctccagtccatcacctggcagatgatcgagcagatccagttcatcaagctgttcggcatggccaagatcgacaacctgctccaggagatgctgctgggcgggagcccgtccgacgcgccccacgcccaccaccccctccacccccacctgatgcaggagcacatgggcaccaacgtgatcgtcgccaacaccatgccgacgcacctgagcaacgggcagatgtgcgagtggccccgcccccggggccaggccgccacccccgagaccccgcagccctccccgcccgggggcagcggctccgagccctacaagctgctccccggggcggtggccaccatcgtgaagcccctgagcgccatcccccagccgacgatcaccaagcaggaggtcatctgaggactagtccctgttcccagagcccacttttttttctttttttgaaataaaatagcctgtctttcagatctcaaaggctcttttcagagccaccaaaaaaaaaaaaaaaaaaaaaaaaaaaaaaaaaaaaaaaaaaaaaaaaaaaaaaaaaaaaaaaaaaaaaaaaaaaaaaaaaaaaaaaaaaaaaaaaaaaaa

SEQ ID NO: 2987 - RNA, 1697 nt, synthetic construct
  misc_feature 1..1697: note = mRNA a-1 (hSL-A100) (opt1) from Homo sapiens__NP_000448.3__HNF4A(1-474)(S142A_S143A_S313A_K458R)
  source 1..1697: mol_type = other RNA
aggagagtcccgcagtcggcgtccagcggctctgcttgttcgtgtgtgtgtcgttgcaggccttattcaagcttaccatgcgcctgagcaagaccctcgtggacatggacatggccgactactccgccgcgctggaccccgcctacaccacgctggagttcgagaacgtccaggtgctcaccatgggcaacgacaccagcccgtccgaggggaccaacctgaacgcccccaacagcctgggcgtgtccgccctctgcgccatctgcggggaccgggcgacgggcaagcactacggggccagctcctgcgacggctgcaagggcttcttccgccggagcgtccgcaagaaccacatgtactcctgccggttcagccgccagtgcgtggtggacaaggacaagcggaaccagtgccgctactgccggctgaagaagtgcttccgcgccgggatgaagaaggaggccgtccagaacgagcgggaccgcatctccacccggcgcgcggcctacgaggacagctccctgcccagcatcaacgccctcctgcaggccgaggtgctgtcccggcagatcaccagccccgtgtccggcatcaacggggacatccgcgccaagaagatcgcgagcatcgccgacgtctgcgagtccatgaaggagcagctcctggtgctggtggagtgggccaagtacatcccggccttctgcgagctccccctggacgaccaggtcgccctgctccgggcgcacgccggcgagcacctcctgctgggggccaccaagcgcagcatggtgttcaaggacgtgctgctgctcggcaacgactacatcgtcccccggcactgccccgagctggccgagatgagccgcgtgtccatccggatcctggacgagctcgtgctgccgttccaggagctgcagatcgacgacaacgagtacgcctacctcaaggcgatcatcttcttcgaccccgacgccaagggcctgagcgaccccgggaagatcaagcgcctgcgcgcccaggtccaggtgtccctcgaggactacatcaacgaccggcagtacgacagccgcggccggttcggggagctgctgctcctgctgcccacgctccagtccatcacctggcagatgatcgagcagatccagttcatcaagctgttcggcatggccaagatcgacaacctgctccaggagatgctgctgggcgggagcccgtccgacgcgccccacgcccaccaccccctccacccccacctgatgcaggagcacatgggcaccaacgtgatcgtcgccaacaccatgccgacgcacctgagcaacgggcagatgtgcgagtggccccgcccccggggccaggccgccacccccgagaccccgcagccctccccgcccgggggcagcggctccgagccctacaagctgctccccggggcggtggccaccatcgtgcgccccctgagcgccatcccccagccgacgatcaccaagcaggaggtcatctgaggactagtccctgttcccagagcccacttttttttctttttttgaaataaaatagcctgtctttcagatctcaaaggctcttttcagagccaccaaaaaaaaaaaaaaaaaaaaaaaaaaaaaaaaaaaaaaaaaaaaaaaaaaaaaaaaaaaaaaaaaaaaaaaaaaaaaaaaaaaaaaaaaaaaaaaaaaaaa

SEQ ID NO: 2988 - RNA, 1697 nt, synthetic construct
  misc_feature 1..1697: note = mRNA a-1 (hSL-A100) (opt1) from Homo sapiens__NP_000448.3__HNF4A(1-474)(S142A_S143A_S167A_S313A_ S378A_T429A_T432A_S436A_K458R)
  source 1..1697: mol_type = other RNA
aggagagtcccgcagtcggcgtccagcggctctgcttgttcgtgtgtgtgtcgttgcaggccttattcaagcttaccatgcgcctgagcaagaccctcgtggacatggacatggccgactactccgccgcgctggaccccgcctacaccacgctggagttcgagaacgtccaggtgctcaccatgggcaacgacaccagcccgtccgaggggaccaacctgaacgcccccaacagcctgggcgtgtccgccctctgcgccatctgcggggaccgggcgacgggcaagcactacggggccagctcctgcgacggctgcaagggcttcttccgccggagcgtccgcaagaaccacatgtactcctgccggttcagccgccagtgcgtggtggacaaggacaagcggaaccagtgccgctactgccggctgaagaagtgcttccgcgccgggatgaagaaggaggccgtccagaacgagcgggaccgcatctccacccggcgcgcggcctacgaggacagctccctgcccagcatcaacgccctcctgcaggccgaggtgctgtcccggcagatcaccgcccccgtgagcggcatcaacggggacatccgcgcgaagaagatcgcctccatcgccgacgtctgcgagagcatgaaggagcagctcctggtgctggtggagtgggccaagtacatcccggccttctgcgagctccccctggacgaccaggtcgcgctgctccgggcccacgccggcgagcacctcctgctgggggccaccaagcgctccatggtgttcaaggacgtgctgctgctcggcaacgactacatcgtcccccggcactgccccgagctggccgagatgagccgcgtgagcatccggatcctggacgagctcgtgctgccgttccaggagctgcagatcgacgacaacgagtacgcgtacctcaaggccatcatcttcttcgaccccgacgccaagggcctgtccgaccccgggaagatcaagcgcctgcgcgcccaggtccaggtgagcctcgaggactacatcaacgaccggcagtacgactcccgcggccggttcggggagctgctgctcctgctgcccacgctccagagcatcacctggcagatgatcgagcagatccagttcatcaagctgttcggcatggccaagatcgacaacctgctccaggagatgctgctgggcggggcgccgtccgacgcgccccacgcccaccaccccctccacccccacctgatgcaggagcacatgggcaccaacgtgatcgtcgccaacaccatgccgacgcacctgagcaacgggcagatgtgcgagtggccccgcccccggggccaggccgccgcccccgaggccccgcagcccgccccgcccgggggctccggcagcgagccctacaagctgctccccggggcggtggccaccatcgtgcgccccctgtccgccatcccccagccgaccatcaccaagcaggaggtcatctgaggactagtccctgttcccagagcccacttttttttctttttttgaaataaaatagcctgtctttcagatctcaaaggctcttttcagagccaccaaaaaaaaaaaaaaaaaaaaaaaaaaaaaaaaaaaaaaaaaaaaaaaaaaaaaaaaaaaaaaaaaaaaaaaaaaaaaaaaaaaaaaaaaaaaaaaaaaaaa

SEQ ID NO: 2989 - RNA, 1697 nt, synthetic construct
  misc_feature 1..1697: note = mRNA a-1 (hSL-A100) (opt1) from Homo sapiens__NP_000448.3__HNF4A(1-474)(S142A_S143A_S148A_S167A_ S313A_S378A_T429A_T432A_S436A_K458R)
  source 1..1697: mol_type = other RNA
aggagagtcccgcagtcggcgtccagcggctctgcttgttcgtgtgtgtgtcgttgcaggccttattcaagcttaccatgcgcctgagcaagaccctcgtggacatggacatggccgactactccgccgcgctggaccccgcctacaccacgctggagttcgagaacgtccaggtgctcaccatgggcaacgacaccagcccgtccgaggggaccaacctgaacgcccccaacagcctgggcgtgtccgccctctgcgccatctgcggggaccgggcgacgggcaagcactacggggccagctcctgcgacggctgcaagggcttcttccgccggagcgtccgcaagaaccacatgtactcctgccggttcagccgccagtgcgtggtggacaaggacaagcggaaccagtgccgctactgccggctgaagaagtgcttccgcgccgggatgaagaaggaggccgtccagaacgagcgggaccgcatctccacccggcgcgcggcctacgaggacagcgccctgccctccatcaacgccctcctgcaggccgaggtgctgagccggcagatcaccgcgcccgtgtccggcatcaacggggacatccgcgccaagaagatcgccagcatcgccgacgtctgcgagtccatgaaggagcagctcctggtgctggtggagtgggccaagtacatcccggcgttctgcgagctccccctggacgaccaggtcgccctgctccgggcccacgccggcgagcacctcctgctgggggccaccaagcgcagcatggtgttcaaggacgtgctgctgctcggcaacgactacatcgtcccccggcactgccccgagctggcggagatgtcccgcgtgagcatccggatcctggacgagctcgtgctgccgttccaggagctgcagatcgacgacaacgagtacgcctacctcaaggccatcatcttcttcgaccccgacgccaagggcctgagcgaccccgggaagatcaagcgcctgcgcgcccaggtccaggtgtccctcgaggactacatcaacgaccggcagtacgacagccgcggccggttcggggagctgctgctcctgctgcccacgctccagtccatcacctggcagatgatcgagcagatccagttcatcaagctgttcggcatggcgaagatcgacaacctgctccaggagatgctgctgggcggggccccgagcgacgcgccccacgcccaccaccccctccacccccacctgatgcaggagcacatgggcaccaacgtgatcgtcgccaacaccatgccgacgcacctgtccaacgggcagatgtgcgagtggccccgcccccggggccaggccgccgcccccgaggccccgcagcccgcgccgcccgggggcagcggctccgagccctacaagctgctccccggggccgtggccaccatcgtgcgccccctgagcgccatcccccagccgaccatcaccaagcaggaggtcatctgaggactagtccctgttcccagagcccacttttttttctttttttgaaataaaatagcctgtctttcagatctcaaaggctcttttcagagccaccaaaaaaaaaaaaaaaaaaaaaaaaaaaaaaaaaaaaaaaaaaaaaaaaaaaaaaaaaaaaaaaaaaaaaaaaaaaaaaaaaaaaaaaaaaaaaaaaaaaaa

SEQ ID NO: 2990 - RNA, 1697 nt, synthetic construct
  misc_feature 1..1697: note = mRNA a-1 (hSL-A100) (opt1) from Homo sapiens__NP_000448.3__HNF4A(1-474)(K106R_K108R_K126R_K127R_ S142A_S143A_S148A_S167A_S313A_S378A_T429A_T432A_S436A_K458R )
  source 1..1697: mol_type = other RNA
aggagagtcccgcagtcggcgtccagcggctctgcttgttcgtgtgtgtgtcgttgcaggccttattcaagcttaccatgcgcctgagcaagaccctcgtggacatggacatggccgactactccgccgcgctggaccccgcctacaccacgctggagttcgagaacgtccaggtgctcaccatgggcaacgacaccagcccgtccgaggggaccaacctgaacgcccccaacagcctgggcgtgtccgccctctgcgccatctgcggggaccgggcgacgggcaagcactacggggccagctcctgcgacggctgcaagggcttcttccgccggagcgtccgcaagaaccacatgtactcctgccggttcagccgccagtgcgtggtggaccgggaccgccggaaccagtgccgctactgccggctgaagaagtgcttccgcgccgggatgcggcgcgaggccgtccagaacgagcgggaccgcatctccacccggcgcgcggcctacgaggacagcgccctgccctccatcaacgccctcctgcaggccgaggtgctgagccggcagatcaccgcgcccgtgtccggcatcaacggggacatccgcgccaagaagatcgccagcatcgccgacgtctgcgagtccatgaaggagcagctcctggtgctggtggagtgggccaagtacatcccggcgttctgcgagctccccctggacgaccaggtcgccctgctccgggcccacgccggcgagcacctcctgctgggggccaccaagcgcagcatggtgttcaaggacgtgctgctgctcggcaacgactacatcgtcccccgccactgccccgagctggcggagatgtcccgggtgagcatccgcatcctggacgagctcgtgctgccgttccaggagctgcagatcgacgacaacgagtacgcctacctcaaggccatcatcttcttcgaccccgacgccaagggcctgagcgaccccgggaagatcaagcggctgcgcgcccaggtccaggtgtccctcgaggactacatcaacgaccggcagtacgacagccgcggccggttcggggagctgctgctcctgctgcccacgctccagtccatcacctggcagatgatcgagcagatccagttcatcaagctgttcggcatggcgaagatcgacaacctgctccaggagatgctgctgggcggggccccgagcgacgcgccccacgcccaccaccccctccacccccacctgatgcaggagcacatgggcaccaacgtgatcgtcgccaacaccatgccgacgcacctgtccaacgggcagatgtgcgagtggccccgcccccggggccaggccgccgcccccgaggccccgcagcccgcgccgcccgggggcagcggctccgagccctacaagctgctccccggggccgtggccaccatcgtgcgccccctgagcgccatcccccagccgaccatcaccaagcaggaggtcatctgaggactagtccctgttcccagagcccacttttttttctttttttgaaataaaatagcctgtctttcagatctcaaaggctcttttcagagccaccaaaaaaaaaaaaaaaaaaaaaaaaaaaaaaaaaaaaaaaaaaaaaaaaaaaaaaaaaaaaaaaaaaaaaaaaaaaaaaaaaaaaaaaaaaaaaaaaaaaaa

SEQ ID NO: 2991 - RNA, 1697 nt, synthetic construct
  misc_feature 1..1697: note = mRNA a-1 (hSL-A100) (opt1) from Homo sapiens__NP_000448.3__HNF4A(1-474)(S142A_S143A_S148A_T166A_ S167A_S313A_S378A_T429A_T432A_S436A_K458R)
  source 1..1697: mol_type = other RNA
aggagagtcccgcagtcggcgtccagcggctctgcttgttcgtgtgtgtgtcgttgcaggccttattcaagcttaccatgcgcctgagcaagaccctcgtggacatggacatggccgactactccgccgcgctggaccccgcctacaccacgctggagttcgagaacgtccaggtgctcaccatgggcaacgacaccagcccgtccgaggggaccaacctgaacgcccccaacagcctgggcgtgtccgccctctgcgccatctgcggggaccgggcgacgggcaagcactacggggccagctcctgcgacggctgcaagggcttcttccgccggagcgtccgcaagaaccacatgtactcctgccggttcagccgccagtgcgtggtggacaaggacaagcggaaccagtgccgctactgccggctgaagaagtgcttccgcgccgggatgaagaaggaggccgtccagaacgagcgggaccgcatctccacccggcgcgcggcctacgaggacagcgccctgccctccatcaacgccctcctgcaggccgaggtgctgagccggcagatcgcggcccccgtgtccggcatcaacggggacatccgcgccaagaagatcgccagcatcgccgacgtctgcgagtccatgaaggagcagctcctggtgctggtggagtgggcgaagtacatcccggccttctgcgagctccccctggacgaccaggtcgccctgctccgggcccacgccggcgagcacctcctgctgggggcgaccaagcgcagcatggtgttcaaggacgtgctgctgctcggcaacgactacatcgtcccccggcactgccccgagctggccgagatgtcccgcgtgagcatccggatcctggacgagctcgtgctgccgttccaggagctgcagatcgacgacaacgagtacgcctacctcaaggccatcatcttcttcgaccccgacgccaagggcctgagcgaccccgggaagatcaagcgcctgcgcgcgcaggtccaggtgtccctcgaggactacatcaacgaccggcagtacgacagccgcggccggttcggggagctgctgctcctgctgcccaccctccagtccatcacgtggcagatgatcgagcagatccagttcatcaagctgttcggcatggccaagatcgacaacctgctccaggagatgctgctgggcggggccccgagcgacgcgccccacgcccaccaccccctccacccccacctgatgcaggagcacatgggcaccaacgtgatcgtcgccaacaccatgccgacccacctgtccaacgggcagatgtgcgagtggccccgcccccggggccaggccgccgcccccgaggcgccgcagcccgccccgcccgggggcagcggctccgagccctacaagctgctccccggggccgtggccacgatcgtgcgccccctgagcgccatcccccagccgaccatcaccaagcaggaggtcatctgaggactagtccctgttcccagagcccacttttttttctttttttgaaataaaatagcctgtctttcagatctcaaaggctcttttcagagccaccaaaaaaaaaaaaaaaaaaaaaaaaaaaaaaaaaaaaaaaaaaaaaaaaaaaaaaaaaaaaaaaaaaaaaaaaaaaaaaaaaaaaaaaaaaaaaaaaaaaaa

SEQ ID NO: 2992 - RNA, 1697 nt, synthetic construct
  misc_feature 1..1697: note = mRNA a-1 (hSL-A100) (opt1) from Homo sapiens__NP_000448.3__HNF4A(1-474)(S87A_S142A_S143A_S148A_T 166A_S167A_S313A_S378A_T429A_T432A_S436A_K458R)
  source 1..1697: mol_type = other RNA
aggagagtcccgcagtcggcgtccagcggctctgcttgttcgtgtgtgtgtcgttgcaggccttattcaagcttaccatgcgcctgagcaagaccctcgtggacatggacatggccgactactccgccgcgctggaccccgcctacaccacgctggagttcgagaacgtccaggtgctcaccatgggcaacgacaccagcccgtccgaggggaccaacctgaacgcccccaacagcctgggcgtgtccgccctctgcgccatctgcggggaccgggcgacgggcaagcactacggggccagctcctgcgacggctgcaagggcttcttccgccgggccgtccgcaagaaccacatgtacagctgccggttctcccgccagtgcgtggtggacaaggacaagcggaaccagtgccgctactgccggctgaagaagtgcttccgcgccgggatgaagaaggaggcggtccagaacgagcgggaccgcatcagcacccggcgcgccgcctacgaggactccgccctgcccagcatcaacgccctcctgcaggcggaggtgctgtcccggcagatcgccgcccccgtgagcggcatcaacggggacatccgcgccaagaagatcgcctccatcgcggacgtctgcgagagcatgaaggagcagctcctggtgctggtggagtgggccaagtacatcccggccttctgcgagctccccctggacgaccaggtcgccctgctccgggcccacgcgggcgagcacctcctgctgggggccaccaagcgctccatggtgttcaaggacgtgctgctgctcggcaacgactacatcgtcccccggcactgccccgagctggccgagatgagccgcgtgtccatccggatcctggacgagctcgtgctgccgttccaggagctgcagatcgacgacaacgagtacgcctacctcaaggccatcatcttcttcgaccccgacgcgaagggcctgagcgaccccgggaagatcaagcgcctgcgcgcccaggtccaggtgagcctcgaggactacatcaacgaccggcagtacgactcccgcggccggttcggggagctgctgctcctgctgcccaccctccagagcatcacgtggcagatgatcgagcagatccagttcatcaagctgttcggcatggccaagatcgacaacctgctccaggagatgctgctgggcggggccccgtccgacgcgccccacgcccaccaccccctccacccccacctgatgcaggagcacatgggcaccaacgtgatcgtcgccaacaccatgccgacccacctgagcaacgggcagatgtgcgagtggccccgcccccggggccaggccgccgcgcccgaggccccgcagcccgccccgcccgggggctccggcagcgagccctacaagctgctccccggggccgtggccacgatcgtgcgccccctgtccgcgatcccccagccgaccatcaccaagcaggaggtcatctgaggactagtccctgttcccagagcccacttttttttctttttttgaaataaaatagcctgtctttcagatctcaaaggctcttttcagagccaccaaaaaaaaaaaaaaaaaaaaaaaaaaaaaaaaaaaaaaaaaaaaaaaaaaaaaaaaaaaaaaaaaaaaaaaaaaaaaaaaaaaaaaaaaaaaaaaaaaaaa

SEQ ID NO: 2993 - RNA, 1697 nt, synthetic construct
  misc_feature 1..1697: note = mRNA a-1 (hSL-A100) (opt1) from Homo sapiens__NP_000448.3__HNF4A(1-474)(S87A_K106R_K108R_K126R_K 127R_S142A_S143A_S148A_T166A_S167A_S313A_S378A_T429A_T432A_ S436A_K458R)
  source 1..1697: mol_type = other RNA
aggagagtcccgcagtcggcgtccagcggctctgcttgttcgtgtgtgtgtcgttgcaggccttattcaagcttaccatgcgcctgagcaagaccctcgtggacatggacatggccgactactccgccgcgctggaccccgcctacaccacgctggagttcgagaacgtccaggtgctcaccatgggcaacgacaccagcccgtccgaggggaccaacctgaacgcccccaacagcctgggcgtgtccgccctctgcgccatctgcggggaccgggcgacgggcaagcactacggggccagctcctgcgacggctgcaagggcttcttccgccgggccgtccgcaagaaccacatgtacagctgccggttctcccgccagtgcgtggtggaccgggaccgccggaaccagtgccgctactgccggctgaagaagtgcttccgcgccgggatgcggcgcgaggcggtccagaacgagcgggaccgcatcagcacccggcgcgccgcctacgaggactccgccctgcccagcatcaacgccctcctgcaggcggaggtgctgtcccggcagatcgccgcccccgtgagcggcatcaacggggacatccgcgccaagaagatcgcctccatcgcggacgtctgcgagagcatgaaggagcagctcctggtgctggtggagtgggccaagtacatcccggccttctgcgagctccccctggacgaccaggtcgccctgctccgggcccacgcgggcgagcacctcctgctgggggccaccaagcgctccatggtgttcaaggacgtgctgctgctcggcaacgactacatcgtcccccgccactgccccgagctggccgagatgagccgggtgtccatccgcatcctggacgagctcgtgctgccgttccaggagctgcagatcgacgacaacgagtacgcctacctcaaggccatcatcttcttcgaccccgacgcgaagggcctgagcgaccccgggaagatcaagcggctgcgcgcccaggtccaggtgagcctcgaggactacatcaacgaccggcagtacgactcccgcggccggttcggggagctgctgctcctgctgcccaccctccagagcatcacgtggcagatgatcgagcagatccagttcatcaagctgttcggcatggccaagatcgacaacctgctccaggagatgctgctgggcggggccccgtccgacgcgccccacgcccaccaccccctccacccccacctgatgcaggagcacatgggcaccaacgtgatcgtcgccaacaccatgccgacccacctgagcaacgggcagatgtgcgagtggccccgcccccggggccaggccgccgcgcccgaggccccgcagcccgccccgcccgggggctccggcagcgagccctacaagctgctccccggggccgtggccacgatcgtgcgccccctgtccgcgatcccccagccgaccatcaccaagcaggaggtcatctgaggactagtccctgttcccagagcccacttttttttctttttttgaaataaaatagcctgtctttcagatctcaaaggctcttttcagagccaccaaaaaaaaaaaaaaaaaaaaaaaaaaaaaaaaaaaaaaaaaaaaaaaaaaaaaaaaaaaaaaaaaaaaaaaaaaaaaaaaaaaaaaaaaaaaaaaaaaaaa

SEQ ID NO: 2994 - RNA, 1697 nt, synthetic construct
  misc_feature 1..1697: note = mRNA a-1 (hSL-A100) (opt1) from Homo sapiens__NP_000448.3__HNF4A(1-474)(S87A_K106R_K108R_K126R_K 127R)
  source 1..1697: mol_type = other RNA
aggagagtcccgcagtcggcgtccagcggctctgcttgttcgtgtgtgtgtcgttgcaggccttattcaagcttaccatgcgcctgagcaagaccctcgtggacatggacatggccgactactccgccgcgctggaccccgcctacaccacgctggagttcgagaacgtccaggtgctcaccatgggcaacgacaccagcccgtccgaggggaccaacctgaacgcccccaacagcctgggcgtgtccgccctctgcgccatctgcggggaccgggcgacgggcaagcactacggggccagctcctgcgacggctgcaagggcttcttccgccgggccgtccgcaagaaccacatgtacagctgccggttctcccgccagtgcgtggtggaccgggaccgccggaaccagtgccgctactgccggctgaagaagtgcttccgcgccgggatgcggcgcgaggcggtccagaacgagcgggaccgcatcagcacccggcgctccagctacgaggactccagcctgccctccatcaacgccctcctgcaggccgaggtgctgagccggcagatcacctcccccgtgagcggcatcaacggggacatccgcgccaagaagatcgcctccatcgcggacgtctgcgagagcatgaaggagcagctcctggtgctggtggagtgggccaagtacatcccggccttctgcgagctccccctggacgaccaggtcgccctgctccgggcccacgcgggcgagcacctcctgctgggggccaccaagcgcagcatggtgttcaaggacgtgctgctgctcggcaacgactacatcgtcccccgccactgccccgagctggccgagatgtcccgggtgagcatccgcatcctggacgagctcgtgctgccgttccaggagctgcagatcgacgacaacgagtacgcctacctcaaggccatcatcttcttcgaccccgacgcgaagggcctgtccgaccccgggaagatcaagcggctgcgcagccaggtccaggtgtccctcgaggactacatcaacgaccggcagtacgacagccgcggccggttcggggagctgctgctcctgctgcccacgctccagtccatcacctggcagatgatcgagcagatccagttcatcaagctgttcggcatggccaagatcgacaacctgctccaggagatgctgctgggcgggagcccgtccgacgcgccccacgcccaccaccccctccacccccacctgatgcaggagcacatgggcaccaacgtgatcgtcgccaacaccatgccgacgcacctgagcaacgggcagatgtgcgagtggccccgcccccggggccaggccgccacccccgagaccccgcagccctccccgcccgggggcagcggctccgagccctacaagctgctccccggggccgtggccaccatcgtgaagcccctgagcgcgatcccccagccgacgatcaccaagcaggaggtcatctgaggactagtccctgttcccagagcccacttttttttctttttttgaaataaaatagcctgtctttcagatctcaaaggctcttttcagagccaccaaaaaaaaaaaaaaaaaaaaaaaaaaaaaaaaaaaaaaaaaaaaaaaaaaaaaaaaaaaaaaaaaaaaaaaaaaaaaaaaaaaaaaaaaaaaaaaaaaaaa

SEQ ID NO: 2995 - RNA, 1697 nt, synthetic construct
  misc_feature 1..1697: note = mRNA a-1 (hSL-A100) (opt1) from Homo sapiens__NP_000448.3__HNF4A(1-474)(S87A_K106R_K108R_K126R_K 127R_S142A_S143A_S148A_T166A_S167A_S313A_S378A_T429A_T432A_ S436A_K458R_S461A)
  source 1..1697: mol_type = other RNA
aggagagtcccgcagtcggcgtccagcggctctgcttgttcgtgtgtgtgtcgttgcaggccttattcaagcttaccatgcgcctgagcaagaccctcgtggacatggacatggccgactactccgccgcgctggaccccgcctacaccacgctggagttcgagaacgtccaggtgctcaccatgggcaacgacaccagcccgtccgaggggaccaacctgaacgcccccaacagcctgggcgtgtccgccctctgcgccatctgcggggaccgggcgacgggcaagcactacggggccagctcctgcgacggctgcaagggcttcttccgccgggccgtccgcaagaaccacatgtacagctgccggttctcccgccagtgcgtggtggaccgggaccgccggaaccagtgccgctactgccggctgaagaagtgcttccgcgccgggatgcggcgcgaggcggtccagaacgagcgggaccgcatcagcacccggcgcgccgcctacgaggactccgccctgcccagcatcaacgccctcctgcaggcggaggtgctgtcccggcagatcgccgcccccgtgagcggcatcaacggggacatccgcgccaagaagatcgcctccatcgcggacgtctgcgagagcatgaaggagcagctcctggtgctggtggagtgggccaagtacatcccggccttctgcgagctccccctggacgaccaggtcgccctgctccgggcccacgcgggcgagcacctcctgctgggggccaccaagcgctccatggtgttcaaggacgtgctgctgctcggcaacgactacatcgtcccccgccactgccccgagctggccgagatgagccgggtgtccatccgcatcctggacgagctcgtgctgccgttccaggagctgcagatcgacgacaacgagtacgcctacctcaaggccatcatcttcttcgaccccgacgcgaagggcctgagcgaccccgggaagatcaagcggctgcgcgcccaggtccaggtgagcctcgaggactacatcaacgaccggcagtacgactcccgcggccggttcggggagctgctgctcctgctgcccaccctccagagcatcacgtggcagatgatcgagcagatccagttcatcaagctgttcggcatggccaagatcgacaacctgctccaggagatgctgctgggcggggccccgtccgacgcgccccacgcccaccaccccctccacccccacctgatgcaggagcacatgggcaccaacgtgatcgtcgccaacaccatgccgacccacctgagcaacgggcagatgtgcgagtggccccgcccccggggccaggccgccgcgcccgaggccccgcagcccgccccgcccgggggctccggcagcgagccctacaagctgctccccggggccgtggccacgatcgtgcgccccctggcggccatcccccagccgaccatcaccaagcaggaggtcatctgaggactagtccctgttcccagagcccacttttttttctttttttgaaataaaatagcctgtctttcagatctcaaaggctcttttcagagccaccaaaaaaaaaaaaaaaaaaaaaaaaaaaaaaaaaaaaaaaaaaaaaaaaaaaaaaaaaaaaaaaaaaaaaaaaaaaaaaaaaaaaaaaaaaaaaaaaaaaaa

SEQ ID NO: 2996 - RNA, 1697 nt, synthetic construct
  misc_feature 1..1697: note = mRNA a-1 (hSL-A100) (opt1) from Homo sapiens__NP_000448.3__HNF4A(1-474)(S87A_K106R_K108R_K126R_K 127R_S142A_S143A_S148A_T166A_S167A_S313A_S378A_T429A_T432A_ S436A_K458R_S461E)
  source 1..1697: mol_type = other RNA
aggagagtcccgcagtcggcgtccagcggctctgcttgttcgtgtgtgtgtcgttgcaggccttattcaagcttaccatgcgcctgagcaagaccctcgtggacatggacatggccgactactccgccgcgctggaccccgcctacaccacgctggagttcgagaacgtccaggtgctcaccatgggcaacgacaccagcccgtccgaggggaccaacctgaacgcccccaacagcctgggcgtgtccgccctctgcgccatctgcggggaccgggcgacgggcaagcactacggggccagctcctgcgacggctgcaagggcttcttccgccgggccgtccgcaagaaccacatgtacagctgccggttctcccgccagtgcgtggtggaccgggaccgccggaaccagtgccgctactgccggctgaagaagtgcttccgcgccgggatgcggcgcgaggcggtccagaacgagcgggaccgcatcagcacccggcgcgccgcctacgaggactccgccctgcccagcatcaacgccctcctgcaggcggaggtgctgtcccggcagatcgccgcccccgtgagcggcatcaacggggacatccgcgccaagaagatcgcctccatcgcggacgtctgcgagagcatgaaggagcagctcctggtgctggtggagtgggccaagtacatcccggccttctgcgagctccccctggacgaccaggtcgccctgctccgggcccacgcgggcgagcacctcctgctgggggccaccaagcgctccatggtgttcaaggacgtgctgctgctcggcaacgactacatcgtcccccgccactgccccgagctggccgagatgagccgggtgtccatccgcatcctggacgagctcgtgctgccgttccaggagctgcagatcgacgacaacgagtacgcctacctcaaggccatcatcttcttcgaccccgacgcgaagggcctgagcgaccccgggaagatcaagcggctgcgcgcccaggtccaggtgagcctcgaggactacatcaacgaccggcagtacgactcccgcggccggttcggggagctgctgctcctgctgcccaccctccagagcatcacgtggcagatgatcgagcagatccagttcatcaagctgttcggcatggccaagatcgacaacctgctccaggagatgctgctgggcggggccccgtccgacgcgccccacgcccaccaccccctccacccccacctgatgcaggagcacatgggcaccaacgtgatcgtcgccaacaccatgccgacccacctgagcaacgggcagatgtgcgagtggccccgcccccggggccaggccgccgcgcccgaggccccgcagcccgccccgcccgggggctccggcagcgagccctacaagctgctccccggggccgtggccacgatcgtgcgccccctggaggcgatcccccagccgaccatcaccaagcaggaggtcatctgaggactagtccctgttcccagagcccacttttttttctttttttgaaataaaatagcctgtctttcagatctcaaaggctcttttcagagccaccaaaaaaaaaaaaaaaaaaaaaaaaaaaaaaaaaaaaaaaaaaaaaaaaaaaaaaaaaaaaaaaaaaaaaaaaaaaaaaaaaaaaaaaaaaaaaaaaaaaaa

SEQ ID NO: 2997 - RNA, 1697 nt, synthetic construct
  misc_feature 1..1697: note = mRNA a-1 (hSL-A100) (opt1) from Homo sapiens__NP_000448.3__HNF4A(1-474)(S87A_K106R_K108R_K126R_K 127R_S142A_S143A_S148E_T166A_S167E_S313A_S378E_T429E_T432E_ S436E_K458R_S461E)
  source 1..1697: mol_type = other RNA
aggagagtcccgcagtcggcgtccagcggctctgcttgttcgtgtgtgtgtcgttgcaggccttattcaagcttaccatgcgcctgagcaagaccctcgtggacatggacatggccgactactccgccgcgctggaccccgcctacaccacgctggagttcgagaacgtccaggtgctcaccatgggcaacgacaccagcccgtccgaggggaccaacctgaacgcccccaacagcctgggcgtgtccgccctctgcgccatctgcggggaccgggcgacgggcaagcactacggggccagctcctgcgacggctgcaagggcttcttccgccgggccgtccgcaagaaccacatgtacagctgccggttctcccgccagtgcgtggtggaccgggaccgccggaaccagtgccgctactgccggctgaagaagtgcttccgcgccgggatgcggcgcgaggcggtccagaacgagcgggaccgcatcagcacccggcgcgccgcctacgaggactccgagctgcccagcatcaacgccctcctgcaggccgaggtgctgtcccggcagatcgcggagcccgtgagcggcatcaacggggacatccgcgccaagaagatcgcctccatcgccgacgtctgcgagagcatgaaggagcagctcctggtgctggtggagtgggccaagtacatcccggcgttctgcgagctccccctggacgaccaggtcgccctgctccgggcccacgccggcgagcacctcctgctgggggccaccaagcgctccatggtgttcaaggacgtgctgctgctcggcaacgactacatcgtcccccgccactgccccgagctggcggagatgagccgggtgtccatccgcatcctggacgagctcgtgctgccgttccaggagctgcagatcgacgacaacgagtacgcctacctcaaggccatcatcttcttcgaccccgacgccaagggcctgagcgaccccgggaagatcaagcggctgcgcgcccaggtccaggtgagcctcgaggactacatcaacgaccggcagtacgactcccgcggccggttcggggagctgctgctcctgctgcccaccctccagagcatcacgtggcagatgatcgagcagatccagttcatcaagctgttcggcatggcgaagatcgacaacctgctccaggagatgctgctgggcggggagccgtccgacgcgccccacgcccaccaccccctccacccccacctgatgcaggagcacatgggcaccaacgtgatcgtcgccaacaccatgccgacccacctgagcaacgggcagatgtgcgagtggccccgcccccggggccaggccgccgagcccgaggagccgcagcccgagccgcccgggggctccggcagcgagccctacaagctgctccccggggccgtggccacgatcgtgcgccccctggaggccatcccccagccgaccatcaccaagcaggaggtcatctgaggactagtccctgttcccagagcccacttttttttctttttttgaaataaaatagcctgtctttcagatctcaaaggctcttttcagagccaccaaaaaaaaaaaaaaaaaaaaaaaaaaaaaaaaaaaaaaaaaaaaaaaaaaaaaaaaaaaaaaaaaaaaaaaaaaaaaaaaaaaaaaaaaaaaaaaaaaaaa

SEQ ID NO: 2998 - RNA, 1697 nt, synthetic construct
  misc_feature 1..1697: note = mRNA a-1 (hSL-A100) (opt1) from Homo sapiens__NP_000448.3__HNF4A(1-474)(S87A_K106R_K108R_K126R_K 127R_S142A_S143A_S148A_T166A_S167A_K179R_K180R_S313A_S378A_ T429A_T432A_S436A_K458R_S461E)
  source 1..1697: mol_type = other RNA
aggagagtcccgcagtcggcgtccagcggctctgcttgttcgtgtgtgtgtcgttgcaggccttattcaagcttaccatgcgcctgagcaagaccctcgtggacatggacatggccgactactccgccgcgctggaccccgcctacaccacgctggagttcgagaacgtccaggtgctcaccatgggcaacgacaccagcccgtccgaggggaccaacctgaacgcccccaacagcctgggcgtgtccgccctctgcgccatctgcggggaccgggcgacgggcaagcactacggggccagctcctgcgacggctgcaagggcttcttccgccgggccgtccgcaagaaccacatgtacagctgccggttctcccgccagtgcgtggtggaccgggaccgccggaaccagtgccgctactgccggctgaagaagtgcttccgcgccgggatgcggcgcgaggcggtccagaacgagcgggaccgcatcagcacccggcgcgccgcctacgaggactccgccctgcccagcatcaacgccctcctgcaggcggaggtgctgtcccggcagatcgccgcccccgtgagcggcatcaacggggacatccgcgcccggcgcatcgcctccatcgcggacgtctgcgagagcatgaaggagcagctcctggtgctggtggagtgggccaagtacatcccggccttctgcgagctccccctggacgaccaggtcgccctgctccgcgcccacgcgggcgagcacctcctgctgggggccaccaagcggtccatggtgttcaaggacgtgctgctgctcggcaacgactacatcgtcccccgccactgccccgagctggccgagatgagccgggtgtccatccgcatcctggacgagctcgtgctgccgttccaggagctgcagatcgacgacaacgagtacgcctacctcaaggccatcatcttcttcgaccccgacgcgaagggcctgagcgaccccgggaagatcaagcggctgcgcgcccaggtccaggtgagcctcgaggactacatcaacgaccggcagtacgactcccgcggccggttcggggagctgctgctcctgctgcccaccctccagagcatcacgtggcagatgatcgagcagatccagttcatcaagctgttcggcatggccaagatcgacaacctgctccaggagatgctgctgggcggggccccgtccgacgcgccccacgcccaccaccccctccacccccacctgatgcaggagcacatgggcaccaacgtgatcgtcgccaacaccatgccgacccacctgagcaacgggcagatgtgcgagtggccccgcccccggggccaggccgccgcgcccgaggccccgcagcccgccccgcccgggggctccggcagcgagccctacaagctgctccccggggccgtggccacgatcgtgcgccccctggaggcgatcccccagccgaccatcaccaagcaggaggtcatctgaggactagtccctgttcccagagcccacttttttttctttttttgaaataaaatagcctgtctttcagatctcaaaggctcttttcagagccaccaaaaaaaaaaaaaaaaaaaaaaaaaaaaaaaaaaaaaaaaaaaaaaaaaaaaaaaaaaaaaaaaaaaaaaaaaaaaaaaaaaaaaaaaaaaaaaaaaaaaa

SEQ ID NO: 2999 - RNA, 1697 nt, synthetic construct
  misc_feature 1..1697: note = mRNA a-1 (hSL-A100) (opt1) from Homo sapiens__NP_000448.3__HNF4A(1-474)(S87A_K106R_K108R_K126R_K 127R_S142A_S143A_S148A_T166A_S167A_K300R_K307R_K309R_S313A_ S378A_T429A_T432A_S436A_K458R_S461E)
  source 1..1697: mol_type = other RNA
aggagagtcccgcagtcggcgtccagcggctctgcttgttcgtgtgtgtgtcgttgcaggccttattcaagcttaccatgcgcctgagcaagaccctcgtggacatggacatggccgactactccgccgcgctggaccccgcctacaccacgctggagttcgagaacgtccaggtgctcaccatgggcaacgacaccagcccgtccgaggggaccaacctgaacgcccccaacagcctgggcgtgtccgccctctgcgccatctgcggggaccgggcgacgggcaagcactacggggccagctcctgcgacggctgcaagggcttcttccgccgggccgtccgcaagaaccacatgtacagctgccggttctcccgccagtgcgtggtggaccgggaccgccggaaccagtgccgctactgccggctgaagaagtgcttccgcgccgggatgcggcgcgaggcggtccagaacgagcgggaccgcatcagcacccggcgcgccgcctacgaggactccgccctgcccagcatcaacgccctcctgcaggcggaggtgctgtcccggcagatcgccgcccccgtgagcggcatcaacggggacatccgcgccaagaagatcgcctccatcgcggacgtctgcgagagcatgaaggagcagctcctggtgctggtggagtgggccaagtacatcccggccttctgcgagctccccctggacgaccaggtcgccctgctccgggcccacgcgggcgagcacctcctgctgggggccaccaagcgctccatggtgttcaaggacgtgctgctgctcggcaacgactacatcgtcccccgccactgccccgagctggccgagatgagccgggtgtccatccgcatcctggacgagctcgtgctgccgttccaggagctgcagatcgacgacaacgagtacgcctacctcaaggccatcatcttcttcgaccccgacgcgcggggcctgagcgaccccgggcgcatccggcgcctgcgggcccaggtccaggtgagcctcgaggactacatcaacgaccgccagtacgactcccggggccgcttcggggagctgctgctcctgctgcccaccctccagagcatcacgtggcagatgatcgagcagatccagttcatcaagctgttcggcatggccaagatcgacaacctgctccaggagatgctgctgggcggggccccgtccgacgcgccccacgcccaccaccccctccacccccacctgatgcaggagcacatgggcaccaacgtgatcgtcgccaacaccatgccgacccacctgagcaacgggcagatgtgcgagtggccccggccccgcggccaggccgccgcgcccgaggccccgcagcccgccccgcccgggggctccggcagcgagccctacaagctgctccccggggccgtggccacgatcgtgcggcccctggaggcgatcccccagccgaccatcaccaagcaggaggtcatctgaggactagtccctgttcccagagcccacttttttttctttttttgaaataaaatagcctgtctttcagatctcaaaggctcttttcagagccaccaaaaaaaaaaaaaaaaaaaaaaaaaaaaaaaaaaaaaaaaaaaaaaaaaaaaaaaaaaaaaaaaaaaaaaaaaaaaaaaaaaaaaaaaaaaaaaaaaaaaa

SEQ ID NO: 3000 - RNA, 1697 nt, synthetic construct
  misc_feature 1..1697: note = mRNA a-1 (hSL-A100) (opt1) from Homo sapiens__NP_000448.3__HNF4A(1-474)(S87A_K106R_K108R_K126R_K 127R_S142A_S143A_S148A_T166A_S167A_S313A_S378A_T429A_T432A_ S436A_K447R_K458R_S461E_K470R)
  source 1..1697: mol_type = other RNA
aggagagtcccgcagtcggcgtccagcggctctgcttgttcgtgtgtgtgtcgttgcaggccttattcaagcttaccatgcgcctgagcaagaccctcgtggacatggacatggccgactactccgccgcgctggaccccgcctacaccacgctggagttcgagaacgtccaggtgctcaccatgggcaacgacaccagcccgtccgaggggaccaacctgaacgcccccaacagcctgggcgtgtccgccctctgcgccatctgcggggaccgggcgacgggcaagcactacggggccagctcctgcgacggctgcaagggcttcttccgccgggccgtccgcaagaaccacatgtacagctgccggttctcccgccagtgcgtggtggaccgggaccgccggaaccagtgccgctactgccggctgaagaagtgcttccgcgccgggatgcggcgcgaggcggtccagaacgagcgggaccgcatcagcacccggcgcgccgcctacgaggactccgccctgcccagcatcaacgccctcctgcaggcggaggtgctgtcccggcagatcgccgcccccgtgagcggcatcaacggggacatccgcgccaagaagatcgcctccatcgcggacgtctgcgagagcatgaaggagcagctcctggtgctggtggagtgggccaagtacatcccggccttctgcgagctccccctggacgaccaggtcgccctgctccgggcccacgcgggcgagcacctcctgctgggggccaccaagcgctccatggtgttcaaggacgtgctgctgctcggcaacgactacatcgtcccccgccactgccccgagctggccgagatgagccgggtgtccatccgcatcctggacgagctcgtgctgccgttccaggagctgcagatcgacgacaacgagtacgcctacctcaaggccatcatcttcttcgaccccgacgcgaagggcctgagcgaccccgggaagatcaagcggctgcgcgcccaggtccaggtgagcctcgaggactacatcaacgaccggcagtacgactcccgcggccggttcggggagctgctgctcctgctgcccaccctccagagcatcacgtggcagatgatcgagcagatccagttcatcaagctgttcggcatggccaagatcgacaacctgctccaggagatgctgctgggcggggccccgtccgacgcgccccacgcccaccaccccctccacccccacctgatgcaggagcacatgggcaccaacgtgatcgtcgccaacaccatgccgacccacctgagcaacgggcagatgtgcgagtggccccgcccccggggccaggccgccgcgcccgaggccccgcagcccgccccgcccgggggctccggcagcgagccctaccgcctgctccccggggccgtggccacgatcgtgcggcccctggaggcgatcccccagccgaccatcacccgccaggaggtcatctgaggactagtccctgttcccagagcccacttttttttctttttttgaaataaaatagcctgtctttcagatctcaaaggctcttttcagagccaccaaaaaaaaaaaaaaaaaaaaaaaaaaaaaaaaaaaaaaaaaaaaaaaaaaaaaaaaaaaaaaaaaaaaaaaaaaaaaaaaaaaaaaaaaaaaaaaaaaaaa

SEQ ID NO: 3001 - RNA, 1697 nt, synthetic construct
  misc_feature 1..1697: note = mRNA a-1 (hSL-A100) (opt1) from Homo sapiens__NP_000448.3__HNF4A(1-474)(S87A_K106R_K108R_K126R_K 127R_S142A_S143A_S148A_T166A_S167A_K179R_K180R_K234R_K300R_ K307R_K309R_S313A_S378A_T429A_T432A_S436A_K447R_K458R_S461E _K470R)
  source 1..1697: mol_type = other RNA
aggagagtcccgcagtcggcgtccagcggctctgcttgttcgtgtgtgtgtcgttgcaggccttattcaagcttaccatgcgcctgagcaagaccctcgtggacatggacatggccgactactccgccgcgctggaccccgcctacaccacgctggagttcgagaacgtccaggtgctcaccatgggcaacgacaccagcccgtccgaggggaccaacctgaacgcccccaacagcctgggcgtgtccgccctctgcgccatctgcggggaccgggcgacgggcaagcactacggggccagctcctgcgacggctgcaagggcttcttccgccgggccgtccgcaagaaccacatgtacagctgccggttctcccgccagtgcgtggtggaccgggaccgccggaaccagtgccgctactgccggctgaagaagtgcttccgcgccgggatgcggcgcgaggcggtccagaacgagcgggaccgcatcagcacccggcgcgccgcctacgaggactccgccctgcccagcatcaacgccctcctgcaggcggaggtgctgtcccggcagatcgccgcccccgtgagcggcatcaacggggacatccgcgcccggcgcatcgcctccatcgcggacgtctgcgagagcatgaaggagcagctcctggtgctggtggagtgggccaagtacatcccggccttctgcgagctccccctggacgaccaggtcgccctgctccgcgcccacgcgggcgagcacctcctgctgggggccacccggcgctccatggtgttcaaggacgtgctgctgctcggcaacgactacatcgtcccccggcactgccccgagctggccgagatgagccgcgtgtccatccggatcctggacgagctcgtgctgccgttccaggagctgcagatcgacgacaacgagtacgcctacctcaaggccatcatcttcttcgaccccgacgcgcgcggcctgagcgaccccgggcggatccgccggctgcgcgcccaggtccaggtgagcctcgaggactacatcaacgaccggcagtacgactcccgcggccggttcggggagctgctgctcctgctgcccaccctccagagcatcacgtggcagatgatcgagcagatccagttcatcaagctgttcggcatggccaagatcgacaacctgctccaggagatgctgctgggcggggccccgtccgacgcgccccacgcccaccaccccctccacccccacctgatgcaggagcacatgggcaccaacgtgatcgtcgccaacaccatgccgacccacctgagcaacgggcagatgtgcgagtggccccgcccccggggccaggccgccgcgcccgaggccccgcagcccgccccgcccgggggctccggcagcgagccctaccgcctgctccccggggccgtggccacgatcgtgcggcccctggaggcgatcccccagccgaccatcacccgccaggaggtcatctgaggactagtccctgttcccagagcccacttttttttctttttttgaaataaaatagcctgtctttcagatctcaaaggctcttttcagagccaccaaaaaaaaaaaaaaaaaaaaaaaaaaaaaaaaaaaaaaaaaaaaaaaaaaaaaaaaaaaaaaaaaaaaaaaaaaaaaaaaaaaaaaaaaaaaaaaaaaaaa

SEQ ID NO: 3002 - RNA, 1697 nt, synthetic construct
  misc_feature 1..1697: note = mRNA a-1 (hSL-A100) (opt1) from Homo sapiens__NP_000448.3__HNF4A(1-474)(S87A_S95A_S99A_K106R_K10 8R_K126R_K127R_S142A_S143A_S148A_T166A_S167A_S313A_S378A_T4 29A_T432A_S436A_K458R_S461E)
  source 1..1697: mol_type = other RNA
aggagagtcccgcagtcggcgtccagcggctctgcttgttcgtgtgtgtgtcgttgcaggccttattcaagcttaccatgcgcctgagcaagaccctcgtggacatggacatggccgactactccgccgcgctggaccccgcctacaccacgctggagttcgagaacgtccaggtgctcaccatgggcaacgacaccagcccgtccgaggggaccaacctgaacgcccccaacagcctgggcgtgtccgccctctgcgccatctgcggggaccgggcgacgggcaagcactacggggccagctcctgcgacggctgcaagggcttcttccgccgggccgtccgcaagaaccacatgtacgcctgccggttcgcgcgccagtgcgtggtggaccgggaccgccggaaccagtgccgctactgccggctgaagaagtgcttccgcgccgggatgcggcgcgaggccgtccagaacgagcgggaccgcatcagcacccggcgcgccgcctacgaggactccgcgctgcccagcatcaacgccctcctgcaggccgaggtgctgtcccggcagatcgccgcccccgtgagcggcatcaacggggacatccgcgcgaagaagatcgcctccatcgccgacgtctgcgagagcatgaaggagcagctcctggtgctggtggagtgggccaagtacatcccggccttctgcgagctccccctggacgaccaggtcgcgctgctccgggcccacgccggcgagcacctcctgctgggggccaccaagcgctccatggtgttcaaggacgtgctgctgctcggcaacgactacatcgtcccccgccactgccccgagctggccgagatgagccgggtgtccatccgcatcctggacgagctcgtgctgccgttccaggagctgcagatcgacgacaacgagtacgcgtacctcaaggccatcatcttcttcgaccccgacgccaagggcctgagcgaccccgggaagatcaagcggctgcgcgcccaggtccaggtgtccctcgaggactacatcaacgaccggcagtacgacagccgcggccggttcggggagctgctgctcctgctgcccaccctccagagcatcacgtggcagatgatcgagcagatccagttcatcaagctgttcggcatggcgaagatcgacaacctgctccaggagatgctgctgggcggggccccgtccgacgcgccccacgcccaccaccccctccacccccacctgatgcaggagcacatgggcaccaacgtgatcgtcgccaacaccatgccgacccacctgagcaacgggcagatgtgcgagtggccccgcccccggggccaggccgccgcccccgaggccccgcagcccgccccgcccgggggctccggcagcgagccctacaagctgctccccggggcggtggccacgatcgtgcgccccctggaggccatcccccagccgaccatcaccaagcaggaggtcatctgaggactagtccctgttcccagagcccacttttttttctttttttgaaataaaatagcctgtctttcagatctcaaaggctcttttcagagccaccaaaaaaaaaaaaaaaaaaaaaaaaaaaaaaaaaaaaaaaaaaaaaaaaaaaaaaaaaaaaaaaaaaaaaaaaaaaaaaaaaaaaaaaaaaaaaaaaaaaaa

SEQ ID NO: 3003 - RNA, 1697 nt, synthetic construct
  misc_feature 1..1697: note = mRNA a-1 (hSL-A100) (opt1) from Homo sapiens__NP_000448.3__HNF4A(1-474)(S87A_K106R_K108R_K126R_K 127R_S138A_T139A_S142A_S143A_S148A_T166A_S167A_S313A_S378A_ T429A_T432A_S436A_K458R_S461E)
  source 1..1697: mol_type = other RNA
aggagagtcccgcagtcggcgtccagcggctctgcttgttcgtgtgtgtgtcgttgcaggccttattcaagcttaccatgcgcctgagcaagaccctcgtggacatggacatggccgactactccgccgcgctggaccccgcctacaccacgctggagttcgagaacgtccaggtgctcaccatgggcaacgacaccagcccgtccgaggggaccaacctgaacgcccccaacagcctgggcgtgtccgccctctgcgccatctgcggggaccgggcgacgggcaagcactacggggccagctcctgcgacggctgcaagggcttcttccgccgggccgtccgcaagaaccacatgtacagctgccggttctcccgccagtgcgtggtggaccgggaccgccggaaccagtgccgctactgccggctgaagaagtgcttccgcgccgggatgcggcgcgaggcggtccagaacgagcgggaccgcatcgccgcccggcgcgccgcctacgaggacagcgcgctgccctccatcaacgccctcctgcaggccgaggtgctgagccggcagatcgccgcccccgtgtccggcatcaacggggacatccgcgcgaagaagatcgccagcatcgccgacgtctgcgagtccatgaaggagcagctcctggtgctggtggagtgggccaagtacatcccggccttctgcgagctccccctggacgaccaggtcgcgctgctccgggcccacgccggcgagcacctcctgctgggggccaccaagcgcagcatggtgttcaaggacgtgctgctgctcggcaacgactacatcgtcccccgccactgccccgagctggccgagatgtcccgggtgagcatccgcatcctggacgagctcgtgctgccgttccaggagctgcagatcgacgacaacgagtacgcgtacctcaaggccatcatcttcttcgaccccgacgccaagggcctgtccgaccccgggaagatcaagcggctgcgcgcccaggtccaggtgagcctcgaggactacatcaacgaccggcagtacgacagccgcggccggttcggggagctgctgctcctgctgcccaccctccagtccatcacctggcagatgatcgagcagatccagttcatcaagctgttcggcatggcgaagatcgacaacctgctccaggagatgctgctgggcggggccccgagcgacgcgccccacgcccaccaccccctccacccccacctgatgcaggagcacatgggcacgaacgtgatcgtcgccaacaccatgccgacccacctgtccaacgggcagatgtgcgagtggccccgcccccggggccaggccgccgcccccgaggccccgcagcccgccccgcccgggggcagcggctccgagccctacaagctgctccccggggcggtggccaccatcgtgcgccccctggaggccatcccccagccgacgatcaccaagcaggaggtcatctgaggactagtccctgttcccagagcccacttttttttctttttttgaaataaaatagcctgtctttcagatctcaaaggctcttttcagagccaccaaaaaaaaaaaaaaaaaaaaaaaaaaaaaaaaaaaaaaaaaaaaaaaaaaaaaaaaaaaaaaaaaaaaaaaaaaaaaaaaaaaaaaaaaaaaaaaaaaaaa

SEQ ID NO: 3004 - RNA, 1697 nt, synthetic construct
  misc_feature 1..1697: note = mRNA a-1 (hSL-A100) (opt1) from Homo sapiens__NP_000448.3__HNF4A(1-474)(S87A_S95A_S99A_K106R_K10 8R_K126R_K127R_S138A_T139A_S142A_S143A_S148A_T166A_S167A_S3 13A_S378A_T429A_T432A_S436A_K458R_S461E)
  source 1..1697: mol_type = other RNA
aggagagtcccgcagtcggcgtccagcggctctgcttgttcgtgtgtgtgtcgttgcaggccttattcaagcttaccatgcgcctgagcaagaccctcgtggacatggacatggccgactactccgccgcgctggaccccgcctacaccacgctggagttcgagaacgtccaggtgctcaccatgggcaacgacaccagcccgtccgaggggaccaacctgaacgcccccaacagcctgggcgtgtccgccctctgcgccatctgcggggaccgggcgacgggcaagcactacggggccagctcctgcgacggctgcaagggcttcttccgccgggccgtccgcaagaaccacatgtacgcctgccggttcgcgcgccagtgcgtggtggaccgggaccgccggaaccagtgccgctactgccggctgaagaagtgcttccgcgccgggatgcggcgcgaggccgtccagaacgagcgggaccgcatcgccgcccggcgcgcggcctacgaggacagcgccctgccctccatcaacgccctcctgcaggccgaggtgctgagccggcagatcgcggcccccgtgtccggcatcaacggggacatccgcgccaagaagatcgccagcatcgccgacgtctgcgagtccatgaaggagcagctcctggtgctggtggagtgggcgaagtacatcccggccttctgcgagctccccctggacgaccaggtcgccctgctccgggcccacgccggcgagcacctcctgctgggggcgaccaagcgcagcatggtgttcaaggacgtgctgctgctcggcaacgactacatcgtcccccgccactgccccgagctggccgagatgtcccgggtgagcatccgcatcctggacgagctcgtgctgccgttccaggagctgcagatcgacgacaacgagtacgcctacctcaaggccatcatcttcttcgaccccgacgcgaagggcctgtccgaccccgggaagatcaagcggctgcgcgcccaggtccaggtgagcctcgaggactacatcaacgaccggcagtacgactcccgcggccggttcggggagctgctgctcctgctgcccaccctccagagcatcacctggcagatgatcgagcagatccagttcatcaagctgttcggcatggccaagatcgacaacctgctccaggagatgctgctgggcggggccccgagcgacgcgccccacgcccaccaccccctccacccccacctgatgcaggagcacatgggcacgaacgtgatcgtcgccaacaccatgccgacccacctgtccaacgggcagatgtgcgagtggccccgcccccggggccaggccgccgcccccgaggcgccgcagcccgccccgcccgggggcagcggctccgagccctacaagctgctccccggggccgtggccaccatcgtgcgccccctggaggccatcccccagccgacgatcaccaagcaggaggtcatctgaggactagtccctgttcccagagcccacttttttttctttttttgaaataaaatagcctgtctttcagatctcaaaggctcttttcagagccaccaaaaaaaaaaaaaaaaaaaaaaaaaaaaaaaaaaaaaaaaaaaaaaaaaaaaaaaaaaaaaaaaaaaaaaaaaaaaaaaaaaaaaaaaaaaaaaaaaaaaa

SEQ ID NO: 3005 - RNA, 1697 nt, synthetic construct
  misc_feature 1..1697: note = mRNA a-1 (hSL-A100) (opt2) from Homo sapiens__NP_000448.3__HNF4A(1-474) R9824
  source 1..1697: mol_type = other RNA
aggagagtcccgcagtcggcgtccagcggctctgcttgttcgtgtgtgtgtcgttgcaggccttattcaagcttaccatgcgcctctccaagaccctcgtcgacatggacatggccgactactccgccgccctcgaccccgcctacaccaccctcgagttcgagaacgtccaggtcctcaccatgggcaacgacacctccccctccgagggcaccaacctcaacgcccccaactccctcggcgtctccgccctctgcgccatctgcggcgaccgcgccaccggcaagcactacggcgcctcctcctgcgacggctgcaagggcttcttccgccgctccgtccgcaagaaccacatgtactcctgccgcttctcccgccagtgcgtcgtcgacaaggacaagcgcaaccagtgccgctactgccgcctcaagaagtgcttccgcgccggcatgaagaaggaggccgtccagaacgagcgcgaccgcatctccacccgccgctcctcctacgaggactcctccctcccctccatcaacgccctcctccaggccgaggtcctctcccgccagatcacctcccccgtctccggcatcaacggcgacatccgcgccaagaagatcgcctccatcgccgacgtctgcgagtccatgaaggagcagctcctcgtcctcgtcgagtgggccaagtacatccccgccttctgcgagctccccctcgacgaccaggtcgccctcctccgcgcccacgccggcgagcacctcctcctcggcgccaccaagcgctccatggtcttcaaggacgtcctcctcctcggcaacgactacatcgtcccccgccactgccccgagctcgccgagatgtcccgcgtctccatccgcatcctcgacgagctcgtcctccccttccaggagctccagatcgacgacaacgagtacgcctacctcaaggccatcatcttcttcgaccccgacgccaagggcctctccgaccccggcaagatcaagcgcctccgctcccaggtccaggtctccctcgaggactacatcaacgaccgccagtacgactcgcgcgggcgcttcggcgagctcctcctcctcctccccaccctccagtccatcacctggcagatgatcgagcagatccagttcatcaagctgttcggcatggccaagatcgacaacctcctccaggagatgctcctcggcggctccccctccgacgccccccacgcccaccaccccctccacccccacctcatgcaggagcacatgggcaccaacgtcatcgtcgccaacaccatgcccacccacctctccaacggccagatgtgcgagtggccccgcccgcgcggccaggccgccacccccgagaccccccagccctccccccccggcggctccggctccgagccctacaagctcctccccggcgccgtcgccaccatcgtcaagcccctctccgccatcccccagcccaccatcaccaagcaggaggtcatctgaggactagtccctgttcccagagcccacttttttttctttttttgaaataaaatagcctgtctttcagatctcaaaggctcttttcagagccaccaaaaaaaaaaaaaaaaaaaaaaaaaaaaaaaaaaaaaaaaaaaaaaaaaaaaaaaaaaaaaaaaaaaaaaaaaaaaaaaaaaaaaaaaaaaaaaaaaaaaa

SEQ ID NO: 3006 - RNA, 1697 nt, synthetic construct
  misc_feature 1..1697: note = mRNA a-1 (hSL-A100) (opt2) from Homo sapiens__NP_000448.3__HNF4A(1-474)(S313A)
  source 1..1697: mol_type = other RNA
aggagagtcccgcagtcggcgtccagcggctctgcttgttcgtgtgtgtgtcgttgcaggccttattcaagcttaccatgcgcctctccaagaccctcgtcgacatggacatggccgactactccgccgccctcgaccccgcctacaccaccctcgagttcgagaacgtccaggtcctcaccatgggcaacgacacctccccctccgagggcaccaacctcaacgcccccaactccctcggcgtctccgccctctgcgccatctgcggcgaccgcgccaccggcaagcactacggcgcctcctcctgcgacggctgcaagggcttcttccgccgctccgtccgcaagaaccacatgtactcctgccgcttctcccgccagtgcgtcgtcgacaaggacaagcgcaaccagtgccgctactgccgcctcaagaagtgcttccgcgccggcatgaagaaggaggccgtccagaacgagcgcgaccgcatctccacccgccgctcctcctacgaggactcctccctcccctccatcaacgccctcctccaggccgaggtcctctcccgccagatcacctcccccgtctccggcatcaacggcgacatccgcgccaagaagatcgcctccatcgccgacgtctgcgagtccatgaaggagcagctcctcgtcctcgtcgagtgggccaagtacatccccgccttctgcgagctccccctcgacgaccaggtcgccctcctccgcgcccacgccggcgagcacctcctcctcggcgccaccaagcgctccatggtcttcaaggacgtcctcctcctcggcaacgactacatcgtcccccgccactgccccgagctcgccgagatgtcccgcgtctccatccgcatcctcgacgagctcgtcctccccttccaggagctccagatcgacgacaacgagtacgcctacctcaaggccatcatcttcttcgaccccgacgccaagggcctctccgaccccggcaagatcaagcgcctccgcgcccaggtccaggtctccctcgaggactacatcaacgaccgccagtacgactcccgcggccgcttcggcgagctcctcctcctcctccccaccctccagtccatcacctggcagatgatcgagcagatccagttcatcaagctcttcggcatggccaagatcgacaacctcctccaggagatgctcctcggcggctccccctccgacgccccccacgcccaccaccccctccacccccacctcatgcaggagcacatgggcaccaacgtcatcgtcgccaacaccatgcccacccacctctccaacggccagatgtgcgagtggccccgcccccgcggccaggccgccacccccgagaccccccagccctccccccccggcggctccggctccgagccctacaagctcctccccggcgccgtcgccaccatcgtcaagcccctctccgccatcccccagcccaccatcaccaagcaggaggtcatctgaggactagtccctgttcccagagcccacttttttttctttttttgaaataaaatagcctgtctttcagatctcaaaggctcttttcagagccaccaaaaaaaaaaaaaaaaaaaaaaaaaaaaaaaaaaaaaaaaaaaaaaaaaaaaaaaaaaaaaaaaaaaaaaaaaaaaaaaaaaaaaaaaaaaaaaaaaaaaa

SEQ ID NO: 3007 - RNA, 1697 nt, synthetic construct
  misc_feature 1..1697: note = mRNA a-1 (hSL-A100) (opt2) from Homo sapiens__NP_000448.3__HNF4A(1-474)(S313E)
  source 1..1697: mol_type = other RNA
aggagagtcccgcagtcggcgtccagcggctctgcttgttcgtgtgtgtgtcgttgcaggccttattcaagcttaccatgcgcctctccaagaccctcgtcgacatggacatggccgactactccgccgccctcgaccccgcctacaccaccctcgagttcgagaacgtccaggtcctcaccatgggcaacgacacctccccctccgagggcaccaacctcaacgcccccaactccctcggcgtctccgccctctgcgccatctgcggcgaccgcgccaccggcaagcactacggcgcctcctcctgcgacggctgcaagggcttcttccgccgctccgtccgcaagaaccacatgtactcctgccgcttctcccgccagtgcgtcgtcgacaaggacaagcgcaaccagtgccgctactgccgcctcaagaagtgcttccgcgccggcatgaagaaggaggccgtccagaacgagcgcgaccgcatctccacccgccgctcctcctacgaggactcctccctcccctccatcaacgccctcctccaggccgaggtcctctcccgccagatcacctcccccgtctccggcatcaacggcgacatccgcgccaagaagatcgcctccatcgccgacgtctgcgagtccatgaaggagcagctcctcgtcctcgtcgagtgggccaagtacatccccgccttctgcgagctccccctcgacgaccaggtcgccctcctccgcgcccacgccggcgagcacctcctcctcggcgccaccaagcgctccatggtcttcaaggacgtcctcctcctcggcaacgactacatcgtcccccgccactgccccgagctcgccgagatgtcccgcgtctccatccgcatcctcgacgagctcgtcctccccttccaggagctccagatcgacgacaacgagtacgcctacctcaaggccatcatcttcttcgaccccgacgccaagggcctctccgaccccggcaagatcaagcgcctccgcgagcaggtccaggtctccctcgaggactacatcaacgaccgccagtacgactcccgcggccgcttcggcgagctcctcctcctcctccccaccctccagtccatcacctggcagatgatcgagcagatccagttcatcaagctcttcggcatggccaagatcgacaacctcctccaggagatgctcctcggcggctccccctccgacgccccccacgcccaccaccccctccacccccacctcatgcaggagcacatgggcaccaacgtcatcgtcgccaacaccatgcccacccacctctccaacggccagatgtgcgagtggccccgcccccgcggccaggccgccacccccgagaccccccagccctccccccccggcggctccggctccgagccctacaagctcctccccggcgccgtcgccaccatcgtcaagcccctctccgccatcccccagcccaccatcaccaagcaggaggtcatctgaggactagtccctgttcccagagcccacttttttttctttttttgaaataaaatagcctgtctttcagatctcaaaggctcttttcagagccaccaaaaaaaaaaaaaaaaaaaaaaaaaaaaaaaaaaaaaaaaaaaaaaaaaaaaaaaaaaaaaaaaaaaaaaaaaaaaaaaaaaaaaaaaaaaaaaaaaaaaa

SEQ ID NO: 3008 - RNA, 1697 nt, synthetic construct
  misc_feature 1..1697: note = mRNA a-1 (hSL-A100) (opt2) from Homo sapiens__NP_000448.3__HNF4A(1-474)(S142A_S143A)
  source 1..1697: mol_type = other RNA
aggagagtcccgcagtcggcgtccagcggctctgcttgttcgtgtgtgtgtcgttgcaggccttattcaagcttaccatgcgcctctccaagaccctcgtcgacatggacatggccgactactccgccgccctcgaccccgcctacaccaccctcgagttcgagaacgtccaggtcctcaccatgggcaacgacacctccccctccgagggcaccaacctcaacgcccccaactccctcggcgtctccgccctctgcgccatctgcggcgaccgcgccaccggcaagcactacggcgcctcctcctgcgacggctgcaagggcttcttccgccgctccgtccgcaagaaccacatgtactcctgccgcttctcccgccagtgcgtcgtcgacaaggacaagcgcaaccagtgccgctactgccgcctcaagaagtgcttccgcgccggcatgaagaaggaggccgtccagaacgagcgcgaccgcatctccacccgccgcgccgcctacgaggactcctccctcccctccatcaacgccctcctccaggccgaggtcctctcccgccagatcacctcccccgtctccggcatcaacggcgacatccgcgccaagaagatcgcctccatcgccgacgtctgcgagtccatgaaggagcagctcctcgtcctcgtcgagtgggccaagtacatccccgccttctgcgagctccccctcgacgaccaggtcgccctcctccgcgcccacgccggcgagcacctcctcctcggcgccaccaagcgctccatggtcttcaaggacgtcctcctcctcggcaacgactacatcgtcccccgccactgccccgagctcgccgagatgtcccgcgtctccatccgcatcctcgacgagctcgtcctccccttccaggagctccagatcgacgacaacgagtacgcctacctcaaggccatcatcttcttcgaccccgacgccaagggcctctccgaccccggcaagatcaagcgcctccgctcccaggtccaggtctccctcgaggactacatcaacgaccgccagtacgactcccgcggccgcttcggcgagctcctcctcctcctccccaccctccagtccatcacctggcagatgatcgagcagatccagttcatcaagctcttcggcatggccaagatcgacaacctcctccaggagatgctcctcggcggctccccctccgacgccccccacgcccaccaccccctccacccccacctcatgcaggagcacatgggcaccaacgtcatcgtcgccaacaccatgcccacccacctctccaacggccagatgtgcgagtggccccgcccccgcggccaggccgccacccccgagaccccccagccctccccccccggcggctccggctccgagccctacaagctcctccccggcgccgtcgccaccatcgtcaagcccctctccgccatcccccagcccaccatcaccaagcaggaggtcatctgaggactagtccctgttcccagagcccacttttttttctttttttgaaataaaatagcctgtctttcagatctcaaaggctcttttcagagccaccaaaaaaaaaaaaaaaaaaaaaaaaaaaaaaaaaaaaaaaaaaaaaaaaaaaaaaaaaaaaaaaaaaaaaaaaaaaaaaaaaaaaaaaaaaaaaaaaaaaaa

SEQ ID NO: 3009 - RNA, 1697 nt, synthetic construct
  misc_feature 1..1697: note = mRNA a-1 (hSL-A100) (opt2) from Homo sapiens__NP_000448.3__HNF4A(1-474)(S142E_S143E)
  source 1..1697: mol_type = other RNA
aggagagtcccgcagtcggcgtccagcggctctgcttgttcgtgtgtgtgtcgttgcaggccttattcaagcttaccatgcgcctctccaagaccctcgtcgacatggacatggccgactactccgccgccctcgaccccgcctacaccaccctcgagttcgagaacgtccaggtcctcaccatgggcaacgacacctccccctccgagggcaccaacctcaacgcccccaactccctcggcgtctccgccctctgcgccatctgcggcgaccgcgccaccggcaagcactacggcgcctcctcctgcgacggctgcaagggcttcttccgccgctccgtccgcaagaaccacatgtactcctgccgcttctcccgccagtgcgtcgtcgacaaggacaagcgcaaccagtgccgctactgccgcctcaagaagtgcttccgcgccggcatgaagaaggaggccgtccagaacgagcgcgaccgcatctccacccgccgcgaggagtacgaggactcctccctcccctccatcaacgccctcctccaggccgaggtcctctcccgccagatcacctcccccgtctccggcatcaacggcgacatccgcgccaagaagatcgcctccatcgccgacgtctgcgagtccatgaaggagcagctcctcgtcctcgtcgagtgggccaagtacatccccgccttctgcgagctccccctcgacgaccaggtcgccctcctccgcgcccacgccggcgagcacctcctcctcggcgccaccaagcgctccatggtcttcaaggacgtcctcctcctcggcaacgactacatcgtcccccgccactgccccgagctcgccgagatgtcccgcgtctccatccgcatcctcgacgagctcgtcctccccttccaggagctccagatcgacgacaacgagtacgcctacctcaaggccatcatcttcttcgaccccgacgccaagggcctctccgaccccggcaagatcaagcgcctccgctcccaggtccaggtctccctcgaggactacatcaacgaccgccagtacgactcccgcggccgcttcggcgagctcctcctcctcctccccaccctccagtccatcacctggcagatgatcgagcagatccagttcatcaagctcttcggcatggccaagatcgacaacctcctccaggagatgctcctcggcggctccccctccgacgccccccacgcccaccaccccctccacccccacctcatgcaggagcacatgggcaccaacgtcatcgtcgccaacaccatgcccacccacctctccaacggccagatgtgcgagtggccccgcccccgcggccaggccgccacccccgagaccccccagccctccccccccggcggctccggctccgagccctacaagctcctccccggcgccgtcgccaccatcgtcaagcccctctccgccatcccccagcccaccatcaccaagcaggaggtcatctgaggactagtccctgttcccagagcccacttttttttctttttttgaaataaaatagcctgtctttcagatctcaaaggctcttttcagagccaccaaaaaaaaaaaaaaaaaaaaaaaaaaaaaaaaaaaaaaaaaaaaaaaaaaaaaaaaaaaaaaaaaaaaaaaaaaaaaaaaaaaaaaaaaaaaaaaaaaaaa

SEQ ID NO: 3010 - RNA, 1697 nt, synthetic construct
  misc_feature 1..1697: note = mRNA a-1 (hSL-A100) (opt2) from Homo sapiens__NP_000448.3__HNF4A(1-474)(S143A)
  source 1..1697: mol_type = other RNA
aggagagtcccgcagtcggcgtccagcggctctgcttgttcgtgtgtgtgtcgttgcaggccttattcaagcttaccatgcgcctctccaagaccctcgtcgacatggacatggccgactactccgccgccctcgaccccgcctacaccaccctcgagttcgagaacgtccaggtcctcaccatgggcaacgacacctccccctccgagggcaccaacctcaacgcccccaactccctcggcgtctccgccctctgcgccatctgcggcgaccgcgccaccggcaagcactacggcgcctcctcctgcgacggctgcaagggcttcttccgccgctccgtccgcaagaaccacatgtactcctgccgcttctcccgccagtgcgtcgtcgacaaggacaagcgcaaccagtgccgctactgccgcctcaagaagtgcttccgcgccggcatgaagaaggaggccgtccagaacgagcgcgaccgcatctccacccgccgctccgcctacgaggactcctccctcccctccatcaacgccctcctccaggccgaggtcctctcccgccagatcacctcccccgtctccggcatcaacggcgacatccgcgccaagaagatcgcctccatcgccgacgtctgcgagtccatgaaggagcagctcctcgtcctcgtcgagtgggccaagtacatccccgccttctgcgagctccccctcgacgaccaggtcgccctcctccgcgcccacgccggcgagcacctcctcctcggcgccaccaagcgctccatggtcttcaaggacgtcctcctcctcggcaacgactacatcgtcccccgccactgccccgagctcgccgagatgtcccgcgtctccatccgcatcctcgacgagctcgtcctccccttccaggagctccagatcgacgacaacgagtacgcctacctcaaggccatcatcttcttcgaccccgacgccaagggcctctccgaccccggcaagatcaagcgcctccgctcccaggtccaggtctccctcgaggactacatcaacgaccgccagtacgactcccgcggccgcttcggcgagctcctcctcctcctccccaccctccagtccatcacctggcagatgatcgagcagatccagttcatcaagctcttcggcatggccaagatcgacaacctcctccaggagatgctcctcggcggctccccctccgacgccccccacgcccaccaccccctccacccccacctcatgcaggagcacatgggcaccaacgtcatcgtcgccaacaccatgcccacccacctctccaacggccagatgtgcgagtggccccgcccccgcggccaggccgccacccccgagaccccccagccctccccccccggcggctccggctccgagccctacaagctcctccccggcgccgtcgccaccatcgtcaagcccctctccgccatcccccagcccaccatcaccaagcaggaggtcatctgaggactagtccctgttcccagagcccacttttttttctttttttgaaataaaatagcctgtctttcagatctcaaaggctcttttcagagccaccaaaaaaaaaaaaaaaaaaaaaaaaaaaaaaaaaaaaaaaaaaaaaaaaaaaaaaaaaaaaaaaaaaaaaaaaaaaaaaaaaaaaaaaaaaaaaaaaaaaaa

SEQ ID NO: 3011 - RNA, 1697 nt, synthetic construct
  misc_feature 1..1697: note = mRNA a-1 (hSL-A100) (opt2) from Homo sapiens__NP_000448.3__HNF4A(1-474)(T166A)
  source 1..1697: mol_type = other RNA
aggagagtcccgcagtcggcgtccagcggctctgcttgttcgtgtgtgtgtcgttgcaggccttattcaagcttaccatgcgcctctccaagaccctcgtcgacatggacatggccgactactccgccgccctcgaccccgcctacaccaccctcgagttcgagaacgtccaggtcctcaccatgggcaacgacacctccccctccgagggcaccaacctcaacgcccccaactccctcggcgtctccgccctctgcgccatctgcggcgaccgcgccaccggcaagcactacggcgcctcctcctgcgacggctgcaagggcttcttccgccgctccgtccgcaagaaccacatgtactcctgccgcttctcccgccagtgcgtcgtcgacaaggacaagcgcaaccagtgccgctactgccgcctcaagaagtgcttccgcgccggcatgaagaaggaggccgtccagaacgagcgcgaccgcatctccacccgccgctcctcctacgaggactcctccctcccctccatcaacgccctcctccaggccgaggtcctctcccgccagatcgcctcccccgtctccggcatcaacggcgacatccgcgccaagaagatcgcctccatcgccgacgtctgcgagtccatgaaggagcagctcctcgtcctcgtcgagtgggccaagtacatccccgccttctgcgagctccccctcgacgaccaggtcgccctcctccgcgcccacgccggcgagcacctcctcctcggcgccaccaagcgctccatggtcttcaaggacgtcctcctcctcggcaacgactacatcgtcccccgccactgccccgagctcgccgagatgtcccgcgtctccatccgcatcctcgacgagctcgtcctccccttccaggagctccagatcgacgacaacgagtacgcctacctcaaggccatcatcttcttcgaccccgacgccaagggcctctccgaccccggcaagatcaagcgcctccgctcccaggtccaggtctccctcgaggactacatcaacgaccgccagtacgactcccgcggccgcttcggcgagctcctcctcctcctccccaccctccagtccatcacctggcagatgatcgagcagatccagttcatcaagctcttcggcatggccaagatcgacaacctcctccaggagatgctcctcggcggctccccctccgacgccccccacgcccaccaccccctccacccccacctcatgcaggagcacatgggcaccaacgtcatcgtcgccaacaccatgcccacccacctctccaacggccagatgtgcgagtggccccgcccccgcggccaggccgccacccccgagaccccccagccctccccccccggcggctccggctccgagccctacaagctcctccccggcgccgtcgccaccatcgtcaagcccctctccgccatcccccagcccaccatcaccaagcaggaggtcatctgaggactagtccctgttcccagagcccacttttttttctttttttgaaataaaatagcctgtctttcagatctcaaaggctcttttcagagccaccaaaaaaaaaaaaaaaaaaaaaaaaaaaaaaaaaaaaaaaaaaaaaaaaaaaaaaaaaaaaaaaaaaaaaaaaaaaaaaaaaaaaaaaaaaaaaaaaaaaaa

SEQ ID NO: 3012 - RNA, 1697 nt, synthetic construct
  misc_feature 1..1697: note = mRNA a-1 (hSL-A100) (opt2) from Homo sapiens__NP_000448.3__HNF4A(1-474)(S167E)
  source 1..1697: mol_type = other RNA
aggagagtcccgcagtcggcgtccagcggctctgcttgttcgtgtgtgtgtcgttgcaggccttattcaagcttaccatgcgcctctccaagaccctcgtcgacatggacatggccgactactccgccgccctcgaccccgcctacaccaccctcgagttcgagaacgtccaggtcctcaccatgggcaacgacacctccccctccgagggcaccaacctcaacgcccccaactccctcggcgtctccgccctctgcgccatctgcggcgaccgcgccaccggcaagcactacggcgcctcctcctgcgacggctgcaagggcttcttccgccgctccgtccgcaagaaccacatgtactcctgccgcttctcccgccagtgcgtcgtcgacaaggacaagcgcaaccagtgccgctactgccgcctcaagaagtgcttccgcgccggcatgaagaaggaggccgtccagaacgagcgcgaccgcatctccacccgccgctcctcctacgaggactcctccctcccctccatcaacgccctcctccaggccgaggtcctctcccgccagatcaccgagcccgtctccggcatcaacggcgacatccgcgccaagaagatcgcctccatcgccgacgtctgcgagtccatgaaggagcagctcctcgtcctcgtcgagtgggccaagtacatccccgccttctgcgagctccccctcgacgaccaggtcgccctcctccgcgcccacgccggcgagcacctcctcctcggcgccaccaagcgctccatggtcttcaaggacgtcctcctcctcggcaacgactacatcgtcccccgccactgccccgagctcgccgagatgtcccgcgtctccatccgcatcctcgacgagctcgtcctccccttccaggagctccagatcgacgacaacgagtacgcctacctcaaggccatcatcttcttcgaccccgacgccaagggcctctccgaccccggcaagatcaagcgcctccgctcccaggtccaggtctccctcgaggactacatcaacgaccgccagtacgactcccgcggccgcttcggcgagctcctcctcctcctccccaccctccagtccatcacctggcagatgatcgagcagatccagttcatcaagctcttcggcatggccaagatcgacaacctcctccaggagatgctcctcggcggctccccctccgacgccccccacgcccaccaccccctccacccccacctcatgcaggagcacatgggcaccaacgtcatcgtcgccaacaccatgcccacccacctctccaacggccagatgtgcgagtggccccgcccccgcggccaggccgccacccccgagaccccccagccctccccccccggcggctccggctccgagccctacaagctcctccccggcgccgtcgccaccatcgtcaagcccctctccgccatcccccagcccaccatcaccaagcaggaggtcatctgaggactagtccctgttcccagagcccacttttttttctttttttgaaataaaatagcctgtctttcagatctcaaaggctcttttcagagccaccaaaaaaaaaaaaaaaaaaaaaaaaaaaaaaaaaaaaaaaaaaaaaaaaaaaaaaaaaaaaaaaaaaaaaaaaaaaaaaaaaaaaaaaaaaaaaaaaaaaaa

SEQ ID NO: 3013 - RNA, 1697 nt, synthetic construct
  misc_feature 1..1697: note = mRNA a-1 (hSL-A100) (opt2) from Homo sapiens__NP_000448.3__HNF4A(1-474)(S167A)
  source 1..1697: mol_type = other RNA
aggagagtcccgcagtcggcgtccagcggctctgcttgttcgtgtgtgtgtcgttgcaggccttattcaagcttaccatgcgcctctccaagaccctcgtcgacatggacatggccgactactccgccgccctcgaccccgcctacaccaccctcgagttcgagaacgtccaggtcctcaccatgggcaacgacacctccccctccgagggcaccaacctcaacgcccccaactccctcggcgtctccgccctctgcgccatctgcggcgaccgcgccaccggcaagcactacggcgcctcctcctgcgacggctgcaagggcttcttccgccgctccgtccgcaagaaccacatgtactcctgccgcttctcccgccagtgcgtcgtcgacaaggacaagcgcaaccagtgccgctactgccgcctcaagaagtgcttccgcgccggcatgaagaaggaggccgtccagaacgagcgcgaccgcatctccacccgccgctcctcctacgaggactcctccctcccctccatcaacgccctcctccaggccgaggtcctctcccgccagatcaccgcccccgtctccggcatcaacggcgacatccgcgccaagaagatcgcctccatcgccgacgtctgcgagtccatgaaggagcagctcctcgtcctcgtcgagtgggccaagtacatccccgccttctgcgagctccccctcgacgaccaggtcgccctcctccgcgcccacgccggcgagcacctcctcctcggcgccaccaagcgctccatggtcttcaaggacgtcctcctcctcggcaacgactacatcgtcccccgccactgccccgagctcgccgagatgtcccgcgtctccatccgcatcctcgacgagctcgtcctccccttccaggagctccagatcgacgacaacgagtacgcctacctcaaggccatcatcttcttcgaccccgacgccaagggcctctccgaccccggcaagatcaagcgcctccgctcccaggtccaggtctccctcgaggactacatcaacgaccgccagtacgactcccgcggccgcttcggcgagctcctcctcctcctccccaccctccagtccatcacctggcagatgatcgagcagatccagttcatcaagctcttcggcatggccaagatcgacaacctcctccaggagatgctcctcggcggctccccctccgacgccccccacgcccaccaccccctccacccccacctcatgcaggagcacatgggcaccaacgtcatcgtcgccaacaccatgcccacccacctctccaacggccagatgtgcgagtggccccgcccccgcggccaggccgccacccccgagaccccccagccctccccccccggcggctccggctccgagccctacaagctcctccccggcgccgtcgccaccatcgtcaagcccctctccgccatcccccagcccaccatcaccaagcaggaggtcatctgaggactagtccctgttcccagagcccacttttttttctttttttgaaataaaatagcctgtctttcagatctcaaaggctcttttcagagccaccaaaaaaaaaaaaaaaaaaaaaaaaaaaaaaaaaaaaaaaaaaaaaaaaaaaaaaaaaaaaaaaaaaaaaaaaaaaaaaaaaaaaaaaaaaaaaaaaaaaaa

SEQ ID NO: 3014 - RNA, 1697 nt, synthetic construct
  misc_feature 1..1697: note = mRNA a-1 (hSL-A100) (opt2) from Homo sapiens__NP_000448.3__HNF4A(1-474)(S167A_S378A_T429A_T432A_ S436A)
  source 1..1697: mol_type = other RNA
aggagagtcccgcagtcggcgtccagcggctctgcttgttcgtgtgtgtgtcgttgcaggccttattcaagcttaccatgcgcctctccaagaccctcgtcgacatggacatggccgactactccgccgccctcgaccccgcctacaccaccctcgagttcgagaacgtccaggtcctcaccatgggcaacgacacctccccctccgagggcaccaacctcaacgcccccaactccctcggcgtctccgccctctgcgccatctgcggcgaccgcgccaccggcaagcactacggcgcctcctcctgcgacggctgcaagggcttcttccgccgctccgtccgcaagaaccacatgtactcctgccgcttctcccgccagtgcgtcgtcgacaaggacaagcgcaaccagtgccgctactgccgcctcaagaagtgcttccgcgccggcatgaagaaggaggccgtccagaacgagcgcgaccgcatctccacccgccgctcctcctacgaggactcctccctcccctccatcaacgccctcctccaggccgaggtcctctcccgccagatcaccgcccccgtctccggcatcaacggcgacatccgcgccaagaagatcgcctccatcgccgacgtctgcgagtccatgaaggagcagctcctcgtcctcgtcgagtgggccaagtacatccccgccttctgcgagctccccctcgacgaccaggtcgccctcctccgcgcccacgccggcgagcacctcctcctcggcgccaccaagcgctccatggtcttcaaggacgtcctcctcctcggcaacgactacatcgtcccccgccactgccccgagctcgccgagatgtcccgcgtctccatccgcatcctcgacgagctcgtcctccccttccaggagctccagatcgacgacaacgagtacgcctacctcaaggccatcatcttcttcgaccccgacgccaagggcctctccgaccccggcaagatcaagcgcctccgctcccaggtccaggtctccctcgaggactacatcaacgaccgccagtacgactcccgcggccgcttcggcgagctcctcctcctcctccccaccctccagtccatcacctggcagatgatcgagcagatccagttcatcaagctcttcggcatggccaagatcgacaacctcctccaggagatgctcctcggcggcgccccctccgacgccccccacgcccaccaccccctccacccccacctcatgcaggagcacatgggcaccaacgtcatcgtcgccaacaccatgcccacccacctctccaacggccagatgtgcgagtggccccgcccccgcggccaggccgccgcccccgaggccccccagcccgccccccccggcggctccggctccgagccctacaagctcctccccggcgccgtcgccaccatcgtcaagcccctctccgccatcccccagcccaccatcaccaagcaggaggtcatctgaggactagtccctgttcccagagcccacttttttttctttttttgaaataaaatagcctgtctttcagatctcaaaggctcttttcagagccaccaaaaaaaaaaaaaaaaaaaaaaaaaaaaaaaaaaaaaaaaaaaaaaaaaaaaaaaaaaaaaaaaaaaaaaaaaaaaaaaaaaaaaaaaaaaaaaaaaaaaa

SEQ ID NO: 3015 - RNA, 1697 nt, synthetic construct
  misc_feature 1..1697: note = mRNA a-1 (hSL-A100) (opt2) from Homo sapiens__NP_000448.3__HNF4A(1-474)(S167E_S378E_T429E_T432E_ S436E)
  source 1..1697: mol_type = other RNA
aggagagtcccgcagtcggcgtccagcggctctgcttgttcgtgtgtgtgtcgttgcaggccttattcaagcttaccatgcgcctctccaagaccctcgtcgacatggacatggccgactactccgccgccctcgaccccgcctacaccaccctcgagttcgagaacgtccaggtcctcaccatgggcaacgacacctccccctccgagggcaccaacctcaacgcccccaactccctcggcgtctccgccctctgcgccatctgcggcgaccgcgccaccggcaagcactacggcgcctcctcctgcgacggctgcaagggcttcttccgccgctccgtccgcaagaaccacatgtactcctgccgcttctcccgccagtgcgtcgtcgacaaggacaagcgcaaccagtgccgctactgccgcctcaagaagtgcttccgcgccggcatgaagaaggaggccgtccagaacgagcgcgaccgcatctccacccgccgctcctcctacgaggactcctccctcccctccatcaacgccctcctccaggccgaggtcctctcccgccagatcaccgagcccgtctccggcatcaacggcgacatccgcgccaagaagatcgcctccatcgccgacgtctgcgagtccatgaaggagcagctcctcgtcctcgtcgagtgggccaagtacatccccgccttctgcgagctccccctcgacgaccaggtcgccctcctccgcgcccacgccggcgagcacctcctcctcggcgccaccaagcgctccatggtcttcaaggacgtcctcctcctcggcaacgactacatcgtcccccgccactgccccgagctcgccgagatgtcccgcgtctccatccgcatcctcgacgagctcgtcctccccttccaggagctccagatcgacgacaacgagtacgcctacctcaaggccatcatcttcttcgaccccgacgccaagggcctctccgaccccggcaagatcaagcgcctccgctcccaggtccaggtctccctcgaggactacatcaacgaccgccagtacgactcccgcggccgcttcggcgagctcctcctcctcctccccaccctccagtccatcacctggcagatgatcgagcagatccagttcatcaagctcttcggcatggccaagatcgacaacctcctccaggagatgctcctcggcggcgagccctccgacgccccccacgcccaccaccccctccacccccacctcatgcaggagcacatgggcaccaacgtcatcgtcgccaacaccatgcccacccacctctccaacggccagatgtgcgagtggccccgcccccgcggccaggccgccgagcccgaggagccccagcccgagccccccggcggctccggctccgagccctacaagctcctccccggcgccgtcgccaccatcgtcaagcccctctccgccatcccccagcccaccatcaccaagcaggaggtcatctgaggactagtccctgttcccagagcccacttttttttctttttttgaaataaaatagcctgtctttcagatctcaaaggctcttttcagagccaccaaaaaaaaaaaaaaaaaaaaaaaaaaaaaaaaaaaaaaaaaaaaaaaaaaaaaaaaaaaaaaaaaaaaaaaaaaaaaaaaaaaaaaaaaaaaaaaaaaaaa

SEQ ID NO: 3016 - RNA, 1697 nt, synthetic construct
  misc_feature 1..1697: note = mRNA a-1 (hSL-A100) (opt2) from Homo sapiens__NP_000448.3__HNF4A(1-474)(S87A)
  source 1..1697: mol_type = other RNA
aggagagtcccgcagtcggcgtccagcggctctgcttgttcgtgtgtgtgtcgttgcaggccttattcaagcttaccatgcgcctctccaagaccctcgtcgacatggacatggccgactactccgccgccctcgaccccgcctacaccaccctcgagttcgagaacgtccaggtcctcaccatgggcaacgacacctccccctccgagggcaccaacctcaacgcccccaactccctcggcgtctccgccctctgcgccatctgcggcgaccgcgccaccggcaagcactacggcgcctcctcctgcgacggctgcaagggcttcttccgccgcgccgtccgcaagaaccacatgtactcctgccgcttctcccgccagtgcgtcgtcgacaaggacaagcgcaaccagtgccgctactgccgcctcaagaagtgcttccgcgccggcatgaagaaggaggccgtccagaacgagcgcgaccgcatctccacccgccgctcctcctacgaggactcctccctcccctccatcaacgccctcctccaggccgaggtcctctcccgccagatcacctcccccgtctccggcatcaacggcgacatccgcgccaagaagatcgcctccatcgccgacgtctgcgagtccatgaaggagcagctcctcgtcctcgtcgagtgggccaagtacatccccgccttctgcgagctccccctcgacgaccaggtcgccctcctccgcgcccacgccggcgagcacctcctcctcggcgccaccaagcgctccatggtcttcaaggacgtcctcctcctcggcaacgactacatcgtcccccgccactgccccgagctcgccgagatgtcccgcgtctccatccgcatcctcgacgagctcgtcctccccttccaggagctccagatcgacgacaacgagtacgcctacctcaaggccatcatcttcttcgaccccgacgccaagggcctctccgaccccggcaagatcaagcgcctccgctcccaggtccaggtctccctcgaggactacatcaacgaccgccagtacgactcccgcggccgcttcggcgagctcctcctcctcctccccaccctccagtccatcacctggcagatgatcgagcagatccagttcatcaagctcttcggcatggccaagatcgacaacctcctccaggagatgctcctcggcggctccccctccgacgccccccacgcccaccaccccctccacccccacctcatgcaggagcacatgggcaccaacgtcatcgtcgccaacaccatgcccacccacctctccaacggccagatgtgcgagtggccccgcccccgcggccaggccgccacccccgagaccccccagccctccccccccggcggctccggctccgagccctacaagctcctccccggcgccgtcgccaccatcgtcaagcccctctccgccatcccccagcccaccatcaccaagcaggaggtcatctgaggactagtccctgttcccagagcccacttttttttctttttttgaaataaaatagcctgtctttcagatctcaaaggctcttttcagagccaccaaaaaaaaaaaaaaaaaaaaaaaaaaaaaaaaaaaaaaaaaaaaaaaaaaaaaaaaaaaaaaaaaaaaaaaaaaaaaaaaaaaaaaaaaaaaaaaaaaaaa

SEQ ID NO: 3017 - RNA, 1697 nt, synthetic construct
  misc_feature 1..1697: note = mRNA a-1 (hSL-A100) (opt2) from Homo sapiens__NP_000448.3__HNF4A(1-474)(S87E)
  source 1..1697: mol_type = other RNA
aggagagtcccgcagtcggcgtccagcggctctgcttgttcgtgtgtgtgtcgttgcaggccttattcaagcttaccatgcgcctctccaagaccctcgtcgacatggacatggccgactactccgccgccctcgaccccgcctacaccaccctcgagttcgagaacgtccaggtcctcaccatgggcaacgacacctccccctccgagggcaccaacctcaacgcccccaactccctcggcgtctccgccctctgcgccatctgcggcgaccgcgccaccggcaagcactacggcgcctcctcctgcgacggctgcaagggcttcttccgccgcgaggtccgcaagaaccacatgtactcctgccgcttctcccgccagtgcgtcgtcgacaaggacaagcgcaaccagtgccgctactgccgcctcaagaagtgcttccgcgccggcatgaagaaggaggccgtccagaacgagcgcgaccgcatctccacccgccgctcctcctacgaggactcctccctcccctccatcaacgccctcctccaggccgaggtcctctcccgccagatcacctcccccgtctccggcatcaacggcgacatccgcgccaagaagatcgcctccatcgccgacgtctgcgagtccatgaaggagcagctcctcgtcctcgtcgagtgggccaagtacatccccgccttctgcgagctccccctcgacgaccaggtcgccctcctccgcgcccacgccggcgagcacctcctcctcggcgccaccaagcgctccatggtcttcaaggacgtcctcctcctcggcaacgactacatcgtcccccgccactgccccgagctcgccgagatgtcccgcgtctccatccgcatcctcgacgagctcgtcctccccttccaggagctccagatcgacgacaacgagtacgcctacctcaaggccatcatcttcttcgaccccgacgccaagggcctctccgaccccggcaagatcaagcgcctccgctcccaggtccaggtctccctcgaggactacatcaacgaccgccagtacgactcccgcggccgcttcggcgagctcctcctcctcctccccaccctccagtccatcacctggcagatgatcgagcagatccagttcatcaagctcttcggcatggccaagatcgacaacctcctccaggagatgctcctcggcggctccccctccgacgccccccacgcccaccaccccctccacccccacctcatgcaggagcacatgggcaccaacgtcatcgtcgccaacaccatgcccacccacctctccaacggccagatgtgcgagtggccccgcccccgcggccaggccgccacccccgagaccccccagccctccccccccggcggctccggctccgagccctacaagctcctccccggcgccgtcgccaccatcgtcaagcccctctccgccatcccccagcccaccatcaccaagcaggaggtcatctgaggactagtccctgttcccagagcccacttttttttctttttttgaaataaaatagcctgtctttcagatctcaaaggctcttttcagagccaccaaaaaaaaaaaaaaaaaaaaaaaaaaaaaaaaaaaaaaaaaaaaaaaaaaaaaaaaaaaaaaaaaaaaaaaaaaaaaaaaaaaaaaaaaaaaaaaaaaaaa

SEQ ID NO: 3018 - RNA, 1697 nt, synthetic construct
  misc_feature 1..1697: note = mRNA a-1 (hSL-A100) (opt2) from Homo sapiens__NP_000448.3__HNF4A(1-474)(R2V)
  source 1..1697: mol_type = other RNA
aggagagtcccgcagtcggcgtccagcggctctgcttgttcgtgtgtgtgtcgttgcaggccttattcaagcttaccatggtcctctccaagaccctcgtcgacatggacatggccgactactccgccgccctcgaccccgcctacaccaccctcgagttcgagaacgtccaggtcctcaccatgggcaacgacacctccccctccgagggcaccaacctcaacgcccccaactccctcggcgtctccgccctctgcgccatctgcggcgaccgcgccaccggcaagcactacggcgcctcctcctgcgacggctgcaagggcttcttccgccgctccgtccgcaagaaccacatgtactcctgccgcttctcccgccagtgcgtcgtcgacaaggacaagcgcaaccagtgccgctactgccgcctcaagaagtgcttccgcgccggcatgaagaaggaggccgtccagaacgagcgcgaccgcatctccacccgccgctcctcctacgaggactcctccctcccctccatcaacgccctcctccaggccgaggtcctctcccgccagatcacctcccccgtctccggcatcaacggcgacatccgcgccaagaagatcgcctccatcgccgacgtctgcgagtccatgaaggagcagctcctcgtcctcgtcgagtgggccaagtacatccccgccttctgcgagctccccctcgacgaccaggtcgccctcctccgcgcccacgccggcgagcacctcctcctcggcgccaccaagcgctccatggtcttcaaggacgtcctcctcctcggcaacgactacatcgtcccccgccactgccccgagctcgccgagatgtcccgcgtctccatccgcatcctcgacgagctcgtcctccccttccaggagctccagatcgacgacaacgagtacgcctacctcaaggccatcatcttcttcgaccccgacgccaagggcctctccgaccccggcaagatcaagcgcctccgctcccaggtccaggtctccctcgaggactacatcaacgaccgccagtacgactcccgcggccgcttcggcgagctcctcctcctcctccccaccctccagtccatcacctggcagatgatcgagcagatccagttcatcaagctcttcggcatggccaagatcgacaacctcctccaggagatgctcctcggcggctccccctccgacgccccccacgcccaccaccccctccacccccacctcatgcaggagcacatgggcaccaacgtcatcgtcgccaacaccatgcccacccacctctccaacggccagatgtgcgagtggccccgcccccgcggccaggccgccacccccgagaccccccagccctccccccccggcggctccggctccgagccctacaagctcctccccggcgccgtcgccaccatcgtcaagcccctctccgccatcccccagcccaccatcaccaagcaggaggtcatctgaggactagtccctgttcccagagcccacttttttttctttttttgaaataaaatagcctgtctttcagatctcaaaggctcttttcagagccaccaaaaaaaaaaaaaaaaaaaaaaaaaaaaaaaaaaaaaaaaaaaaaaaaaaaaaaaaaaaaaaaaaaaaaaaaaaaaaaaaaaaaaaaaaaaaaaaaaaaaa

SEQ ID NO: 3019 - RNA, 1697 nt, synthetic construct
  misc_feature 1..1697: note = mRNA a-1 (hSL-A100) (opt2) from Homo sapiens__NP_000448.3__HNF4A(1-474)(R2V_K5V)
  source 1..1697: mol_type = other RNA
aggagagtcccgcagtcggcgtccagcggctctgcttgttcgtgtgtgtgtcgttgcaggccttattcaagcttaccatggtcctctccgtcaccctcgtcgacatggacatggccgactactccgccgccctcgaccccgcctacaccaccctcgagttcgagaacgtccaggtcctcaccatgggcaacgacacctccccctccgagggcaccaacctcaacgcccccaactccctcggcgtctccgccctctgcgccatctgcggcgaccgcgccaccggcaagcactacggcgcctcctcctgcgacggctgcaagggcttcttccgccgctccgtccgcaagaaccacatgtactcctgccgcttctcccgccagtgcgtcgtcgacaaggacaagcgcaaccagtgccgctactgccgcctcaagaagtgcttccgcgccggcatgaagaaggaggccgtccagaacgagcgcgaccgcatctccacccgccgctcctcctacgaggactcctccctcccctccatcaacgccctcctccaggccgaggtcctctcccgccagatcacctcccccgtctccggcatcaacggcgacatccgcgccaagaagatcgcctccatcgccgacgtctgcgagtccatgaaggagcagctcctcgtcctcgtcgagtgggccaagtacatccccgccttctgcgagctccccctcgacgaccaggtcgccctcctccgcgcccacgccggcgagcacctcctcctcggcgccaccaagcgctccatggtcttcaaggacgtcctcctcctcggcaacgactacatcgtcccccgccactgccccgagctcgccgagatgtcccgcgtctccatccgcatcctcgacgagctcgtcctccccttccaggagctccagatcgacgacaacgagtacgcctacctcaaggccatcatcttcttcgaccccgacgccaagggcctctccgaccccggcaagatcaagcgcctccgctcccaggtccaggtctccctcgaggactacatcaacgaccgccagtacgactcccgcggccgcttcggcgagctcctcctcctcctccccaccctccagtccatcacctggcagatgatcgagcagatccagttcatcaagctcttcggcatggccaagatcgacaacctcctccaggagatgctcctcggcggctccccctccgacgccccccacgcccaccaccccctccacccccacctcatgcaggagcacatgggcaccaacgtcatcgtcgccaacaccatgcccacccacctctccaacggccagatgtgcgagtggccccgcccccgcggccaggccgccacccccgagaccccccagccctccccccccggcggctccggctccgagccctacaagctcctccccggcgccgtcgccaccatcgtcaagcccctctccgccatcccccagcccaccatcaccaagcaggaggtcatctgaggactagtccctgttcccagagcccacttttttttctttttttgaaataaaatagcctgtctttcagatctcaaaggctcttttcagagccaccaaaaaaaaaaaaaaaaaaaaaaaaaaaaaaaaaaaaaaaaaaaaaaaaaaaaaaaaaaaaaaaaaaaaaaaaaaaaaaaaaaaaaaaaaaaaaaaaaaaaa

SEQ ID NO: 3020 - RNA, 1697 nt, synthetic construct
  misc_feature 1..1697: note = mRNA a-1 (hSL-A100) (opt2) from Homo sapiens__NP_000448.3__HNF4A(1-474)(K179R_K180R)
  source 1..1697: mol_type = other RNA
aggagagtcccgcagtcggcgtccagcggctctgcttgttcgtgtgtgtgtcgttgcaggccttattcaagcttaccatgcgcctctccaagaccctcgtcgacatggacatggccgactactccgccgccctcgaccccgcctacaccaccctcgagttcgagaacgtccaggtcctcaccatgggcaacgacacctccccctccgagggcaccaacctcaacgcccccaactccctcggcgtctccgccctctgcgccatctgcggcgaccgcgccaccggcaagcactacggcgcctcctcctgcgacggctgcaagggcttcttccgccgctccgtccgcaagaaccacatgtactcctgccgcttctcccgccagtgcgtcgtcgacaaggacaagcgcaaccagtgccgctactgccgcctcaagaagtgcttccgcgccggcatgaagaaggaggccgtccagaacgagcgcgaccgcatctccacccgccgctcctcctacgaggactcctccctcccctccatcaacgccctcctccaggccgaggtcctctcccgccagatcacctcccccgtctccggcatcaacggcgacatccgcgcccgccgcatcgcctccatcgccgacgtctgcgagtccatgaaggagcagctcctcgtcctcgtcgagtgggccaagtacatccccgccttctgcgagctccccctcgacgaccaggtcgccctcctccgcgcccacgccggcgagcacctcctcctcggcgccaccaagcgctccatggtcttcaaggacgtcctcctcctcggcaacgactacatcgtcccccgccactgccccgagctcgccgagatgtcccgcgtctccatccgcatcctcgacgagctcgtcctccccttccaggagctccagatcgacgacaacgagtacgcctacctcaaggccatcatcttcttcgaccccgacgccaagggcctctccgaccccggcaagatcaagcgcctccgctcccaggtccaggtctccctcgaggactacatcaacgaccgccagtacgactcccgcggccgcttcggcgagctcctcctcctcctccccaccctccagtccatcacctggcagatgatcgagcagatccagttcatcaagctcttcggcatggccaagatcgacaacctcctccaggagatgctcctcggcggctccccctccgacgccccccacgcccaccaccccctccacccccacctcatgcaggagcacatgggcaccaacgtcatcgtcgccaacaccatgcccacccacctctccaacggccagatgtgcgagtggccccgcccccgcggccaggccgccacccccgagaccccccagccctccccccccggcggctccggctccgagccctacaagctcctccccggcgccgtcgccaccatcgtcaagcccctctccgccatcccccagcccaccatcaccaagcaggaggtcatctgaggactagtccctgttcccagagcccacttttttttctttttttgaaataaaatagcctgtctttcagatctcaaaggctcttttcagagccaccaaaaaaaaaaaaaaaaaaaaaaaaaaaaaaaaaaaaaaaaaaaaaaaaaaaaaaaaaaaaaaaaaaaaaaaaaaaaaaaaaaaaaaaaaaaaaaaaaaaaa

SEQ ID NO: 3021 - RNA, 1697 nt, synthetic construct
  misc_feature 1..1697: note = mRNA a-1 (hSL-A100) (opt2) from Homo sapiens__NP_000448.3__HNF4A(1-474)(K234R)
  source 1..1697: mol_type = other RNA
aggagagtcccgcagtcggcgtccagcggctctgcttgttcgtgtgtgtgtcgttgcaggccttattcaagcttaccatgcgcctctccaagaccctcgtcgacatggacatggccgactactccgccgccctcgaccccgcctacaccaccctcgagttcgagaacgtccaggtcctcaccatgggcaacgacacctccccctccgagggcaccaacctcaacgcccccaactccctcggcgtctccgccctctgcgccatctgcggcgaccgcgccaccggcaagcactacggcgcctcctcctgcgacggctgcaagggcttcttccgccgctccgtccgcaagaaccacatgtactcctgccgcttctcccgccagtgcgtcgtcgacaaggacaagcgcaaccagtgccgctactgccgcctcaagaagtgcttccgcgccggcatgaagaaggaggccgtccagaacgagcgcgaccgcatctccacccgccgctcctcctacgaggactcctccctcccctccatcaacgccctcctccaggccgaggtcctctcccgccagatcacctcccccgtctccggcatcaacggcgacatccgcgccaagaagatcgcctccatcgccgacgtctgcgagtccatgaaggagcagctcctcgtcctcgtcgagtgggccaagtacatccccgccttctgcgagctccccctcgacgaccaggtcgccctcctccgcgcccacgccggcgagcacctcctcctcggcgccacccgccgctccatggtcttcaaggacgtcctcctcctcggcaacgactacatcgtcccccgccactgccccgagctcgccgagatgtcccgcgtctccatccgcatcctcgacgagctcgtcctccccttccaggagctccagatcgacgacaacgagtacgcctacctcaaggccatcatcttcttcgaccccgacgccaagggcctctccgaccccggcaagatcaagcgcctccgctcccaggtccaggtctccctcgaggactacatcaacgaccgccagtacgactcccgcggccgcttcggcgagctcctcctcctcctccccaccctccagtccatcacctggcagatgatcgagcagatccagttcatcaagctcttcggcatggccaagatcgacaacctcctccaggagatgctcctcggcggctccccctccgacgccccccacgcccaccaccccctccacccccacctcatgcaggagcacatgggcaccaacgtcatcgtcgccaacaccatgcccacccacctctccaacggccagatgtgcgagtggccccgcccccgcggccaggccgccacccccgagaccccccagccctccccccccggcggctccggctccgagccctacaagctcctccccggcgccgtcgccaccatcgtcaagcccctctccgccatcccccagcccaccatcaccaagcaggaggtcatctgaggactagtccctgttcccagagcccacttttttttctttttttgaaataaaatagcctgtctttcagatctcaaaggctcttttcagagccaccaaaaaaaaaaaaaaaaaaaaaaaaaaaaaaaaaaaaaaaaaaaaaaaaaaaaaaaaaaaaaaaaaaaaaaaaaaaaaaaaaaaaaaaaaaaaaaaaaaaaa

SEQ ID NO: 3022 - RNA, 1697 nt, synthetic construct
  misc_feature 1..1697: note = mRNA a-1 (hSL-A100) (opt2) from Homo sapiens__NP_000448.3__HNF4A(1-474)(K300R)
  source 1..1697: mol_type = other RNA
aggagagtcccgcagtcggcgtccagcggctctgcttgttcgtgtgtgtgtcgttgcaggccttattcaagcttaccatgcgcctctccaagaccctcgtcgacatggacatggccgactactccgccgccctcgaccccgcctacaccaccctcgagttcgagaacgtccaggtcctcaccatgggcaacgacacctccccctccgagggcaccaacctcaacgcccccaactccctcggcgtctccgccctctgcgccatctgcggcgaccgcgccaccggcaagcactacggcgcctcctcctgcgacggctgcaagggcttcttccgccgctccgtccgcaagaaccacatgtactcctgccgcttctcccgccagtgcgtcgtcgacaaggacaagcgcaaccagtgccgctactgccgcctcaagaagtgcttccgcgccggcatgaagaaggaggccgtccagaacgagcgcgaccgcatctccacccgccgctcctcctacgaggactcctccctcccctccatcaacgccctcctccaggccgaggtcctctcccgccagatcacctcccccgtctccggcatcaacggcgacatccgcgccaagaagatcgcctccatcgccgacgtctgcgagtccatgaaggagcagctcctcgtcctcgtcgagtgggccaagtacatccccgccttctgcgagctccccctcgacgaccaggtcgccctcctccgcgcccacgccggcgagcacctcctcctcggcgccaccaagcgctccatggtcttcaaggacgtcctcctcctcggcaacgactacatcgtcccccgccactgccccgagctcgccgagatgtcccgcgtctccatccgcatcctcgacgagctcgtcctccccttccaggagctccagatcgacgacaacgagtacgcctacctcaaggccatcatcttcttcgaccccgacgcccgcggcctctccgaccccggcaagatcaagcgcctccgctcccaggtccaggtctccctcgaggactacatcaacgaccgccagtacgactcccgcggccgcttcggcgagctcctcctcctcctccccaccctccagtccatcacctggcagatgatcgagcagatccagttcatcaagctcttcggcatggccaagatcgacaacctcctccaggagatgctcctcggcggctccccctccgacgccccccacgcccaccaccccctccacccccacctcatgcaggagcacatgggcaccaacgtcatcgtcgccaacaccatgcccacccacctctccaacggccagatgtgcgagtggccccgcccccgcggccaggccgccacccccgagaccccccagccctccccccccggcggctccggctccgagccctacaagctcctccccggcgccgtcgccaccatcgtcaagcccctctccgccatcccccagcccaccatcaccaagcaggaggtcatctgaggactagtccctgttcccagagcccacttttttttctttttttgaaataaaatagcctgtctttcagatctcaaaggctcttttcagagccaccaaaaaaaaaaaaaaaaaaaaaaaaaaaaaaaaaaaaaaaaaaaaaaaaaaaaaaaaaaaaaaaaaaaaaaaaaaaaaaaaaaaaaaaaaaaaaaaaaaaaa

SEQ ID NO: 3023 - RNA, 1697 nt, synthetic construct
  misc_feature 1..1697: note = mRNA a-1 (hSL-A100) (opt2) from Homo sapiens__NP_000448.3__HNF4A(1-474)(K300R_K307R_K309R)
  source 1..1697: mol_type = other RNA
aggagagtcccgcagtcggcgtccagcggctctgcttgttcgtgtgtgtgtcgttgcaggccttattcaagcttaccatgcgcctctccaagaccctcgtcgacatggacatggccgactactccgccgccctcgaccccgcctacaccaccctcgagttcgagaacgtccaggtcctcaccatgggcaacgacacctccccctccgagggcaccaacctcaacgcccccaactccctcggcgtctccgccctctgcgccatctgcggcgaccgcgccaccggcaagcactacggcgcctcctcctgcgacggctgcaagggcttcttccgccgctccgtccgcaagaaccacatgtactcctgccgcttctcccgccagtgcgtcgtcgacaaggacaagcgcaaccagtgccgctactgccgcctcaagaagtgcttccgcgccggcatgaagaaggaggccgtccagaacgagcgcgaccgcatctccacccgccgctcctcctacgaggactcctccctcccctccatcaacgccctcctccaggccgaggtcctctcccgccagatcacctcccccgtctccggcatcaacggcgacatccgcgccaagaagatcgcctccatcgccgacgtctgcgagtccatgaaggagcagctcctcgtcctcgtcgagtgggccaagtacatccccgccttctgcgagctccccctcgacgaccaggtcgccctcctccgcgcccacgccggcgagcacctcctcctcggcgccaccaagcgctccatggtcttcaaggacgtcctcctcctcggcaacgactacatcgtcccccgccactgccccgagctcgccgagatgtcccgcgtctccatccgcatcctcgacgagctcgtcctccccttccaggagctccagatcgacgacaacgagtacgcctacctcaaggccatcatcttcttcgaccccgacgcccgcggcctctccgaccccggccgcatccgccgcctccgctcccaggtccaggtctccctcgaggactacatcaacgaccgccagtacgactcccgcggccgcttcggcgagctcctcctcctcctccccaccctccagtccatcacctggcagatgatcgagcagatccagttcatcaagctcttcggcatggccaagatcgacaacctcctccaggagatgctcctcggcggctccccctccgacgccccccacgcccaccaccccctccacccccacctcatgcaggagcacatgggcaccaacgtcatcgtcgccaacaccatgcccacccacctctccaacggccagatgtgcgagtggccccgcccccgcggccaggccgccacccccgagaccccccagccctccccccccggcggctccggctccgagccctacaagctcctccccggcgccgtcgccaccatcgtcaagcccctctccgccatcccccagcccaccatcaccaagcaggaggtcatctgaggactagtccctgttcccagagcccacttttttttctttttttgaaataaaatagcctgtctttcagatctcaaaggctcttttcagagccaccaaaaaaaaaaaaaaaaaaaaaaaaaaaaaaaaaaaaaaaaaaaaaaaaaaaaaaaaaaaaaaaaaaaaaaaaaaaaaaaaaaaaaaaaaaaaaaaaaaaaa

SEQ ID NO: 3024 - RNA, 1697 nt, synthetic construct
  misc_feature 1..1697: note = mRNA a-1 (hSL-A100) (opt2) from Homo sapiens__NP_000448.3__HNF4A(1-474)(K447R_K470R)
  source 1..1697: mol_type = other RNA
aggagagtcccgcagtcggcgtccagcggctctgcttgttcgtgtgtgtgtcgttgcaggccttattcaagcttaccatgcgcctctccaagaccctcgtcgacatggacatggccgactactccgccgccctcgaccccgcctacaccaccctcgagttcgagaacgtccaggtcctcaccatgggcaacgacacctccccctccgagggcaccaacctcaacgcccccaactccctcggcgtctccgccctctgcgccatctgcggcgaccgcgccaccggcaagcactacggcgcctcctcctgcgacggctgcaagggcttcttccgccgctccgtccgcaagaaccacatgtactcctgccgcttctcccgccagtgcgtcgtcgacaaggacaagcgcaaccagtgccgctactgccgcctcaagaagtgcttccgcgccggcatgaagaaggaggccgtccagaacgagcgcgaccgcatctccacccgccgctcctcctacgaggactcctccctcccctccatcaacgccctcctccaggccgaggtcctctcccgccagatcacctcccccgtctccggcatcaacggcgacatccgcgccaagaagatcgcctccatcgccgacgtctgcgagtccatgaaggagcagctcctcgtcctcgtcgagtgggccaagtacatccccgccttctgcgagctccccctcgacgaccaggtcgccctcctccgcgcccacgccggcgagcacctcctcctcggcgccaccaagcgctccatggtcttcaaggacgtcctcctcctcggcaacgactacatcgtcccccgccactgccccgagctcgccgagatgtcccgcgtctccatccgcatcctcgacgagctcgtcctccccttccaggagctccagatcgacgacaacgagtacgcctacctcaaggccatcatcttcttcgaccccgacgccaagggcctctccgaccccggcaagatcaagcgcctccgctcccaggtccaggtctccctcgaggactacatcaacgaccgccagtacgactcccgcggccgcttcggcgagctcctcctcctcctccccaccctccagtccatcacctggcagatgatcgagcagatccagttcatcaagctcttcggcatggccaagatcgacaacctcctccaggagatgctcctcggcggctccccctccgacgccccccacgcccaccaccccctccacccccacctcatgcaggagcacatgggcaccaacgtcatcgtcgccaacaccatgcccacccacctctccaacggccagatgtgcgagtggccccgcccccgcggccaggccgccacccccgagaccccccagccctccccccccggcggctccggctccgagccctaccgcctcctccccggcgccgtcgccaccatcgtcaagcccctctccgccatcccccagcccaccatcacccgccaggaggtcatctgaggactagtccctgttcccagagcccacttttttttctttttttgaaataaaatagcctgtctttcagatctcaaaggctcttttcagagccaccaaaaaaaaaaaaaaaaaaaaaaaaaaaaaaaaaaaaaaaaaaaaaaaaaaaaaaaaaaaaaaaaaaaaaaaaaaaaaaaaaaaaaaaaaaaaaaaaaaaaa

SEQ ID NO: 3025 - RNA, 1697 nt, synthetic construct
  misc_feature 1..1697: note = mRNA a-1 (hSL-A100) (opt2) from Homo sapiens__NP_000448.3__HNF4A(1-474)(K458R)
  source 1..1697: mol_type = other RNA
aggagagtcccgcagtcggcgtccagcggctctgcttgttcgtgtgtgtgtcgttgcaggccttattcaagcttaccatgcgcctctccaagaccctcgtcgacatggacatggccgactactccgccgccctcgaccccgcctacaccaccctcgagttcgagaacgtccaggtcctcaccatgggcaacgacacctccccctccgagggcaccaacctcaacgcccccaactccctcggcgtctccgccctctgcgccatctgcggcgaccgcgccaccggcaagcactacggcgcctcctcctgcgacggctgcaagggcttcttccgccgctccgtccgcaagaaccacatgtactcctgccgcttctcccgccagtgcgtcgtcgacaaggacaagcgcaaccagtgccgctactgccgcctcaagaagtgcttccgcgccggcatgaagaaggaggccgtccagaacgagcgcgaccgcatctccacccgccgctcctcctacgaggactcctccctcccctccatcaacgccctcctccaggccgaggtcctctcccgccagatcacctcccccgtctccggcatcaacggcgacatccgcgccaagaagatcgcctccatcgccgacgtctgcgagtccatgaaggagcagctcctcgtcctcgtcgagtgggccaagtacatccccgccttctgcgagctccccctcgacgaccaggtcgccctcctccgcgcccacgccggcgagcacctcctcctcggcgccaccaagcgctccatggtcttcaaggacgtcctcctcctcggcaacgactacatcgtcccccgccactgccccgagctcgccgagatgtcccgcgtctccatccgcatcctcgacgagctcgtcctccccttccaggagctccagatcgacgacaacgagtacgcctacctcaaggccatcatcttcttcgaccccgacgccaagggcctctccgaccccggcaagatcaagcgcctccgctcccaggtccaggtctccctcgaggactacatcaacgaccgccagtacgactcccgcggccgcttcggcgagctcctcctcctcctccccaccctccagtccatcacctggcagatgatcgagcagatccagttcatcaagctcttcggcatggccaagatcgacaacctcctccaggagatgctcctcggcggctccccctccgacgccccccacgcccaccaccccctccacccccacctcatgcaggagcacatgggcaccaacgtcatcgtcgccaacaccatgcccacccacctctccaacggccagatgtgcgagtggccccgcccccgcggccaggccgccacccccgagaccccccagccctccccccccggcggctccggctccgagccctacaagctcctccccggcgccgtcgccaccatcgtccgccccctctccgccatcccccagcccaccatcaccaagcaggaggtcatctgaggactagtccctgttcccagagcccacttttttttctttttttgaaataaaatagcctgtctttcagatctcaaaggctcttttcagagccaccaaaaaaaaaaaaaaaaaaaaaaaaaaaaaaaaaaaaaaaaaaaaaaaaaaaaaaaaaaaaaaaaaaaaaaaaaaaaaaaaaaaaaaaaaaaaaaaaaaaaa

SEQ ID NO: 3026 - RNA, 1697 nt, synthetic construct
  misc_feature 1..1697: note = mRNA a-1 (hSL-A100) (opt2) from Homo sapiens__NP_000448.3__HNF4A(1-474)(K106R_K108R_K126R_K127R)
  source 1..1697: mol_type = other RNA
aggagagtcccgcagtcggcgtccagcggctctgcttgttcgtgtgtgtgtcgttgcaggccttattcaagcttaccatgcgcctctccaagaccctcgtcgacatggacatggccgactactccgccgccctcgaccccgcctacaccaccctcgagttcgagaacgtccaggtcctcaccatgggcaacgacacctccccctccgagggcaccaacctcaacgcccccaactccctcggcgtctccgccctctgcgccatctgcggcgaccgcgccaccggcaagcactacggcgcctcctcctgcgacggctgcaagggcttcttccgccgctccgtccgcaagaaccacatgtactcctgccgcttctcccgccagtgcgtcgtcgaccgcgaccgccgcaaccagtgccgctactgccgcctcaagaagtgcttccgcgccggcatgcgccgcgaggccgtccagaacgagcgcgaccgcatctccacccgccgctcctcctacgaggactcctccctcccctccatcaacgccctcctccaggccgaggtcctctcccgccagatcacctcccccgtctccggcatcaacggcgacatccgcgccaagaagatcgcctccatcgccgacgtctgcgagtccatgaaggagcagctcctcgtcctcgtcgagtgggccaagtacatccccgccttctgcgagctccccctcgacgaccaggtcgccctcctccgcgcccacgccggcgagcacctcctcctcggcgccaccaagcgctccatggtcttcaaggacgtcctcctcctcggcaacgactacatcgtcccccgccactgccccgagctcgccgagatgtcccgcgtctccatccgcatcctcgacgagctcgtcctccccttccaggagctccagatcgacgacaacgagtacgcctacctcaaggccatcatcttcttcgaccccgacgccaagggcctctccgaccccggcaagatcaagcgcctccgctcccaggtccaggtctccctcgaggactacatcaacgaccgccagtacgactcccgcggccgcttcggcgagctcctcctcctcctccccaccctccagtccatcacctggcagatgatcgagcagatccagttcatcaagctcttcggcatggccaagatcgacaacctcctccaggagatgctcctcggcggctccccctccgacgccccccacgcccaccaccccctccacccccacctcatgcaggagcacatgggcaccaacgtcatcgtcgccaacaccatgcccacccacctctccaacggccagatgtgcgagtggccccgcccccgcggccaggccgccacccccgagaccccccagccctccccccccggcggctccggctccgagccctacaagctcctccccggcgccgtcgccaccatcgtcaagcccctctccgccatcccccagcccaccatcaccaagcaggaggtcatctgaggactagtccctgttcccagagcccacttttttttctttttttgaaataaaatagcctgtctttcagatctcaaaggctcttttcagagccaccaaaaaaaaaaaaaaaaaaaaaaaaaaaaaaaaaaaaaaaaaaaaaaaaaaaaaaaaaaaaaaaaaaaaaaaaaaaaaaaaaaaaaaaaaaaaaaaaaaaaa

SEQ ID NO: 3027 - RNA, 1697 nt, synthetic construct
  misc_feature 1..1697: note = mRNA a-1 (hSL-A100) (opt2) from Homo sapiens__NP_000448.3__HNF4A(1-474)(E285Q)
  source 1..1697: mol_type = other RNA
aggagagtcccgcagtcggcgtccagcggctctgcttgttcgtgtgtgtgtcgttgcaggccttattcaagcttaccatgcgcctctccaagaccctcgtcgacatggacatggccgactactccgccgccctcgaccccgcctacaccaccctcgagttcgagaacgtccaggtcctcaccatgggcaacgacacctccccctccgagggcaccaacctcaacgcccccaactccctcggcgtctccgccctctgcgccatctgcggcgaccgcgccaccggcaagcactacggcgcctcctcctgcgacggctgcaagggcttcttccgccgctccgtccgcaagaaccacatgtactcctgccgcttctcccgccagtgcgtcgtcgacaaggacaagcgcaaccagtgccgctactgccgcctcaagaagtgcttccgcgccggcatgaagaaggaggccgtccagaacgagcgcgaccgcatctccacccgccgctcctcctacgaggactcctccctcccctccatcaacgccctcctccaggccgaggtcctctcccgccagatcacctcccccgtctccggcatcaacggcgacatccgcgccaagaagatcgcctccatcgccgacgtctgcgagtccatgaaggagcagctcctcgtcctcgtcgagtgggccaagtacatccccgccttctgcgagctccccctcgacgaccaggtcgccctcctccgcgcccacgccggcgagcacctcctcctcggcgccaccaagcgctccatggtcttcaaggacgtcctcctcctcggcaacgactacatcgtcccccgccactgccccgagctcgccgagatgtcccgcgtctccatccgcatcctcgacgagctcgtcctccccttccaggagctccagatcgacgacaaccagtacgcctacctcaaggccatcatcttcttcgaccccgacgccaagggcctctccgaccccggcaagatcaagcgcctccgctcccaggtccaggtctccctcgaggactacatcaacgaccgccagtacgactcccgcggccgcttcggcgagctcctcctcctcctccccaccctccagtccatcacctggcagatgatcgagcagatccagttcatcaagctcttcggcatggccaagatcgacaacctcctccaggagatgctcctcggcggctccccctccgacgccccccacgcccaccaccccctccacccccacctcatgcaggagcacatgggcaccaacgtcatcgtcgccaacaccatgcccacccacctctccaacggccagatgtgcgagtggccccgcccccgcggccaggccgccacccccgagaccccccagccctccccccccggcggctccggctccgagccctacaagctcctccccggcgccgtcgccaccatcgtcaagcccctctccgccatcccccagcccaccatcaccaagcaggaggtcatctgaggactagtccctgttcccagagcccacttttttttctttttttgaaataaaatagcctgtctttcagatctcaaaggctcttttcagagccaccaaaaaaaaaaaaaaaaaaaaaaaaaaaaaaaaaaaaaaaaaaaaaaaaaaaaaaaaaaaaaaaaaaaaaaaaaaaaaaaaaaaaaaaaaaaaaaaaaaaaa

SEQ ID NO: 3028 - RNA, 1697 nt, synthetic construct
  misc_feature 1..1697: note = mRNA a-1 (hSL-A100) (opt2) from Homo sapiens__NP_000448.3__HNF4A(1-474)(T166E)
  source 1..1697: mol_type = other RNA
aggagagtcccgcagtcggcgtccagcggctctgcttgttcgtgtgtgtgtcgttgcaggccttattcaagcttaccatgcgcctctccaagaccctcgtcgacatggacatggccgactactccgccgccctcgaccccgcctacaccaccctcgagttcgagaacgtccaggtcctcaccatgggcaacgacacctccccctccgagggcaccaacctcaacgcccccaactccctcggcgtctccgccctctgcgccatctgcggcgaccgcgccaccggcaagcactacggcgcctcctcctgcgacggctgcaagggcttcttccgccgctccgtccgcaagaaccacatgtactcctgccgcttctcccgccagtgcgtcgtcgacaaggacaagcgcaaccagtgccgctactgccgcctcaagaagtgcttccgcgccggcatgaagaaggaggccgtccagaacgagcgcgaccgcatctccacccgccgctcctcctacgaggactcctccctcccctccatcaacgccctcctccaggccgaggtcctctcccgccagatcgagtcccccgtctccggcatcaacggcgacatccgcgccaagaagatcgcctccatcgccgacgtctgcgagtccatgaaggagcagctcctcgtcctcgtcgagtgggccaagtacatccccgccttctgcgagctccccctcgacgaccaggtcgccctcctccgcgcccacgccggcgagcacctcctcctcggcgccaccaagcgctccatggtcttcaaggacgtcctcctcctcggcaacgactacatcgtcccccgccactgccccgagctcgccgagatgtcccgcgtctccatccgcatcctcgacgagctcgtcctccccttccaggagctccagatcgacgacaacgagtacgcctacctcaaggccatcatcttcttcgaccccgacgccaagggcctctccgaccccggcaagatcaagcgcctccgctcccaggtccaggtctccctcgaggactacatcaacgaccgccagtacgactcccgcggccgcttcggcgagctcctcctcctcctccccaccctccagtccatcacctggcagatgatcgagcagatccagttcatcaagctcttcggcatggccaagatcgacaacctcctccaggagatgctcctcggcggctccccctccgacgccccccacgcccaccaccccctccacccccacctcatgcaggagcacatgggcaccaacgtcatcgtcgccaacaccatgcccacccacctctccaacggccagatgtgcgagtggccccgcccccgcggccaggccgccacccccgagaccccccagccctccccccccggcggctccggctccgagccctacaagctcctccccggcgccgtcgccaccatcgtcaagcccctctccgccatcccccagcccaccatcaccaagcaggaggtcatctgaggactagtccctgttcccagagcccacttttttttctttttttgaaataaaatagcctgtctttcagatctcaaaggctcttttcagagccaccaaaaaaaaaaaaaaaaaaaaaaaaaaaaaaaaaaaaaaaaaaaaaaaaaaaaaaaaaaaaaaaaaaaaaaaaaaaaaaaaaaaaaaaaaaaaaaaaaaaaa

SEQ ID NO: 3029 - RNA, 1697 nt, synthetic construct
  misc_feature 1..1697: note = mRNA a-1 (hSL-A100) (opt2) from Homo sapiens__NP_000448.3__HNF4A(1-474)(S148A)
  source 1..1697: mol_type = other RNA
aggagagtcccgcagtcggcgtccagcggctctgcttgttcgtgtgtgtgtcgttgcaggccttattcaagcttaccatgcgcctctccaagaccctcgtcgacatggacatggccgactactccgccgccctcgaccccgcctacaccaccctcgagttcgagaacgtccaggtcctcaccatgggcaacgacacctccccctccgagggcaccaacctcaacgcccccaactccctcggcgtctccgccctctgcgccatctgcggcgaccgcgccaccggcaagcactacggcgcctcctcctgcgacggctgcaagggcttcttccgccgctccgtccgcaagaaccacatgtactcctgccgcttctcccgccagtgcgtcgtcgacaaggacaagcgcaaccagtgccgctactgccgcctcaagaagtgcttccgcgccggcatgaagaaggaggccgtccagaacgagcgcgaccgcatctccacccgccgctcctcctacgaggactccgccctcccctccatcaacgccctcctccaggccgaggtcctctcccgccagatcacctcccccgtctccggcatcaacggcgacatccgcgccaagaagatcgcctccatcgccgacgtctgcgagtccatgaaggagcagctcctcgtcctcgtcgagtgggccaagtacatccccgccttctgcgagctccccctcgacgaccaggtcgccctcctccgcgcccacgccggcgagcacctcctcctcggcgccaccaagcgctccatggtcttcaaggacgtcctcctcctcggcaacgactacatcgtcccccgccactgccccgagctcgccgagatgtcccgcgtctccatccgcatcctcgacgagctcgtcctccccttccaggagctccagatcgacgacaacgagtacgcctacctcaaggccatcatcttcttcgaccccgacgccaagggcctctccgaccccggcaagatcaagcgcctccgctcccaggtccaggtctccctcgaggactacatcaacgaccgccagtacgactcccgcggccgcttcggcgagctcctcctcctcctccccaccctccagtccatcacctggcagatgatcgagcagatccagttcatcaagctcttcggcatggccaagatcgacaacctcctccaggagatgctcctcggcggctccccctccgacgccccccacgcccaccaccccctccacccccacctcatgcaggagcacatgggcaccaacgtcatcgtcgccaacaccatgcccacccacctctccaacggccagatgtgcgagtggccccgcccccgcggccaggccgccacccccgagaccccccagccctccccccccggcggctccggctccgagccctacaagctcctccccggcgccgtcgccaccatcgtcaagcccctctccgccatcccccagcccaccatcaccaagcaggaggtcatctgaggactagtccctgttcccagagcccacttttttttctttttttgaaataaaatagcctgtctttcagatctcaaaggctcttttcagagccaccaaaaaaaaaaaaaaaaaaaaaaaaaaaaaaaaaaaaaaaaaaaaaaaaaaaaaaaaaaaaaaaaaaaaaaaaaaaaaaaaaaaaaaaaaaaaaaaaaaaaa

SEQ ID NO: 3030 - RNA, 1697 nt, synthetic construct
  misc_feature 1..1697: note = mRNA a-1 (hSL-A100) (opt2) from Homo sapiens__NP_000448.3__HNF4A(1-474)(S148E)
  source 1..1697: mol_type = other RNA
aggagagtcccgcagtcggcgtccagcggctctgcttgttcgtgtgtgtgtcgttgcaggccttattcaagcttaccatgcgcctctccaagaccctcgtcgacatggacatggccgactactccgccgccctcgaccccgcctacaccaccctcgagttcgagaacgtccaggtcctcaccatgggcaacgacacctccccctccgagggcaccaacctcaacgcccccaactccctcggcgtctccgccctctgcgccatctgcggcgaccgcgccaccggcaagcactacggcgcctcctcctgcgacggctgcaagggcttcttccgccgctccgtccgcaagaaccacatgtactcctgccgcttctcccgccagtgcgtcgtcgacaaggacaagcgcaaccagtgccgctactgccgcctcaagaagtgcttccgcgccggcatgaagaaggaggccgtccagaacgagcgcgaccgcatctccacccgccgctcctcctacgaggactccgagctcccctccatcaacgccctcctccaggccgaggtcctctcccgccagatcacctcccccgtctccggcatcaacggcgacatccgcgccaagaagatcgcctccatcgccgacgtctgcgagtccatgaaggagcagctcctcgtcctcgtcgagtgggccaagtacatccccgccttctgcgagctccccctcgacgaccaggtcgccctcctccgcgcccacgccggcgagcacctcctcctcggcgccaccaagcgctccatggtcttcaaggacgtcctcctcctcggcaacgactacatcgtcccccgccactgccccgagctcgccgagatgtcccgcgtctccatccgcatcctcgacgagctcgtcctccccttccaggagctccagatcgacgacaacgagtacgcctacctcaaggccatcatcttcttcgaccccgacgccaagggcctctccgaccccggcaagatcaagcgcctccgctcccaggtccaggtctccctcgaggactacatcaacgaccgccagtacgactcccgcggccgcttcggcgagctcctcctcctcctccccaccctccagtccatcacctggcagatgatcgagcagatccagttcatcaagctcttcggcatggccaagatcgacaacctcctccaggagatgctcctcggcggctccccctccgacgccccccacgcccaccaccccctccacccccacctcatgcaggagcacatgggcaccaacgtcatcgtcgccaacaccatgcccacccacctctccaacggccagatgtgcgagtggccccgcccccgcggccaggccgccacccccgagaccccccagccctccccccccggcggctccggctccgagccctacaagctcctccccggcgccgtcgccaccatcgtcaagcccctctccgccatcccccagcccaccatcaccaagcaggaggtcatctgaggactagtccctgttcccagagcccacttttttttctttttttgaaataaaatagcctgtctttcagatctcaaaggctcttttcagagccaccaaaaaaaaaaaaaaaaaaaaaaaaaaaaaaaaaaaaaaaaaaaaaaaaaaaaaaaaaaaaaaaaaaaaaaaaaaaaaaaaaaaaaaaaaaaaaaaaaaaaa

SEQ ID NO: 3031 - RNA, 1697 nt, synthetic construct
  misc_feature 1..1697: note = mRNA a-1 (hSL-A100) (opt2) from Homo sapiens__NP_000448.3__HNF4A(1-474)(S183A)
  source 1..1697: mol_type = other RNA
aggagagtcccgcagtcggcgtccagcggctctgcttgttcgtgtgtgtgtcgttgcaggccttattcaagcttaccatgcgcctctccaagaccctcgtcgacatggacatggccgactactccgccgccctcgaccccgcctacaccaccctcgagttcgagaacgtccaggtcctcaccatgggcaacgacacctccccctccgagggcaccaacctcaacgcccccaactccctcggcgtctccgccctctgcgccatctgcggcgaccgcgccaccggcaagcactacggcgcctcctcctgcgacggctgcaagggcttcttccgccgctccgtccgcaagaaccacatgtactcctgccgcttctcccgccagtgcgtcgtcgacaaggacaagcgcaaccagtgccgctactgccgcctcaagaagtgcttccgcgccggcatgaagaaggaggccgtccagaacgagcgcgaccgcatctccacccgccgctcctcctacgaggactcctccctcccctccatcaacgccctcctccaggccgaggtcctctcccgccagatcacctcccccgtctccggcatcaacggcgacatccgcgccaagaagatcgccgccatcgccgacgtctgcgagtccatgaaggagcagctcctcgtcctcgtcgagtgggccaagtacatccccgccttctgcgagctccccctcgacgaccaggtcgccctcctccgcgcccacgccggcgagcacctcctcctcggcgccaccaagcgctccatggtcttcaaggacgtcctcctcctcggcaacgactacatcgtcccccgccactgccccgagctcgccgagatgtcccgcgtctccatccgcatcctcgacgagctcgtcctccccttccaggagctccagatcgacgacaacgagtacgcctacctcaaggccatcatcttcttcgaccccgacgccaagggcctctccgaccccggcaagatcaagcgcctccgctcccaggtccaggtctccctcgaggactacatcaacgaccgccagtacgactcccgcggccgcttcggcgagctcctcctcctcctccccaccctccagtccatcacctggcagatgatcgagcagatccagttcatcaagctcttcggcatggccaagatcgacaacctcctccaggagatgctcctcggcggctccccctccgacgccccccacgcccaccaccccctccacccccacctcatgcaggagcacatgggcaccaacgtcatcgtcgccaacaccatgcccacccacctctccaacggccagatgtgcgagtggccccgcccccgcggccaggccgccacccccgagaccccccagccctccccccccggcggctccggctccgagccctacaagctcctccccggcgccgtcgccaccatcgtcaagcccctctccgccatcccccagcccaccatcaccaagcaggaggtcatctgaggactagtccctgttcccagagcccacttttttttctttttttgaaataaaatagcctgtctttcagatctcaaaggctcttttcagagccaccaaaaaaaaaaaaaaaaaaaaaaaaaaaaaaaaaaaaaaaaaaaaaaaaaaaaaaaaaaaaaaaaaaaaaaaaaaaaaaaaaaaaaaaaaaaaaaaaaaaaa

SEQ ID NO: 3032 - RNA, 1697 nt, synthetic construct
  misc_feature 1..1697: note = mRNA a-1 (hSL-A100) (opt2) from Homo sapiens__NP_000448.3__HNF4A(1-474)(S183E)
  source 1..1697: mol_type = other RNA
aggagagtcccgcagtcggcgtccagcggctctgcttgttcgtgtgtgtgtcgttgcaggccttattcaagcttaccatgcgcctctccaagaccctcgtcgacatggacatggccgactactccgccgccctcgaccccgcctacaccaccctcgagttcgagaacgtccaggtcctcaccatgggcaacgacacctccccctccgagggcaccaacctcaacgcccccaactccctcggcgtctccgccctctgcgccatctgcggcgaccgcgccaccggcaagcactacggcgcctcctcctgcgacggctgcaagggcttcttccgccgctccgtccgcaagaaccacatgtactcctgccgcttctcccgccagtgcgtcgtcgacaaggacaagcgcaaccagtgccgctactgccgcctcaagaagtgcttccgcgccggcatgaagaaggaggccgtccagaacgagcgcgaccgcatctccacccgccgctcctcctacgaggactcctccctcccctccatcaacgccctcctccaggccgaggtcctctcccgccagatcacctcccccgtctccggcatcaacggcgacatccgcgccaagaagatcgccgagatcgccgacgtctgcgagtccatgaaggagcagctcctcgtcctcgtcgagtgggccaagtacatccccgccttctgcgagctccccctcgacgaccaggtcgccctcctccgcgcccacgccggcgagcacctcctcctcggcgccaccaagcgctccatggtcttcaaggacgtcctcctcctcggcaacgactacatcgtcccccgccactgccccgagctcgccgagatgtcccgcgtctccatccgcatcctcgacgagctcgtcctccccttccaggagctccagatcgacgacaacgagtacgcctacctcaaggccatcatcttcttcgaccccgacgccaagggcctctccgaccccggcaagatcaagcgcctccgctcccaggtccaggtctccctcgaggactacatcaacgaccgccagtacgactcccgcggccgcttcggcgagctcctcctcctcctccccaccctccagtccatcacctggcagatgatcgagcagatccagttcatcaagctcttcggcatggccaagatcgacaacctcctccaggagatgctcctcggcggctccccctccgacgccccccacgcccaccaccccctccacccccacctcatgcaggagcacatgggcaccaacgtcatcgtcgccaacaccatgcccacccacctctccaacggccagatgtgcgagtggccccgcccccgcggccaggccgccacccccgagaccccccagccctccccccccggcggctccggctccgagccctacaagctcctccccggcgccgtcgccaccatcgtcaagcccctctccgccatcccccagcccaccatcaccaagcaggaggtcatctgaggactagtccctgttcccagagcccacttttttttctttttttgaaataaaatagcctgtctttcagatctcaaaggctcttttcagagccaccaaaaaaaaaaaaaaaaaaaaaaaaaaaaaaaaaaaaaaaaaaaaaaaaaaaaaaaaaaaaaaaaaaaaaaaaaaaaaaaaaaaaaaaaaaaaaaaaaaaaa

SEQ ID NO: 3033 - RNA, 1697 nt, synthetic construct
  misc_feature 1..1697: note = mRNA a-1 (hSL-A100) (opt2) from Homo sapiens__NP_000448.3__HNF4A(1-474)(S461A)
  source 1..1697: mol_type = other RNA
aggagagtcccgcagtcggcgtccagcggctctgcttgttcgtgtgtgtgtcgttgcaggccttattcaagcttaccatgcgcctctccaagaccctcgtcgacatggacatggccgactactccgccgccctcgaccccgcctacaccaccctcgagttcgagaacgtccaggtcctcaccatgggcaacgacacctccccctccgagggcaccaacctcaacgcccccaactccctcggcgtctccgccctctgcgccatctgcggcgaccgcgccaccggcaagcactacggcgcctcctcctgcgacggctgcaagggcttcttccgccgctccgtccgcaagaaccacatgtactcctgccgcttctcccgccagtgcgtcgtcgacaaggacaagcgcaaccagtgccgctactgccgcctcaagaagtgcttccgcgccggcatgaagaaggaggccgtccagaacgagcgcgaccgcatctccacccgccgctcctcctacgaggactcctccctcccctccatcaacgccctcctccaggccgaggtcctctcccgccagatcacctcccccgtctccggcatcaacggcgacatccgcgccaagaagatcgcctccatcgccgacgtctgcgagtccatgaaggagcagctcctcgtcctcgtcgagtgggccaagtacatccccgccttctgcgagctccccctcgacgaccaggtcgccctcctccgcgcccacgccggcgagcacctcctcctcggcgccaccaagcgctccatggtcttcaaggacgtcctcctcctcggcaacgactacatcgtcccccgccactgccccgagctcgccgagatgtcccgcgtctccatccgcatcctcgacgagctcgtcctccccttccaggagctccagatcgacgacaacgagtacgcctacctcaaggccatcatcttcttcgaccccgacgccaagggcctctccgaccccggcaagatcaagcgcctccgctcccaggtccaggtctccctcgaggactacatcaacgaccgccagtacgactcccgcggccgcttcggcgagctcctcctcctcctccccaccctccagtccatcacctggcagatgatcgagcagatccagttcatcaagctcttcggcatggccaagatcgacaacctcctccaggagatgctcctcggcggctccccctccgacgccccccacgcccaccaccccctccacccccacctcatgcaggagcacatgggcaccaacgtcatcgtcgccaacaccatgcccacccacctctccaacggccagatgtgcgagtggccccgcccccgcggccaggccgccacccccgagaccccccagccctccccccccggcggctccggctccgagccctacaagctcctccccggcgccgtcgccaccatcgtcaagcccctcgccgccatcccccagcccaccatcaccaagcaggaggtcatctgaggactagtccctgttcccagagcccacttttttttctttttttgaaataaaatagcctgtctttcagatctcaaaggctcttttcagagccaccaaaaaaaaaaaaaaaaaaaaaaaaaaaaaaaaaaaaaaaaaaaaaaaaaaaaaaaaaaaaaaaaaaaaaaaaaaaaaaaaaaaaaaaaaaaaaaaaaaaaa

SEQ ID NO: 3034 - RNA, 1697 nt, synthetic construct
  misc_feature 1..1697: note = mRNA a-1 (hSL-A100) (opt2) from Homo sapiens__NP_000448.3__HNF4A(1-474)(S461E)
  source 1..1697: mol_type = other RNA
aggagagtcccgcagtcggcgtccagcggctctgcttgttcgtgtgtgtgtcgttgcaggccttattcaagcttaccatgcgcctctccaagaccctcgtcgacatggacatggccgactactccgccgccctcgaccccgcctacaccaccctcgagttcgagaacgtccaggtcctcaccatgggcaacgacacctccccctccgagggcaccaacctcaacgcccccaactccctcggcgtctccgccctctgcgccatctgcggcgaccgcgccaccggcaagcactacggcgcctcctcctgcgacggctgcaagggcttcttccgccgctccgtccgcaagaaccacatgtactcctgccgcttctcccgccagtgcgtcgtcgacaaggacaagcgcaaccagtgccgctactgccgcctcaagaagtgcttccgcgccggcatgaagaaggaggccgtccagaacgagcgcgaccgcatctccacccgccgctcctcctacgaggactcctccctcccctccatcaacgccctcctccaggccgaggtcctctcccgccagatcacctcccccgtctccggcatcaacggcgacatccgcgccaagaagatcgcctccatcgccgacgtctgcgagtccatgaaggagcagctcctcgtcctcgtcgagtgggccaagtacatccccgccttctgcgagctccccctcgacgaccaggtcgccctcctccgcgcccacgccggcgagcacctcctcctcggcgccaccaagcgctccatggtcttcaaggacgtcctcctcctcggcaacgactacatcgtcccccgccactgccccgagctcgccgagatgtcccgcgtctccatccgcatcctcgacgagctcgtcctccccttccaggagctccagatcgacgacaacgagtacgcctacctcaaggccatcatcttcttcgaccccgacgccaagggcctctccgaccccggcaagatcaagcgcctccgctcccaggtccaggtctccctcgaggactacatcaacgaccgccagtacgactcccgcggccgcttcggcgagctcctcctcctcctccccaccctccagtccatcacctggcagatgatcgagcagatccagttcatcaagctcttcggcatggccaagatcgacaacctcctccaggagatgctcctcggcggctccccctccgacgccccccacgcccaccaccccctccacccccacctcatgcaggagcacatgggcaccaacgtcatcgtcgccaacaccatgcccacccacctctccaacggccagatgtgcgagtggccccgcccccgcggccaggccgccacccccgagaccccccagccctccccccccggcggctccggctccgagccctacaagctcctccccggcgccgtcgccaccatcgtcaagcccctcgaggccatcccccagcccaccatcaccaagcaggaggtcatctgaggactagtccctgttcccagagcccacttttttttctttttttgaaataaaatagcctgtctttcagatctcaaaggctcttttcagagccaccaaaaaaaaaaaaaaaaaaaaaaaaaaaaaaaaaaaaaaaaaaaaaaaaaaaaaaaaaaaaaaaaaaaaaaaaaaaaaaaaaaaaaaaaaaaaaaaaaaaaa

SEQ ID NO: 3035 - RNA, 1697 nt, synthetic construct
  misc_feature 1..1697: note = mRNA a-1 (hSL-A100) (opt2) from Homo sapiens__NP_000448.3__HNF4A(1-474)(S142A_S143A_S313A)
  source 1..1697: mol_type = other RNA
aggagagtcccgcagtcggcgtccagcggctctgcttgttcgtgtgtgtgtcgttgcaggccttattcaagcttaccatgcgcctctccaagaccctcgtcgacatggacatggccgactactccgccgccctcgaccccgcctacaccaccctcgagttcgagaacgtccaggtcctcaccatgggcaacgacacctccccctccgagggcaccaacctcaacgcccccaactccctcggcgtctccgccctctgcgccatctgcggcgaccgcgccaccggcaagcactacggcgcctcctcctgcgacggctgcaagggcttcttccgccgctccgtccgcaagaaccacatgtactcctgccgcttctcccgccagtgcgtcgtcgacaaggacaagcgcaaccagtgccgctactgccgcctcaagaagtgcttccgcgccggcatgaagaaggaggccgtccagaacgagcgcgaccgcatctccacccgccgcgccgcctacgaggactcctccctcccctccatcaacgccctcctccaggccgaggtcctctcccgccagatcacctcccccgtctccggcatcaacggcgacatccgcgccaagaagatcgcctccatcgccgacgtctgcgagtccatgaaggagcagctcctcgtcctcgtcgagtgggccaagtacatccccgccttctgcgagctccccctcgacgaccaggtcgccctcctccgcgcccacgccggcgagcacctcctcctcggcgccaccaagcgctccatggtcttcaaggacgtcctcctcctcggcaacgactacatcgtcccccgccactgccccgagctcgccgagatgtcccgcgtctccatccgcatcctcgacgagctcgtcctccccttccaggagctccagatcgacgacaacgagtacgcctacctcaaggccatcatcttcttcgaccccgacgccaagggcctctccgaccccggcaagatcaagcgcctccgcgcccaggtccaggtctccctcgaggactacatcaacgaccgccagtacgactcccgcggccgcttcggcgagctcctcctcctcctccccaccctccagtccatcacctggcagatgatcgagcagatccagttcatcaagctcttcggcatggccaagatcgacaacctcctccaggagatgctcctcggcggctccccctccgacgccccccacgcccaccaccccctccacccccacctcatgcaggagcacatgggcaccaacgtcatcgtcgccaacaccatgcccacccacctctccaacggccagatgtgcgagtggccccgcccccgcggccaggccgccacccccgagaccccccagccctccccccccggcggctccggctccgagccctacaagctcctccccggcgccgtcgccaccatcgtcaagcccctctccgccatcccccagcccaccatcaccaagcaggaggtcatctgaggactagtccctgttcccagagcccacttttttttctttttttgaaataaaatagcctgtctttcagatctcaaaggctcttttcagagccaccaaaaaaaaaaaaaaaaaaaaaaaaaaaaaaaaaaaaaaaaaaaaaaaaaaaaaaaaaaaaaaaaaaaaaaaaaaaaaaaaaaaaaaaaaaaaaaaaaaaaa

SEQ ID NO: 3036 - RNA, 1697 nt, synthetic construct
  misc_feature 1..1697: note = mRNA a-1 (hSL-A100) (opt2) from Homo sapiens__NP_000448.3__HNF4A(1-474)(S142A_S143A_S313A_K458R)
  source 1..1697: mol_type = other RNA
aggagagtcccgcagtcggcgtccagcggctctgcttgttcgtgtgtgtgtcgttgcaggccttattcaagcttaccatgcgcctctccaagaccctcgtcgacatggacatggccgactactccgccgccctcgaccccgcctacaccaccctcgagttcgagaacgtccaggtcctcaccatgggcaacgacacctccccctccgagggcaccaacctcaacgcccccaactccctcggcgtctccgccctctgcgccatctgcggcgaccgcgccaccggcaagcactacggcgcctcctcctgcgacggctgcaagggcttcttccgccgctccgtccgcaagaaccacatgtactcctgccgcttctcccgccagtgcgtcgtcgacaaggacaagcgcaaccagtgccgctactgccgcctcaagaagtgcttccgcgccggcatgaagaaggaggccgtccagaacgagcgcgaccgcatctccacccgccgcgccgcctacgaggactcctccctcccctccatcaacgccctcctccaggccgaggtcctctcccgccagatcacctcccccgtctccggcatcaacggcgacatccgcgccaagaagatcgcctccatcgccgacgtctgcgagtccatgaaggagcagctcctcgtcctcgtcgagtgggccaagtacatccccgccttctgcgagctccccctcgacgaccaggtcgccctcctccgcgcccacgccggcgagcacctcctcctcggcgccaccaagcgctccatggtcttcaaggacgtcctcctcctcggcaacgactacatcgtcccccgccactgccccgagctcgccgagatgtcccgcgtctccatccgcatcctcgacgagctcgtcctccccttccaggagctccagatcgacgacaacgagtacgcctacctcaaggccatcatcttcttcgaccccgacgccaagggcctctccgaccccggcaagatcaagcgcctccgcgcccaggtccaggtctccctcgaggactacatcaacgaccgccagtacgactcccgcggccgcttcggcgagctcctcctcctcctccccaccctccagtccatcacctggcagatgatcgagcagatccagttcatcaagctcttcggcatggccaagatcgacaacctcctccaggagatgctcctcggcggctccccctccgacgccccccacgcccaccaccccctccacccccacctcatgcaggagcacatgggcaccaacgtcatcgtcgccaacaccatgcccacccacctctccaacggccagatgtgcgagtggccccgcccccgcggccaggccgccacccccgagaccccccagccctccccccccggcggctccggctccgagccctacaagctcctccccggcgccgtcgccaccatcgtccgccccctctccgccatcccccagcccaccatcaccaagcaggaggtcatctgaggactagtccctgttcccagagcccacttttttttctttttttgaaataaaatagcctgtctttcagatctcaaaggctcttttcagagccaccaaaaaaaaaaaaaaaaaaaaaaaaaaaaaaaaaaaaaaaaaaaaaaaaaaaaaaaaaaaaaaaaaaaaaaaaaaaaaaaaaaaaaaaaaaaaaaaaaaaaa

SEQ ID NO: 3037 - RNA, 1697 nt, synthetic construct
  misc_feature 1..1697: note = mRNA a-1 (hSL-A100) (opt2) from Homo sapiens__NP_000448.3__HNF4A(1-474)(S142A_S143A_S167A_S313A_ S378A_T429A_T432A_S436A_K458R)
  source 1..1697: mol_type = other RNA
aggagagtcccgcagtcggcgtccagcggctctgcttgttcgtgtgtgtgtcgttgcaggccttattcaagcttaccatgcgcctctccaagaccctcgtcgacatggacatggccgactactccgccgccctcgaccccgcctacaccaccctcgagttcgagaacgtccaggtcctcaccatgggcaacgacacctccccctccgagggcaccaacctcaacgcccccaactccctcggcgtctccgccctctgcgccatctgcggcgaccgcgccaccggcaagcactacggcgcctcctcctgcgacggctgcaagggcttcttccgccgctccgtccgcaagaaccacatgtactcctgccgcttctcccgccagtgcgtcgtcgacaaggacaagcgcaaccagtgccgctactgccgcctcaagaagtgcttccgcgccggcatgaagaaggaggccgtccagaacgagcgcgaccgcatctccacccgccgcgccgcctacgaggactcctccctcccctccatcaacgccctcctccaggccgaggtcctctcccgccagatcaccgcccccgtctccggcatcaacggcgacatccgcgccaagaagatcgcctccatcgccgacgtctgcgagtccatgaaggagcagctcctcgtcctcgtcgagtgggccaagtacatccccgccttctgcgagctccccctcgacgaccaggtcgccctcctccgcgcccacgccggcgagcacctcctcctcggcgccaccaagcgctccatggtcttcaaggacgtcctcctcctcggcaacgactacatcgtcccccgccactgccccgagctcgccgagatgtcccgcgtctccatccgcatcctcgacgagctcgtcctccccttccaggagctccagatcgacgacaacgagtacgcctacctcaaggccatcatcttcttcgaccccgacgccaagggcctctccgaccccggcaagatcaagcgcctccgcgcccaggtccaggtctccctcgaggactacatcaacgaccgccagtacgactcccgcggccgcttcggcgagctcctcctcctcctccccaccctccagtccatcacctggcagatgatcgagcagatccagttcatcaagctcttcggcatggccaagatcgacaacctcctccaggagatgctcctcggcggcgccccctccgacgccccccacgcccaccaccccctccacccccacctcatgcaggagcacatgggcaccaacgtcatcgtcgccaacaccatgcccacccacctctccaacggccagatgtgcgagtggccccgcccccgcggccaggccgccgcccccgaggccccccagcccgccccccccggcggctccggctccgagccctacaagctcctccccggcgccgtcgccaccatcgtccgccccctctccgccatcccccagcccaccatcaccaagcaggaggtcatctgaggactagtccctgttcccagagcccacttttttttctttttttgaaataaaatagcctgtctttcagatctcaaaggctcttttcagagccaccaaaaaaaaaaaaaaaaaaaaaaaaaaaaaaaaaaaaaaaaaaaaaaaaaaaaaaaaaaaaaaaaaaaaaaaaaaaaaaaaaaaaaaaaaaaaaaaaaaaaa

SEQ ID NO: 3038 - RNA, 1697 nt, synthetic construct
  misc_feature 1..1697: note = mRNA a-1 (hSL-A100) (opt2) from Homo sapiens__NP_000448.3__HNF4A(1-474)(S142A_S143A_S148A_S167A_ S313A_S378A_T429A_T432A_S436A_K458R)
  source 1..1697: mol_type = other RNA
aggagagtcccgcagtcggcgtccagcggctctgcttgttcgtgtgtgtgtcgttgcaggccttattcaagcttaccatgcgcctctccaagaccctcgtcgacatggacatggccgactactccgccgccctcgaccccgcctacaccaccctcgagttcgagaacgtccaggtcctcaccatgggcaacgacacctccccctccgagggcaccaacctcaacgcccccaactccctcggcgtctccgccctctgcgccatctgcggcgaccgcgccaccggcaagcactacggcgcctcctcctgcgacggctgcaagggcttcttccgccgctccgtccgcaagaaccacatgtactcctgccgcttctcccgccagtgcgtcgtcgacaaggacaagcgcaaccagtgccgctactgccgcctcaagaagtgcttccgcgccggcatgaagaaggaggccgtccagaacgagcgcgaccgcatctccacccgccgcgccgcctacgaggactccgccctcccctccatcaacgccctcctccaggccgaggtcctctcccgccagatcaccgcccccgtctccggcatcaacggcgacatccgcgccaagaagatcgcctccatcgccgacgtctgcgagtccatgaaggagcagctcctcgtcctcgtcgagtgggccaagtacatccccgccttctgcgagctccccctcgacgaccaggtcgccctcctccgcgcccacgccggcgagcacctcctcctcggcgccaccaagcgctccatggtcttcaaggacgtcctcctcctcggcaacgactacatcgtcccccgccactgccccgagctcgccgagatgtcccgcgtctccatccgcatcctcgacgagctcgtcctccccttccaggagctccagatcgacgacaacgagtacgcctacctcaaggccatcatcttcttcgaccccgacgccaagggcctctccgaccccggcaagatcaagcgcctccgcgcccaggtccaggtctccctcgaggactacatcaacgaccgccagtacgactcccgcggccgcttcggcgagctcctcctcctcctccccaccctccagtccatcacctggcagatgatcgagcagatccagttcatcaagctcttcggcatggccaagatcgacaacctcctccaggagatgctcctcggcggcgccccctccgacgccccccacgcccaccaccccctccacccccacctcatgcaggagcacatgggcaccaacgtcatcgtcgccaacaccatgcccacccacctctccaacggccagatgtgcgagtggccccgcccccgcggccaggccgccgcccccgaggccccccagcccgccccccccggcggctccggctccgagccctacaagctcctccccggcgccgtcgccaccatcgtccgccccctctccgccatcccccagcccaccatcaccaagcaggaggtcatctgaggactagtccctgttcccagagcccacttttttttctttttttgaaataaaatagcctgtctttcagatctcaaaggctcttttcagagccaccaaaaaaaaaaaaaaaaaaaaaaaaaaaaaaaaaaaaaaaaaaaaaaaaaaaaaaaaaaaaaaaaaaaaaaaaaaaaaaaaaaaaaaaaaaaaaaaaaaaaa

SEQ ID NO: 3039 - RNA, 1697 nt, synthetic construct
  misc_feature 1..1697: note = mRNA a-1 (hSL-A100) (opt2) from Homo sapiens__NP_000448.3__HNF4A(1-474)(K106R_K108R_K126R_K127R_ S142A_S143A_S148A_S167A_S313A_S378A_T429A_T432A_S436A_K458R )
  source 1..1697: mol_type = other RNA
aggagagtcccgcagtcggcgtccagcggctctgcttgttcgtgtgtgtgtcgttgcaggccttattcaagcttaccatgcgcctctccaagaccctcgtcgacatggacatggccgactactccgccgccctcgaccccgcctacaccaccctcgagttcgagaacgtccaggtcctcaccatgggcaacgacacctccccctccgagggcaccaacctcaacgcccccaactccctcggcgtctccgccctctgcgccatctgcggcgaccgcgccaccggcaagcactacggcgcctcctcctgcgacggctgcaagggcttcttccgccgctccgtccgcaagaaccacatgtactcctgccgcttctcccgccagtgcgtcgtcgaccgcgaccgccgcaaccagtgccgctactgccgcctcaagaagtgcttccgcgccggcatgcgccgcgaggccgtccagaacgagcgcgaccgcatctccacccgccgcgccgcctacgaggactccgccctcccctccatcaacgccctcctccaggccgaggtcctctcccgccagatcaccgcccccgtctccggcatcaacggcgacatccgcgccaagaagatcgcctccatcgccgacgtctgcgagtccatgaaggagcagctcctcgtcctcgtcgagtgggccaagtacatccccgccttctgcgagctccccctcgacgaccaggtcgccctcctccgcgcccacgccggcgagcacctcctcctcggcgccaccaagcgctccatggtcttcaaggacgtcctcctcctcggcaacgactacatcgtcccccgccactgccccgagctcgccgagatgtcccgcgtctccatccgcatcctcgacgagctcgtcctccccttccaggagctccagatcgacgacaacgagtacgcctacctcaaggccatcatcttcttcgaccccgacgccaagggcctctccgaccccggcaagatcaagcgcctccgcgcccaggtccaggtctccctcgaggactacatcaacgaccgccagtacgactcccgcggccgcttcggcgagctcctcctcctcctccccaccctccagtccatcacctggcagatgatcgagcagatccagttcatcaagctcttcggcatggccaagatcgacaacctcctccaggagatgctcctcggcggcgccccctccgacgccccccacgcccaccaccccctccacccccacctcatgcaggagcacatgggcaccaacgtcatcgtcgccaacaccatgcccacccacctctccaacggccagatgtgcgagtggccccgcccccgcggccaggccgccgcccccgaggccccccagcccgccccccccggcggctccggctccgagccctacaagctcctccccggcgccgtcgccaccatcgtccgccccctctccgccatcccccagcccaccatcaccaagcaggaggtcatctgaggactagtccctgttcccagagcccacttttttttctttttttgaaataaaatagcctgtctttcagatctcaaaggctcttttcagagccaccaaaaaaaaaaaaaaaaaaaaaaaaaaaaaaaaaaaaaaaaaaaaaaaaaaaaaaaaaaaaaaaaaaaaaaaaaaaaaaaaaaaaaaaaaaaaaaaaaaaaa

SEQ ID NO: 3040 - RNA, 1697 nt, synthetic construct
  misc_feature 1..1697: note = mRNA a-1 (hSL-A100) (opt2) from Homo sapiens__NP_000448.3__HNF4A(1-474)(S142A_S143A_S148A_T166A_ S167A_S313A_S378A_T429A_T432A_S436A_K458R)
  source 1..1697: mol_type = other RNA
aggagagtcccgcagtcggcgtccagcggctctgcttgttcgtgtgtgtgtcgttgcaggccttattcaagcttaccatgcgcctctccaagaccctcgtcgacatggacatggccgactactccgccgccctcgaccccgcctacaccaccctcgagttcgagaacgtccaggtcctcaccatgggcaacgacacctccccctccgagggcaccaacctcaacgcccccaactccctcggcgtctccgccctctgcgccatctgcggcgaccgcgccaccggcaagcactacggcgcctcctcctgcgacggctgcaagggcttcttccgccgctccgtccgcaagaaccacatgtactcctgccgcttctcccgccagtgcgtcgtcgacaaggacaagcgcaaccagtgccgctactgccgcctcaagaagtgcttccgcgccggcatgaagaaggaggccgtccagaacgagcgcgaccgcatctccacccgccgcgccgcctacgaggactccgccctcccctccatcaacgccctcctccaggccgaggtcctctcccgccagatcgccgcccccgtctccggcatcaacggcgacatccgcgccaagaagatcgcctccatcgccgacgtctgcgagtccatgaaggagcagctcctcgtcctcgtcgagtgggccaagtacatccccgccttctgcgagctccccctcgacgaccaggtcgccctcctccgcgcccacgccggcgagcacctcctcctcggcgccaccaagcgctccatggtcttcaaggacgtcctcctcctcggcaacgactacatcgtcccccgccactgccccgagctcgccgagatgtcccgcgtctccatccgcatcctcgacgagctcgtcctccccttccaggagctccagatcgacgacaacgagtacgcctacctcaaggccatcatcttcttcgaccccgacgccaagggcctctccgaccccggcaagatcaagcgcctccgcgcccaggtccaggtctccctcgaggactacatcaacgaccgccagtacgactcccgcggccgcttcggcgagctcctcctcctcctccccaccctccagtccatcacctggcagatgatcgagcagatccagttcatcaagctcttcggcatggccaagatcgacaacctcctccaggagatgctcctcggcggcgccccctccgacgccccccacgcccaccaccccctccacccccacctcatgcaggagcacatgggcaccaacgtcatcgtcgccaacaccatgcccacccacctctccaacggccagatgtgcgagtggccccgcccccgcggccaggccgccgcccccgaggccccccagcccgccccccccggcggctccggctccgagccctacaagctcctccccggcgccgtcgccaccatcgtccgccccctctccgccatcccccagcccaccatcaccaagcaggaggtcatctgaggactagtccctgttcccagagcccacttttttttctttttttgaaataaaatagcctgtctttcagatctcaaaggctcttttcagagccaccaaaaaaaaaaaaaaaaaaaaaaaaaaaaaaaaaaaaaaaaaaaaaaaaaaaaaaaaaaaaaaaaaaaaaaaaaaaaaaaaaaaaaaaaaaaaaaaaaaaaa

SEQ ID NO: 3041 - RNA, 1697 nt, synthetic construct
  misc_feature 1..1697: note = mRNA a-1 (hSL-A100) (opt2) from Homo sapiens__NP_000448.3__HNF4A(1-474)(S87A_S142A_S143A_S148A_T 166A_S167A_S313A_S378A_T429A_T432A_S436A_K458R)
  source 1..1697: mol_type = other RNA
aggagagtcccgcagtcggcgtccagcggctctgcttgttcgtgtgtgtgtcgttgcaggccttattcaagcttaccatgcgcctctccaagaccctcgtcgacatggacatggccgactactccgccgccctcgaccccgcctacaccaccctcgagttcgagaacgtccaggtcctcaccatgggcaacgacacctccccctccgagggcaccaacctcaacgcccccaactccctcggcgtctccgccctctgcgccatctgcggcgaccgcgccaccggcaagcactacggcgcctcctcctgcgacggctgcaagggcttcttccgccgcgccgtccgcaagaaccacatgtactcctgccgcttctcccgccagtgcgtcgtcgacaaggacaagcgcaaccagtgccgctactgccgcctcaagaagtgcttccgcgccggcatgaagaaggaggccgtccagaacgagcgcgaccgcatctccacccgccgcgccgcctacgaggactccgccctcccctccatcaacgccctcctccaggccgaggtcctctcccgccagatcgccgcccccgtctccggcatcaacggcgacatccgcgccaagaagatcgcctccatcgccgacgtctgcgagtccatgaaggagcagctcctcgtcctcgtcgagtgggccaagtacatccccgccttctgcgagctccccctcgacgaccaggtcgccctcctccgcgcccacgccggcgagcacctcctcctcggcgccaccaagcgctccatggtcttcaaggacgtcctcctcctcggcaacgactacatcgtcccccgccactgccccgagctcgccgagatgtcccgcgtctccatccgcatcctcgacgagctcgtcctccccttccaggagctccagatcgacgacaacgagtacgcctacctcaaggccatcatcttcttcgaccccgacgccaagggcctctccgaccccggcaagatcaagcgcctccgcgcccaggtccaggtctccctcgaggactacatcaacgaccgccagtacgactcccgcggccgcttcggcgagctcctcctcctcctccccaccctccagtccatcacctggcagatgatcgagcagatccagttcatcaagctcttcggcatggccaagatcgacaacctcctccaggagatgctcctcggcggcgccccctccgacgccccccacgcccaccaccccctccacccccacctcatgcaggagcacatgggcaccaacgtcatcgtcgccaacaccatgcccacccacctctccaacggccagatgtgcgagtggccccgcccccgcggccaggccgccgcccccgaggccccccagcccgccccccccggcggctccggctccgagccctacaagctcctccccggcgccgtcgccaccatcgtccgccccctctccgccatcccccagcccaccatcaccaagcaggaggtcatctgaggactagtccctgttcccagagcccacttttttttctttttttgaaataaaatagcctgtctttcagatctcaaaggctcttttcagagccaccaaaaaaaaaaaaaaaaaaaaaaaaaaaaaaaaaaaaaaaaaaaaaaaaaaaaaaaaaaaaaaaaaaaaaaaaaaaaaaaaaaaaaaaaaaaaaaaaaaaaa

SEQ ID NO: 3042 - RNA, 1697 nt, synthetic construct
  misc_feature 1..1697: note = mRNA a-1 (hSL-A100) (opt2) from Homo sapiens__NP_000448.3__HNF4A(1-474)(S87A_K106R_K108R_K126R_K 127R_S142A_S143A_S148A_T166A_S167A_S313A_S378A_T429A_T432A_ S436A_K458R)
  source 1..1697: mol_type = other RNA
aggagagtcccgcagtcggcgtccagcggctctgcttgttcgtgtgtgtgtcgttgcaggccttattcaagcttaccatgcgcctctccaagaccctcgtcgacatggacatggccgactactccgccgccctcgaccccgcctacaccaccctcgagttcgagaacgtccaggtcctcaccatgggcaacgacacctccccctccgagggcaccaacctcaacgcccccaactccctcggcgtctccgccctctgcgccatctgcggcgaccgcgccaccggcaagcactacggcgcctcctcctgcgacggctgcaagggcttcttccgccgcgccgtccgcaagaaccacatgtactcctgccgcttctcccgccagtgcgtcgtcgaccgcgaccgccgcaaccagtgccgctactgccgcctcaagaagtgcttccgcgccggcatgcgccgcgaggccgtccagaacgagcgcgaccgcatctccacccgccgcgccgcctacgaggactccgccctcccctccatcaacgccctcctccaggccgaggtcctctcccgccagatcgccgcccccgtctccggcatcaacggcgacatccgcgccaagaagatcgcctccatcgccgacgtctgcgagtccatgaaggagcagctcctcgtcctcgtcgagtgggccaagtacatccccgccttctgcgagctccccctcgacgaccaggtcgccctcctccgcgcccacgccggcgagcacctcctcctcggcgccaccaagcgctccatggtcttcaaggacgtcctcctcctcggcaacgactacatcgtcccccgccactgccccgagctcgccgagatgtcccgcgtctccatccgcatcctcgacgagctcgtcctccccttccaggagctccagatcgacgacaacgagtacgcctacctcaaggccatcatcttcttcgaccccgacgccaagggcctctccgaccccggcaagatcaagcgcctccgcgcccaggtccaggtctccctcgaggactacatcaacgaccgccagtacgactcccgcggccgcttcggcgagctcctcctcctcctccccaccctccagtccatcacctggcagatgatcgagcagatccagttcatcaagctcttcggcatggccaagatcgacaacctcctccaggagatgctcctcggcggcgccccctccgacgccccccacgcccaccaccccctccacccccacctcatgcaggagcacatgggcaccaacgtcatcgtcgccaacaccatgcccacccacctctccaacggccagatgtgcgagtggccccgcccccgcggccaggccgccgcccccgaggccccccagcccgccccccccggcggctccggctccgagccctacaagctcctccccggcgccgtcgccaccatcgtccgccccctctccgccatcccccagcccaccatcaccaagcaggaggtcatctgaggactagtccctgttcccagagcccacttttttttctttttttgaaataaaatagcctgtctttcagatctcaaaggctcttttcagagccaccaaaaaaaaaaaaaaaaaaaaaaaaaaaaaaaaaaaaaaaaaaaaaaaaaaaaaaaaaaaaaaaaaaaaaaaaaaaaaaaaaaaaaaaaaaaaaaaaaaaaa

SEQ ID NO: 3043 - RNA, 1697 nt, synthetic construct
  misc_feature 1..1697: note = mRNA a-1 (hSL-A100) (opt2) from Homo sapiens__NP_000448.3__HNF4A(1-474)(S87A_K106R_K108R_K126R_K 127R)
  source 1..1697: mol_type = other RNA
aggagagtcccgcagtcggcgtccagcggctctgcttgttcgtgtgtgtgtcgttgcaggccttattcaagcttaccatgcgcctctccaagaccctcgtcgacatggacatggccgactactccgccgccctcgaccccgcctacaccaccctcgagttcgagaacgtccaggtcctcaccatgggcaacgacacctccccctccgagggcaccaacctcaacgcccccaactccctcggcgtctccgccctctgcgccatctgcggcgaccgcgccaccggcaagcactacggcgcctcctcctgcgacggctgcaagggcttcttccgccgcgccgtccgcaagaaccacatgtactcctgccgcttctcccgccagtgcgtcgtcgaccgcgaccgccgcaaccagtgccgctactgccgcctcaagaagtgcttccgcgccggcatgcgccgcgaggccgtccagaacgagcgcgaccgcatctccacccgccgctcctcctacgaggactcctccctcccctccatcaacgccctcctccaggccgaggtcctctcccgccagatcacctcccccgtctccggcatcaacggcgacatccgcgccaagaagatcgcctccatcgccgacgtctgcgagtccatgaaggagcagctcctcgtcctcgtcgagtgggccaagtacatccccgccttctgcgagctccccctcgacgaccaggtcgccctcctccgcgcccacgccggcgagcacctcctcctcggcgccaccaagcgctccatggtcttcaaggacgtcctcctcctcggcaacgactacatcgtcccccgccactgccccgagctcgccgagatgtcccgcgtctccatccgcatcctcgacgagctcgtcctccccttccaggagctccagatcgacgacaacgagtacgcctacctcaaggccatcatcttcttcgaccccgacgccaagggcctctccgaccccggcaagatcaagcgcctccgctcccaggtccaggtctccctcgaggactacatcaacgaccgccagtacgactcccgcggccgcttcggcgagctcctcctcctcctccccaccctccagtccatcacctggcagatgatcgagcagatccagttcatcaagctcttcggcatggccaagatcgacaacctcctccaggagatgctcctcggcggctccccctccgacgccccccacgcccaccaccccctccacccccacctcatgcaggagcacatgggcaccaacgtcatcgtcgccaacaccatgcccacccacctctccaacggccagatgtgcgagtggccccgcccccgcggccaggccgccacccccgagaccccccagccctccccccccggcggctccggctccgagccctacaagctcctccccggcgccgtcgccaccatcgtcaagcccctctccgccatcccccagcccaccatcaccaagcaggaggtcatctgaggactagtccctgttcccagagcccacttttttttctttttttgaaataaaatagcctgtctttcagatctcaaaggctcttttcagagccaccaaaaaaaaaaaaaaaaaaaaaaaaaaaaaaaaaaaaaaaaaaaaaaaaaaaaaaaaaaaaaaaaaaaaaaaaaaaaaaaaaaaaaaaaaaaaaaaaaaaaa

SEQ ID NO: 3044 - RNA, 1697 nt, synthetic construct
  misc_feature 1..1697: note = mRNA a-1 (hSL-A100) (opt2) from Homo sapiens__NP_000448.3__HNF4A(1-474)(S87A_K106R_K108R_K126R_K 127R_S142A_S143A_S148A_T166A_S167A_S313A_S378A_T429A_T432A_ S436A_K458R_S461A)
  source 1..1697: mol_type = other RNA
aggagagtcccgcagtcggcgtccagcggctctgcttgttcgtgtgtgtgtcgttgcaggccttattcaagcttaccatgcgcctctccaagaccctcgtcgacatggacatggccgactactccgccgccctcgaccccgcctacaccaccctcgagttcgagaacgtccaggtcctcaccatgggcaacgacacctccccctccgagggcaccaacctcaacgcccccaactccctcggcgtctccgccctctgcgccatctgcggcgaccgcgccaccggcaagcactacggcgcctcctcctgcgacggctgcaagggcttcttccgccgcgccgtccgcaagaaccacatgtactcctgccgcttctcccgccagtgcgtcgtcgaccgcgaccgccgcaaccagtgccgctactgccgcctcaagaagtgcttccgcgccggcatgcgccgcgaggccgtccagaacgagcgcgaccgcatctccacccgccgcgccgcctacgaggactccgccctcccctccatcaacgccctcctccaggccgaggtcctctcccgccagatcgccgcccccgtctccggcatcaacggcgacatccgcgccaagaagatcgcctccatcgccgacgtctgcgagtccatgaaggagcagctcctcgtcctcgtcgagtgggccaagtacatccccgccttctgcgagctccccctcgacgaccaggtcgccctcctccgcgcccacgccggcgagcacctcctcctcggcgccaccaagcgctccatggtcttcaaggacgtcctcctcctcggcaacgactacatcgtcccccgccactgccccgagctcgccgagatgtcccgcgtctccatccgcatcctcgacgagctcgtcctccccttccaggagctccagatcgacgacaacgagtacgcctacctcaaggccatcatcttcttcgaccccgacgccaagggcctctccgaccccggcaagatcaagcgcctccgcgcccaggtccaggtctccctcgaggactacatcaacgaccgccagtacgactcccgcggccgcttcggcgagctcctcctcctcctccccaccctccagtccatcacctggcagatgatcgagcagatccagttcatcaagctcttcggcatggccaagatcgacaacctcctccaggagatgctcctcggcggcgccccctccgacgccccccacgcccaccaccccctccacccccacctcatgcaggagcacatgggcaccaacgtcatcgtcgccaacaccatgcccacccacctctccaacggccagatgtgcgagtggccccgcccccgcggccaggccgccgcccccgaggccccccagcccgccccccccggcggctccggctccgagccctacaagctcctccccggcgccgtcgccaccatcgtccgccccctcgccgccatcccccagcccaccatcaccaagcaggaggtcatctgaggactagtccctgttcccagagcccacttttttttctttttttgaaataaaatagcctgtctttcagatctcaaaggctcttttcagagccaccaaaaaaaaaaaaaaaaaaaaaaaaaaaaaaaaaaaaaaaaaaaaaaaaaaaaaaaaaaaaaaaaaaaaaaaaaaaaaaaaaaaaaaaaaaaaaaaaaaaaa

SEQ ID NO: 3045 - RNA, 1697 nt, synthetic construct
  misc_feature 1..1697: note = mRNA a-1 (hSL-A100) (opt2) from Homo sapiens__NP_000448.3__HNF4A(1-474)(S87A_K106R_K108R_K126R_K 127R_S142A_S143A_S148A_T166A_S167A_S313A_S378A_T429A_T432A_ S436A_K458R_S461E)
  source 1..1697: mol_type = other RNA
aggagagtcccgcagtcggcgtccagcggctctgcttgttcgtgtgtgtgtcgttgcaggccttattcaagcttaccatgcgcctctccaagaccctcgtcgacatggacatggccgactactccgccgccctcgaccccgcctacaccaccctcgagttcgagaacgtccaggtcctcaccatgggcaacgacacctccccctccgagggcaccaacctcaacgcccccaactccctcggcgtctccgccctctgcgccatctgcggcgaccgcgccaccggcaagcactacggcgcctcctcctgcgacggctgcaagggcttcttccgccgcgccgtccgcaagaaccacatgtactcctgccgcttctcccgccagtgcgtcgtcgaccgcgaccgccgcaaccagtgccgctactgccgcctcaagaagtgcttccgcgccggcatgcgccgcgaggccgtccagaacgagcgcgaccgcatctccacccgccgcgccgcctacgaggactccgccctcccctccatcaacgccctcctccaggccgaggtcctctcccgccagatcgccgcccccgtctccggcatcaacggcgacatccgcgccaagaagatcgcctccatcgccgacgtctgcgagtccatgaaggagcagctcctcgtcctcgtcgagtgggccaagtacatccccgccttctgcgagctccccctcgacgaccaggtcgccctcctccgcgcccacgccggcgagcacctcctcctcggcgccaccaagcgctccatggtcttcaaggacgtcctcctcctcggcaacgactacatcgtcccccgccactgccccgagctcgccgagatgtcccgcgtctccatccgcatcctcgacgagctcgtcctccccttccaggagctccagatcgacgacaacgagtacgcctacctcaaggccatcatcttcttcgaccccgacgccaagggcctctccgaccccggcaagatcaagcgcctccgcgcccaggtccaggtctccctcgaggactacatcaacgaccgccagtacgactcccgcggccgcttcggcgagctcctcctcctcctccccaccctccagtccatcacctggcagatgatcgagcagatccagttcatcaagctcttcggcatggccaagatcgacaacctcctccaggagatgctcctcggcggcgccccctccgacgccccccacgcccaccaccccctccacccccacctcatgcaggagcacatgggcaccaacgtcatcgtcgccaacaccatgcccacccacctctccaacggccagatgtgcgagtggccccgcccccgcggccaggccgccgcccccgaggccccccagcccgccccccccggcggctccggctccgagccctacaagctcctccccggcgccgtcgccaccatcgtccgccccctcgaggccatcccccagcccaccatcaccaagcaggaggtcatctgaggactagtccctgttcccagagcccacttttttttctttttttgaaataaaatagcctgtctttcagatctcaaaggctcttttcagagccaccaaaaaaaaaaaaaaaaaaaaaaaaaaaaaaaaaaaaaaaaaaaaaaaaaaaaaaaaaaaaaaaaaaaaaaaaaaaaaaaaaaaaaaaaaaaaaaaaaaaaa

SEQ ID NO: 3046 - RNA, 1697 nt, synthetic construct
  misc_feature 1..1697: note = mRNA a-1 (hSL-A100) (opt2) from Homo sapiens__NP_000448.3__HNF4A(1-474)(S87A_K106R_K108R_K126R_K 127R_S142A_S143A_S148E_T166A_S167E_S313A_S378E_T429E_T432E_ S436E_K458R_S461E)
  source 1..1697: mol_type = other RNA
aggagagtcccgcagtcggcgtccagcggctctgcttgttcgtgtgtgtgtcgttgcaggccttattcaagcttaccatgcgcctctccaagaccctcgtcgacatggacatggccgactactccgccgccctcgaccccgcctacaccaccctcgagttcgagaacgtccaggtcctcaccatgggcaacgacacctccccctccgagggcaccaacctcaacgcccccaactccctcggcgtctccgccctctgcgccatctgcggcgaccgcgccaccggcaagcactacggcgcctcctcctgcgacggctgcaagggcttcttccgccgcgccgtccgcaagaaccacatgtactcctgccgcttctcccgccagtgcgtcgtcgaccgcgaccgccgcaaccagtgccgctactgccgcctcaagaagtgcttccgcgccggcatgcgccgcgaggccgtccagaacgagcgcgaccgcatctccacccgccgcgccgcctacgaggactccgagctcccctccatcaacgccctcctccaggccgaggtcctctcccgccagatcgccgagcccgtctccggcatcaacggcgacatccgcgccaagaagatcgcctccatcgccgacgtctgcgagtccatgaaggagcagctcctcgtcctcgtcgagtgggccaagtacatccccgccttctgcgagctccccctcgacgaccaggtcgccctcctccgcgcccacgccggcgagcacctcctcctcggcgccaccaagcgctccatggtcttcaaggacgtcctcctcctcggcaacgactacatcgtcccccgccactgccccgagctcgccgagatgtcccgcgtctccatccgcatcctcgacgagctcgtcctccccttccaggagctccagatcgacgacaacgagtacgcctacctcaaggccatcatcttcttcgaccccgacgccaagggcctctccgaccccggcaagatcaagcgcctccgcgcccaggtccaggtctccctcgaggactacatcaacgaccgccagtacgactcccgcggccgcttcggcgagctcctcctcctcctccccaccctccagtccatcacctggcagatgatcgagcagatccagttcatcaagctcttcggcatggccaagatcgacaacctcctccaggagatgctcctcggcggcgagccctccgacgccccccacgcccaccaccccctccacccccacctcatgcaggagcacatgggcaccaacgtcatcgtcgccaacaccatgcccacccacctctccaacggccagatgtgcgagtggccccgcccccgcggccaggccgccgagcccgaggagccccagcccgagccccccggcggctccggctccgagccctacaagctcctccccggcgccgtcgccaccatcgtccgccccctcgaggccatcccccagcccaccatcaccaagcaggaggtcatctgaggactagtccctgttcccagagcccacttttttttctttttttgaaataaaatagcctgtctttcagatctcaaaggctcttttcagagccaccaaaaaaaaaaaaaaaaaaaaaaaaaaaaaaaaaaaaaaaaaaaaaaaaaaaaaaaaaaaaaaaaaaaaaaaaaaaaaaaaaaaaaaaaaaaaaaaaaaaaa

SEQ ID NO: 3047 - RNA, 1697 nt, synthetic construct
  misc_feature 1..1697: note = mRNA a-1 (hSL-A100) (opt2) from Homo sapiens__NP_000448.3__HNF4A(1-474)(S87A_K106R_K108R_K126R_K 127R_S142A_S143A_S148A_T166A_S167A_K179R_K180R_S313A_S378A_ T429A_T432A_S436A_K458R_S461E)
  source 1..1697: mol_type = other RNA
aggagagtcccgcagtcggcgtccagcggctctgcttgttcgtgtgtgtgtcgttgcaggccttattcaagcttaccatgcgcctctccaagaccctcgtcgacatggacatggccgactactccgccgccctcgaccccgcctacaccaccctcgagttcgagaacgtccaggtcctcaccatgggcaacgacacctccccctccgagggcaccaacctcaacgcccccaactccctcggcgtctccgccctctgcgccatctgcggcgaccgcgccaccggcaagcactacggcgcctcctcctgcgacggctgcaagggcttcttccgccgcgccgtccgcaagaaccacatgtactcctgccgcttctcccgccagtgcgtcgtcgaccgcgaccgccgcaaccagtgccgctactgccgcctcaagaagtgcttccgcgccggcatgcgccgcgaggccgtccagaacgagcgcgaccgcatctccacccgccgcgccgcctacgaggactccgccctcccctccatcaacgccctcctccaggccgaggtcctctcccgccagatcgccgcccccgtctccggcatcaacggcgacatccgcgcccgccgcatcgcctccatcgccgacgtctgcgagtccatgaaggagcagctcctcgtcctcgtcgagtgggccaagtacatccccgccttctgcgagctccccctcgacgaccaggtcgccctcctccgcgcccacgccggcgagcacctcctcctcggcgccaccaagcgctccatggtcttcaaggacgtcctcctcctcggcaacgactacatcgtcccccgccactgccccgagctcgccgagatgtcccgcgtctccatccgcatcctcgacgagctcgtcctccccttccaggagctccagatcgacgacaacgagtacgcctacctcaaggccatcatcttcttcgaccccgacgccaagggcctctccgaccccggcaagatcaagcgcctccgcgcccaggtccaggtctccctcgaggactacatcaacgaccgccagtacgactcccgcggccgcttcggcgagctcctcctcctcctccccaccctccagtccatcacctggcagatgatcgagcagatccagttcatcaagctcttcggcatggccaagatcgacaacctcctccaggagatgctcctcggcggcgccccctccgacgccccccacgcccaccaccccctccacccccacctcatgcaggagcacatgggcaccaacgtcatcgtcgccaacaccatgcccacccacctctccaacggccagatgtgcgagtggccccgcccccgcggccaggccgccgcccccgaggccccccagcccgccccccccggcggctccggctccgagccctacaagctcctccccggcgccgtcgccaccatcgtccgccccctcgaggccatcccccagcccaccatcaccaagcaggaggtcatctgaggactagtccctgttcccagagcccacttttttttctttttttgaaataaaatagcctgtctttcagatctcaaaggctcttttcagagccaccaaaaaaaaaaaaaaaaaaaaaaaaaaaaaaaaaaaaaaaaaaaaaaaaaaaaaaaaaaaaaaaaaaaaaaaaaaaaaaaaaaaaaaaaaaaaaaaaaaaaa

SEQ ID NO: 3048 - RNA, 1697 nt, synthetic construct
  misc_feature 1..1697: note = mRNA a-1 (hSL-A100) (opt2) from Homo sapiens__NP_000448.3__HNF4A(1-474)(S87A_K106R_K108R_K126R_K 127R_S142A_S143A_S148A_T166A_S167A_K300R_K307R_K309R_S313A_ S378A_T429A_T432A_S436A_K458R_S461E)
  source 1..1697: mol_type = other RNA
aggagagtcccgcagtcggcgtccagcggctctgcttgttcgtgtgtgtgtcgttgcaggccttattcaagcttaccatgcgcctctccaagaccctcgtcgacatggacatggccgactactccgccgccctcgaccccgcctacaccaccctcgagttcgagaacgtccaggtcctcaccatgggcaacgacacctccccctccgagggcaccaacctcaacgcccccaactccctcggcgtctccgccctctgcgccatctgcggcgaccgcgccaccggcaagcactacggcgcctcctcctgcgacggctgcaagggcttcttccgccgcgccgtccgcaagaaccacatgtactcctgccgcttctcccgccagtgcgtcgtcgaccgcgaccgccgcaaccagtgccgctactgccgcctcaagaagtgcttccgcgccggcatgcgccgcgaggccgtccagaacgagcgcgaccgcatctccacccgccgcgccgcctacgaggactccgccctcccctccatcaacgccctcctccaggccgaggtcctctcccgccagatcgccgcccccgtctccggcatcaacggcgacatccgcgccaagaagatcgcctccatcgccgacgtctgcgagtccatgaaggagcagctcctcgtcctcgtcgagtgggccaagtacatccccgccttctgcgagctccccctcgacgaccaggtcgccctcctccgcgcccacgccggcgagcacctcctcctcggcgccaccaagcgctccatggtcttcaaggacgtcctcctcctcggcaacgactacatcgtcccccgccactgccccgagctcgccgagatgtcccgcgtctccatccgcatcctcgacgagctcgtcctccccttccaggagctccagatcgacgacaacgagtacgcctacctcaaggccatcatcttcttcgaccccgacgcccgcggcctctccgaccccggccgcatccgccgcctccgcgcccaggtccaggtctccctcgaggactacatcaacgaccgccagtacgactcccgcggccgcttcggcgagctcctcctcctcctccccaccctccagtccatcacctggcagatgatcgagcagatccagttcatcaagctcttcggcatggccaagatcgacaacctcctccaggagatgctcctcggcggcgccccctccgacgccccccacgcccaccaccccctccacccccacctcatgcaggagcacatgggcaccaacgtcatcgtcgccaacaccatgcccacccacctctccaacggccagatgtgcgagtggccccgcccccgcggccaggccgccgcccccgaggccccccagcccgccccccccggcggctccggctccgagccctacaagctcctccccggcgccgtcgccaccatcgtccgccccctcgaggccatcccccagcccaccatcaccaagcaggaggtcatctgaggactagtccctgttcccagagcccacttttttttctttttttgaaataaaatagcctgtctttcagatctcaaaggctcttttcagagccaccaaaaaaaaaaaaaaaaaaaaaaaaaaaaaaaaaaaaaaaaaaaaaaaaaaaaaaaaaaaaaaaaaaaaaaaaaaaaaaaaaaaaaaaaaaaaaaaaaaaaa

SEQ ID NO: 3049 - RNA, 1697 nt, synthetic construct
  misc_feature 1..1697: note = mRNA a-1 (hSL-A100) (opt2) from Homo sapiens__NP_000448.3__HNF4A(1-474)(S87A_K106R_K108R_K126R_K 127R_S142A_S143A_S148A_T166A_S167A_S313A_S378A_T429A_T432A_ S436A_K447R_K458R_S461E_K470R)
  source 1..1697: mol_type = other RNA
aggagagtcccgcagtcggcgtccagcggctctgcttgttcgtgtgtgtgtcgttgcaggccttattcaagcttaccatgcgcctctccaagaccctcgtcgacatggacatggccgactactccgccgccctcgaccccgcctacaccaccctcgagttcgagaacgtccaggtcctcaccatgggcaacgacacctccccctccgagggcaccaacctcaacgcccccaactccctcggcgtctccgccctctgcgccatctgcggcgaccgcgccaccggcaagcactacggcgcctcctcctgcgacggctgcaagggcttcttccgccgcgccgtccgcaagaaccacatgtactcctgccgcttctcccgccagtgcgtcgtcgaccgcgaccgccgcaaccagtgccgctactgccgcctcaagaagtgcttccgcgccggcatgcgccgcgaggccgtccagaacgagcgcgaccgcatctccacccgccgcgccgcctacgaggactccgccctcccctccatcaacgccctcctccaggccgaggtcctctcccgccagatcgccgcccccgtctccggcatcaacggcgacatccgcgccaagaagatcgcctccatcgccgacgtctgcgagtccatgaaggagcagctcctcgtcctcgtcgagtgggccaagtacatccccgccttctgcgagctccccctcgacgaccaggtcgccctcctccgcgcccacgccggcgagcacctcctcctcggcgccaccaagcgctccatggtcttcaaggacgtcctcctcctcggcaacgactacatcgtcccccgccactgccccgagctcgccgagatgtcccgcgtctccatccgcatcctcgacgagctcgtcctccccttccaggagctccagatcgacgacaacgagtacgcctacctcaaggccatcatcttcttcgaccccgacgccaagggcctctccgaccccggcaagatcaagcgcctccgcgcccaggtccaggtctccctcgaggactacatcaacgaccgccagtacgactcccgcggccgcttcggcgagctcctcctcctcctccccaccctccagtccatcacctggcagatgatcgagcagatccagttcatcaagctcttcggcatggccaagatcgacaacctcctccaggagatgctcctcggcggcgccccctccgacgccccccacgcccaccaccccctccacccccacctcatgcaggagcacatgggcaccaacgtcatcgtcgccaacaccatgcccacccacctctccaacggccagatgtgcgagtggccccgcccccgcggccaggccgccgcccccgaggccccccagcccgccccccccggcggctccggctccgagccctaccgcctcctccccggcgccgtcgccaccatcgtccgccccctcgaggccatcccccagcccaccatcacccgccaggaggtcatctgaggactagtccctgttcccagagcccacttttttttctttttttgaaataaaatagcctgtctttcagatctcaaaggctcttttcagagccaccaaaaaaaaaaaaaaaaaaaaaaaaaaaaaaaaaaaaaaaaaaaaaaaaaaaaaaaaaaaaaaaaaaaaaaaaaaaaaaaaaaaaaaaaaaaaaaaaaaaaa

SEQ ID NO: 3050 - RNA, 1697 nt, synthetic construct
  misc_feature 1..1697: note = mRNA a-1 (hSL-A100) (opt2) from Homo sapiens__NP_000448.3__HNF4A(1-474)(S87A_K106R_K108R_K126R_K 127R_S142A_S143A_S148A_T166A_S167A_K179R_K180R_K234R_K300R_ K307R_K309R_S313A_S378A_T429A_T432A_S436A_K447R_K458R_S461E _K470R)
  source 1..1697: mol_type = other RNA
aggagagtcccgcagtcggcgtccagcggctctgcttgttcgtgtgtgtgtcgttgcaggccttattcaagcttaccatgcgcctctccaagaccctcgtcgacatggacatggccgactactccgccgccctcgaccccgcctacaccaccctcgagttcgagaacgtccaggtcctcaccatgggcaacgacacctccccctccgagggcaccaacctcaacgcccccaactccctcggcgtctccgccctctgcgccatctgcggcgaccgcgccaccggcaagcactacggcgcctcctcctgcgacggctgcaagggcttcttccgccgcgccgtccgcaagaaccacatgtactcctgccgcttctcccgccagtgcgtcgtcgaccgcgaccgccgcaaccagtgccgctactgccgcctcaagaagtgcttccgcgccggcatgcgccgcgaggccgtccagaacgagcgcgaccgcatctccacccgccgcgccgcctacgaggactccgccctcccctccatcaacgccctcctccaggccgaggtcctctcccgccagatcgccgcccccgtctccggcatcaacggcgacatccgcgcccgccgcatcgcctccatcgccgacgtctgcgagtccatgaaggagcagctcctcgtcctcgtcgagtgggccaagtacatccccgccttctgcgagctccccctcgacgaccaggtcgccctcctccgcgcccacgccggcgagcacctcctcctcggcgccacccgccgctccatggtcttcaaggacgtcctcctcctcggcaacgactacatcgtcccccgccactgccccgagctcgccgagatgtcccgcgtctccatccgcatcctcgacgagctcgtcctccccttccaggagctccagatcgacgacaacgagtacgcctacctcaaggccatcatcttcttcgaccccgacgcccgcggcctctccgaccccggccgcatccgccgcctccgcgcccaggtccaggtctccctcgaggactacatcaacgaccgccagtacgactcccgcggccgcttcggcgagctcctcctcctcctccccaccctccagtccatcacctggcagatgatcgagcagatccagttcatcaagctcttcggcatggccaagatcgacaacctcctccaggagatgctcctcggcggcgccccctccgacgccccccacgcccaccaccccctccacccccacctcatgcaggagcacatgggcaccaacgtcatcgtcgccaacaccatgcccacccacctctccaacggccagatgtgcgagtggccccgcccccgcggccaggccgccgcccccgaggccccccagcccgccccccccggcggctccggctccgagccctaccgcctcctccccggcgccgtcgccaccatcgtccgccccctcgaggccatcccccagcccaccatcacccgccaggaggtcatctgaggactagtccctgttcccagagcccacttttttttctttttttgaaataaaatagcctgtctttcagatctcaaaggctcttttcagagccaccaaaaaaaaaaaaaaaaaaaaaaaaaaaaaaaaaaaaaaaaaaaaaaaaaaaaaaaaaaaaaaaaaaaaaaaaaaaaaaaaaaaaaaaaaaaaaaaaaaaaa

SEQ ID NO: 3051 - RNA, 1697 nt, synthetic construct
  misc_feature 1..1697: note = mRNA a-1 (hSL-A100) (opt2) from Homo sapiens__NP_000448.3__HNF4A(1-474)(S87A_S95A_S99A_K106R_K10 8R_K126R_K127R_S142A_S143A_S148A_T166A_S167A_S313A_S378A_T4 29A_T432A_S436A_K458R_S461E)
  source 1..1697: mol_type = other RNA
aggagagtcccgcagtcggcgtccagcggctctgcttgttcgtgtgtgtgtcgttgcaggccttattcaagcttaccatgcgcctctccaagaccctcgtcgacatggacatggccgactactccgccgccctcgaccccgcctacaccaccctcgagttcgagaacgtccaggtcctcaccatgggcaacgacacctccccctccgagggcaccaacctcaacgcccccaactccctcggcgtctccgccctctgcgccatctgcggcgaccgcgccaccggcaagcactacggcgcctcctcctgcgacggctgcaagggcttcttccgccgcgccgtccgcaagaaccacatgtacgcctgccgcttcgcccgccagtgcgtcgtcgaccgcgaccgccgcaaccagtgccgctactgccgcctcaagaagtgcttccgcgccggcatgcgccgcgaggccgtccagaacgagcgcgaccgcatctccacccgccgcgccgcctacgaggactccgccctcccctccatcaacgccctcctccaggccgaggtcctctcccgccagatcgccgcccccgtctccggcatcaacggcgacatccgcgccaagaagatcgcctccatcgccgacgtctgcgagtccatgaaggagcagctcctcgtcctcgtcgagtgggccaagtacatccccgccttctgcgagctccccctcgacgaccaggtcgccctcctccgcgcccacgccggcgagcacctcctcctcggcgccaccaagcgctccatggtcttcaaggacgtcctcctcctcggcaacgactacatcgtcccccgccactgccccgagctcgccgagatgtcccgcgtctccatccgcatcctcgacgagctcgtcctccccttccaggagctccagatcgacgacaacgagtacgcctacctcaaggccatcatcttcttcgaccccgacgccaagggcctctccgaccccggcaagatcaagcgcctccgcgcccaggtccaggtctccctcgaggactacatcaacgaccgccagtacgactcccgcggccgcttcggcgagctcctcctcctcctccccaccctccagtccatcacctggcagatgatcgagcagatccagttcatcaagctcttcggcatggccaagatcgacaacctcctccaggagatgctcctcggcggcgccccctccgacgccccccacgcccaccaccccctccacccccacctcatgcaggagcacatgggcaccaacgtcatcgtcgccaacaccatgcccacccacctctccaacggccagatgtgcgagtggccccgcccccgcggccaggccgccgcccccgaggccccccagcccgccccccccggcggctccggctccgagccctacaagctcctccccggcgccgtcgccaccatcgtccgccccctcgaggccatcccccagcccaccatcaccaagcaggaggtcatctgaggactagtccctgttcccagagcccacttttttttctttttttgaaataaaatagcctgtctttcagatctcaaaggctcttttcagagccaccaaaaaaaaaaaaaaaaaaaaaaaaaaaaaaaaaaaaaaaaaaaaaaaaaaaaaaaaaaaaaaaaaaaaaaaaaaaaaaaaaaaaaaaaaaaaaaaaaaaaa

SEQ ID NO: 3052 - RNA, 1697 nt, synthetic construct
  misc_feature 1..1697: note = mRNA a-1 (hSL-A100) (opt2) from Homo sapiens__NP_000448.3__HNF4A(1-474)(S87A_K106R_K108R_K126R_K 127R_S138A_T139A_S142A_S143A_S148A_T166A_S167A_S313A_S378A_ T429A_T432A_S436A_K458R_S461E)
  source 1..1697: mol_type = other RNA
aggagagtcccgcagtcggcgtccagcggctctgcttgttcgtgtgtgtgtcgttgcaggccttattcaagcttaccatgcgcctctccaagaccctcgtcgacatggacatggccgactactccgccgccctcgaccccgcctacaccaccctcgagttcgagaacgtccaggtcctcaccatgggcaacgacacctccccctccgagggcaccaacctcaacgcccccaactccctcggcgtctccgccctctgcgccatctgcggcgaccgcgccaccggcaagcactacggcgcctcctcctgcgacggctgcaagggcttcttccgccgcgccgtccgcaagaaccacatgtactcctgccgcttctcccgccagtgcgtcgtcgaccgcgaccgccgcaaccagtgccgctactgccgcctcaagaagtgcttccgcgccggcatgcgccgcgaggccgtccagaacgagcgcgaccgcatcgccgcccgccgcgccgcctacgaggactccgccctcccctccatcaacgccctcctccaggccgaggtcctctcccgccagatcgccgcccccgtctccggcatcaacggcgacatccgcgccaagaagatcgcctccatcgccgacgtctgcgagtccatgaaggagcagctcctcgtcctcgtcgagtgggccaagtacatccccgccttctgcgagctccccctcgacgaccaggtcgccctcctccgcgcccacgccggcgagcacctcctcctcggcgccaccaagcgctccatggtcttcaaggacgtcctcctcctcggcaacgactacatcgtcccccgccactgccccgagctcgccgagatgtcccgcgtctccatccgcatcctcgacgagctcgtcctccccttccaggagctccagatcgacgacaacgagtacgcctacctcaaggccatcatcttcttcgaccccgacgccaagggcctctccgaccccggcaagatcaagcgcctccgcgcccaggtccaggtctccctcgaggactacatcaacgaccgccagtacgactcccgcggccgcttcggcgagctcctcctcctcctccccaccctccagtccatcacctggcagatgatcgagcagatccagttcatcaagctcttcggcatggccaagatcgacaacctcctccaggagatgctcctcggcggcgccccctccgacgccccccacgcccaccaccccctccacccccacctcatgcaggagcacatgggcaccaacgtcatcgtcgccaacaccatgcccacccacctctccaacggccagatgtgcgagtggccccgcccccgcggccaggccgccgcccccgaggccccccagcccgccccccccggcggctccggctccgagccctacaagctcctccccggcgccgtcgccaccatcgtccgccccctcgaggccatcccccagcccaccatcaccaagcaggaggtcatctgaggactagtccctgttcccagagcccacttttttttctttttttgaaataaaatagcctgtctttcagatctcaaaggctcttttcagagccaccaaaaaaaaaaaaaaaaaaaaaaaaaaaaaaaaaaaaaaaaaaaaaaaaaaaaaaaaaaaaaaaaaaaaaaaaaaaaaaaaaaaaaaaaaaaaaaaaaaaaa

SEQ ID NO: 3053 - RNA, 1697 nt, synthetic construct
  misc_feature 1..1697: note = mRNA a-1 (hSL-A100) (opt2) from Homo sapiens__NP_000448.3__HNF4A(1-474)(S87A_S95A_S99A_K106R_K10 8R_K126R_K127R_S138A_T139A_S142A_S143A_S148A_T166A_S167A_S3 13A_S378A_T429A_T432A_S436A_K458R_S461E)
  source 1..1697: mol_type = other RNA
aggagagtcccgcagtcggcgtccagcggctctgcttgttcgtgtgtgtgtcgttgcaggccttattcaagcttaccatgcgcctctccaagaccctcgtcgacatggacatggccgactactccgccgccctcgaccccgcctacaccaccctcgagttcgagaacgtccaggtcctcaccatgggcaacgacacctccccctccgagggcaccaacctcaacgcccccaactccctcggcgtctccgccctctgcgccatctgcggcgaccgcgccaccggcaagcactacggcgcctcctcctgcgacggctgcaagggcttcttccgccgcgccgtccgcaagaaccacatgtacgcctgccgcttcgcccgccagtgcgtcgtcgaccgcgaccgccgcaaccagtgccgctactgccgcctcaagaagtgcttccgcgccggcatgcgccgcgaggccgtccagaacgagcgcgaccgcatcgccgcccgccgcgccgcctacgaggactccgccctcccctccatcaacgccctcctccaggccgaggtcctctcccgccagatcgccgcccccgtctccggcatcaacggcgacatccgcgccaagaagatcgcctccatcgccgacgtctgcgagtccatgaaggagcagctcctcgtcctcgtcgagtgggccaagtacatccccgccttctgcgagctccccctcgacgaccaggtcgccctcctccgcgcccacgccggcgagcacctcctcctcggcgccaccaagcgctccatggtcttcaaggacgtcctcctcctcggcaacgactacatcgtcccccgccactgccccgagctcgccgagatgtcccgcgtctccatccgcatcctcgacgagctcgtcctccccttccaggagctccagatcgacgacaacgagtacgcctacctcaaggccatcatcttcttcgaccccgacgccaagggcctctccgaccccggcaagatcaagcgcctccgcgcccaggtccaggtctccctcgaggactacatcaacgaccgccagtacgactcccgcggccgcttcggcgagctcctcctcctcctccccaccctccagtccatcacctggcagatgatcgagcagatccagttcatcaagctcttcggcatggccaagatcgacaacctcctccaggagatgctcctcggcggcgccccctccgacgccccccacgcccaccaccccctccacccccacctcatgcaggagcacatgggcaccaacgtcatcgtcgccaacaccatgcccacccacctctccaacggccagatgtgcgagtggccccgcccccgcggccaggccgccgcccccgaggccccccagcccgccccccccggcggctccggctccgagccctacaagctcctccccggcgccgtcgccaccatcgtccgccccctcgaggccatcccccagcccaccatcaccaagcaggaggtcatctgaggactagtccctgttcccagagcccacttttttttctttttttgaaataaaatagcctgtctttcagatctcaaaggctcttttcagagccaccaaaaaaaaaaaaaaaaaaaaaaaaaaaaaaaaaaaaaaaaaaaaaaaaaaaaaaaaaaaaaaaaaaaaaaaaaaaaaaaaaaaaaaaaaaaaaaaaaaaaa

SEQ ID NO: 3054 - RNA, 1697 nt, synthetic construct
  misc_feature 1..1697: note = mRNA a-1 (hSL-A100) (opt3) from Homo sapiens__NP_000448.3__HNF4A(1-474)
  source 1..1697: mol_type = other RNA
aggagagtcccgcagtcggcgtccagcggctctgcttgttcgtgtgtgtgtcgttgcaggccttattcaagcttaccatgagactgagcaagaccctcgtggacatggatatggccgactactccgctgcacttgatcccgcctatacaactctggagttcgaaaacgtccaggttttgacgatgggcaatgacacctctccttcagaggggacaaacttaaatgcgccaaacagtctgggagtgagcgctctatgcgccatctgtggtgatagggcaactggcaaacactacggggcctcctcttgcgacggatgtaagggctttttccggcgctcggtacgtaaaaatcatatgtattcatgccgatttagcagacaatgtgtggtcgataaggacaaaaggaaccagtgccggtactgtcgcctcaagaagtgcttcagagctggtatgaaaaaggaagcagtgcagaatgagagggatcggattagtacccgccgatcctcttatgaagacagctccctgccgtcaataaacgcccttctgcaggctgaggttttgagtagacaaatcacaagccccgtgtctgggattaatggagatatcagggccaaaaagattgcgtccatcgcagacgtctgtgagtcaatgaaagaacagctcctggtgctggtagagtgggccaagtacatacctgctttttgcgaactcccattagatgaccaggttgccctgcttcgggcacacgctggcgagcatttgctgctaggcgccaccaagcgtagcatggtgttcaaagacgtcctcctgcttgggaacgattatatcgtgccccgccactgtcctgagctggcggaaatgagtagagtgtctattaggatcttggacgagctcgtcctgccatttcaggaattacaaattgatgacaatgagtacgcctacctgaaggcaatcatattctttgatcccgacgctaaaggactctccgatcctggtaagattaaacggcttcgaagccaggttcaggtgtcgctggaagactatatcaacgatcgccagtacgactctagaggcaggttcggggagttgctactgctcctgccaactcttcaatccattacatggcagatgatcgagcagatccaatttattaagctgttcggaatggccaaaatagataatttgctccaggaaatgctgttaggcggttcaccgagtgacgctccccatgcccaccaccctctgcatccacacctaatgcaggagcatatggggaccaacgtaatcgtggcaaatacgatgcccactcacctcagcaacggacagatgtgcgaatggcctcggccacgcggccaagccgctacccccgagacaccgcagccttctcccccaggcgggtccggaagcgaaccttataagctgcttcccggtgcggtcgcaactattgtgaagccattgtcagccatcccccagcctaccataacaaaacaggaggttatttgaggactagtccctgttcccagagcccacttttttttctttttttgaaataaaatagcctgtctttcagatctcaaaggctcttttcagagccaccaaaaaaaaaaaaaaaaaaaaaaaaaaaaaaaaaaaaaaaaaaaaaaaaaaaaaaaaaaaaaaaaaaaaaaaaaaaaaaaaaaaaaaaaaaaaaaaaaaaaa

SEQ ID NO: 3055 - RNA, 1697 nt, synthetic construct
  misc_feature 1..1697: note = mRNA a-1 (hSL-A100) (opt3) from Homo sapiens__NP_000448.3__HNF4A(1-474)(S313A)
  source 1..1697: mol_type = other RNA
aggagagtcccgcagtcggcgtccagcggctctgcttgttcgtgtgtgtgtcgttgcaggccttattcaagcttaccatgagactgagcaagaccctcgtggacatggatatggccgactactccgctgcacttgatcccgcctatacaactctggagttcgaaaacgtccaggttttgacgatgggcaatgacacctctccttcagaggggacaaacttaaatgcgccaaacagtctgggagtgagcgctctatgcgccatctgtggtgatagggcaactggcaaacactacggggcctcctcttgcgacggatgtaagggctttttccggcgctcggtacgtaaaaatcatatgtattcatgccgatttagcagacaatgtgtggtcgataaggacaaaaggaaccagtgccggtactgtcgcctcaagaagtgcttcagagctggtatgaaaaaggaagcagtgcagaatgagagggatcggattagtacccgccgatcctcttatgaagacagctccctgccgtcaataaacgcccttctgcaggctgaggttttgagtagacaaatcacaagccccgtgtctgggattaatggagatatcagggccaaaaagattgcgtccatcgcagacgtctgtgagtcaatgaaagaacagctcctggtgctggtagagtgggccaagtacatacctgctttttgcgaactcccattagatgaccaggttgccctgcttcgggcacacgctggcgagcatttgctgctaggcgccaccaagcgtagcatggtgttcaaagacgtcctcctgcttgggaacgattatatcgtgccccgccactgtcctgagctggcggaaatgagtagagtgtctattaggatcttggacgagctcgtcctgccatttcaggaattacaaattgatgacaatgagtacgcctacctgaaggcaatcatattctttgatcccgacgctaaaggactctccgatcctggtaagattaaacggcttcgagcccaggttcaggtgagcctggaagactatatcaacgatcgccagtacgactcgagaggcaggttcggggagttgctactgctcctgccaactcttcaatctattacatggcagatgatcgagcagatccaatttattaagctgttcggaatggctaaaatagataatttgctccaggaaatgctgttaggcggttccccgtcagacgcaccccatgcccaccaccctctgcatccacacctaatgcaggagcatatggggaccaacgtaatcgtggccaatacgatgcccactcacctcagtaacggacagatgtgcgaatggcctcggccacgcggccaagctgcgacccccgagacaccgcagcctagcccacccggcgggtccggatctgaaccttataagctgcttcccggtgcagtcgccactattgtgaagccattgagcgctatcccccagcctaccataacaaaacaggaggttatttgaggactagtccctgttcccagagcccacttttttttctttttttgaaataaaatagcctgtctttcagatctcaaaggctcttttcagagccaccaaaaaaaaaaaaaaaaaaaaaaaaaaaaaaaaaaaaaaaaaaaaaaaaaaaaaaaaaaaaaaaaaaaaaaaaaaaaaaaaaaaaaaaaaaaaaaaaaaaaa

SEQ ID NO: 3056 - RNA, 1697 nt, synthetic construct
  misc_feature 1..1697: note = mRNA a-1 (hSL-A100) (opt3) from Homo sapiens__NP_000448.3__HNF4A(1-474)(S313E)
  source 1..1697: mol_type = other RNA
aggagagtcccgcagtcggcgtccagcggctctgcttgttcgtgtgtgtgtcgttgcaggccttattcaagcttaccatgagactgagcaagaccctcgtggacatggatatggccgactactccgctgcacttgatcccgcctatacaactctggagttcgaaaacgtccaggttttgacgatgggcaatgacacctctccttcagaggggacaaacttaaatgcgccaaacagtctgggagtgagcgctctatgcgccatctgtggtgatagggcaactggcaaacactacggggcctcctcttgcgacggatgtaagggctttttccggcgctcggtacgtaaaaatcatatgtattcatgccgatttagcagacaatgtgtggtcgataaggacaaaaggaaccagtgccggtactgtcgcctcaagaagtgcttcagagctggtatgaaaaaggaagcagtgcagaatgagagggatcggattagtacccgccgatcctcttatgaagacagctccctgccgtcaataaacgcccttctgcaggctgaggttttgagtagacaaatcacaagccccgtgtctgggattaatggagatatcagggccaaaaagattgcgtccatcgcagacgtctgtgagtcaatgaaagaacagctcctggtgctggtagagtgggccaagtacatacctgctttttgcgaactcccattagatgaccaggttgccctgcttcgggcacacgctggcgagcatttgctgctaggcgccaccaagcgtagcatggtgttcaaagacgtcctcctgcttgggaacgattatatcgtgccccgccactgtcctgagctggcggaaatgagtagagtgtctattaggatcttggacgagctcgtcctgccatttcaggaattacaaattgatgacaatgagtacgcctacctgaaggcaatcatattctttgatcccgacgctaaaggactctccgatcctggtaagattaaacggcttcgagaacaggttcaggtgagcctggaggactatatcaacgatcgccagtacgactcgagaggcaggttcggggagttgctactgctcctgccaactcttcaatctattacatggcagatgatcgaacagatccaatttattaagctgttcggaatggccaaaatagataatttgctccaggagatgctgttaggcggttccccgtcagacgctccccatgcccaccaccctctgcatccacacctaatgcaggaacatatggggaccaacgtaatcgtggcaaatacgatgcccactcacctcagtaacggacagatgtgcgagtggcctcggccacgcggccaagccgctacccccgaaacaccgcagcctagcccacccggcgggtccggatctgagccttataagctgcttcccggtgcggtcgcaactattgtgaagccattgagcgccatcccccagcctaccataacaaaacaggaggttatttgaggactagtccctgttcccagagcccacttttttttctttttttgaaataaaatagcctgtctttcagatctcaaaggctcttttcagagccaccaaaaaaaaaaaaaaaaaaaaaaaaaaaaaaaaaaaaaaaaaaaaaaaaaaaaaaaaaaaaaaaaaaaaaaaaaaaaaaaaaaaaaaaaaaaaaaaaaaaaa

SEQ ID NO: 3057 - RNA, 1697 nt, synthetic construct
  misc_feature 1..1697: note = mRNA a-1 (hSL-A100) (opt3) from Homo sapiens__NP_000448.3__HNF4A(1-474)(S142A_S143A)
  source 1..1697: mol_type = other RNA
aggagagtcccgcagtcggcgtccagcggctctgcttgttcgtgtgtgtgtcgttgcaggccttattcaagcttaccatgagactgagcaagaccctcgtggacatggatatggccgactactccgctgcacttgatcccgcctatacaactctggagttcgaaaacgtccaggttttgacgatgggcaatgacacctctccttcagaggggacaaacttaaatgcgccaaacagtctgggagtgagcgctctatgcgccatctgtggtgatagggcaactggcaaacactacggggcctcctcttgcgacggatgtaagggctttttccggcgctcggtacgtaaaaatcatatgtattcatgccgatttagcagacaatgtgtggtcgataaggacaaaaggaaccagtgccggtactgtcgcctcaagaagtgcttcagagctggtatgaaaaaggaagcagtgcagaatgagagggatcggattagtacccgccgagccgcttatgaagactcctctctgccgagcataaacgcccttctgcaggcggaggttttgtccagacaaatcacatcacccgtgagtgggattaatggagatatcagggccaaaaagattgcaagcatcgctgacgtctgtgagtctatgaaagaacagctcctggtgctggtagagtgggccaagtacatacctgcattttgcgaactcccattagatgaccaggttgctctgcttcgggcccacgcgggcgagcatttgctgctaggcgccaccaagcgttccatggtgttcaaagacgtcctcctgcttgggaacgattatatcgtgccccgccactgtcctgagctggcagaaatgtcaagagtgagcattaggatcttggacgagctcgtcctgccatttcaggaattacaaattgatgacaatgagtacgcttacctgaaggccatcatattctttgatcccgacgctaaaggactcagtgatcctggtaagattaaacggcttcgatctcaggttcaggtgtccctggaagactatatcaacgatcgccagtacgacagcagaggcaggttcggggagttgctactgctcctgccaactcttcaatcgattacatggcagatgatcgagcagatccaatttattaagctgttcggaatggccaaaatagataatttgctccaggaaatgctgttaggcggttctccgtccgacgcaccccatgcccaccaccctctgcatccacacctaatgcaggagcatatggggaccaacgtaatcgtggctaatacgatgcccactcacctctcaaacggacagatgtgcgaatggcctcggccacgcggccaagcggcaacccccgagacaccgcagcctagtcccccaggcgggagcggatccgaaccttataagctgcttcccggtgccgtcgctactattgtgaagccattgtctgccatcccccagcctaccataacaaaacaggaggttatttgaggactagtccctgttcccagagcccacttttttttctttttttgaaataaaatagcctgtctttcagatctcaaaggctcttttcagagccaccaaaaaaaaaaaaaaaaaaaaaaaaaaaaaaaaaaaaaaaaaaaaaaaaaaaaaaaaaaaaaaaaaaaaaaaaaaaaaaaaaaaaaaaaaaaaaaaaaaaaa

SEQ ID NO: 3058 - RNA, 1697 nt, synthetic construct
  misc_feature 1..1697: note = mRNA a-1 (hSL-A100) (opt3) from Homo sapiens__NP_000448.3__HNF4A(1-474)(S142E_S143E)
  source 1..1697: mol_type = other RNA
aggagagtcccgcagtcggcgtccagcggctctgcttgttcgtgtgtgtgtcgttgcaggccttattcaagcttaccatgagactgagcaagaccctcgtggacatggatatggccgactactccgctgcacttgatcccgcctatacaactctggagttcgaaaacgtccaggttttgacgatgggcaatgacacctctccttcagaggggacaaacttaaatgcgccaaacagtctgggagtgagcgctctatgcgccatctgtggtgatagggcaactggcaaacactacggggcctcctcttgcgacggatgtaagggctttttccggcgctcggtacgtaaaaatcatatgtattcatgccgatttagcagacaatgtgtggtcgataaggacaaaaggaaccagtgccggtactgtcgcctcaagaagtgcttcagagctggtatgaaaaaggaagcagtgcagaatgagagggatcggattagtacccgccgagaagagtatgaggactcctctctgccgagcataaacgcccttctgcaggctgaagttttgtccagacaaatcacatcacccgtgagtgggattaatggagatatcagggccaaaaagattgcgagcatcgcagacgtctgtgagtctatgaaagaacagctcctggtgctggtagagtgggccaagtacatacctgctttttgcgagctcccattagatgaccaggttgccctgcttcgggcacacgctggcgaacatttgctgctaggcgccaccaagcgttccatggtgttcaaagacgtcctcctgcttgggaacgattatatcgtgccccgccactgtcctgagctggcggaaatgtcaagagtgagcattaggatcttggacgagctcgtcctgccatttcaggaattacaaattgatgacaatgagtacgcctacctgaaggcaatcatattctttgatcccgacgctaaaggactcagtgatcctggtaagattaaacggcttcgatctcaggttcaggtgtccctggaggactatatcaacgatcgccagtacgacagcagaggcaggttcggggaattgctactgctcctgccaactcttcaatcgattacatggcagatgatcgagcagatccaatttattaagctgttcggaatggccaaaatagataatttgctccaggaaatgctgttaggcggttctccgtccgacgctccccatgcccaccaccctctgcatccacacctaatgcaggagcatatggggaccaacgtaatcgtggcaaatacgatgcccactcacctctcaaacggacagatgtgcgaatggcctcggccacgcggccaagccgctacccccgagacaccgcagcctagtcccccaggcgggagcggatccgagccttataagctgcttcccggtgcggtcgcaactattgtgaagccattgtctgccatcccccagcctaccataacaaaacaggaagttatttgaggactagtccctgttcccagagcccacttttttttctttttttgaaataaaatagcctgtctttcagatctcaaaggctcttttcagagccaccaaaaaaaaaaaaaaaaaaaaaaaaaaaaaaaaaaaaaaaaaaaaaaaaaaaaaaaaaaaaaaaaaaaaaaaaaaaaaaaaaaaaaaaaaaaaaaaaaaaaa

SEQ ID NO: 3059 - RNA, 1697 nt, synthetic construct
  misc_feature 1..1697: note = mRNA a-1 (hSL-A100) (opt3) from Homo sapiens__NP_000448.3__HNF4A(1-474)(S143A)
  source 1..1697: mol_type = other RNA
aggagagtcccgcagtcggcgtccagcggctctgcttgttcgtgtgtgtgtcgttgcaggccttattcaagcttaccatgagactgagcaagaccctcgtggacatggatatggccgactactccgctgcacttgatcccgcctatacaactctggagttcgaaaacgtccaggttttgacgatgggcaatgacacctctccttcagaggggacaaacttaaatgcgccaaacagtctgggagtgagcgctctatgcgccatctgtggtgatagggcaactggcaaacactacggggcctcctcttgcgacggatgtaagggctttttccggcgctcggtacgtaaaaatcatatgtattcatgccgatttagcagacaatgtgtggtcgataaggacaaaaggaaccagtgccggtactgtcgcctcaagaagtgcttcagagctggtatgaaaaaggaagcagtgcagaatgagagggatcggattagtacccgccgatccgcctatgaagactctagcctgccgtccataaacgcccttctgcaggccgaggttttgtcaagacaaatcacaagtcccgtgagcgggattaatggagatatcagggcgaaaaagattgcatctatcgccgacgtctgtgagtccatgaaagaacagctcctggtgctggtagagtgggctaagtacatacctgccttttgcgaactcccattagatgaccaggttgcactgcttcgggctcacgccggcgagcatttgctgctaggcgcgaccaagcgttcaatggtgttcaaagacgtcctcctgcttgggaacgattatatcgtgccccgccactgtcctgagctggccgaaatgagcagagtgagtattaggatcttggacgagctcgtcctgccatttcaggaattacaaattgatgacaatgagtacgcatacctgaaggctatcatattctttgatcccgacgccaaaggactctctgatcctggtaagattaaacggcttcgatcccaggttcaggtgagcctggaagactatatcaacgatcgccagtacgactcgagaggcaggttcggggagttgctactgctcctgccaactcttcaatctattacatggcagatgatcgagcagatccaatttattaagctgttcggaatggctaaaatagataatttgctccaggaaatgctgttaggcggttccccgtcagacgctccccatgcacaccaccctctgcatccacacctaatgcaggagcatatggggaccaacgtaatcgtggccaatacgatgcccactcacctcagtaacggacagatgtgcgaatggcctcggccacgcggccaagctgcgacccccgagacaccgcagcctagcccacccggcgggtccggatctgaaccttataagctgcttcccggtgcagtcgccactattgtgaagccattgagcgctatcccccagcctaccataacaaaacaggaggttatttgaggactagtccctgttcccagagcccacttttttttctttttttgaaataaaatagcctgtctttcagatctcaaaggctcttttcagagccaccaaaaaaaaaaaaaaaaaaaaaaaaaaaaaaaaaaaaaaaaaaaaaaaaaaaaaaaaaaaaaaaaaaaaaaaaaaaaaaaaaaaaaaaaaaaaaaaaaaaaa

SEQ ID NO: 3060 - RNA, 1697 nt, synthetic construct
  misc_feature 1..1697: note = mRNA a-1 (hSL-A100) (opt3) from Homo sapiens__NP_000448.3__HNF4A(1-474)(T166A)
  source 1..1697: mol_type = other RNA
aggagagtcccgcagtcggcgtccagcggctctgcttgttcgtgtgtgtgtcgttgcaggccttattcaagcttaccatgagactgagcaagaccctcgtggacatggatatggccgactactccgctgcacttgatcccgcctatacaactctggagttcgaaaacgtccaggttttgacgatgggcaatgacacctctccttcagaggggacaaacttaaatgcgccaaacagtctgggagtgagcgctctatgcgccatctgtggtgatagggcaactggcaaacactacggggcctcctcttgcgacggatgtaagggctttttccggcgctcggtacgtaaaaatcatatgtattcatgccgatttagcagacaatgtgtggtcgataaggacaaaaggaaccagtgccggtactgtcgcctcaagaagtgcttcagagctggtatgaaaaaggaagcagtgcagaatgagagggatcggattagtacccgccgatcctcttatgaagacagctccctgccgtcaataaacgcccttctgcaggctgaggttttgagtagacaaatcgccagccccgtgtctgggattaatggagatatcagggcgaaaaagattgcatccatcgccgacgtctgtgagtcaatgaaagaacagctcctggtgctggtagagtgggctaagtacatacctgccttttgcgaactcccattagatgaccaggttgcactgcttcgggctcacgccggcgagcatttgctgctaggcgcgacaaagcgtagcatggtgttcaaagacgtcctcctgcttgggaacgattatatcgtgccccgccactgtcctgagctggccgaaatgagtagagtgtctattaggatcttggacgagctcgtcctgccatttcaggaattacaaattgatgacaatgagtacgcatacctgaaggctatcatattctttgatcccgacgccaaaggactctccgatcctggtaagattaaacggcttcgaagccaggttcaggtgtcgctggaagactatatcaacgatcgccagtacgactctagaggcaggttcggggagttgctactgctcctgccaacccttcaatccattacttggcagatgatcgagcagatccaatttattaagctgttcggaatggctaaaatagataatttgctccaggaaatgctgttaggcggttcaccgagtgacgcaccccatgcccaccaccctctgcatccacacctaatgcaggagcatatggggacaaacgtaatcgtggccaataccatgcccacgcacctcagcaacggacagatgtgcgaatggcctcggccacgcggccaagctgcgactcccgagaccccgcagccttctcccccaggcgggtccggaagcgaaccttataagctgcttcccggtgcagtcgccacaattgtgaagccattgtcagctatcccccagcctactataaccaaacaggaggttatttgaggactagtccctgttcccagagcccacttttttttctttttttgaaataaaatagcctgtctttcagatctcaaaggctcttttcagagccaccaaaaaaaaaaaaaaaaaaaaaaaaaaaaaaaaaaaaaaaaaaaaaaaaaaaaaaaaaaaaaaaaaaaaaaaaaaaaaaaaaaaaaaaaaaaaaaaaaaaaa

SEQ ID NO: 3061 - RNA, 1697 nt, synthetic construct
  misc_feature 1..1697: note = mRNA a-1 (hSL-A100) (opt3) from Homo sapiens__NP_000448.3__HNF4A(1-474)(S167E)
  source 1..1697: mol_type = other RNA
aggagagtcccgcagtcggcgtccagcggctctgcttgttcgtgtgtgtgtcgttgcaggccttattcaagcttaccatgagactgagcaagaccctcgtggacatggatatggccgactactccgctgcacttgatcccgcctatacaactctggagttcgaaaacgtccaggttttgacgatgggcaatgacacctctccttcagaggggacaaacttaaatgcgccaaacagtctgggagtgagcgctctatgcgccatctgtggtgatagggcaactggcaaacactacggggcctcctcttgcgacggatgtaagggctttttccggcgctcggtacgtaaaaatcatatgtattcatgccgatttagcagacaatgtgtggtcgataaggacaaaaggaaccagtgccggtactgtcgcctcaagaagtgcttcagagctggtatgaaaaaggaagcagtgcagaatgagagggatcggattagtacccgccgatcctcttatgaagacagctccctgccgtcaataaacgcccttctgcaggctgaggttttgagtagacaaatcacagagcccgtgagcgggattaatggagatatcagggccaaaaagattgcgtctatcgcagacgtctgtgaatccatgaaagagcagctcctggtgctggtagaatgggccaagtacatacctgctttttgcgagctcccattagatgaccaggttgccctgcttcgggcacacgctggcgagcatttgctgctaggcgccaccaagcgttcaatggtgttcaaagacgtcctcctgcttgggaacgattatatcgtgccccgccactgtcctgaactggcggagatgagcagagtgagtattaggatcttggacgaactcgtcctgccatttcaggagttacaaattgatgacaatgaatacgcctacctgaaggcaatcatattctttgatcccgacgctaaaggactctctgatcctggtaagattaaacggcttcgatcccaggttcaggtgagcctggaggactatatcaacgatcgccagtacgactcgagaggcaggttcggggagttgctactgctcctgccaactcttcaatctattacatggcagatgatcgaacagatccaatttattaagctgttcggaatggccaaaatagataatttgctccaggagatgctgttaggcggttccccgtcagacgctccccatgcccaccaccctctgcatccacacctaatgcaggaacatatggggaccaacgtaatcgtggcaaatacgatgcccactcacctcagtaacggacagatgtgcgagtggcctcggccacgcggccaagccgctacccccgaaacaccgcagcctagcccacccggcgggtccggatctgagccttataagctgcttcccggtgcggtcgcaactattgtgaagccattgagcgccatcccccagcctaccataacaaaacaggaggttatttgaggactagtccctgttcccagagcccacttttttttctttttttgaaataaaatagcctgtctttcagatctcaaaggctcttttcagagccaccaaaaaaaaaaaaaaaaaaaaaaaaaaaaaaaaaaaaaaaaaaaaaaaaaaaaaaaaaaaaaaaaaaaaaaaaaaaaaaaaaaaaaaaaaaaaaaaaaaaaa

SEQ ID NO: 3062 - RNA, 1697 nt, synthetic construct
  misc_feature 1..1697: note = mRNA a-1 (hSL-A100) (opt3) from Homo sapiens__NP_000448.3__HNF4A(1-474)(S167A)
  source 1..1697: mol_type = other RNA
aggagagtcccgcagtcggcgtccagcggctctgcttgttcgtgtgtgtgtcgttgcaggccttattcaagcttaccatgagactgagcaagaccctcgtggacatggatatggccgactactccgctgcacttgatcccgcctatacaactctggagttcgaaaacgtccaggttttgacgatgggcaatgacacctctccttcagaggggacaaacttaaatgcgccaaacagtctgggagtgagcgctctatgcgccatctgtggtgatagggcaactggcaaacactacggggcctcctcttgcgacggatgtaagggctttttccggcgctcggtacgtaaaaatcatatgtattcatgccgatttagcagacaatgtgtggtcgataaggacaaaaggaaccagtgccggtactgtcgcctcaagaagtgcttcagagctggtatgaaaaaggaagcagtgcagaatgagagggatcggattagtacccgccgatcctcttatgaagacagctccctgccgtcaataaacgcccttctgcaggctgaggttttgagtagacaaatcacagcccccgtgagcgggattaatggagatatcagggcgaaaaagattgcatctatcgccgacgtctgtgagtccatgaaagaacagctcctggtgctggtagagtgggctaagtacatacctgccttttgcgaactcccattagatgaccaggttgcactgcttcgggctcacgccggcgagcatttgctgctaggcgcgaccaagcgttcaatggtgttcaaagacgtcctcctgcttgggaacgattatatcgtgccccgccactgtcctgagctggccgaaatgagcagagtgagtattaggatcttggacgagctcgtcctgccatttcaggaattacaaattgatgacaatgagtacgcatacctgaaggctatcatattctttgatcccgacgccaaaggactctctgatcctggtaagattaaacggcttcgatcccaggttcaggtgagcctggaagactatatcaacgatcgccagtacgactcgagaggcaggttcggggagttgctactgctcctgccaactcttcaatctattacatggcagatgatcgagcagatccaatttattaagctgttcggaatggctaaaatagataatttgctccaggaaatgctgttaggcggttccccgtcagacgcaccccatgcccaccaccctctgcatccacacctaatgcaggagcatatggggaccaacgtaatcgtggccaatacgatgcccactcacctcagtaacggacagatgtgcgaatggcctcggccacgcggccaagctgcgacccccgagacaccgcagcctagcccacccggcgggtccggatctgaaccttataagctgcttcccggtgcagtcgccactattgtgaagccattgagcgctatcccccagcctaccataacaaaacaggaggttatttgaggactagtccctgttcccagagcccacttttttttctttttttgaaataaaatagcctgtctttcagatctcaaaggctcttttcagagccaccaaaaaaaaaaaaaaaaaaaaaaaaaaaaaaaaaaaaaaaaaaaaaaaaaaaaaaaaaaaaaaaaaaaaaaaaaaaaaaaaaaaaaaaaaaaaaaaaaaaaa

SEQ ID NO: 3063 - RNA, 1697 nt, synthetic construct
  misc_feature 1..1697: note = mRNA a-1 (hSL-A100) (opt3) from Homo sapiens__NP_000448.3__HNF4A(1-474)(S167A_S378A_T429A_T432A_ S436A)
  source 1..1697: mol_type = other RNA
aggagagtcccgcagtcggcgtccagcggctctgcttgttcgtgtgtgtgtcgttgcaggccttattcaagcttaccatgagactgagcaagaccctcgtggacatggatatggccgactactccgctgcacttgatcccgcctatacaactctggagttcgaaaacgtccaggttttgacgatgggcaatgacacctctccttcagaggggacaaacttaaatgcgccaaacagtctgggagtgagcgctctatgcgccatctgtggtgatagggcaactggcaaacactacggggcctcctcttgcgacggatgtaagggctttttccggcgctcggtacgtaaaaatcatatgtattcatgccgatttagcagacaatgtgtggtcgataaggacaaaaggaaccagtgccggtactgtcgcctcaagaagtgcttcagagctggtatgaaaaaggaagcagtgcagaatgagagggatcggattagtacccgccgatcctcttatgaagacagctccctgccgtcaataaacgcccttctgcaggctgaggttttgagtagacaaatcacagcccccgtgagcgggattaatggagatatcagggcgaaaaagattgcatctatcgccgacgtctgtgagtccatgaaagaacagctcctggtgctggtagagtgggctaagtacatacctgccttttgcgaactcccattagatgaccaggttgcactgcttcgggctcacgccggcgagcatttgctgctaggcgcgaccaagcgttcaatggtgttcaaagacgtcctcctgcttgggaacgattatatcgtgccccgccactgtcctgagctggccgaaatgagcagagtgagtattaggatcttggacgagctcgtcctgccatttcaggaattacaaattgatgacaatgagtacgcatacctgaaggctatcatattctttgatcccgacgccaaaggactctctgatcctggtaagattaaacggcttcgatcccaggttcaggtgagcctggaagactatatcaacgatcgccagtacgactcgagaggcaggttcggggagttgctactgctcctgccaactcttcaatctattacatggcagatgatcgagcagatccaatttattaagctgttcggaatggctaaaatagataatttgctccaggaaatgctgttaggcggtgccccgtccgacgcaccccatgcccaccaccctctgcatccacacctaatgcaggagcatatggggaccaacgtaatcgtggctaatacgatgcccactcacctctcaaacggacagatgtgcgaatggcctcggccacgcggccaagcggcagcccccgaggctccgcagcctgcacccccaggcgggagtggaagcgaaccttataagctgcttcccggtgccgtcgccaccattgtgaagccattgtccgctatcccccagcctacaataactaaacaggaggttatttgaggactagtccctgttcccagagcccacttttttttctttttttgaaataaaatagcctgtctttcagatctcaaaggctcttttcagagccaccaaaaaaaaaaaaaaaaaaaaaaaaaaaaaaaaaaaaaaaaaaaaaaaaaaaaaaaaaaaaaaaaaaaaaaaaaaaaaaaaaaaaaaaaaaaaaaaaaaaaa

SEQ ID NO: 3064 - RNA, 1697 nt, synthetic construct
  misc_feature 1..1697: note = mRNA a-1 (hSL-A100) (opt3) from Homo sapiens__NP_000448.3__HNF4A(1-474)(S167E_S378E_T429E_T432E_ S436E)
  source 1..1697: mol_type = other RNA
aggagagtcccgcagtcggcgtccagcggctctgcttgttcgtgtgtgtgtcgttgcaggccttattcaagcttaccatgagactgagcaagaccctcgtggacatggatatggccgactactccgctgcacttgatcccgcctatacaactctggagttcgaaaacgtccaggttttgacgatgggcaatgacacctctccttcagaggggacaaacttaaatgcgccaaacagtctgggagtgagcgctctatgcgccatctgtggtgatagggcaactggcaaacactacggggcctcctcttgcgacggatgtaagggctttttccggcgctcggtacgtaaaaatcatatgtattcatgccgatttagcagacaatgtgtggtcgataaggacaaaaggaaccagtgccggtactgtcgcctcaagaagtgcttcagagctggtatgaaaaaggaagcagtgcagaatgagagggatcggattagtacccgccgatcctcttatgaagacagctccctgccgtcaataaacgcccttctgcaggctgaggttttgagtagacaaatcacagagcccgtgagcgggattaatggagatatcagggccaaaaagattgcgtctatcgcagacgtctgtgaatccatgaaagagcagctcctggtgctggtagaatgggccaagtacatacctgctttttgcgagctcccattagatgaccaggttgccctgcttcgggcacacgctggcgagcatttgctgctaggcgccaccaagcgttcaatggtgttcaaagacgtcctcctgcttgggaacgattatatcgtgccccgccactgtcctgaactggcggagatgagcagagtgagtattaggatcttggacgaactcgtcctgccatttcaggagttacaaattgatgacaatgaatacgcctacctgaaggcaatcatattctttgatcccgacgctaaaggactctctgatcctggtaagattaaacggcttcgatcccaggttcaggtgagcctggaggactatatcaacgatcgccagtacgactcgagaggcaggttcggggagttgctactgctcctgccaactcttcaatctattacatggcagatgatcgaacagatccaatttattaagctgttcggaatggccaaaatagataatttgctccaggagatgctgttaggcggtgaaccgtccgacgctccccatgcccaccaccctctgcatccacacctaatgcaggagcatatggggaccaacgtaatcgtggcaaatacgatgcccactcacctctcaaacggacagatgtgcgaatggcctcggccacgcggccaagccgctgagcccgaggaaccgcagcctgagcccccaggcgggagtggaagcgaaccttataagctgcttcccggtgcggtcgcaaccattgtgaagccattgtccgccatcccccagcctacaataactaaacaggaggttatttgaggactagtccctgttcccagagcccacttttttttctttttttgaaataaaatagcctgtctttcagatctcaaaggctcttttcagagccaccaaaaaaaaaaaaaaaaaaaaaaaaaaaaaaaaaaaaaaaaaaaaaaaaaaaaaaaaaaaaaaaaaaaaaaaaaaaaaaaaaaaaaaaaaaaaaaaaaaaaa

SEQ ID NO: 3065 - RNA, 1697 nt, synthetic construct
  misc_feature 1..1697: note = mRNA a-1 (hSL-A100) (opt3) from Homo sapiens__NP_000448.3__HNF4A(1-474)(S87A)
  source 1..1697: mol_type = other RNA
aggagagtcccgcagtcggcgtccagcggctctgcttgttcgtgtgtgtgtcgttgcaggccttattcaagcttaccatgagactgagcaagaccctcgtggacatggatatggccgactactccgctgcacttgatcccgcctatacaactctggagttcgaaaacgtccaggttttgacgatgggcaatgacacctctccttcagaggggacaaacttaaatgcgccaaacagtctgggagtgagcgctctatgcgccatctgtggtgatagggcaactggcaaacactacggggcctcctcttgcgacggatgtaagggctttttccggcgcgctgtacgtaaaaatcatatgtattcgtgccgattttcaagacaatgtgtggtcgataaggacaaaaggaaccagtgccggtactgtcgcctcaagaagtgcttcagagcaggtatgaaaaaggaagccgtgcagaatgagagggatcggattagcacccgccgaagttcctatgaagactctagcctgccgtccataaacgcccttctgcaggccgaggttttgtcaagacaaatcacaagtcccgtgagcgggattaatggagatatcagggcgaaaaagattgcatctatcgccgacgtctgtgagtccatgaaagaacagctcctggtgctggtagagtgggctaagtacatacctgccttttgcgaactcccattagatgaccaggttgcactgcttcgggctcacgccggcgagcatttgctgctaggcgcgaccaagcgttcaatggtgttcaaagacgtcctcctgcttgggaacgattatatcgtgccccgccactgtcctgagctggccgaaatgagcagagtgagtattaggatcttggacgagctcgtcctgccatttcaggaattacaaattgatgacaatgagtacgcatacctgaaggctatcatattctttgatcccgacgccaaaggactctctgatcctggtaagattaaacggcttcgatcccaggttcaggtgagcctggaagactatatcaacgatcgccagtacgactcgagaggcaggttcggggagttgctactgctcctgccaactcttcaatctattacatggcagatgatcgagcagatccaatttattaagctgttcggaatggctaaaatagataatttgctccaggaaatgctgttaggcggttccccgtcagacgctccccatgcacaccaccctctgcatccacacctaatgcaggagcatatggggaccaacgtaatcgtggccaatacgatgcccactcacctcagtaacggacagatgtgcgaatggcctcggccacgcggccaagctgcgacccccgagacaccgcagcctagcccacccggcgggtccggatctgaaccttataagctgcttcccggtgcagtcgccactattgtgaagccattgagcgctatcccccagcctaccataacaaaacaggaggttatttgaggactagtccctgttcccagagcccacttttttttctttttttgaaataaaatagcctgtctttcagatctcaaaggctcttttcagagccaccaaaaaaaaaaaaaaaaaaaaaaaaaaaaaaaaaaaaaaaaaaaaaaaaaaaaaaaaaaaaaaaaaaaaaaaaaaaaaaaaaaaaaaaaaaaaaaaaaaaaa

SEQ ID NO: 3066 - RNA, 1697 nt, synthetic construct
  misc_feature 1..1697: note = mRNA a-1 (hSL-A100) (opt3) from Homo sapiens__NP_000448.3__HNF4A(1-474)(S87E)
  source 1..1697: mol_type = other RNA
aggagagtcccgcagtcggcgtccagcggctctgcttgttcgtgtgtgtgtcgttgcaggccttattcaagcttaccatgagactgagcaagaccctcgtggacatggatatggccgactactccgctgcacttgatcccgcctatacaactctggagttcgaaaacgtccaggttttgacgatgggcaatgacacctctccttcagaggggacaaacttaaatgcgccaaacagtctgggagtgagcgctctatgcgccatctgtggtgatagggcaactggcaaacactacggggcctcctcttgcgacggatgtaagggctttttccggcgcgaagtacgtaaaaatcatatgtattcgtgccgattttcaagacaatgtgtggtcgataaggacaaaaggaaccagtgccggtactgtcgcctcaagaagtgcttcagagctggtatgaaaaaggaggcagtgcagaatgaaagggatcggattagcacccgccgaagttcctatgaggactctagcctgccgtccataaacgcccttctgcaggctgaggttttgtcaagacaaatcacaagtcccgtgagcgggattaatggagatatcagggccaaaaagattgcgtctatcgcagacgtctgtgaatccatgaaagagcagctcctggtgctggtagaatgggccaagtacatacctgctttttgcgagctcccattagatgaccaggttgccctgcttcgggcacacgctggcgagcatttgctgctaggcgccaccaagcgttcaatggtgttcaaagacgtcctcctgcttgggaacgattatatcgtgccccgccactgtcctgaactggcggagatgagcagagtgagtattaggatcttggacgaactcgtcctgccatttcaggagttacaaattgatgacaatgaatacgcctacctgaaggcaatcatattctttgatcccgacgctaaaggactctctgatcctggtaagattaaacggcttcgatcccaggttcaggtgagcctggaggactatatcaacgatcgccagtacgactcgagaggcaggttcggggagttgctactgctcctgccaactcttcaatctattacatggcagatgatcgaacagatccaatttattaagctgttcggaatggccaaaatagataatttgctccaggagatgctgttaggcggttccccgtcagacgctccccatgcccaccaccctctgcatccacacctaatgcaggaacatatggggaccaacgtaatcgtggcaaatacgatgcccactcacctcagtaacggacagatgtgcgagtggcctcggccacgcggccaagccgctacccccgaaacaccgcagcctagcccacccggcgggtccggatctgagccttataagctgcttcccggtgcggtcgcaactattgtgaagccattgagcgccatcccccagcctaccataacaaaacaggaggttatttgaggactagtccctgttcccagagcccacttttttttctttttttgaaataaaatagcctgtctttcagatctcaaaggctcttttcagagccaccaaaaaaaaaaaaaaaaaaaaaaaaaaaaaaaaaaaaaaaaaaaaaaaaaaaaaaaaaaaaaaaaaaaaaaaaaaaaaaaaaaaaaaaaaaaaaaaaaaaaa

SEQ ID NO: 3067 - RNA, 1697 nt, synthetic construct
  misc_feature 1..1697: note = mRNA a-1 (hSL-A100) (opt3) from Homo sapiens__NP_000448.3__HNF4A(1-474)(R2V)
  source 1..1697: mol_type = other RNA
aggagagtcccgcagtcggcgtccagcggctctgcttgttcgtgtgtgtgtcgttgcaggccttattcaagcttaccatggtgctgagcaagaccctcgtcgacatggatatggccgactactccgctgcacttgatcccgcctatacaactctggagttcgaaaacgttcaggtgttgacgatgggcaatgacacctctccttcagaggggacaaacttaaatgcgccaaacagtctgggagtaagcgctctatgcgccatctgtggtgatagagcaactggcaaacactacggggcctcctcttgcgacggatgtaagggctttttcaggcggtcggtgcgcaaaaatcatatgtattcatgccgatttagccgtcaatgtgtcgtggataaggacaaaagaaaccagtgcaggtactgtcggctcaagaagtgcttccgcgctggtatgaaaaaggaagcagttcagaatgagagagataggattagtacccggcgctcctcttatgaagacagctccctgccgtcaataaacgcccttctgcaggctgaggtgttgagtcgacaaatcacaagccccgtctctgggattaatggagatatcagagccaaaaagattgcgtccatcgcagacgtgtgtgagtcaatgaaagaacagctcctggtactggttgagtgggccaagtacatacctgctttttgcgaactcccattagatgaccaggtggccctgcttagggcacacgctggcgagcatttgctgctaggcgccaccaagcggagcatggtcttcaaagacgtgctcctgcttgggaacgattatatcgtgccccgtcactgtcctgagctggcggaaatgagtcgcgtctctattagaatcttggacgagctcgttctgccatttcaggaattacaaattgatgacaatgagtacgcctacctgaaggcaatcatattctttgatcccgacgctaaaggactctccgatcctggtaagattaaaaggcttcggagccaggtgcaggtatcgctggaagactatatcaacgatcgacagtacgactctcgcggcagattcggggagttgctactgctcctgccaactcttcaatccattacatggcagatgatcgagcagatccaatttattaagctgttcggaatggccaaaatagataatttgctccaggaaatgctgttaggcggttcaccgagtgacgctccccatgcccaccaccctctgcatccacacctaatgcaggagcatatggggaccaacgtgatcgtcgcaaatacgatgcccactcacctcagcaacggacagatgtgcgaatggcctaggccacggggccaagccgctacccccgagacaccgcagccttctcccccaggcgggtccggaagcgaaccttataagctgcttcccggtgcggtggcaactattgttaagccattgtcagccatcccccagcctaccataacaaaacaggaggtgatttgaggactagtccctgttcccagagcccacttttttttctttttttgaaataaaatagcctgtctttcagatctcaaaggctcttttcagagccaccaaaaaaaaaaaaaaaaaaaaaaaaaaaaaaaaaaaaaaaaaaaaaaaaaaaaaaaaaaaaaaaaaaaaaaaaaaaaaaaaaaaaaaaaaaaaaaaaaaaaa

SEQ ID NO: 3068 - RNA, 1697 nt, synthetic construct
  misc_feature 1..1697: note = mRNA a-1 (hSL-A100) (opt3) from Homo sapiens__NP_000448.3__HNF4A(1-474)(R2V_K5V)
  source 1..1697: mol_type = other RNA
aggagagtcccgcagtcggcgtccagcggctctgcttgttcgtgtgtgtgtcgttgcaggccttattcaagcttaccatggtgctgagcgtcaccctcgttgacatggatatggccgactactccgctgcacttgatcccgcctatacaactctggagttcgaaaacgtgcaggtattgacgatgggcaatgacacctctccttcagaggggacaaacttaaatgcgccaaacagtctgggagtgagcgctctatgcgccatctgtggtgatagagcaactggcaagcactacggggcctcctcttgcgacggatgtaaaggctttttcaggcggtcggtccgcaagaatcatatgtattcatgccgatttagccgtcaatgtgtggttgataaagacaagagaaaccagtgcaggtactgtcggctcaaaaagtgcttccgcgctggtatgaagaaagaagcagtgcagaatgagagagataggattagtacccggcgctcctcttatgaagacagctccctgccgtcaataaacgcccttctgcaggctgaggtcttgagtcgacaaatcacaagccccgtgtctgggattaatggagatatcagagccaagaaaattgcgtccatcgcagacgtatgtgagtcaatgaaggaacagctcctggttctggtggagtgggccaaatacatacctgctttttgcgaactcccattagatgaccaggtcgccctgcttagggcacacgctggcgagcatttgctgctaggcgccaccaagcggagcatggtgttcaaggacgtgctcctgcttgggaacgattatatcgtcccccgtcactgtcctgagctggcggaaatgagtcgcgtttctattagaatcttggacgagctcgtgctgccatttcaggaattacaaattgatgacaatgagtacgcctacctgaaagcaatcatattctttgatcccgacgctaagggactctccgatcctggtaaaattaagaggcttcggagccaggtacaggtgtcgctggaagactatatcaacgatcgacagtacgactctcgcggcagattcggggagttgctactgctcctgccaactcttcaatccattacatggcagatgatcgagcagatccaatttattaaactgttcggaatggccaagatagataatttgctccaggaaatgctgttaggcggttcaccgagtgacgctccccatgcccaccaccctctgcatccacacctaatgcaggagcatatggggaccaacgtcatcgtggcaaatacgatgcccactcacctcagcaacggacagatgtgcgaatggcctaggccacggggccaagccgctacccccgagacaccgcagccttctcccccaggcgggtccggaagcgaaccttataaactgcttcccggtgcggttgcaactattgtgaagccattgtcagccatcccccagcctaccataacaaagcaggaggtcatttgaggactagtccctgttcccagagcccacttttttttctttttttgaaataaaatagcctgtctttcagatctcaaaggctcttttcagagccaccaaaaaaaaaaaaaaaaaaaaaaaaaaaaaaaaaaaaaaaaaaaaaaaaaaaaaaaaaaaaaaaaaaaaaaaaaaaaaaaaaaaaaaaaaaaaaaaaaaaaa

SEQ ID NO: 3069 - RNA, 1697 nt, synthetic construct
  misc_feature 1..1697: note = mRNA a-1 (hSL-A100) (opt3) from Homo sapiens__NP_000448.3__HNF4A(1-474)(K179R_K180R)
  source 1..1697: mol_type = other RNA
aggagagtcccgcagtcggcgtccagcggctctgcttgttcgtgtgtgtgtcgttgcaggccttattcaagcttaccatgagactgagcaagaccctcgtggacatggatatggccgactactccgctgcacttgatcccgcctatacaactctggagttcgaaaacgtccaggttttgacgatgggcaatgacacctctccttcagaggggacaaacttaaatgcgccaaacagtctgggagtgagcgctctatgcgccatctgtggtgatagggcaactggcaaacactacggggcctcctcttgcgacggatgtaagggctttttccggcgctcggtacgtaaaaatcatatgtattcatgccgatttagcagacaatgtgtggtcgataaggacaaaaggaaccagtgccggtactgtcgcctcaagaagtgcttcagagctggtatgaaaaaggaagcagtgcagaatgagagggatcggattagtacccgccgatcctcttatgaagacagctccctgccgtcaataaacgcccttctgcaggctgaggttttgagtagacaaatcacaagccccgtgtctgggattaatggagatatcagggcccggcgtattgcgtccatcgcagacgtctgtgagtcaatgaaagaacagctcctggtgctggtagagtgggccaagtacatacctgctttttgcgaactcccattagatgaccaggttgccctgcttcgcgcacacgctggcgagcatttgctgctaggcgccaccaaaagaagcatggtgttcaaggacgtcctcctgcttgggaacgattatatcgtgcccaggcactgtcctgagctggcggaaatgagtcgggtgtctattcgaatcttggacgagctcgtcctgccatttcaggaattacaaattgatgacaatgagtacgcctacctgaaggcaatcatattctttgatcccgacgctaaaggactctccgatcctggtaagattaaacgccttagaagccaggttcaggtgtcgctggaagactatatcaacgataggcagtacgactctcggggccgcttcggggagttgctactgctcctgccaactcttcaatccattacatggcagatgatcgagcagatccaatttattaagctgttcggaatggccaaaatagataatttgctccaggaaatgctgttaggcggttcaccgagtgacgctccccatgcccaccaccctctgcatccacacctaatgcaggagcatatggggaccaacgtaatcgtggcaaatacgatgcccactcacctcagcaacggacagatgtgcgaatggcctagaccaaggggccaagccgctacccccgagacaccgcagccttctcccccaggcgggtccggaagcgaaccttataagctgcttcccggtgcggtcgcaactattgtgaaaccattgtcagccatcccccagcctaccataacaaagcaggaggttatttgaggactagtccctgttcccagagcccacttttttttctttttttgaaataaaatagcctgtctttcagatctcaaaggctcttttcagagccaccaaaaaaaaaaaaaaaaaaaaaaaaaaaaaaaaaaaaaaaaaaaaaaaaaaaaaaaaaaaaaaaaaaaaaaaaaaaaaaaaaaaaaaaaaaaaaaaaaaaaa

SEQ ID NO: 3070 - RNA, 1697 nt, synthetic construct
  misc_feature 1..1697: note = mRNA a-1 (hSL-A100) (opt3) from Homo sapiens__NP_000448.3__HNF4A(1-474)(K234R)
  source 1..1697: mol_type = other RNA
aggagagtcccgcagtcggcgtccagcggctctgcttgttcgtgtgtgtgtcgttgcaggccttattcaagcttaccatgagactgagcaagaccctcgtggacatggatatggccgactactccgctgcacttgatcccgcctatacaactctggagttcgaaaacgtccaggttttgacgatgggcaatgacacctctccttcagaggggacaaacttaaatgcgccaaacagtctgggagtgagcgctctatgcgccatctgtggtgatagggcaactggcaaacactacggggcctcctcttgcgacggatgtaagggctttttccggcgctcggtacgtaaaaatcatatgtattcatgccgatttagcagacaatgtgtggtcgataaggacaaaaggaaccagtgccggtactgtcgcctcaagaagtgcttcagagctggtatgaaaaaggaagcagtgcagaatgagagggatcggattagtacccgccgatcctcttatgaagacagctccctgccgtcaataaacgcccttctgcaggctgaggttttgagtagacaaatcacaagccccgtgtctgggattaatggagatatcagggccaaaaagattgcgtccatcgcagacgtctgtgagtcaatgaaagaacagctcctggtgctggtagagtgggccaagtacatacctgctttttgcgaactcccattagatgaccaggttgccctgcttcgggcacacgctggcgagcatttgctgctaggcgccacccgtcgcagcatggtgttcaaggacgtcctcctgcttgggaacgattatatcgtgcccagacactgtcctgagctggcggaaatgagtagggtgtctattcggatcttggacgagctcgtcctgccatttcaggaattacaaattgatgacaatgagtacgcctacctgaaagcaatcatattctttgatcccgacgctaagggactctccgatcctggtaaaattaagcgacttcgcagccaggttcaggtgtcgctggaagactatatcaacgatagacagtacgactctaggggccggttcggggagttgctactgctcctgccaactcttcaatccattacatggcagatgatcgagcagatccaatttattaaactgttcggaatggccaagatagataatttgctccaggaaatgctgttaggcggttcaccgagtgacgctccccatgcccaccaccctctgcatccacacctaatgcaggagcatatggggaccaacgtaatcgtggcaaatacgatgcccactcacctcagcaacggacagatgtgcgaatggcctcgcccaagaggccaagccgctacccccgagacaccgcagccttctcccccaggcgggtccggaagcgaaccttataaactgcttcccggtgcggtcgcaactattgtgaagccattgtcagccatcccccagcctaccataacaaagcaggaggttatttgaggactagtccctgttcccagagcccacttttttttctttttttgaaataaaatagcctgtctttcagatctcaaaggctcttttcagagccaccaaaaaaaaaaaaaaaaaaaaaaaaaaaaaaaaaaaaaaaaaaaaaaaaaaaaaaaaaaaaaaaaaaaaaaaaaaaaaaaaaaaaaaaaaaaaaaaaaaaaa

SEQ ID NO: 3071 - RNA, 1697 nt, synthetic construct
  misc_feature 1..1697: note = mRNA a-1 (hSL-A100) (opt3) from Homo sapiens__NP_000448.3__HNF4A(1-474)(K300R)
  source 1..1697: mol_type = other RNA
aggagagtcccgcagtcggcgtccagcggctctgcttgttcgtgtgtgtgtcgttgcaggccttattcaagcttaccatgagactgagcaagaccctcgtggacatggatatggccgactactccgctgcacttgatcccgcctatacaactctggagttcgaaaacgtccaggttttgacgatgggcaatgacacctctccttcagaggggacaaacttaaatgcgccaaacagtctgggagtgagcgctctatgcgccatctgtggtgatagggcaactggcaaacactacggggcctcctcttgcgacggatgtaagggctttttccggcgctcggtacgtaaaaatcatatgtattcatgccgatttagcagacaatgtgtggtcgataaggacaaaaggaaccagtgccggtactgtcgcctcaagaagtgcttcagagctggtatgaaaaaggaagcagtgcagaatgagagggatcggattagtacccgccgatcctcttatgaagacagctccctgccgtcaataaacgcccttctgcaggctgaggttttgagtagacaaatcacaagccccgtgtctgggattaatggagatatcagggccaaaaagattgcgtccatcgcagacgtctgtgagtcaatgaaagaacagctcctggtgctggtagagtgggccaagtacatacctgctttttgcgaactcccattagatgaccaggttgccctgcttcgggcacacgctggcgagcatttgctgctaggcgccaccaagcgtagcatggtgttcaaagacgtcctcctgcttgggaacgattatatcgtgccccgccactgtcctgagctggcggaaatgagtagagtgtctattaggatcttggacgagctcgtcctgccatttcaggaattacaaattgatgacaatgagtacgcctacctgaaggcaatcatattctttgatcccgacgctcggggactctccgatcctggtaaaattaagcgacttcgcagccaggttcaggtgtcgctggaagactatatcaacgatagacagtacgactctaggggccggttcggggagttgctactgctcctgccaactcttcaatccattacatggcagatgatcgagcagatccaatttattaaactgttcggaatggccaagatagataatttgctccaggaaatgctgttaggcggttcaccgagtgacgctccccatgcccaccaccctctgcatccacacctaatgcaggagcatatggggaccaacgtaatcgtggcaaatacgatgcccactcacctcagcaacggacagatgtgcgaatggcctcgcccaagaggccaagccgctacccccgagacaccgcagccttctcccccaggcgggtccggaagcgaaccttataaactgcttcccggtgcggtcgcaactattgtgaagccattgtcagccatcccccagcctaccataacaaagcaggaggttatttgaggactagtccctgttcccagagcccacttttttttctttttttgaaataaaatagcctgtctttcagatctcaaaggctcttttcagagccaccaaaaaaaaaaaaaaaaaaaaaaaaaaaaaaaaaaaaaaaaaaaaaaaaaaaaaaaaaaaaaaaaaaaaaaaaaaaaaaaaaaaaaaaaaaaaaaaaaaaaa

SEQ ID NO: 3072 - RNA, 1697 nt, synthetic construct
  misc_feature 1..1697: note = mRNA a-1 (hSL-A100) (opt3) from Homo sapiens__NP_000448.3__HNF4A(1-474)(K300R_K307R_K309R)
  source 1..1697: mol_type = other RNA
aggagagtcccgcagtcggcgtccagcggctctgcttgttcgtgtgtgtgtcgttgcaggccttattcaagcttaccatgagactgagcaagaccctcgtggacatggatatggccgactactccgctgcacttgatcccgcctatacaactctggagttcgaaaacgtccaggttttgacgatgggcaatgacacctctccttcagaggggacaaacttaaatgcgccaaacagtctgggagtgagcgctctatgcgccatctgtggtgatagggcaactggcaaacactacggggcctcctcttgcgacggatgtaagggctttttccggcgctcggtacgtaaaaatcatatgtattcatgccgatttagcagacaatgtgtggtcgataaggacaaaaggaaccagtgccggtactgtcgcctcaagaagtgcttcagagctggtatgaaaaaggaagcagtgcagaatgagagggatcggattagtacccgccgatcctcttatgaagacagctccctgccgtcaataaacgcccttctgcaggctgaggttttgagtagacaaatcacaagccccgtgtctgggattaatggagatatcagggccaaaaagattgcgtccatcgcagacgtctgtgagtcaatgaaagaacagctcctggtgctggtagagtgggccaagtacatacctgctttttgcgaactcccattagatgaccaggttgccctgcttcgggcacacgctggcgagcatttgctgctaggcgccaccaagcgtagcatggtgttcaaagacgtcctcctgcttgggaacgattatatcgtgccccgccactgtcctgagctggcggaaatgagtagagtgtctattaggatcttggacgagctcgtcctgccatttcaggaattacaaattgatgacaatgagtacgcctacctgaaggcaatcatattctttgatcccgacgctcggggactctccgatcctggtcgcattcgaagacttaggagccaggttcaggtgtcgctggaagactatatcaacgatcggcagtacgactctcgcggcagattcggggagttgctactgctcctgccaactcttcaatccattacatggcagatgatcgagcagatccaatttattaaactgttcggaatggccaagatagataatttgctccaggaaatgctgttaggcggttcaccgagtgacgctccccatgcccaccaccctctgcatccacacctaatgcaggagcatatggggaccaacgtaatcgtggcaaatacgatgcccactcacctcagcaacggacagatgtgcgaatggcctaggccacgtggccaagccgctacccccgagacaccgcagccttctcccccaggcgggtccggaagcgaaccttataaactgcttcccggtgcggtcgcaactattgtgaagccattgtcagccatcccccagcctaccataacaaaacaggaggttatttgaggactagtccctgttcccagagcccacttttttttctttttttgaaataaaatagcctgtctttcagatctcaaaggctcttttcagagccaccaaaaaaaaaaaaaaaaaaaaaaaaaaaaaaaaaaaaaaaaaaaaaaaaaaaaaaaaaaaaaaaaaaaaaaaaaaaaaaaaaaaaaaaaaaaaaaaaaaaaa

SEQ ID NO: 3073 - RNA, 1697 nt, synthetic construct
  misc_feature 1..1697: note = mRNA a-1 (hSL-A100) (opt3) from Homo sapiens__NP_000448.3__HNF4A(1-474)(K447R_K470R)
  source 1..1697: mol_type = other RNA
aggagagtcccgcagtcggcgtccagcggctctgcttgttcgtgtgtgtgtcgttgcaggccttattcaagcttaccatgagactgagcaagaccctcgtggacatggatatggccgactactccgctgcacttgatcccgcctatacaactctggagttcgaaaacgtccaggttttgacgatgggcaatgacacctctccttcagaggggacaaacttaaatgcgccaaacagtctgggagtgagcgctctatgcgccatctgtggtgatagggcaactggcaaacactacggggcctcctcttgcgacggatgtaagggctttttccggcgctcggtacgtaaaaatcatatgtattcatgccgatttagcagacaatgtgtggtcgataaggacaaaaggaaccagtgccggtactgtcgcctcaagaagtgcttcagagctggtatgaaaaaggaagcagtgcagaatgagagggatcggattagtacccgccgatcctcttatgaagacagctccctgccgtcaataaacgcccttctgcaggctgaggttttgagtagacaaatcacaagccccgtgtctgggattaatggagatatcagggccaaaaagattgcgtccatcgcagacgtctgtgagtcaatgaaagaacagctcctggtgctggtagagtgggccaagtacatacctgctttttgcgaactcccattagatgaccaggttgccctgcttcgggcacacgctggcgagcatttgctgctaggcgccaccaagcgtagcatggtgttcaaagacgtcctcctgcttgggaacgattatatcgtgccccgccactgtcctgagctggcggaaatgagtagagtgtctattaggatcttggacgagctcgtcctgccatttcaggaattacaaattgatgacaatgagtacgcctacctgaaggcaatcatattctttgatcccgacgctaaaggactctccgatcctggtaagattaaacggcttcgaagccaggttcaggtgtcgctggaagactatatcaacgatcgccagtacgactctagaggcaggttcggggagttgctactgctcctgccaactcttcaatccattacatggcagatgatcgagcagatccaatttattaagctgttcggaatggccaaaatagataatttgctccaggaaatgctgttaggcggttcaccgagtgacgctccccatgcccaccaccctctgcatccacacctaatgcaggagcatatggggaccaacgtaatcgtggcaaatacgatgcccactcacctcagcaacggacagatgtgcgaatggcctcggccacgcggccaagccgctacccccgagacaccgcagccttctcccccaggcgggtccggaagcgaaccttatagactgcttcccggtgcggtcgcaactattgtgaagccattgtcagccatcccccagcctaccataacaaggcaggaggttatttgaggactagtccctgttcccagagcccacttttttttctttttttgaaataaaatagcctgtctttcagatctcaaaggctcttttcagagccaccaaaaaaaaaaaaaaaaaaaaaaaaaaaaaaaaaaaaaaaaaaaaaaaaaaaaaaaaaaaaaaaaaaaaaaaaaaaaaaaaaaaaaaaaaaaaaaaaaaaaa

SEQ ID NO: 3074 - RNA, 1697 nt, synthetic construct
  misc_feature 1..1697: note = mRNA a-1 (hSL-A100) (opt3) from Homo sapiens__NP_000448.3__HNF4A(1-474)(K458R)
  source 1..1697: mol_type = other RNA
aggagagtcccgcagtcggcgtccagcggctctgcttgttcgtgtgtgtgtcgttgcaggccttattcaagcttaccatgagactgagcaagaccctcgtggacatggatatggccgactactccgctgcacttgatcccgcctatacaactctggagttcgaaaacgtccaggttttgacgatgggcaatgacacctctccttcagaggggacaaacttaaatgcgccaaacagtctgggagtgagcgctctatgcgccatctgtggtgatagggcaactggcaaacactacggggcctcctcttgcgacggatgtaagggctttttccggcgctcggtacgtaaaaatcatatgtattcatgccgatttagcagacaatgtgtggtcgataaggacaaaaggaaccagtgccggtactgtcgcctcaagaagtgcttcagagctggtatgaaaaaggaagcagtgcagaatgagagggatcggattagtacccgccgatcctcttatgaagacagctccctgccgtcaataaacgcccttctgcaggctgaggttttgagtagacaaatcacaagccccgtgtctgggattaatggagatatcagggccaaaaagattgcgtccatcgcagacgtctgtgagtcaatgaaagaacagctcctggtgctggtagagtgggccaagtacatacctgctttttgcgaactcccattagatgaccaggttgccctgcttcgggcacacgctggcgagcatttgctgctaggcgccaccaagcgtagcatggtgttcaaagacgtcctcctgcttgggaacgattatatcgtgccccgccactgtcctgagctggcggaaatgagtagagtgtctattaggatcttggacgagctcgtcctgccatttcaggaattacaaattgatgacaatgagtacgcctacctgaaggcaatcatattctttgatcccgacgctaaaggactctccgatcctggtaagattaaacggcttcgaagccaggttcaggtgtcgctggaagactatatcaacgatcgccagtacgactctagaggcaggttcggggagttgctactgctcctgccaactcttcaatccattacatggcagatgatcgagcagatccaatttattaagctgttcggaatggccaaaatagataatttgctccaggaaatgctgttaggcggttcaccgagtgacgctccccatgcccaccaccctctgcatccacacctaatgcaggagcatatggggaccaacgtaatcgtggcaaatacgatgcccactcacctcagcaacggacagatgtgcgaatggcctcggccacgcggccaagccgctacccccgagacaccgcagccttctcccccaggcgggtccggaagcgaaccttataagctgcttcccggtgcggtcgcaactattgtgagaccattgtcagccatcccccagcctaccataacaaagcaggaggttatttgaggactagtccctgttcccagagcccacttttttttctttttttgaaataaaatagcctgtctttcagatctcaaaggctcttttcagagccaccaaaaaaaaaaaaaaaaaaaaaaaaaaaaaaaaaaaaaaaaaaaaaaaaaaaaaaaaaaaaaaaaaaaaaaaaaaaaaaaaaaaaaaaaaaaaaaaaaaaaa

SEQ ID NO: 3075 - RNA, 1697 nt, synthetic construct
  misc_feature 1..1697: note = mRNA a-1 (hSL-A100) (opt3) from Homo sapiens__NP_000448.3__HNF4A(1-474)(K106R_K108R_K126R_K127R)
  source 1..1697: mol_type = other RNA
aggagagtcccgcagtcggcgtccagcggctctgcttgttcgtgtgtgtgtcgttgcaggccttattcaagcttaccatgagactgagcaagaccctcgtggacatggatatggccgactactccgctgcacttgatcccgcctatacaactctggagttcgaaaacgtccaggttttgacgatgggcaatgacacctctccttcagaggggacaaacttaaatgcgccaaacagtctgggagtgagcgctctatgcgccatctgtggtgatagggcaactggcaaacactacggggcctcctcttgcgacggatgtaagggctttttccggcgctcggtacgtaaaaatcatatgtattcatgccgatttagcagacaatgtgtggtcgatagggaccggcgcaaccagtgcagatactgtaggctcaagaaatgcttccgggctggtatgcgccgagaagcagtgcagaatgagagagataggattagtacccggcgttcctcttatgaagacagctccctgccgtcaataaacgcccttctgcaggctgaggttttgagtcgccaaatcacaagccccgtgtctgggattaatggagatatcagagccaagaagattgcgtccatcgcagacgtctgtgagtcaatgaaagaacagctcctggtgctggtagagtgggccaagtacatacctgctttttgcgaactcccattagatgaccaggttgccctgcttagggcacacgctggcgagcatttgctgctaggcgccaccaaacggagcatggtgttcaaggacgtcctcctgcttgggaacgattatatcgtgccccgacactgtcctgagctggcggaaatgagtcgcgtgtctattagaatcttggacgagctcgtcctgccatttcaggaattacaaattgatgacaatgagtacgcctacctgaaagcaatcatattctttgatcccgacgctaagggactctccgatcctggtaagattaaaaggcttcggagccaggttcaggtgtcgctggaagactatatcaacgatcgccagtacgactctagaggcaggttcggggagttgctactgctcctgccaactcttcaatccattacatggcagatgatcgagcagatccaatttattaagctgttcggaatggccaaaatagataatttgctccaggaaatgctgttaggcggttcaccgagtgacgctccccatgcccaccaccctctgcatccacacctaatgcaggagcatatggggaccaacgtaatcgtggcaaatacgatgcccactcacctcagcaacggacagatgtgcgaatggcctcgtccacggggccaagccgctacccccgagacaccgcagccttctcccccaggcgggtccggaagcgaaccttataagctgcttcccggtgcggtcgcaactattgtgaaaccattgtcagccatcccccagcctaccataacaaagcaggaggttatttgaggactagtccctgttcccagagcccacttttttttctttttttgaaataaaatagcctgtctttcagatctcaaaggctcttttcagagccaccaaaaaaaaaaaaaaaaaaaaaaaaaaaaaaaaaaaaaaaaaaaaaaaaaaaaaaaaaaaaaaaaaaaaaaaaaaaaaaaaaaaaaaaaaaaaaaaaaaaaa

SEQ ID NO: 3076 - RNA, 1697 nt, synthetic construct
  misc_feature 1..1697: note = mRNA a-1 (hSL-A100) (opt3) from Homo sapiens__NP_000448.3__HNF4A(1-474)(E285Q)
  source 1..1697: mol_type = other RNA
aggagagtcccgcagtcggcgtccagcggctctgcttgttcgtgtgtgtgtcgttgcaggccttattcaagcttaccatgagactgagcaagaccctcgtggacatggatatggccgactactccgctgcacttgatcccgcctatacaactctggagttcgaaaacgtccaggttttgacgatgggcaatgacacctctccttcagaggggacaaacttaaatgcgccaaacagtctgggagtgagcgctctatgcgccatctgtggtgatagggcaactggcaaacactacggggcctcctcttgcgacggatgtaagggctttttccggcgctcggtacgtaaaaatcatatgtattcatgccgatttagcagacaatgtgtggtcgataaggacaaaaggaaccagtgccggtactgtcgcctcaagaagtgcttcagagctggtatgaaaaaggaagcagtgcagaatgagagggatcggattagtacccgccgatcctcttatgaagacagctccctgccgtcaataaacgcccttctgcaggctgaggttttgagtagacaaatcacaagccccgtgtctgggattaatggagatatcagggccaaaaagattgcgtccatcgcagacgtctgtgagtcaatgaaagaacagctcctggtgctggtagagtgggccaagtacatacctgctttttgcgaactcccattagatgaccaggttgccctgcttcgggcacacgctggcgagcatttgctgctaggcgccaccaagcgtagcatggtgttcaaagacgtcctcctgcttgggaacgattatatcgtgccccgccactgtcctgagctggcggaaatgagtagagtgtctattaggatcttggacgagctcgtcctgccatttcaggaattacaaattgatgacaatcagtacgcctacctgaaggcaatcatattctttgatcccgacgctaaaggactctccgatcctggtaagattaaacggcttcgaagccaggttcaggtgtcgctggaggactatatcaacgatcgccaatacgactctagaggcaggttcggggaattgctactgctcctgccaactcttcagtccattacatggcagatgatcgagcaaatccagtttattaagctgttcggaatggccaaaatagataatttgctccaggagatgctgttaggcggttcaccgagtgacgctccccatgcccaccaccctctgcatccacacctaatgcaggaacatatggggaccaacgtaatcgtggcaaatacgatgcccactcacctcagcaacggacaaatgtgcgagtggcctcggccacgcggccaggccgctacccccgaaacaccgcagccttctcccccaggcgggtccggaagcgagccttataagctgcttcccggtgcggtcgcaactattgtgaagccattgtcagccatcccccagcctaccataacaaaacaagaagttatttgaggactagtccctgttcccagagcccacttttttttctttttttgaaataaaatagcctgtctttcagatctcaaaggctcttttcagagccaccaaaaaaaaaaaaaaaaaaaaaaaaaaaaaaaaaaaaaaaaaaaaaaaaaaaaaaaaaaaaaaaaaaaaaaaaaaaaaaaaaaaaaaaaaaaaaaaaaaaaa

SEQ ID NO: 3077 - RNA, 1697 nt, synthetic construct
  misc_feature 1..1697: note = mRNA a-1 (hSL-A100) (opt3) from Homo sapiens__NP_000448.3__HNF4A(1-474)(T166E)
  source 1..1697: mol_type = other RNA
aggagagtcccgcagtcggcgtccagcggctctgcttgttcgtgtgtgtgtcgttgcaggccttattcaagcttaccatgagactgagcaagaccctcgtggacatggatatggccgactactccgctgcacttgatcccgcctatacaactctggagttcgaaaacgtccaggttttgacgatgggcaatgacacctctccttcagaggggacaaacttaaatgcgccaaacagtctgggagtgagcgctctatgcgccatctgtggtgatagggcaactggcaaacactacggggcctcctcttgcgacggatgtaagggctttttccggcgctcggtacgtaaaaatcatatgtattcatgccgatttagcagacaatgtgtggtcgataaggacaaaaggaaccagtgccggtactgtcgcctcaagaagtgcttcagagctggtatgaaaaaggaagcagtgcagaatgagagggatcggattagtacccgccgatcctcttatgaagacagctccctgccgtcaataaacgcccttctgcaggctgaggttttgagtagacaaatcgagagccccgtgtctgggattaatggagatatcagggccaaaaagattgcgtccatcgcagacgtctgtgaatcaatgaaagagcagctcctggtgctggtagaatgggccaagtacatacctgctttttgcgagctcccattagatgaccaggttgccctgcttcgggcacacgctggcgagcatttgctgctaggcgccacaaagcgtagcatggtgttcaaagacgtcctcctgcttgggaacgattatatcgtgccccgccactgtcctgaactggcggagatgagtagagtgtctattaggatcttggacgaactcgtcctgccatttcaggagttacaaattgatgacaatgaatacgcctacctgaaggcaatcatattctttgatcccgacgctaaaggactctccgatcctggtaagattaaacggcttcgaagccaggttcaggtgtcgctggaggactatatcaacgatcgccagtacgactctagaggcaggttcggggagttgctactgctcctgccaacccttcaatccattacttggcagatgatcgaacagatccaatttattaagctgttcggaatggccaaaatagataatttgctccaggagatgctgttaggcggttcaccgagtgacgctccccatgcccaccaccctctgcatccacacctaatgcaggaacatatggggacaaacgtaatcgtggcaaataccatgcccacgcacctcagcaacggacagatgtgcgagtggcctcggccacgcggccaagccgctactcccgaaaccccgcagccttctcccccaggcgggtccggaagcgagccttataagctgcttcccggtgcggtcgcaacaattgtgaagccattgtcagccatcccccagcctactataaccaaacaggaggttatttgaggactagtccctgttcccagagcccacttttttttctttttttgaaataaaatagcctgtctttcagatctcaaaggctcttttcagagccaccaaaaaaaaaaaaaaaaaaaaaaaaaaaaaaaaaaaaaaaaaaaaaaaaaaaaaaaaaaaaaaaaaaaaaaaaaaaaaaaaaaaaaaaaaaaaaaaaaaaaa

SEQ ID NO: 3078 - RNA, 1697 nt, synthetic construct
  misc_feature 1..1697: note = mRNA a-1 (hSL-A100) (opt3) from Homo sapiens__NP_000448.3__HNF4A(1-474)(S148A)
  source 1..1697: mol_type = other RNA
aggagagtcccgcagtcggcgtccagcggctctgcttgttcgtgtgtgtgtcgttgcaggccttattcaagcttaccatgagactgagcaagaccctcgtggacatggatatggccgactactccgctgcacttgatcccgcctatacaactctggagttcgaaaacgtccaggttttgacgatgggcaatgacacctctccttcagaggggacaaacttaaatgcgccaaacagtctgggagtgagcgctctatgcgccatctgtggtgatagggcaactggcaaacactacggggcctcctcttgcgacggatgtaagggctttttccggcgctcggtacgtaaaaatcatatgtattcatgccgatttagcagacaatgtgtggtcgataaggacaaaaggaaccagtgccggtactgtcgcctcaagaagtgcttcagagctggtatgaaaaaggaagcagtgcagaatgagagggatcggattagtacccgccgatcctcttatgaagacagcgccctgccgtccataaacgcccttctgcaggccgaggttttgtcaagacaaatcacaagtcccgtgagcgggattaatggagatatcagggcgaaaaagattgcatctatcgccgacgtctgtgagtccatgaaagaacagctcctggtgctggtagagtgggctaagtacatacctgccttttgcgaactcccattagatgaccaggttgcactgcttcgggctcacgccggcgagcatttgctgctaggcgcgaccaagcgttcaatggtgttcaaagacgtcctcctgcttgggaacgattatatcgtgccccgccactgtcctgagctggccgaaatgagcagagtgagtattaggatcttggacgagctcgtcctgccatttcaggaattacaaattgatgacaatgagtacgcatacctgaaggctatcatattctttgatcccgacgccaaaggactctctgatcctggtaagattaaacggcttcgatcccaggttcaggtgagcctggaagactatatcaacgatcgccagtacgactcgagaggcaggttcggggagttgctactgctcctgccaactcttcaatctattacatggcagatgatcgagcagatccaatttattaagctgttcggaatggctaaaatagataatttgctccaggaaatgctgttaggcggttccccgtcagacgctccccatgcacaccaccctctgcatccacacctaatgcaggagcatatggggaccaacgtaatcgtggccaatacgatgcccactcacctcagtaacggacagatgtgcgaatggcctcggccacgcggccaagctgcgacccccgagacaccgcagcctagcccacccggcgggtccggatctgaaccttataagctgcttcccggtgcagtcgccactattgtgaagccattgagcgctatcccccagcctaccataacaaaacaggaggttatttgaggactagtccctgttcccagagcccacttttttttctttttttgaaataaaatagcctgtctttcagatctcaaaggctcttttcagagccaccaaaaaaaaaaaaaaaaaaaaaaaaaaaaaaaaaaaaaaaaaaaaaaaaaaaaaaaaaaaaaaaaaaaaaaaaaaaaaaaaaaaaaaaaaaaaaaaaaaaaa

SEQ ID NO: 3079 - RNA, 1697 nt, synthetic construct
  misc_feature 1..1697: note = mRNA a-1 (hSL-A100) (opt3) from Homo sapiens__NP_000448.3__HNF4A(1-474)(S148E)
  source 1..1697: mol_type = other RNA
aggagagtcccgcagtcggcgtccagcggctctgcttgttcgtgtgtgtgtcgttgcaggccttattcaagcttaccatgagactgagcaagaccctcgtggacatggatatggccgactactccgctgcacttgatcccgcctatacaactctggagttcgaaaacgtccaggttttgacgatgggcaatgacacctctccttcagaggggacaaacttaaatgcgccaaacagtctgggagtgagcgctctatgcgccatctgtggtgatagggcaactggcaaacactacggggcctcctcttgcgacggatgtaagggctttttccggcgctcggtacgtaaaaatcatatgtattcatgccgatttagcagacaatgtgtggtcgataaggacaaaaggaaccagtgccggtactgtcgcctcaagaagtgcttcagagctggtatgaaaaaggaagcagtgcagaatgagagggatcggattagtacccgccgatcctcttatgaagacagcgagctgccgtccataaacgcccttctgcaggctgaggttttgtcaagacaaatcacaagtcccgtgagcgggattaatggagatatcagggccaaaaagattgcgtctatcgcagacgtctgtgaatccatgaaagagcagctcctggtgctggtagaatgggccaagtacatacctgctttttgcgagctcccattagatgaccaggttgccctgcttcgggcacacgctggcgagcatttgctgctaggcgccaccaagcgttcaatggtgttcaaagacgtcctcctgcttgggaacgattatatcgtgccccgccactgtcctgaactggcggagatgagcagagtgagtattaggatcttggacgaactcgtcctgccatttcaggagttacaaattgatgacaatgaatacgcctacctgaaggcaatcatattctttgatcccgacgctaaaggactctctgatcctggtaagattaaacggcttcgatcccaggttcaggtgagcctggaggactatatcaacgatcgccagtacgactcgagaggcaggttcggggagttgctactgctcctgccaactcttcaatctattacatggcagatgatcgaacagatccaatttattaagctgttcggaatggccaaaatagataatttgctccaggagatgctgttaggcggttccccgtcagacgctccccatgcccaccaccctctgcatccacacctaatgcaggaacatatggggaccaacgtaatcgtggcaaatacgatgcccactcacctcagtaacggacagatgtgcgagtggcctcggccacgcggccaagccgctacccccgaaacaccgcagcctagcccacccggcgggtccggatctgagccttataagctgcttcccggtgcggtcgcaactattgtgaagccattgagcgccatcccccagcctaccataacaaaacaggaggttatttgaggactagtccctgttcccagagcccacttttttttctttttttgaaataaaatagcctgtctttcagatctcaaaggctcttttcagagccaccaaaaaaaaaaaaaaaaaaaaaaaaaaaaaaaaaaaaaaaaaaaaaaaaaaaaaaaaaaaaaaaaaaaaaaaaaaaaaaaaaaaaaaaaaaaaaaaaaaaaa

SEQ ID NO: 3080 - RNA, 1697 nt, synthetic construct
  misc_feature 1..1697: note = mRNA a-1 (hSL-A100) (opt3) from Homo sapiens__NP_000448.3__HNF4A(1-474)(S183A)
  source 1..1697: mol_type = other RNA
aggagagtcccgcagtcggcgtccagcggctctgcttgttcgtgtgtgtgtcgttgcaggccttattcaagcttaccatgagactgagcaagaccctcgtggacatggatatggccgactactccgctgcacttgatcccgcctatacaactctggagttcgaaaacgtccaggttttgacgatgggcaatgacacctctccttcagaggggacaaacttaaatgcgccaaacagtctgggagtgagcgctctatgcgccatctgtggtgatagggcaactggcaaacactacggggcctcctcttgcgacggatgtaagggctttttccggcgctcggtacgtaaaaatcatatgtattcatgccgatttagcagacaatgtgtggtcgataaggacaaaaggaaccagtgccggtactgtcgcctcaagaagtgcttcagagctggtatgaaaaaggaagcagtgcagaatgagagggatcggattagtacccgccgatcctcttatgaagacagctccctgccgtcaataaacgcccttctgcaggctgaggttttgagtagacaaatcacaagccccgtgtctgggattaatggagatatcagggccaaaaagattgcggcaatcgccgacgtctgtgagtccatgaaagaacagctcctggtgctggtagagtgggctaagtacatacctgccttttgcgaactcccattagatgaccaggttgcactgcttcgggctcacgccggcgagcatttgctgctaggcgcgaccaagcgttcaatggtgttcaaagacgtcctcctgcttgggaacgattatatcgtgccccgccactgtcctgagctggccgaaatgagcagagtgagtattaggatcttggacgagctcgtcctgccatttcaggaattacaaattgatgacaatgagtacgcatacctgaaggctatcatattctttgatcccgacgccaaaggactctctgatcctggtaagattaaacggcttcgatcccaggttcaggtgagcctggaagactatatcaacgatcgccagtacgactcgagaggcaggttcggggagttgctactgctcctgccaactcttcaatctattacatggcagatgatcgagcagatccaatttattaagctgttcggaatggctaaaatagataatttgctccaggaaatgctgttaggcggttccccgtcagacgcaccccatgcccaccaccctctgcatccacacctaatgcaggagcatatggggaccaacgtaatcgtggccaatacgatgcccactcacctcagtaacggacagatgtgcgaatggcctcggccacgcggccaagctgcgacccccgagacaccgcagcctagcccacccggcgggtccggatctgaaccttataagctgcttcccggtgcagtcgccactattgtgaagccattgagcgctatcccccagcctaccataacaaaacaggaggttatttgaggactagtccctgttcccagagcccacttttttttctttttttgaaataaaatagcctgtctttcagatctcaaaggctcttttcagagccaccaaaaaaaaaaaaaaaaaaaaaaaaaaaaaaaaaaaaaaaaaaaaaaaaaaaaaaaaaaaaaaaaaaaaaaaaaaaaaaaaaaaaaaaaaaaaaaaaaaaaa

SEQ ID NO: 3081 - RNA, 1697 nt, synthetic construct
  misc_feature 1..1697: note = mRNA a-1 (hSL-A100) (opt3) from Homo sapiens__NP_000448.3__HNF4A(1-474)(S183E)
  source 1..1697: mol_type = other RNA
aggagagtcccgcagtcggcgtccagcggctctgcttgttcgtgtgtgtgtcgttgcaggccttattcaagcttaccatgagactgagcaagaccctcgtggacatggatatggccgactactccgctgcacttgatcccgcctatacaactctggagttcgaaaacgtccaggttttgacgatgggcaatgacacctctccttcagaggggacaaacttaaatgcgccaaacagtctgggagtgagcgctctatgcgccatctgtggtgatagggcaactggcaaacactacggggcctcctcttgcgacggatgtaagggctttttccggcgctcggtacgtaaaaatcatatgtattcatgccgatttagcagacaatgtgtggtcgataaggacaaaaggaaccagtgccggtactgtcgcctcaagaagtgcttcagagctggtatgaaaaaggaagcagtgcagaatgagagggatcggattagtacccgccgatcctcttatgaagacagctccctgccgtcaataaacgcccttctgcaggctgaggttttgagtagacaaatcacaagccccgtgtctgggattaatggagatatcagggccaaaaagattgcggagatcgcagacgtctgtgaatccatgaaagagcagctcctggtgctggtagaatgggccaagtacatacctgctttttgcgagctcccattagatgaccaggttgccctgcttcgggcacacgctggcgagcatttgctgctaggcgccaccaagcgttcaatggtgttcaaagacgtcctcctgcttgggaacgattatatcgtgccccgccactgtcctgaactggcggagatgagcagagtgagtattaggatcttggacgaactcgtcctgccatttcaggagttacaaattgatgacaatgaatacgcctacctgaaggcaatcatattctttgatcccgacgctaaaggactctctgatcctggtaagattaaacggcttcgatcccaggttcaggtgagcctggaggactatatcaacgatcgccagtacgactcgagaggcaggttcggggagttgctactgctcctgccaactcttcaatctattacatggcagatgatcgaacagatccaatttattaagctgttcggaatggccaaaatagataatttgctccaggagatgctgttaggcggttccccgtcagacgctccccatgcccaccaccctctgcatccacacctaatgcaggaacatatggggaccaacgtaatcgtggcaaatacgatgcccactcacctcagtaacggacagatgtgcgagtggcctcggccacgcggccaagccgctacccccgaaacaccgcagcctagcccacccggcgggtccggatctgagccttataagctgcttcccggtgcggtcgcaactattgtgaagccattgagcgccatcccccagcctaccataacaaaacaggaggttatttgaggactagtccctgttcccagagcccacttttttttctttttttgaaataaaatagcctgtctttcagatctcaaaggctcttttcagagccaccaaaaaaaaaaaaaaaaaaaaaaaaaaaaaaaaaaaaaaaaaaaaaaaaaaaaaaaaaaaaaaaaaaaaaaaaaaaaaaaaaaaaaaaaaaaaaaaaaaaaa

SEQ ID NO: 3082 - RNA, 1697 nt, synthetic construct
  misc_feature 1..1697: note = mRNA a-1 (hSL-A100) (opt3) from Homo sapiens__NP_000448.3__HNF4A(1-474)(S461A)
  source 1..1697: mol_type = other RNA
aggagagtcccgcagtcggcgtccagcggctctgcttgttcgtgtgtgtgtcgttgcaggccttattcaagcttaccatgagactgagcaagaccctcgtggacatggatatggccgactactccgctgcacttgatcccgcctatacaactctggagttcgaaaacgtccaggttttgacgatgggcaatgacacctctccttcagaggggacaaacttaaatgcgccaaacagtctgggagtgagcgctctatgcgccatctgtggtgatagggcaactggcaaacactacggggcctcctcttgcgacggatgtaagggctttttccggcgctcggtacgtaaaaatcatatgtattcatgccgatttagcagacaatgtgtggtcgataaggacaaaaggaaccagtgccggtactgtcgcctcaagaagtgcttcagagctggtatgaaaaaggaagcagtgcagaatgagagggatcggattagtacccgccgatcctcttatgaagacagctccctgccgtcaataaacgcccttctgcaggctgaggttttgagtagacaaatcacaagccccgtgtctgggattaatggagatatcagggccaaaaagattgcgtccatcgcagacgtctgtgagtcaatgaaagaacagctcctggtgctggtagagtgggccaagtacatacctgctttttgcgaactcccattagatgaccaggttgccctgcttcgggcacacgctggcgagcatttgctgctaggcgccaccaagcgtagcatggtgttcaaagacgtcctcctgcttgggaacgattatatcgtgccccgccactgtcctgagctggcggaaatgagtagagtgtctattaggatcttggacgagctcgtcctgccatttcaggaattacaaattgatgacaatgagtacgcctacctgaaggcaatcatattctttgatcccgacgctaaaggactctccgatcctggtaagattaaacggcttcgaagccaggttcaggtgtcgctggaagactatatcaacgatcgccagtacgactctagaggcaggttcggggagttgctactgctcctgccaactcttcaatccattacatggcagatgatcgagcagatccaatttattaagctgttcggaatggccaaaatagataatttgctccaggaaatgctgttaggcggttcaccgagtgacgctccccatgcccaccaccctctgcatccacacctaatgcaggagcatatggggaccaacgtaatcgtggcaaatacgatgcccactcacctcagcaacggacagatgtgcgaatggcctcggccacgcggccaagccgctacccccgagacaccgcagccttctcccccaggcgggtccggaagcgaaccttataagctgcttcccggtgcggtcgcaactattgtgaagccattggccgctatcccccagcctaccataacaaaacaggaggttatttgaggactagtccctgttcccagagcccacttttttttctttttttgaaataaaatagcctgtctttcagatctcaaaggctcttttcagagccaccaaaaaaaaaaaaaaaaaaaaaaaaaaaaaaaaaaaaaaaaaaaaaaaaaaaaaaaaaaaaaaaaaaaaaaaaaaaaaaaaaaaaaaaaaaaaaaaaaaaaa

SEQ ID NO: 3083 - RNA, 1697 nt, synthetic construct
  misc_feature 1..1697: note = mRNA a-1 (hSL-A100) (opt3) from Homo sapiens__NP_000448.3__HNF4A(1-474)(S461E)
  source 1..1697: mol_type = other RNA
aggagagtcccgcagtcggcgtccagcggctctgcttgttcgtgtgtgtgtcgttgcaggccttattcaagcttaccatgagactgagcaagaccctcgtggacatggatatggccgactactccgctgcacttgatcccgcctatacaactctggagttcgaaaacgtccaggttttgacgatgggcaatgacacctctccttcagaggggacaaacttaaatgcgccaaacagtctgggagtgagcgctctatgcgccatctgtggtgatagggcaactggcaaacactacggggcctcctcttgcgacggatgtaagggctttttccggcgctcggtacgtaaaaatcatatgtattcatgccgatttagcagacaatgtgtggtcgataaggacaaaaggaaccagtgccggtactgtcgcctcaagaagtgcttcagagctggtatgaaaaaggaagcagtgcagaatgagagggatcggattagtacccgccgatcctcttatgaagacagctccctgccgtcaataaacgcccttctgcaggctgaggttttgagtagacaaatcacaagccccgtgtctgggattaatggagatatcagggccaaaaagattgcgtccatcgcagacgtctgtgagtcaatgaaagaacagctcctggtgctggtagagtgggccaagtacatacctgctttttgcgaactcccattagatgaccaggttgccctgcttcgggcacacgctggcgagcatttgctgctaggcgccaccaagcgtagcatggtgttcaaagacgtcctcctgcttgggaacgattatatcgtgccccgccactgtcctgagctggcggaaatgagtagagtgtctattaggatcttggacgagctcgtcctgccatttcaggaattacaaattgatgacaatgagtacgcctacctgaaggcaatcatattctttgatcccgacgctaaaggactctccgatcctggtaagattaaacggcttcgaagccaggttcaggtgtcgctggaagactatatcaacgatcgccagtacgactctagaggcaggttcggggagttgctactgctcctgccaactcttcaatccattacatggcagatgatcgagcagatccaatttattaagctgttcggaatggccaaaatagataatttgctccaggaaatgctgttaggcggttcaccgagtgacgctccccatgcccaccaccctctgcatccacacctaatgcaggagcatatggggaccaacgtaatcgtggcaaatacgatgcccactcacctcagcaacggacagatgtgcgaatggcctcggccacgcggccaagccgctacccccgagacaccgcagccttctcccccaggcgggtccggaagcgaaccttataagctgcttcccggtgcggtcgcaactattgtgaagccattggaggccatcccccagcctaccataacaaaacaggaggttatttgaggactagtccctgttcccagagcccacttttttttctttttttgaaataaaatagcctgtctttcagatctcaaaggctcttttcagagccaccaaaaaaaaaaaaaaaaaaaaaaaaaaaaaaaaaaaaaaaaaaaaaaaaaaaaaaaaaaaaaaaaaaaaaaaaaaaaaaaaaaaaaaaaaaaaaaaaaaaaa

SEQ ID NO: 3084 - RNA, 1697 nt, synthetic construct
  misc_feature 1..1697: note = mRNA a-1 (hSL-A100) (opt3) from Homo sapiens__NP_000448.3__HNF4A(1-474)(S142A_S143A_S313A)
  source 1..1697: mol_type = other RNA
aggagagtcccgcagtcggcgtccagcggctctgcttgttcgtgtgtgtgtcgttgcaggccttattcaagcttaccatgagactgagcaagaccctcgtggacatggatatggccgactactccgctgcacttgatcccgcctatacaactctggagttcgaaaacgtccaggttttgacgatgggcaatgacacctctccttcagaggggacaaacttaaatgcgccaaacagtctgggagtgagcgctctatgcgccatctgtggtgatagggcaactggcaaacactacggggcctcctcttgcgacggatgtaagggctttttccggcgctcggtacgtaaaaatcatatgtattcatgccgatttagcagacaatgtgtggtcgataaggacaaaaggaaccagtgccggtactgtcgcctcaagaagtgcttcagagctggtatgaaaaaggaagcagtgcagaatgagagggatcggattagtacccgccgagccgcttatgaagactcctctctgccgagcataaacgcccttctgcaggcggaggttttgtccagacaaatcacatcacccgtgagtgggattaatggagatatcagggccaaaaagattgccagcatcgctgacgtctgtgagtctatgaaagaacagctcctggtgctggtagagtgggccaagtacatacctgcattttgcgaactcccattagatgaccaggttgctctgcttcgggcccacgcgggcgagcatttgctgctaggcgccaccaagcgttccatggtgttcaaagacgtcctcctgcttgggaacgattatatcgtgccccgccactgtcctgagctggcagaaatgtcaagagtgagcattaggatcttggacgagctcgtcctgccatttcaggaattacaaattgatgacaatgagtacgcttacctgaaggccatcatattctttgatcccgacgctaaaggactcagtgatcctggtaagattaaacggcttcgagcccaggttcaggtgtctctggaagactatatcaacgatcgccagtacgactccagaggcaggttcggggagttgctactgctcctgccaactcttcaaagcattacatggcagatgatcgagcagatccaatttattaagctgttcggaatggcaaaaatagataatttgctccaggaaatgctgttaggcggttcgccgtctgacgcaccccatgctcaccaccctctgcatccacacctaatgcaggagcatatggggaccaacgtaatcgtggcgaatacgatgcccactcacctctccaacggacagatgtgcgaatggcctcggccacgcggccaagcagccacccccgagacaccgcagccttcacccccaggcgggagtggaagcgaaccttataagctgcttcccggtgctgtcgccactattgtgaagccattgtccgcaatcccccagcctaccataacaaaacaggaggttatttgaggactagtccctgttcccagagcccacttttttttctttttttgaaataaaatagcctgtctttcagatctcaaaggctcttttcagagccaccaaaaaaaaaaaaaaaaaaaaaaaaaaaaaaaaaaaaaaaaaaaaaaaaaaaaaaaaaaaaaaaaaaaaaaaaaaaaaaaaaaaaaaaaaaaaaaaaaaaaa

SEQ ID NO: 3085 - RNA, 1697 nt, synthetic construct
  misc_feature 1..1697: note = mRNA a-1 (hSL-A100) (opt3) from Homo sapiens__NP_000448.3__HNF4A(1-474)(S142A_S143A_S313A_K458R)
  source 1..1697: mol_type = other RNA
aggagagtcccgcagtcggcgtccagcggctctgcttgttcgtgtgtgtgtcgttgcaggccttattcaagcttaccatgagactgagcaagaccctcgtggacatggatatggccgactactccgctgcacttgatcccgcctatacaactctggagttcgaaaacgtccaggttttgacgatgggcaatgacacctctccttcagaggggacaaacttaaatgcgccaaacagtctgggagtgagcgctctatgcgccatctgtggtgatagggcaactggcaaacactacggggcctcctcttgcgacggatgtaagggctttttccggcgctcggtacgtaaaaatcatatgtattcatgccgatttagcagacaatgtgtggtcgataaggacaaaaggaaccagtgccggtactgtcgcctcaagaagtgcttcagagctggtatgaaaaaggaagcagtgcagaatgagagggatcggattagtacccgccgagccgcttatgaagactcctctctgccgagcataaacgcccttctgcaggcggaggttttgtccagacaaatcacatcacccgtgagtgggattaatggagatatcagggccaaaaagattgccagcatcgctgacgtctgtgagtctatgaaagaacagctcctggtgctggtagagtgggccaagtacatacctgcattttgcgaactcccattagatgaccaggttgctctgcttcgggcccacgcgggcgagcatttgctgctaggcgccaccaagcgttccatggtgttcaaagacgtcctcctgcttgggaacgattatatcgtgccccgccactgtcctgagctggcagaaatgtcaagagtgagcattaggatcttggacgagctcgtcctgccatttcaggaattacaaattgatgacaatgagtacgcttacctgaaggccatcatattctttgatcccgacgctaaaggactcagtgatcctggtaagattaaacggcttcgagcccaggttcaggtgtctctggaagactatatcaacgatcgccagtacgactccagaggcaggttcggggagttgctactgctcctgccaactcttcaaagcattacatggcagatgatcgagcagatccaatttattaagctgttcggaatggcaaaaatagataatttgctccaggaaatgctgttaggcggttcgccgtctgacgcaccccatgctcaccaccctctgcatccacacctaatgcaggagcatatggggaccaacgtaatcgtggcgaatacgatgcccactcacctctccaacggacagatgtgcgaatggcctcggccacgcggccaagcagccacccccgagacaccgcagccttcacccccaggcgggagtggaagcgaaccttataagctgcttcccggtgctgtcgccactattgtgagaccattgtccgcaatcccccagcctaccataacaaagcaggaggttatttgaggactagtccctgttcccagagcccacttttttttctttttttgaaataaaatagcctgtctttcagatctcaaaggctcttttcagagccaccaaaaaaaaaaaaaaaaaaaaaaaaaaaaaaaaaaaaaaaaaaaaaaaaaaaaaaaaaaaaaaaaaaaaaaaaaaaaaaaaaaaaaaaaaaaaaaaaaaaaa

SEQ ID NO: 3086 - RNA, 1697 nt, synthetic construct
  misc_feature 1..1697: note = mRNA a-1 (hSL-A100) (opt3) from Homo sapiens__NP_000448.3__HNF4A(1-474)(S142A_S143A_S167A_S313A_ S378A_T429A_T432A_S436A_K458R)
  source 1..1697: mol_type = other RNA
aggagagtcccgcagtcggcgtccagcggctctgcttgttcgtgtgtgtgtcgttgcaggccttattcaagcttaccatgagactgagcaagaccctcgtggacatggatatggccgactactccgctgcacttgatcccgcctatacaactctggagttcgaaaacgtccaggttttgacgatgggcaatgacacctctccttcagaggggacaaacttaaatgcgccaaacagtctgggagtgagcgctctatgcgccatctgtggtgatagggcaactggcaaacactacggggcctcctcttgcgacggatgtaagggctttttccggcgctcggtacgtaaaaatcatatgtattcatgccgatttagcagacaatgtgtggtcgataaggacaaaaggaaccagtgccggtactgtcgcctcaagaagtgcttcagagctggtatgaaaaaggaagcagtgcagaatgagagggatcggattagtacccgccgagccgcttatgaagactcctctctgccgagcataaacgcccttctgcaggcggaggttttgtccagacaaatcacagcacccgtgtcagggattaatggagatatcagggccaaaaagattgctagtatcgccgacgtctgtgagagcatgaaagaacagctcctggtgctggtagagtgggcaaagtacatacctgctttttgcgaactcccattagatgaccaggttgccctgcttcgggcgcacgccggcgagcatttgctgctaggcgcaaccaagcgttctatggtgttcaaagacgtcctcctgcttgggaacgattatatcgtgccccgccactgtcctgagctggctgaaatgtccagagtgtcaattaggatcttggacgagctcgtcctgccatttcaggaattacaaattgatgacaatgagtacgcctacctgaaggctatcatattctttgatcccgacgccaaaggactcagcgatcctggtaagattaaacggcttcgagcacaggttcaggtgagtctggaagactatatcaacgatcgccagtacgactctagaggcaggttcggggagttgctactgctcctgccaactcttcaatccattacatggcagatgatcgagcagatccaatttattaagctgttcggaatggccaaaatagataatttgctccaggaaatgctgttaggcggtgctccgagcgacgcgccccatgcacaccaccctctgcatccacacctaatgcaggagcatatggggaccaacgtaatcgtggccaatacgatgcccactcacctctcgaacggacagatgtgcgaatggcctcggccacgcggccaagctgccgcacccgaggccccgcagcctgctcccccaggcgggtctggatccgaaccttataagctgcttcccggtgccgtcgcaaccattgtgagaccattgtcagcgatcccccagcctacaataactaagcaggaggttatttgaggactagtccctgttcccagagcccacttttttttctttttttgaaataaaatagcctgtctttcagatctcaaaggctcttttcagagccaccaaaaaaaaaaaaaaaaaaaaaaaaaaaaaaaaaaaaaaaaaaaaaaaaaaaaaaaaaaaaaaaaaaaaaaaaaaaaaaaaaaaaaaaaaaaaaaaaaaaaa

SEQ ID NO: 3087 - RNA, 1697 nt, synthetic construct
  misc_feature 1..1697: note = mRNA a-1 (hSL-A100) (opt3) from Homo sapiens__NP_000448.3__HNF4A(1-474)(S142A_S143A_S148A_S167A_ S313A_S378A_T429A_T432A_S436A_K458R)
  source 1..1697: mol_type = other RNA
aggagagtcccgcagtcggcgtccagcggctctgcttgttcgtgtgtgtgtcgttgcaggccttattcaagcttaccatgagactgagcaagaccctcgtggacatggatatggccgactactccgctgcacttgatcccgcctatacaactctggagttcgaaaacgtccaggttttgacgatgggcaatgacacctctccttcagaggggacaaacttaaatgcgccaaacagtctgggagtgagcgctctatgcgccatctgtggtgatagggcaactggcaaacactacggggcctcctcttgcgacggatgtaagggctttttccggcgctcggtacgtaaaaatcatatgtattcatgccgatttagcagacaatgtgtggtcgataaggacaaaaggaaccagtgccggtactgtcgcctcaagaagtgcttcagagctggtatgaaaaaggaagcagtgcagaatgagagggatcggattagtacccgccgagccgcttatgaagactccgccctgccgtctataaacgcgcttctgcaggcagaggttttgagcagacaaatcacagcccccgtgtccgggattaatggagatatcagggctaaaaagattgcctcaatcgcagacgtctgtgagagtatgaaagaacagctcctggtgctggtagagtgggctaagtacatacctgccttttgcgaactcccattagatgaccaggttgcgctgcttcgggcccacgcaggcgagcatttgctgctaggcgctaccaagcgtagcatggtgttcaaagacgtcctcctgcttgggaacgattatatcgtgccccgccactgtcctgagctggccgaaatgtctagagtgtccattaggatcttggacgagctcgtcctgccatttcaggaattacaaattgatgacaatgagtacgcttacctgaaggccatcatattctttgatcccgacgcaaaaggactctcagatcctggtaagattaaacggcttcgagcccaggttcaggtgagcctggaagactatatcaacgatcgccagtacgacagtagaggcaggttcggggagttgctactgctcctgccaactcttcaatctattacatggcagatgatcgagcagatccaatttattaagctgttcggaatggctaaaatagataatttgctccaggaaatgctgttaggcggtgcgccgtccgacgcaccccatgcccaccaccctctgcatccacacctaatgcaggagcatatggggaccaacgtaatcgtggctaatacgatgcccactcacctcagcaacggacagatgtgcgaatggcctcggccacgcggccaagccgcagcccccgaggctccgcagcctgcacccccaggcgggtcgggatctgaaccttataagctgcttcccggtgccgtcgcgaccattgtgagaccattgtccgctatcccccagcctacaataactaagcaggaggttatttgaggactagtccctgttcccagagcccacttttttttctttttttgaaataaaatagcctgtctttcagatctcaaaggctcttttcagagccaccaaaaaaaaaaaaaaaaaaaaaaaaaaaaaaaaaaaaaaaaaaaaaaaaaaaaaaaaaaaaaaaaaaaaaaaaaaaaaaaaaaaaaaaaaaaaaaaaaaaaa

SEQ ID NO: 3088 - RNA, 1697 nt, synthetic construct
  misc_feature 1..1697: note = mRNA a-1 (hSL-A100) (opt3) from Homo sapiens__NP_000448.3__HNF4A(1-474)(K106R_K108R_K126R_K127R_ S142A_S143A_S148A_S167A_S313A_S378A_T429A_T432A_S436A_K458R )
  source 1..1697: mol_type = other RNA
aggagagtcccgcagtcggcgtccagcggctctgcttgttcgtgtgtgtgtcgttgcaggccttattcaagcttaccatgagactgagcaagaccctcgtggacatggatatggccgactactccgctgcacttgatcccgcctatacaactctggagttcgaaaacgtccaggttttgacgatgggcaatgacacctctccttcagaggggacaaacttaaatgcgccaaacagtctgggagtgagcgctctatgcgccatctgtggtgatagggcaactggcaaacactacggggcctcctcttgcgacggatgtaagggctttttccggcgctcggtacgtaaaaatcatatgtattcatgccgatttagcagacaatgtgtggtcgatagggaccggcgcaaccagtgcagatactgtaggctcaagaaatgcttccgggctggtatgcgccgagaagcagtgcagaatgagagagataggattagtacccggcgtgccgcttatgaagactccgccctgccgtctataaacgcgcttctgcaggcagaggttttgagccgccaaatcacagcccccgtgtccgggattaatggagatatcagagctaagaagattgcctcaatcgcagacgtctgtgagagtatgaaagaacagctcctggtgctggtagagtgggctaagtacatacctgccttttgcgaactcccattagatgaccaggttgcgctgcttagggcccacgcaggcgagcatttgctgctaggcgctaccaaacggagcatggtgttcaaggacgtcctcctgcttgggaacgattatatcgtgccccgacactgtcctgagctggccgaaatgtctcgcgtgtccattagaatcttggacgagctcgtcctgccatttcaggaattacaaattgatgacaatgagtacgcttacctgaaagccatcatattctttgatcccgacgcaaagggactctcagatcctggtaagattaaaaggcttcgggcccaggttcaggtgagcctggaagactatatcaacgatcgccagtacgacagtagaggcaggttcggggagttgctactgctcctgccaactcttcaatctattacatggcagatgatcgagcagatccaatttattaagctgttcggaatggctaaaatagataatttgctccaggaaatgctgttaggcggtgcgccgtccgacgcaccccatgcccaccaccctctgcatccacacctaatgcaggagcatatggggaccaacgtaatcgtggctaatacgatgcccactcacctcagcaacggacagatgtgcgaatggcctcgtccacggggccaagccgcagcccccgaggctccgcagcctgcacccccaggcgggtcgggatctgaaccttataagctgcttcccggtgccgtcgcgaccattgtgcgaccattgtccgctatcccccagcctacaataactaaacaggaggttatttgaggactagtccctgttcccagagcccacttttttttctttttttgaaataaaatagcctgtctttcagatctcaaaggctcttttcagagccaccaaaaaaaaaaaaaaaaaaaaaaaaaaaaaaaaaaaaaaaaaaaaaaaaaaaaaaaaaaaaaaaaaaaaaaaaaaaaaaaaaaaaaaaaaaaaaaaaaaaaa

SEQ ID NO: 3089 - RNA, 1697 nt, synthetic construct
  misc_feature 1..1697: note = mRNA a-1 (hSL-A100) (opt3) from Homo sapiens__NP_000448.3__HNF4A(1-474)(S142A_S143A_S148A_T166A_ S167A_S313A_S378A_T429A_T432A_S436A_K458R)
  source 1..1697: mol_type = other RNA
aggagagtcccgcagtcggcgtccagcggctctgcttgttcgtgtgtgtgtcgttgcaggccttattcaagcttaccatgagactgagcaagaccctcgtggacatggatatggccgactactccgctgcacttgatcccgcctatacaactctggagttcgaaaacgtccaggttttgacgatgggcaatgacacctctccttcagaggggacaaacttaaatgcgccaaacagtctgggagtgagcgctctatgcgccatctgtggtgatagggcaactggcaaacactacggggcctcctcttgcgacggatgtaagggctttttccggcgctcggtacgtaaaaatcatatgtattcatgccgatttagcagacaatgtgtggtcgataaggacaaaaggaaccagtgccggtactgtcgcctcaagaagtgcttcagagctggtatgaaaaaggaagcagtgcagaatgagagggatcggattagtacccgccgagccgcttatgaagactccgccctgccgtctataaacgcgcttctgcaggcagaggttttgagcagacaaatcgccgctcccgtgtccgggattaatggagatatcagggccaaaaagattgcatcaatcgctgacgtctgtgagagtatgaaagaacagctcctggtgctggtagagtgggccaagtacatacctgcgttttgcgaactcccattagatgaccaggttgccctgcttcgggcacacgctggcgagcatttgctgctaggcgccacaaagcgtagcatggtgttcaaagacgtcctcctgcttgggaacgattatatcgtgccccgccactgtcctgagctggctgaaatgtctagagtgtccattaggatcttggacgagctcgtcctgccatttcaggaattacaaattgatgacaatgagtacgcctacctgaaggcaatcatattctttgatcccgacgccaaaggactctcagatcctggtaagattaaacggcttcgagctcaggttcaggtgagcctggaagactatatcaacgatcgccagtacgacagtagaggcaggttcggggagttgctactgctcctgccaacccttcaatctattacttggcagatgatcgagcagatccaatttattaagctgttcggaatggcgaaaatagataatttgctccaggaaatgctgttaggcggtgcaccgtccgacgctccccatgcccaccaccctctgcatccacacctaatgcaggagcatatggggacaaacgtaatcgtggccaataccatgcccacgcacctcagcaacggacagatgtgcgaatggcctcggccacgcggccaagcagccgctcccgaggccccgcagcctgcacccccaggcgggtcgggatctgaaccttataagctgcttcccggtgcggtcgctactattgtgagaccattgtccgccatcccccagcctaccataacaaagcaggaggttatttgaggactagtccctgttcccagagcccacttttttttctttttttgaaataaaatagcctgtctttcagatctcaaaggctcttttcagagccaccaaaaaaaaaaaaaaaaaaaaaaaaaaaaaaaaaaaaaaaaaaaaaaaaaaaaaaaaaaaaaaaaaaaaaaaaaaaaaaaaaaaaaaaaaaaaaaaaaaaaa

SEQ ID NO: 3090 - RNA, 1697 nt, synthetic construct
  misc_feature 1..1697: note = mRNA a-1 (hSL-A100) (opt3) from Homo sapiens__NP_000448.3__HNF4A(1-474)(S87A_S142A_S143A_S148A_T 166A_S167A_S313A_S378A_T429A_T432A_S436A_K458R)
  source 1..1697: mol_type = other RNA
aggagagtcccgcagtcggcgtccagcggctctgcttgttcgtgtgtgtgtcgttgcaggccttattcaagcttaccatgagactgagcaagaccctcgtggacatggatatggccgactactccgctgcacttgatcccgcctatacaactctggagttcgaaaacgtccaggttttgacgatgggcaatgacacctctccttcagaggggacaaacttaaatgcgccaaacagtctgggagtgagcgctctatgcgccatctgtggtgatagggcaactggcaaacactacggggcctcctcttgcgacggatgtaagggctttttccggcgcgctgtacgtaaaaatcatatgtattcgtgccgattttcaagacaatgtgtggtcgataaggacaaaaggaaccagtgccggtactgtcgcctcaagaagtgcttcagagcaggtatgaaaaaggaagccgtgcagaatgagagggatcggattagcacccgccgagctgcctatgaagacagtgcgctgccgtccataaacgcacttctgcaggccgaggttttgtctagacaaatcgctgcccccgtgagcgggattaatggagatatcagggctaaaaagattgcatccatcgccgacgtctgtgagtcaatgaaagaacagctcctggtgctggtagagtgggcgaagtacatacctgccttttgcgaactcccattagatgaccaggttgcactgcttcgggctcacgccggcgagcatttgctgctaggcgctacaaagcgtagtatggtgttcaaagacgtcctcctgcttgggaacgattatatcgtgccccgccactgtcctgagctggccgaaatgagcagagtgtctattaggatcttggacgagctcgtcctgccatttcaggaattacaaattgatgacaatgagtacgcatacctgaaggccatcatattctttgatcccgacgctaaaggactctccgatcctggtaagattaaacggcttcgagcgcaggttcaggtgtcactggaagactatatcaacgatcgccagtacgacagcagaggcaggttcggggagttgctactgctcctgccaacccttcaaagtattacttggcagatgatcgagcagatccaatttattaagctgttcggaatggcaaaaatagataatttgctccaggaaatgctgttaggcggtgccccgtctgacgctccccatgcccaccaccctctgcatccacacctaatgcaggagcatatggggacaaacgtaatcgtggcaaataccatgcccacgcacctctccaacggacagatgtgcgaatggcctcggccacgcggccaagccgctgcccccgaggcaccgcagcctgcgcccccaggcgggagcggatcggaaccttataagctgcttcccggtgctgtcgccactattgtgagaccattgtctgcaatcccccagcctaccataacaaagcaggaggttatttgaggactagtccctgttcccagagcccacttttttttctttttttgaaataaaatagcctgtctttcagatctcaaaggctcttttcagagccaccaaaaaaaaaaaaaaaaaaaaaaaaaaaaaaaaaaaaaaaaaaaaaaaaaaaaaaaaaaaaaaaaaaaaaaaaaaaaaaaaaaaaaaaaaaaaaaaaaaaaa

SEQ ID NO: 3091 - RNA, 1697 nt, synthetic construct
  misc_feature 1..1697: note = mRNA a-1 (hSL-A100) (opt3) from Homo sapiens__NP_000448.3__HNF4A(1-474)(S87A_K106R_K108R_K126R_K 127R_S142A_S143A_S148A_T166A_S167A_S313A_S378A_T429A_T432A_ S436A_K458R)
  source 1..1697: mol_type = other RNA
aggagagtcccgcagtcggcgtccagcggctctgcttgttcgtgtgtgtgtcgttgcaggccttattcaagcttaccatgagactgagcaagaccctcgtggacatggatatggccgactactccgctgcacttgatcccgcctatacaactctggagttcgaaaacgtccaggttttgacgatgggcaatgacacctctccttcagaggggacaaacttaaatgcgccaaacagtctgggagtgagcgctctatgcgccatctgtggtgatagggcaactggcaaacactacggggcctcctcttgcgacggatgtaagggctttttccggcgcgctgtacgtaaaaatcatatgtattcgtgccgattttcaagacaatgtgtggtcgatagggaccggcgcaaccagtgcagatactgtaggctcaagaaatgcttccgggcaggtatgcgccgagaagccgtgcagaatgagagagataggattagcacccggcgtgctgcctatgaagacagtgcgctgccgtccataaacgcacttctgcaggccgaggttttgtctcgccaaatcgctgcccccgtgagcgggattaatggagatatcagagcaaagaagattgcttccatcgccgacgtctgtgagtcaatgaaagaacagctcctggtgctggtagagtgggcgaagtacatacctgccttttgcgaactcccattagatgaccaggttgcactgcttagggctcacgccggcgagcatttgctgctaggcgctacaaaacggagtatggtgttcaaggacgtcctcctgcttgggaacgattatatcgtgccccgacactgtcctgagctggccgaaatgagccgcgtgtctattagaatcttggacgagctcgtcctgccatttcaggaattacaaattgatgacaatgagtacgcatacctgaaagccatcatattctttgatcccgacgctaagggactctccgatcctggtaagattaaaaggcttcgggcgcaggttcaggtgtcactggaagactatatcaacgatcgccagtacgacagcagaggcaggttcggggagttgctactgctcctgccaacccttcaaagtattacttggcagatgatcgagcagatccaatttattaagctgttcggaatggcaaaaatagataatttgctccaggaaatgctgttaggcggtgccccgtctgacgctccccatgcccaccaccctctgcatccacacctaatgcaggagcatatggggacaaacgtaatcgtggcaaataccatgcccacgcacctctccaacggacagatgtgcgaatggcctcgtccacggggccaagccgctgcccccgaggcaccgcagcctgcgcccccaggcgggagcggatcggaaccttataagctgcttcccggtgctgtcgccactattgtgcgaccattgtctgcaatcccccagcctaccataacaaaacaggaggttatttgaggactagtccctgttcccagagcccacttttttttctttttttgaaataaaatagcctgtctttcagatctcaaaggctcttttcagagccaccaaaaaaaaaaaaaaaaaaaaaaaaaaaaaaaaaaaaaaaaaaaaaaaaaaaaaaaaaaaaaaaaaaaaaaaaaaaaaaaaaaaaaaaaaaaaaaaaaaaaa

SEQ ID NO: 3092 - RNA, 1697 nt, synthetic construct
  misc_feature 1..1697: note = mRNA a-1 (hSL-A100) (opt3) from Homo sapiens__NP_000448.3__HNF4A(1-474)(S87A_K106R_K108R_K126R_K 127R)
  source 1..1697: mol_type = other RNA
aggagagtcccgcagtcggcgtccagcggctctgcttgttcgtgtgtgtgtcgttgcaggccttattcaagcttaccatgagactgagcaagaccctcgtggacatggatatggccgactactccgctgcacttgatcccgcctatacaactctggagttcgaaaacgtccaggttttgacgatgggcaatgacacctctccttcagaggggacaaacttaaatgcgccaaacagtctgggagtgagcgctctatgcgccatctgtggtgatagggcaactggcaaacactacggggcctcctcttgcgacggatgtaagggctttttccggcgcgctgtacgtaaaaatcatatgtattcgtgccgattttcaagacaatgtgtggtcgatagggaccggcgcaaccagtgcagatactgtaggctcaagaaatgcttccgggcaggtatgcgccgagaagccgtgcagaatgagagagataggattagcacccggcgtagttcctatgaagactctagcctgccgtccataaacgcccttctgcaggccgaggttttgtcacgccaaatcacaagtcccgtgagcgggattaatggagatatcagagcgaagaagattgcatctatcgccgacgtctgtgagtccatgaaagaacagctcctggtgctggtagagtgggctaagtacatacctgccttttgcgaactcccattagatgaccaggttgcactgcttagggctcacgccggcgagcatttgctgctaggcgcgaccaaacggtcaatggtgttcaaggacgtcctcctgcttgggaacgattatatcgtgccccgacactgtcctgagctggccgaaatgagccgcgtgagtattagaatcttggacgagctcgtcctgccatttcaggaattacaaattgatgacaatgagtacgcatacctgaaagctatcatattctttgatcccgacgccaagggactctctgatcctggtaagattaaaaggcttcggtcccaggttcaggtgagcctggaagactatatcaacgatcgccagtacgactcgagaggcaggttcggggagttgctactgctcctgccaactcttcaatctattacatggcagatgatcgagcagatccaatttattaagctgttcggaatggctaaaatagataatttgctccaggaaatgctgttaggcggttccccgtcagacgctccccatgcacaccaccctctgcatccacacctaatgcaggagcatatggggaccaacgtaatcgtggccaatacgatgcccactcacctcagtaacggacagatgtgcgaatggcctcgtccacggggccaagctgcgacccccgagacaccgcagcctagcccacccggcgggtccggatctgaaccttataagctgcttcccggtgcagtcgccactattgtgaaaccattgagcgctatcccccagcctaccataacaaagcaggaggttatttgaggactagtccctgttcccagagcccacttttttttctttttttgaaataaaatagcctgtctttcagatctcaaaggctcttttcagagccaccaaaaaaaaaaaaaaaaaaaaaaaaaaaaaaaaaaaaaaaaaaaaaaaaaaaaaaaaaaaaaaaaaaaaaaaaaaaaaaaaaaaaaaaaaaaaaaaaaaaaa

SEQ ID NO: 3093 - RNA, 1697 nt, synthetic construct
  misc_feature 1..1697: note = mRNA a-1 (hSL-A100) (opt3) from Homo sapiens__NP_000448.3__HNF4A(1-474)(S87A_K106R_K108R_K126R_K 127R_S142A_S143A_S148A_T166A_S167A_S313A_S378A_T429A_T432A_ S436A_K458R_S461A)
  source 1..1697: mol_type = other RNA
aggagagtcccgcagtcggcgtccagcggctctgcttgttcgtgtgtgtgtcgttgcaggccttattcaagcttaccatgagactgagcaagaccctcgtggacatggatatggccgactactccgctgcacttgatcccgcctatacaactctggagttcgaaaacgtccaggttttgacgatgggcaatgacacctctccttcagaggggacaaacttaaatgcgccaaacagtctgggagtgagcgctctatgcgccatctgtggtgatagggcaactggcaaacactacggggcctcctcttgcgacggatgtaagggctttttccggcgcgctgtacgtaaaaatcatatgtattcgtgccgattttcaagacaatgtgtggtcgatagggaccggcgcaaccagtgcagatactgtaggctcaagaaatgcttccgggcaggtatgcgccgagaagccgtgcagaatgagagagataggattagcacccggcgtgctgcctatgaagacagtgcgctgccgtccataaacgcacttctgcaggccgaggttttgtctcgccaaatcgctgcccccgtgagcgggattaatggagatatcagagcaaagaagattgcttccatcgccgacgtctgtgagtcaatgaaagaacagctcctggtgctggtagagtgggcgaagtacatacctgccttttgcgaactcccattagatgaccaggttgcactgcttagggctcacgccggcgagcatttgctgctaggcgctacaaaacggagtatggtgttcaaggacgtcctcctgcttgggaacgattatatcgtgccccgacactgtcctgagctggccgaaatgagccgcgtgtctattagaatcttggacgagctcgtcctgccatttcaggaattacaaattgatgacaatgagtacgcatacctgaaagccatcatattctttgatcccgacgctaagggactctccgatcctggtaagattaaaaggcttcgggcgcaggttcaggtgtcactggaagactatatcaacgatcgccagtacgacagcagaggcaggttcggggagttgctactgctcctgccaacccttcaaagtattacttggcagatgatcgagcagatccaatttattaagctgttcggaatggcaaaaatagataatttgctccaggaaatgctgttaggcggtgccccgtctgacgctccccatgcccaccaccctctgcatccacacctaatgcaggagcatatggggacaaacgtaatcgtggcaaataccatgcccacgcacctctccaacggacagatgtgcgaatggcctcgtccacggggccaagccgctgcccccgaggcaccgcagcctgcgcccccaggcgggagcggatcggaaccttataagctgcttcccggtgctgtcgccactattgtgcgaccattggcagccatcccccagcctaccataacaaaacaggaggttatttgaggactagtccctgttcccagagcccacttttttttctttttttgaaataaaatagcctgtctttcagatctcaaaggctcttttcagagccaccaaaaaaaaaaaaaaaaaaaaaaaaaaaaaaaaaaaaaaaaaaaaaaaaaaaaaaaaaaaaaaaaaaaaaaaaaaaaaaaaaaaaaaaaaaaaaaaaaaaaa

SEQ ID NO: 3094 - RNA, 1697 nt, synthetic construct
  misc_feature 1..1697: note = mRNA a-1 (hSL-A100) (opt3) from Homo sapiens__NP_000448.3__HNF4A(1-474)(S87A_K106R_K108R_K126R_K 127R_S142A_S143A_S148A_T166A_S167A_S313A_S378A_T429A_T432A_ S436A_K458R_S461E)
  source 1..1697: mol_type = other RNA
aggagagtcccgcagtcggcgtccagcggctctgcttgttcgtgtgtgtgtcgttgcaggccttattcaagcttaccatgagactgagcaagaccctcgtggacatggatatggccgactactccgctgcacttgatcccgcctatacaactctggagttcgaaaacgtccaggttttgacgatgggcaatgacacctctccttcagaggggacaaacttaaatgcgccaaacagtctgggagtgagcgctctatgcgccatctgtggtgatagggcaactggcaaacactacggggcctcctcttgcgacggatgtaagggctttttccggcgcgctgtacgtaaaaatcatatgtattcgtgccgattttcaagacaatgtgtggtcgatagggaccggcgcaaccagtgcagatactgtaggctcaagaaatgcttccgggcaggtatgcgccgagaagccgtgcagaatgagagagataggattagcacccggcgtgctgcctatgaagacagtgcgctgccgtccataaacgcacttctgcaggccgaggttttgtctcgccaaatcgctgcccccgtgagcgggattaatggagatatcagagcaaagaagattgcttccatcgccgacgtctgtgagtcaatgaaagaacagctcctggtgctggtagagtgggcgaagtacatacctgccttttgcgaactcccattagatgaccaggttgcactgcttagggctcacgccggcgagcatttgctgctaggcgctacaaaacggagtatggtgttcaaggacgtcctcctgcttgggaacgattatatcgtgccccgacactgtcctgagctggccgaaatgagccgcgtgtctattagaatcttggacgagctcgtcctgccatttcaggaattacaaattgatgacaatgagtacgcatacctgaaagccatcatattctttgatcccgacgctaagggactctccgatcctggtaagattaaaaggcttcgggcgcaggttcaggtgtcactggaagactatatcaacgatcgccagtacgacagcagaggcaggttcggggagttgctactgctcctgccaacccttcaaagtattacttggcagatgatcgagcagatccaatttattaagctgttcggaatggcaaaaatagataatttgctccaggaaatgctgttaggcggtgccccgtctgacgctccccatgcccaccaccctctgcatccacacctaatgcaggagcatatggggacaaacgtaatcgtggcaaataccatgcccacgcacctctccaacggacagatgtgcgaatggcctcgtccacggggccaagccgctgcccccgaggcaccgcagcctgcgcccccaggcgggagcggatcggaaccttataagctgcttcccggtgctgtcgccactattgtgcgaccattggaggcaatcccccagcctaccataacaaaacaggaggttatttgaggactagtccctgttcccagagcccacttttttttctttttttgaaataaaatagcctgtctttcagatctcaaaggctcttttcagagccaccaaaaaaaaaaaaaaaaaaaaaaaaaaaaaaaaaaaaaaaaaaaaaaaaaaaaaaaaaaaaaaaaaaaaaaaaaaaaaaaaaaaaaaaaaaaaaaaaaaaaa

SEQ ID NO: 3095 - RNA, 1697 nt, synthetic construct
  misc_feature 1..1697: note = mRNA a-1 (hSL-A100) (opt3) from Homo sapiens__NP_000448.3__HNF4A(1-474)(S87A_K106R_K108R_K126R_K 127R_S142A_S143A_S148E_T166A_S167E_S313A_S378E_T429E_T432E_ S436E_K458R_S461E)
  source 1..1697: mol_type = other RNA
aggagagtcccgcagtcggcgtccagcggctctgcttgttcgtgtgtgtgtcgttgcaggccttattcaagcttaccatgagactgagcaagaccctcgtggacatggatatggccgactactccgctgcacttgatcccgcctatacaactctggagttcgaaaacgtccaggttttgacgatgggcaatgacacctctccttcagaggggacaaacttaaatgcgccaaacagtctgggagtgagcgctctatgcgccatctgtggtgatagggcaactggcaaacactacggggcctcctcttgcgacggatgtaagggctttttccggcgcgctgtacgtaaaaatcatatgtattcgtgccgattttcaagacaatgtgtggtcgatagggaccggcgcaaccagtgcagatactgtaggctcaagaaatgcttccgggcaggtatgcgccgagaagccgtgcagaatgagagagataggattagcacccggcgtgctgcctatgaagacagtgagctgccgtccataaacgcgcttctgcaggcagaggttttgtctcgccaaatcgccgaacccgtgagcgggattaatggagatatcagagctaagaagattgcctccatcgcagacgtctgtgagtcaatgaaagaacagctcctggtgctggtagagtgggctaagtacatacctgccttttgcgagctcccattagatgaccaggttgcgctgcttagggcccacgcaggcgaacatttgctgctaggcgctacaaaacggagtatggtgttcaaggacgtcctcctgcttgggaacgattatatcgtgccccgacactgtcctgagctggccgaaatgagccgcgtgtctattagaatcttggacgagctcgtcctgccatttcaggaattacaaattgatgacaatgagtacgcttacctgaaagccatcatattctttgatcccgacgcaaagggactctccgatcctggtaagattaaaaggcttcgggcccaggttcaggtgtcactggaggactatatcaacgatcgccagtacgacagcagaggcaggttcggggaattgctactgctcctgccaacccttcaaagtattacttggcagatgatcgagcagatccaatttattaagctgttcggaatggctaaaatagataatttgctccaggaaatgctgttaggcggtgagccgtctgacgcgccccatgcacaccaccctctgcatccacacctaatgcaggaacatatggggacaaacgtaatcgtggccaataccatgcccacgcacctctccaacggacagatgtgcgagtggcctcgtccacggggccaagctgccgagcccgaggaaccgcagcctgaacccccaggcgggagcggatcggagccttataagctgcttcccggtgcagtcgccactattgtgcgaccattggaagctatcccccagcctaccataacaaaacaggaggttatttgaggactagtccctgttcccagagcccacttttttttctttttttgaaataaaatagcctgtctttcagatctcaaaggctcttttcagagccaccaaaaaaaaaaaaaaaaaaaaaaaaaaaaaaaaaaaaaaaaaaaaaaaaaaaaaaaaaaaaaaaaaaaaaaaaaaaaaaaaaaaaaaaaaaaaaaaaaaaaa

SEQ ID NO: 3096 - RNA, 1697 nt, synthetic construct
  misc_feature 1..1697: note = mRNA a-1 (hSL-A100) (opt3) from Homo sapiens__NP_000448.3__HNF4A(1-474)(S87A_K106R_K108R_K126R_K 127R_S142A_S143A_S148A_T166A_S167A_K179R_K180R_S313A_S378A_ T429A_T432A_S436A_K458R_S461E)
  source 1..1697: mol_type = other RNA
aggagagtcccgcagtcggcgtccagcggctctgcttgttcgtgtgtgtgtcgttgcaggccttattcaagcttaccatgagactgagcaagaccctcgtggacatggatatggccgactactccgctgcacttgatcccgcctatacaactctggagttcgaaaacgtccaggttttgacgatgggcaatgacacctctccttcagaggggacaaacttaaatgcgccaaacagtctgggagtgagcgctctatgcgccatctgtggtgatagggcaactggcaaacactacggggcctcctcttgcgacggatgtaagggctttttccggcgcgctgtacgtaaaaatcatatgtattcgtgccgattttcaagacaatgtgtggtcgatagggaccggcgcaaccagtgcagatactgtaggctcaagaaatgcttccgggcaggtatgcgccgagaagccgtgcagaatgagagagataggattagcacccggcgtgctgcctatgaagacagtgcgctgccgtccataaacgcacttctgcaggccgaggttttgtctcgccaaatcgctgcccccgtgagcgggattaatggagatatcagagcaaggcggattgcttccatcgccgacgtctgtgagtcaatgaaggaacagctcctggtgctggtagagtgggcgaagtacatacctgccttttgcgaactcccattagatgaccaggttgcactgcttcgagctcacgccggcgagcatttgctgctaggcgctacaaaacgcagtatggtgttcaaggacgtcctcctgcttgggaacgattatatcgtgcccagacactgtcctgagctggccgaaatgagcagggtgtctattcggatcttggacgagctcgtcctgccatttcaggaattacaaattgatgacaatgagtacgcatacctgaaagccatcatattctttgatcccgacgctaagggactctccgatcctggtaaaattaagcgccttagagcgcaggttcaggtgtcactggaagactatatcaacgataggcagtacgacagccgtggccggttcggggagttgctactgctcctgccaacccttcaaagtattacttggcagatgatcgagcagatccaatttattaagctgttcggaatggcaaaaatagataatttgctccaggaaatgctgttaggcggtgccccgtctgacgctccccatgcccaccaccctctgcatccacacctaatgcaggagcatatggggacaaacgtaatcgtggcaaataccatgcccacgcacctctccaacggacagatgtgcgaatggcctcgaccaagaggccaagccgctgcccccgaggcaccgcagcctgcgcccccaggcgggagcggatcggaaccttataagctgcttcccggtgctgtcgccactattgtgaggccattggaggcaatcccccagcctaccataacaaaacaggaggttatttgaggactagtccctgttcccagagcccacttttttttctttttttgaaataaaatagcctgtctttcagatctcaaaggctcttttcagagccaccaaaaaaaaaaaaaaaaaaaaaaaaaaaaaaaaaaaaaaaaaaaaaaaaaaaaaaaaaaaaaaaaaaaaaaaaaaaaaaaaaaaaaaaaaaaaaaaaaaaaa

SEQ ID NO: 3097 - RNA, 1697 nt, synthetic construct
  misc_feature 1..1697: note = mRNA a-1 (hSL-A100) (opt3) from Homo sapiens__NP_000448.3__HNF4A(1-474)(S87A_K106R_K108R_K126R_K 127R_S142A_S143A_S148A_T166A_S167A_K300R_K307R_K309R_S313A_ S378A_T429A_T432A_S436A_K458R_S461E)
  source 1..1697: mol_type = other RNA
aggagagtcccgcagtcggcgtccagcggctctgcttgttcgtgtgtgtgtcgttgcaggccttattcaagcttaccatgagactgagcaagaccctcgtggacatggatatggccgactactccgctgcacttgatcccgcctatacaactctggagttcgaaaacgtccaggttttgacgatgggcaatgacacctctccttcagaggggacaaacttaaatgcgccaaacagtctgggagtgagcgctctatgcgccatctgtggtgatagggcaactggcaaacactacggggcctcctcttgcgacggatgtaagggctttttccggcgcgctgtacgtaaaaatcatatgtattcgtgccgattttcaagacaatgtgtggtcgatagggaccggcgcaaccagtgcagatactgtaggctcaagaaatgcttccgggcaggtatgcgccgagaagccgtgcagaatgagagagataggattagcacccggcgtgctgcctatgaagacagtgcgctgccgtccataaacgcacttctgcaggccgaggttttgtctcgccaaatcgctgcccccgtgagcgggattaatggagatatcagagcaaagaagattgcttccatcgccgacgtctgtgagtcaatgaaagaacagctcctggtgctggtagagtgggcgaagtacatacctgccttttgcgaactcccattagatgaccaggttgcactgcttagggctcacgccggcgagcatttgctgctaggcgctacaaaacggagtatggtgttcaaggacgtcctcctgcttgggaacgattatatcgtgccccgacactgtcctgagctggccgaaatgagccgcgtgtctattagaatcttggacgagctcgtcctgccatttcaggaattacaaattgatgacaatgagtacgcatacctgaaagccatcatattctttgatcccgacgctaggggactctccgatcctggtcggattcgcagacttagggcgcaggttcaggtgtcactggaagactatatcaacgatcgtcagtacgacagccggggccgattcggggagttgctactgctcctgccaacccttcaaagtattacttggcagatgatcgagcagatccaatttattaagctgttcggaatggcaaagatagataatttgctccaggaaatgctgttaggcggtgccccgtctgacgctccccatgcccaccaccctctgcatccacacctaatgcaggagcatatggggacaaacgtaatcgtggcaaataccatgcccacgcacctctccaacggacagatgtgcgaatggcctagaccaaggggccaagccgctgcccccgaggcaccgcagcctgcgcccccaggcgggagcggatcggaaccttataaactgcttcccggtgctgtcgccactattgtgcgcccattggaggcaatcccccagcctaccataacaaagcaggaggttatttgaggactagtccctgttcccagagcccacttttttttctttttttgaaataaaatagcctgtctttcagatctcaaaggctcttttcagagccaccaaaaaaaaaaaaaaaaaaaaaaaaaaaaaaaaaaaaaaaaaaaaaaaaaaaaaaaaaaaaaaaaaaaaaaaaaaaaaaaaaaaaaaaaaaaaaaaaaaaaa

SEQ ID NO: 3098 - RNA, 1697 nt, synthetic construct
  misc_feature 1..1697: note = mRNA a-1 (hSL-A100) (opt3) from Homo sapiens__NP_000448.3__HNF4A(1-474)(S87A_K106R_K108R_K126R_K 127R_S142A_S143A_S148A_T166A_S167A_S313A_S378A_T429A_T432A_ S436A_K447R_K458R_S461E_K470R)
  source 1..1697: mol_type = other RNA
aggagagtcccgcagtcggcgtccagcggctctgcttgttcgtgtgtgtgtcgttgcaggccttattcaagcttaccatgagactgagcaagaccctcgtggacatggatatggccgactactccgctgcacttgatcccgcctatacaactctggagttcgaaaacgtccaggttttgacgatgggcaatgacacctctccttcagaggggacaaacttaaatgcgccaaacagtctgggagtgagcgctctatgcgccatctgtggtgatagggcaactggcaaacactacggggcctcctcttgcgacggatgtaagggctttttccggcgcgctgtacgtaaaaatcatatgtattcgtgccgattttcaagacaatgtgtggtcgatagggaccggcgcaaccagtgcagatactgtaggctcaagaaatgcttccgggcaggtatgcgccgagaagccgtgcagaatgagagagataggattagcacccggcgtgctgcctatgaagacagtgcgctgccgtccataaacgcacttctgcaggccgaggttttgtctcgccaaatcgctgcccccgtgagcgggattaatggagatatcagagcaaagaagattgcttccatcgccgacgtctgtgagtcaatgaaagaacagctcctggtgctggtagagtgggcgaagtacatacctgccttttgcgaactcccattagatgaccaggttgcactgcttagggctcacgccggcgagcatttgctgctaggcgctacaaaacggagtatggtgttcaaggacgtcctcctgcttgggaacgattatatcgtgccccgacactgtcctgagctggccgaaatgagccgcgtgtctattagaatcttggacgagctcgtcctgccatttcaggaattacaaattgatgacaatgagtacgcatacctgaaagccatcatattctttgatcccgacgctaagggactctccgatcctggtaagattaaaaggcttcgggcgcaggttcaggtgtcactggaagactatatcaacgatcgccagtacgacagcagaggcaggttcggggagttgctactgctcctgccaacccttcaaagtattacttggcagatgatcgagcagatccaatttattaagctgttcggaatggcaaaaatagataatttgctccaggaaatgctgttaggcggtgccccgtctgacgctccccatgcccaccaccctctgcatccacacctaatgcaggagcatatggggacaaacgtaatcgtggcaaataccatgcccacgcacctctccaacggacagatgtgcgaatggcctcgtccacggggccaagccgctgcccccgaggcaccgcagcctgcgcccccaggcgggagcggatcggaaccttatcgactgcttcccggtgctgtcgccactattgtgagaccattggaggcaatcccccagcctaccataacaaggcaggaggttatttgaggactagtccctgttcccagagcccacttttttttctttttttgaaataaaatagcctgtctttcagatctcaaaggctcttttcagagccaccaaaaaaaaaaaaaaaaaaaaaaaaaaaaaaaaaaaaaaaaaaaaaaaaaaaaaaaaaaaaaaaaaaaaaaaaaaaaaaaaaaaaaaaaaaaaaaaaaaaaa

SEQ ID NO: 3099 - RNA, 1697 nt, synthetic construct
  misc_feature 1..1697: note = mRNA a-1 (hSL-A100) (opt3) from Homo sapiens__NP_000448.3__HNF4A(1-474)(S87A_K106R_K108R_K126R_K 127R_S142A_S143A_S148A_T166A_S167A_K179R_K180R_K234R_K300R_ K307R_K309R_S313A_S378A_T429A_T432A_S436A_K447R_K458R_S461E _K470R)
  source 1..1697: mol_type = other RNA
aggagagtcccgcagtcggcgtccagcggctctgcttgttcgtgtgtgtgtcgttgcaggccttattcaagcttaccatgagactgagcaagaccctcgtggacatggatatggccgactactccgctgcacttgatcccgcctatacaactctggagttcgaaaacgtccaggttttgacgatgggcaatgacacctctccttcagaggggacaaacttaaatgcgccaaacagtctgggagtgagcgctctatgcgccatctgtggtgatagggcaactggcaaacactacggggcctcctcttgcgacggatgtaagggctttttccggcgcgctgtacgtaaaaatcatatgtattcgtgccgattttcaagacaatgtgtggtcgatagggaccggcgcaaccagtgcagatactgtaggctcaagaaatgcttccgggcaggtatgcgccgagaagccgtgcagaatgagagagataggattagcacccggcgtgctgcctatgaagacagtgcgctgccgtccataaacgcacttctgcaggccgaggttttgtctcgccaaatcgctgcccccgtgagcgggattaatggagatatcagagcaaggcggattgcttccatcgccgacgtctgtgagtcaatgaaggaacagctcctggtgctggtagagtgggcgaagtacatacctgccttttgcgaactcccattagatgaccaggttgcactgcttcgagctcacgccggcgagcatttgctgctaggcgctacacgcagaagtatggtgttcaaagacgtcctcctgcttgggaacgattatatcgtgcccaggcactgtcctgagctggccgaaatgagccgggtgtctattcgcatcttggacgagctcgtcctgccatttcaggaattacaaattgatgacaatgagtacgcatacctgaaggccatcatattctttgatcccgacgctagaggactctccgatcctggtaggattcgtcggcttcgagcgcaggttcaggtgtcactggaagactatatcaacgatagacagtacgacagcaggggccgcttcggggagttgctactgctcctgccaacccttcaaagtattacttggcagatgatcgagcagatccaatttattaaactgttcggaatggcaaagatagataatttgctccaggaaatgctgttaggcggtgccccgtctgacgctccccatgcccaccaccctctgcatccacacctaatgcaggagcatatggggacaaacgtaatcgtggcaaataccatgcccacgcacctctccaacggacagatgtgcgaatggcctcggccaagaggccaagccgctgcccccgaggcaccgcagcctgcgcccccaggcgggagcggatcggaaccttataggctgcttcccggtgctgtcgccactattgtgcgcccattggaggcaatcccccagcctaccataacacgacaggaggttatttgaggactagtccctgttcccagagcccacttttttttctttttttgaaataaaatagcctgtctttcagatctcaaaggctcttttcagagccaccaaaaaaaaaaaaaaaaaaaaaaaaaaaaaaaaaaaaaaaaaaaaaaaaaaaaaaaaaaaaaaaaaaaaaaaaaaaaaaaaaaaaaaaaaaaaaaaaaaaaa

SEQ ID NO: 3100 - RNA, 1697 nt, synthetic construct
  misc_feature 1..1697: note = mRNA a-1 (hSL-A100) (opt3) from Homo sapiens__NP_000448.3__HNF4A(1-474)(S87A_S95A_S99A_K106R_K10 8R_K126R_K127R_S142A_S143A_S148A_T166A_S167A_S313A_S378A_T4 29A_T432A_S436A_K458R_S461E)
  source 1..1697: mol_type = other RNA
aggagagtcccgcagtcggcgtccagcggctctgcttgttcgtgtgtgtgtcgttgcaggccttattcaagcttaccatgagactgagcaagaccctcgtggacatggatatggccgactactccgctgcacttgatcccgcctatacaactctggagttcgaaaacgtccaggttttgacgatgggcaatgacacctctccttcagaggggacaaacttaaatgcgccaaacagtctgggagtgagcgctctatgcgccatctgtggtgatagggcaactggcaaacactacggggcctcctcttgcgacggatgtaagggctttttccggcgcgctgtacgtaaaaatcatatgtatgcatgccgatttgccagacaatgtgtggtcgatagggaccggcgcaaccagtgcagatactgtaggctcaagaaatgcttccgggctggtatgcgccgagaagccgtgcagaatgagagagataggatttcgacccggcgtgcggcatatgaagactcagccctgccgagcataaacgcccttctgcaggccgaggttttgagtcgccaaatcgcagctcccgtgtccgggattaatggagatatcagagccaagaagattgcgtctatcgccgacgtctgtgagagcatgaaagaacagctcctggtgctggtagagtgggcaaagtacatacctgctttttgcgaactcccattagatgaccaggttgccctgcttagggctcacgccggcgagcatttgctgctaggcgcaacaaaacggtccatggtgttcaaggacgtcctcctgcttgggaacgattatatcgtgccccgacactgtcctgagctggccgaaatgtcacgcgtgagtattagaatcttggacgagctcgtcctgccatttcaggaattacaaattgatgacaatgagtacgcttacctgaaagcgatcatattctttgatcccgacgcaaagggactcagcgatcctggtaagattaaaaggcttcgggcccaggttcaggtgtctctggaagactatatcaacgatcgccagtacgactccagaggcaggttcggggagttgctactgctcctgccaacccttcaatcaattacttggcagatgatcgagcagatccaatttattaagctgttcggaatggctaaaatagataatttgctccaggaaatgctgttaggcggtgccccgagcgacgcaccccatgcccaccaccctctgcatccacacctaatgcaggagcatatggggacaaacgtaatcgtggctaataccatgcccacgcacctcagtaacggacagatgtgcgaatggcctcgtccacggggccaagccgcagcgcccgaggctccgcagcctgctcccccaggcgggtctggatccgaaccttataagctgcttcccggtgcagtcgccactattgtgcgaccattggaggctatcccccagcctaccataacaaaacaggaggttatttgaggactagtccctgttcccagagcccacttttttttctttttttgaaataaaatagcctgtctttcagatctcaaaggctcttttcagagccaccaaaaaaaaaaaaaaaaaaaaaaaaaaaaaaaaaaaaaaaaaaaaaaaaaaaaaaaaaaaaaaaaaaaaaaaaaaaaaaaaaaaaaaaaaaaaaaaaaaaaa

SEQ ID NO: 3101 - RNA, 1697 nt, synthetic construct
  misc_feature 1..1697: note = mRNA a-1 (hSL-A100) (opt3) from Homo sapiens__NP_000448.3__HNF4A(1-474)(S87A_K106R_K108R_K126R_K 127R_S138A_T139A_S142A_S143A_S148A_T166A_S167A_S313A_S378A_ T429A_T432A_S436A_K458R_S461E)
  source 1..1697: mol_type = other RNA
aggagagtcccgcagtcggcgtccagcggctctgcttgttcgtgtgtgtgtcgttgcaggccttattcaagcttaccatgagactgagcaagaccctcgtggacatggatatggccgactactccgctgcacttgatcccgcctatacaactctggagttcgaaaacgtccaggttttgacgatgggcaatgacacctctccttcagaggggacaaacttaaatgcgccaaacagtctgggagtgagcgctctatgcgccatctgtggtgatagggcaactggcaaacactacggggcctcctcttgcgacggatgtaagggctttttccggcgcgctgtacgtaaaaatcatatgtattcgtgccgattttcaagacaatgtgtggtcgatagggaccggcgcaaccagtgcagatactgtaggctcaagaaatgcttccgggcaggtatgcgccgagaagccgtgcagaatgagagagataggattgctgcccggcgtgcggcatatgaagacagcgccctgccgagtataaacgcccttctgcaggccgaggttttgtcccgccaaatcgcagctcccgtgtctgggattaatggagatatcagagccaagaagattgcgagcatcgccgacgtctgtgagtccatgaaagaacagctcctggtgctggtagagtgggcaaagtacatacctgctttttgcgaactcccattagatgaccaggttgccctgcttagggctcacgccggcgagcatttgctgctaggcgcaaccaaacggtcaatggtgttcaaggacgtcctcctgcttgggaacgattatatcgtgccccgacactgtcctgagctggccgaaatgagtcgcgtgagcattagaatcttggacgagctcgtcctgccatttcaggaattacaaattgatgacaatgagtacgcttacctgaaagcgatcatattctttgatcccgacgcaaagggactctctgatcctggtaagattaaaaggcttcgggcccaggttcaggtgtccctggaagactatatcaacgatcgccagtacgactcaagaggcaggttcggggagttgctactgctcctgccaacacttcaaagcattacctggcagatgatcgagcagatccaatttattaagctgttcggaatggctaaaatagataatttgctccaggaaatgctgttaggcggtgccccgagtgacgcaccccatgcccaccaccctctgcatccacacctaatgcaggagcatatggggactaacgtaatcgtggctaatacaatgcccacccacctctctaacggacagatgtgcgaatggcctcgtccacggggccaagccgcagcgcccgaggctccgcagcctgctcccccaggcgggtccggaagcgaaccttataagctgcttcccggtgcagtcgccacgattgtgcgaccattggaggctatcccccagcctactataaccaaacaggaggttatttgaggactagtccctgttcccagagcccacttttttttctttttttgaaataaaatagcctgtctttcagatctcaaaggctcttttcagagccaccaaaaaaaaaaaaaaaaaaaaaaaaaaaaaaaaaaaaaaaaaaaaaaaaaaaaaaaaaaaaaaaaaaaaaaaaaaaaaaaaaaaaaaaaaaaaaaaaaaaaa

SEQ ID NO: 3102 - RNA, 1697 nt, synthetic construct
  misc_feature 1..1697: note = mRNA a-1 (hSL-A100) (opt3) from Homo sapiens__NP_000448.3__HNF4A(1-474)(S87A_S95A_S99A_K106R_K10 8R_K126R_K127R_S138A_T139A_S142A_S143A_S148A_T166A_S167A_S3 13A_S378A_T429A_T432A_S436A_K458R_S461E)
  source 1..1697: mol_type = other RNA
aggagagtcccgcagtcggcgtccagcggctctgcttgttcgtgtgtgtgtcgttgcaggccttattcaagcttaccatgagactgagcaagaccctcgtggacatggatatggccgactactccgctgcacttgatcccgcctatacaactctggagttcgaaaacgtccaggttttgacgatgggcaatgacacctctccttcagaggggacaaacttaaatgcgccaaacagtctgggagtgagcgctctatgcgccatctgtggtgatagggcaactggcaaacactacggggcctcctcttgcgacggatgtaagggctttttccggcgcgctgtacgtaaaaatcatatgtatgcatgccgatttgccagacaatgtgtggtcgatagggaccggcgcaaccagtgcagatactgtaggctcaagaaatgcttccgggctggtatgcgccgagaagccgtgcagaatgagagagataggattgcggcacggcgtgccgcttatgaagactcggccctgccgtcaataaacgcacttctgcaggctgaggttttgagccgccaaatcgccgcgcccgtgagtgggattaatggagatatcagagccaagaagattgcatccatcgctgacgtctgtgagtctatgaaagaacagctcctggtgctggtagagtgggccaagtacatacctgctttttgcgaactcccattagatgaccaggttgccctgcttagggcacacgccggcgagcatttgctgctaggcgctaccaaacggagcatggtgttcaaggacgtcctcctgcttgggaacgattatatcgtgccccgacactgtcctgagctggcggaaatgtcccgcgtgtcaattagaatcttggacgagctcgtcctgccatttcaggaattacaaattgatgacaatgagtacgcatacctgaaagccatcatattctttgatcccgacgctaagggactcagtgatcctggtaagattaaaaggcttcgggcccaggttcaggtgagcctggaagactatatcaacgatcgccagtacgactctagaggcaggttcggggagttgctactgctcctgccaacacttcaatccattacctggcagatgatcgagcagatccaatttattaagctgttcggaatggcaaaaatagataatttgctccaggaaatgctgttaggcggtgccccgtcagacgctccccatgcccaccaccctctgcatccacacctaatgcaggagcatatggggactaacgtaatcgtggcaaatacaatgcccacccacctcagcaacggacagatgtgcgaatggcctcgtccacggggccaagcggctgcccccgaggcaccgcagcctgctcccccaggcgggagtggatctgaaccttataagctgcttcccggtgccgtcgccacgattgtgcgaccattggaggcaatcccccagcctactataaccaaacaggaggttatttgaggactagtccctgttcccagagcccacttttttttctttttttgaaataaaatagcctgtctttcagatctcaaaggctcttttcagagccaccaaaaaaaaaaaaaaaaaaaaaaaaaaaaaaaaaaaaaaaaaaaaaaaaaaaaaaaaaaaaaaaaaaaaaaaaaaaaaaaaaaaaaaaaaaaaaaaaaaaaa

SEQ ID NO: 3103 - RNA, 1697 nt, synthetic construct
  misc_feature 1..1697: note = mRNA a-1 (hSL-A100) (opt4) from Homo sapiens__NP_000448.3__HNF4A(1-474)
  source 1..1697: mol_type = other RNA
aggagagtcccgcagtcggcgtccagcggctctgcttgttcgtgtgtgtgtcgttgcaggccttattcaagcttaccatgagactgagcaagaccctggtggacatggacatggccgactacagcgccgccctggaccccgcctacaccaccctggagttcgagaacgtgcaggtgctgaccatgggcaacgacaccagccccagcgagggcaccaacctgaacgcccccaacagcctgggcgtgagcgccctgtgcgccatctgcggcgacagagccaccggcaagcactacggcgccagcagctgcgacggctgcaagggcttcttcagaagaagcgtgagaaagaaccacatgtacagctgcagattcagcagacagtgcgtggtggacaaggacaagagaaaccagtgcagatactgcagactgaagaagtgcttcagagccggcatgaagaaggaggccgtgcagaacgagagagacagaatcagcaccagaagaagcagctacgaggacagcagcctgcccagcatcaacgccctgctgcaggccgaggtgctgagcagacagatcaccagccccgtgagcggcatcaacggcgacatcagagccaagaagatcgccagcatcgccgacgtgtgcgagagcatgaaggagcagctgctggtgctggtggagtgggccaagtacatccccgccttctgcgagctgcccctggacgaccaggtggccctgctgagagcccacgccggcgagcacctgctgctgggcgccaccaagagaagcatggtgttcaaggacgtgctgctgctgggcaacgactacatcgtgcccagacactgccccgagctggccgagatgagcagagtgagcatcagaatcctggacgagctggtgctgcccttccaggagctgcagatcgacgacaacgagtacgcctacctgaaggccatcatcttcttcgaccccgacgccaagggcctgagcgaccccggcaagatcaagagactgagaagccaggtgcaggtgagcctggaggactacatcaacgacagacagtacgacagcagaggcagattcggcgagctgctgctgctgctgcccaccctgcagagcatcacctggcagatgatcgagcagatccagttcatcaagctgttcggcatggccaagatcgacaacctgctgcaggagatgctgctgggcggcagccccagcgacgccccccacgcccaccaccccctgcacccccacctgatgcaggagcacatgggcaccaacgtgatcgtggccaacaccatgcccacccacctgagcaacggccagatgtgcgagtggcccagacccagaggccaggccgccacccccgagaccccccagcccagcccccccggcggcagcggcagcgagccctacaagctgctgcccggcgccgtggccaccatcgtgaagcccctgagcgccatcccccagcccaccatcaccaagcaggaggtgatctgaggactagtccctgttcccagagcccacttttttttctttttttgaaataaaatagcctgtctttcagatctcaaaggctcttttcagagccaccaaaaaaaaaaaaaaaaaaaaaaaaaaaaaaaaaaaaaaaaaaaaaaaaaaaaaaaaaaaaaaaaaaaaaaaaaaaaaaaaaaaaaaaaaaaaaaaaaaaaa

SEQ ID NO: 3104 - RNA, 1697 nt, synthetic construct
  misc_feature 1..1697: note = mRNA a-1 (hSL-A100) (opt4) from Homo sapiens__NP_000448.3__HNF4A(1-474)(S313A)
  source 1..1697: mol_type = other RNA
aggagagtcccgcagtcggcgtccagcggctctgcttgttcgtgtgtgtgtcgttgcaggccttattcaagcttaccatgagactgagcaagaccctggtggacatggacatggccgactacagcgccgccctggaccccgcctacaccaccctggagttcgagaacgtgcaggtgctgaccatgggcaacgacaccagccccagcgagggcaccaacctgaacgcccccaacagcctgggcgtgagcgccctgtgcgccatctgcggcgacagagccaccggcaagcactacggcgccagcagctgcgacggctgcaagggcttcttcagaagaagcgtgagaaagaaccacatgtacagctgcagattcagcagacagtgcgtggtggacaaggacaagagaaaccagtgcagatactgcagactgaagaagtgcttcagagccggcatgaagaaggaggccgtgcagaacgagagagacagaatcagcaccagaagaagcagctacgaggacagcagcctgcccagcatcaacgccctgctgcaggccgaggtgctgagcagacagatcaccagccccgtgagcggcatcaacggcgacatcagagccaagaagatcgccagcatcgccgacgtgtgcgagagcatgaaggagcagctgctggtgctggtggagtgggccaagtacatccccgccttctgcgagctgcccctggacgaccaggtggccctgctgagagcccacgccggcgagcacctgctgctgggcgccaccaagagaagcatggtgttcaaggacgtgctgctgctgggcaacgactacatcgtgcccagacactgccccgagctggccgagatgagcagagtgagcatcagaatcctggacgagctggtgctgcccttccaggagctgcagatcgacgacaacgagtacgcctacctgaaggccatcatcttcttcgaccccgacgccaagggcctgagcgaccccggcaagatcaagagactgagagcccaggtgcaggtgagcctggaggactacatcaacgacagacagtacgacagcagaggcagattcggcgagctgctgctgctgctgcccaccctgcagagcatcacctggcagatgatcgagcagatccagttcatcaagctgttcggcatggccaagatcgacaacctgctgcaggagatgctgctgggcggcagccccagcgacgccccccacgcccaccaccccctgcacccccacctgatgcaggagcacatgggcaccaacgtgatcgtggccaacaccatgcccacccacctgagcaacggccagatgtgcgagtggcccagacccagaggccaggccgccacccccgagaccccccagcccagcccccccggcggcagcggcagcgagccctacaagctgctgcccggcgccgtggccaccatcgtgaagcccctgagcgccatcccccagcccaccatcaccaagcaggaggtgatctgaggactagtccctgttcccagagcccacttttttttctttttttgaaataaaatagcctgtctttcagatctcaaaggctcttttcagagccaccaaaaaaaaaaaaaaaaaaaaaaaaaaaaaaaaaaaaaaaaaaaaaaaaaaaaaaaaaaaaaaaaaaaaaaaaaaaaaaaaaaaaaaaaaaaaaaaaaaaaa

SEQ ID NO: 3105 - RNA, 1697 nt, synthetic construct
  misc_feature 1..1697: note = mRNA a-1 (hSL-A100) (opt4) from Homo sapiens__NP_000448.3__HNF4A(1-474)(S313E)
  source 1..1697: mol_type = other RNA
aggagagtcccgcagtcggcgtccagcggctctgcttgttcgtgtgtgtgtcgttgcaggccttattcaagcttaccatgagactgagcaagaccctggtggacatggacatggccgactacagcgccgccctggaccccgcctacaccaccctggagttcgagaacgtgcaggtgctgaccatgggcaacgacaccagccccagcgagggcaccaacctgaacgcccccaacagcctgggcgtgagcgccctgtgcgccatctgcggcgacagagccaccggcaagcactacggcgccagcagctgcgacggctgcaagggcttcttcagaagaagcgtgagaaagaaccacatgtacagctgcagattcagcagacagtgcgtggtggacaaggacaagagaaaccagtgcagatactgcagactgaagaagtgcttcagagccggcatgaagaaggaggccgtgcagaacgagagagacagaatcagcaccagaagaagcagctacgaggacagcagcctgcccagcatcaacgccctgctgcaggccgaggtgctgagcagacagatcaccagccccgtgagcggcatcaacggcgacatcagagccaagaagatcgccagcatcgccgacgtgtgcgagagcatgaaggagcagctgctggtgctggtggagtgggccaagtacatccccgccttctgcgagctgcccctggacgaccaggtggccctgctgagagcccacgccggcgagcacctgctgctgggcgccaccaagagaagcatggtgttcaaggacgtgctgctgctgggcaacgactacatcgtgcccagacactgccccgagctggccgagatgagcagagtgagcatcagaatcctggacgagctggtgctgcccttccaggagctgcagatcgacgacaacgagtacgcctacctgaaggccatcatcttcttcgaccccgacgccaagggcctgagcgaccccggcaagatcaagagactgagagagcaggtgcaggtgagcctggaggactacatcaacgacagacagtacgacagcagaggcagattcggcgagctgctgctgctgctgcccaccctgcagagcatcacctggcagatgatcgagcagatccagttcatcaagctgttcggcatggccaagatcgacaacctgctgcaggagatgctgctgggcggcagccccagcgacgccccccacgcccaccaccccctgcacccccacctgatgcaggagcacatgggcaccaacgtgatcgtggccaacaccatgcccacccacctgagcaacggccagatgtgcgagtggcccagacccagaggccaggccgccacccccgagaccccccagcccagcccccccggcggcagcggcagcgagccctacaagctgctgcccggcgccgtggccaccatcgtgaagcccctgagcgccatcccccagcccaccatcaccaagcaggaggtgatctgaggactagtccctgttcccagagcccacttttttttctttttttgaaataaaatagcctgtctttcagatctcaaaggctcttttcagagccaccaaaaaaaaaaaaaaaaaaaaaaaaaaaaaaaaaaaaaaaaaaaaaaaaaaaaaaaaaaaaaaaaaaaaaaaaaaaaaaaaaaaaaaaaaaaaaaaaaaaaa

SEQ ID NO: 3106 - RNA, 1697 nt, synthetic construct
  misc_feature 1..1697: note = mRNA a-1 (hSL-A100) (opt4) from Homo sapiens__NP_000448.3__HNF4A(1-474)(S142A_S143A)
  source 1..1697: mol_type = other RNA
aggagagtcccgcagtcggcgtccagcggctctgcttgttcgtgtgtgtgtcgttgcaggccttattcaagcttaccatgagactgagcaagaccctggtggacatggacatggccgactacagcgccgccctggaccccgcctacaccaccctggagttcgagaacgtgcaggtgctgaccatgggcaacgacaccagccccagcgagggcaccaacctgaacgcccccaacagcctgggcgtgagcgccctgtgcgccatctgcggcgacagagccaccggcaagcactacggcgccagcagctgcgacggctgcaagggcttcttcagaagaagcgtgagaaagaaccacatgtacagctgcagattcagcagacagtgcgtggtggacaaggacaagagaaaccagtgcagatactgcagactgaagaagtgcttcagagccggcatgaagaaggaggccgtgcagaacgagagagacagaatcagcaccagaagagccgcctacgaggacagcagcctgcccagcatcaacgccctgctgcaggccgaggtgctgagcagacagatcaccagccccgtgagcggcatcaacggcgacatcagagccaagaagatcgccagcatcgccgacgtgtgcgagagcatgaaggagcagctgctggtgctggtggagtgggccaagtacatccccgccttctgcgagctgcccctggacgaccaggtggccctgctgagagcccacgccggcgagcacctgctgctgggcgccaccaagagaagcatggtgttcaaggacgtgctgctgctgggcaacgactacatcgtgcccagacactgccccgagctggccgagatgagcagagtgagcatcagaatcctggacgagctggtgctgcccttccaggagctgcagatcgacgacaacgagtacgcctacctgaaggccatcatcttcttcgaccccgacgccaagggcctgagcgaccccggcaagatcaagagactgagaagccaggtgcaggtgagcctggaggactacatcaacgacagacagtacgacagcagaggcagattcggcgagctgctgctgctgctgcccaccctgcagagcatcacctggcagatgatcgagcagatccagttcatcaagctgttcggcatggccaagatcgacaacctgctgcaggagatgctgctgggcggcagccccagcgacgccccccacgcccaccaccccctgcacccccacctgatgcaggagcacatgggcaccaacgtgatcgtggccaacaccatgcccacccacctgagcaacggccagatgtgcgagtggcccagacccagaggccaggccgccacccccgagaccccccagcccagcccccccggcggcagcggcagcgagccctacaagctgctgcccggcgccgtggccaccatcgtgaagcccctgagcgccatcccccagcccaccatcaccaagcaggaggtgatctgaggactagtccctgttcccagagcccacttttttttctttttttgaaataaaatagcctgtctttcagatctcaaaggctcttttcagagccaccaaaaaaaaaaaaaaaaaaaaaaaaaaaaaaaaaaaaaaaaaaaaaaaaaaaaaaaaaaaaaaaaaaaaaaaaaaaaaaaaaaaaaaaaaaaaaaaaaaaaa

SEQ ID NO: 3107 - RNA, 1697 nt, synthetic construct
  misc_feature 1..1697: note = mRNA a-1 (hSL-A100) (opt4) from Homo sapiens__NP_000448.3__HNF4A(1-474)(S142E_S143E)
  source 1..1697: mol_type = other RNA
aggagagtcccgcagtcggcgtccagcggctctgcttgttcgtgtgtgtgtcgttgcaggccttattcaagcttaccatgagactgagcaagaccctggtggacatggacatggccgactacagcgccgccctggaccccgcctacaccaccctggagttcgagaacgtgcaggtgctgaccatgggcaacgacaccagccccagcgagggcaccaacctgaacgcccccaacagcctgggcgtgagcgccctgtgcgccatctgcggcgacagagccaccggcaagcactacggcgccagcagctgcgacggctgcaagggcttcttcagaagaagcgtgagaaagaaccacatgtacagctgcagattcagcagacagtgcgtggtggacaaggacaagagaaaccagtgcagatactgcagactgaagaagtgcttcagagccggcatgaagaaggaggccgtgcagaacgagagagacagaatcagcaccagaagagaggagtacgaggacagcagcctgcccagcatcaacgccctgctgcaggccgaggtgctgagcagacagatcaccagccccgtgagcggcatcaacggcgacatcagagccaagaagatcgccagcatcgccgacgtgtgcgagagcatgaaggagcagctgctggtgctggtggagtgggccaagtacatccccgccttctgcgagctgcccctggacgaccaggtggccctgctgagagcccacgccggcgagcacctgctgctgggcgccaccaagagaagcatggtgttcaaggacgtgctgctgctgggcaacgactacatcgtgcccagacactgccccgagctggccgagatgagcagagtgagcatcagaatcctggacgagctggtgctgcccttccaggagctgcagatcgacgacaacgagtacgcctacctgaaggccatcatcttcttcgaccccgacgccaagggcctgagcgaccccggcaagatcaagagactgagaagccaggtgcaggtgagcctggaggactacatcaacgacagacagtacgacagcagaggcagattcggcgagctgctgctgctgctgcccaccctgcagagcatcacctggcagatgatcgagcagatccagttcatcaagctgttcggcatggccaagatcgacaacctgctgcaggagatgctgctgggcggcagccccagcgacgccccccacgcccaccaccccctgcacccccacctgatgcaggagcacatgggcaccaacgtgatcgtggccaacaccatgcccacccacctgagcaacggccagatgtgcgagtggcccagacccagaggccaggccgccacccccgagaccccccagcccagcccccccggcggcagcggcagcgagccctacaagctgctgcccggcgccgtggccaccatcgtgaagcccctgagcgccatcccccagcccaccatcaccaagcaggaggtgatctgaggactagtccctgttcccagagcccacttttttttctttttttgaaataaaatagcctgtctttcagatctcaaaggctcttttcagagccaccaaaaaaaaaaaaaaaaaaaaaaaaaaaaaaaaaaaaaaaaaaaaaaaaaaaaaaaaaaaaaaaaaaaaaaaaaaaaaaaaaaaaaaaaaaaaaaaaaaaaa

SEQ ID NO: 3108 - RNA, 1697 nt, synthetic construct
  misc_feature 1..1697: note = mRNA a-1 (hSL-A100) (opt4) from Homo sapiens__NP_000448.3__HNF4A(1-474)(S143A)
  source 1..1697: mol_type = other RNA
aggagagtcccgcagtcggcgtccagcggctctgcttgttcgtgtgtgtgtcgttgcaggccttattcaagcttaccatgagactgagcaagaccctggtggacatggacatggccgactacagcgccgccctggaccccgcctacaccaccctggagttcgagaacgtgcaggtgctgaccatgggcaacgacaccagccccagcgagggcaccaacctgaacgcccccaacagcctgggcgtgagcgccctgtgcgccatctgcggcgacagagccaccggcaagcactacggcgccagcagctgcgacggctgcaagggcttcttcagaagaagcgtgagaaagaaccacatgtacagctgcagattcagcagacagtgcgtggtggacaaggacaagagaaaccagtgcagatactgcagactgaagaagtgcttcagagccggcatgaagaaggaggccgtgcagaacgagagagacagaatcagcaccagaagaagcgcctacgaggacagcagcctgcccagcatcaacgccctgctgcaggccgaggtgctgagcagacagatcaccagccccgtgagcggcatcaacggcgacatcagagccaagaagatcgccagcatcgccgacgtgtgcgagagcatgaaggagcagctgctggtgctggtggagtgggccaagtacatccccgccttctgcgagctgcccctggacgaccaggtggccctgctgagagcccacgccggcgagcacctgctgctgggcgccaccaagagaagcatggtgttcaaggacgtgctgctgctgggcaacgactacatcgtgcccagacactgccccgagctggccgagatgagcagagtgagcatcagaatcctggacgagctggtgctgcccttccaggagctgcagatcgacgacaacgagtacgcctacctgaaggccatcatcttcttcgaccccgacgccaagggcctgagcgaccccggcaagatcaagagactgagaagccaggtgcaggtgagcctggaggactacatcaacgacagacagtacgacagcagaggcagattcggcgagctgctgctgctgctgcccaccctgcagagcatcacctggcagatgatcgagcagatccagttcatcaagctgttcggcatggccaagatcgacaacctgctgcaggagatgctgctgggcggcagccccagcgacgccccccacgcccaccaccccctgcacccccacctgatgcaggagcacatgggcaccaacgtgatcgtggccaacaccatgcccacccacctgagcaacggccagatgtgcgagtggcccagacccagaggccaggccgccacccccgagaccccccagcccagcccccccggcggcagcggcagcgagccctacaagctgctgcccggcgccgtggccaccatcgtgaagcccctgagcgccatcccccagcccaccatcaccaagcaggaggtgatctgaggactagtccctgttcccagagcccacttttttttctttttttgaaataaaatagcctgtctttcagatctcaaaggctcttttcagagccaccaaaaaaaaaaaaaaaaaaaaaaaaaaaaaaaaaaaaaaaaaaaaaaaaaaaaaaaaaaaaaaaaaaaaaaaaaaaaaaaaaaaaaaaaaaaaaaaaaaaaa

SEQ ID NO: 3109 - RNA, 1697 nt, synthetic construct
  misc_feature 1..1697: note = mRNA a-1 (hSL-A100) (opt4) from Homo sapiens__NP_000448.3__HNF4A(1-474)(T166A)
  source 1..1697: mol_type = other RNA
aggagagtcccgcagtcggcgtccagcggctctgcttgttcgtgtgtgtgtcgttgcaggccttattcaagcttaccatgagactgagcaagaccctggtggacatggacatggccgactacagcgccgccctggaccccgcctacaccaccctggagttcgagaacgtgcaggtgctgaccatgggcaacgacaccagccccagcgagggcaccaacctgaacgcccccaacagcctgggcgtgagcgccctgtgcgccatctgcggcgacagagccaccggcaagcactacggcgccagcagctgcgacggctgcaagggcttcttcagaagaagcgtgagaaagaaccacatgtacagctgcagattcagcagacagtgcgtggtggacaaggacaagagaaaccagtgcagatactgcagactgaagaagtgcttcagagccggcatgaagaaggaggccgtgcagaacgagagagacagaatcagcaccagaagaagcagctacgaggacagcagcctgcccagcatcaacgccctgctgcaggccgaggtgctgagcagacagatcgccagccccgtgagcggcatcaacggcgacatcagagccaagaagatcgccagcatcgccgacgtgtgcgagagcatgaaggagcagctgctggtgctggtggagtgggccaagtacatccccgccttctgcgagctgcccctggacgaccaggtggccctgctgagagcccacgccggcgagcacctgctgctgggcgccaccaagagaagcatggtgttcaaggacgtgctgctgctgggcaacgactacatcgtgcccagacactgccccgagctggccgagatgagcagagtgagcatcagaatcctggacgagctggtgctgcccttccaggagctgcagatcgacgacaacgagtacgcctacctgaaggccatcatcttcttcgaccccgacgccaagggcctgagcgaccccggcaagatcaagagactgagaagccaggtgcaggtgagcctggaggactacatcaacgacagacagtacgacagcagaggcagattcggcgagctgctgctgctgctgcccaccctgcagagcatcacctggcagatgatcgagcagatccagttcatcaagctgttcggcatggccaagatcgacaacctgctgcaggagatgctgctgggcggcagccccagcgacgccccccacgcccaccaccccctgcacccccacctgatgcaggagcacatgggcaccaacgtgatcgtggccaacaccatgcccacccacctgagcaacggccagatgtgcgagtggcccagacccagaggccaggccgccacccccgagaccccccagcccagcccccccggcggcagcggcagcgagccctacaagctgctgcccggcgccgtggccaccatcgtgaagcccctgagcgccatcccccagcccaccatcaccaagcaggaggtgatctgaggactagtccctgttcccagagcccacttttttttctttttttgaaataaaatagcctgtctttcagatctcaaaggctcttttcagagccaccaaaaaaaaaaaaaaaaaaaaaaaaaaaaaaaaaaaaaaaaaaaaaaaaaaaaaaaaaaaaaaaaaaaaaaaaaaaaaaaaaaaaaaaaaaaaaaaaaaaaa

SEQ ID NO: 3110 - RNA, 1697 nt, synthetic construct
  misc_feature 1..1697: note = mRNA a-1 (hSL-A100) (opt4) from Homo sapiens__NP_000448.3__HNF4A(1-474)(S167E)
  source 1..1697: mol_type = other RNA
aggagagtcccgcagtcggcgtccagcggctctgcttgttcgtgtgtgtgtcgttgcaggccttattcaagcttaccatgagactgagcaagaccctggtggacatggacatggccgactacagcgccgccctggaccccgcctacaccaccctggagttcgagaacgtgcaggtgctgaccatgggcaacgacaccagccccagcgagggcaccaacctgaacgcccccaacagcctgggcgtgagcgccctgtgcgccatctgcggcgacagagccaccggcaagcactacggcgccagcagctgcgacggctgcaagggcttcttcagaagaagcgtgagaaagaaccacatgtacagctgcagattcagcagacagtgcgtggtggacaaggacaagagaaaccagtgcagatactgcagactgaagaagtgcttcagagccggcatgaagaaggaggccgtgcagaacgagagagacagaatcagcaccagaagaagcagctacgaggacagcagcctgcccagcatcaacgccctgctgcaggccgaggtgctgagcagacagatcaccgagcccgtgagcggcatcaacggcgacatcagagccaagaagatcgccagcatcgccgacgtgtgcgagagcatgaaggagcagctgctggtgctggtggagtgggccaagtacatccccgccttctgcgagctgcccctggacgaccaggtggccctgctgagagcccacgccggcgagcacctgctgctgggcgccaccaagagaagcatggtgttcaaggacgtgctgctgctgggcaacgactacatcgtgcccagacactgccccgagctggccgagatgagcagagtgagcatcagaatcctggacgagctggtgctgcccttccaggagctgcagatcgacgacaacgagtacgcctacctgaaggccatcatcttcttcgaccccgacgccaagggcctgagcgaccccggcaagatcaagagactgagaagccaggtgcaggtgagcctggaggactacatcaacgacagacagtacgacagcagaggcagattcggcgagctgctgctgctgctgcccaccctgcagagcatcacctggcagatgatcgagcagatccagttcatcaagctgttcggcatggccaagatcgacaacctgctgcaggagatgctgctgggcggcagccccagcgacgccccccacgcccaccaccccctgcacccccacctgatgcaggagcacatgggcaccaacgtgatcgtggccaacaccatgcccacccacctgagcaacggccagatgtgcgagtggcccagacccagaggccaggccgccacccccgagaccccccagcccagcccccccggcggcagcggcagcgagccctacaagctgctgcccggcgccgtggccaccatcgtgaagcccctgagcgccatcccccagcccaccatcaccaagcaggaggtgatctgaggactagtccctgttcccagagcccacttttttttctttttttgaaataaaatagcctgtctttcagatctcaaaggctcttttcagagccaccaaaaaaaaaaaaaaaaaaaaaaaaaaaaaaaaaaaaaaaaaaaaaaaaaaaaaaaaaaaaaaaaaaaaaaaaaaaaaaaaaaaaaaaaaaaaaaaaaaaaa

SEQ ID NO: 3111 - RNA, 1697 nt, synthetic construct
  misc_feature 1..1697: note = mRNA a-1 (hSL-A100) (opt4) from Homo sapiens__NP_000448.3__HNF4A(1-474)(S167A)
  source 1..1697: mol_type = other RNA
aggagagtcccgcagtcggcgtccagcggctctgcttgttcgtgtgtgtgtcgttgcaggccttattcaagcttaccatgagactgagcaagaccctggtggacatggacatggccgactacagcgccgccctggaccccgcctacaccaccctggagttcgagaacgtgcaggtgctgaccatgggcaacgacaccagccccagcgagggcaccaacctgaacgcccccaacagcctgggcgtgagcgccctgtgcgccatctgcggcgacagagccaccggcaagcactacggcgccagcagctgcgacggctgcaagggcttcttcagaagaagcgtgagaaagaaccacatgtacagctgcagattcagcagacagtgcgtggtggacaaggacaagagaaaccagtgcagatactgcagactgaagaagtgcttcagagccggcatgaagaaggaggccgtgcagaacgagagagacagaatcagcaccagaagaagcagctacgaggacagcagcctgcccagcatcaacgccctgctgcaggccgaggtgctgagcagacagatcaccgcccccgtgagcggcatcaacggcgacatcagagccaagaagatcgccagcatcgccgacgtgtgcgagagcatgaaggagcagctgctggtgctggtggagtgggccaagtacatccccgccttctgcgagctgcccctggacgaccaggtggccctgctgagagcccacgccggcgagcacctgctgctgggcgccaccaagagaagcatggtgttcaaggacgtgctgctgctgggcaacgactacatcgtgcccagacactgccccgagctggccgagatgagcagagtgagcatcagaatcctggacgagctggtgctgcccttccaggagctgcagatcgacgacaacgagtacgcctacctgaaggccatcatcttcttcgaccccgacgccaagggcctgagcgaccccggcaagatcaagagactgagaagccaggtgcaggtgagcctggaggactacatcaacgacagacagtacgacagcagaggcagattcggcgagctgctgctgctgctgcccaccctgcagagcatcacctggcagatgatcgagcagatccagttcatcaagctgttcggcatggccaagatcgacaacctgctgcaggagatgctgctgggcggcagccccagcgacgccccccacgcccaccaccccctgcacccccacctgatgcaggagcacatgggcaccaacgtgatcgtggccaacaccatgcccacccacctgagcaacggccagatgtgcgagtggcccagacccagaggccaggccgccacccccgagaccccccagcccagcccccccggcggcagcggcagcgagccctacaagctgctgcccggcgccgtggccaccatcgtgaagcccctgagcgccatcccccagcccaccatcaccaagcaggaggtgatctgaggactagtccctgttcccagagcccacttttttttctttttttgaaataaaatagcctgtctttcagatctcaaaggctcttttcagagccaccaaaaaaaaaaaaaaaaaaaaaaaaaaaaaaaaaaaaaaaaaaaaaaaaaaaaaaaaaaaaaaaaaaaaaaaaaaaaaaaaaaaaaaaaaaaaaaaaaaaaa

SEQ ID NO: 3112 - RNA, 1697 nt, synthetic construct
  misc_feature 1..1697: note = mRNA a-1 (hSL-A100) (opt4) from Homo sapiens__NP_000448.3__HNF4A(1-474)(S167A_S378A_T429A_T432A_ S436A)
  source 1..1697: mol_type = other RNA
aggagagtcccgcagtcggcgtccagcggctctgcttgttcgtgtgtgtgtcgttgcaggccttattcaagcttaccatgagactgagcaagaccctggtggacatggacatggccgactacagcgccgccctggaccccgcctacaccaccctggagttcgagaacgtgcaggtgctgaccatgggcaacgacaccagccccagcgagggcaccaacctgaacgcccccaacagcctgggcgtgagcgccctgtgcgccatctgcggcgacagagccaccggcaagcactacggcgccagcagctgcgacggctgcaagggcttcttcagaagaagcgtgagaaagaaccacatgtacagctgcagattcagcagacagtgcgtggtggacaaggacaagagaaaccagtgcagatactgcagactgaagaagtgcttcagagccggcatgaagaaggaggccgtgcagaacgagagagacagaatcagcaccagaagaagcagctacgaggacagcagcctgcccagcatcaacgccctgctgcaggccgaggtgctgagcagacagatcaccgcccccgtgagcggcatcaacggcgacatcagagccaagaagatcgccagcatcgccgacgtgtgcgagagcatgaaggagcagctgctggtgctggtggagtgggccaagtacatccccgccttctgcgagctgcccctggacgaccaggtggccctgctgagagcccacgccggcgagcacctgctgctgggcgccaccaagagaagcatggtgttcaaggacgtgctgctgctgggcaacgactacatcgtgcccagacactgccccgagctggccgagatgagcagagtgagcatcagaatcctggacgagctggtgctgcccttccaggagctgcagatcgacgacaacgagtacgcctacctgaaggccatcatcttcttcgaccccgacgccaagggcctgagcgaccccggcaagatcaagagactgagaagccaggtgcaggtgagcctggaggactacatcaacgacagacagtacgacagcagaggcagattcggcgagctgctgctgctgctgcccaccctgcagagcatcacctggcagatgatcgagcagatccagttcatcaagctgttcggcatggccaagatcgacaacctgctgcaggagatgctgctgggcggcgcccccagcgacgccccccacgcccaccaccccctgcacccccacctgatgcaggagcacatgggcaccaacgtgatcgtggccaacaccatgcccacccacctgagcaacggccagatgtgcgagtggcccagacccagaggccaggccgccgcccccgaggccccccagcccgccccccccggcggcagcggcagcgagccctacaagctgctgcccggcgccgtggccaccatcgtgaagcccctgagcgccatcccccagcccaccatcaccaagcaggaggtgatctgaggactagtccctgttcccagagcccacttttttttctttttttgaaataaaatagcctgtctttcagatctcaaaggctcttttcagagccaccaaaaaaaaaaaaaaaaaaaaaaaaaaaaaaaaaaaaaaaaaaaaaaaaaaaaaaaaaaaaaaaaaaaaaaaaaaaaaaaaaaaaaaaaaaaaaaaaaaaaa

SEQ ID NO: 3113 - RNA, 1697 nt, synthetic construct
  misc_feature 1..1697: note = mRNA a-1 (hSL-A100) (opt4) from Homo sapiens__NP_000448.3__HNF4A(1-474)(S167E_S378E_T429E_T432E_ S436E)
  source 1..1697: mol_type = other RNA
aggagagtcccgcagtcggcgtccagcggctctgcttgttcgtgtgtgtgtcgttgcaggccttattcaagcttaccatgagactgagcaagaccctggtggacatggacatggccgactacagcgccgccctggaccccgcctacaccaccctggagttcgagaacgtgcaggtgctgaccatgggcaacgacaccagccccagcgagggcaccaacctgaacgcccccaacagcctgggcgtgagcgccctgtgcgccatctgcggcgacagagccaccggcaagcactacggcgccagcagctgcgacggctgcaagggcttcttcagaagaagcgtgagaaagaaccacatgtacagctgcagattcagcagacagtgcgtggtggacaaggacaagagaaaccagtgcagatactgcagactgaagaagtgcttcagagccggcatgaagaaggaggccgtgcagaacgagagagacagaatcagcaccagaagaagcagctacgaggacagcagcctgcccagcatcaacgccctgctgcaggccgaggtgctgagcagacagatcaccgagcccgtgagcggcatcaacggcgacatcagagccaagaagatcgccagcatcgccgacgtgtgcgagagcatgaaggagcagctgctggtgctggtggagtgggccaagtacatccccgccttctgcgagctgcccctggacgaccaggtggccctgctgagagcccacgccggcgagcacctgctgctgggcgccaccaagagaagcatggtgttcaaggacgtgctgctgctgggcaacgactacatcgtgcccagacactgccccgagctggccgagatgagcagagtgagcatcagaatcctggacgagctggtgctgcccttccaggagctgcagatcgacgacaacgagtacgcctacctgaaggccatcatcttcttcgaccccgacgccaagggcctgagcgaccccggcaagatcaagagactgagaagccaggtgcaggtgagcctggaggactacatcaacgacagacagtacgacagcagaggcagattcggcgagctgctgctgctgctgcccaccctgcagagcatcacctggcagatgatcgagcagatccagttcatcaagctgttcggcatggccaagatcgacaacctgctgcaggagatgctgctgggcggcgagcccagcgacgccccccacgcccaccaccccctgcacccccacctgatgcaggagcacatgggcaccaacgtgatcgtggccaacaccatgcccacccacctgagcaacggccagatgtgcgagtggcccagacccagaggccaggccgccgagcccgaggagccccagcccgagccccccggcggcagcggcagcgagccctacaagctgctgcccggcgccgtggccaccatcgtgaagcccctgagcgccatcccccagcccaccatcaccaagcaggaggtgatctgaggactagtccctgttcccagagcccacttttttttctttttttgaaataaaatagcctgtctttcagatctcaaaggctcttttcagagccaccaaaaaaaaaaaaaaaaaaaaaaaaaaaaaaaaaaaaaaaaaaaaaaaaaaaaaaaaaaaaaaaaaaaaaaaaaaaaaaaaaaaaaaaaaaaaaaaaaaaaa

SEQ ID NO: 3114 - RNA, 1697 nt, synthetic construct
  misc_feature 1..1697: note = mRNA a-1 (hSL-A100) (opt4) from Homo sapiens__NP_000448.3__HNF4A(1-474)(S87A)
  source 1..1697: mol_type = other RNA
aggagagtcccgcagtcggcgtccagcggctctgcttgttcgtgtgtgtgtcgttgcaggccttattcaagcttaccatgagactgagcaagaccctggtggacatggacatggccgactacagcgccgccctggaccccgcctacaccaccctggagttcgagaacgtgcaggtgctgaccatgggcaacgacaccagccccagcgagggcaccaacctgaacgcccccaacagcctgggcgtgagcgccctgtgcgccatctgcggcgacagagccaccggcaagcactacggcgccagcagctgcgacggctgcaagggcttcttcagaagagccgtgagaaagaaccacatgtacagctgcagattcagcagacagtgcgtggtggacaaggacaagagaaaccagtgcagatactgcagactgaagaagtgcttcagagccggcatgaagaaggaggccgtgcagaacgagagagacagaatcagcaccagaagaagcagctacgaggacagcagcctgcccagcatcaacgccctgctgcaggccgaggtgctgagcagacagatcaccagccccgtgagcggcatcaacggcgacatcagagccaagaagatcgccagcatcgccgacgtgtgcgagagcatgaaggagcagctgctggtgctggtggagtgggccaagtacatccccgccttctgcgagctgcccctggacgaccaggtggccctgctgagagcccacgccggcgagcacctgctgctgggcgccaccaagagaagcatggtgttcaaggacgtgctgctgctgggcaacgactacatcgtgcccagacactgccccgagctggccgagatgagcagagtgagcatcagaatcctggacgagctggtgctgcccttccaggagctgcagatcgacgacaacgagtacgcctacctgaaggccatcatcttcttcgaccccgacgccaagggcctgagcgaccccggcaagatcaagagactgagaagccaggtgcaggtgagcctggaggactacatcaacgacagacagtacgacagcagaggcagattcggcgagctgctgctgctgctgcccaccctgcagagcatcacctggcagatgatcgagcagatccagttcatcaagctgttcggcatggccaagatcgacaacctgctgcaggagatgctgctgggcggcagccccagcgacgccccccacgcccaccaccccctgcacccccacctgatgcaggagcacatgggcaccaacgtgatcgtggccaacaccatgcccacccacctgagcaacggccagatgtgcgagtggcccagacccagaggccaggccgccacccccgagaccccccagcccagcccccccggcggcagcggcagcgagccctacaagctgctgcccggcgccgtggccaccatcgtgaagcccctgagcgccatcccccagcccaccatcaccaagcaggaggtgatctgaggactagtccctgttcccagagcccacttttttttctttttttgaaataaaatagcctgtctttcagatctcaaaggctcttttcagagccaccaaaaaaaaaaaaaaaaaaaaaaaaaaaaaaaaaaaaaaaaaaaaaaaaaaaaaaaaaaaaaaaaaaaaaaaaaaaaaaaaaaaaaaaaaaaaaaaaaaaaa

SEQ ID NO: 3115 - RNA, 1697 nt, synthetic construct
  misc_feature 1..1697: note = mRNA a-1 (hSL-A100) (opt4) from Homo sapiens__NP_000448.3__HNF4A(1-474)(S87E)
  source 1..1697: mol_type = other RNA
aggagagtcccgcagtcggcgtccagcggctctgcttgttcgtgtgtgtgtcgttgcaggccttattcaagcttaccatgagactgagcaagaccctggtggacatggacatggccgactacagcgccgccctggaccccgcctacaccaccctggagttcgagaacgtgcaggtgctgaccatgggcaacgacaccagccccagcgagggcaccaacctgaacgcccccaacagcctgggcgtgagcgccctgtgcgccatctgcggcgacagagccaccggcaagcactacggcgccagcagctgcgacggctgcaagggcttcttcagaagagaggtgagaaagaaccacatgtacagctgcagattcagcagacagtgcgtggtggacaaggacaagagaaaccagtgcagatactgcagactgaagaagtgcttcagagccggcatgaagaaggaggccgtgcagaacgagagagacagaatcagcaccagaagaagcagctacgaggacagcagcctgcccagcatcaacgccctgctgcaggccgaggtgctgagcagacagatcaccagccccgtgagcggcatcaacggcgacatcagagccaagaagatcgccagcatcgccgacgtgtgcgagagcatgaaggagcagctgctggtgctggtggagtgggccaagtacatccccgccttctgcgagctgcccctggacgaccaggtggccctgctgagagcccacgccggcgagcacctgctgctgggcgccaccaagagaagcatggtgttcaaggacgtgctgctgctgggcaacgactacatcgtgcccagacactgccccgagctggccgagatgagcagagtgagcatcagaatcctggacgagctggtgctgcccttccaggagctgcagatcgacgacaacgagtacgcctacctgaaggccatcatcttcttcgaccccgacgccaagggcctgagcgaccccggcaagatcaagagactgagaagccaggtgcaggtgagcctggaggactacatcaacgacagacagtacgacagcagaggcagattcggcgagctgctgctgctgctgcccaccctgcagagcatcacctggcagatgatcgagcagatccagttcatcaagctgttcggcatggccaagatcgacaacctgctgcaggagatgctgctgggcggcagccccagcgacgccccccacgcccaccaccccctgcacccccacctgatgcaggagcacatgggcaccaacgtgatcgtggccaacaccatgcccacccacctgagcaacggccagatgtgcgagtggcccagacccagaggccaggccgccacccccgagaccccccagcccagcccccccggcggcagcggcagcgagccctacaagctgctgcccggcgccgtggccaccatcgtgaagcccctgagcgccatcccccagcccaccatcaccaagcaggaggtgatctgaggactagtccctgttcccagagcccacttttttttctttttttgaaataaaatagcctgtctttcagatctcaaaggctcttttcagagccaccaaaaaaaaaaaaaaaaaaaaaaaaaaaaaaaaaaaaaaaaaaaaaaaaaaaaaaaaaaaaaaaaaaaaaaaaaaaaaaaaaaaaaaaaaaaaaaaaaaaaa

SEQ ID NO: 3116 - RNA, 1697 nt, synthetic construct
  misc_feature 1..1697: note = mRNA a-1 (hSL-A100) (opt4) from Homo sapiens__NP_000448.3__HNF4A(1-474)(R2V)
  source 1..1697: mol_type = other RNA
aggagagtcccgcagtcggcgtccagcggctctgcttgttcgtgtgtgtgtcgttgcaggccttattcaagcttaccatggtgctgagcaagaccctggtggacatggacatggccgactacagcgccgccctggaccccgcctacaccaccctggagttcgagaacgtgcaggtgctgaccatgggcaacgacaccagccccagcgagggcaccaacctgaacgcccccaacagcctgggcgtgagcgccctgtgcgccatctgcggcgacagagccaccggcaagcactacggcgccagcagctgcgacggctgcaagggcttcttcagaagaagcgtgagaaagaaccacatgtacagctgcagattcagcagacagtgcgtggtggacaaggacaagagaaaccagtgcagatactgcagactgaagaagtgcttcagagccggcatgaagaaggaggccgtgcagaacgagagagacagaatcagcaccagaagaagcagctacgaggacagcagcctgcccagcatcaacgccctgctgcaggccgaggtgctgagcagacagatcaccagccccgtgagcggcatcaacggcgacatcagagccaagaagatcgccagcatcgccgacgtgtgcgagagcatgaaggagcagctgctggtgctggtggagtgggccaagtacatccccgccttctgcgagctgcccctggacgaccaggtggccctgctgagagcccacgccggcgagcacctgctgctgggcgccaccaagagaagcatggtgttcaaggacgtgctgctgctgggcaacgactacatcgtgcccagacactgccccgagctggccgagatgagcagagtgagcatcagaatcctggacgagctggtgctgcccttccaggagctgcagatcgacgacaacgagtacgcctacctgaaggccatcatcttcttcgaccccgacgccaagggcctgagcgaccccggcaagatcaagagactgagaagccaggtgcaggtgagcctggaggactacatcaacgacagacagtacgacagcagaggcagattcggcgagctgctgctgctgctgcccaccctgcagagcatcacctggcagatgatcgagcagatccagttcatcaagctgttcggcatggccaagatcgacaacctgctgcaggagatgctgctgggcggcagccccagcgacgccccccacgcccaccaccccctgcacccccacctgatgcaggagcacatgggcaccaacgtgatcgtggccaacaccatgcccacccacctgagcaacggccagatgtgcgagtggcccagacccagaggccaggccgccacccccgagaccccccagcccagcccccccggcggcagcggcagcgagccctacaagctgctgcccggcgccgtggccaccatcgtgaagcccctgagcgccatcccccagcccaccatcaccaagcaggaggtgatctgaggactagtccctgttcccagagcccacttttttttctttttttgaaataaaatagcctgtctttcagatctcaaaggctcttttcagagccaccaaaaaaaaaaaaaaaaaaaaaaaaaaaaaaaaaaaaaaaaaaaaaaaaaaaaaaaaaaaaaaaaaaaaaaaaaaaaaaaaaaaaaaaaaaaaaaaaaaaaa

SEQ ID NO: 3117 - RNA, 1697 nt, synthetic construct
  misc_feature 1..1697: note = mRNA a-1 (hSL-A100) (opt4) from Homo sapiens__NP_000448.3__HNF4A(1-474)(R2V_K5V)
  source 1..1697: mol_type = other RNA
aggagagtcccgcagtcggcgtccagcggctctgcttgttcgtgtgtgtgtcgttgcaggccttattcaagcttaccatggtgctgagcgtgaccctggtggacatggacatggccgactacagcgccgccctggaccccgcctacaccaccctggagttcgagaacgtgcaggtgctgaccatgggcaacgacaccagccccagcgagggcaccaacctgaacgcccccaacagcctgggcgtgagcgccctgtgcgccatctgcggcgacagagccaccggcaagcactacggcgccagcagctgcgacggctgcaagggcttcttcagaagaagcgtgagaaagaaccacatgtacagctgcagattcagcagacagtgcgtggtggacaaggacaagagaaaccagtgcagatactgcagactgaagaagtgcttcagagccggcatgaagaaggaggccgtgcagaacgagagagacagaatcagcaccagaagaagcagctacgaggacagcagcctgcccagcatcaacgccctgctgcaggccgaggtgctgagcagacagatcaccagccccgtgagcggcatcaacggcgacatcagagccaagaagatcgccagcatcgccgacgtgtgcgagagcatgaaggagcagctgctggtgctggtggagtgggccaagtacatccccgccttctgcgagctgcccctggacgaccaggtggccctgctgagagcccacgccggcgagcacctgctgctgggcgccaccaagagaagcatggtgttcaaggacgtgctgctgctgggcaacgactacatcgtgcccagacactgccccgagctggccgagatgagcagagtgagcatcagaatcctggacgagctggtgctgcccttccaggagctgcagatcgacgacaacgagtacgcctacctgaaggccatcatcttcttcgaccccgacgccaagggcctgagcgaccccggcaagatcaagagactgagaagccaggtgcaggtgagcctggaggactacatcaacgacagacagtacgacagcagaggcagattcggcgagctgctgctgctgctgcccaccctgcagagcatcacctggcagatgatcgagcagatccagttcatcaagctgttcggcatggccaagatcgacaacctgctgcaggagatgctgctgggcggcagccccagcgacgccccccacgcccaccaccccctgcacccccacctgatgcaggagcacatgggcaccaacgtgatcgtggccaacaccatgcccacccacctgagcaacggccagatgtgcgagtggcccagacccagaggccaggccgccacccccgagaccccccagcccagcccccccggcggcagcggcagcgagccctacaagctgctgcccggcgccgtggccaccatcgtgaagcccctgagcgccatcccccagcccaccatcaccaagcaggaggtgatctgaggactagtccctgttcccagagcccacttttttttctttttttgaaataaaatagcctgtctttcagatctcaaaggctcttttcagagccaccaaaaaaaaaaaaaaaaaaaaaaaaaaaaaaaaaaaaaaaaaaaaaaaaaaaaaaaaaaaaaaaaaaaaaaaaaaaaaaaaaaaaaaaaaaaaaaaaaaaaa

SEQ ID NO: 3118 - RNA, 1697 nt, synthetic construct
  misc_feature 1..1697: note = mRNA a-1 (hSL-A100) (opt4) from Homo sapiens__NP_000448.3__HNF4A(1-474)(K179R_K180R)
  source 1..1697: mol_type = other RNA
aggagagtcccgcagtcggcgtccagcggctctgcttgttcgtgtgtgtgtcgttgcaggccttattcaagcttaccatgagactgagcaagaccctggtggacatggacatggccgactacagcgccgccctggaccccgcctacaccaccctggagttcgagaacgtgcaggtgctgaccatgggcaacgacaccagccccagcgagggcaccaacctgaacgcccccaacagcctgggcgtgagcgccctgtgcgccatctgcggcgacagagccaccggcaagcactacggcgccagcagctgcgacggctgcaagggcttcttcagaagaagcgtgagaaagaaccacatgtacagctgcagattcagcagacagtgcgtggtggacaaggacaagagaaaccagtgcagatactgcagactgaagaagtgcttcagagccggcatgaagaaggaggccgtgcagaacgagagagacagaatcagcaccagaagaagcagctacgaggacagcagcctgcccagcatcaacgccctgctgcaggccgaggtgctgagcagacagatcaccagccccgtgagcggcatcaacggcgacatcagagccagaagaatcgccagcatcgccgacgtgtgcgagagcatgaaggagcagctgctggtgctggtggagtgggccaagtacatccccgccttctgcgagctgcccctggacgaccaggtggccctgctgagagcccacgccggcgagcacctgctgctgggcgccaccaagagaagcatggtgttcaaggacgtgctgctgctgggcaacgactacatcgtgcccagacactgccccgagctggccgagatgagcagagtgagcatcagaatcctggacgagctggtgctgcccttccaggagctgcagatcgacgacaacgagtacgcctacctgaaggccatcatcttcttcgaccccgacgccaagggcctgagcgaccccggcaagatcaagagactgagaagccaggtgcaggtgagcctggaggactacatcaacgacagacagtacgacagcagaggcagattcggcgagctgctgctgctgctgcccaccctgcagagcatcacctggcagatgatcgagcagatccagttcatcaagctgttcggcatggccaagatcgacaacctgctgcaggagatgctgctgggcggcagccccagcgacgccccccacgcccaccaccccctgcacccccacctgatgcaggagcacatgggcaccaacgtgatcgtggccaacaccatgcccacccacctgagcaacggccagatgtgcgagtggcccagacccagaggccaggccgccacccccgagaccccccagcccagcccccccggcggcagcggcagcgagccctacaagctgctgcccggcgccgtggccaccatcgtgaagcccctgagcgccatcccccagcccaccatcaccaagcaggaggtgatctgaggactagtccctgttcccagagcccacttttttttctttttttgaaataaaatagcctgtctttcagatctcaaaggctcttttcagagccaccaaaaaaaaaaaaaaaaaaaaaaaaaaaaaaaaaaaaaaaaaaaaaaaaaaaaaaaaaaaaaaaaaaaaaaaaaaaaaaaaaaaaaaaaaaaaaaaaaaaaa

SEQ ID NO: 3119 - RNA, 1697 nt, synthetic construct
  misc_feature 1..1697: note = mRNA a-1 (hSL-A100) (opt4) from Homo sapiens__NP_000448.3__HNF4A(1-474)(K234R)
  source 1..1697: mol_type = other RNA
aggagagtcccgcagtcggcgtccagcggctctgcttgttcgtgtgtgtgtcgttgcaggccttattcaagcttaccatgagactgagcaagaccctggtggacatggacatggccgactacagcgccgccctggaccccgcctacaccaccctggagttcgagaacgtgcaggtgctgaccatgggcaacgacaccagccccagcgagggcaccaacctgaacgcccccaacagcctgggcgtgagcgccctgtgcgccatctgcggcgacagagccaccggcaagcactacggcgccagcagctgcgacggctgcaagggcttcttcagaagaagcgtgagaaagaaccacatgtacagctgcagattcagcagacagtgcgtggtggacaaggacaagagaaaccagtgcagatactgcagactgaagaagtgcttcagagccggcatgaagaaggaggccgtgcagaacgagagagacagaatcagcaccagaagaagcagctacgaggacagcagcctgcccagcatcaacgccctgctgcaggccgaggtgctgagcagacagatcaccagccccgtgagcggcatcaacggcgacatcagagccaagaagatcgccagcatcgccgacgtgtgcgagagcatgaaggagcagctgctggtgctggtggagtgggccaagtacatccccgccttctgcgagctgcccctggacgaccaggtggccctgctgagagcccacgccggcgagcacctgctgctgggcgccaccagaagaagcatggtgttcaaggacgtgctgctgctgggcaacgactacatcgtgcccagacactgccccgagctggccgagatgagcagagtgagcatcagaatcctggacgagctggtgctgcccttccaggagctgcagatcgacgacaacgagtacgcctacctgaaggccatcatcttcttcgaccccgacgccaagggcctgagcgaccccggcaagatcaagagactgagaagccaggtgcaggtgagcctggaggactacatcaacgacagacagtacgacagcagaggcagattcggcgagctgctgctgctgctgcccaccctgcagagcatcacctggcagatgatcgagcagatccagttcatcaagctgttcggcatggccaagatcgacaacctgctgcaggagatgctgctgggcggcagccccagcgacgccccccacgcccaccaccccctgcacccccacctgatgcaggagcacatgggcaccaacgtgatcgtggccaacaccatgcccacccacctgagcaacggccagatgtgcgagtggcccagacccagaggccaggccgccacccccgagaccccccagcccagcccccccggcggcagcggcagcgagccctacaagctgctgcccggcgccgtggccaccatcgtgaagcccctgagcgccatcccccagcccaccatcaccaagcaggaggtgatctgaggactagtccctgttcccagagcccacttttttttctttttttgaaataaaatagcctgtctttcagatctcaaaggctcttttcagagccaccaaaaaaaaaaaaaaaaaaaaaaaaaaaaaaaaaaaaaaaaaaaaaaaaaaaaaaaaaaaaaaaaaaaaaaaaaaaaaaaaaaaaaaaaaaaaaaaaaaaaa

SEQ ID NO: 3120 - RNA, 1697 nt, synthetic construct
  misc_feature 1..1697: note = mRNA a-1 (hSL-A100) (opt4) from Homo sapiens__NP_000448.3__HNF4A(1-474)(K300R)
  source 1..1697: mol_type = other RNA
aggagagtcccgcagtcggcgtccagcggctctgcttgttcgtgtgtgtgtcgttgcaggccttattcaagcttaccatgagactgagcaagaccctggtggacatggacatggccgactacagcgccgccctggaccccgcctacaccaccctggagttcgagaacgtgcaggtgctgaccatgggcaacgacaccagccccagcgagggcaccaacctgaacgcccccaacagcctgggcgtgagcgccctgtgcgccatctgcggcgacagagccaccggcaagcactacggcgccagcagctgcgacggctgcaagggcttcttcagaagaagcgtgagaaagaaccacatgtacagctgcagattcagcagacagtgcgtggtggacaaggacaagagaaaccagtgcagatactgcagactgaagaagtgcttcagagccggcatgaagaaggaggccgtgcagaacgagagagacagaatcagcaccagaagaagcagctacgaggacagcagcctgcccagcatcaacgccctgctgcaggccgaggtgctgagcagacagatcaccagccccgtgagcggcatcaacggcgacatcagagccaagaagatcgccagcatcgccgacgtgtgcgagagcatgaaggagcagctgctggtgctggtggagtgggccaagtacatccccgccttctgcgagctgcccctggacgaccaggtggccctgctgagagcccacgccggcgagcacctgctgctgggcgccaccaagagaagcatggtgttcaaggacgtgctgctgctgggcaacgactacatcgtgcccagacactgccccgagctggccgagatgagcagagtgagcatcagaatcctggacgagctggtgctgcccttccaggagctgcagatcgacgacaacgagtacgcctacctgaaggccatcatcttcttcgaccccgacgccagaggcctgagcgaccccggcaagatcaagagactgagaagccaggtgcaggtgagcctggaggactacatcaacgacagacagtacgacagcagaggcagattcggcgagctgctgctgctgctgcccaccctgcagagcatcacctggcagatgatcgagcagatccagttcatcaagctgttcggcatggccaagatcgacaacctgctgcaggagatgctgctgggcggcagccccagcgacgccccccacgcccaccaccccctgcacccccacctgatgcaggagcacatgggcaccaacgtgatcgtggccaacaccatgcccacccacctgagcaacggccagatgtgcgagtggcccagacccagaggccaggccgccacccccgagaccccccagcccagcccccccggcggcagcggcagcgagccctacaagctgctgcccggcgccgtggccaccatcgtgaagcccctgagcgccatcccccagcccaccatcaccaagcaggaggtgatctgaggactagtccctgttcccagagcccacttttttttctttttttgaaataaaatagcctgtctttcagatctcaaaggctcttttcagagccaccaaaaaaaaaaaaaaaaaaaaaaaaaaaaaaaaaaaaaaaaaaaaaaaaaaaaaaaaaaaaaaaaaaaaaaaaaaaaaaaaaaaaaaaaaaaaaaaaaaaaa

SEQ ID NO: 3121 - RNA, 1697 nt, synthetic construct
  misc_feature 1..1697: note = mRNA a-1 (hSL-A100) (opt4) from Homo sapiens__NP_000448.3__HNF4A(1-474)(K300R_K307R_K309R)
  source 1..1697: mol_type = other RNA
aggagagtcccgcagtcggcgtccagcggctctgcttgttcgtgtgtgtgtcgttgcaggccttattcaagcttaccatgagactgagcaagaccctggtggacatggacatggccgactacagcgccgccctggaccccgcctacaccaccctggagttcgagaacgtgcaggtgctgaccatgggcaacgacaccagccccagcgagggcaccaacctgaacgcccccaacagcctgggcgtgagcgccctgtgcgccatctgcggcgacagagccaccggcaagcactacggcgccagcagctgcgacggctgcaagggcttcttcagaagaagcgtgagaaagaaccacatgtacagctgcagattcagcagacagtgcgtggtggacaaggacaagagaaaccagtgcagatactgcagactgaagaagtgcttcagagccggcatgaagaaggaggccgtgcagaacgagagagacagaatcagcaccagaagaagcagctacgaggacagcagcctgcccagcatcaacgccctgctgcaggccgaggtgctgagcagacagatcaccagccccgtgagcggcatcaacggcgacatcagagccaagaagatcgccagcatcgccgacgtgtgcgagagcatgaaggagcagctgctggtgctggtggagtgggccaagtacatccccgccttctgcgagctgcccctggacgaccaggtggccctgctgagagcccacgccggcgagcacctgctgctgggcgccaccaagagaagcatggtgttcaaggacgtgctgctgctgggcaacgactacatcgtgcccagacactgccccgagctggccgagatgagcagagtgagcatcagaatcctggacgagctggtgctgcccttccaggagctgcagatcgacgacaacgagtacgcctacctgaaggccatcatcttcttcgaccccgacgccagaggcctgagcgaccccggcagaatcagaagactgagaagccaggtgcaggtgagcctggaggactacatcaacgacagacagtacgacagcagaggcagattcggcgagctgctgctgctgctgcccaccctgcagagcatcacctggcagatgatcgagcagatccagttcatcaagctgttcggcatggccaagatcgacaacctgctgcaggagatgctgctgggcggcagccccagcgacgccccccacgcccaccaccccctgcacccccacctgatgcaggagcacatgggcaccaacgtgatcgtggccaacaccatgcccacccacctgagcaacggccagatgtgcgagtggcccagacccagaggccaggccgccacccccgagaccccccagcccagcccccccggcggcagcggcagcgagccctacaagctgctgcccggcgccgtggccaccatcgtgaagcccctgagcgccatcccccagcccaccatcaccaagcaggaggtgatctgaggactagtccctgttcccagagcccacttttttttctttttttgaaataaaatagcctgtctttcagatctcaaaggctcttttcagagccaccaaaaaaaaaaaaaaaaaaaaaaaaaaaaaaaaaaaaaaaaaaaaaaaaaaaaaaaaaaaaaaaaaaaaaaaaaaaaaaaaaaaaaaaaaaaaaaaaaaaaa

SEQ ID NO: 3122 - RNA, 1697 nt, synthetic construct
  misc_feature 1..1697: note = mRNA a-1 (hSL-A100) (opt4) from Homo sapiens__NP_000448.3__HNF4A(1-474)(K447R_K470R)
  source 1..1697: mol_type = other RNA
aggagagtcccgcagtcggcgtccagcggctctgcttgttcgtgtgtgtgtcgttgcaggccttattcaagcttaccatgagactgagcaagaccctggtggacatggacatggccgactacagcgccgccctggaccccgcctacaccaccctggagttcgagaacgtgcaggtgctgaccatgggcaacgacaccagccccagcgagggcaccaacctgaacgcccccaacagcctgggcgtgagcgccctgtgcgccatctgcggcgacagagccaccggcaagcactacggcgccagcagctgcgacggctgcaagggcttcttcagaagaagcgtgagaaagaaccacatgtacagctgcagattcagcagacagtgcgtggtggacaaggacaagagaaaccagtgcagatactgcagactgaagaagtgcttcagagccggcatgaagaaggaggccgtgcagaacgagagagacagaatcagcaccagaagaagcagctacgaggacagcagcctgcccagcatcaacgccctgctgcaggccgaggtgctgagcagacagatcaccagccccgtgagcggcatcaacggcgacatcagagccaagaagatcgccagcatcgccgacgtgtgcgagagcatgaaggagcagctgctggtgctggtggagtgggccaagtacatccccgccttctgcgagctgcccctggacgaccaggtggccctgctgagagcccacgccggcgagcacctgctgctgggcgccaccaagagaagcatggtgttcaaggacgtgctgctgctgggcaacgactacatcgtgcccagacactgccccgagctggccgagatgagcagagtgagcatcagaatcctggacgagctggtgctgcccttccaggagctgcagatcgacgacaacgagtacgcctacctgaaggccatcatcttcttcgaccccgacgccaagggcctgagcgaccccggcaagatcaagagactgagaagccaggtgcaggtgagcctggaggactacatcaacgacagacagtacgacagcagaggcagattcggcgagctgctgctgctgctgcccaccctgcagagcatcacctggcagatgatcgagcagatccagttcatcaagctgttcggcatggccaagatcgacaacctgctgcaggagatgctgctgggcggcagccccagcgacgccccccacgcccaccaccccctgcacccccacctgatgcaggagcacatgggcaccaacgtgatcgtggccaacaccatgcccacccacctgagcaacggccagatgtgcgagtggcccagacccagaggccaggccgccacccccgagaccccccagcccagcccccccggcggcagcggcagcgagccctacagactgctgcccggcgccgtggccaccatcgtgaagcccctgagcgccatcccccagcccaccatcaccagacaggaggtgatctgaggactagtccctgttcccagagcccacttttttttctttttttgaaataaaatagcctgtctttcagatctcaaaggctcttttcagagccaccaaaaaaaaaaaaaaaaaaaaaaaaaaaaaaaaaaaaaaaaaaaaaaaaaaaaaaaaaaaaaaaaaaaaaaaaaaaaaaaaaaaaaaaaaaaaaaaaaaaaa

SEQ ID NO: 3123 - RNA, 1697 nt, synthetic construct
  misc_feature 1..1697: note = mRNA a-1 (hSL-A100) (opt4) from Homo sapiens__NP_000448.3__HNF4A(1-474)(K458R)
  source 1..1697: mol_type = other RNA
aggagagtcccgcagtcggcgtccagcggctctgcttgttcgtgtgtgtgtcgttgcaggccttattcaagcttaccatgagactgagcaagaccctggtggacatggacatggccgactacagcgccgccctggaccccgcctacaccaccctggagttcgagaacgtgcaggtgctgaccatgggcaacgacaccagccccagcgagggcaccaacctgaacgcccccaacagcctgggcgtgagcgccctgtgcgccatctgcggcgacagagccaccggcaagcactacggcgccagcagctgcgacggctgcaagggcttcttcagaagaagcgtgagaaagaaccacatgtacagctgcagattcagcagacagtgcgtggtggacaaggacaagagaaaccagtgcagatactgcagactgaagaagtgcttcagagccggcatgaagaaggaggccgtgcagaacgagagagacagaatcagcaccagaagaagcagctacgaggacagcagcctgcccagcatcaacgccctgctgcaggccgaggtgctgagcagacagatcaccagccccgtgagcggcatcaacggcgacatcagagccaagaagatcgccagcatcgccgacgtgtgcgagagcatgaaggagcagctgctggtgctggtggagtgggccaagtacatccccgccttctgcgagctgcccctggacgaccaggtggccctgctgagagcccacgccggcgagcacctgctgctgggcgccaccaagagaagcatggtgttcaaggacgtgctgctgctgggcaacgactacatcgtgcccagacactgccccgagctggccgagatgagcagagtgagcatcagaatcctggacgagctggtgctgcccttccaggagctgcagatcgacgacaacgagtacgcctacctgaaggccatcatcttcttcgaccccgacgccaagggcctgagcgaccccggcaagatcaagagactgagaagccaggtgcaggtgagcctggaggactacatcaacgacagacagtacgacagcagaggcagattcggcgagctgctgctgctgctgcccaccctgcagagcatcacctggcagatgatcgagcagatccagttcatcaagctgttcggcatggccaagatcgacaacctgctgcaggagatgctgctgggcggcagccccagcgacgccccccacgcccaccaccccctgcacccccacctgatgcaggagcacatgggcaccaacgtgatcgtggccaacaccatgcccacccacctgagcaacggccagatgtgcgagtggcccagacccagaggccaggccgccacccccgagaccccccagcccagcccccccggcggcagcggcagcgagccctacaagctgctgcccggcgccgtggccaccatcgtgagacccctgagcgccatcccccagcccaccatcaccaagcaggaggtgatctgaggactagtccctgttcccagagcccacttttttttctttttttgaaataaaatagcctgtctttcagatctcaaaggctcttttcagagccaccaaaaaaaaaaaaaaaaaaaaaaaaaaaaaaaaaaaaaaaaaaaaaaaaaaaaaaaaaaaaaaaaaaaaaaaaaaaaaaaaaaaaaaaaaaaaaaaaaaaaa

SEQ ID NO: 3124 - RNA, 1697 nt, synthetic construct
  misc_feature 1..1697: note = mRNA a-1 (hSL-A100) (opt4) from Homo sapiens__NP_000448.3__HNF4A(1-474)(K106R_K108R_K126R_K127R)
  source 1..1697: mol_type = other RNA
aggagagtcccgcagtcggcgtccagcggctctgcttgttcgtgtgtgtgtcgttgcaggccttattcaagcttaccatgagactgagcaagaccctggtggacatggacatggccgactacagcgccgccctggaccccgcctacaccaccctggagttcgagaacgtgcaggtgctgaccatgggcaacgacaccagccccagcgagggcaccaacctgaacgcccccaacagcctgggcgtgagcgccctgtgcgccatctgcggcgacagagccaccggcaagcactacggcgccagcagctgcgacggctgcaagggcttcttcagaagaagcgtgagaaagaaccacatgtacagctgcagattcagcagacagtgcgtggtggacagagacagaagaaaccagtgcagatactgcagactgaagaagtgcttcagagccggcatgagaagagaggccgtgcagaacgagagagacagaatcagcaccagaagaagcagctacgaggacagcagcctgcccagcatcaacgccctgctgcaggccgaggtgctgagcagacagatcaccagccccgtgagcggcatcaacggcgacatcagagccaagaagatcgccagcatcgccgacgtgtgcgagagcatgaaggagcagctgctggtgctggtggagtgggccaagtacatccccgccttctgcgagctgcccctggacgaccaggtggccctgctgagagcccacgccggcgagcacctgctgctgggcgccaccaagagaagcatggtgttcaaggacgtgctgctgctgggcaacgactacatcgtgcccagacactgccccgagctggccgagatgagcagagtgagcatcagaatcctggacgagctggtgctgcccttccaggagctgcagatcgacgacaacgagtacgcctacctgaaggccatcatcttcttcgaccccgacgccaagggcctgagcgaccccggcaagatcaagagactgagaagccaggtgcaggtgagcctggaggactacatcaacgacagacagtacgacagcagaggcagattcggcgagctgctgctgctgctgcccaccctgcagagcatcacctggcagatgatcgagcagatccagttcatcaagctgttcggcatggccaagatcgacaacctgctgcaggagatgctgctgggcggcagccccagcgacgccccccacgcccaccaccccctgcacccccacctgatgcaggagcacatgggcaccaacgtgatcgtggccaacaccatgcccacccacctgagcaacggccagatgtgcgagtggcccagacccagaggccaggccgccacccccgagaccccccagcccagcccccccggcggcagcggcagcgagccctacaagctgctgcccggcgccgtggccaccatcgtgaagcccctgagcgccatcccccagcccaccatcaccaagcaggaggtgatctgaggactagtccctgttcccagagcccacttttttttctttttttgaaataaaatagcctgtctttcagatctcaaaggctcttttcagagccaccaaaaaaaaaaaaaaaaaaaaaaaaaaaaaaaaaaaaaaaaaaaaaaaaaaaaaaaaaaaaaaaaaaaaaaaaaaaaaaaaaaaaaaaaaaaaaaaaaaaaa

SEQ ID NO: 3125 - RNA, 1697 nt, synthetic construct
  misc_feature 1..1697: note = mRNA a-1 (hSL-A100) (opt4) from Homo sapiens__NP_000448.3__HNF4A(1-474)(E285Q)
  source 1..1697: mol_type = other RNA
aggagagtcccgcagtcggcgtccagcggctctgcttgttcgtgtgtgtgtcgttgcaggccttattcaagcttaccatgagactgagcaagaccctggtggacatggacatggccgactacagcgccgccctggaccccgcctacaccaccctggagttcgagaacgtgcaggtgctgaccatgggcaacgacaccagccccagcgagggcaccaacctgaacgcccccaacagcctgggcgtgagcgccctgtgcgccatctgcggcgacagagccaccggcaagcactacggcgccagcagctgcgacggctgcaagggcttcttcagaagaagcgtgagaaagaaccacatgtacagctgcagattcagcagacagtgcgtggtggacaaggacaagagaaaccagtgcagatactgcagactgaagaagtgcttcagagccggcatgaagaaggaggccgtgcagaacgagagagacagaatcagcaccagaagaagcagctacgaggacagcagcctgcccagcatcaacgccctgctgcaggccgaggtgctgagcagacagatcaccagccccgtgagcggcatcaacggcgacatcagagccaagaagatcgccagcatcgccgacgtgtgcgagagcatgaaggagcagctgctggtgctggtggagtgggccaagtacatccccgccttctgcgagctgcccctggacgaccaggtggccctgctgagagcccacgccggcgagcacctgctgctgggcgccaccaagagaagcatggtgttcaaggacgtgctgctgctgggcaacgactacatcgtgcccagacactgccccgagctggccgagatgagcagagtgagcatcagaatcctggacgagctggtgctgcccttccaggagctgcagatcgacgacaaccagtacgcctacctgaaggccatcatcttcttcgaccccgacgccaagggcctgagcgaccccggcaagatcaagagactgagaagccaggtgcaggtgagcctggaggactacatcaacgacagacagtacgacagcagaggcagattcggcgagctgctgctgctgctgcccaccctgcagagcatcacctggcagatgatcgagcagatccagttcatcaagctgttcggcatggccaagatcgacaacctgctgcaggagatgctgctgggcggcagccccagcgacgccccccacgcccaccaccccctgcacccccacctgatgcaggagcacatgggcaccaacgtgatcgtggccaacaccatgcccacccacctgagcaacggccagatgtgcgagtggcccagacccagaggccaggccgccacccccgagaccccccagcccagcccccccggcggcagcggcagcgagccctacaagctgctgcccggcgccgtggccaccatcgtgaagcccctgagcgccatcccccagcccaccatcaccaagcaggaggtgatctgaggactagtccctgttcccagagcccacttttttttctttttttgaaataaaatagcctgtctttcagatctcaaaggctcttttcagagccaccaaaaaaaaaaaaaaaaaaaaaaaaaaaaaaaaaaaaaaaaaaaaaaaaaaaaaaaaaaaaaaaaaaaaaaaaaaaaaaaaaaaaaaaaaaaaaaaaaaaaa

SEQ ID NO: 3126 - RNA, 1697 nt, synthetic construct
  misc_feature 1..1697: note = mRNA a-1 (hSL-A100) (opt4) from Homo sapiens__NP_000448.3__HNF4A(1-474)(T166E)
  source 1..1697: mol_type = other RNA
aggagagtcccgcagtcggcgtccagcggctctgcttgttcgtgtgtgtgtcgttgcaggccttattcaagcttaccatgagactgagcaagaccctggtggacatggacatggccgactacagcgccgccctggaccccgcctacaccaccctggagttcgagaacgtgcaggtgctgaccatgggcaacgacaccagccccagcgagggcaccaacctgaacgcccccaacagcctgggcgtgagcgccctgtgcgccatctgcggcgacagagccaccggcaagcactacggcgccagcagctgcgacggctgcaagggcttcttcagaagaagcgtgagaaagaaccacatgtacagctgcagattcagcagacagtgcgtggtggacaaggacaagagaaaccagtgcagatactgcagactgaagaagtgcttcagagccggcatgaagaaggaggccgtgcagaacgagagagacagaatcagcaccagaagaagcagctacgaggacagcagcctgcccagcatcaacgccctgctgcaggccgaggtgctgagcagacagatcgagagccccgtgagcggcatcaacggcgacatcagagccaagaagatcgccagcatcgccgacgtgtgcgagagcatgaaggagcagctgctggtgctggtggagtgggccaagtacatccccgccttctgcgagctgcccctggacgaccaggtggccctgctgagagcccacgccggcgagcacctgctgctgggcgccaccaagagaagcatggtgttcaaggacgtgctgctgctgggcaacgactacatcgtgcccagacactgccccgagctggccgagatgagcagagtgagcatcagaatcctggacgagctggtgctgcccttccaggagctgcagatcgacgacaacgagtacgcctacctgaaggccatcatcttcttcgaccccgacgccaagggcctgagcgaccccggcaagatcaagagactgagaagccaggtgcaggtgagcctggaggactacatcaacgacagacagtacgacagcagaggcagattcggcgagctgctgctgctgctgcccaccctgcagagcatcacctggcagatgatcgagcagatccagttcatcaagctgttcggcatggccaagatcgacaacctgctgcaggagatgctgctgggcggcagccccagcgacgccccccacgcccaccaccccctgcacccccacctgatgcaggagcacatgggcaccaacgtgatcgtggccaacaccatgcccacccacctgagcaacggccagatgtgcgagtggcccagacccagaggccaggccgccacccccgagaccccccagcccagcccccccggcggcagcggcagcgagccctacaagctgctgcccggcgccgtggccaccatcgtgaagcccctgagcgccatcccccagcccaccatcaccaagcaggaggtgatctgaggactagtccctgttcccagagcccacttttttttctttttttgaaataaaatagcctgtctttcagatctcaaaggctcttttcagagccaccaaaaaaaaaaaaaaaaaaaaaaaaaaaaaaaaaaaaaaaaaaaaaaaaaaaaaaaaaaaaaaaaaaaaaaaaaaaaaaaaaaaaaaaaaaaaaaaaaaaaa

SEQ ID NO: 3127 - RNA, 1697 nt, synthetic construct
  misc_feature 1..1697: note = mRNA a-1 (hSL-A100) (opt4) from Homo sapiens__NP_000448.3__HNF4A(1-474)(S148A)
  source 1..1697: mol_type = other RNA
aggagagtcccgcagtcggcgtccagcggctctgcttgttcgtgtgtgtgtcgttgcaggccttattcaagcttaccatgagactgagcaagaccctggtggacatggacatggccgactacagcgccgccctggaccccgcctacaccaccctggagttcgagaacgtgcaggtgctgaccatgggcaacgacaccagccccagcgagggcaccaacctgaacgcccccaacagcctgggcgtgagcgccctgtgcgccatctgcggcgacagagccaccggcaagcactacggcgccagcagctgcgacggctgcaagggcttcttcagaagaagcgtgagaaagaaccacatgtacagctgcagattcagcagacagtgcgtggtggacaaggacaagagaaaccagtgcagatactgcagactgaagaagtgcttcagagccggcatgaagaaggaggccgtgcagaacgagagagacagaatcagcaccagaagaagcagctacgaggacagcgccctgcccagcatcaacgccctgctgcaggccgaggtgctgagcagacagatcaccagccccgtgagcggcatcaacggcgacatcagagccaagaagatcgccagcatcgccgacgtgtgcgagagcatgaaggagcagctgctggtgctggtggagtgggccaagtacatccccgccttctgcgagctgcccctggacgaccaggtggccctgctgagagcccacgccggcgagcacctgctgctgggcgccaccaagagaagcatggtgttcaaggacgtgctgctgctgggcaacgactacatcgtgcccagacactgccccgagctggccgagatgagcagagtgagcatcagaatcctggacgagctggtgctgcccttccaggagctgcagatcgacgacaacgagtacgcctacctgaaggccatcatcttcttcgaccccgacgccaagggcctgagcgaccccggcaagatcaagagactgagaagccaggtgcaggtgagcctggaggactacatcaacgacagacagtacgacagcagaggcagattcggcgagctgctgctgctgctgcccaccctgcagagcatcacctggcagatgatcgagcagatccagttcatcaagctgttcggcatggccaagatcgacaacctgctgcaggagatgctgctgggcggcagccccagcgacgccccccacgcccaccaccccctgcacccccacctgatgcaggagcacatgggcaccaacgtgatcgtggccaacaccatgcccacccacctgagcaacggccagatgtgcgagtggcccagacccagaggccaggccgccacccccgagaccccccagcccagcccccccggcggcagcggcagcgagccctacaagctgctgcccggcgccgtggccaccatcgtgaagcccctgagcgccatcccccagcccaccatcaccaagcaggaggtgatctgaggactagtccctgttcccagagcccacttttttttctttttttgaaataaaatagcctgtctttcagatctcaaaggctcttttcagagccaccaaaaaaaaaaaaaaaaaaaaaaaaaaaaaaaaaaaaaaaaaaaaaaaaaaaaaaaaaaaaaaaaaaaaaaaaaaaaaaaaaaaaaaaaaaaaaaaaaaaaa

SEQ ID NO: 3128 - RNA, 1697 nt, synthetic construct
  misc_feature 1..1697: note = mRNA a-1 (hSL-A100) (opt4) from Homo sapiens__NP_000448.3__HNF4A(1-474)(S148E)
  source 1..1697: mol_type = other RNA
aggagagtcccgcagtcggcgtccagcggctctgcttgttcgtgtgtgtgtcgttgcaggccttattcaagcttaccatgagactgagcaagaccctggtggacatggacatggccgactacagcgccgccctggaccccgcctacaccaccctggagttcgagaacgtgcaggtgctgaccatgggcaacgacaccagccccagcgagggcaccaacctgaacgcccccaacagcctgggcgtgagcgccctgtgcgccatctgcggcgacagagccaccggcaagcactacggcgccagcagctgcgacggctgcaagggcttcttcagaagaagcgtgagaaagaaccacatgtacagctgcagattcagcagacagtgcgtggtggacaaggacaagagaaaccagtgcagatactgcagactgaagaagtgcttcagagccggcatgaagaaggaggccgtgcagaacgagagagacagaatcagcaccagaagaagcagctacgaggacagcgagctgcccagcatcaacgccctgctgcaggccgaggtgctgagcagacagatcaccagccccgtgagcggcatcaacggcgacatcagagccaagaagatcgccagcatcgccgacgtgtgcgagagcatgaaggagcagctgctggtgctggtggagtgggccaagtacatccccgccttctgcgagctgcccctggacgaccaggtggccctgctgagagcccacgccggcgagcacctgctgctgggcgccaccaagagaagcatggtgttcaaggacgtgctgctgctgggcaacgactacatcgtgcccagacactgccccgagctggccgagatgagcagagtgagcatcagaatcctggacgagctggtgctgcccttccaggagctgcagatcgacgacaacgagtacgcctacctgaaggccatcatcttcttcgaccccgacgccaagggcctgagcgaccccggcaagatcaagagactgagaagccaggtgcaggtgagcctggaggactacatcaacgacagacagtacgacagcagaggcagattcggcgagctgctgctgctgctgcccaccctgcagagcatcacctggcagatgatcgagcagatccagttcatcaagctgttcggcatggccaagatcgacaacctgctgcaggagatgctgctgggcggcagccccagcgacgccccccacgcccaccaccccctgcacccccacctgatgcaggagcacatgggcaccaacgtgatcgtggccaacaccatgcccacccacctgagcaacggccagatgtgcgagtggcccagacccagaggccaggccgccacccccgagaccccccagcccagcccccccggcggcagcggcagcgagccctacaagctgctgcccggcgccgtggccaccatcgtgaagcccctgagcgccatcccccagcccaccatcaccaagcaggaggtgatctgaggactagtccctgttcccagagcccacttttttttctttttttgaaataaaatagcctgtctttcagatctcaaaggctcttttcagagccaccaaaaaaaaaaaaaaaaaaaaaaaaaaaaaaaaaaaaaaaaaaaaaaaaaaaaaaaaaaaaaaaaaaaaaaaaaaaaaaaaaaaaaaaaaaaaaaaaaaaaa

SEQ ID NO: 3129 - RNA, 1697 nt, synthetic construct
  misc_feature 1..1697: note = mRNA a-1 (hSL-A100) (opt4) from Homo sapiens__NP_000448.3__HNF4A(1-474)(S183A)
  source 1..1697: mol_type = other RNA
aggagagtcccgcagtcggcgtccagcggctctgcttgttcgtgtgtgtgtcgttgcaggccttattcaagcttaccatgagactgagcaagaccctggtggacatggacatggccgactacagcgccgccctggaccccgcctacaccaccctggagttcgagaacgtgcaggtgctgaccatgggcaacgacaccagccccagcgagggcaccaacctgaacgcccccaacagcctgggcgtgagcgccctgtgcgccatctgcggcgacagagccaccggcaagcactacggcgccagcagctgcgacggctgcaagggcttcttcagaagaagcgtgagaaagaaccacatgtacagctgcagattcagcagacagtgcgtggtggacaaggacaagagaaaccagtgcagatactgcagactgaagaagtgcttcagagccggcatgaagaaggaggccgtgcagaacgagagagacagaatcagcaccagaagaagcagctacgaggacagcagcctgcccagcatcaacgccctgctgcaggccgaggtgctgagcagacagatcaccagccccgtgagcggcatcaacggcgacatcagagccaagaagatcgccgccatcgccgacgtgtgcgagagcatgaaggagcagctgctggtgctggtggagtgggccaagtacatccccgccttctgcgagctgcccctggacgaccaggtggccctgctgagagcccacgccggcgagcacctgctgctgggcgccaccaagagaagcatggtgttcaaggacgtgctgctgctgggcaacgactacatcgtgcccagacactgccccgagctggccgagatgagcagagtgagcatcagaatcctggacgagctggtgctgcccttccaggagctgcagatcgacgacaacgagtacgcctacctgaaggccatcatcttcttcgaccccgacgccaagggcctgagcgaccccggcaagatcaagagactgagaagccaggtgcaggtgagcctggaggactacatcaacgacagacagtacgacagcagaggcagattcggcgagctgctgctgctgctgcccaccctgcagagcatcacctggcagatgatcgagcagatccagttcatcaagctgttcggcatggccaagatcgacaacctgctgcaggagatgctgctgggcggcagccccagcgacgccccccacgcccaccaccccctgcacccccacctgatgcaggagcacatgggcaccaacgtgatcgtggccaacaccatgcccacccacctgagcaacggccagatgtgcgagtggcccagacccagaggccaggccgccacccccgagaccccccagcccagcccccccggcggcagcggcagcgagccctacaagctgctgcccggcgccgtggccaccatcgtgaagcccctgagcgccatcccccagcccaccatcaccaagcaggaggtgatctgaggactagtccctgttcccagagcccacttttttttctttttttgaaataaaatagcctgtctttcagatctcaaaggctcttttcagagccaccaaaaaaaaaaaaaaaaaaaaaaaaaaaaaaaaaaaaaaaaaaaaaaaaaaaaaaaaaaaaaaaaaaaaaaaaaaaaaaaaaaaaaaaaaaaaaaaaaaaaa

SEQ ID NO: 3130 - RNA, 1697 nt, synthetic construct
  misc_feature 1..1697: note = mRNA a-1 (hSL-A100) (opt4) from Homo sapiens__NP_000448.3__HNF4A(1-474)(S183E)
  source 1..1697: mol_type = other RNA
aggagagtcccgcagtcggcgtccagcggctctgcttgttcgtgtgtgtgtcgttgcaggccttattcaagcttaccatgagactgagcaagaccctggtggacatggacatggccgactacagcgccgccctggaccccgcctacaccaccctggagttcgagaacgtgcaggtgctgaccatgggcaacgacaccagccccagcgagggcaccaacctgaacgcccccaacagcctgggcgtgagcgccctgtgcgccatctgcggcgacagagccaccggcaagcactacggcgccagcagctgcgacggctgcaagggcttcttcagaagaagcgtgagaaagaaccacatgtacagctgcagattcagcagacagtgcgtggtggacaaggacaagagaaaccagtgcagatactgcagactgaagaagtgcttcagagccggcatgaagaaggaggccgtgcagaacgagagagacagaatcagcaccagaagaagcagctacgaggacagcagcctgcccagcatcaacgccctgctgcaggccgaggtgctgagcagacagatcaccagccccgtgagcggcatcaacggcgacatcagagccaagaagatcgccgagatcgccgacgtgtgcgagagcatgaaggagcagctgctggtgctggtggagtgggccaagtacatccccgccttctgcgagctgcccctggacgaccaggtggccctgctgagagcccacgccggcgagcacctgctgctgggcgccaccaagagaagcatggtgttcaaggacgtgctgctgctgggcaacgactacatcgtgcccagacactgccccgagctggccgagatgagcagagtgagcatcagaatcctggacgagctggtgctgcccttccaggagctgcagatcgacgacaacgagtacgcctacctgaaggccatcatcttcttcgaccccgacgccaagggcctgagcgaccccggcaagatcaagagactgagaagccaggtgcaggtgagcctggaggactacatcaacgacagacagtacgacagcagaggcagattcggcgagctgctgctgctgctgcccaccctgcagagcatcacctggcagatgatcgagcagatccagttcatcaagctgttcggcatggccaagatcgacaacctgctgcaggagatgctgctgggcggcagccccagcgacgccccccacgcccaccaccccctgcacccccacctgatgcaggagcacatgggcaccaacgtgatcgtggccaacaccatgcccacccacctgagcaacggccagatgtgcgagtggcccagacccagaggccaggccgccacccccgagaccccccagcccagcccccccggcggcagcggcagcgagccctacaagctgctgcccggcgccgtggccaccatcgtgaagcccctgagcgccatcccccagcccaccatcaccaagcaggaggtgatctgaggactagtccctgttcccagagcccacttttttttctttttttgaaataaaatagcctgtctttcagatctcaaaggctcttttcagagccaccaaaaaaaaaaaaaaaaaaaaaaaaaaaaaaaaaaaaaaaaaaaaaaaaaaaaaaaaaaaaaaaaaaaaaaaaaaaaaaaaaaaaaaaaaaaaaaaaaaaaa

SEQ ID NO: 3131 - RNA, 1697 nt, synthetic construct
  misc_feature 1..1697: note = mRNA a-1 (hSL-A100) (opt4) from Homo sapiens__NP_000448.3__HNF4A(1-474)(S461A)
  source 1..1697: mol_type = other RNA
aggagagtcccgcagtcggcgtccagcggctctgcttgttcgtgtgtgtgtcgttgcaggccttattcaagcttaccatgagactgagcaagaccctggtggacatggacatggccgactacagcgccgccctggaccccgcctacaccaccctggagttcgagaacgtgcaggtgctgaccatgggcaacgacaccagccccagcgagggcaccaacctgaacgcccccaacagcctgggcgtgagcgccctgtgcgccatctgcggcgacagagccaccggcaagcactacggcgccagcagctgcgacggctgcaagggcttcttcagaagaagcgtgagaaagaaccacatgtacagctgcagattcagcagacagtgcgtggtggacaaggacaagagaaaccagtgcagatactgcagactgaagaagtgcttcagagccggcatgaagaaggaggccgtgcagaacgagagagacagaatcagcaccagaagaagcagctacgaggacagcagcctgcccagcatcaacgccctgctgcaggccgaggtgctgagcagacagatcaccagccccgtgagcggcatcaacggcgacatcagagccaagaagatcgccagcatcgccgacgtgtgcgagagcatgaaggagcagctgctggtgctggtggagtgggccaagtacatccccgccttctgcgagctgcccctggacgaccaggtggccctgctgagagcccacgccggcgagcacctgctgctgggcgccaccaagagaagcatggtgttcaaggacgtgctgctgctgggcaacgactacatcgtgcccagacactgccccgagctggccgagatgagcagagtgagcatcagaatcctggacgagctggtgctgcccttccaggagctgcagatcgacgacaacgagtacgcctacctgaaggccatcatcttcttcgaccccgacgccaagggcctgagcgaccccggcaagatcaagagactgagaagccaggtgcaggtgagcctggaggactacatcaacgacagacagtacgacagcagaggcagattcggcgagctgctgctgctgctgcccaccctgcagagcatcacctggcagatgatcgagcagatccagttcatcaagctgttcggcatggccaagatcgacaacctgctgcaggagatgctgctgggcggcagccccagcgacgccccccacgcccaccaccccctgcacccccacctgatgcaggagcacatgggcaccaacgtgatcgtggccaacaccatgcccacccacctgagcaacggccagatgtgcgagtggcccagacccagaggccaggccgccacccccgagaccccccagcccagcccccccggcggcagcggcagcgagccctacaagctgctgcccggcgccgtggccaccatcgtgaagcccctggccgccatcccccagcccaccatcaccaagcaggaggtgatctgaggactagtccctgttcccagagcccacttttttttctttttttgaaataaaatagcctgtctttcagatctcaaaggctcttttcagagccaccaaaaaaaaaaaaaaaaaaaaaaaaaaaaaaaaaaaaaaaaaaaaaaaaaaaaaaaaaaaaaaaaaaaaaaaaaaaaaaaaaaaaaaaaaaaaaaaaaaaaa

SEQ ID NO: 3132 - RNA, 1697 nt, synthetic construct
  misc_feature 1..1697: note = mRNA a-1 (hSL-A100) (opt4) from Homo sapiens__NP_000448.3__HNF4A(1-474)(S461E)
  source 1..1697: mol_type = other RNA
aggagagtcccgcagtcggcgtccagcggctctgcttgttcgtgtgtgtgtcgttgcaggccttattcaagcttaccatgagactgagcaagaccctggtggacatggacatggccgactacagcgccgccctggaccccgcctacaccaccctggagttcgagaacgtgcaggtgctgaccatgggcaacgacaccagccccagcgagggcaccaacctgaacgcccccaacagcctgggcgtgagcgccctgtgcgccatctgcggcgacagagccaccggcaagcactacggcgccagcagctgcgacggctgcaagggcttcttcagaagaagcgtgagaaagaaccacatgtacagctgcagattcagcagacagtgcgtggtggacaaggacaagagaaaccagtgcagatactgcagactgaagaagtgcttcagagccggcatgaagaaggaggccgtgcagaacgagagagacagaatcagcaccagaagaagcagctacgaggacagcagcctgcccagcatcaacgccctgctgcaggccgaggtgctgagcagacagatcaccagccccgtgagcggcatcaacggcgacatcagagccaagaagatcgccagcatcgccgacgtgtgcgagagcatgaaggagcagctgctggtgctggtggagtgggccaagtacatccccgccttctgcgagctgcccctggacgaccaggtggccctgctgagagcccacgccggcgagcacctgctgctgggcgccaccaagagaagcatggtgttcaaggacgtgctgctgctgggcaacgactacatcgtgcccagacactgccccgagctggccgagatgagcagagtgagcatcagaatcctggacgagctggtgctgcccttccaggagctgcagatcgacgacaacgagtacgcctacctgaaggccatcatcttcttcgaccccgacgccaagggcctgagcgaccccggcaagatcaagagactgagaagccaggtgcaggtgagcctggaggactacatcaacgacagacagtacgacagcagaggcagattcggcgagctgctgctgctgctgcccaccctgcagagcatcacctggcagatgatcgagcagatccagttcatcaagctgttcggcatggccaagatcgacaacctgctgcaggagatgctgctgggcggcagccccagcgacgccccccacgcccaccaccccctgcacccccacctgatgcaggagcacatgggcaccaacgtgatcgtggccaacaccatgcccacccacctgagcaacggccagatgtgcgagtggcccagacccagaggccaggccgccacccccgagaccccccagcccagcccccccggcggcagcggcagcgagccctacaagctgctgcccggcgccgtggccaccatcgtgaagcccctggaggccatcccccagcccaccatcaccaagcaggaggtgatctgaggactagtccctgttcccagagcccacttttttttctttttttgaaataaaatagcctgtctttcagatctcaaaggctcttttcagagccaccaaaaaaaaaaaaaaaaaaaaaaaaaaaaaaaaaaaaaaaaaaaaaaaaaaaaaaaaaaaaaaaaaaaaaaaaaaaaaaaaaaaaaaaaaaaaaaaaaaaaa

SEQ ID NO: 3133 - RNA, 1697 nt, synthetic construct
  misc_feature 1..1697: note = mRNA a-1 (hSL-A100) (opt4) from Homo sapiens__NP_000448.3__HNF4A(1-474)(S142A_S143A_S313A)
  source 1..1697: mol_type = other RNA
aggagagtcccgcagtcggcgtccagcggctctgcttgttcgtgtgtgtgtcgttgcaggccttattcaagcttaccatgagactgagcaagaccctggtggacatggacatggccgactacagcgccgccctggaccccgcctacaccaccctggagttcgagaacgtgcaggtgctgaccatgggcaacgacaccagccccagcgagggcaccaacctgaacgcccccaacagcctgggcgtgagcgccctgtgcgccatctgcggcgacagagccaccggcaagcactacggcgccagcagctgcgacggctgcaagggcttcttcagaagaagcgtgagaaagaaccacatgtacagctgcagattcagcagacagtgcgtggtggacaaggacaagagaaaccagtgcagatactgcagactgaagaagtgcttcagagccggcatgaagaaggaggccgtgcagaacgagagagacagaatcagcaccagaagagccgcctacgaggacagcagcctgcccagcatcaacgccctgctgcaggccgaggtgctgagcagacagatcaccagccccgtgagcggcatcaacggcgacatcagagccaagaagatcgccagcatcgccgacgtgtgcgagagcatgaaggagcagctgctggtgctggtggagtgggccaagtacatccccgccttctgcgagctgcccctggacgaccaggtggccctgctgagagcccacgccggcgagcacctgctgctgggcgccaccaagagaagcatggtgttcaaggacgtgctgctgctgggcaacgactacatcgtgcccagacactgccccgagctggccgagatgagcagagtgagcatcagaatcctggacgagctggtgctgcccttccaggagctgcagatcgacgacaacgagtacgcctacctgaaggccatcatcttcttcgaccccgacgccaagggcctgagcgaccccggcaagatcaagagactgagagcccaggtgcaggtgagcctggaggactacatcaacgacagacagtacgacagcagaggcagattcggcgagctgctgctgctgctgcccaccctgcagagcatcacctggcagatgatcgagcagatccagttcatcaagctgttcggcatggccaagatcgacaacctgctgcaggagatgctgctgggcggcagccccagcgacgccccccacgcccaccaccccctgcacccccacctgatgcaggagcacatgggcaccaacgtgatcgtggccaacaccatgcccacccacctgagcaacggccagatgtgcgagtggcccagacccagaggccaggccgccacccccgagaccccccagcccagcccccccggcggcagcggcagcgagccctacaagctgctgcccggcgccgtggccaccatcgtgaagcccctgagcgccatcccccagcccaccatcaccaagcaggaggtgatctgaggactagtccctgttcccagagcccacttttttttctttttttgaaataaaatagcctgtctttcagatctcaaaggctcttttcagagccaccaaaaaaaaaaaaaaaaaaaaaaaaaaaaaaaaaaaaaaaaaaaaaaaaaaaaaaaaaaaaaaaaaaaaaaaaaaaaaaaaaaaaaaaaaaaaaaaaaaaaa

SEQ ID NO: 3134 - RNA, 1697 nt, synthetic construct
  misc_feature 1..1697: note = mRNA a-1 (hSL-A100) (opt4) from Homo sapiens__NP_000448.3__HNF4A(1-474)(S142A_S143A_S313A_K458R)
  source 1..1697: mol_type = other RNA
aggagagtcccgcagtcggcgtccagcggctctgcttgttcgtgtgtgtgtcgttgcaggccttattcaagcttaccatgagactgagcaagaccctggtggacatggacatggccgactacagcgccgccctggaccccgcctacaccaccctggagttcgagaacgtgcaggtgctgaccatgggcaacgacaccagccccagcgagggcaccaacctgaacgcccccaacagcctgggcgtgagcgccctgtgcgccatctgcggcgacagagccaccggcaagcactacggcgccagcagctgcgacggctgcaagggcttcttcagaagaagcgtgagaaagaaccacatgtacagctgcagattcagcagacagtgcgtggtggacaaggacaagagaaaccagtgcagatactgcagactgaagaagtgcttcagagccggcatgaagaaggaggccgtgcagaacgagagagacagaatcagcaccagaagagccgcctacgaggacagcagcctgcccagcatcaacgccctgctgcaggccgaggtgctgagcagacagatcaccagccccgtgagcggcatcaacggcgacatcagagccaagaagatcgccagcatcgccgacgtgtgcgagagcatgaaggagcagctgctggtgctggtggagtgggccaagtacatccccgccttctgcgagctgcccctggacgaccaggtggccctgctgagagcccacgccggcgagcacctgctgctgggcgccaccaagagaagcatggtgttcaaggacgtgctgctgctgggcaacgactacatcgtgcccagacactgccccgagctggccgagatgagcagagtgagcatcagaatcctggacgagctggtgctgcccttccaggagctgcagatcgacgacaacgagtacgcctacctgaaggccatcatcttcttcgaccccgacgccaagggcctgagcgaccccggcaagatcaagagactgagagcccaggtgcaggtgagcctggaggactacatcaacgacagacagtacgacagcagaggcagattcggcgagctgctgctgctgctgcccaccctgcagagcatcacctggcagatgatcgagcagatccagttcatcaagctgttcggcatggccaagatcgacaacctgctgcaggagatgctgctgggcggcagccccagcgacgccccccacgcccaccaccccctgcacccccacctgatgcaggagcacatgggcaccaacgtgatcgtggccaacaccatgcccacccacctgagcaacggccagatgtgcgagtggcccagacccagaggccaggccgccacccccgagaccccccagcccagcccccccggcggcagcggcagcgagccctacaagctgctgcccggcgccgtggccaccatcgtgagacccctgagcgccatcccccagcccaccatcaccaagcaggaggtgatctgaggactagtccctgttcccagagcccacttttttttctttttttgaaataaaatagcctgtctttcagatctcaaaggctcttttcagagccaccaaaaaaaaaaaaaaaaaaaaaaaaaaaaaaaaaaaaaaaaaaaaaaaaaaaaaaaaaaaaaaaaaaaaaaaaaaaaaaaaaaaaaaaaaaaaaaaaaaaaa

SEQ ID NO: 3135 - RNA, 1697 nt, synthetic construct
  misc_feature 1..1697: note = mRNA a-1 (hSL-A100) (opt4) from Homo sapiens__NP_000448.3__HNF4A(1-474)(S142A_S143A_S167A_S313A_ S378A_T429A_T432A_S436A_K458R)
  source 1..1697: mol_type = other RNA
aggagagtcccgcagtcggcgtccagcggctctgcttgttcgtgtgtgtgtcgttgcaggccttattcaagcttaccatgagactgagcaagaccctggtggacatggacatggccgactacagcgccgccctggaccccgcctacaccaccctggagttcgagaacgtgcaggtgctgaccatgggcaacgacaccagccccagcgagggcaccaacctgaacgcccccaacagcctgggcgtgagcgccctgtgcgccatctgcggcgacagagccaccggcaagcactacggcgccagcagctgcgacggctgcaagggcttcttcagaagaagcgtgagaaagaaccacatgtacagctgcagattcagcagacagtgcgtggtggacaaggacaagagaaaccagtgcagatactgcagactgaagaagtgcttcagagccggcatgaagaaggaggccgtgcagaacgagagagacagaatcagcaccagaagagccgcctacgaggacagcagcctgcccagcatcaacgccctgctgcaggccgaggtgctgagcagacagatcaccgcccccgtgagcggcatcaacggcgacatcagagccaagaagatcgccagcatcgccgacgtgtgcgagagcatgaaggagcagctgctggtgctggtggagtgggccaagtacatccccgccttctgcgagctgcccctggacgaccaggtggccctgctgagagcccacgccggcgagcacctgctgctgggcgccaccaagagaagcatggtgttcaaggacgtgctgctgctgggcaacgactacatcgtgcccagacactgccccgagctggccgagatgagcagagtgagcatcagaatcctggacgagctggtgctgcccttccaggagctgcagatcgacgacaacgagtacgcctacctgaaggccatcatcttcttcgaccccgacgccaagggcctgagcgaccccggcaagatcaagagactgagagcccaggtgcaggtgagcctggaggactacatcaacgacagacagtacgacagcagaggcagattcggcgagctgctgctgctgctgcccaccctgcagagcatcacctggcagatgatcgagcagatccagttcatcaagctgttcggcatggccaagatcgacaacctgctgcaggagatgctgctgggcggcgcccccagcgacgccccccacgcccaccaccccctgcacccccacctgatgcaggagcacatgggcaccaacgtgatcgtggccaacaccatgcccacccacctgagcaacggccagatgtgcgagtggcccagacccagaggccaggccgccgcccccgaggccccccagcccgccccccccggcggcagcggcagcgagccctacaagctgctgcccggcgccgtggccaccatcgtgagacccctgagcgccatcccccagcccaccatcaccaagcaggaggtgatctgaggactagtccctgttcccagagcccacttttttttctttttttgaaataaaatagcctgtctttcagatctcaaaggctcttttcagagccaccaaaaaaaaaaaaaaaaaaaaaaaaaaaaaaaaaaaaaaaaaaaaaaaaaaaaaaaaaaaaaaaaaaaaaaaaaaaaaaaaaaaaaaaaaaaaaaaaaaaaa

SEQ ID NO: 3136 - RNA, 1697 nt, synthetic construct
  misc_feature 1..1697: note = mRNA a-1 (hSL-A100) (opt4) from Homo sapiens__NP_000448.3__HNF4A(1-474)(S142A_S143A_S148A_S167A_ S313A_S378A_T429A_T432A_S436A_K458R)
  source 1..1697: mol_type = other RNA
aggagagtcccgcagtcggcgtccagcggctctgcttgttcgtgtgtgtgtcgttgcaggccttattcaagcttaccatgagactgagcaagaccctggtggacatggacatggccgactacagcgccgccctggaccccgcctacaccaccctggagttcgagaacgtgcaggtgctgaccatgggcaacgacaccagccccagcgagggcaccaacctgaacgcccccaacagcctgggcgtgagcgccctgtgcgccatctgcggcgacagagccaccggcaagcactacggcgccagcagctgcgacggctgcaagggcttcttcagaagaagcgtgagaaagaaccacatgtacagctgcagattcagcagacagtgcgtggtggacaaggacaagagaaaccagtgcagatactgcagactgaagaagtgcttcagagccggcatgaagaaggaggccgtgcagaacgagagagacagaatcagcaccagaagagccgcctacgaggacagcgccctgcccagcatcaacgccctgctgcaggccgaggtgctgagcagacagatcaccgcccccgtgagcggcatcaacggcgacatcagagccaagaagatcgccagcatcgccgacgtgtgcgagagcatgaaggagcagctgctggtgctggtggagtgggccaagtacatccccgccttctgcgagctgcccctggacgaccaggtggccctgctgagagcccacgccggcgagcacctgctgctgggcgccaccaagagaagcatggtgttcaaggacgtgctgctgctgggcaacgactacatcgtgcccagacactgccccgagctggccgagatgagcagagtgagcatcagaatcctggacgagctggtgctgcccttccaggagctgcagatcgacgacaacgagtacgcctacctgaaggccatcatcttcttcgaccccgacgccaagggcctgagcgaccccggcaagatcaagagactgagagcccaggtgcaggtgagcctggaggactacatcaacgacagacagtacgacagcagaggcagattcggcgagctgctgctgctgctgcccaccctgcagagcatcacctggcagatgatcgagcagatccagttcatcaagctgttcggcatggccaagatcgacaacctgctgcaggagatgctgctgggcggcgcccccagcgacgccccccacgcccaccaccccctgcacccccacctgatgcaggagcacatgggcaccaacgtgatcgtggccaacaccatgcccacccacctgagcaacggccagatgtgcgagtggcccagacccagaggccaggccgccgcccccgaggccccccagcccgccccccccggcggcagcggcagcgagccctacaagctgctgcccggcgccgtggccaccatcgtgagacccctgagcgccatcccccagcccaccatcaccaagcaggaggtgatctgaggactagtccctgttcccagagcccacttttttttctttttttgaaataaaatagcctgtctttcagatctcaaaggctcttttcagagccaccaaaaaaaaaaaaaaaaaaaaaaaaaaaaaaaaaaaaaaaaaaaaaaaaaaaaaaaaaaaaaaaaaaaaaaaaaaaaaaaaaaaaaaaaaaaaaaaaaaaaa

SEQ ID NO: 3137 - RNA, 1697 nt, synthetic construct
  misc_feature 1..1697: note = mRNA a-1 (hSL-A100) (opt4) from Homo sapiens__NP_000448.3__HNF4A(1-474)(K106R_K108R_K126R_K127R_ S142A_S143A_S148A_S167A_S313A_S378A_T429A_T432A_S436A_K458R )
  source 1..1697: mol_type = other RNA
aggagagtcccgcagtcggcgtccagcggctctgcttgttcgtgtgtgtgtcgttgcaggccttattcaagcttaccatgagactgagcaagaccctggtggacatggacatggccgactacagcgccgccctggaccccgcctacaccaccctggagttcgagaacgtgcaggtgctgaccatgggcaacgacaccagccccagcgagggcaccaacctgaacgcccccaacagcctgggcgtgagcgccctgtgcgccatctgcggcgacagagccaccggcaagcactacggcgccagcagctgcgacggctgcaagggcttcttcagaagaagcgtgagaaagaaccacatgtacagctgcagattcagcagacagtgcgtggtggacagagacagaagaaaccagtgcagatactgcagactgaagaagtgcttcagagccggcatgagaagagaggccgtgcagaacgagagagacagaatcagcaccagaagagccgcctacgaggacagcgccctgcccagcatcaacgccctgctgcaggccgaggtgctgagcagacagatcaccgcccccgtgagcggcatcaacggcgacatcagagccaagaagatcgccagcatcgccgacgtgtgcgagagcatgaaggagcagctgctggtgctggtggagtgggccaagtacatccccgccttctgcgagctgcccctggacgaccaggtggccctgctgagagcccacgccggcgagcacctgctgctgggcgccaccaagagaagcatggtgttcaaggacgtgctgctgctgggcaacgactacatcgtgcccagacactgccccgagctggccgagatgagcagagtgagcatcagaatcctggacgagctggtgctgcccttccaggagctgcagatcgacgacaacgagtacgcctacctgaaggccatcatcttcttcgaccccgacgccaagggcctgagcgaccccggcaagatcaagagactgagagcccaggtgcaggtgagcctggaggactacatcaacgacagacagtacgacagcagaggcagattcggcgagctgctgctgctgctgcccaccctgcagagcatcacctggcagatgatcgagcagatccagttcatcaagctgttcggcatggccaagatcgacaacctgctgcaggagatgctgctgggcggcgcccccagcgacgccccccacgcccaccaccccctgcacccccacctgatgcaggagcacatgggcaccaacgtgatcgtggccaacaccatgcccacccacctgagcaacggccagatgtgcgagtggcccagacccagaggccaggccgccgcccccgaggccccccagcccgccccccccggcggcagcggcagcgagccctacaagctgctgcccggcgccgtggccaccatcgtgagacccctgagcgccatcccccagcccaccatcaccaagcaggaggtgatctgaggactagtccctgttcccagagcccacttttttttctttttttgaaataaaatagcctgtctttcagatctcaaaggctcttttcagagccaccaaaaaaaaaaaaaaaaaaaaaaaaaaaaaaaaaaaaaaaaaaaaaaaaaaaaaaaaaaaaaaaaaaaaaaaaaaaaaaaaaaaaaaaaaaaaaaaaaaaaa

SEQ ID NO: 3138 - RNA, 1697 nt, synthetic construct
  misc_feature 1..1697: note = mRNA a-1 (hSL-A100) (opt4) from Homo sapiens__NP_000448.3__HNF4A(1-474)(S142A_S143A_S148A_T166A_ S167A_S313A_S378A_T429A_T432A_S436A_K458R)
  source 1..1697: mol_type = other RNA
aggagagtcccgcagtcggcgtccagcggctctgcttgttcgtgtgtgtgtcgttgcaggccttattcaagcttaccatgagactgagcaagaccctggtggacatggacatggccgactacagcgccgccctggaccccgcctacaccaccctggagttcgagaacgtgcaggtgctgaccatgggcaacgacaccagccccagcgagggcaccaacctgaacgcccccaacagcctgggcgtgagcgccctgtgcgccatctgcggcgacagagccaccggcaagcactacggcgccagcagctgcgacggctgcaagggcttcttcagaagaagcgtgagaaagaaccacatgtacagctgcagattcagcagacagtgcgtggtggacaaggacaagagaaaccagtgcagatactgcagactgaagaagtgcttcagagccggcatgaagaaggaggccgtgcagaacgagagagacagaatcagcaccagaagagccgcctacgaggacagcgccctgcccagcatcaacgccctgctgcaggccgaggtgctgagcagacagatcgccgcccccgtgagcggcatcaacggcgacatcagagccaagaagatcgccagcatcgccgacgtgtgcgagagcatgaaggagcagctgctggtgctggtggagtgggccaagtacatccccgccttctgcgagctgcccctggacgaccaggtggccctgctgagagcccacgccggcgagcacctgctgctgggcgccaccaagagaagcatggtgttcaaggacgtgctgctgctgggcaacgactacatcgtgcccagacactgccccgagctggccgagatgagcagagtgagcatcagaatcctggacgagctggtgctgcccttccaggagctgcagatcgacgacaacgagtacgcctacctgaaggccatcatcttcttcgaccccgacgccaagggcctgagcgaccccggcaagatcaagagactgagagcccaggtgcaggtgagcctggaggactacatcaacgacagacagtacgacagcagaggcagattcggcgagctgctgctgctgctgcccaccctgcagagcatcacctggcagatgatcgagcagatccagttcatcaagctgttcggcatggccaagatcgacaacctgctgcaggagatgctgctgggcggcgcccccagcgacgccccccacgcccaccaccccctgcacccccacctgatgcaggagcacatgggcaccaacgtgatcgtggccaacaccatgcccacccacctgagcaacggccagatgtgcgagtggcccagacccagaggccaggccgccgcccccgaggccccccagcccgccccccccggcggcagcggcagcgagccctacaagctgctgcccggcgccgtggccaccatcgtgagacccctgagcgccatcccccagcccaccatcaccaagcaggaggtgatctgaggactagtccctgttcccagagcccacttttttttctttttttgaaataaaatagcctgtctttcagatctcaaaggctcttttcagagccaccaaaaaaaaaaaaaaaaaaaaaaaaaaaaaaaaaaaaaaaaaaaaaaaaaaaaaaaaaaaaaaaaaaaaaaaaaaaaaaaaaaaaaaaaaaaaaaaaaaaaa

SEQ ID NO: 3139 - RNA, 1697 nt, synthetic construct
  misc_feature 1..1697: note = mRNA a-1 (hSL-A100) (opt4) from Homo sapiens__NP_000448.3__HNF4A(1-474)(S87A_S142A_S143A_S148A_T 166A_S167A_S313A_S378A_T429A_T432A_S436A_K458R)
  source 1..1697: mol_type = other RNA
aggagagtcccgcagtcggcgtccagcggctctgcttgttcgtgtgtgtgtcgttgcaggccttattcaagcttaccatgagactgagcaagaccctggtggacatggacatggccgactacagcgccgccctggaccccgcctacaccaccctggagttcgagaacgtgcaggtgctgaccatgggcaacgacaccagccccagcgagggcaccaacctgaacgcccccaacagcctgggcgtgagcgccctgtgcgccatctgcggcgacagagccaccggcaagcactacggcgccagcagctgcgacggctgcaagggcttcttcagaagagccgtgagaaagaaccacatgtacagctgcagattcagcagacagtgcgtggtggacaaggacaagagaaaccagtgcagatactgcagactgaagaagtgcttcagagccggcatgaagaaggaggccgtgcagaacgagagagacagaatcagcaccagaagagccgcctacgaggacagcgccctgcccagcatcaacgccctgctgcaggccgaggtgctgagcagacagatcgccgcccccgtgagcggcatcaacggcgacatcagagccaagaagatcgccagcatcgccgacgtgtgcgagagcatgaaggagcagctgctggtgctggtggagtgggccaagtacatccccgccttctgcgagctgcccctggacgaccaggtggccctgctgagagcccacgccggcgagcacctgctgctgggcgccaccaagagaagcatggtgttcaaggacgtgctgctgctgggcaacgactacatcgtgcccagacactgccccgagctggccgagatgagcagagtgagcatcagaatcctggacgagctggtgctgcccttccaggagctgcagatcgacgacaacgagtacgcctacctgaaggccatcatcttcttcgaccccgacgccaagggcctgagcgaccccggcaagatcaagagactgagagcccaggtgcaggtgagcctggaggactacatcaacgacagacagtacgacagcagaggcagattcggcgagctgctgctgctgctgcccaccctgcagagcatcacctggcagatgatcgagcagatccagttcatcaagctgttcggcatggccaagatcgacaacctgctgcaggagatgctgctgggcggcgcccccagcgacgccccccacgcccaccaccccctgcacccccacctgatgcaggagcacatgggcaccaacgtgatcgtggccaacaccatgcccacccacctgagcaacggccagatgtgcgagtggcccagacccagaggccaggccgccgcccccgaggccccccagcccgccccccccggcggcagcggcagcgagccctacaagctgctgcccggcgccgtggccaccatcgtgagacccctgagcgccatcccccagcccaccatcaccaagcaggaggtgatctgaggactagtccctgttcccagagcccacttttttttctttttttgaaataaaatagcctgtctttcagatctcaaaggctcttttcagagccaccaaaaaaaaaaaaaaaaaaaaaaaaaaaaaaaaaaaaaaaaaaaaaaaaaaaaaaaaaaaaaaaaaaaaaaaaaaaaaaaaaaaaaaaaaaaaaaaaaaaaa

SEQ ID NO: 3140 - RNA, 1697 nt, synthetic construct
  misc_feature 1..1697: note = mRNA a-1 (hSL-A100) (opt4) from Homo sapiens__NP_000448.3__HNF4A(1-474)(S87A_K106R_K108R_K126R_K 127R_S142A_S143A_S148A_T166A_S167A_S313A_S378A_T429A_T432A_ S436A_K458R)
  source 1..1697: mol_type = other RNA
aggagagtcccgcagtcggcgtccagcggctctgcttgttcgtgtgtgtgtcgttgcaggccttattcaagcttaccatgagactgagcaagaccctggtggacatggacatggccgactacagcgccgccctggaccccgcctacaccaccctggagttcgagaacgtgcaggtgctgaccatgggcaacgacaccagccccagcgagggcaccaacctgaacgcccccaacagcctgggcgtgagcgccctgtgcgccatctgcggcgacagagccaccggcaagcactacggcgccagcagctgcgacggctgcaagggcttcttcagaagagccgtgagaaagaaccacatgtacagctgcagattcagcagacagtgcgtggtggacagagacagaagaaaccagtgcagatactgcagactgaagaagtgcttcagagccggcatgagaagagaggccgtgcagaacgagagagacagaatcagcaccagaagagccgcctacgaggacagcgccctgcccagcatcaacgccctgctgcaggccgaggtgctgagcagacagatcgccgcccccgtgagcggcatcaacggcgacatcagagccaagaagatcgccagcatcgccgacgtgtgcgagagcatgaaggagcagctgctggtgctggtggagtgggccaagtacatccccgccttctgcgagctgcccctggacgaccaggtggccctgctgagagcccacgccggcgagcacctgctgctgggcgccaccaagagaagcatggtgttcaaggacgtgctgctgctgggcaacgactacatcgtgcccagacactgccccgagctggccgagatgagcagagtgagcatcagaatcctggacgagctggtgctgcccttccaggagctgcagatcgacgacaacgagtacgcctacctgaaggccatcatcttcttcgaccccgacgccaagggcctgagcgaccccggcaagatcaagagactgagagcccaggtgcaggtgagcctggaggactacatcaacgacagacagtacgacagcagaggcagattcggcgagctgctgctgctgctgcccaccctgcagagcatcacctggcagatgatcgagcagatccagttcatcaagctgttcggcatggccaagatcgacaacctgctgcaggagatgctgctgggcggcgcccccagcgacgccccccacgcccaccaccccctgcacccccacctgatgcaggagcacatgggcaccaacgtgatcgtggccaacaccatgcccacccacctgagcaacggccagatgtgcgagtggcccagacccagaggccaggccgccgcccccgaggccccccagcccgccccccccggcggcagcggcagcgagccctacaagctgctgcccggcgccgtggccaccatcgtgagacccctgagcgccatcccccagcccaccatcaccaagcaggaggtgatctgaggactagtccctgttcccagagcccacttttttttctttttttgaaataaaatagcctgtctttcagatctcaaaggctcttttcagagccaccaaaaaaaaaaaaaaaaaaaaaaaaaaaaaaaaaaaaaaaaaaaaaaaaaaaaaaaaaaaaaaaaaaaaaaaaaaaaaaaaaaaaaaaaaaaaaaaaaaaaa

SEQ ID NO: 3141 - RNA, 1697 nt, synthetic construct
  misc_feature 1..1697: note = mRNA a-1 (hSL-A100) (opt4) from Homo sapiens__NP_000448.3__HNF4A(1-474)(S87A_K106R_K108R_K126R_K 127R)
  source 1..1697: mol_type = other RNA
aggagagtcccgcagtcggcgtccagcggctctgcttgttcgtgtgtgtgtcgttgcaggccttattcaagcttaccatgagactgagcaagaccctggtggacatggacatggccgactacagcgccgccctggaccccgcctacaccaccctggagttcgagaacgtgcaggtgctgaccatgggcaacgacaccagccccagcgagggcaccaacctgaacgcccccaacagcctgggcgtgagcgccctgtgcgccatctgcggcgacagagccaccggcaagcactacggcgccagcagctgcgacggctgcaagggcttcttcagaagagccgtgagaaagaaccacatgtacagctgcagattcagcagacagtgcgtggtggacagagacagaagaaaccagtgcagatactgcagactgaagaagtgcttcagagccggcatgagaagagaggccgtgcagaacgagagagacagaatcagcaccagaagaagcagctacgaggacagcagcctgcccagcatcaacgccctgctgcaggccgaggtgctgagcagacagatcaccagccccgtgagcggcatcaacggcgacatcagagccaagaagatcgccagcatcgccgacgtgtgcgagagcatgaaggagcagctgctggtgctggtggagtgggccaagtacatccccgccttctgcgagctgcccctggacgaccaggtggccctgctgagagcccacgccggcgagcacctgctgctgggcgccaccaagagaagcatggtgttcaaggacgtgctgctgctgggcaacgactacatcgtgcccagacactgccccgagctggccgagatgagcagagtgagcatcagaatcctggacgagctggtgctgcccttccaggagctgcagatcgacgacaacgagtacgcctacctgaaggccatcatcttcttcgaccccgacgccaagggcctgagcgaccccggcaagatcaagagactgagaagccaggtgcaggtgagcctggaggactacatcaacgacagacagtacgacagcagaggcagattcggcgagctgctgctgctgctgcccaccctgcagagcatcacctggcagatgatcgagcagatccagttcatcaagctgttcggcatggccaagatcgacaacctgctgcaggagatgctgctgggcggcagccccagcgacgccccccacgcccaccaccccctgcacccccacctgatgcaggagcacatgggcaccaacgtgatcgtggccaacaccatgcccacccacctgagcaacggccagatgtgcgagtggcccagacccagaggccaggccgccacccccgagaccccccagcccagcccccccggcggcagcggcagcgagccctacaagctgctgcccggcgccgtggccaccatcgtgaagcccctgagcgccatcccccagcccaccatcaccaagcaggaggtgatctgaggactagtccctgttcccagagcccacttttttttctttttttgaaataaaatagcctgtctttcagatctcaaaggctcttttcagagccaccaaaaaaaaaaaaaaaaaaaaaaaaaaaaaaaaaaaaaaaaaaaaaaaaaaaaaaaaaaaaaaaaaaaaaaaaaaaaaaaaaaaaaaaaaaaaaaaaaaaaa

SEQ ID NO: 3142 - RNA, 1697 nt, synthetic construct
  misc_feature 1..1697: note = mRNA a-1 (hSL-A100) (opt4) from Homo sapiens__NP_000448.3__HNF4A(1-474)(S87A_K106R_K108R_K126R_K 127R_S142A_S143A_S148A_T166A_S167A_S313A_S378A_T429A_T432A_ S436A_K458R_S461A)
  source 1..1697: mol_type = other RNA
aggagagtcccgcagtcggcgtccagcggctctgcttgttcgtgtgtgtgtcgttgcaggccttattcaagcttaccatgagactgagcaagaccctggtggacatggacatggccgactacagcgccgccctggaccccgcctacaccaccctggagttcgagaacgtgcaggtgctgaccatgggcaacgacaccagccccagcgagggcaccaacctgaacgcccccaacagcctgggcgtgagcgccctgtgcgccatctgcggcgacagagccaccggcaagcactacggcgccagcagctgcgacggctgcaagggcttcttcagaagagccgtgagaaagaaccacatgtacagctgcagattcagcagacagtgcgtggtggacagagacagaagaaaccagtgcagatactgcagactgaagaagtgcttcagagccggcatgagaagagaggccgtgcagaacgagagagacagaatcagcaccagaagagccgcctacgaggacagcgccctgcccagcatcaacgccctgctgcaggccgaggtgctgagcagacagatcgccgcccccgtgagcggcatcaacggcgacatcagagccaagaagatcgccagcatcgccgacgtgtgcgagagcatgaaggagcagctgctggtgctggtggagtgggccaagtacatccccgccttctgcgagctgcccctggacgaccaggtggccctgctgagagcccacgccggcgagcacctgctgctgggcgccaccaagagaagcatggtgttcaaggacgtgctgctgctgggcaacgactacatcgtgcccagacactgccccgagctggccgagatgagcagagtgagcatcagaatcctggacgagctggtgctgcccttccaggagctgcagatcgacgacaacgagtacgcctacctgaaggccatcatcttcttcgaccccgacgccaagggcctgagcgaccccggcaagatcaagagactgagagcccaggtgcaggtgagcctggaggactacatcaacgacagacagtacgacagcagaggcagattcggcgagctgctgctgctgctgcccaccctgcagagcatcacctggcagatgatcgagcagatccagttcatcaagctgttcggcatggccaagatcgacaacctgctgcaggagatgctgctgggcggcgcccccagcgacgccccccacgcccaccaccccctgcacccccacctgatgcaggagcacatgggcaccaacgtgatcgtggccaacaccatgcccacccacctgagcaacggccagatgtgcgagtggcccagacccagaggccaggccgccgcccccgaggccccccagcccgccccccccggcggcagcggcagcgagccctacaagctgctgcccggcgccgtggccaccatcgtgagacccctggccgccatcccccagcccaccatcaccaagcaggaggtgatctgaggactagtccctgttcccagagcccacttttttttctttttttgaaataaaatagcctgtctttcagatctcaaaggctcttttcagagccaccaaaaaaaaaaaaaaaaaaaaaaaaaaaaaaaaaaaaaaaaaaaaaaaaaaaaaaaaaaaaaaaaaaaaaaaaaaaaaaaaaaaaaaaaaaaaaaaaaaaaa

SEQ ID NO: 3143 - RNA, 1697 nt, synthetic construct
  misc_feature 1..1697: note = mRNA a-1 (hSL-A100) (opt4) from Homo sapiens__NP_000448.3__HNF4A(1-474)(S87A_K106R_K108R_K126R_K 127R_S142A_S143A_S148A_T166A_S167A_S313A_S378A_T429A_T432A_ S436A_K458R_S461E)
  source 1..1697: mol_type = other RNA
aggagagtcccgcagtcggcgtccagcggctctgcttgttcgtgtgtgtgtcgttgcaggccttattcaagcttaccatgagactgagcaagaccctggtggacatggacatggccgactacagcgccgccctggaccccgcctacaccaccctggagttcgagaacgtgcaggtgctgaccatgggcaacgacaccagccccagcgagggcaccaacctgaacgcccccaacagcctgggcgtgagcgccctgtgcgccatctgcggcgacagagccaccggcaagcactacggcgccagcagctgcgacggctgcaagggcttcttcagaagagccgtgagaaagaaccacatgtacagctgcagattcagcagacagtgcgtggtggacagagacagaagaaaccagtgcagatactgcagactgaagaagtgcttcagagccggcatgagaagagaggccgtgcagaacgagagagacagaatcagcaccagaagagccgcctacgaggacagcgccctgcccagcatcaacgccctgctgcaggccgaggtgctgagcagacagatcgccgcccccgtgagcggcatcaacggcgacatcagagccaagaagatcgccagcatcgccgacgtgtgcgagagcatgaaggagcagctgctggtgctggtggagtgggccaagtacatccccgccttctgcgagctgcccctggacgaccaggtggccctgctgagagcccacgccggcgagcacctgctgctgggcgccaccaagagaagcatggtgttcaaggacgtgctgctgctgggcaacgactacatcgtgcccagacactgccccgagctggccgagatgagcagagtgagcatcagaatcctggacgagctggtgctgcccttccaggagctgcagatcgacgacaacgagtacgcctacctgaaggccatcatcttcttcgaccccgacgccaagggcctgagcgaccccggcaagatcaagagactgagagcccaggtgcaggtgagcctggaggactacatcaacgacagacagtacgacagcagaggcagattcggcgagctgctgctgctgctgcccaccctgcagagcatcacctggcagatgatcgagcagatccagttcatcaagctgttcggcatggccaagatcgacaacctgctgcaggagatgctgctgggcggcgcccccagcgacgccccccacgcccaccaccccctgcacccccacctgatgcaggagcacatgggcaccaacgtgatcgtggccaacaccatgcccacccacctgagcaacggccagatgtgcgagtggcccagacccagaggccaggccgccgcccccgaggccccccagcccgccccccccggcggcagcggcagcgagccctacaagctgctgcccggcgccgtggccaccatcgtgagacccctggaggccatcccccagcccaccatcaccaagcaggaggtgatctgaggactagtccctgttcccagagcccacttttttttctttttttgaaataaaatagcctgtctttcagatctcaaaggctcttttcagagccaccaaaaaaaaaaaaaaaaaaaaaaaaaaaaaaaaaaaaaaaaaaaaaaaaaaaaaaaaaaaaaaaaaaaaaaaaaaaaaaaaaaaaaaaaaaaaaaaaaaaaa

SEQ ID NO: 3144 - RNA, 1697 nt, synthetic construct
  misc_feature 1..1697: note = mRNA a-1 (hSL-A100) (opt4) from Homo sapiens__NP_000448.3__HNF4A(1-474)(S87A_K106R_K108R_K126R_K 127R_S142A_S143A_S148E_T166A_S167E_S313A_S378E_T429E_T432E_ S436E_K458R_S461E)
  source 1..1697: mol_type = other RNA
aggagagtcccgcagtcggcgtccagcggctctgcttgttcgtgtgtgtgtcgttgcaggccttattcaagcttaccatgagactgagcaagaccctggtggacatggacatggccgactacagcgccgccctggaccccgcctacaccaccctggagttcgagaacgtgcaggtgctgaccatgggcaacgacaccagccccagcgagggcaccaacctgaacgcccccaacagcctgggcgtgagcgccctgtgcgccatctgcggcgacagagccaccggcaagcactacggcgccagcagctgcgacggctgcaagggcttcttcagaagagccgtgagaaagaaccacatgtacagctgcagattcagcagacagtgcgtggtggacagagacagaagaaaccagtgcagatactgcagactgaagaagtgcttcagagccggcatgagaagagaggccgtgcagaacgagagagacagaatcagcaccagaagagccgcctacgaggacagcgagctgcccagcatcaacgccctgctgcaggccgaggtgctgagcagacagatcgccgagcccgtgagcggcatcaacggcgacatcagagccaagaagatcgccagcatcgccgacgtgtgcgagagcatgaaggagcagctgctggtgctggtggagtgggccaagtacatccccgccttctgcgagctgcccctggacgaccaggtggccctgctgagagcccacgccggcgagcacctgctgctgggcgccaccaagagaagcatggtgttcaaggacgtgctgctgctgggcaacgactacatcgtgcccagacactgccccgagctggccgagatgagcagagtgagcatcagaatcctggacgagctggtgctgcccttccaggagctgcagatcgacgacaacgagtacgcctacctgaaggccatcatcttcttcgaccccgacgccaagggcctgagcgaccccggcaagatcaagagactgagagcccaggtgcaggtgagcctggaggactacatcaacgacagacagtacgacagcagaggcagattcggcgagctgctgctgctgctgcccaccctgcagagcatcacctggcagatgatcgagcagatccagttcatcaagctgttcggcatggccaagatcgacaacctgctgcaggagatgctgctgggcggcgagcccagcgacgccccccacgcccaccaccccctgcacccccacctgatgcaggagcacatgggcaccaacgtgatcgtggccaacaccatgcccacccacctgagcaacggccagatgtgcgagtggcccagacccagaggccaggccgccgagcccgaggagccccagcccgagccccccggcggcagcggcagcgagccctacaagctgctgcccggcgccgtggccaccatcgtgagacccctggaggccatcccccagcccaccatcaccaagcaggaggtgatctgaggactagtccctgttcccagagcccacttttttttctttttttgaaataaaatagcctgtctttcagatctcaaaggctcttttcagagccaccaaaaaaaaaaaaaaaaaaaaaaaaaaaaaaaaaaaaaaaaaaaaaaaaaaaaaaaaaaaaaaaaaaaaaaaaaaaaaaaaaaaaaaaaaaaaaaaaaaaaa

SEQ ID NO: 3145 - RNA, 1697 nt, synthetic construct
  misc_feature 1..1697: note = mRNA a-1 (hSL-A100) (opt4) from Homo sapiens__NP_000448.3__HNF4A(1-474)(S87A_K106R_K108R_K126R_K 127R_S142A_S143A_S148A_T166A_S167A_K179R_K180R_S313A_S378A_ T429A_T432A_S436A_K458R_S461E)
  source 1..1697: mol_type = other RNA
aggagagtcccgcagtcggcgtccagcggctctgcttgttcgtgtgtgtgtcgttgcaggccttattcaagcttaccatgagactgagcaagaccctggtggacatggacatggccgactacagcgccgccctggaccccgcctacaccaccctggagttcgagaacgtgcaggtgctgaccatgggcaacgacaccagccccagcgagggcaccaacctgaacgcccccaacagcctgggcgtgagcgccctgtgcgccatctgcggcgacagagccaccggcaagcactacggcgccagcagctgcgacggctgcaagggcttcttcagaagagccgtgagaaagaaccacatgtacagctgcagattcagcagacagtgcgtggtggacagagacagaagaaaccagtgcagatactgcagactgaagaagtgcttcagagccggcatgagaagagaggccgtgcagaacgagagagacagaatcagcaccagaagagccgcctacgaggacagcgccctgcccagcatcaacgccctgctgcaggccgaggtgctgagcagacagatcgccgcccccgtgagcggcatcaacggcgacatcagagccagaagaatcgccagcatcgccgacgtgtgcgagagcatgaaggagcagctgctggtgctggtggagtgggccaagtacatccccgccttctgcgagctgcccctggacgaccaggtggccctgctgagagcccacgccggcgagcacctgctgctgggcgccaccaagagaagcatggtgttcaaggacgtgctgctgctgggcaacgactacatcgtgcccagacactgccccgagctggccgagatgagcagagtgagcatcagaatcctggacgagctggtgctgcccttccaggagctgcagatcgacgacaacgagtacgcctacctgaaggccatcatcttcttcgaccccgacgccaagggcctgagcgaccccggcaagatcaagagactgagagcccaggtgcaggtgagcctggaggactacatcaacgacagacagtacgacagcagaggcagattcggcgagctgctgctgctgctgcccaccctgcagagcatcacctggcagatgatcgagcagatccagttcatcaagctgttcggcatggccaagatcgacaacctgctgcaggagatgctgctgggcggcgcccccagcgacgccccccacgcccaccaccccctgcacccccacctgatgcaggagcacatgggcaccaacgtgatcgtggccaacaccatgcccacccacctgagcaacggccagatgtgcgagtggcccagacccagaggccaggccgccgcccccgaggccccccagcccgccccccccggcggcagcggcagcgagccctacaagctgctgcccggcgccgtggccaccatcgtgagacccctggaggccatcccccagcccaccatcaccaagcaggaggtgatctgaggactagtccctgttcccagagcccacttttttttctttttttgaaataaaatagcctgtctttcagatctcaaaggctcttttcagagccaccaaaaaaaaaaaaaaaaaaaaaaaaaaaaaaaaaaaaaaaaaaaaaaaaaaaaaaaaaaaaaaaaaaaaaaaaaaaaaaaaaaaaaaaaaaaaaaaaaaaaa

SEQ ID NO: 3146 - RNA, 1697 nt, synthetic construct
  misc_feature 1..1697: note = mRNA a-1 (hSL-A100) (opt4) from Homo sapiens__NP_000448.3__HNF4A(1-474)(S87A_K106R_K108R_K126R_K 127R_S142A_S143A_S148A_T166A_S167A_K300R_K307R_K309R_S313A_ S378A_T429A_T432A_S436A_K458R_S461E)
  source 1..1697: mol_type = other RNA
aggagagtcccgcagtcggcgtccagcggctctgcttgttcgtgtgtgtgtcgttgcaggccttattcaagcttaccatgagactgagcaagaccctggtggacatggacatggccgactacagcgccgccctggaccccgcctacaccaccctggagttcgagaacgtgcaggtgctgaccatgggcaacgacaccagccccagcgagggcaccaacctgaacgcccccaacagcctgggcgtgagcgccctgtgcgccatctgcggcgacagagccaccggcaagcactacggcgccagcagctgcgacggctgcaagggcttcttcagaagagccgtgagaaagaaccacatgtacagctgcagattcagcagacagtgcgtggtggacagagacagaagaaaccagtgcagatactgcagactgaagaagtgcttcagagccggcatgagaagagaggccgtgcagaacgagagagacagaatcagcaccagaagagccgcctacgaggacagcgccctgcccagcatcaacgccctgctgcaggccgaggtgctgagcagacagatcgccgcccccgtgagcggcatcaacggcgacatcagagccaagaagatcgccagcatcgccgacgtgtgcgagagcatgaaggagcagctgctggtgctggtggagtgggccaagtacatccccgccttctgcgagctgcccctggacgaccaggtggccctgctgagagcccacgccggcgagcacctgctgctgggcgccaccaagagaagcatggtgttcaaggacgtgctgctgctgggcaacgactacatcgtgcccagacactgccccgagctggccgagatgagcagagtgagcatcagaatcctggacgagctggtgctgcccttccaggagctgcagatcgacgacaacgagtacgcctacctgaaggccatcatcttcttcgaccccgacgccagaggcctgagcgaccccggcagaatcagaagactgagagcccaggtgcaggtgagcctggaggactacatcaacgacagacagtacgacagcagaggcagattcggcgagctgctgctgctgctgcccaccctgcagagcatcacctggcagatgatcgagcagatccagttcatcaagctgttcggcatggccaagatcgacaacctgctgcaggagatgctgctgggcggcgcccccagcgacgccccccacgcccaccaccccctgcacccccacctgatgcaggagcacatgggcaccaacgtgatcgtggccaacaccatgcccacccacctgagcaacggccagatgtgcgagtggcccagacccagaggccaggccgccgcccccgaggccccccagcccgccccccccggcggcagcggcagcgagccctacaagctgctgcccggcgccgtggccaccatcgtgagacccctggaggccatcccccagcccaccatcaccaagcaggaggtgatctgaggactagtccctgttcccagagcccacttttttttctttttttgaaataaaatagcctgtctttcagatctcaaaggctcttttcagagccaccaaaaaaaaaaaaaaaaaaaaaaaaaaaaaaaaaaaaaaaaaaaaaaaaaaaaaaaaaaaaaaaaaaaaaaaaaaaaaaaaaaaaaaaaaaaaaaaaaaaaa

SEQ ID NO: 3147 - RNA, 1697 nt, synthetic construct
  misc_feature 1..1697: note = mRNA a-1 (hSL-A100) (opt4) from Homo sapiens__NP_000448.3__HNF4A(1-474)(S87A_K106R_K108R_K126R_K 127R_S142A_S143A_S148A_T166A_S167A_S313A_S378A_T429A_T432A_ S436A_K447R_K458R_S461E_K470R)
  source 1..1697: mol_type = other RNA
aggagagtcccgcagtcggcgtccagcggctctgcttgttcgtgtgtgtgtcgttgcaggccttattcaagcttaccatgagactgagcaagaccctggtggacatggacatggccgactacagcgccgccctggaccccgcctacaccaccctggagttcgagaacgtgcaggtgctgaccatgggcaacgacaccagccccagcgagggcaccaacctgaacgcccccaacagcctgggcgtgagcgccctgtgcgccatctgcggcgacagagccaccggcaagcactacggcgccagcagctgcgacggctgcaagggcttcttcagaagagccgtgagaaagaaccacatgtacagctgcagattcagcagacagtgcgtggtggacagagacagaagaaaccagtgcagatactgcagactgaagaagtgcttcagagccggcatgagaagagaggccgtgcagaacgagagagacagaatcagcaccagaagagccgcctacgaggacagcgccctgcccagcatcaacgccctgctgcaggccgaggtgctgagcagacagatcgccgcccccgtgagcggcatcaacggcgacatcagagccaagaagatcgccagcatcgccgacgtgtgcgagagcatgaaggagcagctgctggtgctggtggagtgggccaagtacatccccgccttctgcgagctgcccctggacgaccaggtggccctgctgagagcccacgccggcgagcacctgctgctgggcgccaccaagagaagcatggtgttcaaggacgtgctgctgctgggcaacgactacatcgtgcccagacactgccccgagctggccgagatgagcagagtgagcatcagaatcctggacgagctggtgctgcccttccaggagctgcagatcgacgacaacgagtacgcctacctgaaggccatcatcttcttcgaccccgacgccaagggcctgagcgaccccggcaagatcaagagactgagagcccaggtgcaggtgagcctggaggactacatcaacgacagacagtacgacagcagaggcagattcggcgagctgctgctgctgctgcccaccctgcagagcatcacctggcagatgatcgagcagatccagttcatcaagctgttcggcatggccaagatcgacaacctgctgcaggagatgctgctgggcggcgcccccagcgacgccccccacgcccaccaccccctgcacccccacctgatgcaggagcacatgggcaccaacgtgatcgtggccaacaccatgcccacccacctgagcaacggccagatgtgcgagtggcccagacccagaggccaggccgccgcccccgaggccccccagcccgccccccccggcggcagcggcagcgagccctacagactgctgcccggcgccgtggccaccatcgtgagacccctggaggccatcccccagcccaccatcaccagacaggaggtgatctgaggactagtccctgttcccagagcccacttttttttctttttttgaaataaaatagcctgtctttcagatctcaaaggctcttttcagagccaccaaaaaaaaaaaaaaaaaaaaaaaaaaaaaaaaaaaaaaaaaaaaaaaaaaaaaaaaaaaaaaaaaaaaaaaaaaaaaaaaaaaaaaaaaaaaaaaaaaaaa

SEQ ID NO: 3148 - RNA, 1697 nt, synthetic construct
  misc_feature 1..1697: note = mRNA a-1 (hSL-A100) (opt4) from Homo sapiens__NP_000448.3__HNF4A(1-474)(S87A_K106R_K108R_K126R_K 127R_S142A_S143A_S148A_T166A_S167A_K179R_K180R_K234R_K300R_ K307R_K309R_S313A_S378A_T429A_T432A_S436A_K447R_K458R_S461E _K470R)
  source 1..1697: mol_type = other RNA
aggagagtcccgcagtcggcgtccagcggctctgcttgttcgtgtgtgtgtcgttgcaggccttattcaagcttaccatgagactgagcaagaccctggtggacatggacatggccgactacagcgccgccctggaccccgcctacaccaccctggagttcgagaacgtgcaggtgctgaccatgggcaacgacaccagccccagcgagggcaccaacctgaacgcccccaacagcctgggcgtgagcgccctgtgcgccatctgcggcgacagagccaccggcaagcactacggcgccagcagctgcgacggctgcaagggcttcttcagaagagccgtgagaaagaaccacatgtacagctgcagattcagcagacagtgcgtggtggacagagacagaagaaaccagtgcagatactgcagactgaagaagtgcttcagagccggcatgagaagagaggccgtgcagaacgagagagacagaatcagcaccagaagagccgcctacgaggacagcgccctgcccagcatcaacgccctgctgcaggccgaggtgctgagcagacagatcgccgcccccgtgagcggcatcaacggcgacatcagagccagaagaatcgccagcatcgccgacgtgtgcgagagcatgaaggagcagctgctggtgctggtggagtgggccaagtacatccccgccttctgcgagctgcccctggacgaccaggtggccctgctgagagcccacgccggcgagcacctgctgctgggcgccaccagaagaagcatggtgttcaaggacgtgctgctgctgggcaacgactacatcgtgcccagacactgccccgagctggccgagatgagcagagtgagcatcagaatcctggacgagctggtgctgcccttccaggagctgcagatcgacgacaacgagtacgcctacctgaaggccatcatcttcttcgaccccgacgccagaggcctgagcgaccccggcagaatcagaagactgagagcccaggtgcaggtgagcctggaggactacatcaacgacagacagtacgacagcagaggcagattcggcgagctgctgctgctgctgcccaccctgcagagcatcacctggcagatgatcgagcagatccagttcatcaagctgttcggcatggccaagatcgacaacctgctgcaggagatgctgctgggcggcgcccccagcgacgccccccacgcccaccaccccctgcacccccacctgatgcaggagcacatgggcaccaacgtgatcgtggccaacaccatgcccacccacctgagcaacggccagatgtgcgagtggcccagacccagaggccaggccgccgcccccgaggccccccagcccgccccccccggcggcagcggcagcgagccctacagactgctgcccggcgccgtggccaccatcgtgagacccctggaggccatcccccagcccaccatcaccagacaggaggtgatctgaggactagtccctgttcccagagcccacttttttttctttttttgaaataaaatagcctgtctttcagatctcaaaggctcttttcagagccaccaaaaaaaaaaaaaaaaaaaaaaaaaaaaaaaaaaaaaaaaaaaaaaaaaaaaaaaaaaaaaaaaaaaaaaaaaaaaaaaaaaaaaaaaaaaaaaaaaaaaa

SEQ ID NO: 3149 - RNA, 1697 nt, synthetic construct
  misc_feature 1..1697: note = mRNA a-1 (hSL-A100) (opt4) from Homo sapiens__NP_000448.3__HNF4A(1-474)(S87A_S95A_S99A_K106R_K10 8R_K126R_K127R_S142A_S143A_S148A_T166A_S167A_S313A_S378A_T4 29A_T432A_S436A_K458R_S461E)
  source 1..1697: mol_type = other RNA
aggagagtcccgcagtcggcgtccagcggctctgcttgttcgtgtgtgtgtcgttgcaggccttattcaagcttaccatgagactgagcaagaccctggtggacatggacatggccgactacagcgccgccctggaccccgcctacaccaccctggagttcgagaacgtgcaggtgctgaccatgggcaacgacaccagccccagcgagggcaccaacctgaacgcccccaacagcctgggcgtgagcgccctgtgcgccatctgcggcgacagagccaccggcaagcactacggcgccagcagctgcgacggctgcaagggcttcttcagaagagccgtgagaaagaaccacatgtacgcctgcagattcgccagacagtgcgtggtggacagagacagaagaaaccagtgcagatactgcagactgaagaagtgcttcagagccggcatgagaagagaggccgtgcagaacgagagagacagaatcagcaccagaagagccgcctacgaggacagcgccctgcccagcatcaacgccctgctgcaggccgaggtgctgagcagacagatcgccgcccccgtgagcggcatcaacggcgacatcagagccaagaagatcgccagcatcgccgacgtgtgcgagagcatgaaggagcagctgctggtgctggtggagtgggccaagtacatccccgccttctgcgagctgcccctggacgaccaggtggccctgctgagagcccacgccggcgagcacctgctgctgggcgccaccaagagaagcatggtgttcaaggacgtgctgctgctgggcaacgactacatcgtgcccagacactgccccgagctggccgagatgagcagagtgagcatcagaatcctggacgagctggtgctgcccttccaggagctgcagatcgacgacaacgagtacgcctacctgaaggccatcatcttcttcgaccccgacgccaagggcctgagcgaccccggcaagatcaagagactgagagcccaggtgcaggtgagcctggaggactacatcaacgacagacagtacgacagcagaggcagattcggcgagctgctgctgctgctgcccaccctgcagagcatcacctggcagatgatcgagcagatccagttcatcaagctgttcggcatggccaagatcgacaacctgctgcaggagatgctgctgggcggcgcccccagcgacgccccccacgcccaccaccccctgcacccccacctgatgcaggagcacatgggcaccaacgtgatcgtggccaacaccatgcccacccacctgagcaacggccagatgtgcgagtggcccagacccagaggccaggccgccgcccccgaggccccccagcccgccccccccggcggcagcggcagcgagccctacaagctgctgcccggcgccgtggccaccatcgtgagacccctggaggccatcccccagcccaccatcaccaagcaggaggtgatctgaggactagtccctgttcccagagcccacttttttttctttttttgaaataaaatagcctgtctttcagatctcaaaggctcttttcagagccaccaaaaaaaaaaaaaaaaaaaaaaaaaaaaaaaaaaaaaaaaaaaaaaaaaaaaaaaaaaaaaaaaaaaaaaaaaaaaaaaaaaaaaaaaaaaaaaaaaaaaa

SEQ ID NO: 3150 - RNA, 1697 nt, synthetic construct
  misc_feature 1..1697: note = mRNA a-1 (hSL-A100) (opt4) from Homo sapiens__NP_000448.3__HNF4A(1-474)(S87A_K106R_K108R_K126R_K 127R_S138A_T139A_S142A_S143A_S148A_T166A_S167A_S313A_S378A_ T429A_T432A_S436A_K458R_S461E)
  source 1..1697: mol_type = other RNA
aggagagtcccgcagtcggcgtccagcggctctgcttgttcgtgtgtgtgtcgttgcaggccttattcaagcttaccatgagactgagcaagaccctggtggacatggacatggccgactacagcgccgccctggaccccgcctacaccaccctggagttcgagaacgtgcaggtgctgaccatgggcaacgacaccagccccagcgagggcaccaacctgaacgcccccaacagcctgggcgtgagcgccctgtgcgccatctgcggcgacagagccaccggcaagcactacggcgccagcagctgcgacggctgcaagggcttcttcagaagagccgtgagaaagaaccacatgtacagctgcagattcagcagacagtgcgtggtggacagagacagaagaaaccagtgcagatactgcagactgaagaagtgcttcagagccggcatgagaagagaggccgtgcagaacgagagagacagaatcgccgccagaagagccgcctacgaggacagcgccctgcccagcatcaacgccctgctgcaggccgaggtgctgagcagacagatcgccgcccccgtgagcggcatcaacggcgacatcagagccaagaagatcgccagcatcgccgacgtgtgcgagagcatgaaggagcagctgctggtgctggtggagtgggccaagtacatccccgccttctgcgagctgcccctggacgaccaggtggccctgctgagagcccacgccggcgagcacctgctgctgggcgccaccaagagaagcatggtgttcaaggacgtgctgctgctgggcaacgactacatcgtgcccagacactgccccgagctggccgagatgagcagagtgagcatcagaatcctggacgagctggtgctgcccttccaggagctgcagatcgacgacaacgagtacgcctacctgaaggccatcatcttcttcgaccccgacgccaagggcctgagcgaccccggcaagatcaagagactgagagcccaggtgcaggtgagcctggaggactacatcaacgacagacagtacgacagcagaggcagattcggcgagctgctgctgctgctgcccaccctgcagagcatcacctggcagatgatcgagcagatccagttcatcaagctgttcggcatggccaagatcgacaacctgctgcaggagatgctgctgggcggcgcccccagcgacgccccccacgcccaccaccccctgcacccccacctgatgcaggagcacatgggcaccaacgtgatcgtggccaacaccatgcccacccacctgagcaacggccagatgtgcgagtggcccagacccagaggccaggccgccgcccccgaggccccccagcccgccccccccggcggcagcggcagcgagccctacaagctgctgcccggcgccgtggccaccatcgtgagacccctggaggccatcccccagcccaccatcaccaagcaggaggtgatctgaggactagtccctgttcccagagcccacttttttttctttttttgaaataaaatagcctgtctttcagatctcaaaggctcttttcagagccaccaaaaaaaaaaaaaaaaaaaaaaaaaaaaaaaaaaaaaaaaaaaaaaaaaaaaaaaaaaaaaaaaaaaaaaaaaaaaaaaaaaaaaaaaaaaaaaaaaaaaa

SEQ ID NO: 3151 - RNA, 1697 nt, synthetic construct
  misc_feature 1..1697: note = mRNA a-1 (hSL-A100) (opt4) from Homo sapiens__NP_000448.3__HNF4A(1-474)(S87A_S95A_S99A_K106R_K10 8R_K126R_K127R_S138A_T139A_S142A_S143A_S148A_T166A_S167A_S3 13A_S378A_T429A_T432A_S436A_K458R_S461E)
  source 1..1697: mol_type = other RNA
aggagagtcccgcagtcggcgtccagcggctctgcttgttcgtgtgtgtgtcgttgcaggccttattcaagcttaccatgagactgagcaagaccctggtggacatggacatggccgactacagcgccgccctggaccccgcctacaccaccctggagttcgagaacgtgcaggtgctgaccatgggcaacgacaccagccccagcgagggcaccaacctgaacgcccccaacagcctgggcgtgagcgccctgtgcgccatctgcggcgacagagccaccggcaagcactacggcgccagcagctgcgacggctgcaagggcttcttcagaagagccgtgagaaagaaccacatgtacgcctgcagattcgccagacagtgcgtggtggacagagacagaagaaaccagtgcagatactgcagactgaagaagtgcttcagagccggcatgagaagagaggccgtgcagaacgagagagacagaatcgccgccagaagagccgcctacgaggacagcgccctgcccagcatcaacgccctgctgcaggccgaggtgctgagcagacagatcgccgcccccgtgagcggcatcaacggcgacatcagagccaagaagatcgccagcatcgccgacgtgtgcgagagcatgaaggagcagctgctggtgctggtggagtgggccaagtacatccccgccttctgcgagctgcccctggacgaccaggtggccctgctgagagcccacgccggcgagcacctgctgctgggcgccaccaagagaagcatggtgttcaaggacgtgctgctgctgggcaacgactacatcgtgcccagacactgccccgagctggccgagatgagcagagtgagcatcagaatcctggacgagctggtgctgcccttccaggagctgcagatcgacgacaacgagtacgcctacctgaaggccatcatcttcttcgaccccgacgccaagggcctgagcgaccccggcaagatcaagagactgagagcccaggtgcaggtgagcctggaggactacatcaacgacagacagtacgacagcagaggcagattcggcgagctgctgctgctgctgcccaccctgcagagcatcacctggcagatgatcgagcagatccagttcatcaagctgttcggcatggccaagatcgacaacctgctgcaggagatgctgctgggcggcgcccccagcgacgccccccacgcccaccaccccctgcacccccacctgatgcaggagcacatgggcaccaacgtgatcgtggccaacaccatgcccacccacctgagcaacggccagatgtgcgagtggcccagacccagaggccaggccgccgcccccgaggccccccagcccgccccccccggcggcagcggcagcgagccctacaagctgctgcccggcgccgtggccaccatcgtgagacccctggaggccatcccccagcccaccatcaccaagcaggaggtgatctgaggactagtccctgttcccagagcccacttttttttctttttttgaaataaaatagcctgtctttcagatctcaaaggctcttttcagagccaccaaaaaaaaaaaaaaaaaaaaaaaaaaaaaaaaaaaaaaaaaaaaaaaaaaaaaaaaaaaaaaaaaaaaaaaaaaaaaaaaaaaaaaaaaaaaaaaaaaaaa

SEQ ID NO: 3152 - RNA, 1697 nt, synthetic construct
  misc_feature 1..1697: note = mRNA a-1 (hSL-A100) (opt5) from Homo sapiens__NP_000448.3__HNF4A(1-474)
  source 1..1697: mol_type = other RNA
aggagagtcccgcagtcggcgtccagcggctctgcttgttcgtgtgtgtgtcgttgcaggccttattcaagcttaccatgagactgagcaagaccctcgtggacatggatatggccgactactccgctgccctggatcccgcgtatacaacgcttgagttcgaaaacgtccaggttctgaccatgggcaatgacacatctcctagcgaggggaccaacctcaatgctccgaactccctgggagtgtctgccctttgcgccatctgtggcgatcgggctacagggaaacactacggagccagctcctgcgacggctgtaaggggtttttccgcagatctgtgcggaaaaatcatatgtatagctgccgcttttccagacaatgtgtcgtggataaggacaaacggaaccagtgccgctactgtagactgaagaagtgcttccgggctggaatgaaaaaggaagccgttcagaatgagcgcgatagaattagcacccggcgcagctcctatgaagacagctctctcccctccatcaacgcgctgctgcaggccgaggtgctcagcagacaaattacatctcctgtctccggcatcaatggcgatattcgggctaaaaagatcgccagcatcgctgacgtgtgtgagtccatgaaagaacagctgcttgttctggtggagtgggccaagtacattcccgcgttttgcgaactccctctggatgaccaggtcgcccttctgcgcgctcacgccggggagcatctcctgctgggagctaccaagagatctatggtgttcaaagacgtgctcctgcttggcaacgattatatcgtcccccggcactgtcctgagctggccgaaatgagcagagtttccattcgcatcctcgacgagctggtgcttccgtttcaggaactgcaaattgatgacaatgagtacgcctacctcaaggctatcattttctttgatcccgacgcgaaagggctgagcgatcctggaaagatcaaacggctgagatctcaggtgcaggtctccctcgaagactatatcaacgatcgccagtacgacagccggggcagattcggggagctgcttctgctcctgcccacgcttcaatctattacctggcagatgatcgagcagattcaatttatcaagctgttcggaatggccaaaattgataatctcctgcaggaaatgctgctcggcggcagcccttccgacgctccccatgcccaccacccgctgcatcctcaccttatgcaggagcatatggggacaaacgtgatcgttgccaataccatgcccacacacctgtctaacggacagatgtgcgaatggcctcgcccccggggccaagctgccacccccgagacgcctcagccgtctccccctgggggatccggcagcgaaccctataagctcctgcctggggcggtggctacaatcgtcaagcccctgtctgccattccgcagcctaccatcacaaaacaggaggtgatttgaggactagtccctgttcccagagcccacttttttttctttttttgaaataaaatagcctgtctttcagatctcaaaggctcttttcagagccaccaaaaaaaaaaaaaaaaaaaaaaaaaaaaaaaaaaaaaaaaaaaaaaaaaaaaaaaaaaaaaaaaaaaaaaaaaaaaaaaaaaaaaaaaaaaaaaaaaaaaa

SEQ ID NO: 3153 - RNA, 1697 nt, synthetic construct
  misc_feature 1..1697: note = mRNA a-1 (hSL-A100) (opt5) from Homo sapiens__NP_000448.3__HNF4A(1-474)(S313A)
  source 1..1697: mol_type = other RNA
aggagagtcccgcagtcggcgtccagcggctctgcttgttcgtgtgtgtgtcgttgcaggccttattcaagcttaccatgagactgagcaagaccctcgtggacatggatatggccgactactccgctgccctggatcccgcgtatacaacgcttgagttcgaaaacgtccaggttctgaccatgggcaatgacacatctcctagcgaggggaccaacctcaatgctccgaactccctgggagtgtctgccctttgcgccatctgtggcgatcgggctacagggaaacactacggagccagctcctgcgacggctgtaaggggtttttccgcagatctgtgcggaaaaatcatatgtatagctgccgcttttccagacaatgtgtcgtggataaggacaaacggaaccagtgccgctactgtagactgaagaagtgcttccgggctggaatgaaaaaggaagccgttcagaatgagcgcgatagaattagcacccggagatcttcctatgaagacagctctctcccctccatcaacgcgctgctgcaggccgaggtgctcagccgccaaattacatctcctgtctccggcatcaatggcgatattcgggctaaaaagatcgccagcatcgctgacgtgtgtgagtccatgaaagaacagctgcttgttctggtggagtgggccaagtacattcccgcgttttgcgaactccctctggatgaccaggtcgcccttctgcgcgctcacgccggggagcatctcctgctgggagctaccaagagatctatggtgttcaaagacgtgctcctgcttggcaacgattatatcgtcccccggcactgtcctgagctggccgaaatgagcagagtttccattcgcatcctcgacgagctggtgcttccgtttcaggaactgcaaattgatgacaatgagtacgcctacctcaaggctatcattttctttgatcccgacgcgaaagggctgagcgatcctggaaagatcaaacggctgagagcccaggtgcaggtctctctcgaagactatatcaacgatcgccagtacgactcccggggcagattcggggagctgcttctgctcctgcccacgcttcaaagcattacctggcagatgatcgagcagattcaatttatcaagctgttcggaatggctaaaattgataatctcctgcaggaaatgctgctcggcggctctcctagcgacgctccccatgcccaccacccgctgcatcctcaccttatgcaggagcatatggggacaaacgtgatcgttgccaataccatgcccacacacctgtccaacggacagatgtgcgaatggcctcgcccccggggccaagccgcgacccccgagacgcctcagccgtctccccctgggggaagcggctccgaaccctataagctcctgcctggggctgtggccacaatcgtcaagcccctgagcgccattccgcagcctaccatcacaaaacaggaggtgatttgaggactagtccctgttcccagagcccacttttttttctttttttgaaataaaatagcctgtctttcagatctcaaaggctcttttcagagccaccaaaaaaaaaaaaaaaaaaaaaaaaaaaaaaaaaaaaaaaaaaaaaaaaaaaaaaaaaaaaaaaaaaaaaaaaaaaaaaaaaaaaaaaaaaaaaaaaaaaaa

SEQ ID NO: 3154 - RNA, 1697 nt, synthetic construct
  misc_feature 1..1697: note = mRNA a-1 (hSL-A100) (opt5) from Homo sapiens__NP_000448.3__HNF4A(1-474)(S313E)
  source 1..1697: mol_type = other RNA
aggagagtcccgcagtcggcgtccagcggctctgcttgttcgtgtgtgtgtcgttgcaggccttattcaagcttaccatgagactgagcaagaccctcgtggacatggatatggccgactactccgctgccctggatcccgcgtatacaacgcttgagttcgaaaacgtccaggttctgaccatgggcaatgacacatctcctagcgaggggaccaacctcaatgctccgaactccctgggagtgtctgccctttgcgccatctgtggcgatcgggctacagggaaacactacggagccagctcctgcgacggctgtaaggggtttttccgcagatctgtgcggaaaaatcatatgtatagctgccgcttttccagacaatgtgtcgtggataaggacaaacggaaccagtgccgctactgtagactgaagaagtgcttccgggctggaatgaaaaaggaagccgttcagaatgagcgcgatagaattagcacccggagatcttcctatgaagacagctctctcccctccatcaacgcgctgctgcaggccgaggtgctcagccgccaaattacatctcctgtctccggcatcaatggcgatattcgggctaaaaagatcgccagcatcgctgacgtgtgtgagtccatgaaagaacagctgcttgttctggtggagtgggccaagtacattcccgcgttttgcgaactccctctggatgaccaggtcgcccttctgcgcgctcacgccggggagcatctcctgctgggagctaccaagagatctatggtgttcaaagacgtgctcctgcttggcaacgattatatcgtcccccggcactgtcctgagctggccgaaatgagcagagtttccattcgcatcctcgacgagctggtgcttccgtttcaggaactgcaaattgatgacaatgagtacgcctacctcaaggctatcattttctttgatcccgacgcgaaagggctgagcgatcctggaaagatcaaacggctgagagaacaggtgcaggtctctctcgaggactatatcaacgatcgccagtacgactcccggggcagattcggggagctgcttctgctcctgcccacgcttcaaagcattacctggcagatgatcgaacagattcaatttatcaagctgttcggaatggccaaaattgataatctcctgcaggagatgctgctcggcggctctcctagcgacgctccccatgcccaccacccgctgcatcctcaccttatgcaggaacatatggggacaaacgtgatcgttgccaataccatgcccacacacctgtccaacggacagatgtgcgagtggcctcgcccccggggccaagctgccacccccgaaacgcctcagccgtctccccctgggggaagcggctccgagccctataagctcctgcctggggcggtggctacaatcgtcaagcccctgagcgccattccgcagcctaccatcacaaaacaggaggtgatttgaggactagtccctgttcccagagcccacttttttttctttttttgaaataaaatagcctgtctttcagatctcaaaggctcttttcagagccaccaaaaaaaaaaaaaaaaaaaaaaaaaaaaaaaaaaaaaaaaaaaaaaaaaaaaaaaaaaaaaaaaaaaaaaaaaaaaaaaaaaaaaaaaaaaaaaaaaaaaa

SEQ ID NO: 3155 - RNA, 1697 nt, synthetic construct
  misc_feature 1..1697: note = mRNA a-1 (hSL-A100) (opt5) from Homo sapiens__NP_000448.3__HNF4A(1-474)(S142A_S143A)
  source 1..1697: mol_type = other RNA
aggagagtcccgcagtcggcgtccagcggctctgcttgttcgtgtgtgtgtcgttgcaggccttattcaagcttaccatgagactgagcaagaccctcgtggacatggatatggccgactactccgctgccctggatcccgcgtatacaacgcttgagttcgaaaacgtccaggttctgaccatgggcaatgacacatctcctagcgaggggaccaacctcaatgctccgaactccctgggagtgtctgccctttgcgccatctgtggcgatcgggctacagggaaacactacggagccagctcctgcgacggctgtaaggggtttttccgcagatctgtgcggaaaaatcatatgtatagctgccgcttttccagacaatgtgtcgtggataaggacaaacggaaccagtgccgctactgtagactgaagaagtgcttccgggctggaatgaaaaaggaagccgttcagaatgagcgcgatagaattagcacccggcgcgcggcctatgaagactcttccctccccagcatcaacgctctgctgcaggccgaggtgctctctagacaaattacatcccctgtcagcggcatcaatggcgatattcgggctaaaaagatcgcctctatcgcggacgtgtgtgagtccatgaaagaacagctgcttgttctggtggagtgggccaagtacattcccgctttttgcgaactccctctggatgaccaggtcgcccttctgcgcgctcacgccggggagcatctcctgctgggagccaccaagagaagcatggtgttcaaagacgtgctcctgcttggcaacgattatatcgtcccccggcactgtcctgagctggctgaaatgtccagagtttctattcgcatcctcgacgagctggtgcttccgtttcaggaactgcaaattgatgacaatgagtacgcgtacctcaaggccatcattttctttgatcccgacgctaaagggctgagcgatcctggaaagatcaaacggctgagatcccaggtgcaggtcagcctcgaagactatatcaacgatcgccagtacgactctcggggcagattcggggagctgcttctgctcctgcccacgcttcaatccattacctggcagatgatcgagcagattcaatttatcaagctgttcggaatggccaaaattgataatctcctgcaggaaatgctgctcggcggcagcccttctgacgctccccatgcccaccacccgctgcatcctcaccttatgcaggagcatatggggacaaacgtgatcgttgccaataccatgcccacacacctgagcaacggacagatgtgcgaatggcctcgcccccggggccaagcggctacccccgagacgcctcagccgtctccccctgggggatccggcagcgaaccctataagctcctgcctggggccgtggccacaatcgtcaagcccctgtccgctattccgcagcctaccatcacaaaacaggaggtgatttgaggactagtccctgttcccagagcccacttttttttctttttttgaaataaaatagcctgtctttcagatctcaaaggctcttttcagagccaccaaaaaaaaaaaaaaaaaaaaaaaaaaaaaaaaaaaaaaaaaaaaaaaaaaaaaaaaaaaaaaaaaaaaaaaaaaaaaaaaaaaaaaaaaaaaaaaaaaaaa

SEQ ID NO: 3156 - RNA, 1697 nt, synthetic construct
  misc_feature 1..1697: note = mRNA a-1 (hSL-A100) (opt5) from Homo sapiens__NP_000448.3__HNF4A(1-474)(S142E_S143E)
  source 1..1697: mol_type = other RNA
aggagagtcccgcagtcggcgtccagcggctctgcttgttcgtgtgtgtgtcgttgcaggccttattcaagcttaccatgagactgagcaagaccctcgtggacatggatatggccgactactccgctgccctggatcccgcgtatacaacgcttgagttcgaaaacgtccaggttctgaccatgggcaatgacacatctcctagcgaggggaccaacctcaatgctccgaactccctgggagtgtctgccctttgcgccatctgtggcgatcgggctacagggaaacactacggagccagctcctgcgacggctgtaaggggtttttccgcagatctgtgcggaaaaatcatatgtatagctgccgcttttccagacaatgtgtcgtggataaggacaaacggaaccagtgccgctactgtagactgaagaagtgcttccgggctggaatgaaaaaggaagccgttcagaatgagcgcgatagaattagcacccggcgcgaagagtatgaggactcttccctccccagcatcaacgcgctgctgcaggccgaagtgctctctagacaaattacatcccctgtcagcggcatcaatggcgatattcgggctaaaaagatcgcctctatcgctgacgtgtgtgagtccatgaaagaacagctgcttgttctggtggagtgggccaagtacattcccgcgttttgcgagctccctctggatgaccaggtcgcccttctgcgcgctcacgccggggaacatctcctgctgggagctaccaagagaagcatggtgttcaaagacgtgctcctgcttggcaacgattatatcgtcccccggcactgtcctgagctggccgaaatgtccagagtttctattcgcatcctcgacgagctggtgcttccgtttcaggaactgcaaattgatgacaatgagtacgcctacctcaaggctatcattttctttgatcccgacgcgaaagggctgagcgatcctggaaagatcaaacggctgagatcccaggtgcaggtcagcctcgaggactatatcaacgatcgccagtacgactctcggggcagattcggggaactgcttctgctcctgcccacgcttcaatccattacctggcagatgatcgagcagattcaatttatcaagctgttcggaatggccaaaattgataatctcctgcaggaaatgctgctcggcggcagcccttctgacgctccccatgcccaccacccgctgcatcctcaccttatgcaggagcatatggggacaaacgtgatcgttgccaataccatgcccacacacctgagcaacggacagatgtgcgaatggcctcgcccccggggccaagctgccacccccgagacgcctcagccgtctccccctgggggatccggcagcgagccctataagctcctgcctggggcggtggctacaatcgtcaagcccctgtccgccattccgcagcctaccatcacaaaacaggaagtgatttgaggactagtccctgttcccagagcccacttttttttctttttttgaaataaaatagcctgtctttcagatctcaaaggctcttttcagagccaccaaaaaaaaaaaaaaaaaaaaaaaaaaaaaaaaaaaaaaaaaaaaaaaaaaaaaaaaaaaaaaaaaaaaaaaaaaaaaaaaaaaaaaaaaaaaaaaaaaaaa

SEQ ID NO: 3157 - RNA, 1697 nt, synthetic construct
  misc_feature 1..1697: note = mRNA a-1 (hSL-A100) (opt5) from Homo sapiens__NP_000448.3__HNF4A(1-474)(S143A)
  source 1..1697: mol_type = other RNA
aggagagtcccgcagtcggcgtccagcggctctgcttgttcgtgtgtgtgtcgttgcaggccttattcaagcttaccatgagactgagcaagaccctcgtggacatggatatggccgactactccgctgccctggatcccgcgtatacaacgcttgagttcgaaaacgtccaggttctgaccatgggcaatgacacatctcctagcgaggggaccaacctcaatgctccgaactccctgggagtgtctgccctttgcgccatctgtggcgatcgggctacagggaaacactacggagccagctcctgcgacggctgtaaggggtttttccgcagatctgtgcggaaaaatcatatgtatagctgccgcttttccagacaatgtgtcgtggataaggacaaacggaaccagtgccgctactgtagactgaagaagtgcttccgggctggaatgaaaaaggaagccgttcagaatgagcgcgatagaattagcacccggcgctctgcgtatgaagactccagcctcccctctatcaacgccctgctgcaggctgaggtgctctccagacaaattacaagccctgtctctggcatcaatggcgatattcgggccaaaaagatcgcttccatcgccgacgtgtgtgagagcatgaaagaacagctgcttgttctggtggagtgggcgaagtacattcccgccttttgcgaactccctctggatgaccaggtcgcccttctgcgcgcccacgctggggagcatctcctgctgggagccaccaagagatccatggtgttcaaagacgtgctcctgcttggcaacgattatatcgtcccccggcactgtcctgagctggccgaaatgtctagagttagcattcgcatcctcgacgagctggtgcttccgtttcaggaactgcaaattgatgacaatgagtacgcttacctcaaggcgatcattttctttgatcccgacgccaaagggctgtccgatcctggaaagatcaaacggctgagaagccaggtgcaggtctctctcgaagactatatcaacgatcgccagtacgactcccggggcagattcggggagctgcttctgctcctgcccacgcttcaaagcattacctggcagatgatcgagcagattcaatttatcaagctgttcggaatggctaaaattgataatctcctgcaggaaatgctgctcggcggctctcctagcgacgctccccatgcccaccacccgctgcatcctcaccttatgcaggagcatatggggacaaacgtgatcgttgctaataccatgcccacacacctgtccaacggacagatgtgcgaatggcctcgcccccggggccaagccgcgacccccgagacgcctcagccgtctccccctgggggaagcggctccgaaccctataagctcctgcctggggctgtggccacaatcgtcaagcccctgagcgccattccgcagcctaccatcacaaaacaggaggtgatttgaggactagtccctgttcccagagcccacttttttttctttttttgaaataaaatagcctgtctttcagatctcaaaggctcttttcagagccaccaaaaaaaaaaaaaaaaaaaaaaaaaaaaaaaaaaaaaaaaaaaaaaaaaaaaaaaaaaaaaaaaaaaaaaaaaaaaaaaaaaaaaaaaaaaaaaaaaaaaa

SEQ ID NO: 3158 - RNA, 1697 nt, synthetic construct
  misc_feature 1..1697: note = mRNA a-1 (hSL-A100) (opt5) from Homo sapiens__NP_000448.3__HNF4A(1-474)(T166A)
  source 1..1697: mol_type = other RNA
aggagagtcccgcagtcggcgtccagcggctctgcttgttcgtgtgtgtgtcgttgcaggccttattcaagcttaccatgagactgagcaagaccctcgtggacatggatatggccgactactccgctgccctggatcccgcgtatacaacgcttgagttcgaaaacgtccaggttctgaccatgggcaatgacacatctcctagcgaggggaccaacctcaatgctccgaactccctgggagtgtctgccctttgcgccatctgtggcgatcgggctacagggaaacactacggagccagctcctgcgacggctgtaaggggtttttccgcagatctgtgcggaaaaatcatatgtatagctgccgcttttccagacaatgtgtcgtggataaggacaaacggaaccagtgccgctactgtagactgaagaagtgcttccgggctggaatgaaaaaggaagccgttcagaatgagcgcgatagaattagcacccggcgcagctcctatgaagacagctctctcccctccatcaacgcgctgctgcaggccgaggtgctcagcagacaaattgcttctcctgtctccggcatcaatggcgatattcgggccaaaaagatcgctagcatcgccgacgtgtgtgagtccatgaaagaacagctgcttgttctggtggagtgggcgaagtacattcccgccttttgcgaactccctctggatgaccaggtcgcccttctgcgcgcccacgctggggagcatctcctgctgggagccacaaagagatctatggtgttcaaagacgtgctcctgcttggcaacgattatatcgtcccccggcactgtcctgagctggccgaaatgagcagagtttccattcgcatcctcgacgagctggtgcttccgtttcaggaactgcaaattgatgacaatgagtacgcttacctcaaggcgatcattttctttgatcccgacgccaaagggctgagcgatcctggaaagatcaaacggctgagatctcaggtgcaggtctccctcgaagactatatcaacgatcgccagtacgacagccggggcagattcggggagctgcttctgctcctgcccacccttcaatctattacgtggcagatgatcgagcagattcaatttatcaagctgttcggaatggctaaaattgataatctcctgcaggaaatgctgctcggcggcagcccttccgacgctccccatgcccaccacccgctgcatcctcaccttatgcaggagcatatggggaccaacgtgatcgttgctaatacaatgcccacccacctgtctaacggacagatgtgcgaatggcctcgcccccggggccaagccgcgacacccgagacccctcagccgtctccccctgggggatccggcagcgaaccctataagctcctgcctggggctgtggccacgatcgtcaagcccctgtctgccattccgcagcctacaatcaccaaacaggaggtgatttgaggactagtccctgttcccagagcccacttttttttctttttttgaaataaaatagcctgtctttcagatctcaaaggctcttttcagagccaccaaaaaaaaaaaaaaaaaaaaaaaaaaaaaaaaaaaaaaaaaaaaaaaaaaaaaaaaaaaaaaaaaaaaaaaaaaaaaaaaaaaaaaaaaaaaaaaaaaaaa

SEQ ID NO: 3159 - RNA, 1697 nt, synthetic construct
  misc_feature 1..1697: note = mRNA a-1 (hSL-A100) (opt5) from Homo sapiens__NP_000448.3__HNF4A(1-474)(S167E)
  source 1..1697: mol_type = other RNA
aggagagtcccgcagtcggcgtccagcggctctgcttgttcgtgtgtgtgtcgttgcaggccttattcaagcttaccatgagactgagcaagaccctcgtggacatggatatggccgactactccgctgccctggatcccgcgtatacaacgcttgagttcgaaaacgtccaggttctgaccatgggcaatgacacatctcctagcgaggggaccaacctcaatgctccgaactccctgggagtgtctgccctttgcgccatctgtggcgatcgggctacagggaaacactacggagccagctcctgcgacggctgtaaggggtttttccgcagatctgtgcggaaaaatcatatgtatagctgccgcttttccagacaatgtgtcgtggataaggacaaacggaaccagtgccgctactgtagactgaagaagtgcttccgggctggaatgaaaaaggaagccgttcagaatgagcgcgatagaattagcacccggagatcttcctatgaagacagctctctcccctccatcaacgcgctgctgcaggccgaggtgctcagccgccaaattacagagcctgtctctggcatcaatggcgatattcgggctaaaaagatcgcctccatcgctgacgtgtgtgaaagcatgaaagagcagctgcttgttctggtggaatgggccaagtacattcccgcgttttgcgagctccctctggatgaccaggtcgcccttctgcgcgctcacgccggggagcatctcctgctgggagctaccaagagatccatggtgttcaaagacgtgctcctgcttggcaacgattatatcgtcccccggcactgtcctgaactggccgagatgtctagagttagcattcgcatcctcgacgaactggtgcttccgtttcaggagctgcaaattgatgacaatgaatacgcctacctcaaggctatcattttctttgatcccgacgcgaaagggctgtccgatcctggaaagatcaaacggctgagaagccaggtgcaggtctctctcgaggactatatcaacgatcgccagtacgactcccggggcagattcggggagctgcttctgctcctgcccacgcttcaaagcattacctggcagatgatcgaacagattcaatttatcaagctgttcggaatggccaaaattgataatctcctgcaggagatgctgctcggcggctctcctagcgacgctccccatgcccaccacccgctgcatcctcaccttatgcaggaacatatggggacaaacgtgatcgttgccaataccatgcccacacacctgtccaacggacagatgtgcgagtggcctcgcccccggggccaagctgccacccccgaaacgcctcagccgtctccccctgggggaagcggctccgagccctataagctcctgcctggggcggtggctacaatcgtcaagcccctgagcgccattccgcagcctaccatcacaaaacaggaggtgatttgaggactagtccctgttcccagagcccacttttttttctttttttgaaataaaatagcctgtctttcagatctcaaaggctcttttcagagccaccaaaaaaaaaaaaaaaaaaaaaaaaaaaaaaaaaaaaaaaaaaaaaaaaaaaaaaaaaaaaaaaaaaaaaaaaaaaaaaaaaaaaaaaaaaaaaaaaaaaaa

SEQ ID NO: 3160 - RNA, 1697 nt, synthetic construct
  misc_feature 1..1697: note = mRNA a-1 (hSL-A100) (opt5) from Homo sapiens__NP_000448.3__HNF4A(1-474)(S167A)
  source 1..1697: mol_type = other RNA
aggagagtcccgcagtcggcgtccagcggctctgcttgttcgtgtgtgtgtcgttgcaggccttattcaagcttaccatgagactgagcaagaccctcgtggacatggatatggccgactactccgctgccctggatcccgcgtatacaacgcttgagttcgaaaacgtccaggttctgaccatgggcaatgacacatctcctagcgaggggaccaacctcaatgctccgaactccctgggagtgtctgccctttgcgccatctgtggcgatcgggctacagggaaacactacggagccagctcctgcgacggctgtaaggggtttttccgcagatctgtgcggaaaaatcatatgtatagctgccgcttttccagacaatgtgtcgtggataaggacaaacggaaccagtgccgctactgtagactgaagaagtgcttccgggctggaatgaaaaaggaagccgttcagaatgagcgcgatagaattagcacccggagatcttcctatgaagacagctctctcccctccatcaacgcgctgctgcaggccgaggtgctcagccgccaaattacagctcctgtctctggcatcaatggcgatattcgggccaaaaagatcgcttccatcgccgacgtgtgtgagagcatgaaagaacagctgcttgttctggtggagtgggcgaagtacattcccgccttttgcgaactccctctggatgaccaggtcgcccttctgcgcgcccacgctggggagcatctcctgctgggagccaccaagagatccatggtgttcaaagacgtgctcctgcttggcaacgattatatcgtcccccggcactgtcctgagctggccgaaatgtctagagttagcattcgcatcctcgacgagctggtgcttccgtttcaggaactgcaaattgatgacaatgagtacgcttacctcaaggcgatcattttctttgatcccgacgccaaagggctgtccgatcctggaaagatcaaacggctgagaagccaggtgcaggtctctctcgaagactatatcaacgatcgccagtacgactcccggggcagattcggggagctgcttctgctcctgcccacgcttcaaagcattacctggcagatgatcgagcagattcaatttatcaagctgttcggaatggctaaaattgataatctcctgcaggaaatgctgctcggcggctctcctagcgacgctccccatgcccaccacccgctgcatcctcaccttatgcaggagcatatggggacaaacgtgatcgttgctaataccatgcccacacacctgtccaacggacagatgtgcgaatggcctcgcccccggggccaagccgcgacccccgagacgcctcagccgtctccccctgggggaagcggctccgaaccctataagctcctgcctggggctgtggccacaatcgtcaagcccctgagcgccattccgcagcctaccatcacaaaacaggaggtgatttgaggactagtccctgttcccagagcccacttttttttctttttttgaaataaaatagcctgtctttcagatctcaaaggctcttttcagagccaccaaaaaaaaaaaaaaaaaaaaaaaaaaaaaaaaaaaaaaaaaaaaaaaaaaaaaaaaaaaaaaaaaaaaaaaaaaaaaaaaaaaaaaaaaaaaaaaaaaaaa

SEQ ID NO: 3161 - RNA, 1697 nt, synthetic construct
  misc_feature 1..1697: note = mRNA a-1 (hSL-A100) (opt5) from Homo sapiens__NP_000448.3__HNF4A(1-474)(S167A_S378A_T429A_T432A_ S436A)
  source 1..1697: mol_type = other RNA
aggagagtcccgcagtcggcgtccagcggctctgcttgttcgtgtgtgtgtcgttgcaggccttattcaagcttaccatgagactgagcaagaccctcgtggacatggatatggccgactactccgctgccctggatcccgcgtatacaacgcttgagttcgaaaacgtccaggttctgaccatgggcaatgacacatctcctagcgaggggaccaacctcaatgctccgaactccctgggagtgtctgccctttgcgccatctgtggcgatcgggctacagggaaacactacggagccagctcctgcgacggctgtaaggggtttttccgcagatctgtgcggaaaaatcatatgtatagctgccgcttttccagacaatgtgtcgtggataaggacaaacggaaccagtgccgctactgtagactgaagaagtgcttccgggctggaatgaaaaaggaagccgttcagaatgagcgcgatagaattagcacccggagatcttcctatgaagacagctctctcccctccatcaacgcgctgctgcaggccgaggtgctcagccgccaaattacagctcctgtctctggcatcaatggcgatattcgggccaaaaagatcgcttccatcgccgacgtgtgtgagagcatgaaagaacagctgcttgttctggtggagtgggcgaagtacattcccgccttttgcgaactccctctggatgaccaggtcgcccttctgcgcgcccacgctggggagcatctcctgctgggagccaccaagagatccatggtgttcaaagacgtgctcctgcttggcaacgattatatcgtcccccggcactgtcctgagctggccgaaatgtctagagttagcattcgcatcctcgacgagctggtgcttccgtttcaggaactgcaaattgatgacaatgagtacgcttacctcaaggcgatcattttctttgatcccgacgccaaagggctgtccgatcctggaaagatcaaacggctgagaagccaggtgcaggtctctctcgaagactatatcaacgatcgccagtacgactcccggggcagattcggggagctgcttctgctcctgcccacgcttcaaagcattacctggcagatgatcgagcagattcaatttatcaagctgttcggaatggctaaaattgataatctcctgcaggaaatgctgctcggcggcgccccttctgacgctccccatgctcaccacccgctgcatcctcaccttatgcaggagcatatggggacaaacgtgatcgttgccaataccatgcccacacacctgagcaacggacagatgtgcgaatggcctcgcccccggggccaagcggctgcccccgaggcccctcagccggctccccctgggggatccggctctgaaccctataagctcctgcctggggccgtggctaccatcgtcaagcccctgagcgccattccgcagcctacgatcacaaaacaggaggtgatttgaggactagtccctgttcccagagcccacttttttttctttttttgaaataaaatagcctgtctttcagatctcaaaggctcttttcagagccaccaaaaaaaaaaaaaaaaaaaaaaaaaaaaaaaaaaaaaaaaaaaaaaaaaaaaaaaaaaaaaaaaaaaaaaaaaaaaaaaaaaaaaaaaaaaaaaaaaaaaa

SEQ ID NO: 3162 - RNA, 1697 nt, synthetic construct
  misc_feature 1..1697: note = mRNA a-1 (hSL-A100) (opt5) from Homo sapiens__NP_000448.3__HNF4A(1-474)(S167E_S378E_T429E_T432E_ S436E)
  source 1..1697: mol_type = other RNA
aggagagtcccgcagtcggcgtccagcggctctgcttgttcgtgtgtgtgtcgttgcaggccttattcaagcttaccatgagactgagcaagaccctcgtggacatggatatggccgactactccgctgccctggatcccgcgtatacaacgcttgagttcgaaaacgtccaggttctgaccatgggcaatgacacatctcctagcgaggggaccaacctcaatgctccgaactccctgggagtgtctgccctttgcgccatctgtggcgatcgggctacagggaaacactacggagccagctcctgcgacggctgtaaggggtttttccgcagatctgtgcggaaaaatcatatgtatagctgccgcttttccagacaatgtgtcgtggataaggacaaacggaaccagtgccgctactgtagactgaagaagtgcttccgggctggaatgaaaaaggaagccgttcagaatgagcgcgatagaattagcacccggagatcttcctatgaagacagctctctcccctccatcaacgcgctgctgcaggccgaggtgctcagccgccaaattacagagcctgtctctggcatcaatggcgatattcgggctaaaaagatcgcctccatcgctgacgtgtgtgaaagcatgaaagagcagctgcttgttctggtggaatgggccaagtacattcccgcgttttgcgagctccctctggatgaccaggtcgcccttctgcgcgctcacgccggggagcatctcctgctgggagctaccaagagatccatggtgttcaaagacgtgctcctgcttggcaacgattatatcgtcccccggcactgtcctgaactggccgagatgtctagagttagcattcgcatcctcgacgaactggtgcttccgtttcaggagctgcaaattgatgacaatgaatacgcctacctcaaggctatcattttctttgatcccgacgcgaaagggctgtccgatcctggaaagatcaaacggctgagaagccaggtgcaggtctctctcgaggactatatcaacgatcgccagtacgactcccggggcagattcggggagctgcttctgctcctgcccacgcttcaaagcattacctggcagatgatcgaacagattcaatttatcaagctgttcggaatggccaaaattgataatctcctgcaggagatgctgctcggcggcgaaccttctgacgctccccatgcccaccacccgctgcatcctcaccttatgcaggagcatatggggacaaacgtgatcgttgccaataccatgcccacacacctgagcaacggacagatgtgcgaatggcctcgcccccggggccaagctgccgagcccgaggaacctcagccggagccccctgggggatccggctctgaaccctataagctcctgcctggggcggtggctaccatcgtcaagcccctgagcgccattccgcagcctacgatcacaaaacaggaggtgatttgaggactagtccctgttcccagagcccacttttttttctttttttgaaataaaatagcctgtctttcagatctcaaaggctcttttcagagccaccaaaaaaaaaaaaaaaaaaaaaaaaaaaaaaaaaaaaaaaaaaaaaaaaaaaaaaaaaaaaaaaaaaaaaaaaaaaaaaaaaaaaaaaaaaaaaaaaaaaaa

SEQ ID NO: 3163 - RNA, 1697 nt, synthetic construct
  misc_feature 1..1697: note = mRNA a-1 (hSL-A100) (opt5) from Homo sapiens__NP_000448.3__HNF4A(1-474)(S87A)
  source 1..1697: mol_type = other RNA
aggagagtcccgcagtcggcgtccagcggctctgcttgttcgtgtgtgtgtcgttgcaggccttattcaagcttaccatgagactgagcaagaccctcgtggacatggatatggccgactactccgctgccctggatcccgcgtatacaacgcttgagttcgaaaacgtccaggttctgaccatgggcaatgacacatctcctagcgaggggaccaacctcaatgctccgaactccctgggagtgtctgccctttgcgccatctgtggcgatcgggctacagggaaacactacggagccagctcctgcgacggctgtaaggggtttttccgcagagctgtgcggaaaaatcatatgtattcttgccgctttagcagacaatgtgtcgtggataaggacaaacggaaccagtgccgctactgtagactgaagaagtgcttccgggccggaatgaaaaaggaagcggttcagaatgagcgcgatagaatttccacccggcgcagctcttatgaagactccagcctcccctctatcaacgccctgctgcaggctgaggtgctctccagacaaattacaagccctgtctctggcatcaatggcgatattcgggccaaaaagatcgcttccatcgccgacgtgtgtgagagcatgaaagaacagctgcttgttctggtggagtgggcgaagtacattcccgccttttgcgaactccctctggatgaccaggtcgcccttctgcgcgcccacgctggggagcatctcctgctgggagccaccaagagatccatggtgttcaaagacgtgctcctgcttggcaacgattatatcgtcccccggcactgtcctgagctggccgaaatgtctagagttagcattcgcatcctcgacgagctggtgcttccgtttcaggaactgcaaattgatgacaatgagtacgcttacctcaaggcgatcattttctttgatcccgacgccaaagggctgtccgatcctggaaagatcaaacggctgagaagccaggtgcaggtctctctcgaagactatatcaacgatcgccagtacgactcccggggcagattcggggagctgcttctgctcctgcccacgcttcaaagcattacctggcagatgatcgagcagattcaatttatcaagctgttcggaatggctaaaattgataatctcctgcaggaaatgctgctcggcggctctcctagcgacgctccccatgcccaccacccgctgcatcctcaccttatgcaggagcatatggggacaaacgtgatcgttgctaataccatgcccacacacctgtccaacggacagatgtgcgaatggcctcgcccccggggccaagccgcgacccccgagacgcctcagccgtctccccctgggggaagcggctccgaaccctataagctcctgcctggggctgtggccacaatcgtcaagcccctgagcgccattccgcagcctaccatcacaaaacaggaggtgatttgaggactagtccctgttcccagagcccacttttttttctttttttgaaataaaatagcctgtctttcagatctcaaaggctcttttcagagccaccaaaaaaaaaaaaaaaaaaaaaaaaaaaaaaaaaaaaaaaaaaaaaaaaaaaaaaaaaaaaaaaaaaaaaaaaaaaaaaaaaaaaaaaaaaaaaaaaaaaaa

SEQ ID NO: 3164 - RNA, 1697 nt, synthetic construct
  misc_feature 1..1697: note = mRNA a-1 (hSL-A100) (opt5) from Homo sapiens__NP_000448.3__HNF4A(1-474)(S87E)
  source 1..1697: mol_type = other RNA
aggagagtcccgcagtcggcgtccagcggctctgcttgttcgtgtgtgtgtcgttgcaggccttattcaagcttaccatgagactgagcaagaccctcgtggacatggatatggccgactactccgctgccctggatcccgcgtatacaacgcttgagttcgaaaacgtccaggttctgaccatgggcaatgacacatctcctagcgaggggaccaacctcaatgctccgaactccctgggagtgtctgccctttgcgccatctgtggcgatcgggctacagggaaacactacggagccagctcctgcgacggctgtaaggggtttttccgcagagaagtgcggaaaaatcatatgtattcttgccgctttagcagacaatgtgtcgtggataaggacaaacggaaccagtgccgctactgtagactgaagaagtgcttccgggctggaatgaaaaaggaggccgttcagaatgaacgcgatagaatttccacccggcgcagctcttatgaggactccagcctcccctctatcaacgcgctgctgcaggccgaggtgctctccagacaaattacaagccctgtctctggcatcaatggcgatattcgggctaaaaagatcgcctccatcgctgacgtgtgtgaaagcatgaaagagcagctgcttgttctggtggaatgggccaagtacattcccgcgttttgcgagctccctctggatgaccaggtcgcccttctgcgcgctcacgccggggagcatctcctgctgggagctaccaagagatccatggtgttcaaagacgtgctcctgcttggcaacgattatatcgtcccccggcactgtcctgaactggccgagatgtctagagttagcattcgcatcctcgacgaactggtgcttccgtttcaggagctgcaaattgatgacaatgaatacgcctacctcaaggctatcattttctttgatcccgacgcgaaagggctgtccgatcctggaaagatcaaacggctgagaagccaggtgcaggtctctctcgaggactatatcaacgatcgccagtacgactcccggggcagattcggggagctgcttctgctcctgcccacgcttcaaagcattacctggcagatgatcgaacagattcaatttatcaagctgttcggaatggccaaaattgataatctcctgcaggagatgctgctcggcggctctcctagcgacgctccccatgcccaccacccgctgcatcctcaccttatgcaggaacatatggggacaaacgtgatcgttgccaataccatgcccacacacctgtccaacggacagatgtgcgagtggcctcgcccccggggccaagctgccacccccgaaacgcctcagccgtctccccctgggggaagcggctccgagccctataagctcctgcctggggcggtggctacaatcgtcaagcccctgagcgccattccgcagcctaccatcacaaaacaggaggtgatttgaggactagtccctgttcccagagcccacttttttttctttttttgaaataaaatagcctgtctttcagatctcaaaggctcttttcagagccaccaaaaaaaaaaaaaaaaaaaaaaaaaaaaaaaaaaaaaaaaaaaaaaaaaaaaaaaaaaaaaaaaaaaaaaaaaaaaaaaaaaaaaaaaaaaaaaaaaaaaa

SEQ ID NO: 3165 - RNA, 1697 nt, synthetic construct
  misc_feature 1..1697: note = mRNA a-1 (hSL-A100) (opt5) from Homo sapiens__NP_000448.3__HNF4A(1-474)(R2V)
  source 1..1697: mol_type = other RNA
aggagagtcccgcagtcggcgtccagcggctctgcttgttcgtgtgtgtgtcgttgcaggccttattcaagcttaccatggtgctgagcaagaccctcgtcgacatggatatggccgactactccgctgccctggatcccgcgtatacaacgcttgagttcgaaaacgttcaggtgctgaccatgggcaatgacacatctcctagcgaggggaccaacctcaatgctccgaactccctgggagtgtctgccctttgcgccatctgtggcgatagagctacagggaaacactacggagccagctcctgcgacggctgtaaggggtttttccggcgctctgtccggaaaaatcatatgtatagctgcagattttcccgccaatgtgtggttgataaggacaaaagaaaccagtgccggtactgtcgcctgaagaagtgcttcagagctggaatgaaaaaggaagccgtgcagaatgagcgggatcgcattagcaccagacggtcttcctatgaagacagctctctcccctccatcaacgcgctgctgcaggccgaggtcctcagccgccaaattacatctcctgtgtccggcatcaatggcgatattagagctaaaaagatcgccagcatcgctgacgtttgtgagtccatgaaagaacagctgcttgtgctggtcgagtgggccaagtacattcccgcgttttgcgaactccctctggatgaccaggtggcccttctgcgggctcacgccggggagcatctcctgctgggagctaccaagcgctctatggtgttcaaagacgtcctcctgcttggcaacgattatatcgttcccagacactgtcctgagctggccgaaatgagccgggtgtccattagaatcctcgacgagctggtgcttccgtttcaggaactgcaaattgatgacaatgagtacgcctacctcaaggctatcattttctttgatcccgacgcgaaagggctgagcgatcctggaaagatcaaacgcctgcggtctcaggtccaggtgtccctcgaagactatatcaacgatagacagtacgacagccgcggccggttcggggagctgcttctgctcctgcccacgcttcaatctattacctggcagatgatcgagcagattcaatttatcaagctgttcggaatggccaaaattgataatctcctgcaggaaatgctgctcggcggcagcccttccgacgctccccatgcccaccacccgctgcatcctcaccttatgcaggagcatatggggacaaacgttatcgtggccaataccatgcccacacacctgtctaacggacagatgtgcgaatggcctagaccccgcggccaagctgccacccccgagacgcctcagccgagccctcccgggggatccggcagcgaaccctataagctcctgcctggggcggtcgctacaatcgtgaagcccctgtctgccattccgcagcctaccatcacaaaacaggaggttatttgaggactagtccctgttcccagagcccacttttttttctttttttgaaataaaatagcctgtctttcagatctcaaaggctcttttcagagccaccaaaaaaaaaaaaaaaaaaaaaaaaaaaaaaaaaaaaaaaaaaaaaaaaaaaaaaaaaaaaaaaaaaaaaaaaaaaaaaaaaaaaaaaaaaaaaaaaaaaaa

SEQ ID NO: 3166 - RNA, 1697 nt, synthetic construct
  misc_feature 1..1697: note = mRNA a-1 (hSL-A100) (opt5) from Homo sapiens__NP_000448.3__HNF4A(1-474)(R2V_K5V)
  source 1..1697: mol_type = other RNA
aggagagtcccgcagtcggcgtccagcggctctgcttgttcgtgtgtgtgtcgttgcaggccttattcaagcttaccatggtgctgagcgtcaccctcgttgacatggatatggccgactactccgctgccctggatcccgcgtatacaacgcttgagttcgaaaacgtccaggtgctgaccatgggcaatgacacatctcctagcgaggggaccaacctcaatgctccgaactccctgggagtgtctgccctttgcgccatctgtggcgatagagctacagggaagcactacggagccagctcctgcgacggctgtaaagggtttttccggcgctctgtgagaaagaatcatatgtatagctgccggttttcccgccaatgtgttgtggataaagacaagagaaaccagtgccggtactgtcgcctgaaaaagtgcttcagagctggaatgaagaaagaagccgtccagaatgagcgggatcgcattagcaccagacggtcttcctatgaagacagctctctcccctccatcaacgcgctgctgcaggccgaggtgctcagccgccaaattacatctcctgtttccggcatcaatggcgatattagagctaagaaaatcgccagcatcgctgacgtgtgtgagtccatgaaggaacagctgcttgtcctggtggagtgggccaaatacattcccgcgttttgcgaactccctctggatgaccaggtggcccttctgcgggctcacgccggggagcatctcctgctgggagctaccaagcgctctatggtcttcaaggacgttctcctgcttggcaacgattatatcgtgcccagacactgtcctgagctggccgaaatgagccgggtgtccattagaatcctcgacgagctggtccttccgtttcaggaactgcaaattgatgacaatgagtacgcctacctcaaagctatcattttctttgatcccgacgcgaaggggctgagcgatcctggaaaaatcaagcgcctgcggtctcaggtgcaggtttccctcgaagactatatcaacgatagacagtacgacagccgcggccggttcggggagctgcttctgctcctgcccacgcttcaatctattacctggcagatgatcgagcagattcaatttatcaaactgttcggaatggccaagattgataatctcctgcaggaaatgctgctcggcggcagcccttccgacgctccccatgcccaccacccgctgcatcctcaccttatgcaggagcatatggggacaaacgtgatcgtcgccaataccatgcccacacacctgtctaacggacagatgtgcgaatggcctagaccccgcggccaagctgccacccccgagacgcctcagccgagccctcccgggggatccggcagcgaaccctataaactcctgcctggggcggtggctacaatcgttaagcccctgtctgccattccgcagcctaccatcacaaagcaggaggtgatttgaggactagtccctgttcccagagcccacttttttttctttttttgaaataaaatagcctgtctttcagatctcaaaggctcttttcagagccaccaaaaaaaaaaaaaaaaaaaaaaaaaaaaaaaaaaaaaaaaaaaaaaaaaaaaaaaaaaaaaaaaaaaaaaaaaaaaaaaaaaaaaaaaaaaaaaaaaaaaa

SEQ ID NO: 3167 - RNA, 1697 nt, synthetic construct
  misc_feature 1..1697: note = mRNA a-1 (hSL-A100) (opt5) from Homo sapiens__NP_000448.3__HNF4A(1-474)(K179R_K180R)
  source 1..1697: mol_type = other RNA
aggagagtcccgcagtcggcgtccagcggctctgcttgttcgtgtgtgtgtcgttgcaggccttattcaagcttaccatgagactgagcaagaccctcgtggacatggatatggccgactactccgctgccctggatcccgcgtatacaacgcttgagttcgaaaacgtccaggttctgaccatgggcaatgacacatctcctagcgaggggaccaacctcaatgctccgaactccctgggagtgtctgccctttgcgccatctgtggcgatcgggctacagggaaacactacggagccagctcctgcgacggctgtaaggggtttttccgcagatctgtgcggaaaaatcatatgtatagctgccgcttttccagacaatgtgtcgtggataaggacaaacggaaccagtgccgctactgtagactgaagaagtgcttccgggctggaatgaaaaaggaagccgttcagaatgagcgcgatagaattagcacccggcgcagctcctatgaagacagctctctcccctccatcaacgcgctgctgcaggccgaggtgctcagcagacaaattacatctcctgtctccggcatcaatggcgatattcgggctcgcagaatcgccagcatcgctgacgtgtgtgagtccatgaaagaacagctgcttgttctggtggagtgggccaagtacattcccgcgttttgcgaactccctctggatgaccaggtcgcccttctgcgggctcacgccggggagcatctcctgctgggagctaccaaaagatctatggtgttcaaggacgtgctcctgcttggcaacgattatatcgtcccccgccactgtcctgagctggccgaaatgagccgggtttccattagaatcctcgacgagctggtgcttccgtttcaggaactgcaaattgatgacaatgagtacgcctacctcaaggctatcattttctttgatcccgacgcgaaagggctgagcgatcctggaaagatcaaacgcctgcggtctcaggtgcaggtctccctcgaagactatatcaacgatagacagtacgacagccgcggccggttcggggagctgcttctgctcctgcccacgcttcaatctattacctggcagatgatcgagcagattcaatttatcaagctgttcggaatggccaaaattgataatctcctgcaggaaatgctgctcggcggcagcccttccgacgctccccatgcccaccacccgctgcatcctcaccttatgcaggagcatatggggacaaacgtgatcgttgccaataccatgcccacacacctgtctaacggacagatgtgcgaatggcctagaccccgcggccaagctgccacccccgagacgcctcagccgtctccccctgggggatccggcagcgaaccctataagctcctgcctggggcggtggctacaatcgtcaaacccctgtctgccattccgcagcctaccatcacaaagcaggaggtgatttgaggactagtccctgttcccagagcccacttttttttctttttttgaaataaaatagcctgtctttcagatctcaaaggctcttttcagagccaccaaaaaaaaaaaaaaaaaaaaaaaaaaaaaaaaaaaaaaaaaaaaaaaaaaaaaaaaaaaaaaaaaaaaaaaaaaaaaaaaaaaaaaaaaaaaaaaaaaaaa

SEQ ID NO: 3168 - RNA, 1697 nt, synthetic construct
  misc_feature 1..1697: note = mRNA a-1 (hSL-A100) (opt5) from Homo sapiens__NP_000448.3__HNF4A(1-474)(K234R)
  source 1..1697: mol_type = other RNA
aggagagtcccgcagtcggcgtccagcggctctgcttgttcgtgtgtgtgtcgttgcaggccttattcaagcttaccatgagactgagcaagaccctcgtggacatggatatggccgactactccgctgccctggatcccgcgtatacaacgcttgagttcgaaaacgtccaggttctgaccatgggcaatgacacatctcctagcgaggggaccaacctcaatgctccgaactccctgggagtgtctgccctttgcgccatctgtggcgatcgggctacagggaaacactacggagccagctcctgcgacggctgtaaggggtttttccgcagatctgtgcggaaaaatcatatgtatagctgccgcttttccagacaatgtgtcgtggataaggacaaacggaaccagtgccgctactgtagactgaagaagtgcttccgggctggaatgaaaaaggaagccgttcagaatgagcgcgatagaattagcacccggcgcagctcctatgaagacagctctctcccctccatcaacgcgctgctgcaggccgaggtgctcagcagacaaattacatctcctgtctccggcatcaatggcgatattcgggctaaaaagatcgccagcatcgctgacgtgtgtgagtccatgaaagaacagctgcttgttctggtggagtgggccaagtacattcccgcgttttgcgaactccctctggatgaccaggtcgcccttctgcgcgctcacgccggggagcatctcctgctgggagctaccagacggtctatggtgttcaaggacgtgctcctgcttggcaacgattatatcgtccccagacactgtcctgagctggccgaaatgagccgcgtttccattcggatcctcgacgagctggtgcttccgtttcaggaactgcaaattgatgacaatgagtacgcctacctcaaagctatcattttctttgatcccgacgcgaaggggctgagcgatcctggaaaaatcaagagactgcgctctcaggtgcaggtctccctcgaagactatatcaacgatcggcagtacgacagcagaggccgcttcggggagctgcttctgctcctgcccacgcttcaatctattacctggcagatgatcgagcagattcaatttatcaaactgttcggaatggccaagattgataatctcctgcaggaaatgctgctcggcggcagcccttccgacgctccccatgcccaccacccgctgcatcctcaccttatgcaggagcatatggggacaaacgtgatcgttgccaataccatgcccacacacctgtctaacggacagatgtgcgaatggcctcggcccagaggccaagctgccacccccgagacgcctcagccgtctccccctgggggatccggcagcgaaccctataaactcctgcctggggcggtggctacaatcgtcaagcccctgtctgccattccgcagcctaccatcacaaagcaggaggtgatttgaggactagtccctgttcccagagcccacttttttttctttttttgaaataaaatagcctgtctttcagatctcaaaggctcttttcagagccaccaaaaaaaaaaaaaaaaaaaaaaaaaaaaaaaaaaaaaaaaaaaaaaaaaaaaaaaaaaaaaaaaaaaaaaaaaaaaaaaaaaaaaaaaaaaaaaaaaaaaa

SEQ ID NO: 3169 - RNA, 1697 nt, synthetic construct
  misc_feature 1..1697: note = mRNA a-1 (hSL-A100) (opt5) from Homo sapiens__NP_000448.3__HNF4A(1-474)(K300R)
  source 1..1697: mol_type = other RNA
aggagagtcccgcagtcggcgtccagcggctctgcttgttcgtgtgtgtgtcgttgcaggccttattcaagcttaccatgagactgagcaagaccctcgtggacatggatatggccgactactccgctgccctggatcccgcgtatacaacgcttgagttcgaaaacgtccaggttctgaccatgggcaatgacacatctcctagcgaggggaccaacctcaatgctccgaactccctgggagtgtctgccctttgcgccatctgtggcgatcgggctacagggaaacactacggagccagctcctgcgacggctgtaaggggtttttccgcagatctgtgcggaaaaatcatatgtatagctgccgcttttccagacaatgtgtcgtggataaggacaaacggaaccagtgccgctactgtagactgaagaagtgcttccgggctggaatgaaaaaggaagccgttcagaatgagcgcgatagaattagcacccggcgcagctcctatgaagacagctctctcccctccatcaacgcgctgctgcaggccgaggtgctcagcagacaaattacatctcctgtctccggcatcaatggcgatattcgggctaaaaagatcgccagcatcgctgacgtgtgtgagtccatgaaagaacagctgcttgttctggtggagtgggccaagtacattcccgcgttttgcgaactccctctggatgaccaggtcgcccttctgcgcgctcacgccggggagcatctcctgctgggagctaccaagagatctatggtgttcaaagacgtgctcctgcttggcaacgattatatcgtcccccggcactgtcctgagctggccgaaatgagcagagtttccattcgcatcctcgacgagctggtgcttccgtttcaggaactgcaaattgatgacaatgagtacgcctacctcaaggctatcattttctttgatcccgacgcgcgggggctgagcgatcctggaaaaatcaagagactgcgctctcaggtgcaggtctccctcgaagactatatcaacgatcggcagtacgacagcagaggccgcttcggggagctgcttctgctcctgcccacgcttcaatctattacctggcagatgatcgagcagattcaatttatcaaactgttcggaatggccaagattgataatctcctgcaggaaatgctgctcggcggcagcccttccgacgctccccatgcccaccacccgctgcatcctcaccttatgcaggagcatatggggacaaacgtgatcgttgccaataccatgcccacacacctgtctaacggacagatgtgcgaatggcctcggcccagaggccaagctgccacccccgagacgcctcagccgtctccccctgggggatccggcagcgaaccctataaactcctgcctggggcggtggctacaatcgtcaagcccctgtctgccattccgcagcctaccatcacaaagcaggaggtgatttgaggactagtccctgttcccagagcccacttttttttctttttttgaaataaaatagcctgtctttcagatctcaaaggctcttttcagagccaccaaaaaaaaaaaaaaaaaaaaaaaaaaaaaaaaaaaaaaaaaaaaaaaaaaaaaaaaaaaaaaaaaaaaaaaaaaaaaaaaaaaaaaaaaaaaaaaaaaaaa

SEQ ID NO: 3170 - RNA, 1697 nt, synthetic construct
  misc_feature 1..1697: note = mRNA a-1 (hSL-A100) (opt5) from Homo sapiens__NP_000448.3__HNF4A(1-474)(K300R_K307R_K309R)
  source 1..1697: mol_type = other RNA
aggagagtcccgcagtcggcgtccagcggctctgcttgttcgtgtgtgtgtcgttgcaggccttattcaagcttaccatgagactgagcaagaccctcgtggacatggatatggccgactactccgctgccctggatcccgcgtatacaacgcttgagttcgaaaacgtccaggttctgaccatgggcaatgacacatctcctagcgaggggaccaacctcaatgctccgaactccctgggagtgtctgccctttgcgccatctgtggcgatcgggctacagggaaacactacggagccagctcctgcgacggctgtaaggggtttttccgcagatctgtgcggaaaaatcatatgtatagctgccgcttttccagacaatgtgtcgtggataaggacaaacggaaccagtgccgctactgtagactgaagaagtgcttccgggctggaatgaaaaaggaagccgttcagaatgagcgcgatagaattagcacccggcgcagctcctatgaagacagctctctcccctccatcaacgcgctgctgcaggccgaggtgctcagcagacaaattacatctcctgtctccggcatcaatggcgatattcgggctaaaaagatcgccagcatcgctgacgtgtgtgagtccatgaaagaacagctgcttgttctggtggagtgggccaagtacattcccgcgttttgcgaactccctctggatgaccaggtcgcccttctgcgcgctcacgccggggagcatctcctgctgggagctaccaagagatctatggtgttcaaagacgtgctcctgcttggcaacgattatatcgtcccccggcactgtcctgagctggccgaaatgagcagagtttccattcgcatcctcgacgagctggtgcttccgtttcaggaactgcaaattgatgacaatgagtacgcctacctcaaggctatcattttctttgatcccgacgcgcgggggctgagcgatcctggaagaatccgccggctgagatctcaggtgcaggtctccctcgaagactatatcaacgatcgccagtacgacagccggggcagattcggggagctgcttctgctcctgcccacgcttcaatctattacctggcagatgatcgagcagattcaatttatcaaactgttcggaatggccaagattgataatctcctgcaggaaatgctgctcggcggcagcccttccgacgctccccatgcccaccacccgctgcatcctcaccttatgcaggagcatatggggacaaacgtgatcgttgccaataccatgcccacacacctgtctaacggacagatgtgcgaatggcctcgcccccggggccaagctgccacccccgagacgcctcagccgtctccccctgggggatccggcagcgaaccctataaactcctgcctggggcggtggctacaatcgtcaagcccctgtctgccattccgcagcctaccatcacaaaacaggaggtgatttgaggactagtccctgttcccagagcccacttttttttctttttttgaaataaaatagcctgtctttcagatctcaaaggctcttttcagagccaccaaaaaaaaaaaaaaaaaaaaaaaaaaaaaaaaaaaaaaaaaaaaaaaaaaaaaaaaaaaaaaaaaaaaaaaaaaaaaaaaaaaaaaaaaaaaaaaaaaaaa

SEQ ID NO: 3171 - RNA, 1697 nt, synthetic construct
  misc_feature 1..1697: note = mRNA a-1 (hSL-A100) (opt5) from Homo sapiens__NP_000448.3__HNF4A(1-474)(K447R_K470R)
  source 1..1697: mol_type = other RNA
aggagagtcccgcagtcggcgtccagcggctctgcttgttcgtgtgtgtgtcgttgcaggccttattcaagcttaccatgagactgagcaagaccctcgtggacatggatatggccgactactccgctgccctggatcccgcgtatacaacgcttgagttcgaaaacgtccaggttctgaccatgggcaatgacacatctcctagcgaggggaccaacctcaatgctccgaactccctgggagtgtctgccctttgcgccatctgtggcgatcgggctacagggaaacactacggagccagctcctgcgacggctgtaaggggtttttccgcagatctgtgcggaaaaatcatatgtatagctgccgcttttccagacaatgtgtcgtggataaggacaaacggaaccagtgccgctactgtagactgaagaagtgcttccgggctggaatgaaaaaggaagccgttcagaatgagcgcgatagaattagcacccggcgcagctcctatgaagacagctctctcccctccatcaacgcgctgctgcaggccgaggtgctcagcagacaaattacatctcctgtctccggcatcaatggcgatattcgggctaaaaagatcgccagcatcgctgacgtgtgtgagtccatgaaagaacagctgcttgttctggtggagtgggccaagtacattcccgcgttttgcgaactccctctggatgaccaggtcgcccttctgcgcgctcacgccggggagcatctcctgctgggagctaccaagagatctatggtgttcaaagacgtgctcctgcttggcaacgattatatcgtcccccggcactgtcctgagctggccgaaatgagcagagtttccattcgcatcctcgacgagctggtgcttccgtttcaggaactgcaaattgatgacaatgagtacgcctacctcaaggctatcattttctttgatcccgacgcgaaagggctgagcgatcctggaaagatcaaacggctgagatctcaggtgcaggtctccctcgaagactatatcaacgatcgccagtacgacagccggggcagattcggggagctgcttctgctcctgcccacgcttcaatctattacctggcagatgatcgagcagattcaatttatcaagctgttcggaatggccaaaattgataatctcctgcaggaaatgctgctcggcggcagcccttccgacgctccccatgcccaccacccgctgcatcctcaccttatgcaggagcatatggggacaaacgtgatcgttgccaataccatgcccacacacctgtctaacggacagatgtgcgaatggcctcgcccccggggccaagctgccacccccgagacgcctcagccgtctccccctgggggatccggcagcgaaccctatagactcctgcctggggcggtggctacaatcgtcaagcccctgtctgccattccgcagcctaccatcacacgccaggaggtgatttgaggactagtccctgttcccagagcccacttttttttctttttttgaaataaaatagcctgtctttcagatctcaaaggctcttttcagagccaccaaaaaaaaaaaaaaaaaaaaaaaaaaaaaaaaaaaaaaaaaaaaaaaaaaaaaaaaaaaaaaaaaaaaaaaaaaaaaaaaaaaaaaaaaaaaaaaaaaaaa

SEQ ID NO: 3172 - RNA, 1697 nt, synthetic construct
  misc_feature 1..1697: note = mRNA a-1 (hSL-A100) (opt5) from Homo sapiens__NP_000448.3__HNF4A(1-474)(K458R)
  source 1..1697: mol_type = other RNA
aggagagtcccgcagtcggcgtccagcggctctgcttgttcgtgtgtgtgtcgttgcaggccttattcaagcttaccatgagactgagcaagaccctcgtggacatggatatggccgactactccgctgccctggatcccgcgtatacaacgcttgagttcgaaaacgtccaggttctgaccatgggcaatgacacatctcctagcgaggggaccaacctcaatgctccgaactccctgggagtgtctgccctttgcgccatctgtggcgatcgggctacagggaaacactacggagccagctcctgcgacggctgtaaggggtttttccgcagatctgtgcggaaaaatcatatgtatagctgccgcttttccagacaatgtgtcgtggataaggacaaacggaaccagtgccgctactgtagactgaagaagtgcttccgggctggaatgaaaaaggaagccgttcagaatgagcgcgatagaattagcacccggcgcagctcctatgaagacagctctctcccctccatcaacgcgctgctgcaggccgaggtgctcagcagacaaattacatctcctgtctccggcatcaatggcgatattcgggctaaaaagatcgccagcatcgctgacgtgtgtgagtccatgaaagaacagctgcttgttctggtggagtgggccaagtacattcccgcgttttgcgaactccctctggatgaccaggtcgcccttctgcgcgctcacgccggggagcatctcctgctgggagctaccaagagatctatggtgttcaaagacgtgctcctgcttggcaacgattatatcgtcccccggcactgtcctgagctggccgaaatgagcagagtttccattcgcatcctcgacgagctggtgcttccgtttcaggaactgcaaattgatgacaatgagtacgcctacctcaaggctatcattttctttgatcccgacgcgaaagggctgagcgatcctggaaagatcaaacggctgagatctcaggtgcaggtctccctcgaagactatatcaacgatcgccagtacgacagccggggcagattcggggagctgcttctgctcctgcccacgcttcaatctattacctggcagatgatcgagcagattcaatttatcaagctgttcggaatggccaaaattgataatctcctgcaggaaatgctgctcggcggcagcccttccgacgctccccatgcccaccacccgctgcatcctcaccttatgcaggagcatatggggacaaacgtgatcgttgccaataccatgcccacacacctgtctaacggacagatgtgcgaatggcctcgcccccggggccaagctgccacccccgagacgcctcagccgtctccccctgggggatccggcagcgaaccctataagctcctgcctggggcggtggctacaatcgtcagacccctgtctgccattccgcagcctaccatcacaaagcaggaggtgatttgaggactagtccctgttcccagagcccacttttttttctttttttgaaataaaatagcctgtctttcagatctcaaaggctcttttcagagccaccaaaaaaaaaaaaaaaaaaaaaaaaaaaaaaaaaaaaaaaaaaaaaaaaaaaaaaaaaaaaaaaaaaaaaaaaaaaaaaaaaaaaaaaaaaaaaaaaaaaaa

SEQ ID NO: 3173 - RNA, 1697 nt, synthetic construct
  misc_feature 1..1697: note = mRNA a-1 (hSL-A100) (opt5) from Homo sapiens__NP_000448.3__HNF4A(1-474)(K106R_K108R_K126R_K127R)
  source 1..1697: mol_type = other RNA
aggagagtcccgcagtcggcgtccagcggctctgcttgttcgtgtgtgtgtcgttgcaggccttattcaagcttaccatgagactgagcaagaccctcgtggacatggatatggccgactactccgctgccctggatcccgcgtatacaacgcttgagttcgaaaacgtccaggttctgaccatgggcaatgacacatctcctagcgaggggaccaacctcaatgctccgaactccctgggagtgtctgccctttgcgccatctgtggcgatcgggctacagggaaacactacggagccagctcctgcgacggctgtaaggggtttttccgcagatctgtgcggaaaaatcatatgtatagctgccgcttttccagacaatgtgtcgtggatcgggaccgcagaaaccagtgccggtactgtcgcctgaagaaatgcttcagagctggaatgcggcgcgaagccgttcagaatgagagagatcggattagcacccgcagatcttcctatgaagacagctctctcccctccatcaacgcgctgctgcaggccgaggtgctcagccggcaaattacatctcctgtctccggcatcaatggcgatattagagctaagaagatcgccagcatcgctgacgtgtgtgagtccatgaaagaacagctgcttgttctggtggagtgggccaagtacattcccgcgttttgcgaactccctctggatgaccaggtcgcccttctgcgcgctcacgccggggagcatctcctgctgggagctaccaaacggtctatggtgttcaaggacgtgctcctgcttggcaacgattatatcgtccccagacactgtcctgagctggccgaaatgagccgcgtttccattcggatcctcgacgagctggtgcttccgtttcaggaactgcaaattgatgacaatgagtacgcctacctcaaagctatcattttctttgatcccgacgcgaaggggctgagcgatcctggaaagatcaaaagactgcgctctcaggtgcaggtctccctcgaagactatatcaacgatcggcagtacgacagcagaggccgcttcggggagctgcttctgctcctgcccacgcttcaatctattacctggcagatgatcgagcagattcaatttatcaagctgttcggaatggccaaaattgataatctcctgcaggaaatgctgctcggcggcagcccttccgacgctccccatgcccaccacccgctgcatcctcaccttatgcaggagcatatggggacaaacgtgatcgttgccaataccatgcccacacacctgtctaacggacagatgtgcgaatggcctcggcccagaggccaagctgccacccccgagacgcctcagccgagccctcccgggggatccggcagcgaaccctataagctcctgcctggggcggtggctacaatcgtcaaacccctgtctgccattccgcagcctaccatcacaaagcaggaggtgatttgaggactagtccctgttcccagagcccacttttttttctttttttgaaataaaatagcctgtctttcagatctcaaaggctcttttcagagccaccaaaaaaaaaaaaaaaaaaaaaaaaaaaaaaaaaaaaaaaaaaaaaaaaaaaaaaaaaaaaaaaaaaaaaaaaaaaaaaaaaaaaaaaaaaaaaaaaaaaaa

SEQ ID NO: 3174 - RNA, 1697 nt, synthetic construct
  misc_feature 1..1697: note = mRNA a-1 (hSL-A100) (opt5) from Homo sapiens__NP_000448.3__HNF4A(1-474)(E285Q)
  source 1..1697: mol_type = other RNA
aggagagtcccgcagtcggcgtccagcggctctgcttgttcgtgtgtgtgtcgttgcaggccttattcaagcttaccatgagactgagcaagaccctcgtggacatggatatggccgactactccgctgccctggatcccgcgtatacaacgcttgagttcgaaaacgtccaggttctgaccatgggcaatgacacatctcctagcgaggggaccaacctcaatgctccgaactccctgggagtgtctgccctttgcgccatctgtggcgatcgggctacagggaaacactacggagccagctcctgcgacggctgtaaggggtttttccgcagatctgtgcggaaaaatcatatgtatagctgccgcttttccagacaatgtgtcgtggataaggacaaacggaaccagtgccgctactgtagactgaagaagtgcttccgggctggaatgaaaaaggaagccgttcagaatgagcgcgatagaattagcacccggcgcagctcctatgaagacagctctctcccctccatcaacgcgctgctgcaggccgaggtgctcagcagacaaattacatctcctgtctccggcatcaatggcgatattcgggctaaaaagatcgccagcatcgctgacgtgtgtgagtccatgaaagaacagctgcttgttctggtggagtgggccaagtacattcccgcgttttgcgaactccctctggatgaccaggtcgcccttctgcgcgctcacgccggggagcatctcctgctgggagctaccaagagatctatggtgttcaaagacgtgctcctgcttggcaacgattatatcgtcccccggcactgtcctgagctggccgaaatgagcagagtttccattcgcatcctcgacgagctggtgcttccgtttcaggaactgcaaattgatgacaatcagtacgcctacctcaaggctatcattttctttgatcccgacgcgaaagggctgagcgatcctggaaagatcaaacggctgagatctcaggtgcaggtctccctcgaggactatatcaacgatcgccaatacgacagccggggcagattcggggaactgcttctgctcctgcccacgcttcagtctattacctggcagatgatcgagcaaattcagtttatcaagctgttcggaatggccaaaattgataatctcctgcaggagatgctgctcggcggcagcccttccgacgctccccatgcccaccacccgctgcatcctcaccttatgcaggaacatatggggacaaacgtgatcgttgccaataccatgcccacacacctgtctaacggacaaatgtgcgagtggcctcgcccccggggccaggctgccacccccgaaacgcctcagccgtctccccctgggggatccggcagcgagccctataagctcctgcctggggcggtggctacaatcgtcaagcccctgtctgccattccgcagcctaccatcacaaaacaagaagtgatttgaggactagtccctgttcccagagcccacttttttttctttttttgaaataaaatagcctgtctttcagatctcaaaggctcttttcagagccaccaaaaaaaaaaaaaaaaaaaaaaaaaaaaaaaaaaaaaaaaaaaaaaaaaaaaaaaaaaaaaaaaaaaaaaaaaaaaaaaaaaaaaaaaaaaaaaaaaaaaa

SEQ ID NO: 3175 - RNA, 1697 nt, synthetic construct
  misc_feature 1..1697: note = mRNA a-1 (hSL-A100) (opt5) from Homo sapiens__NP_000448.3__HNF4A(1-474)(T166E)
  source 1..1697: mol_type = other RNA
aggagagtcccgcagtcggcgtccagcggctctgcttgttcgtgtgtgtgtcgttgcaggccttattcaagcttaccatgagactgagcaagaccctcgtggacatggatatggccgactactccgctgccctggatcccgcgtatacaacgcttgagttcgaaaacgtccaggttctgaccatgggcaatgacacatctcctagcgaggggaccaacctcaatgctccgaactccctgggagtgtctgccctttgcgccatctgtggcgatcgggctacagggaaacactacggagccagctcctgcgacggctgtaaggggtttttccgcagatctgtgcggaaaaatcatatgtatagctgccgcttttccagacaatgtgtcgtggataaggacaaacggaaccagtgccgctactgtagactgaagaagtgcttccgggctggaatgaaaaaggaagccgttcagaatgagcgcgatagaattagcacccggcgcagctcctatgaagacagctctctcccctccatcaacgcgctgctgcaggccgaggtgctcagcagacaaattgagtctcctgtctccggcatcaatggcgatattcgggctaaaaagatcgccagcatcgctgacgtgtgtgaatccatgaaagagcagctgcttgttctggtggaatgggccaagtacattcccgcgttttgcgagctccctctggatgaccaggtcgcccttctgcgcgctcacgccggggagcatctcctgctgggagctacaaagagatctatggtgttcaaagacgtgctcctgcttggcaacgattatatcgtcccccggcactgtcctgaactggccgagatgagcagagtttccattcgcatcctcgacgaactggtgcttccgtttcaggagctgcaaattgatgacaatgaatacgcctacctcaaggctatcattttctttgatcccgacgcgaaagggctgagcgatcctggaaagatcaaacggctgagatctcaggtgcaggtctccctcgaggactatatcaacgatcgccagtacgacagccggggcagattcggggagctgcttctgctcctgcccacccttcaatctattacgtggcagatgatcgaacagattcaatttatcaagctgttcggaatggccaaaattgataatctcctgcaggagatgctgctcggcggcagcccttccgacgctccccatgcccaccacccgctgcatcctcaccttatgcaggaacatatggggaccaacgtgatcgttgccaatacaatgcccacccacctgtctaacggacagatgtgcgagtggcctcgcccccggggccaagctgccacacccgaaacccctcagccgtctccccctgggggatccggcagcgagccctataagctcctgcctggggcggtggctacgatcgtcaagcccctgtctgccattccgcagcctacaatcaccaaacaggaggtgatttgaggactagtccctgttcccagagcccacttttttttctttttttgaaataaaatagcctgtctttcagatctcaaaggctcttttcagagccaccaaaaaaaaaaaaaaaaaaaaaaaaaaaaaaaaaaaaaaaaaaaaaaaaaaaaaaaaaaaaaaaaaaaaaaaaaaaaaaaaaaaaaaaaaaaaaaaaaaaaa

SEQ ID NO: 3176 - RNA, 1697 nt, synthetic construct
  misc_feature 1..1697: note = mRNA a-1 (hSL-A100) (opt5) from Homo sapiens__NP_000448.3__HNF4A(1-474)(S148A)
  source 1..1697: mol_type = other RNA
aggagagtcccgcagtcggcgtccagcggctctgcttgttcgtgtgtgtgtcgttgcaggccttattcaagcttaccatgagactgagcaagaccctcgtggacatggatatggccgactactccgctgccctggatcccgcgtatacaacgcttgagttcgaaaacgtccaggttctgaccatgggcaatgacacatctcctagcgaggggaccaacctcaatgctccgaactccctgggagtgtctgccctttgcgccatctgtggcgatcgggctacagggaaacactacggagccagctcctgcgacggctgtaaggggtttttccgcagatctgtgcggaaaaatcatatgtatagctgccgcttttccagacaatgtgtcgtggataaggacaaacggaaccagtgccgctactgtagactgaagaagtgcttccgggctggaatgaaaaaggaagccgttcagaatgagcgcgatagaattagcacccggagatcttcctatgaagacagcgcgctcccctctatcaacgccctgctgcaggctgaggtgctctcccgccaaattacaagccctgtctctggcatcaatggcgatattcgggccaaaaagatcgcttccatcgccgacgtgtgtgagagcatgaaagaacagctgcttgttctggtggagtgggcgaagtacattcccgccttttgcgaactccctctggatgaccaggtcgcccttctgcgcgcccacgctggggagcatctcctgctgggagccaccaagagatccatggtgttcaaagacgtgctcctgcttggcaacgattatatcgtcccccggcactgtcctgagctggccgaaatgtctagagttagcattcgcatcctcgacgagctggtgcttccgtttcaggaactgcaaattgatgacaatgagtacgcttacctcaaggcgatcattttctttgatcccgacgccaaagggctgtccgatcctggaaagatcaaacggctgagaagccaggtgcaggtctctctcgaagactatatcaacgatcgccagtacgactcccggggcagattcggggagctgcttctgctcctgcccacgcttcaaagcattacctggcagatgatcgagcagattcaatttatcaagctgttcggaatggctaaaattgataatctcctgcaggaaatgctgctcggcggctctcctagcgacgctccccatgcccaccacccgctgcatcctcaccttatgcaggagcatatggggacaaacgtgatcgttgctaataccatgcccacacacctgtccaacggacagatgtgcgaatggcctcgcccccggggccaagccgcgacccccgagacgcctcagccgtctccccctgggggaagcggctccgaaccctataagctcctgcctggggctgtggccacaatcgtcaagcccctgagcgccattccgcagcctaccatcacaaaacaggaggtgatttgaggactagtccctgttcccagagcccacttttttttctttttttgaaataaaatagcctgtctttcagatctcaaaggctcttttcagagccaccaaaaaaaaaaaaaaaaaaaaaaaaaaaaaaaaaaaaaaaaaaaaaaaaaaaaaaaaaaaaaaaaaaaaaaaaaaaaaaaaaaaaaaaaaaaaaaaaaaaaa

SEQ ID NO: 3177 - RNA, 1697 nt, synthetic construct
  misc_feature 1..1697: note = mRNA a-1 (hSL-A100) (opt5) from Homo sapiens__NP_000448.3__HNF4A(1-474)(S148E)
  source 1..1697: mol_type = other RNA
aggagagtcccgcagtcggcgtccagcggctctgcttgttcgtgtgtgtgtcgttgcaggccttattcaagcttaccatgagactgagcaagaccctcgtggacatggatatggccgactactccgctgccctggatcccgcgtatacaacgcttgagttcgaaaacgtccaggttctgaccatgggcaatgacacatctcctagcgaggggaccaacctcaatgctccgaactccctgggagtgtctgccctttgcgccatctgtggcgatcgggctacagggaaacactacggagccagctcctgcgacggctgtaaggggtttttccgcagatctgtgcggaaaaatcatatgtatagctgccgcttttccagacaatgtgtcgtggataaggacaaacggaaccagtgccgctactgtagactgaagaagtgcttccgggctggaatgaaaaaggaagccgttcagaatgagcgcgatagaattagcacccggagatcttcctatgaagacagcgagctcccctctatcaacgcgctgctgcaggccgaggtgctctcccgccaaattacaagccctgtctctggcatcaatggcgatattcgggctaaaaagatcgcctccatcgctgacgtgtgtgaaagcatgaaagagcagctgcttgttctggtggaatgggccaagtacattcccgcgttttgcgagctccctctggatgaccaggtcgcccttctgcgcgctcacgccggggagcatctcctgctgggagctaccaagagatccatggtgttcaaagacgtgctcctgcttggcaacgattatatcgtcccccggcactgtcctgaactggccgagatgtctagagttagcattcgcatcctcgacgaactggtgcttccgtttcaggagctgcaaattgatgacaatgaatacgcctacctcaaggctatcattttctttgatcccgacgcgaaagggctgtccgatcctggaaagatcaaacggctgagaagccaggtgcaggtctctctcgaggactatatcaacgatcgccagtacgactcccggggcagattcggggagctgcttctgctcctgcccacgcttcaaagcattacctggcagatgatcgaacagattcaatttatcaagctgttcggaatggccaaaattgataatctcctgcaggagatgctgctcggcggctctcctagcgacgctccccatgcccaccacccgctgcatcctcaccttatgcaggaacatatggggacaaacgtgatcgttgccaataccatgcccacacacctgtccaacggacagatgtgcgagtggcctcgcccccggggccaagctgccacccccgaaacgcctcagccgtctccccctgggggaagcggctccgagccctataagctcctgcctggggcggtggctacaatcgtcaagcccctgagcgccattccgcagcctaccatcacaaaacaggaggtgatttgaggactagtccctgttcccagagcccacttttttttctttttttgaaataaaatagcctgtctttcagatctcaaaggctcttttcagagccaccaaaaaaaaaaaaaaaaaaaaaaaaaaaaaaaaaaaaaaaaaaaaaaaaaaaaaaaaaaaaaaaaaaaaaaaaaaaaaaaaaaaaaaaaaaaaaaaaaaaaa

SEQ ID NO: 3178 - RNA, 1697 nt, synthetic construct
  misc_feature 1..1697: note = mRNA a-1 (hSL-A100) (opt5) from Homo sapiens__NP_000448.3__HNF4A(1-474)(S183A)
  source 1..1697: mol_type = other RNA
aggagagtcccgcagtcggcgtccagcggctctgcttgttcgtgtgtgtgtcgttgcaggccttattcaagcttaccatgagactgagcaagaccctcgtggacatggatatggccgactactccgctgccctggatcccgcgtatacaacgcttgagttcgaaaacgtccaggttctgaccatgggcaatgacacatctcctagcgaggggaccaacctcaatgctccgaactccctgggagtgtctgccctttgcgccatctgtggcgatcgggctacagggaaacactacggagccagctcctgcgacggctgtaaggggtttttccgcagatctgtgcggaaaaatcatatgtatagctgccgcttttccagacaatgtgtcgtggataaggacaaacggaaccagtgccgctactgtagactgaagaagtgcttccgggctggaatgaaaaaggaagccgttcagaatgagcgcgatagaattagcacccggagatcttcctatgaagacagctctctcccctccatcaacgcgctgctgcaggccgaggtgctcagccgccaaattacatctcctgtctccggcatcaatggcgatattcgggctaaaaagatcgccgctatcgccgacgtgtgtgagagcatgaaagaacagctgcttgttctggtggagtgggcgaagtacattcccgccttttgcgaactccctctggatgaccaggtcgcccttctgcgcgcccacgctggggagcatctcctgctgggagccaccaagagatccatggtgttcaaagacgtgctcctgcttggcaacgattatatcgtcccccggcactgtcctgagctggccgaaatgtctagagttagcattcgcatcctcgacgagctggtgcttccgtttcaggaactgcaaattgatgacaatgagtacgcttacctcaaggcgatcattttctttgatcccgacgccaaagggctgtccgatcctggaaagatcaaacggctgagaagccaggtgcaggtctctctcgaagactatatcaacgatcgccagtacgactcccggggcagattcggggagctgcttctgctcctgcccacgcttcaaagcattacctggcagatgatcgagcagattcaatttatcaagctgttcggaatggctaaaattgataatctcctgcaggaaatgctgctcggcggctctcctagcgacgctccccatgcccaccacccgctgcatcctcaccttatgcaggagcatatggggacaaacgtgatcgttgctaataccatgcccacacacctgtccaacggacagatgtgcgaatggcctcgcccccggggccaagccgcgacccccgagacgcctcagccgtctccccctgggggaagcggctccgaaccctataagctcctgcctggggctgtggccacaatcgtcaagcccctgagcgccattccgcagcctaccatcacaaaacaggaggtgatttgaggactagtccctgttcccagagcccacttttttttctttttttgaaataaaatagcctgtctttcagatctcaaaggctcttttcagagccaccaaaaaaaaaaaaaaaaaaaaaaaaaaaaaaaaaaaaaaaaaaaaaaaaaaaaaaaaaaaaaaaaaaaaaaaaaaaaaaaaaaaaaaaaaaaaaaaaaaaaa

SEQ ID NO: 3179 - RNA, 1697 nt, synthetic construct
  misc_feature 1..1697: note = mRNA a-1 (hSL-A100) (opt5) from Homo sapiens__NP_000448.3__HNF4A(1-474)(S183E)
  source 1..1697: mol_type = other RNA
aggagagtcccgcagtcggcgtccagcggctctgcttgttcgtgtgtgtgtcgttgcaggccttattcaagcttaccatgagactgagcaagaccctcgtggacatggatatggccgactactccgctgccctggatcccgcgtatacaacgcttgagttcgaaaacgtccaggttctgaccatgggcaatgacacatctcctagcgaggggaccaacctcaatgctccgaactccctgggagtgtctgccctttgcgccatctgtggcgatcgggctacagggaaacactacggagccagctcctgcgacggctgtaaggggtttttccgcagatctgtgcggaaaaatcatatgtatagctgccgcttttccagacaatgtgtcgtggataaggacaaacggaaccagtgccgctactgtagactgaagaagtgcttccgggctggaatgaaaaaggaagccgttcagaatgagcgcgatagaattagcacccggagatcttcctatgaagacagctctctcccctccatcaacgcgctgctgcaggccgaggtgctcagccgccaaattacatctcctgtctccggcatcaatggcgatattcgggctaaaaagatcgccgagatcgctgacgtgtgtgaaagcatgaaagagcagctgcttgttctggtggaatgggccaagtacattcccgcgttttgcgagctccctctggatgaccaggtcgcccttctgcgcgctcacgccggggagcatctcctgctgggagctaccaagagatccatggtgttcaaagacgtgctcctgcttggcaacgattatatcgtcccccggcactgtcctgaactggccgagatgtctagagttagcattcgcatcctcgacgaactggtgcttccgtttcaggagctgcaaattgatgacaatgaatacgcctacctcaaggctatcattttctttgatcccgacgcgaaagggctgtccgatcctggaaagatcaaacggctgagaagccaggtgcaggtctctctcgaggactatatcaacgatcgccagtacgactcccggggcagattcggggagctgcttctgctcctgcccacgcttcaaagcattacctggcagatgatcgaacagattcaatttatcaagctgttcggaatggccaaaattgataatctcctgcaggagatgctgctcggcggctctcctagcgacgctccccatgcccaccacccgctgcatcctcaccttatgcaggaacatatggggacaaacgtgatcgttgccaataccatgcccacacacctgtccaacggacagatgtgcgagtggcctcgcccccggggccaagctgccacccccgaaacgcctcagccgtctccccctgggggaagcggctccgagccctataagctcctgcctggggcggtggctacaatcgtcaagcccctgagcgccattccgcagcctaccatcacaaaacaggaggtgatttgaggactagtccctgttcccagagcccacttttttttctttttttgaaataaaatagcctgtctttcagatctcaaaggctcttttcagagccaccaaaaaaaaaaaaaaaaaaaaaaaaaaaaaaaaaaaaaaaaaaaaaaaaaaaaaaaaaaaaaaaaaaaaaaaaaaaaaaaaaaaaaaaaaaaaaaaaaaaaa

SEQ ID NO: 3180 - RNA, 1697 nt, synthetic construct
  misc_feature 1..1697: note = mRNA a-1 (hSL-A100) (opt5) from Homo sapiens__NP_000448.3__HNF4A(1-474)(S461A)
  source 1..1697: mol_type = other RNA
aggagagtcccgcagtcggcgtccagcggctctgcttgttcgtgtgtgtgtcgttgcaggccttattcaagcttaccatgagactgagcaagaccctcgtggacatggatatggccgactactccgctgccctggatcccgcgtatacaacgcttgagttcgaaaacgtccaggttctgaccatgggcaatgacacatctcctagcgaggggaccaacctcaatgctccgaactccctgggagtgtctgccctttgcgccatctgtggcgatcgggctacagggaaacactacggagccagctcctgcgacggctgtaaggggtttttccgcagatctgtgcggaaaaatcatatgtatagctgccgcttttccagacaatgtgtcgtggataaggacaaacggaaccagtgccgctactgtagactgaagaagtgcttccgggctggaatgaaaaaggaagccgttcagaatgagcgcgatagaattagcacccggcgcagctcctatgaagacagctctctcccctccatcaacgcgctgctgcaggccgaggtgctcagcagacaaattacatctcctgtctccggcatcaatggcgatattcgggctaaaaagatcgccagcatcgctgacgtgtgtgagtccatgaaagaacagctgcttgttctggtggagtgggccaagtacattcccgcgttttgcgaactccctctggatgaccaggtcgcccttctgcgcgctcacgccggggagcatctcctgctgggagctaccaagagatctatggtgttcaaagacgtgctcctgcttggcaacgattatatcgtcccccggcactgtcctgagctggccgaaatgagcagagtttccattcgcatcctcgacgagctggtgcttccgtttcaggaactgcaaattgatgacaatgagtacgcctacctcaaggctatcattttctttgatcccgacgcgaaagggctgagcgatcctggaaagatcaaacggctgagatctcaggtgcaggtctccctcgaagactatatcaacgatcgccagtacgacagccggggcagattcggggagctgcttctgctcctgcccacgcttcaatctattacctggcagatgatcgagcagattcaatttatcaagctgttcggaatggccaaaattgataatctcctgcaggaaatgctgctcggcggcagcccttccgacgctccccatgcccaccacccgctgcatcctcaccttatgcaggagcatatggggacaaacgtgatcgttgccaataccatgcccacacacctgtctaacggacagatgtgcgaatggcctcgcccccggggccaagctgccacccccgagacgcctcagccgtctccccctgggggatccggcagcgaaccctataagctcctgcctggggcggtggctacaatcgtcaagcccctggccgccattccgcagcctaccatcacaaaacaggaggtgatttgaggactagtccctgttcccagagcccacttttttttctttttttgaaataaaatagcctgtctttcagatctcaaaggctcttttcagagccaccaaaaaaaaaaaaaaaaaaaaaaaaaaaaaaaaaaaaaaaaaaaaaaaaaaaaaaaaaaaaaaaaaaaaaaaaaaaaaaaaaaaaaaaaaaaaaaaaaaaaa

SEQ ID NO: 3181 - RNA, 1697 nt, synthetic construct
  misc_feature 1..1697: note = mRNA a-1 (hSL-A100) (opt5) from Homo sapiens__NP_000448.3__HNF4A(1-474)(S461E)
  source 1..1697: mol_type = other RNA
aggagagtcccgcagtcggcgtccagcggctctgcttgttcgtgtgtgtgtcgttgcaggccttattcaagcttaccatgagactgagcaagaccctcgtggacatggatatggccgactactccgctgccctggatcccgcgtatacaacgcttgagttcgaaaacgtccaggttctgaccatgggcaatgacacatctcctagcgaggggaccaacctcaatgctccgaactccctgggagtgtctgccctttgcgccatctgtggcgatcgggctacagggaaacactacggagccagctcctgcgacggctgtaaggggtttttccgcagatctgtgcggaaaaatcatatgtatagctgccgcttttccagacaatgtgtcgtggataaggacaaacggaaccagtgccgctactgtagactgaagaagtgcttccgggctggaatgaaaaaggaagccgttcagaatgagcgcgatagaattagcacccggcgcagctcctatgaagacagctctctcccctccatcaacgcgctgctgcaggccgaggtgctcagcagacaaattacatctcctgtctccggcatcaatggcgatattcgggctaaaaagatcgccagcatcgctgacgtgtgtgagtccatgaaagaacagctgcttgttctggtggagtgggccaagtacattcccgcgttttgcgaactccctctggatgaccaggtcgcccttctgcgcgctcacgccggggagcatctcctgctgggagctaccaagagatctatggtgttcaaagacgtgctcctgcttggcaacgattatatcgtcccccggcactgtcctgagctggccgaaatgagcagagtttccattcgcatcctcgacgagctggtgcttccgtttcaggaactgcaaattgatgacaatgagtacgcctacctcaaggctatcattttctttgatcccgacgcgaaagggctgagcgatcctggaaagatcaaacggctgagatctcaggtgcaggtctccctcgaagactatatcaacgatcgccagtacgacagccggggcagattcggggagctgcttctgctcctgcccacgcttcaatctattacctggcagatgatcgagcagattcaatttatcaagctgttcggaatggccaaaattgataatctcctgcaggaaatgctgctcggcggcagcccttccgacgctccccatgcccaccacccgctgcatcctcaccttatgcaggagcatatggggacaaacgtgatcgttgccaataccatgcccacacacctgtctaacggacagatgtgcgaatggcctcgcccccggggccaagctgccacccccgagacgcctcagccgtctccccctgggggatccggcagcgaaccctataagctcctgcctggggcggtggctacaatcgtcaagcccctggaggccattccgcagcctaccatcacaaaacaggaggtgatttgaggactagtccctgttcccagagcccacttttttttctttttttgaaataaaatagcctgtctttcagatctcaaaggctcttttcagagccaccaaaaaaaaaaaaaaaaaaaaaaaaaaaaaaaaaaaaaaaaaaaaaaaaaaaaaaaaaaaaaaaaaaaaaaaaaaaaaaaaaaaaaaaaaaaaaaaaaaaaa

SEQ ID NO: 3182 - RNA, 1697 nt, synthetic construct
  misc_feature 1..1697: note = mRNA a-1 (hSL-A100) (opt5) from Homo sapiens__NP_000448.3__HNF4A(1-474)(S142A_S143A_S313A)
  source 1..1697: mol_type = other RNA
aggagagtcccgcagtcggcgtccagcggctctgcttgttcgtgtgtgtgtcgttgcaggccttattcaagcttaccatgagactgagcaagaccctcgtggacatggatatggccgactactccgctgccctggatcccgcgtatacaacgcttgagttcgaaaacgtccaggttctgaccatgggcaatgacacatctcctagcgaggggaccaacctcaatgctccgaactccctgggagtgtctgccctttgcgccatctgtggcgatcgggctacagggaaacactacggagccagctcctgcgacggctgtaaggggtttttccgcagatctgtgcggaaaaatcatatgtatagctgccgcttttccagacaatgtgtcgtggataaggacaaacggaaccagtgccgctactgtagactgaagaagtgcttccgggctggaatgaaaaaggaagccgttcagaatgagcgcgatagaattagcacccggcgcgcggcctatgaagactcttccctccccagcatcaacgctctgctgcaggccgaggtgctctctagacaaattacatcccctgtcagcggcatcaatggcgatattcgggctaaaaagatcgcctctatcgcggacgtgtgtgagtccatgaaagaacagctgcttgttctggtggagtgggccaagtacattcccgctttttgcgaactccctctggatgaccaggtcgcccttctgcgcgctcacgccggggagcatctcctgctgggagccaccaagagaagcatggtgttcaaagacgtgctcctgcttggcaacgattatatcgtcccccggcactgtcctgagctggctgaaatgtccagagtttctattcgcatcctcgacgagctggtgcttccgtttcaggaactgcaaattgatgacaatgagtacgcgtacctcaaggccatcattttctttgatcccgacgctaaagggctgagcgatcctggaaagatcaaacggctgagagcccaggtgcaggtctccctcgaagactatatcaacgatcgccagtacgacagccggggcagattcggggagctgcttctgctcctgcccacgcttcaatctattacctggcagatgatcgagcagattcaatttatcaagctgttcggaatggccaaaattgataatctcctgcaggaaatgctgctcggcggctcccctagcgacgctccccatgcccaccacccgctgcatcctcaccttatgcaggagcatatggggacaaacgtgatcgttgcgaataccatgcccacacacctgtctaacggacagatgtgcgaatggcctcgcccccggggccaagctgccacccccgagacgcctcagccgagccctcccgggggatccggctctgaaccctataagctcctgcctggggccgtggctacaatcgtcaagcccctgagcgccattccgcagcctaccatcacaaaacaggaggtgatttgaggactagtccctgttcccagagcccacttttttttctttttttgaaataaaatagcctgtctttcagatctcaaaggctcttttcagagccaccaaaaaaaaaaaaaaaaaaaaaaaaaaaaaaaaaaaaaaaaaaaaaaaaaaaaaaaaaaaaaaaaaaaaaaaaaaaaaaaaaaaaaaaaaaaaaaaaaaaaa

SEQ ID NO: 3183 - RNA, 1697 nt, synthetic construct
  misc_feature 1..1697: note = mRNA a-1 (hSL-A100) (opt5) from Homo sapiens__NP_000448.3__HNF4A(1-474)(S142A_S143A_S313A_K458R)
  source 1..1697: mol_type = other RNA
aggagagtcccgcagtcggcgtccagcggctctgcttgttcgtgtgtgtgtcgttgcaggccttattcaagcttaccatgagactgagcaagaccctcgtggacatggatatggccgactactccgctgccctggatcccgcgtatacaacgcttgagttcgaaaacgtccaggttctgaccatgggcaatgacacatctcctagcgaggggaccaacctcaatgctccgaactccctgggagtgtctgccctttgcgccatctgtggcgatcgggctacagggaaacactacggagccagctcctgcgacggctgtaaggggtttttccgcagatctgtgcggaaaaatcatatgtatagctgccgcttttccagacaatgtgtcgtggataaggacaaacggaaccagtgccgctactgtagactgaagaagtgcttccgggctggaatgaaaaaggaagccgttcagaatgagcgcgatagaattagcacccggcgcgcggcctatgaagactcttccctccccagcatcaacgctctgctgcaggccgaggtgctctctagacaaattacatcccctgtcagcggcatcaatggcgatattcgggctaaaaagatcgcctctatcgcggacgtgtgtgagtccatgaaagaacagctgcttgttctggtggagtgggccaagtacattcccgctttttgcgaactccctctggatgaccaggtcgcccttctgcgcgctcacgccggggagcatctcctgctgggagccaccaagagaagcatggtgttcaaagacgtgctcctgcttggcaacgattatatcgtcccccggcactgtcctgagctggctgaaatgtccagagtttctattcgcatcctcgacgagctggtgcttccgtttcaggaactgcaaattgatgacaatgagtacgcgtacctcaaggccatcattttctttgatcccgacgctaaagggctgagcgatcctggaaagatcaaacggctgagagcccaggtgcaggtctccctcgaagactatatcaacgatcgccagtacgacagccggggcagattcggggagctgcttctgctcctgcccacgcttcaatctattacctggcagatgatcgagcagattcaatttatcaagctgttcggaatggccaaaattgataatctcctgcaggaaatgctgctcggcggctcccctagcgacgctccccatgcccaccacccgctgcatcctcaccttatgcaggagcatatggggacaaacgtgatcgttgcgaataccatgcccacacacctgtctaacggacagatgtgcgaatggcctcgcccccggggccaagctgccacccccgagacgcctcagccgagccctcccgggggatccggctctgaaccctataagctcctgcctggggccgtggctacaatcgtcagacccctgagcgccattccgcagcctaccatcacaaagcaggaggtgatttgaggactagtccctgttcccagagcccacttttttttctttttttgaaataaaatagcctgtctttcagatctcaaaggctcttttcagagccaccaaaaaaaaaaaaaaaaaaaaaaaaaaaaaaaaaaaaaaaaaaaaaaaaaaaaaaaaaaaaaaaaaaaaaaaaaaaaaaaaaaaaaaaaaaaaaaaaaaaaa

SEQ ID NO: 3184 - RNA, 1697 nt, synthetic construct
  misc_feature 1..1697: note = mRNA a-1 (hSL-A100) (opt5) from Homo sapiens__NP_000448.3__HNF4A(1-474)(S142A_S143A_S167A_S313A_ S378A_T429A_T432A_S436A_K458R)
  source 1..1697: mol_type = other RNA
aggagagtcccgcagtcggcgtccagcggctctgcttgttcgtgtgtgtgtcgttgcaggccttattcaagcttaccatgagactgagcaagaccctcgtggacatggatatggccgactactccgctgccctggatcccgcgtatacaacgcttgagttcgaaaacgtccaggttctgaccatgggcaatgacacatctcctagcgaggggaccaacctcaatgctccgaactccctgggagtgtctgccctttgcgccatctgtggcgatcgggctacagggaaacactacggagccagctcctgcgacggctgtaaggggtttttccgcagatctgtgcggaaaaatcatatgtatagctgccgcttttccagacaatgtgtcgtggataaggacaaacggaaccagtgccgctactgtagactgaagaagtgcttccgggctggaatgaaaaaggaagccgttcagaatgagcgcgatagaattagcacccggcgcgcggcctatgaagactcttccctccccagcatcaacgctctgctgcaggccgaggtgctctctagacaaattacagctcctgtctccggcatcaatggcgatattcgggccaaaaagatcgcgagcatcgccgacgtgtgtgagtctatgaaagaacagctgcttgttctggtggagtgggctaagtacattcccgccttttgcgaactccctctggatgaccaggtcgcccttctgcgcgcccacgccggggagcatctcctgctgggagctaccaagagatccatggtgttcaaagacgtgctcctgcttggcaacgattatatcgtcccccggcactgtcctgagctggcggaaatgagcagagtttccattcgcatcctcgacgagctggtgcttccgtttcaggaactgcaaattgatgacaatgagtacgcctacctcaaggctatcattttctttgatcccgacgccaaagggctgtctgatcctggaaagatcaaacggctgagagcccaggtgcaggtcagcctcgaagactatatcaacgatcgccagtacgactcccggggcagattcggggagctgcttctgctcctgcccacgcttcaaagcattacctggcagatgatcgagcagattcaatttatcaagctgttcggaatggctaaaattgataatctcctgcaggaaatgctgctcggcggcgccccttctgacgcgccccatgctcaccacccgctgcatcctcaccttatgcaggagcatatggggacaaacgtgatcgttgccaataccatgcccacacacctgtccaacggacagatgtgcgaatggcctcgcccccggggccaagccgctgcccccgaggctcctcagccggctccccctgggggaagcggctctgaaccctataagctcctgcctggggcggtggccaccatcgtcagacccctgagcgctattccgcagcctacgatcacaaagcaggaggtgatttgaggactagtccctgttcccagagcccacttttttttctttttttgaaataaaatagcctgtctttcagatctcaaaggctcttttcagagccaccaaaaaaaaaaaaaaaaaaaaaaaaaaaaaaaaaaaaaaaaaaaaaaaaaaaaaaaaaaaaaaaaaaaaaaaaaaaaaaaaaaaaaaaaaaaaaaaaaaaaa

SEQ ID NO: 3185 - RNA, 1697 nt, synthetic construct
  misc_feature 1..1697: note = mRNA a-1 (hSL-A100) (opt5) from Homo sapiens__NP_000448.3__HNF4A(1-474)(S142A_S143A_S148A_S167A_ S313A_S378A_T429A_T432A_S436A_K458R)
  source 1..1697: mol_type = other RNA
aggagagtcccgcagtcggcgtccagcggctctgcttgttcgtgtgtgtgtcgttgcaggccttattcaagcttaccatgagactgagcaagaccctcgtggacatggatatggccgactactccgctgccctggatcccgcgtatacaacgcttgagttcgaaaacgtccaggttctgaccatgggcaatgacacatctcctagcgaggggaccaacctcaatgctccgaactccctgggagtgtctgccctttgcgccatctgtggcgatcgggctacagggaaacactacggagccagctcctgcgacggctgtaaggggtttttccgcagatctgtgcggaaaaatcatatgtatagctgccgcttttccagacaatgtgtcgtggataaggacaaacggaaccagtgccgctactgtagactgaagaagtgcttccgggctggaatgaaaaaggaagccgttcagaatgagcgcgatagaattagcacccggcgcgcggcctatgaagactctgctctcccctccatcaacgccctgctgcaggctgaggtgctcagcagacaaattacagcccctgtctctggcatcaatggcgatattcgggcgaaaaagatcgcctccatcgctgacgtgtgtgagagcatgaaagaacagctgcttgttctggtggagtgggccaagtacattcccgctttttgcgaactccctctggatgaccaggtcgcccttctgcgcgcccacgctggggagcatctcctgctgggagcgaccaagagatctatggtgttcaaagacgtgctcctgcttggcaacgattatatcgtcccccggcactgtcctgagctggccgaaatgtccagagttagcattcgcatcctcgacgagctggtgcttccgtttcaggaactgcaaattgatgacaatgagtacgcttacctcaaggccatcattttctttgatcccgacgccaaagggctgtccgatcctggaaagatcaaacggctgagagctcaggtgcaggtctctctcgaagactatatcaacgatcgccagtacgacagccggggcagattcggggagctgcttctgctcctgcccacgcttcaatccattacctggcagatgatcgagcagattcaatttatcaagctgttcggaatggccaaaattgataatctcctgcaggaaatgctgctcggcggcgcgcctagcgacgctccccatgcccaccacccgctgcatcctcaccttatgcaggagcatatggggacaaacgtgatcgttgccaataccatgcccacacacctgtctaacggacagatgtgcgaatggcctcgcccccggggccaagctgccgctcccgaggcccctcagccggcgccccctgggggatccggcagcgaaccctataagctcctgcctggggccgtggctaccatcgtcagacccctgtctgccattccgcagcctacgatcacaaagcaggaggtgatttgaggactagtccctgttcccagagcccacttttttttctttttttgaaataaaatagcctgtctttcagatctcaaaggctcttttcagagccaccaaaaaaaaaaaaaaaaaaaaaaaaaaaaaaaaaaaaaaaaaaaaaaaaaaaaaaaaaaaaaaaaaaaaaaaaaaaaaaaaaaaaaaaaaaaaaaaaaaaaa

SEQ ID NO: 3186 - RNA, 1697 nt, synthetic construct
  misc_feature 1..1697: note = mRNA a-1 (hSL-A100) (opt5) from Homo sapiens__NP_000448.3__HNF4A(1-474)(K106R_K108R_K126R_K127R_ S142A_S143A_S148A_S167A_S313A_S378A_T429A_T432A_S436A_K458R )
  source 1..1697: mol_type = other RNA
aggagagtcccgcagtcggcgtccagcggctctgcttgttcgtgtgtgtgtcgttgcaggccttattcaagcttaccatgagactgagcaagaccctcgtggacatggatatggccgactactccgctgccctggatcccgcgtatacaacgcttgagttcgaaaacgtccaggttctgaccatgggcaatgacacatctcctagcgaggggaccaacctcaatgctccgaactccctgggagtgtctgccctttgcgccatctgtggcgatcgggctacagggaaacactacggagccagctcctgcgacggctgtaaggggtttttccgcagatctgtgcggaaaaatcatatgtatagctgccgcttttccagacaatgtgtcgtggatcgggaccgcagaaaccagtgccggtactgtcgcctgaagaaatgcttcagagctggaatgcggcgcgaagccgttcagaatgagagagatcggattagcacccgcagagcggcctatgaagactctgctctcccctccatcaacgccctgctgcaggctgaggtgctcagccggcaaattacagcccctgtctctggcatcaatggcgatattagagcgaagaagatcgcctccatcgctgacgtgtgtgagagcatgaaagaacagctgcttgttctggtggagtgggccaagtacattcccgctttttgcgaactccctctggatgaccaggtcgcccttctgcgcgcccacgctggggagcatctcctgctgggagcgaccaaacggtctatggtgttcaaggacgtgctcctgcttggcaacgattatatcgtccccagacactgtcctgagctggccgaaatgtcccgcgttagcattcggatcctcgacgagctggtgcttccgtttcaggaactgcaaattgatgacaatgagtacgcttacctcaaagccatcattttctttgatcccgacgccaaggggctgtccgatcctggaaagatcaaaagactgcgcgctcaggtgcaggtctctctcgaagactatatcaacgatcggcagtacgacagcagaggccgcttcggggagctgcttctgctcctgcccacgcttcaatccattacctggcagatgatcgagcagattcaatttatcaagctgttcggaatggccaaaattgataatctcctgcaggaaatgctgctcggcggcgcgcctagcgacgctccccatgcccaccacccgctgcatcctcaccttatgcaggagcatatggggacaaacgtgatcgttgccaataccatgcccacacacctgtctaacggacagatgtgcgaatggcctcggcccagaggccaagctgccgctcccgaggcccctcagccggcgccccctgggggatccggcagcgaaccctataagctcctgcctggggccgtggctaccatcgtccgccccctgtctgccattccgcagcctacgatcacaaaacaggaggtgatttgaggactagtccctgttcccagagcccacttttttttctttttttgaaataaaatagcctgtctttcagatctcaaaggctcttttcagagccaccaaaaaaaaaaaaaaaaaaaaaaaaaaaaaaaaaaaaaaaaaaaaaaaaaaaaaaaaaaaaaaaaaaaaaaaaaaaaaaaaaaaaaaaaaaaaaaaaaaaaa

SEQ ID NO: 3187 - RNA, 1697 nt, synthetic construct
  misc_feature 1..1697: note = mRNA a-1 (hSL-A100) (opt5) from Homo sapiens__NP_000448.3__HNF4A(1-474)(S142A_S143A_S148A_T166A_ S167A_S313A_S378A_T429A_T432A_S436A_K458R)
  source 1..1697: mol_type = other RNA
aggagagtcccgcagtcggcgtccagcggctctgcttgttcgtgtgtgtgtcgttgcaggccttattcaagcttaccatgagactgagcaagaccctcgtggacatggatatggccgactactccgctgccctggatcccgcgtatacaacgcttgagttcgaaaacgtccaggttctgaccatgggcaatgacacatctcctagcgaggggaccaacctcaatgctccgaactccctgggagtgtctgccctttgcgccatctgtggcgatcgggctacagggaaacactacggagccagctcctgcgacggctgtaaggggtttttccgcagatctgtgcggaaaaatcatatgtatagctgccgcttttccagacaatgtgtcgtggataaggacaaacggaaccagtgccgctactgtagactgaagaagtgcttccgggctggaatgaaaaaggaagccgttcagaatgagcgcgatagaattagcacccggcgcgcggcctatgaagactctgctctcccctccatcaacgccctgctgcaggctgaggtgctcagcagacaaattgccgcgcctgtctctggcatcaatggcgatattcgggccaaaaagatcgcttccatcgccgacgtgtgtgagagcatgaaagaacagctgcttgttctggtggagtgggctaagtacattcccgccttttgcgaactccctctggatgaccaggtcgcccttctgcgcgctcacgcgggggagcatctcctgctgggagccacaaagagatctatggtgttcaaagacgtgctcctgcttggcaacgattatatcgtcccccggcactgtcctgagctggctgaaatgtccagagttagcattcgcatcctcgacgagctggtgcttccgtttcaggaactgcaaattgatgacaatgagtacgcctacctcaaggccatcattttctttgatcccgacgctaaagggctgtccgatcctggaaagatcaaacggctgagagcccaggtgcaggtctctctcgaagactatatcaacgatcgccagtacgacagccggggcagattcggggagctgcttctgctcctgcccacccttcaatccattacgtggcagatgatcgagcagattcaatttatcaagctgttcggaatggcgaaaattgataatctcctgcaggaaatgctgctcggcggcgctcctagcgacgctccccatgcccaccacccgctgcatcctcaccttatgcaggagcatatggggaccaacgtgatcgttgccaatacaatgcccacccacctgtctaacggacagatgtgcgaatggcctcgcccccggggccaagccgctgcccccgaggcgcctcagccggctccccctgggggatccggcagcgaaccctataagctcctgcctggggccgtggccacaatcgtcagacccctgtctgctattccgcagcctaccatcacgaagcaggaggtgatttgaggactagtccctgttcccagagcccacttttttttctttttttgaaataaaatagcctgtctttcagatctcaaaggctcttttcagagccaccaaaaaaaaaaaaaaaaaaaaaaaaaaaaaaaaaaaaaaaaaaaaaaaaaaaaaaaaaaaaaaaaaaaaaaaaaaaaaaaaaaaaaaaaaaaaaaaaaaaaa

SEQ ID NO: 3188 - RNA, 1697 nt, synthetic construct
  misc_feature 1..1697: note = mRNA a-1 (hSL-A100) (opt5) from Homo sapiens__NP_000448.3__HNF4A(1-474)(S87A_S142A_S143A_S148A_T 166A_S167A_S313A_S378A_T429A_T432A_S436A_K458R)
  source 1..1697: mol_type = other RNA
aggagagtcccgcagtcggcgtccagcggctctgcttgttcgtgtgtgtgtcgttgcaggccttattcaagcttaccatgagactgagcaagaccctcgtggacatggatatggccgactactccgctgccctggatcccgcgtatacaacgcttgagttcgaaaacgtccaggttctgaccatgggcaatgacacatctcctagcgaggggaccaacctcaatgctccgaactccctgggagtgtctgccctttgcgccatctgtggcgatcgggctacagggaaacactacggagccagctcctgcgacggctgtaaggggtttttccgcagagctgtgcggaaaaatcatatgtattcttgccgctttagcagacaatgtgtcgtggataaggacaaacggaaccagtgccgctactgtagactgaagaagtgcttccgggccggaatgaaaaaggaagcggttcagaatgagcgcgatagaatttccacccggcgcgccgcttatgaagacagcgccctcccctctatcaacgctctgctgcaggccgaggtgctctccagacaaattgcggcccctgtcagcggcatcaatggcgatattcgggctaaaaagatcgcctctatcgctgacgtgtgtgagtccatgaaagaacagctgcttgttctggtggagtgggccaagtacattcccgccttttgcgaactccctctggatgaccaggtcgcccttctgcgcgcgcacgccggggagcatctcctgctgggagctacaaagagaagcatggtgttcaaagacgtgctcctgcttggcaacgattatatcgtcccccggcactgtcctgagctggccgaaatgtctagagtttccattcgcatcctcgacgagctggtgcttccgtttcaggaactgcaaattgatgacaatgagtacgcctacctcaaggctatcattttctttgatcccgacgccaaagggctgagcgatcctggaaagatcaaacggctgagagctcaggtgcaggtctccctcgaagactatatcaacgatcgccagtacgactctcggggcagattcggggagctgcttctgctcctgcccacccttcaaagcattacgtggcagatgatcgagcagattcaatttatcaagctgttcggaatggcgaaaattgataatctcctgcaggaaatgctgctcggcggcgccccttccgacgctccccatgctcaccacccgctgcatcctcaccttatgcaggagcatatggggaccaacgtgatcgttgccaatacaatgcccacccacctgagcaacggacagatgtgcgaatggcctcgcccccggggccaagctgccgcgcccgaggcccctcagccggctccccctgggggatctggctccgaaccctataagctcctgcctggggccgtggctacaatcgtcagacccctgagcgccattccgcagcctaccatcacgaagcaggaggtgatttgaggactagtccctgttcccagagcccacttttttttctttttttgaaataaaatagcctgtctttcagatctcaaaggctcttttcagagccaccaaaaaaaaaaaaaaaaaaaaaaaaaaaaaaaaaaaaaaaaaaaaaaaaaaaaaaaaaaaaaaaaaaaaaaaaaaaaaaaaaaaaaaaaaaaaaaaaaaaaa

SEQ ID NO: 3189 - RNA, 1697 nt, synthetic construct
  misc_feature 1..1697: note = mRNA a-1 (hSL-A100) (opt5) from Homo sapiens__NP_000448.3__HNF4A(1-474)(S87A_K106R_K108R_K126R_K 127R_S142A_S143A_S148A_T166A_S167A_S313A_S378A_T429A_T432A_ S436A_K458R)
  source 1..1697: mol_type = other RNA
aggagagtcccgcagtcggcgtccagcggctctgcttgttcgtgtgtgtgtcgttgcaggccttattcaagcttaccatgagactgagcaagaccctcgtggacatggatatggccgactactccgctgccctggatcccgcgtatacaacgcttgagttcgaaaacgtccaggttctgaccatgggcaatgacacatctcctagcgaggggaccaacctcaatgctccgaactccctgggagtgtctgccctttgcgccatctgtggcgatcgggctacagggaaacactacggagccagctcctgcgacggctgtaaggggtttttccgcagagctgtgcggaaaaatcatatgtattcttgccgctttagcagacaatgtgtcgtggatcgggaccgcagaaaccagtgccggtactgtcgcctgaagaaatgcttcagagccggaatgcggcgcgaagcggttcagaatgagagagatcggatttccacccgcagagccgcttatgaagacagcgccctcccctctatcaacgctctgctgcaggccgaggtgctctcccggcaaattgcggcccctgtcagcggcatcaatggcgatattagagctaagaagatcgcctctatcgctgacgtgtgtgagtccatgaaagaacagctgcttgttctggtggagtgggccaagtacattcccgccttttgcgaactccctctggatgaccaggtcgcccttctgcgcgcgcacgccggggagcatctcctgctgggagctacaaaacggagcatggtgttcaaggacgtgctcctgcttggcaacgattatatcgtccccagacactgtcctgagctggccgaaatgtctcgcgtttccattcggatcctcgacgagctggtgcttccgtttcaggaactgcaaattgatgacaatgagtacgcctacctcaaagctatcattttctttgatcccgacgccaaggggctgagcgatcctggaaagatcaaaagactgcgcgctcaggtgcaggtctccctcgaagactatatcaacgatcggcagtacgactctagaggccgcttcggggagctgcttctgctcctgcccacccttcaaagcattacgtggcagatgatcgagcagattcaatttatcaagctgttcggaatggcgaaaattgataatctcctgcaggaaatgctgctcggcggcgccccttccgacgctccccatgctcaccacccgctgcatcctcaccttatgcaggagcatatggggaccaacgtgatcgttgccaatacaatgcccacccacctgagcaacggacagatgtgcgaatggcctcggcccagaggccaagctgccgcgcccgaggcccctcagccggctccccctgggggatctggctccgaaccctataagctcctgcctggggccgtggctacaatcgtccgccccctgagcgccattccgcagcctaccatcacgaaacaggaggtgatttgaggactagtccctgttcccagagcccacttttttttctttttttgaaataaaatagcctgtctttcagatctcaaaggctcttttcagagccaccaaaaaaaaaaaaaaaaaaaaaaaaaaaaaaaaaaaaaaaaaaaaaaaaaaaaaaaaaaaaaaaaaaaaaaaaaaaaaaaaaaaaaaaaaaaaaaaaaaaaa

SEQ ID NO: 3190 - RNA, 1697 nt, synthetic construct
  misc_feature 1..1697: note = mRNA a-1 (hSL-A100) (opt5) from Homo sapiens__NP_000448.3__HNF4A(1-474)(S87A_K106R_K108R_K126R_K 127R)
  source 1..1697: mol_type = other RNA
aggagagtcccgcagtcggcgtccagcggctctgcttgttcgtgtgtgtgtcgttgcaggccttattcaagcttaccatgagactgagcaagaccctcgtggacatggatatggccgactactccgctgccctggatcccgcgtatacaacgcttgagttcgaaaacgtccaggttctgaccatgggcaatgacacatctcctagcgaggggaccaacctcaatgctccgaactccctgggagtgtctgccctttgcgccatctgtggcgatcgggctacagggaaacactacggagccagctcctgcgacggctgtaaggggtttttccgcagagctgtgcggaaaaatcatatgtattcttgccgctttagcagacaatgtgtcgtggatcgggaccgcagaaaccagtgccggtactgtcgcctgaagaaatgcttcagagccggaatgcggcgcgaagcggttcagaatgagagagatcggatttccacccgcagaagctcttatgaagactccagcctcccctctatcaacgccctgctgcaggctgaggtgctctcccggcaaattacaagccctgtctctggcatcaatggcgatattagagccaagaagatcgcttccatcgccgacgtgtgtgagagcatgaaagaacagctgcttgttctggtggagtgggcgaagtacattcccgccttttgcgaactccctctggatgaccaggtcgcccttctgcgcgcccacgctggggagcatctcctgctgggagccaccaaacggtccatggtgttcaaggacgtgctcctgcttggcaacgattatatcgtccccagacactgtcctgagctggccgaaatgtctcgcgttagcattcggatcctcgacgagctggtgcttccgtttcaggaactgcaaattgatgacaatgagtacgcttacctcaaagcgatcattttctttgatcccgacgccaaggggctgtccgatcctggaaagatcaaaagactgcgcagccaggtgcaggtctctctcgaagactatatcaacgatcggcagtacgactccagaggccgcttcggggagctgcttctgctcctgcccacgcttcaaagcattacctggcagatgatcgagcagattcaatttatcaagctgttcggaatggctaaaattgataatctcctgcaggaaatgctgctcggcggctctcctagcgacgctccccatgcccaccacccgctgcatcctcaccttatgcaggagcatatggggacaaacgtgatcgttgctaataccatgcccacacacctgtccaacggacagatgtgcgaatggcctcggcccagaggccaagccgcgacccccgagacgcctcagccgtctccccctgggggaagcggctccgaaccctataagctcctgcctggggctgtggccacaatcgtcaaacccctgagcgccattccgcagcctaccatcacaaagcaggaggtgatttgaggactagtccctgttcccagagcccacttttttttctttttttgaaataaaatagcctgtctttcagatctcaaaggctcttttcagagccaccaaaaaaaaaaaaaaaaaaaaaaaaaaaaaaaaaaaaaaaaaaaaaaaaaaaaaaaaaaaaaaaaaaaaaaaaaaaaaaaaaaaaaaaaaaaaaaaaaaaaa

SEQ ID NO: 3191 - RNA, 1697 nt, synthetic construct
  misc_feature 1..1697: note = mRNA a-1 (hSL-A100) (opt5) from Homo sapiens__NP_000448.3__HNF4A(1-474)(S87A_K106R_K108R_K126R_K 127R_S142A_S143A_S148A_T166A_S167A_S313A_S378A_T429A_T432A_ S436A_K458R_S461A)
  source 1..1697: mol_type = other RNA
aggagagtcccgcagtcggcgtccagcggctctgcttgttcgtgtgtgtgtcgttgcaggccttattcaagcttaccatgagactgagcaagaccctcgtggacatggatatggccgactactccgctgccctggatcccgcgtatacaacgcttgagttcgaaaacgtccaggttctgaccatgggcaatgacacatctcctagcgaggggaccaacctcaatgctccgaactccctgggagtgtctgccctttgcgccatctgtggcgatcgggctacagggaaacactacggagccagctcctgcgacggctgtaaggggtttttccgcagagctgtgcggaaaaatcatatgtattcttgccgctttagcagacaatgtgtcgtggatcgggaccgcagaaaccagtgccggtactgtcgcctgaagaaatgcttcagagccggaatgcggcgcgaagcggttcagaatgagagagatcggatttccacccgcagagccgcttatgaagacagcgccctcccctctatcaacgctctgctgcaggccgaggtgctctcccggcaaattgcggcccctgtcagcggcatcaatggcgatattagagctaagaagatcgcctctatcgctgacgtgtgtgagtccatgaaagaacagctgcttgttctggtggagtgggccaagtacattcccgccttttgcgaactccctctggatgaccaggtcgcccttctgcgcgcgcacgccggggagcatctcctgctgggagctacaaaacggagcatggtgttcaaggacgtgctcctgcttggcaacgattatatcgtccccagacactgtcctgagctggccgaaatgtctcgcgtttccattcggatcctcgacgagctggtgcttccgtttcaggaactgcaaattgatgacaatgagtacgcctacctcaaagctatcattttctttgatcccgacgccaaggggctgagcgatcctggaaagatcaaaagactgcgcgctcaggtgcaggtctccctcgaagactatatcaacgatcggcagtacgactctagaggccgcttcggggagctgcttctgctcctgcccacccttcaaagcattacgtggcagatgatcgagcagattcaatttatcaagctgttcggaatggcgaaaattgataatctcctgcaggaaatgctgctcggcggcgccccttccgacgctccccatgctcaccacccgctgcatcctcaccttatgcaggagcatatggggaccaacgtgatcgttgccaatacaatgcccacccacctgagcaacggacagatgtgcgaatggcctcggcccagaggccaagctgccgcgcccgaggcccctcagccggctccccctgggggatctggctccgaaccctataagctcctgcctggggccgtggctacaatcgtccgccccctggccgcgattccgcagcctaccatcacgaaacaggaggtgatttgaggactagtccctgttcccagagcccacttttttttctttttttgaaataaaatagcctgtctttcagatctcaaaggctcttttcagagccaccaaaaaaaaaaaaaaaaaaaaaaaaaaaaaaaaaaaaaaaaaaaaaaaaaaaaaaaaaaaaaaaaaaaaaaaaaaaaaaaaaaaaaaaaaaaaaaaaaaaaa

SEQ ID NO: 3192 - RNA, 1697 nt, synthetic construct
  misc_feature 1..1697: note = mRNA a-1 (hSL-A100) (opt5) from Homo sapiens__NP_000448.3__HNF4A(1-474)(S87A_K106R_K108R_K126R_K 127R_S142A_S143A_S148A_T166A_S167A_S313A_S378A_T429A_T432A_ S436A_K458R_S461E)
  source 1..1697: mol_type = other RNA
aggagagtcccgcagtcggcgtccagcggctctgcttgttcgtgtgtgtgtcgttgcaggccttattcaagcttaccatgagactgagcaagaccctcgtggacatggatatggccgactactccgctgccctggatcccgcgtatacaacgcttgagttcgaaaacgtccaggttctgaccatgggcaatgacacatctcctagcgaggggaccaacctcaatgctccgaactccctgggagtgtctgccctttgcgccatctgtggcgatcgggctacagggaaacactacggagccagctcctgcgacggctgtaaggggtttttccgcagagctgtgcggaaaaatcatatgtattcttgccgctttagcagacaatgtgtcgtggatcgggaccgcagaaaccagtgccggtactgtcgcctgaagaaatgcttcagagccggaatgcggcgcgaagcggttcagaatgagagagatcggatttccacccgcagagccgcttatgaagacagcgccctcccctctatcaacgctctgctgcaggccgaggtgctctcccggcaaattgcggcccctgtcagcggcatcaatggcgatattagagctaagaagatcgcctctatcgctgacgtgtgtgagtccatgaaagaacagctgcttgttctggtggagtgggccaagtacattcccgccttttgcgaactccctctggatgaccaggtcgcccttctgcgcgcgcacgccggggagcatctcctgctgggagctacaaaacggagcatggtgttcaaggacgtgctcctgcttggcaacgattatatcgtccccagacactgtcctgagctggccgaaatgtctcgcgtttccattcggatcctcgacgagctggtgcttccgtttcaggaactgcaaattgatgacaatgagtacgcctacctcaaagctatcattttctttgatcccgacgccaaggggctgagcgatcctggaaagatcaaaagactgcgcgctcaggtgcaggtctccctcgaagactatatcaacgatcggcagtacgactctagaggccgcttcggggagctgcttctgctcctgcccacccttcaaagcattacgtggcagatgatcgagcagattcaatttatcaagctgttcggaatggcgaaaattgataatctcctgcaggaaatgctgctcggcggcgccccttccgacgctccccatgctcaccacccgctgcatcctcaccttatgcaggagcatatggggaccaacgtgatcgttgccaatacaatgcccacccacctgagcaacggacagatgtgcgaatggcctcggcccagaggccaagctgccgcgcccgaggcccctcagccggctccccctgggggatctggctccgaaccctataagctcctgcctggggccgtggctacaatcgtccgccccctggaggccattccgcagcctaccatcacgaaacaggaggtgatttgaggactagtccctgttcccagagcccacttttttttctttttttgaaataaaatagcctgtctttcagatctcaaaggctcttttcagagccaccaaaaaaaaaaaaaaaaaaaaaaaaaaaaaaaaaaaaaaaaaaaaaaaaaaaaaaaaaaaaaaaaaaaaaaaaaaaaaaaaaaaaaaaaaaaaaaaaaaaaa

SEQ ID NO: 3193 - RNA, 1697 nt, synthetic construct
  misc_feature 1..1697: note = mRNA a-1 (hSL-A100) (opt5) from Homo sapiens__NP_000448.3__HNF4A(1-474)(S87A_K106R_K108R_K126R_K 127R_S142A_S143A_S148E_T166A_S167E_S313A_S378E_T429E_T432E_ S436E_K458R_S461E)
  source 1..1697: mol_type = other RNA
aggagagtcccgcagtcggcgtccagcggctctgcttgttcgtgtgtgtgtcgttgcaggccttattcaagcttaccatgagactgagcaagaccctcgtggacatggatatggccgactactccgctgccctggatcccgcgtatacaacgcttgagttcgaaaacgtccaggttctgaccatgggcaatgacacatctcctagcgaggggaccaacctcaatgctccgaactccctgggagtgtctgccctttgcgccatctgtggcgatcgggctacagggaaacactacggagccagctcctgcgacggctgtaaggggtttttccgcagagctgtgcggaaaaatcatatgtattcttgccgctttagcagacaatgtgtcgtggatcgggaccgcagaaaccagtgccggtactgtcgcctgaagaaatgcttcagagccggaatgcggcgcgaagcggttcagaatgagagagatcggatttccacccgcagagccgcttatgaagacagcgagctcccctctatcaacgccctgctgcaggctgaggtgctctcccggcaaattgccgaacctgtcagcggcatcaatggcgatattagagcgaagaagatcgcctctatcgctgacgtgtgtgagtccatgaaagaacagctgcttgttctggtggagtgggccaagtacattcccgctttttgcgagctccctctggatgaccaggtcgcccttctgcgcgcccacgctggggaacatctcctgctgggagcgacaaaacggagcatggtgttcaaggacgtgctcctgcttggcaacgattatatcgtccccagacactgtcctgagctggccgaaatgtctcgcgtttccattcggatcctcgacgagctggtgcttccgtttcaggaactgcaaattgatgacaatgagtacgcttacctcaaagccatcattttctttgatcccgacgccaaggggctgagcgatcctggaaagatcaaaagactgcgcgctcaggtgcaggtctccctcgaggactatatcaacgatcggcagtacgactctagaggccgcttcggggaactgcttctgctcctgcccacccttcaaagcattacgtggcagatgatcgagcagattcaatttatcaagctgttcggaatggccaaaattgataatctcctgcaggaaatgctgctcggcggcgagccttccgacgcgccccatgctcaccacccgctgcatcctcaccttatgcaggaacatatggggaccaacgtgatcgttgccaatacaatgcccacccacctgagcaacggacagatgtgcgagtggcctcggcccagaggccaagccgctgagcccgaggaacctcagccggaaccccctgggggatctggctccgagccctataagctcctgcctggggccgtggctacaatcgtccgccccctggaagccattccgcagcctaccatcacgaaacaggaggtgatttgaggactagtccctgttcccagagcccacttttttttctttttttgaaataaaatagcctgtctttcagatctcaaaggctcttttcagagccaccaaaaaaaaaaaaaaaaaaaaaaaaaaaaaaaaaaaaaaaaaaaaaaaaaaaaaaaaaaaaaaaaaaaaaaaaaaaaaaaaaaaaaaaaaaaaaaaaaaaaa

SEQ ID NO: 3194 - RNA, 1697 nt, synthetic construct
  misc_feature 1..1697: note = mRNA a-1 (hSL-A100) (opt5) from Homo sapiens__NP_000448.3__HNF4A(1-474)(S87A_K106R_K108R_K126R_K 127R_S142A_S143A_S148A_T166A_S167A_K179R_K180R_S313A_S378A_ T429A_T432A_S436A_K458R_S461E)
  source 1..1697: mol_type = other RNA
aggagagtcccgcagtcggcgtccagcggctctgcttgttcgtgtgtgtgtcgttgcaggccttattcaagcttaccatgagactgagcaagaccctcgtggacatggatatggccgactactccgctgccctggatcccgcgtatacaacgcttgagttcgaaaacgtccaggttctgaccatgggcaatgacacatctcctagcgaggggaccaacctcaatgctccgaactccctgggagtgtctgccctttgcgccatctgtggcgatcgggctacagggaaacactacggagccagctcctgcgacggctgtaaggggtttttccgcagagctgtgcggaaaaatcatatgtattcttgccgctttagcagacaatgtgtcgtggatcgggaccgcagaaaccagtgccggtactgtcgcctgaagaaatgcttcagagccggaatgcggcgcgaagcggttcagaatgagagagatcggatttccacccgcagagccgcttatgaagacagcgccctcccctctatcaacgctctgctgcaggccgaggtgctctcccggcaaattgcggcccctgtcagcggcatcaatggcgatattagagctcgccggatcgcctctatcgctgacgtgtgtgagtccatgaaggaacagctgcttgttctggtggagtgggccaagtacattcccgccttttgcgaactccctctggatgaccaggtcgcccttctgagagcgcacgccggggagcatctcctgctgggagctacaaaacgcagcatggtgttcaaggacgtgctcctgcttggcaacgattatatcgtcccccggcactgtcctgagctggccgaaatgtctagagtttccattcgcatcctcgacgagctggtgcttccgtttcaggaactgcaaattgatgacaatgagtacgcctacctcaaagctatcattttctttgatcccgacgccaaggggctgagcgatcctggaaaaatcaagcggctgagagctcaggtgcaggtctccctcgaagactatatcaacgatcgccagtacgactctcggggcagattcggggagctgcttctgctcctgcccacccttcaaagcattacgtggcagatgatcgagcagattcaatttatcaagctgttcggaatggcgaaaattgataatctcctgcaggaaatgctgctcggcggcgccccttccgacgctccccatgctcaccacccgctgcatcctcaccttatgcaggagcatatggggaccaacgtgatcgttgccaatacaatgcccacccacctgagcaacggacagatgtgcgaatggcctcgcccccggggccaagctgccgcgcccgaggcccctcagccggctccccctgggggatctggctccgaaccctataagctcctgcctggggccgtggctacaatcgtcagacccctggaggccattccgcagcctaccatcacgaaacaggaggtgatttgaggactagtccctgttcccagagcccacttttttttctttttttgaaataaaatagcctgtctttcagatctcaaaggctcttttcagagccaccaaaaaaaaaaaaaaaaaaaaaaaaaaaaaaaaaaaaaaaaaaaaaaaaaaaaaaaaaaaaaaaaaaaaaaaaaaaaaaaaaaaaaaaaaaaaaaaaaaaaa

SEQ ID NO: 3195 - RNA, 1697 nt, synthetic construct
  misc_feature 1..1697: note = mRNA a-1 (hSL-A100) (opt5) from Homo sapiens__NP_000448.3__HNF4A(1-474)(S87A_K106R_K108R_K126R_K 127R_S142A_S143A_S148A_T166A_S167A_K300R_K307R_K309R_S313A_ S378A_T429A_T432A_S436A_K458R_S461E)
  source 1..1697: mol_type = other RNA
aggagagtcccgcagtcggcgtccagcggctctgcttgttcgtgtgtgtgtcgttgcaggccttattcaagcttaccatgagactgagcaagaccctcgtggacatggatatggccgactactccgctgccctggatcccgcgtatacaacgcttgagttcgaaaacgtccaggttctgaccatgggcaatgacacatctcctagcgaggggaccaacctcaatgctccgaactccctgggagtgtctgccctttgcgccatctgtggcgatcgggctacagggaaacactacggagccagctcctgcgacggctgtaaggggtttttccgcagagctgtgcggaaaaatcatatgtattcttgccgctttagcagacaatgtgtcgtggatcgggaccgcagaaaccagtgccggtactgtcgcctgaagaaatgcttcagagccggaatgcggcgcgaagcggttcagaatgagagagatcggatttccacccgcagagccgcttatgaagacagcgccctcccctctatcaacgctctgctgcaggccgaggtgctctcccggcaaattgcggcccctgtcagcggcatcaatggcgatattagagctaagaagatcgcctctatcgctgacgtgtgtgagtccatgaaagaacagctgcttgttctggtggagtgggccaagtacattcccgccttttgcgaactccctctggatgaccaggtcgcccttctgcgcgcgcacgccggggagcatctcctgctgggagctacaaaacggagcatggtgttcaaggacgtgctcctgcttggcaacgattatatcgtccccagacactgtcctgagctggccgaaatgtctcgcgtttccattcggatcctcgacgagctggtgcttccgtttcaggaactgcaaattgatgacaatgagtacgcctacctcaaagctatcattttctttgatcccgacgccagagggctgagcgatcctggacgcatccggagactgcgcgctcaggtgcaggtctccctcgaagactatatcaacgatcggcagtacgactctagaggccgcttcggggagctgcttctgctcctgcccacccttcaaagcattacgtggcagatgatcgagcagattcaatttatcaagctgttcggaatggcgaagattgataatctcctgcaggaaatgctgctcggcggcgccccttccgacgctccccatgctcaccacccgctgcatcctcaccttatgcaggagcatatggggaccaacgtgatcgttgccaatacaatgcccacccacctgagcaacggacagatgtgcgaatggcctcggcccagaggccaagctgccgcgcccgaggcccctcagccggctccccctgggggatctggctccgaaccctataaactcctgcctggggccgtggctacaatcgtccggcccctggaggccattccgcagcctaccatcacgaagcaggaggtgatttgaggactagtccctgttcccagagcccacttttttttctttttttgaaataaaatagcctgtctttcagatctcaaaggctcttttcagagccaccaaaaaaaaaaaaaaaaaaaaaaaaaaaaaaaaaaaaaaaaaaaaaaaaaaaaaaaaaaaaaaaaaaaaaaaaaaaaaaaaaaaaaaaaaaaaaaaaaaaaa

SEQ ID NO: 3196 - RNA, 1697 nt, synthetic construct
  misc_feature 1..1697: note = mRNA a-1 (hSL-A100) (opt5) from Homo sapiens__NP_000448.3__HNF4A(1-474)(S87A_K106R_K108R_K126R_K 127R_S142A_S143A_S148A_T166A_S167A_S313A_S378A_T429A_T432A_ S436A_K447R_K458R_S461E_K470R)
  source 1..1697: mol_type = other RNA
aggagagtcccgcagtcggcgtccagcggctctgcttgttcgtgtgtgtgtcgttgcaggccttattcaagcttaccatgagactgagcaagaccctcgtggacatggatatggccgactactccgctgccctggatcccgcgtatacaacgcttgagttcgaaaacgtccaggttctgaccatgggcaatgacacatctcctagcgaggggaccaacctcaatgctccgaactccctgggagtgtctgccctttgcgccatctgtggcgatcgggctacagggaaacactacggagccagctcctgcgacggctgtaaggggtttttccgcagagctgtgcggaaaaatcatatgtattcttgccgctttagcagacaatgtgtcgtggatcgggaccgcagaaaccagtgccggtactgtcgcctgaagaaatgcttcagagccggaatgcggcgcgaagcggttcagaatgagagagatcggatttccacccgcagagccgcttatgaagacagcgccctcccctctatcaacgctctgctgcaggccgaggtgctctcccggcaaattgcggcccctgtcagcggcatcaatggcgatattagagctaagaagatcgcctctatcgctgacgtgtgtgagtccatgaaagaacagctgcttgttctggtggagtgggccaagtacattcccgccttttgcgaactccctctggatgaccaggtcgcccttctgcgcgcgcacgccggggagcatctcctgctgggagctacaaaacggagcatggtgttcaaggacgtgctcctgcttggcaacgattatatcgtccccagacactgtcctgagctggccgaaatgtctcgcgtttccattcggatcctcgacgagctggtgcttccgtttcaggaactgcaaattgatgacaatgagtacgcctacctcaaagctatcattttctttgatcccgacgccaaggggctgagcgatcctggaaagatcaaaagactgcgcgctcaggtgcaggtctccctcgaagactatatcaacgatcggcagtacgactctagaggccgcttcggggagctgcttctgctcctgcccacccttcaaagcattacgtggcagatgatcgagcagattcaatttatcaagctgttcggaatggcgaaaattgataatctcctgcaggaaatgctgctcggcggcgccccttccgacgctccccatgctcaccacccgctgcatcctcaccttatgcaggagcatatggggaccaacgtgatcgttgccaatacaatgcccacccacctgagcaacggacagatgtgcgaatggcctcggcccagaggccaagctgccgcgcccgaggcccctcagccggctccccctgggggatctggctccgaaccctatcgcctcctgcctggggccgtggctacaatcgtccggcccctggaggccattccgcagcctaccatcacgagacaggaggtgatttgaggactagtccctgttcccagagcccacttttttttctttttttgaaataaaatagcctgtctttcagatctcaaaggctcttttcagagccaccaaaaaaaaaaaaaaaaaaaaaaaaaaaaaaaaaaaaaaaaaaaaaaaaaaaaaaaaaaaaaaaaaaaaaaaaaaaaaaaaaaaaaaaaaaaaaaaaaaaaa

SEQ ID NO: 3197 - RNA, 1697 nt, synthetic construct
  misc_feature 1..1697: note = mRNA a-1 (hSL-A100) (opt5) from Homo sapiens__NP_000448.3__HNF4A(1-474)(S87A_K106R_K108R_K126R_K 127R_S142A_S143A_S148A_T166A_S167A_K179R_K180R_K234R_K300R_ K307R_K309R_S313A_S378A_T429A_T432A_S436A_K447R_K458R_S461E _K470R)
  source 1..1697: mol_type = other RNA
aggagagtcccgcagtcggcgtccagcggctctgcttgttcgtgtgtgtgtcgttgcaggccttattcaagcttaccatgagactgagcaagaccctcgtggacatggatatggccgactactccgctgccctggatcccgcgtatacaacgcttgagttcgaaaacgtccaggttctgaccatgggcaatgacacatctcctagcgaggggaccaacctcaatgctccgaactccctgggagtgtctgccctttgcgccatctgtggcgatcgggctacagggaaacactacggagccagctcctgcgacggctgtaaggggtttttccgcagagctgtgcggaaaaatcatatgtattcttgccgctttagcagacaatgtgtcgtggatcgggaccgcagaaaccagtgccggtactgtcgcctgaagaaatgcttcagagccggaatgcggcgcgaagcggttcagaatgagagagatcggatttccacccgcagagccgcttatgaagacagcgccctcccctctatcaacgctctgctgcaggccgaggtgctctcccggcaaattgcggcccctgtcagcggcatcaatggcgatattagagctcgccggatcgcctctatcgctgacgtgtgtgagtccatgaaggaacagctgcttgttctggtggagtgggccaagtacattcccgccttttgcgaactccctctggatgaccaggtcgcccttctgagagcgcacgccggggagcatctcctgctgggagctacacgccggagcatggtgttcaaagacgtgctcctgcttggcaacgattatatcgtccccagacactgtcctgagctggccgaaatgtctcgcgtttccattcggatcctcgacgagctggtgcttccgtttcaggaactgcaaattgatgacaatgagtacgcctacctcaaggctatcattttctttgatcccgacgccagagggctgagcgatcctggacgcatccggagactgcgcgctcaggtgcaggtctccctcgaagactatatcaacgatcggcagtacgactctagaggccggttcggggagctgcttctgctcctgcccacccttcaaagcattacgtggcagatgatcgagcagattcaatttatcaaactgttcggaatggcgaagattgataatctcctgcaggaaatgctgctcggcggcgccccttccgacgctccccatgctcaccacccgctgcatcctcaccttatgcaggagcatatggggaccaacgtgatcgttgccaatacaatgcccacccacctgagcaacggacagatgtgcgaatggcctcgccccagaggccaagctgccgcgcccgaggcccctcagccggctccccctgggggatctggctccgaaccctatcggctcctgcctggggccgtggctacaatcgtcagacccctggaggccattccgcagcctaccatcacgcgccaggaggtgatttgaggactagtccctgttcccagagcccacttttttttctttttttgaaataaaatagcctgtctttcagatctcaaaggctcttttcagagccaccaaaaaaaaaaaaaaaaaaaaaaaaaaaaaaaaaaaaaaaaaaaaaaaaaaaaaaaaaaaaaaaaaaaaaaaaaaaaaaaaaaaaaaaaaaaaaaaaaaaaa

SEQ ID NO: 3198 - RNA, 1697 nt, synthetic construct
  misc_feature 1..1697: note = mRNA a-1 (hSL-A100) (opt5) from Homo sapiens__NP_000448.3__HNF4A(1-474)(S87A_S95A_S99A_K106R_K10 8R_K126R_K127R_S142A_S143A_S148A_T166A_S167A_S313A_S378A_T4 29A_T432A_S436A_K458R_S461E)
  source 1..1697: mol_type = other RNA
aggagagtcccgcagtcggcgtccagcggctctgcttgttcgtgtgtgtgtcgttgcaggccttattcaagcttaccatgagactgagcaagaccctcgtggacatggatatggccgactactccgctgccctggatcccgcgtatacaacgcttgagttcgaaaacgtccaggttctgaccatgggcaatgacacatctcctagcgaggggaccaacctcaatgctccgaactccctgggagtgtctgccctttgcgccatctgtggcgatcgggctacagggaaacactacggagccagctcctgcgacggctgtaaggggtttttccgcagagctgtgcggaaaaatcatatgtatgcctgccgctttgcgagacaatgtgtcgtggatcgggaccgcagaaaccagtgccggtactgtcgcctgaagaaatgcttcagagccggaatgcggcgcgaagctgttcagaatgagagagatcggatttctacccgcagagccgcttatgaagacagcgccctcccctccatcaacgcgctgctgcaggccgaggtgctcagccggcaaattgctgcccctgtctctggcatcaatggcgatattagagctaagaagatcgcctccatcgccgacgtgtgtgagagcatgaaagaacagctgcttgttctggtggagtgggctaagtacattcccgcgttttgcgaactccctctggatgaccaggtcgcccttctgcgcgctcacgccggggagcatctcctgctgggagccacaaaacggtctatggtgttcaaggacgtgctcctgcttggcaacgattatatcgtccccagacactgtcctgagctggctgaaatgtcccgcgttagcattcggatcctcgacgagctggtgcttccgtttcaggaactgcaaattgatgacaatgagtacgcctacctcaaagcgatcattttctttgatcccgacgctaaggggctgtctgatcctggaaagatcaaaagactgcgcgcccaggtgcaggtctccctcgaagactatatcaacgatcggcagtacgacagcagaggccgcttcggggagctgcttctgctcctgcccacccttcaatccattacgtggcagatgatcgagcagattcaatttatcaagctgttcggaatggccaaaattgataatctcctgcaggaaatgctgctcggcggcgctccttctgacgctccccatgcccaccacccgctgcatcctcaccttatgcaggagcatatggggaccaacgtgatcgttgccaatacaatgcccacccacctgagcaacggacagatgtgcgaatggcctcggcccagaggccaagcggccgctcccgaggcccctcagccggctccccctgggggatccggcagcgaaccctataagctcctgcctggggccgtggcgacaatcgtccgccccctggaggccattccgcagcctaccatcacgaaacaggaggtgatttgaggactagtccctgttcccagagcccacttttttttctttttttgaaataaaatagcctgtctttcagatctcaaaggctcttttcagagccaccaaaaaaaaaaaaaaaaaaaaaaaaaaaaaaaaaaaaaaaaaaaaaaaaaaaaaaaaaaaaaaaaaaaaaaaaaaaaaaaaaaaaaaaaaaaaaaaaaaaaa

SEQ ID NO: 3199 - RNA, 1697 nt, synthetic construct
  misc_feature 1..1697: note = mRNA a-1 (hSL-A100) (opt5) from Homo sapiens__NP_000448.3__HNF4A(1-474)(S87A_K106R_K108R_K126R_K 127R_S138A_T139A_S142A_S143A_S148A_T166A_S167A_S313A_S378A_ T429A_T432A_S436A_K458R_S461E)
  source 1..1697: mol_type = other RNA
aggagagtcccgcagtcggcgtccagcggctctgcttgttcgtgtgtgtgtcgttgcaggccttattcaagcttaccatgagactgagcaagaccctcgtggacatggatatggccgactactccgctgccctggatcccgcgtatacaacgcttgagttcgaaaacgtccaggttctgaccatgggcaatgacacatctcctagcgaggggaccaacctcaatgctccgaactccctgggagtgtctgccctttgcgccatctgtggcgatcgggctacagggaaacactacggagccagctcctgcgacggctgtaaggggtttttccgcagagctgtgcggaaaaatcatatgtattcttgccgctttagcagacaatgtgtcgtggatcgggaccgcagaaaccagtgccggtactgtcgcctgaagaaatgcttcagagccggaatgcggcgcgaagcggttcagaatgagagagatcggattgccgctcgcagagccgcttatgaagactccgccctccccagcatcaacgcgctgctgcaggccgaggtgctctctcggcaaattgctgcccctgtctccggcatcaatggcgatattagagctaagaagatcgccagcatcgccgacgtgtgtgagtctatgaaagaacagctgcttgttctggtggagtgggctaagtacattcccgcgttttgcgaactccctctggatgaccaggtcgcccttctgcgcgctcacgccggggagcatctcctgctgggagccaccaaacggtccatggtgttcaaggacgtgctcctgcttggcaacgattatatcgtccccagacactgtcctgagctggctgaaatgagccgcgtttctattcggatcctcgacgagctggtgcttccgtttcaggaactgcaaattgatgacaatgagtacgcctacctcaaagcgatcattttctttgatcccgacgctaaggggctgtccgatcctggaaagatcaaaagactgcgcgcccaggtgcaggtcagcctcgaagactatatcaacgatcggcagtacgactccagaggccgcttcggggagctgcttctgctcctgcccacacttcaatctattacctggcagatgatcgagcagattcaatttatcaagctgttcggaatggccaaaattgataatctcctgcaggaaatgctgctcggcggcgctcctagcgacgctccccatgcccaccacccgctgcatcctcaccttatgcaggagcatatggggacgaacgtgatcgttgccaataccatgcccacacacctgtccaacggacagatgtgcgaatggcctcggcccagaggccaagcggccgctcccgaggcccctcagccggctccccctgggggaagcggctctgaaccctataagctcctgcctggggccgtggcgaccatcgtccgccccctggaggccattccgcagcctacaatcaccaaacaggaggtgatttgaggactagtccctgttcccagagcccacttttttttctttttttgaaataaaatagcctgtctttcagatctcaaaggctcttttcagagccaccaaaaaaaaaaaaaaaaaaaaaaaaaaaaaaaaaaaaaaaaaaaaaaaaaaaaaaaaaaaaaaaaaaaaaaaaaaaaaaaaaaaaaaaaaaaaaaaaaaaaa

SEQ ID NO: 3200 - RNA, 1697 nt, synthetic construct
  misc_feature 1..1697: note = mRNA a-1 (hSL-A100) (opt5) from Homo sapiens__NP_000448.3__HNF4A(1-474)(S87A_S95A_S99A_K106R_K10 8R_K126R_K127R_S138A_T139A_S142A_S143A_S148A_T166A_S167A_S3 13A_S378A_T429A_T432A_S436A_K458R_S461E)
  source 1..1697: mol_type = other RNA
aggagagtcccgcagtcggcgtccagcggctctgcttgttcgtgtgtgtgtcgttgcaggccttattcaagcttaccatgagactgagcaagaccctcgtggacatggatatggccgactactccgctgccctggatcccgcgtatacaacgcttgagttcgaaaacgtccaggttctgaccatgggcaatgacacatctcctagcgaggggaccaacctcaatgctccgaactccctgggagtgtctgccctttgcgccatctgtggcgatcgggctacagggaaacactacggagccagctcctgcgacggctgtaaggggtttttccgcagagctgtgcggaaaaatcatatgtatgcctgccgctttgcgagacaatgtgtcgtggatcgggaccgcagaaaccagtgccggtactgtcgcctgaagaaatgcttcagagccggaatgcggcgcgaagctgttcagaatgagagagatcggattgccgctcgcagagccgcgtatgaagactctgccctccccagcatcaacgctctgctgcaggccgaggtgctctcccggcaaattgctgcccctgtcagcggcatcaatggcgatattagagccaagaagatcgcttctatcgcggacgtgtgtgagtccatgaaagaacagctgcttgttctggtggagtgggccaagtacattcccgctttttgcgaactccctctggatgaccaggtcgcccttctgcgcgcccacgctggggagcatctcctgctgggagccaccaaacggagcatggtgttcaaggacgtgctcctgcttggcaacgattatatcgtccccagacactgtcctgagctggcggaaatgtctcgcgtttccattcggatcctcgacgagctggtgcttccgtttcaggaactgcaaattgatgacaatgagtacgcttacctcaaagccatcattttctttgatcccgacgccaaggggctgagcgatcctggaaagatcaaaagactgcgcgctcaggtgcaggtctctctcgaagactatatcaacgatcggcagtacgactccagaggccgcttcggggagctgcttctgctcctgcccacacttcaaagcattacctggcagatgatcgagcagattcaatttatcaagctgttcggaatggccaaaattgataatctcctgcaggaaatgctgctcggcggcgctccttccgacgcgccccatgcccaccacccgctgcatcctcaccttatgcaggagcatatggggacgaacgtgatcgttgccaataccatgcccacacacctgtctaacggacagatgtgcgaatggcctcggcccagaggccaagctgccgctcccgaggcccctcagccggcgccccctgggggaagcggctccgaaccctataagctcctgcctggggccgtggctaccatcgtccgccccctggaggccattccgcagcctacaatcaccaaacaggaggtgatttgaggactagtccctgttcccagagcccacttttttttctttttttgaaataaaatagcctgtctttcagatctcaaaggctcttttcagagccaccaaaaaaaaaaaaaaaaaaaaaaaaaaaaaaaaaaaaaaaaaaaaaaaaaaaaaaaaaaaaaaaaaaaaaaaaaaaaaaaaaaaaaaaaaaaaaaaaaaaaa

SEQ ID NO: 3201 - RNA, 1697 nt, synthetic construct
  misc_feature 1..1697: note = mRNA a-1 (hSL-A100) (opt11) from Homo sapiens__NP_000448.3__HNF4A(1-474)
  source 1..1697: mol_type = other RNA
aggagagtcccgcagtcggcgtccagcggctctgcttgttcgtgtgtgtgtcgttgcaggccttattcaagcttaccatgcgtctttccaaaacactcgtagacatggacatggcagactacagcgccgccctcgacccagcctacaccaccctcgaatttgaaaacgtccaagtcctaactatgggaaacgacacatcaccctcagaaggtacaaacctcaacgcccccaactcgctaggcgtctccgcactatgcgcaatctgcggcgaccgtgccaccggcaaacactacggagcctcatcctgcgacggttgtaaaggcttcttccgacgcagcgtcagaaaaaaccacatgtactcctgccgcttctcccgtcaatgcgtcgtcgacaaagacaaacgcaaccaatgccggtactgccgcctaaaaaaatgcttccgcgcaggcatgaaaaaagaagcagtccaaaacgaacgcgaccgcatatcaacccgtcgatcatcatacgaagactcctccctccccagcatcaacgccctcctccaagcagaagtactaagccggcaaataacatccccagtcagcggcatcaacggagacatacgagccaaaaaaatagcttcaatcgccgacgtctgcgaatccatgaaagagcaactactggtcctcgtcgaatgggctaaatacatcccggccttctgcgaactccccctcgacgatcaagtcgcccttctaagagcccacgccggcgaacacctcctcttaggcgcaaccaaacgcagcatggtattcaaagacgtactgctcctcggcaacgattacatcgtcccacgacattgccccgagctcgcagaaatgtcccgagtctccatccgcatactcgacgaactcgtactccccttccaagaactccaaatagacgacaatgaatacgcatacctcaaagcaatcatcttcttcgaccccgacgccaaaggactcagcgacccaggcaaaatcaaacgcctacgatcacaagtacaagtttcacttgaagactacatcaacgacagacaatacgactcaagaggtcgtttcggagaactactcctactactaccaaccctccaaagcataacctggcaaatgatagaacaaatacaatttataaaactcttcggcatggccaaaatcgacaatctcctacaagaaatgctcctcggaggaagcccctcagatgccccacacgcccaccacccactacacccccacctcatgcaagagcacatgggtaccaacgtcatagtcgccaacacaatgcccacccacctctcaaacggccaaatgtgcgaatggccgcgcccacgcggacaagccgccacccccgaaaccccacagccaagcccacccggtggctccggcagcgaaccctacaaactcctacccggcgccgttgcaacaatagtcaaacccctatccgccataccccaaccaacgatcaccaaacaagaagtcatctagggactagtccctgttcccagagcccacttttttttctttttttgaaataaaatagcctgtctttcagatctcaaaggctcttttcagagccaccaaaaaaaaaaaaaaaaaaaaaaaaaaaaaaaaaaaaaaaaaaaaaaaaaaaaaaaaaaaaaaaaaaaaaaaaaaaaaaaaaaaaaaaaaaaaaaaaaaaaa

SEQ ID NO: 3202 - RNA, 1697 nt, synthetic construct
  misc_feature 1..1697: note = mRNA a-1 (hSL-A100) (opt11) from Homo sapiens__NP_000448.3__HNF4A(1-474)(S313A)
  source 1..1697: mol_type = other RNA
aggagagtcccgcagtcggcgtccagcggctctgcttgttcgtgtgtgtgtcgttgcaggccttattcaagcttaccatgcgtctctcaaaaaccctagtcgacatggacatggccgactattctgcagccctagacccagcctacaccaccctcgaattcgaaaacgtacaagtactcaccatgggcaacgatacctccccatctgaaggcaccaacctcaacgcacccaactctctcggagtctccgccctatgcgcaatctgcggcgaccgagccactggaaaacactacggcgcctcctcttgcgacggatgcaaaggcttcttccgaagatcagtccgaaaaaaccacatgtactcatgccgcttctcgcgccaatgcgtcgtcgacaaagacaaacgtaaccaatgcagatactgccgactcaaaaaatgcttccgcgccggcatgaaaaaagaagccgtccagaacgaacgcgaccgcatctcaaccagacgctcgagctacgaagactcctccctaccctccatcaacgccctactccaagcagaagtactatcccgccaaataacctcccccgtcagcggcatcaacggcgacatcagagccaaaaaaatcgcctcaatcgccgacgtatgcgagagcatgaaagaacagctccttgtcctagtagaatgggccaaatacatcccagccttctgcgaactccccctcgacgaccaagtcgccctactcagagcccacgccggcgaacacctcctcctcggcgctaccaagcgatctatggtattcaaggatgtacttctactcggaaacgactacatcgtaccacgccactgcccagaactagccgaaatgtcccgcgtatccatccgaatcctcgatgaactcgtactccccttccaagaactacaaattgacgacaatgaatacgcctacttaaaagccatcatattcttcgaccccgacgccaaaggtctgtccgacccaggcaaaatcaaacgactacgggcccaagtccaagtatcactcgaagactacatcaacgaccgccaatacgactcacgcggccgcttcggcgagctcctcctccttctcccaaccctacaatccataacctggcaaatgatcgaacaaatccaattcataaaactcttcggcatggcaaaaattgacaaccttctccaagaaatgctcctgggcggatccccctccgacgccccacacgcccatcaccccctccacccccacctaatgcaggaacacatgggcacaaatgtcatagtagccaacactatgcccacacatctctcaaacggccagatgtgtgaatggccacgcccacgaggacaagcagccacacccgaaacaccacaaccctcccccccaggcggctccggatccgaaccctacaaactcctacccggcgccgtcgccacaatcgtcaaacccctatccgccatcccccaacccacgatcaccaaacaagaagtcatctaaggactagtccctgttcccagagcccacttttttttctttttttgaaataaaatagcctgtctttcagatctcaaaggctcttttcagagccaccaaaaaaaaaaaaaaaaaaaaaaaaaaaaaaaaaaaaaaaaaaaaaaaaaaaaaaaaaaaaaaaaaaaaaaaaaaaaaaaaaaaaaaaaaaaaaaaaaaaaa

SEQ ID NO: 3203 - RNA, 1697 nt, synthetic construct
  misc_feature 1..1697: note = mRNA a-1 (hSL-A100) (opt11) from Homo sapiens__NP_000448.3__HNF4A(1-474)(S313E)
  source 1..1697: mol_type = other RNA
aggagagtcccgcagtcggcgtccagcggctctgcttgttcgtgtgtgtgtcgttgcaggccttattcaagcttaccatgcgcctgtccaaaaccctcgtcgacatggacatggctgactactccgccgccctcgaccccgcatacaccacactcgaattcgaaaacgtccaggtcctcaccatgggaaacgacacctccccctcagaaggaaccaacctaaacgctcccaactcccttggcgtctccgccctctgcgcaatatgcggagaccgcgccaccggaaaacactacggcgcctcatcctgcgacggttgcaaaggcttcttccgccgatccgtccgcaaaaaccacatgtattcctgccgcttctcgcgacagtgcgtagtcgacaaagataaacgaaaccaatgccgatactgccgccttaaaaaatgcttccgcgccggaatgaaaaaagaagcagtccaaaacgaacgagaccgcatcagcacccgtaggagctcatacgaggactcgagcctcccctcgatcaacgccttactccaagccgaagtactgtcccgccagatcacctcacccgtctccggcatcaacggagacatcagagccaaaaaaatagcatcgatcgccgacgtatgcgagtccatgaaagaacaactcctagtactagtcgaatgggccaaatacatcccagcattctgcgaactacccctagatgatcaagtagccctactacgagcccacgccggcgaacacctcctcctcggggccaccaaacgatcaatggtcttcaaagacgtcctcctcctcggcaacgactacatcgtaccccgccactgcccagaactcgcagaaatgtcacgcgtctcaatccgcatcctggacgaacttgtactcccattccaagaactacaaatagacgacaacgaatacgcatacctgaaagcaatcatctttttcgaccccgacgccaaaggcctatctgaccccggtaaaataaaacgcctccgcgaacaagtacaagtctctctcgaagactacatcaacgaccgccagtacgacagccggggacgcttcggcgaacttctcctcctcctccccactctacaaagcatcacctggcaaatgatcgaacaaatacaattcatcaaactcttcggaatggcaaaaatcgacaacctcctccaagaaatgctcctcggcggctccccgagcgacgcccctcacgcccaccacccactccacccccacctaatgcaagagcacatgggaaccaacgtcatagtcgcaaacacaatgcccacccacctctccaacggccaaatgtgcgaatggccccgcccacgcggccaagccgccacacccgaaacaccccaaccatcacccccaggcggatcaggatccgagccctacaaactcctcccaggcgccgtcgccacaatcgtcaaacccctcagcgccataccacaaccaacaataacgaaacaagaagtcatataaggactagtccctgttcccagagcccacttttttttctttttttgaaataaaatagcctgtctttcagatctcaaaggctcttttcagagccaccaaaaaaaaaaaaaaaaaaaaaaaaaaaaaaaaaaaaaaaaaaaaaaaaaaaaaaaaaaaaaaaaaaaaaaaaaaaaaaaaaaaaaaaaaaaaaaaaaaaaa

SEQ ID NO: 3204 - RNA, 1697 nt, synthetic construct
  misc_feature 1..1697: note = mRNA a-1 (hSL-A100) (opt11) from Homo sapiens__NP_000448.3__HNF4A(1-474)(S142A_S143A)
  source 1..1697: mol_type = other RNA
aggagagtcccgcagtcggcgtccagcggctctgcttgttcgtgtgtgtgtcgttgcaggccttattcaagcttaccatgcgcctatcaaaaacactggtcgacatggacatggcagactattctgccgccctggaccccgcctacactacactcgagttcgaaaacgtccaagtactcaccatgggaaacgacacctccccctccgaaggcaccaacttaaacgcccccaactcccttggggtctccgctctctgcgcaatctgcggagacagagccaccggtaaacactacggagcctcctcctgcgacggatgcaaaggcttcttccgccgctcagtacgcaaaaaccacatgtatagttgccgcttctctcgccagtgcgtggtcgacaaagacaaacgcaaccaatgccgatactgccgcctcaaaaagtgcttccgcgccggaatgaagaaagaagctgtccaaaacgaacgcgaccgcatctcaacccgcagagcggcatacgaagacagctcgctaccctccataaacgccctccttcaagccgaagtcctatcccgacagatcacctcccccgtctctggaataaacggcgacatccgcgcaaagaaaatcgcctccatcgccgacgtatgcgaatccatgaaagaacaactcctagtgctagtagaatgggccaaatacatacccgccttctgcgagctccccctagacgaccaagtagccctactccgcgcacacgcaggcgaacacctcctcctcggcgccaccaaacgatcaatggtcttcaaagacgtactactcctcggcaatgactacatcgtcccacgacactgccccgaattagcagaaatgtcgcgagtctccatacgcatcctagacgaactcgtactccctttccaagaactacaaatcgatgacaacgaatacgcatacctcaaagccatcatcttcttcgacccagacgccaaaggcctttccgatcccggcaaaatcaaaagactacgctcacaagtacaagtctccctcgaagattacatcaacgaccgccaatacgactcacgcggccgcttcggagaactcctactactcctcccaaccctacaatccatcacctggcaaatgatcgaacaaatccagttcattaaactcttcggaatggccaaaatcgataacctcctacaagaaatgctcctaggcggcagtccatccgacgcgccccacgcacaccatccactccacccccacctcatgcaagaacacatgggcaccaacgtaatcgtcgcaaacaccatgcccacacacctttcaaacggccaaatgtgcgaatggccgcgcccccgcggccaagcagccaccccagaaaccccacaaccatcacccccaggcggcagcggctcagaaccctataaactcctccccggcgccgtagccacaatcgtcaaacctctctccgcaatcccccaacccaccatcaccaaacaagaagtcatctaaggactagtccctgttcccagagcccacttttttttctttttttgaaataaaatagcctgtctttcagatctcaaaggctcttttcagagccaccaaaaaaaaaaaaaaaaaaaaaaaaaaaaaaaaaaaaaaaaaaaaaaaaaaaaaaaaaaaaaaaaaaaaaaaaaaaaaaaaaaaaaaaaaaaaaaaaaaaaa

SEQ ID NO: 3205 - RNA, 1697 nt, synthetic construct
  misc_feature 1..1697: note = mRNA a-1 (hSL-A100) (opt11) from Homo sapiens__NP_000448.3__HNF4A(1-474)(S142E_S143E)
  source 1..1697: mol_type = other RNA
aggagagtcccgcagtcggcgtccagcggctctgcttgttcgtgtgtgtgtcgttgcaggccttattcaagcttaccatgcgcctatccaaaaccctagtcgacatggacatggcagactactccgccgccctcgacccagcatacaccacactcgaattcgaaaacgtccaagtgctaaccatgggcaacgacaccagcccgtccgaaggcacaaacctcaacgcccccaactcccttggtgtctcagccctctgcgcaatctgcggcgaccgtgccaccggtaaacactatggcgcctcatcctgcgacggctgcaaaggcttcttcagacgatcggtacgcaaaaaccacatgtactcatgtcgcttctcccgacaatgtgtagtggacaaagacaaaagaaaccaatgccgctactgccgcctcaaaaaatgcttccgcgcaggcatgaaaaaagaagccgtccagaatgaacgagaccgcataagcacccgccgagaagaatatgaagactcctcacttccctcaatcaacgccctactccaagccgaagtactatcacggcaaatcacaagccccgtctcaggaataaacggagacatccgcgccaaaaaaattgcctccatcgcggacgtatgcgaaagcatgaaagaacaactactcgtactcgtcgaatgggcaaaatacatccccgcattctgcgaactccccctcgacgaccaagtagccctgctcagagcacacgccggagaacaccttctcctcggcgccaccaaacgctccatggtcttcaaagacgtcctcctcctagggaacgactacatagtaccacgacactgcccagaactagccgaaatgtccagagtatcaatccgaatcctcgacgaactcgtcctccccttccaagaactacaaatcgacgacaacgaatacgcctacctaaaagccatcatattcttcgatcccgacgcaaaaggcctctccgaccccggcaaaatcaagcgactacgatcacaagtacaagtctccctggaagactacatcaacgaccgccaatacgacagccgcggaagattcggcgaactcctgctactactccccaccctacaatccatcacctggcaaatgatagaacaaatacaattcatcaaactcttcggcatggctaaaatcgacaacctcctacaagaaatgctactaggcggcagcccctcagacgccccccacgcccaccaccccctccacccccacctcatgcaggaacacatgggcaccaacgtcatcgtcgccaacacaatgcccacccatctctccaacggccaaatgtgcgaatggcctaggccacgtggtcaagcagcaacccccgaaaccccccaaccctccccaccaggcggttcaggatccgaaccctacaaactactcccaggcgccgtagccaccattgtcaagccgctcagcgctataccccaacccaccataaccaaacaagaagtcatataaggactagtccctgttcccagagcccacttttttttctttttttgaaataaaatagcctgtctttcagatctcaaaggctcttttcagagccaccaaaaaaaaaaaaaaaaaaaaaaaaaaaaaaaaaaaaaaaaaaaaaaaaaaaaaaaaaaaaaaaaaaaaaaaaaaaaaaaaaaaaaaaaaaaaaaaaaaaaa

SEQ ID NO: 3206 - RNA, 1697 nt, synthetic construct
  misc_feature 1..1697: note = mRNA a-1 (hSL-A100) (opt11) from Homo sapiens__NP_000448.3__HNF4A(1-474)(S143A)
  source 1..1697: mol_type = other RNA
aggagagtcccgcagtcggcgtccagcggctctgcttgttcgtgtgtgtgtcgttgcaggccttattcaagcttaccatgcgactctccaagaccctcgtagacatggatatggcagactacagcgccgccctagatccagcttacaccaccctcgaattcgaaaacgttcaagtcctaacgatgggcaacgacacctcaccatcagaaggcaccaacctcaacgcccccaactccctcggagtctcagccctctgcgcaatctgcggcgaccgcgccaccggcaaacactacggagcctcgtcctgcgacggatgcaaaggattcttcaggcgctccgtacggaaaaaccacatgtactcttgtcgtttctcccgccaatgcgtagtcgacaaagacaaacgcaaccaatgccgctactgtcgcctcaaaaaatgcttccgcgccggcatgaagaaagaagccgtccaaaacgaacgcgaccgcatctccacccgcaggtccgcctacgaagactccagcctaccctccatcaacgcactactccaagccgaagtcctctcccgccaaatcacgtctcccgtctcaggaatcaacggcgacatccgcgctaagaaaatagcatctatcgccgacgtctgtgaatccatgaaagaacaactactcgtactggtagaatgggccaaatacatccccgccttctgcgaacttcccctcgacgaccaagttgcactcctccgagcccacgccggggaacacctactcctcggagccaccaaacgctcaatggtcttcaaagacgtactcctcctcggcaacgactacatcgtgccacgccactgccccgaactagccgaaatgtcccgggtctccattcgaatcctcgacgaactcgtcctccccttccaagaactccaaatagacgacaacgaatacgcttacctcaaagcaataatcttcttcgacccagatgccaaaggcctcagcgacccgggcaagattaaacgcctccgctctcaagtccaagtctcccttgaagactacatcaacgaccgccaatacgactcccgcggtcgattcggggaactactcctactcctcccaacactacaatccatcacctggcaaatgatcgaacaaatccaattcatcaaactcttcggcatggccaaaatcgacaacctcctacaggaaatgctcctaggaggcagcccctccgacgccccccacgcccaccaccccctccacccccacctaatgcaagaacatatgggaaccaacgtaatcgtcgcaaacacaatgcccacccacctctccaacggccaaatgtgcgaatggccccgcccccgcggtcaagcagccacacccgaaacccctcaaccctccccgcccggaggcagcggctccgaaccatacaaactcctcccaggcgccgtagccaccatcgtaaaacccctatcggccataccccaacccacaatcaccaaacaagaagtaatctaaggactagtccctgttcccagagcccacttttttttctttttttgaaataaaatagcctgtctttcagatctcaaaggctcttttcagagccaccaaaaaaaaaaaaaaaaaaaaaaaaaaaaaaaaaaaaaaaaaaaaaaaaaaaaaaaaaaaaaaaaaaaaaaaaaaaaaaaaaaaaaaaaaaaaaaaaaaaaa

SEQ ID NO: 3207 - RNA, 1697 nt, synthetic construct
  misc_feature 1..1697: note = mRNA a-1 (hSL-A100) (opt11) from Homo sapiens__NP_000448.3__HNF4A(1-474)(T166A)
  source 1..1697: mol_type = other RNA
aggagagtcccgcagtcggcgtccagcggctctgcttgttcgtgtgtgtgtcgttgcaggccttattcaagcttaccatgaggctcagcaaaactctagtcgacatggacatggccgactactcagccgcactcgaccccgcatataccacactagagttcgaaaacgtccaagttctcaccatgggaaacgacacttccccctcagaaggcacaaacctcaacgcacccaactccctaggagtctccgccctatgcgcgatctgtggcgaccgagcaaccggcaagcattacggcgcatcctcctgcgacggatgcaaaggcttcttccgccgatccgtccgaaagaaccacatgtactcctgccgattctcccgccaatgcgtagttgacaaagacaaacgcaatcaatgccgatactgccgcctcaagaaatgcttccgagcaggaatgaagaaagaagccgtccaaaacgaacgcgatcgcatatccacccgccgctcctcctacgaagactcctccctcccctccatcaacgcactcctccaagcggaagtactctcacgccaaatcgcgtccccagtctccggcataaacggagacatccgcgccaagaaaatagcctcaatcgctgacgtctgcgaatctatgaaagaacagctcctcgtcctagtcgaatgggccaaatacatccccgccttctgcgaactcccactagacgaccaagtggcactcctccgcgcccacgccggcgaacacctactactcggagccaccaaacgctccatggtgttcaaagacgtactactcctcggaaatgactacatcgtcccccgacactgccccgaactcgccgaaatgtccagggtctccatccgcatcctcgacgaactggtcctcccattccaagaactccaaatcgacgacaacgaatacgcctacctaaaagccatcatcttcttcgaccccgacgccaaaggcctatccgacccgggcaaaatcaaacgactccgctcccaagtccaagtctcactcgaagactacatcaacgatagacagtacgactcacgcggtagattcggagaactcctactcctactccccacactccaatccataacctggcaaatgatagaacaaatacaattcatcaaactcttcggcatggccaaaatcgacaacctactccaggaaatgctcttaggcggctccccatccgacgccccacacgcccaccaccccctccacccccacctcatgcaagaacacatgggcaccaatgtcatagtagcaaacaccatgcccacacacctctccaacggacaaatgtgcgaatggccccgcccacgcggtcaggccgccacccccgaaaccccacaaccctccccacccggaggctccggatcagaaccctacaaactcctccccggcgccgtcgcaaccatcgttaaaccactatccgccataccccaacccaccatcaccaaacaagaggtcatataaggactagtccctgttcccagagcccacttttttttctttttttgaaataaaatagcctgtctttcagatctcaaaggctcttttcagagccaccaaaaaaaaaaaaaaaaaaaaaaaaaaaaaaaaaaaaaaaaaaaaaaaaaaaaaaaaaaaaaaaaaaaaaaaaaaaaaaaaaaaaaaaaaaaaaaaaaaaaa

SEQ ID NO: 3208 - RNA, 1697 nt, synthetic construct
  misc_feature 1..1697: note = mRNA a-1 (hSL-A100) (opt11) from Homo sapiens__NP_000448.3__HNF4A(1-474)(S167E)
  source 1..1697: mol_type = other RNA
aggagagtcccgcagtcggcgtccagcggctctgcttgttcgtgtgtgtgtcgttgcaggccttattcaagcttaccatgcgcctctccaaaaccctcgtcgacatggacatggcagactactctgcagctctcgaccccgcctataccacgctcgaattcgaaaacgtacaagtcctcaccatgggaaacgacacctccccctctgaaggcaccaacctcaacgcacccaacagccttggcgtcagcgccttatgcgccatttgcggagaccgcgccaccggcaaacactacggagcatcctcatgcgacggctgcaaaggcttcttccgccgatcagtccgaaaaaaccacatgtactcctgccgcttctctcgccagtgcgtagtcgataaagataaaagaaatcaatgccgctactgccgcctcaaaaaatgcttccgcgccggcatgaaaaaagaagcagttcaaaacgaacgcgaccgaatctccacccgccgctcatcctacgaagactcttccctcccctctataaacgccctcctccaagccgaagtactctcacgccaaatcaccgaacctgtctccggcattaacggagacatacgcgccaagaaaatagccagcatcgccgacgtctgcgaatcaatgaaagaacaactcctcgtcctagtcgaatgggccaaatacatccccgcattctgcgaacttcccctcgacgaccaagtcgccctcctccgtgcccatgcaggcgaacacctcctcctcggcgccaccaaacgctccatggtctttaaagacgtcctcctcctgggcaacgactacatcgtcccccgacactgcccagaactcgccgagatgagccgcgtgtccatacgcatactcgacgaactcgtcctccccttccaagaactccagatagacgataacgaatacgcatacctaaaagccataatattcttcgaccccgacgctaaaggtctctcagacccaggaaaaatcaaacgtctcagaagccaagtccaagtctcactcgaagactacatcaacgaccgccaatacgactctcgcggccgcttcggcgaactcctcttattactcccaacactccaatcaatcacctggcaaatgatcgaacaaatacaatttatcaaactcttcggcatggctaaaatcgacaatctcctccaagaaatgctcctcggaggctccccctcagatgccccccacgcccaccacccccttcatccccacttaatgcaagaacatatgggcaccaacgtcatcgtagccaacaccatgcccacacacctatccaacggccaaatgtgcgaatggccccgcccccgaggacaagccgccaccccagaaacaccccaaccctccccccccggaggcagcggctccgaaccatacaaactcctcccaggtgccgtcgccactatcgtcaaacccctctcagccatcccccaaccaaccatcacaaagcaagaagtcatctaaggactagtccctgttcccagagcccacttttttttctttttttgaaataaaatagcctgtctttcagatctcaaaggctcttttcagagccaccaaaaaaaaaaaaaaaaaaaaaaaaaaaaaaaaaaaaaaaaaaaaaaaaaaaaaaaaaaaaaaaaaaaaaaaaaaaaaaaaaaaaaaaaaaaaaaaaaaaaa

SEQ ID NO: 3209 - RNA, 1697 nt, synthetic construct
  misc_feature 1..1697: note = mRNA a-1 (hSL-A100) (opt11) from Homo sapiens__NP_000448.3__HNF4A(1-474)(S167A)
  source 1..1697: mol_type = other RNA
aggagagtcccgcagtcggcgtccagcggctctgcttgttcgtgtgtgtgtcgttgcaggccttattcaagcttaccatgcggctctcaaaaaccctagtcgacatggacatggccgactactcagctgccctagaccccgcatacaccacactagaattcgaaaatgtccaagtactaaccatgggcaacgacacctcaccctccgaaggtaccaacctcaacgcgcccaactccctcggcgtctcagccctctgcgccatctgcggcgaccgcgcgaccggcaaacactacggtgcctcctcatgcgacggatgcaaaggcttcttccgacgctcagtccgcaaaaaccacatgtactcctgccgcttctcacgacaatgcgtcgttgacaaagacaaacgcaaccaatgccgctactgccgcctcaaaaaatgcttccgcgcaggaatgaaaaaagaagcagttcaaaacgaacgcgaccgcatctcaacccgcagatcatcatacgaagactcatccctaccatcaataaacgccctcctacaagccgaagtcctctccagacaaatcaccgcccccgtctcaggcataaacggcgacatccgtgcaaaaaaaatcgcctccatcgctgacgtctgcgaatccatgaaagaacaactccttgtcctcgtcgaatgggccaaatacattcctgccttctgcgaactccccctcgacgaccaagtcgcactactcagagcccacgcaggcgaacacctcctcctcggagcaacaaaacgctccatggtcttcaaagacgtcctcctactcggaaatgactacatcgtccccagacactgccccgaactcgctgaaatgtcaagagtctccatacgaatactagacgaactagtcctacccttccaagaactgcaaatagacgacaacgaatacgcctacctcaaagccatcatattcttcgaccccgacgccaagggactctcagaccccggcaaaatcaaacgcctacgctcccaagtgcaagtcagcctcgaagactacataaacgatcgccagtacgactcacgaggacgattcggagaactcctcctcctcctcccaacactccagtccatcacctggcaaatgatcgaacaaatccaatttatcaaactcttcggcatggccaaaatcgacaacctactacaagaaatgctcctcggaggatccccctcagacgccccccacgcccaccaccctctccacccccacctaatgcaagaacacatggggaccaacgtaatcgtcgccaataccatgccaactcatctatcaaacggtcaaatgtgcgaatggccccgcccccggggacaagccgccacccccgagacaccgcaaccctccccccctggcggatccggctcagaaccctataaactactccccggcgcggtcgccaccatagtcaaaccactctctgccatcccccaaccaaccataaccaaacaagaagtcatctaaggactagtccctgttcccagagcccacttttttttctttttttgaaataaaatagcctgtctttcagatctcaaaggctcttttcagagccaccaaaaaaaaaaaaaaaaaaaaaaaaaaaaaaaaaaaaaaaaaaaaaaaaaaaaaaaaaaaaaaaaaaaaaaaaaaaaaaaaaaaaaaaaaaaaaaaaaaaaa

SEQ ID NO: 3210 - RNA, 1697 nt, synthetic construct
  misc_feature 1..1697: note = mRNA a-1 (hSL-A100) (opt11) from Homo sapiens__NP_000448.3__HNF4A(1-474)(S167A_S378A_T429A_T432A_ S436A)
  source 1..1697: mol_type = other RNA
aggagagtcccgcagtcggcgtccagcggctctgcttgttcgtgtgtgtgtcgttgcaggccttattcaagcttaccatgcgcctctccaaaaccctcgttgacatggatatggcggactactccgccgcactcgacccagcctacaccaccctagaatttgaaaacgtccaagtactaaccatgggcaacgacacaagcccctccgaaggcacaaatctcaacgcccccaactcactaggcgtctcagccctatgtgctatctgcggcgaccgcgccaccggcaaacactacggcgcatcatcatgtgacggatgcaaaggattcttccgacgctccgtccgaaagaaccacatgtactcctgccgattcagcagacaatgtgttgtcgacaaagacaaacgcaaccaatgtcgctactgccgcctcaaaaaatgctttagagccggaatgaaaaaagaagccgtccaaaacgaacgcgaccgcatctccacacgccgaagctcatacgaagactcatctctcccctccatcaacgcactcctccaagccgaagtcctatctcgccaaatcaccgcacccgtctccggcatcaacggcgacatacgcgccaaaaaaatagcctccatagcagacgtatgcgaatccatgaaagagcaactcctcgtgctagtcgaatgggccaaatacatccccgccttctgcgagctcccactagacgaccaagtcgccctcctccgcgcccacgccggcgaacacctgctcctaggcgccaccaaaagaagcatggtattcaaagacgtcctactcctcggcaacgactatatagtccctcgccactgtccagaactcgcagaaatgtccagagtcagcatccgaatcctcgacgaactcgtcctacccttccaagaactacaaatcgacgacaacgaatacgcctaccttaaagccatcatcttcttcgaccccgacgccaaaggcctatccgaccccggcaaaatcaaacgcttacgatcccaagtccaggtcagcctcgaagactacataaacgaccgccaatacgactcacgcggccgcttcggcgaactactcctcctcctcccaaccctccaaagcatcacctggcaaatgatagaacaaatacaattcatcaaacttttcggcatggccaaaatcgacaaccttttacaagaaatgctactcggtggcgcgcccagcgacgctccgcacgcccaccaccccctccacccacacctcatgcaggaacacatgggcaccaacgtaatagtcgccaacacaatgccaacccacctctcaaacggccagatgtgcgaatggccccgaccccgaggccaagccgcagccccagaagccccccaaccagcccccccaggaggatccggctcagaaccctataaactcttacccggtgccgtcgcgaccattgtcaaacccctctccgccataccccagcccacaatcaccaaacaagaagtcatctaaggactagtccctgttcccagagcccacttttttttctttttttgaaataaaatagcctgtctttcagatctcaaaggctcttttcagagccaccaaaaaaaaaaaaaaaaaaaaaaaaaaaaaaaaaaaaaaaaaaaaaaaaaaaaaaaaaaaaaaaaaaaaaaaaaaaaaaaaaaaaaaaaaaaaaaaaaaaaa

SEQ ID NO: 3211 - RNA, 1697 nt, synthetic construct
  misc_feature 1..1697: note = mRNA a-1 (hSL-A100) (opt11) from Homo sapiens__NP_000448.3__HNF4A(1-474)(S167E_S378E_T429E_T432E_ S436E)
  source 1..1697: mol_type = other RNA
aggagagtcccgcagtcggcgtccagcggctctgcttgttcgtgtgtgtgtcgttgcaggccttattcaagcttaccatgcgactatctaaaactctcgtagacatggacatggccgactactcggccgccctcgaccccgcatacaccacgctcgagttcgaaaacgttcaagtcctcacaatgggcaacgacacctccccctcagaaggcaccaacctcaacgctccaaactccctaggggtctccgcactctgcgcaatctgcggcgaccgtgccaccggcaaacattacggcgcctcatcctgcgacggctgcaaaggattcttccggcgatccgtccgaaagaaccacatgtacagctgcagattcagccgacaatgcgtcgtggacaaagataaacgcaaccaatgccgctactgccgactcaagaaatgcttccgcgcaggcatgaagaaagaagcagtacaaaacgaacgcgaccgcatctcaacaagacgtagctcctacgaagactcaagcctcccatccatcaacgccctcctccaagccgaagtactctcacgtcaaatcaccgaacccgtgtcaggaatcaacggcgacatccgcgccaagaaaatcgcctccatcgcagacgtctgcgaatccatgaaagaacaactcctcgtcctggtcgaatgggctaaatacatccccgcattctgcgaactccccctagatgaccaagtcgccctactgcgcgcccacgcaggcgaacatctattactcggcgccaccaaacgcagcatggtattcaaagacgtcctcctcctcggcaacgactacatagtcccacgccactgcccagaactggccgaaatgagccgagtctctatccgcatactcgacgagctagtcctccccttccaagaactccaaattgacgacaacgaatacgcctacctcaaagccatcatattcttcgaccccgacgcgaaaggcctatccgaccccggtaaaatcaaaagactacgctcacaagtccaagtctcccttgaagactacatcaacgaccgccagtacgacagccgcggccgcttcggcgaactacttctcctcctccccaccctccaatccatcacctggcaaatgatcgaacaaatccaattcataaaactattcggaatggccaaaatcgacaacctcctgcaagaaatgctcctcggaggcgaaccctcagacgcaccccacgcccatcaccccctccatccacacttaatgcaagaacacatgggcaccaacgtaatcgtagccaacactatgcccacccacctatccaatggccaaatgtgcgaatggcccagaccaagaggacaagccgccgaacccgaagaaccacaaccagaacctcccggtggatccggctcagaaccctacaaactactccccggagccgtagctaccatcgtcaagcccctatcagccatcccccaacccacaatcaccaaacaggaagtcatctaaggactagtccctgttcccagagcccacttttttttctttttttgaaataaaatagcctgtctttcagatctcaaaggctcttttcagagccaccaaaaaaaaaaaaaaaaaaaaaaaaaaaaaaaaaaaaaaaaaaaaaaaaaaaaaaaaaaaaaaaaaaaaaaaaaaaaaaaaaaaaaaaaaaaaaaaaaaaaa

SEQ ID NO: 3212 - RNA, 1697 nt, synthetic construct
  misc_feature 1..1697: note = mRNA a-1 (hSL-A100) (opt11) from Homo sapiens__NP_000448.3__HNF4A(1-474)(S87A)
  source 1..1697: mol_type = other RNA
aggagagtcccgcagtcggcgtccagcggctctgcttgttcgtgtgtgtgtcgttgcaggccttattcaagcttaccatgcgcctaagcaaaacattagtcgacatggacatggccgactactccgccgcactcgacccagcatacaccacattagagttcgaaaacgtccaagtcctcacaatgggcaacgacacctcaccctcagagggcaccaatctcaacgccccaaactcactcggagtaagtgcactatgcgcgatctgcggcgaccgcgccaccggcaaacactacggcgcatcctcctgcgacggctgcaaaggattcttccgacgcgccgtccgcaaaaaccacatgtactcatgccgcttctcacgccagtgcgtcgtagacaaagacaaacgcaatcaatgccgctactgccgactcaagaaatgcttccgcgccggaatgaagaaagaagcagtacaaaacgaacgcgaccgaatctccacccgccgctcctcctacgaagattcctccctcccctccatcaacgccctactccaagccgaagtactctcccgccaaatcacctctccagtttccggcataaacggcgacatacgagcaaagaaaattgcatctatcgccgacgtctgcgaatcgatgaaagagcaactcctagtactcgtagaatgggccaaatacatccccgcattctgcgaactcccacttgacgaccaagtcgcccttctccgagcacacgccggcgaacatctcctgctcggcgctacaaaaagaagcatggtcttcaaagacgtcctcctactcggcaacgactacatcgtcccccgccactgccccgaactagccgaaatgagccgagtctccatcagaatcctcgacgaactcgtactccccttccaagaactccaaatagacgacaacgaatatgcatacctcaaagcaatcatattcttcgaccccgacgccaaaggactttccgaccccggcaaaataaaacgcctccgatcccaagtacaggtctccctcgaagactacatcaacgacagacaatacgacagccgtggacgattcggagagttactcctactacttcccacccttcagtcaatcacctggcaaatgatagaacaaatccaattcatcaaactgttcggaatggctaaaatcgacaacctgctacaagaaatgctcctcggcggctcccctagcgacgccccacacgcacaccaccccctccacccacacctcatgcaagagcacatgggcacaaacgtaatagtagccaacacaatgcccacccacctctcgaacggccaaatgtgcgaatggccccgcccccgcggacaagccgcaaccccagaaacaccccaaccttcacccccaggcggctccggatccgaaccctacaaactactccccggagccgtagcaaccatagtcaaaccgctcagcgccatcccccaacccacaataaccaaacaagaagtcatctagggactagtccctgttcccagagcccacttttttttctttttttgaaataaaatagcctgtctttcagatctcaaaggctcttttcagagccaccaaaaaaaaaaaaaaaaaaaaaaaaaaaaaaaaaaaaaaaaaaaaaaaaaaaaaaaaaaaaaaaaaaaaaaaaaaaaaaaaaaaaaaaaaaaaaaaaaaaaa

SEQ ID NO: 3213 - RNA, 1697 nt, synthetic construct
  misc_feature 1..1697: note = mRNA a-1 (hSL-A100) (opt11) from Homo sapiens__NP_000448.3__HNF4A(1-474)(S87E)
  source 1..1697: mol_type = other RNA
aggagagtcccgcagtcggcgtccagcggctctgcttgttcgtgtgtgtgtcgttgcaggccttattcaagcttaccatgcgcctatccaaaaccctagtcgacatggacatggcagactattcagccgcactagatcccgcctatacaacactcgaattcgaaaacgtgcaggtcctcaccatgggcaacgacacctccccctccgaaggaaccaacctaaacgcaccaaattccctcggcgtctccgccctttgcgccatatgtggggaccgcgcaacaggaaaacactacggcgcctcctcctgcgacggatgcaaaggattcttccgacgcgaagtcagaaaaaaccacatgtactcatgtcgattctcccgccagtgcgtcgtcgacaaagacaaaagaaaccaatgcagatactgtcgcctaaaaaaatgcttccgcgccggaatgaaaaaggaagcagtacagaacgaacgcgaccgcatctccaccagacgctcctcctacgaagactcatccctgccctcgatcaacgcacttctccaagccgaggtcctatcaagacaaatcacttctccagtatccggcatcaatggcgacatccgcgccaaaaaaatcgcctcaatcgccgacgtctgcgagtccatgaaagaacaactactagtccttgtagaatgggctaaatatattcccgccttctgcgaacttcccctagacgaccaagtagcactcctccgcgctcacgccggcgagcacctactactcggcgcaaccaaaagatcaatggtcttcaaagacgtcctcctcctgggcaacgactacatcgtcccccgacactgccccgaactcgcggaaatgtcccgcgtcagcatccgcatcctcgacgaactcgtactccccttccaagaactacaaatcgacgacaacgaatacgcctacctcaaagcgataatcttcttcgacccagacgccaaaggtctatccgacccaggaaaaatcaaacgtctccgctctcaagtacaagtctctctcgaagactacataaacgaccgccaatacgactccagaggccggttcggcgaactcctcctcctactccccacactccaaagcatcacctggcaaatgatcgaacaaatccaattcataaaactattcggcatggccaaaatagacaacctgctacaagaaatgctcctcggaggttccccctcagacgccccccacgcccaccacccccttcacccacacctaatgcaagaacacatgggcactaacgtaatagtagccaacacaatgcccacccacctctccaacggccaaatgtgtgaatggccaagaccacgcggacaagccgcaacccctgagaccccccagccctccccacccggcggctctggcagcgaaccctacaaactgctacccggggccgtcgccacaatcgtaaaaccactctcggcaatcccccaacccaccatcaccaaacaagaagttatctaaggactagtccctgttcccagagcccacttttttttctttttttgaaataaaatagcctgtctttcagatctcaaaggctcttttcagagccaccaaaaaaaaaaaaaaaaaaaaaaaaaaaaaaaaaaaaaaaaaaaaaaaaaaaaaaaaaaaaaaaaaaaaaaaaaaaaaaaaaaaaaaaaaaaaaaaaaaaaa

SEQ ID NO: 3214 - RNA, 1697 nt, synthetic construct
  misc_feature 1..1697: note = mRNA a-1 (hSL-A100) (opt11) from Homo sapiens__NP_000448.3__HNF4A(1-474)(R2V)
  source 1..1697: mol_type = other RNA
aggagagtcccgcagtcggcgtccagcggctctgcttgttcgtgtgtgtgtcgttgcaggccttattcaagcttaccatggtactctccaagaccctagtcgacatggacatggccgactactccgccgccctagacccagcctacaccactctagagttcgaaaacgtccaagtcctcacaatgggaaacgacacctccccctccgaaggcacaaacctcaacgcccccaactccctcggcgtctccgccctatgcgccatatgcggagaccgagccaccggcaagcactacggcgcttcctcctgcgacggatgcaaaggcttcttccggagaagcgtccggaaaaaccacatgtattcctgccgattctcacgccaatgcgtagtcgacaaagacaaacgcaaccaatgccgctactgccgccttaagaaatgtttcagagccggaatgaagaaagaagccgtccaaaacgaacgcgaccgcataagcacccgccgctcctcatacgaagacagcagcctcccctccatcaacgccctcctccaagcagaagtgctctcccgacaaatcaccagccccgtaagcggaatcaacggcgacatacgcgccaagaaaatcgcctccatcgccgacgtctgcgaatcaatgaaagaacaactactcgtccttgtagaatgggccaaatacatccccgccttctgcgagctcccactcgacgaccaagtcgccctcctccgcgcacacgccggtgaacatctcctactaggagcaaccaaacgatcaatggtattcaaagacgtcctcctcctcggtaacgactacatagtcccaagacactgccccgaactagccgaaatgtcacgcgtctccatccgcatcctagacgaactcgtccttccctttcaagaactacaaatcgacgacaacgaatacgcctacctcaaagccatcatcttcttcgacccagacgcaaaaggactctcagaccccggcaaaatcaaacgcctccgctcccaagtccaagtcagcctcgaagactacatcaacgacagacaatacgactcacgaggccgcttcggagaactactactcttgctccccacactacaatcgataacctggcaaatgatcgaacaaatccaatttatcaaactattcggaatggcaaaaatagacaaccttctgcaagaaatgctccttggcggctctccctctgacgctccccacgcccaccaccccctccacccccaccttatgcaagaacacatgggaaccaacgtcatcgtagccaacacaatgcccacccacctatcaaacggccaaatgtgcgaatggccacggccacgcggccaagccgcaacacccgaaaccccacaaccctcacccccaggcggctccggctcagagccgtacaaactactacccggcgccgtagccaccatcgtgaaacctctctccgccatccctcaacccacaatcaccaaacaagaggtcatctaaggactagtccctgttcccagagcccacttttttttctttttttgaaataaaatagcctgtctttcagatctcaaaggctcttttcagagccaccaaaaaaaaaaaaaaaaaaaaaaaaaaaaaaaaaaaaaaaaaaaaaaaaaaaaaaaaaaaaaaaaaaaaaaaaaaaaaaaaaaaaaaaaaaaaaaaaaaaaa

SEQ ID NO: 3215 - RNA, 1697 nt, synthetic construct
  misc_feature 1..1697: note = mRNA a-1 (hSL-A100) (opt11) from Homo sapiens__NP_000448.3__HNF4A(1-474)(R2V_K5V)
  source 1..1697: mol_type = other RNA
aggagagtcccgcagtcggcgtccagcggctctgcttgttcgtgtgtgtgtcgttgcaggccttattcaagcttaccatggtcctcagcgtcaccctcgtcgacatggacatggccgactactccgcagccctcgaccccgcctacaccacactagaatttgaaaacgtccaagtcctgaccatgggcaacgacacctccccctcagaaggtaccaacctcaacgcacccaactcgctcggcgtatcagccctttgtgccatctgcggtgatcgcgcaaccggaaaacactacggcgcatcctcatgcgacggctgcaaaggcttcttccgccgatccgtccgtaaaaaccatatgtactcctgtcgattctcccgccaatgtgtcgtagataaagacaaacgcaaccaatgcagatactgccgcctaaaaaaatgcttccgggcaggtatgaagaaagaagcagtccaaaacgaacgcgaccgcatcagcacccgccgctcctcctacgaagactcgtccctcccatccatcaacgccctactccaagccgaagtcttatcccgacaaatcacttcccccgtctccggcataaacggcgacatccgcgcaaaaaaaatcgcctccatagccgacgtctgcgaatcaatgaaagaacaactcctagtccttgtcgaatgggccaaatacatccccgcattctgcgaactcccactcgatgaccaggtagccctcctccgcgcccacgcgggtgaacacctcctcctcggggccaccaaacgctccatggtattcaaagacgtcctcctcctcggaaacgactacatcgtcccacgccattgccccgagctagccgaaatgtctagagtctccatacgcatcctcgacgaactcgtactccccttccaagaactccaaattgatgacaacgaatacgcctacctcaaagcaatcatcttcttcgaccccgacgccaaagggctctccgacccaggaaaaatcaaacgcctcagatcccaagtccaggtatcactcgaagactacatcaacgaccgacaatacgactcccgaggccgtttcggcgaactcctactcctcttaccaaccctacaatccatcacatggcaaatgatcgaacaaattcaattcatcaaactcttcggaatggccaaaatcgacaatctcctacaagaaatgctcctcggaggatcaccctcagacgccccacacgcccaccaccctttacatccccacctaatgcaagaacacatgggaaccaacgtcatcgtagccaacaccatgccaacacacctctcaaacggacaaatgtgcgagtggcccagaccccgaggccaagccgccacaccagaaacaccccagccctcaccacccggcggctcaggctccgaaccctacaaactactccccggagccgtcgccaccatcgtcaagccactatcagcaatcccacaacccaccatcaccaaacaagaagtaatctaaggactagtccctgttcccagagcccacttttttttctttttttgaaataaaatagcctgtctttcagatctcaaaggctcttttcagagccaccaaaaaaaaaaaaaaaaaaaaaaaaaaaaaaaaaaaaaaaaaaaaaaaaaaaaaaaaaaaaaaaaaaaaaaaaaaaaaaaaaaaaaaaaaaaaaaaaaaaaa

SEQ ID NO: 3216 - RNA, 1697 nt, synthetic construct
  misc_feature 1..1697: note = mRNA a-1 (hSL-A100) (opt11) from Homo sapiens__NP_000448.3__HNF4A(1-474)(K179R_K180R)
  source 1..1697: mol_type = other RNA
aggagagtcccgcagtcggcgtccagcggctctgcttgttcgtgtgtgtgtcgttgcaggccttattcaagcttaccatgcgcctctccaaaacacttgtcgacatggacatggccgactactccgccgcactcgaccccgcctacaccacccttgaattcgaaaacgtccaagtcctcaccatgggaaacgacacctccccctccgaaggaaccaacctaaacgcccccaactccctaggcgtctccgccctctgcgcaatatgcggagaccgcgcaaccggcaaacattacggcgcttcctcctgtgacggttgcaaaggatttttccgccgatccgtccgtaaaaaccacatgtactcctgccgcttcagccgacaatgcgtggtagataaagacaaacgcaaccaatgccgttactgccgactcaaaaaatgcttccgagccggaatgaaaaaagaagcagtccaaaacgaacgcgaccgcatctctacacgcagatcttcatatgaagatagcagcctccccagcatcaacgccctcctccaagccgaagtcctctcccgacaaatcacctccccagtaagcggcataaatggcgacatccgtgcccggcgcatcgcatcaatcgccgacgtatgcgaatcaatgaaagaacaactactagtcctcgtcgaatgggcaaaatacatacccgcattctgcgaactccccctcgacgaccaagtagccctcctacgcgcccacgccggagaacacctactcctcggggccacgaaacgatccatggtcttcaaagacgtcctactcctcggaaatgactacatagtccccaggcactgccccgaactcgccgaaatgtcccgcgtctcaattcgaatcctagacgaactcgtcctacccttccaagaactccaaatagacgacaacgaatacgcttacctcaaagccattatcttcttcgacccagacgccaaaggactctccgacccgggaaaaataaaacgactacgcagccaagtccaagtctccttagaagactacatcaacgaccgccagtacgactcccgcggccgattcggagagcttctcctactcctccccaccctccaatccatcacatggcaaatgatcgaacaaatccaattcataaaactcttcggcatggccaaaatcgataatctactccaagaaatgctcctcggcgggtccccatcagacgccccccacgcacaccacccgctgcacccacacctaatgcaagaacacatgggaacaaacgtcatcgtcgccaacacaatgcccacccacctctcaaacggacagatgtgcgaatggccccgcccacgcggccaagcggcaacccccgaaacaccacagccctccccccccggcggcagcggctcagaaccctacaaactcctcccaggagcagtcgccaccatagtcaagcccctctcagccatcccacaaccaaccatcaccaaacaagaagtaatatagggactagtccctgttcccagagcccacttttttttctttttttgaaataaaatagcctgtctttcagatctcaaaggctcttttcagagccaccaaaaaaaaaaaaaaaaaaaaaaaaaaaaaaaaaaaaaaaaaaaaaaaaaaaaaaaaaaaaaaaaaaaaaaaaaaaaaaaaaaaaaaaaaaaaaaaaaaaaa

SEQ ID NO: 3217 - RNA, 1697 nt, synthetic construct
  misc_feature 1..1697: note = mRNA a-1 (hSL-A100) (opt11) from Homo sapiens__NP_000448.3__HNF4A(1-474)(K234R)
  source 1..1697: mol_type = other RNA
aggagagtcccgcagtcggcgtccagcggctctgcttgttcgtgtgtgtgtcgttgcaggccttattcaagcttaccatgcgcctatctaaaacacttgtagacatggacatggccgactactcagccgcactcgaccccgcctacaccaccttagagttcgagaacgtccaagtcctcacgatgggcaatgacacctccccatccgaaggcaccaaccttaacgcacccaactccctcggagtatccgccctctgcgccatctgcggcgaccgcgccacaggcaaacactacggagcctcatcctgcgacggctgcaaaggcttcttccgacgctccgtcagaaaaaaccacatgtactcctgccgattctcccgtcaatgcgtagtcgacaaagacaaacgcaaccaatgccgatactgccgcctcaaaaagtgcttccgagccggcatgaaaaaagaagccgtccagaacgagcgcgaccgaatctccacaagaagatcatcatacgaagactcctccctcccctccatcaacgccctactccaagccgaagtcctctccagacaaatcacaagccccgtatccggtatcaacggcgacataagagccaaaaaaatcgcctccatagccgacgtctgcgaatccatgaaagaacaactcctcgtgctcgtagaatgggccaaatacattcccgccttctgcgaactccctctcgacgaccaggtcgctctactcagggctcacgccggcgaacacctcctcctcggcgcaacccgccgctccatggtattcaaagacgtcctactactcggaaacgactacatcgttccccgccactgcccagagctcgctgaaatgtctcgcgtctccatccgcatcctcgacgaactcgtcctcccattccaagaactccaaatcgacgacaacgaatacgcctacctaaaagccataatcttcttcgaccccgacgcaaaaggactctccgacccagggaaaattaaacgactccgctcccaagtacaggtaagcctcgaagactacatcaacgaccgccaatacgattcccgaggccgcttcggcgaacttctcctactactacccaccctacagtccatcacctggcaaatgatcgaacaaatccaattcatcaaacttttcggaatggccaaaatcgacaacctcctccaagaaatgctcctcggcggctccccctccgacgccccccacgcacaccaccccctccacccacaccttatgcaagaacatatgggcacaaacgtcatcgtcgccaacaccatgcccacccacctctctaacggccaaatgtgcgaatggccccgcccaagaggccaagccgccaccccagaaaccccgcaacctagcccacccggcggctccggcagcgaaccctacaaactattacccggagcagtggccacgatcgtaaagcccctcagcgcaatcccacaaccaacaatcactaaacaagaagtcatctaaggactagtccctgttcccagagcccacttttttttctttttttgaaataaaatagcctgtctttcagatctcaaaggctcttttcagagccaccaaaaaaaaaaaaaaaaaaaaaaaaaaaaaaaaaaaaaaaaaaaaaaaaaaaaaaaaaaaaaaaaaaaaaaaaaaaaaaaaaaaaaaaaaaaaaaaaaaaaa

SEQ ID NO: 3218 - RNA, 1697 nt, synthetic construct
  misc_feature 1..1697: note = mRNA a-1 (hSL-A100) (opt11) from Homo sapiens__NP_000448.3__HNF4A(1-474)(K300R)
  source 1..1697: mol_type = other RNA
aggagagtcccgcagtcggcgtccagcggctctgcttgttcgtgtgtgtgtcgttgcaggccttattcaagcttaccatgcgcctctcaaaaaccctagtagacatggacatggcagactactccgccgccctcgaccccgcatacaccaccctcgagttcgaaaacgtacaagtcctcactatgggaaacgacacctccccctcggaaggcaccaacctcaacgcccccaactcccttggggtcagtgcactatgcgccatctgcggcgatagagccaccggaaagcactacggcgcctcctcatgcgacggctgcaaaggcttcttccgccgatccgtccgcaaaaaccacatgtactcatgcagattcagcagacaatgcgtcgtcgacaaagacaagagaaaccagtgccgatactgccgcctcaagaaatgtttccgcgccggcatgaagaaagaagcagtccaaaacgaacgcgaccgcatctccacccgccgctcatcctacgaagactccagcctaccctccataaatgccctactccaagcagaagtcctctcccgccaaataacctccccagtatccggaatcaacggcgacatccgcgccaagaaaatcgcctcaatagcagacgtctgcgaatccatgaaagaacaactacttgtcttagtagaatgggccaaatacatccccgccttttgcgaactaccccttgacgaccaagtcgccctcctccgcgcacacgccggcgaacacctattactaggcgccactaaacgctccatggtcttcaaagacgtactcctcctcggcaacgactatatcgtcccccgacactgccccgaactcgccgaaatgtcccgcgtctcaatacgaatcctcgacgaactcgtcctccccttccaagaactacagatcgacgacaacgaatacgcctacctcaaagcaatcatcttcttcgaccccgacgcccgcggcctatccgaccctggcaaaatcaaacgcctgcgctcccaagtacaagtgtccctcgaagactacatcaacgaccgacagtacgattcccgaggccgattcggcgaactcctcctcctactcccaacactccaatccatcacctggcaaatgatcgaacaaatccaattcattaaactcttcggcatggcaaaaatcgacaacctcctacaagaaatgctcctcggtgggtccccctccgatgctccccacgcccaccaccccctccacccccacctcatgcaggaacacatgggcaccaacgtcatcgtcgccaacacaatgccaacccacctctcaaacggacaaatgtgtgaatggccccgaccccgaggccaagcagccacacccgaaacaccccaaccctcacccccaggcggctccggctcagaaccctacaaactactcccaggagccgtcgccaccatcgtaaaaccactaagcgccataccccaaccaactatcacaaaacaggaggtcatctaaggactagtccctgttcccagagcccacttttttttctttttttgaaataaaatagcctgtctttcagatctcaaaggctcttttcagagccaccaaaaaaaaaaaaaaaaaaaaaaaaaaaaaaaaaaaaaaaaaaaaaaaaaaaaaaaaaaaaaaaaaaaaaaaaaaaaaaaaaaaaaaaaaaaaaaaaaaaaa

SEQ ID NO: 3219 - RNA, 1697 nt, synthetic construct
  misc_feature 1..1697: note = mRNA a-1 (hSL-A100) (opt11) from Homo sapiens__NP_000448.3__HNF4A(1-474)(K300R_K307R_K309R)
  source 1..1697: mol_type = other RNA
aggagagtcccgcagtcggcgtccagcggctctgcttgttcgtgtgtgtgtcgttgcaggccttattcaagcttaccatgcgcctcagcaaaacactcgttgacatggatatggccgactactccgccgcactagatcccgcctataccacactcgaattcgaaaacgttcaagtactcaccatgggcaacgacacctccccatccgaaggcaccaacctcaacgccccaaactccctcggtgtatccgcactctgcgcaatctgcggcgaccgcgctacaggcaaacactacggcgcatcctcctgcgacggatgcaagggcttcttccgccgctcagtccggaaaaaccacatgtactcttgccgcttctcacgtcagtgcgtggtcgacaaagacaaacgcaaccaatgccgctactgccgactcaaaaaatgcttccgcgccggaatgaaaaaagaagcagtacaaaacgaacgagaccgcatcagcacccgtcgctccagctacgaagactcttcacttccctccatcaacgccctcctccaagccgaagtcctctcacgccaaatcacgtcccccgtctccggcataaacggcgacatccgagcaaaaaaaatcgcctccatcgcagacgtatgcgaatccatgaaagaacagctcctagtcctcgtcgaatgggccaaatacatcccagcattctgcgaacttcccctagacgaccaagtcgcccttctcagagcacacgctggggaacacctcctactaggcgcaacaaaacgctccatggtcttcaaagacgtactactcctcggcaacgactacatagtccctcgccactgccccgaactcgcagaaatgtcccgagtctcaatacgaatactagacgaactagtcctccctttccaagaactacaaatcgacgacaacgaatacgcttacctaaaagccatcattttcttcgacccagacgcccgcgggctctccgaccccggccgcatacgacgccttcgctcccaagtccaagtatcattagaagactacatcaacgaccgccaatacgactcccgcggccgcttcggagaactcctactcctcctacccacactccagtccatcacctggcaaatgatcgaacaaatccaattcattaaactattcggcatggccaaaatcgacaacctactccaagaaatgctcctcggcggaagcccctctgacgcccctcacgcacaccaccccctacacccacacttgatgcaggaacacatggggaccaacgtcatcgtcgccaacaccatgcccacacatctctcaaatggccaaatgtgcgaatggccacgacctcgcggtcaagctgctaccccagaaaccccccaaccttccccacccggcggttcaggctcggaaccctacaaactccttcccggcgccgtcgccacaatagtcaaaccactatccgcaatcccccaacccacaattaccaaacaagaagtaatctagggactagtccctgttcccagagcccacttttttttctttttttgaaataaaatagcctgtctttcagatctcaaaggctcttttcagagccaccaaaaaaaaaaaaaaaaaaaaaaaaaaaaaaaaaaaaaaaaaaaaaaaaaaaaaaaaaaaaaaaaaaaaaaaaaaaaaaaaaaaaaaaaaaaaaaaaaaaaa

SEQ ID NO: 3220 - RNA, 1697 nt, synthetic construct
  misc_feature 1..1697: note = mRNA a-1 (hSL-A100) (opt11) from Homo sapiens__NP_000448.3__HNF4A(1-474)(K447R_K470R)
  source 1..1697: mol_type = other RNA
aggagagtcccgcagtcggcgtccagcggctctgcttgttcgtgtgtgtgtcgttgcaggccttattcaagcttaccatgcgcctctccaaaaccctcgtcgatatggacatggccgactactccgccgcccttgaccccgcctacaccaccctagaattcgaaaacgtacaagtactcacaatgggcaacgacacctccccatccgaaggaacaaacctcaacgctcccaacagcttaggtgtctccgccctctgcgccatctgcggagatcgcgccaccggcaaacactacggcgcctcatcatgcgacggctgcaaaggcttcttccgacgctcagtccgcaaaaaccacatgtactcctgcagattctcaagacaatgtgtcgttgacaaagacaaacgaaaccaatgccgatactgccgccttaaaaaatgcttccgcgcaggaatgaaaaaagaagcagtccagaacgaacgcgaccgcatatccacccgccgttccagctacgaagacagctcactcccttcaatcaacgccctactacaagccgaagtcctctcccgacaaataacctcacccgtatccggcatcaacggagacatacgcgccaaaaaaatagcctcaatcgccgacgtctgcgaatccatgaaagaacaactcctagtcctagtcgaatgggccaaatacatacccgcattctgcgaactccccctagacgaccaggtagccctcctccgagcccacgccggcgagcacctcttacttggcgcaaccaaacgctccatggtattcaaggacgtcctactcctaggcaatgactacatcgtcccccgccactgccccgaactcgctgaaatgtcccgagtctcaatcagaattctagatgaactagtcctacccttccaagaactccaaatagacgacaacgaatacgcatacctcaaagccatcatattcttcgaccccgatgccaaaggtctaagcgaccccggaaaaataaagcgactacggtcgcaagtacaagtctccctggaagactacataaacgaccgccaatacgacagccgcggacgattcggagaactactcctactcctccccactctccaatccataacatggcaaatgatcgaacaaatccaattcatcaaactattcggcatggccaaaatcgacaatcttttacaggaaatgctacttggaggatccccatccgacgcccctcacgcgcaccacccactccacccacacctcatgcaagaacacatgggcaccaacgtgatagtagcaaacaccatgcccacccacctctccaacggccaaatgtgcgagtggccacgaccacggggccaagccgccaccccagagacaccacaaccctcaccccccggaggctccggctccgaaccctaccgactactgccaggagccgtcgcaaccatcgtaaaaccactcagcgccatcccccaacccaccatcacccggcaagaagtcatctaaggactagtccctgttcccagagcccacttttttttctttttttgaaataaaatagcctgtctttcagatctcaaaggctcttttcagagccaccaaaaaaaaaaaaaaaaaaaaaaaaaaaaaaaaaaaaaaaaaaaaaaaaaaaaaaaaaaaaaaaaaaaaaaaaaaaaaaaaaaaaaaaaaaaaaaaaaaaaa

SEQ ID NO: 3221 - RNA, 1697 nt, synthetic construct
  misc_feature 1..1697: note = mRNA a-1 (hSL-A100) (opt11) from Homo sapiens__NP_000448.3__HNF4A(1-474)(K458R)
  source 1..1697: mol_type = other RNA
aggagagtcccgcagtcggcgtccagcggctctgcttgttcgtgtgtgtgtcgttgcaggccttattcaagcttaccatgcgactttccaaaaccctagtcgacatggacatggccgactactctgccgccctcgacccagcttacacaacattagagttcgaaaacgtccaagtcctgaccatgggaaacgacacaagcccatctgaaggaactaacctcaacgcccccaactccctaggagtatccgctctctgcgccatctgcggagaccgcgccaccgggaaacactacggcgcctcctcatgcgacggatgcaaaggcttcttccgccgctcagtccgcaaaaaccacatgtactcctgtcgattctcccgacaatgcgtcgtcgacaaagacaaacgcaaccaatgccgatactgccgcctcaagaaatgcttcagagccggcatgaagaaagaagccgtacaaaacgaacgagaccgcatctccacacgccgtagctcctacgaagactcaagcctcccctcaatcaacgccctacttcaggccgaagtcctctcccgacaaattaccagcccagtctccggcatcaacggcgacatccgagccaagaaaatcgcatcaatagccgatgtctgcgaaagcatgaaagaacaactccttgtcctcgtagaatgggccaaatacatccccgccttctgcgaactacccctcgatgaccaagtagccctactcagagcccacgccggcgaacacctcctcctcggcgccaccaaacgcagcatggtcttcaaagatgtactcctcctcggcaacgactacatcgtcccccgacactgccccgaacttgcagaaatgagcagagtctcaatccgcatcctcgacgaactcgtactaccattccaagaactccagatcgacgacaacgaatacgcctacctgaaagcaattatcttcttcgaccccgacgccaaaggcctctcagaccccggcaaaattaaacgcctcagaagtcaagtccaagtatccctcgaagactatatcaatgaccgccaatacgactcccgcgggcgcttcggcgaactcctcctccttctcccaaccctccaatcaatcacctggcaaatgatcgaacaaatccaattcataaaattattcggaatggccaaaatcgacaacctactccaggaaatgctcctcggcgggtccccctccgacgccccacacgcccaccaccccctccacccccacctaatgcaagaacatatgggcaccaacgtcatcgtcgcaaacaccatgccaacccacctctcaaacggacaaatgtgcgaatggccccgtccccgaggccaggccgccacccccgaaacccctcaaccctcgcctcccggaggctccggctcagaaccctacaaactcctcccaggtgcagttgcaacaatagtcagacccctctccgccatcccccagcccacaataacaaaacaagaagtcatctaaggactagtccctgttcccagagcccacttttttttctttttttgaaataaaatagcctgtctttcagatctcaaaggctcttttcagagccaccaaaaaaaaaaaaaaaaaaaaaaaaaaaaaaaaaaaaaaaaaaaaaaaaaaaaaaaaaaaaaaaaaaaaaaaaaaaaaaaaaaaaaaaaaaaaaaaaaaaaa

SEQ ID NO: 3222 - RNA, 1697 nt, synthetic construct
  misc_feature 1..1697: note = mRNA a-1 (hSL-A100) (opt11) from Homo sapiens__NP_000448.3__HNF4A(1-474)(K106R_K108R_K126R_K127R)
  source 1..1697: mol_type = other RNA
aggagagtcccgcagtcggcgtccagcggctctgcttgttcgtgtgtgtgtcgttgcaggccttattcaagcttaccatgcgactgtccaaaaccttagtcgacatggacatggcagactactcagccgccctcgacccagcatatacaacactagagttcgaaaacgtccaggtccttaccatgggcaacgacacctcaccctccgaaggcaccaacctcaacgctcccaactccctaggcgtctcagccctctgcgcgatatgcggagaccgagccaccggtaaacactacggcgcttcgagctgcgacggctgcaaaggcttcttccgtcgctcagtccgcaaaaaccacatgtactcatgccgattctcacgccaatgcgtagtagaccgcgaccgccgcaaccagtgccgatactgccgtcttaagaaatgcttccgcgccggcatgcgcagagaagcagtccaaaacgaacgcgaccgcatctcaacccggcgcagctcttacgaagactcaagccttccctcaatcaacgccctactacaagccgaagtcctaagccgccaaatcacttcacccgtatccggaataaacggcgacatccgagccaagaaaatagcctccatcgccgacgtctgcgaaagcatgaaagaacaactcctcgtcttagtcgaatgggccaaatacatccccgcattctgcgaactcccactggacgaccaagtagccctgctccgagcccacgccggcgaacacctcctcctcggcgccacgaaacgaagcatggtcttcaaagacgtccttctccttggcaacgactacatcgtcccacgccactgcccagagctagccgaaatgtcacgagtctcaatccgcatactcgacgagctagtactcccattccaagaactacaaatagacgacaacgaatacgcctatctcaaagcgatcatattcttcgaccccgacgccaaaggcctctccgacccaggcaaaatcaaacgcctccgctcccaagtccaggtgtcccttgaagactacataaacgatcgccaatacgactcacgaggaagattcggcgaactccttcttcttctccccacactccagtcaatcacatggcaaatgatcgaacagatacaattcatcaaacttttcggcatggccaaaatagacaacctcctacaggaaatgctactaggaggatccccatcagacgcaccccacgcccaccaccccctacacccccacctcatgcaagaacacatgggcaccaacgtcatagtcgccaacaccatgcccacccacctaagcaacggacaaatgtgcgagtggccccgcccacgcggccaagccgccacccccgaaacaccacaaccaagcccacccggcggctccggctccgaaccatacaaacttctcccaggcgctgtagccaccatcgtaaaaccactctcagccataccccaacccactatcaccaaacaagaggttatctagggactagtccctgttcccagagcccacttttttttctttttttgaaataaaatagcctgtctttcagatctcaaaggctcttttcagagccaccaaaaaaaaaaaaaaaaaaaaaaaaaaaaaaaaaaaaaaaaaaaaaaaaaaaaaaaaaaaaaaaaaaaaaaaaaaaaaaaaaaaaaaaaaaaaaaaaaaaaa

SEQ ID NO: 3223 - RNA, 1697 nt, synthetic construct
  misc_feature 1..1697: note = mRNA a-1 (hSL-A100) (opt11) from Homo sapiens__NP_000448.3__HNF4A(1-474)(E285Q)
  source 1..1697: mol_type = other RNA
aggagagtcccgcagtcggcgtccagcggctctgcttgttcgtgtgtgtgtcgttgcaggccttattcaagcttaccatgcgactctccaaaacacttgtcgacatggacatggccgactactccgccgccctcgatcccgcatacaccaccctcgagttcgaaaacgtccaagtcctcaccatgggaaatgacacctcgccatccgaaggcacgaacctaaatgcccccaactcccttggcgtctccgcactctgcgccatctgcggcgaccgcgcaaccgggaaacactacggcgcctcatcctgcgacggctgcaaaggattcttccgtcgatctgtacgcaaaaaccacatgtactcttgccgattcagccgacaatgcgtcgttgacaaagacaaacgcaaccaatgccgctactgccgactcaaaaagtgcttccgcgcaggtatgaaaaaggaagcagtacaaaacgaacgagaccgcatttccacccgacgatcatcctatgaagactcctccctcccctcaatcaacgccctacttcaagccgaagtcctctcccgacaaataacctcccccgtcagcggcatcaacggcgacatcagagccaagaaaatcgcaagcatcgcagacgtatgcgagtcaatgaaagaacaactcctcgtcctagtcgaatgggcaaaatacatccccgccttctgcgaactcccactagacgaccaagtagccctcctccgcgcccacgccggagaacacctcctcctaggcgccactaaacgctccatggtcttcaaagacgtcctcctcctaggcaatgattacatcgttccccgacattgccccgaactagccgaaatgtcccgagtatccatccgcatcctcgacgaactcgtcctaccattccaagaactacaaatcgacgacaaccaatatgcatacctaaaagcaatcatcttcttcgaccccgacgccaaaggccttagcgacccaggcaaaatcaagcgactacgcagccaagtacaagtatccctagaagattacatcaacgatcgccaatacgactcccgcggccggttcggcgaactcctcctcctcctccccactctacaatccataacctggcaaatgatagaacaaatccaattcatcaagttattcggcatggccaaaatagacaacctcctccaagaaatgctactcggcggctccccatccgacgccccacacgcccatcaccccctccacccacaccttatgcaagaacacatgggcaccaacgtaatagtcgccaacaccatgccaacccacctctccaacggacaaatgtgcgaatggccacggccacgcggacaagccgccacaccggaaacaccacaacccagcccacccggcggttccggctccgaaccctacaaactactacccggcgcagtcgccaccatcgtcaaaccgctctcagccatccctcaaccaaccatcaccaaacaagaagtcatataaggactagtccctgttcccagagcccacttttttttctttttttgaaataaaatagcctgtctttcagatctcaaaggctcttttcagagccaccaaaaaaaaaaaaaaaaaaaaaaaaaaaaaaaaaaaaaaaaaaaaaaaaaaaaaaaaaaaaaaaaaaaaaaaaaaaaaaaaaaaaaaaaaaaaaaaaaaaaa

SEQ ID NO: 3224 - RNA, 1697 nt, synthetic construct
  misc_feature 1..1697: note = mRNA a-1 (hSL-A100) (opt11) from Homo sapiens__NP_000448.3__HNF4A(1-474)(T166E)
  source 1..1697: mol_type = other RNA
aggagagtcccgcagtcggcgtccagcggctctgcttgttcgtgtgtgtgtcgttgcaggccttattcaagcttaccatgcgcctatccaaaaccctcgtcgacatggacatggccgactactcagccgcactcgaccccgcatataccactctcgagttcgaaaacgtacaagtcctcaccatggggaacgacactagcccctccgaaggcaccaacctcaacgcaccaaactccttaggggtttcagccctatgcgccatatgcggcgatagagcaacaggaaaacactacggcgcctcatcatgcgatggctgcaaaggcttcttccgccgatccgtccgaaagaaccacatgtactcatgccgcttctcacgacaatgcgtcgtcgacaaagacaagcgaaaccaatgccgctactgccgcctaaagaaatgcttccgcgccggcatgaagaaagaagcagtacaaaacgaacgcgatcgcatctccacccgcagatcgtcctacgaagacagcagcctccccagcatcaacgccctcctccaagctgaagtcctctcccgccaaatcgaatcacccgtctcaggcatcaacggtgatatccgcgcaaagaaaatagcctccatcgccgacgtctgcgaatccatgaaagaacaactcctagtcctagtagaatgggccaaatacatcccagcattctgcgagctccccctggacgatcaagtcgctctcctccgcgcccacgccggcgaacacctcctactcggagcaaccaaacgcagtatggtattcaaagacgtcctactactcggtaacgactacatagtaccccgccactgcccagaactcgccgaaatgtcccgtgtctccatacgcatcctagacgaactcgtcctccccttccaagaactacaaatcgacgacaacgaatacgcctacctaaaagccatcatcttcttcgaccccgacgctaaaggcctctccgatccaggcaaaatcaaacgcctacgaagccaagtccaagtttccctcgaagactacatcaacgacagacaatacgactcccgcggccgcttcggcgaactactcctcctacttccaacactccaaagcataacgtggcaaatgatagaacaaatccaattcatcaaactcttcggcatggctaaaatagacaacctcctccaggaaatgctccttggaggctccccctccgacgcaccccacgcccaccacccactccaccctcacctcatgcaagaacacatgggcacaaacgtaatcgttgccaacactatgcccacccacctatccaacggacaaatgtgcgaatggccccgaccccgcggccaagccgccaccccagagactccccaaccctcgccacccggagggtccggctccgaaccctacaaactactccccggagcagtagcaacaatcgtaaaaccactctccgccataccccaacccactatcaccaaacaagaagtcatctaaggactagtccctgttcccagagcccacttttttttctttttttgaaataaaatagcctgtctttcagatctcaaaggctcttttcagagccaccaaaaaaaaaaaaaaaaaaaaaaaaaaaaaaaaaaaaaaaaaaaaaaaaaaaaaaaaaaaaaaaaaaaaaaaaaaaaaaaaaaaaaaaaaaaaaaaaaaaaa

SEQ ID NO: 3225 - RNA, 1697 nt, synthetic construct
  misc_feature 1..1697: note = mRNA a-1 (hSL-A100) (opt11) from Homo sapiens__NP_000448.3__HNF4A(1-474)(S148A)
  source 1..1697: mol_type = other RNA
aggagagtcccgcagtcggcgtccagcggctctgcttgttcgtgtgtgtgtcgttgcaggccttattcaagcttaccatgcgactatctaaaacactcgtcgacatggacatggccgactactccgcggccctggaccccgcctacaccacgctagaattcgaaaacgtccaagtattaacaatgggaaacgacacctctccctccgaaggcaccaacctcaacgcacccaactccctcggagtctccgccctctgcgccatctgtggcgaccgagcaaccgggaaacattacggcgcatcctcctgcgacggctgcaaaggcttcttccgccgatccgtcagaaaaaaccacatgtactcgtgccgattctcacgccaatgcgtagttgacaaagacaaacgcaaccaatgccgctactgccgccttaaaaaatgcttccgcgccggaatgaaaaaagaggccgtacaaaatgaacgcgaccgaatcagcacacgccgctcttcatacgaagactccgcactcccatccatcaacgccctactacaagccgaagtcctcagccggcaaatcacatccccagtgtccggtattaacggagacatacgcgccaagaaaatagcctccatagcagacgtctgcgagtcaatgaaagaacaactcctcgtactcgtagaatgggcaaaatacatccccgccttctgcgaacttcccctcgacgaccaagtcgcactcctccgcgcccacgccggcgaacatctcctactaggagccaccaaacgttcaatggtcttcaaagacgtcctgctactcggcaacgactatatcgtccccagacactgccccgaactagcagaaatgtccagagtctcaatacgaatcctagacgaactcgtcctcccattccaagaactacaaatcgacgacaacgaatacgcctacctcaaagccatcatcttctttgaccccgacgccaaagggctctccgaccccggaaaaatcaaacgcctgcgctcacaagtccaagtatccctcgaagactacatcaacgaccgccagtacgacagccgaggacgtttcggcgaactcctactcctcctcccaacactccagtccatcacctggcaaatgatcgaacaaatccaattcataaaactcttcggcatggccaaaatcgacaacctactccaagaaatgctcctcggcggatccccgtccgacgccccccacgcccaccaccccctacacccacacctcatgcaagaacacatgggaacaaacgtcatcgtagccaacaccatgcccacccacctctccaacggccaaatgtgcgaatggccccgcccacgcggccaagctgcaacaccagaaaccccacaaccatccccccccggcggcagcggctccgaaccctacaagcttctccccggtgccgtggccacaatagtcaaaccactctcggccattccccaaccaacaataacaaaacaagaagtgatctaaggactagtccctgttcccagagcccacttttttttctttttttgaaataaaatagcctgtctttcagatctcaaaggctcttttcagagccaccaaaaaaaaaaaaaaaaaaaaaaaaaaaaaaaaaaaaaaaaaaaaaaaaaaaaaaaaaaaaaaaaaaaaaaaaaaaaaaaaaaaaaaaaaaaaaaaaaaaaa

SEQ ID NO: 3226 - RNA, 1697 nt, synthetic construct
  misc_feature 1..1697: note = mRNA a-1 (hSL-A100) (opt11) from Homo sapiens__NP_000448.3__HNF4A(1-474)(S148E)
  source 1..1697: mol_type = other RNA
aggagagtcccgcagtcggcgtccagcggctctgcttgttcgtgtgtgtgtcgttgcaggccttattcaagcttaccatgcgcctctccaaaaccctcgtcgacatggacatggccgactactcagcagccctagacccagcctacacaacactcgagttcgaaaacgtacaagtactaaccatgggcaacgacacctcaccctctgaaggaaccaacctcaacgcacccaactccctcggcgtatccgccctgtgcgccatctgcggtgatcgcgccaccggcaaacactacggggcctcaagctgcgacggctgcaaaggcttcttccgccgctctgtcaggaaaaaccacatgtacagctgccgattctcccgccaatgcgtagtcgataaagacaaacggaaccaatgccgatactgtcgcctcaagaaatgcttccgagcaggcatgaaaaaggaagcagtccaaaacgaacgggaccgaatctccactcgccgctcatcctacgaagacagcgaactaccctccattaatgccctcctccaagcagaagtactttcacgacaaataacctcccccgtctcaggcatcaacggcgacatcagagccaagaaaatcgcctccatcgccgacgtatgcgaatccatgaaagaacaactcctggtgctagtcgaatgggcaaaatatatccccgctttctgcgaactccccctagacgaccaagtcgcactcctccgagcccacgccggagagcacctcttactaggcgccaccaaacgaagcatggtcttcaaagacgtcctcctcctcggaaatgactacatcgtccccagacactgccccgaactcgccgaaatgtcacgagtctccatcagaatcctcgacgaactggtcctaccatttcaagaactacaaatcgatgacaacgaatacgcatacctcaaagcgatcatcttcttcgaccccgacgccaaagggctctccgacccaggcaaaatcaaacgcctcagaagccaggtccaagtctccctagaagactacataaacgaccgccagtatgactcccgcggcagattcggcgaactcctccttctacttccgaccctccaatccatcacctggcaaatgatcgaacaaatccaattcatcaaactcttcggcatggccaaaattgacaacctcctacaagaaatgctcctaggcggcagcccctcagacgcgccccacgcccaccacccactccacccacacctcatgcaagagcacatgggcaccaacgtcatagtagccaacaccatgcccacacacctctccaacggccagatgtgcgaatggccacgcccacgtggtcaagcagccacccccgaaaccccgcaaccatccccacccggcggatccggatccgaaccctacaaactcctacccggcgcagtcgccacaatcgtaaaacccctcagcgccatccctcagcccaccataaccaaacaagaagtcatctgaggactagtccctgttcccagagcccacttttttttctttttttgaaataaaatagcctgtctttcagatctcaaaggctcttttcagagccaccaaaaaaaaaaaaaaaaaaaaaaaaaaaaaaaaaaaaaaaaaaaaaaaaaaaaaaaaaaaaaaaaaaaaaaaaaaaaaaaaaaaaaaaaaaaaaaaaaaaaa

SEQ ID NO: 3227 - RNA, 1697 nt, synthetic construct
  misc_feature 1..1697: note = mRNA a-1 (hSL-A100) (opt11) from Homo sapiens__NP_000448.3__HNF4A(1-474)(S183A)
  source 1..1697: mol_type = other RNA
aggagagtcccgcagtcggcgtccagcggctctgcttgttcgtgtgtgtgtcgttgcaggccttattcaagcttaccatgcgactcagcaaaacactagttgacatggacatggccgactacagcgcagccctggatccagcctacaccaccctcgaattcgaaaacgtacaagtcctcaccatgggtaacgacacctccccctcggagggaacaaacctcaacgcccccaactcactcggcgtcagcgcactctgcgccatatgcggcgaccgcgccaccggaaaacactacggagcctcaagctgcgacggctgcaaaggattcttcagacgcagcgtccggaaaaaccacatgtactcctgccgcttctcccgacaatgcgtcgtcgacaaagacaaacgaaaccaatgccgatactgccgcctaaaaaaatgcttccgcgctggaatgaaaaaagaagcagtacaaaacgaacgcgaccgcatatccaccagaagatcctcctacgaagactccagcctaccctcaatcaacgctctcctccaagcagaagtcctcagccgccaaatcacctcacccgtcagcggcatcaacggggacatccgcgccaaaaaaatcgccgcgattgccgacgtgtgcgaatccatgaaagagcaactcctcgtcctcgtagaatgggccaaatacatccccgccttctgcgaactacccctagacgaccaagtagcccttctacgcgcccacgccggggaacacctcctactcggcgcaaccaaaaggtcaatggtcttcaaagacgtcctcctactcggaaacgactacatcgtgcccaggcactgtccggaactcgccgaaatgtccagagtctcaatccggatactagacgaactcgtactccccttccaagaactacaaatcgacgacaacgaatacgcatacctaaaagccatcatcttcttcgacccagacgctaaaggactaagcgacccaggcaagatcaaacgactacgttcccaagtacaagtatccctggaagactacatcaacgaccgccaatacgactcacgaggtcgcttcggcgaactgctcctactcctacccaccctccaatccatcacatggcaaatgatcgaacaaatccaattcatcaaactcttcggtatggctaaaatcgacaacctactccaagaaatgcttctcggcggctccccatccgacgccccccacgcccaccacccactccacccccacctaatgcaagaacacatgggcaccaatgtcatagtcgccaacaccatgcccacccacctctcaaacggacaaatgtgcgaatggccccgaccacggggacaagcagccacaccagaaaccccccaacctagcccacccggaggctccggctcggaaccctacaaactcctccccggcgccgtagccaccatagtaaaacctttatccgccatcccacaacccaccatcacgaaacaggaagtaatataaggactagtccctgttcccagagcccacttttttttctttttttgaaataaaatagcctgtctttcagatctcaaaggctcttttcagagccaccaaaaaaaaaaaaaaaaaaaaaaaaaaaaaaaaaaaaaaaaaaaaaaaaaaaaaaaaaaaaaaaaaaaaaaaaaaaaaaaaaaaaaaaaaaaaaaaaaaaaa

SEQ ID NO: 3228 - RNA, 1697 nt, synthetic construct
  misc_feature 1..1697: note = mRNA a-1 (hSL-A100) (opt11) from Homo sapiens__NP_000448.3__HNF4A(1-474)(S183E)
  source 1..1697: mol_type = other RNA
aggagagtcccgcagtcggcgtccagcggctctgcttgttcgtgtgtgtgtcgttgcaggccttattcaagcttaccatgcgcctctccaaaaccctcgtcgacatggacatggccgactactccgccgccctcgacccagcctacacaacactagagttcgaaaacgtccaagtcctaaccatgggaaacgatacctccccctcggaagggaccaacctcaacgccccaaattcacttggagtctccgccctatgcgccatatgtggagaccgcgctaccggaaaacactatggcgcgtcatcctgcgacggatgcaaaggcttcttcagacgctcggtccgcaaaaaccacatgtactcctgccgattctcccgccaatgcgtcgtcgacaaagacaaaagaaaccaatgcaggtactgccgtctgaagaaatgcttccgcgccggaatgaagaaagaagccgtccaaaacgaacgcgaccgaatcagcaccagacgcagctcctacgaagactcctcactcccatcaatcaacgccctactccaagccgaagtcctctcccgccaaatcacctccccagtaagcggaatcaacggcgacatccgcgccaagaaaatagccgaaatagccgacgtctgcgaatcaatgaaagaacagctactcgtcctcgtcgaatgggccaaatacatacccgccttctgcgaactccctctcgacgaccaagtcgcactactcagagcccacgccggagaacacctactcctcggagccacgaaacgatccatggtattcaaagacgtactcctccttggtaacgattacatcgtcccaagacactgcccagaactcgccgaaatgtccagagtatcaatccgaatcctcgacgagctagtactcccctttcaggaactacaaatagatgacaacgaatacgcatacctaaaagccatcatcttctttgaccccgacgccaaaggcctctccgacccaggcaaaatcaaacgcctacgctcccaagttcaagtatccctcgaagactacatcaatgaccgccaatacgacagccgaggacgcttcggcgaactactcctgctactccccaccctacaatccatcacttggcaaatgatcgaacaaatccaattcatcaaactcttcggcatggccaaaatcgacaaccttctccaggaaatgctcctcggtggcagcccctccgacgcaccccacgcccaccaccccctccacccacacctcatgcaagaacacatgggcaccaacgtcatagtagcaaacaccatgcccacccacctatcaaacggacaaatgtgcgaatggccgcgcccgagaggacaagccgccacacccgaaacaccccaaccaagccctcccggcggctcaggttcagaaccctataaactcctacccggcgccgtagccaccatcgtaaaacccctcagcgccatcccccaacccaccatcaccaaacaagaagtgatataaggactagtccctgttcccagagcccacttttttttctttttttgaaataaaatagcctgtctttcagatctcaaaggctcttttcagagccaccaaaaaaaaaaaaaaaaaaaaaaaaaaaaaaaaaaaaaaaaaaaaaaaaaaaaaaaaaaaaaaaaaaaaaaaaaaaaaaaaaaaaaaaaaaaaaaaaaaaaa

SEQ ID NO: 3229 - RNA, 1697 nt, synthetic construct
  misc_feature 1..1697: note = mRNA a-1 (hSL-A100) (opt11) from Homo sapiens__NP_000448.3__HNF4A(1-474)(S461A)
  source 1..1697: mol_type = other RNA
aggagagtcccgcagtcggcgtccagcggctctgcttgttcgtgtgtgtgtcgttgcaggccttattcaagcttaccatgcgactctccaaaaccctcgtcgacatggacatggcagattactccgctgccctcgacccggcctacaccacactagagttcgaaaacgttcaagtattaaccatgggcaacgacacatcccccagcgaaggcaccaatctaaacgcacccaactccctcggggtctcagcactatgcgccatctgcggagatcgcgctactggcaaacactacggagcctcctcctgcgacggctgcaaaggcttcttccgaagatcagtccgcaaaaaccacatgtactcatgccgcttctctcgccaatgcgtcgtcgacaaagacaaacgaaaccagtgccgctactgccgcctaaagaaatgctttcgcgccggcatgaagaaagaagcagtacaaaacgaacgcgaccgcatctccacccgccggtcaagctacgaggactcatcactcccatcaatcaacgctctcctccaagcagaagtccttagccgacaaatcacatcccccgtttccggaatcaacggcgacatccgagcaaagaaaatcgcctctatcgcagacgtatgcgaatccatgaaagaacaactcctagtcctagtcgaatgggcaaaatatatacccgccttctgcgaactgcccctagacgatcaagtcgcactactccgagcccacgccggcgagcacctcctgctcggcgccacaaaacgatccatggtattcaaagacgtactactcctcgggaacgactacatcgtaccccgccactgccccgagctcgccgaaatgtcacgtgtctcaattcgcatactagacgagctagtcctccccttccaagaactacaaatagacgacaacgaatacgcatacctaaaagccatcatcttcttcgaccccgatgccaaaggactatccgaccccggcaaaatcaaacgccttcgttcacaagtgcaagtctcgctcgaagactacatcaacgaccgccaatacgactccagaggccgattcggagaactcctactcctcctccccaccctccaatccatcacatggcaaatgatagaacaaatccaattcataaaactcttcggcatggccaaaatcgacaacctgctccaagaaatgctcctcggcggatcaccctccgacgccccacacgcccaccaccccctacacccccaccttatgcaagaacacatgggaaccaacgtcatcgtcgccaacacaatgcccacacacctatcaaacggacaaatgtgcgagtggcctcgcccccgcggccaagcagccacacccgaaacaccccagccctccccacccggcggctccggctcggaaccctacaaacttctcccaggcgccgtcgccaccatcgtaaaaccactcgccgcaataccccaaccaaccatcaccaaacaagaggtaatctaaggactagtccctgttcccagagcccacttttttttctttttttgaaataaaatagcctgtctttcagatctcaaaggctcttttcagagccaccaaaaaaaaaaaaaaaaaaaaaaaaaaaaaaaaaaaaaaaaaaaaaaaaaaaaaaaaaaaaaaaaaaaaaaaaaaaaaaaaaaaaaaaaaaaaaaaaaaaaa

SEQ ID NO: 3230 - RNA, 1697 nt, synthetic construct
  misc_feature 1..1697: note = mRNA a-1 (hSL-A100) (opt11) from Homo sapiens__NP_000448.3__HNF4A(1-474)(S461E)
  source 1..1697: mol_type = other RNA
aggagagtcccgcagtcggcgtccagcggctctgcttgttcgtgtgtgtgtcgttgcaggccttattcaagcttaccatgcgactgtccaaaaccctagtcgacatggacatggcagactacagcgcagcactcgatcccgcctacaccaccctagagttcgaaaacgtacaagtactaacaatgggaaacgacacctctccatccgaaggcacaaacctcaacgcacccaactccctcggcgtctccgcactttgcgcaatctgcggcgaccgagccaccggcaaacattacggagcctccagctgcgacggctgcaagggattcttccgccgcagcgtccgcaaaaaccacatgtactcgtgccgcttctcacgacagtgcgtagtcgacaaagacaaacgcaaccaatgcagatactgcagacttaaaaagtgcttccgcgcgggaatgaagaaagaagccgtccaaaacgaacgagatcgcatctccacccgccggagctcatacgaagactcatcactaccatcaataaacgccctcctacaagccgaagtcctatcccgccaaataacctcccccgtctctggcatcaacggagacatccgcgccaagaaaatcgcaagcatcgccgacgtctgcgaatcaatgaaagagcaactactcgtcctagtagaatgggcaaaatacataccagccttctgcgaactccccctagacgaccaagtcgcgctactccgagcccacgcaggagaacaccttctcctaggcgcaaccaaacgctccatggtatttaaagacgtcctactcctgggcaacgactacatagtcccccgccattgcccagaactcgccgaaatgtcacgcgtatcgatacgcatcctcgacgagctagtcctccccttccaagaactacaaatagacgacaacgaatacgcctacttgaaagccataatcttcttcgacccagacgccaaaggcctctccgacccaggcaaaataaaacgcctacgcagccaggtacaggtcagcctcgaagactatatcaacgaccgtcaatacgactcccgaggccgattcggagaactcctcctactcctaccaaccctccaatcaatcacctggcaaatgatcgaacaaatacaattcatcaaactgttcggcatggcaaaaatagacaacctacttcaagaaatgctcttaggaggctccccctccgacgccccacacgcccaccaccccctccacccacacctcatgcaagaacacatggggaccaacgtaatagtcgccaacaccatgcccacccacctatccaacggccaaatgtgcgaatggccccgcccgcgcggccaagccgccacccctgaaacaccacaaccctcccctcccggcggatcaggctccgaaccctacaaactccttcccggcgccgtagccactatcgtcaaacccctcgaagccatacctcaaccaaccatcaccaaacaagaggtcatctaaggactagtccctgttcccagagcccacttttttttctttttttgaaataaaatagcctgtctttcagatctcaaaggctcttttcagagccaccaaaaaaaaaaaaaaaaaaaaaaaaaaaaaaaaaaaaaaaaaaaaaaaaaaaaaaaaaaaaaaaaaaaaaaaaaaaaaaaaaaaaaaaaaaaaaaaaaaaaa

SEQ ID NO: 3231 - RNA, 1697 nt, synthetic construct
  misc_feature 1..1697: note = mRNA a-1 (hSL-A100) (opt11) from Homo sapiens__NP_000448.3__HNF4A(1-474)(S142A_S143A_S313A)
  source 1..1697: mol_type = other RNA
aggagagtcccgcagtcggcgtccagcggctctgcttgttcgtgtgtgtgtcgttgcaggccttattcaagcttaccatgcgcctctccaaaacccttgtcgacatggacatggcagactactccgccgcacttgacccggcttacacaaccctagaattcgaaaacgtccaagtactcaccatgggaaatgacacctcaccctctgaagggaccaacctaaacgcaccaaactcactcggagtcagcgccctatgcgccatctgcggcgaccgcgcaaccggaaaacactacggcgcctcctcttgcgacggctgcaaaggcttcttccgaagatccgtcagaaaaaaccatatgtacagctgccgcttctcacgacaatgcgtcgtcgacaaagacaaaagaaaccaatgcagatattgccgactcaaaaaatgctttcgagccggcatgaaaaaggaagcagtccaaaacgaacgcgaccgcatttccacccgcagagccgcctacgaagacagctccctccccagcatcaacgcactactccaagctgaagtattatcccgccaaatcacctccccagtctccggcatcaacggcgacatacgggccaaaaaaatcgcctcaatcgccgacgtctgcgaatccatgaaagaacaactcctagtcctagtcgaatgggccaaatacatacccgcattctgcgaactacctttagacgaccaagtcgccctcttacgagcccacgccggcgaacatctactgcttggcgccaccaaacgatccatggttttcaaagacgtactactcctcggaaacgactacatcgtcccacgtcactgcccagaactagccgaaatgtcccgcgtctcaatccgcatcctcgacgaactcgtactcccctttcaagaactacaaatcgacgacaacgagtacgcctacctcaaagccatcatcttcttcgaccccgacgcaaaaggcctctccgaccccggcaaaattaaacgacttagagcacaagtacaagtcagcctagaagactacataaatgaccgccaatacgacagcagaggccgcttcggcgagctcctactcctcctccccaccctacaatcaattacctggcagatgatcgaacaaatacaattcataaaacttttcggaatggccaaaatcgacaacctactccaagaaatgctcctcggcggctcccccagcgacgccccccacgcacaccaccccctacacccccacctaatgcaagagcacatgggaaccaacgtcatagtagccaacacaatgcccactcacctcagcaacggccaaatgtgcgaatggccccgcccccgaggacaagccgccacccccgaaaccccccaaccgagcccccccggcggctccggctccgaaccctacaaactcctccctggcgccgtagccacgatagtaaaaccgctctccgccatcccccaaccgacaataacgaaacaagaagtaatctaaggactagtccctgttcccagagcccacttttttttctttttttgaaataaaatagcctgtctttcagatctcaaaggctcttttcagagccaccaaaaaaaaaaaaaaaaaaaaaaaaaaaaaaaaaaaaaaaaaaaaaaaaaaaaaaaaaaaaaaaaaaaaaaaaaaaaaaaaaaaaaaaaaaaaaaaaaaaaa

SEQ ID NO: 3232 - RNA, 1697 nt, synthetic construct
  misc_feature 1..1697: note = mRNA a-1 (hSL-A100) (opt11) from Homo sapiens__NP_000448.3__HNF4A(1-474)(S142A_S143A_S313A_K458R)
  source 1..1697: mol_type = other RNA
aggagagtcccgcagtcggcgtccagcggctctgcttgttcgtgtgtgtgtcgttgcaggccttattcaagcttaccatgcgcctcagcaaaacactagtagacatggacatggcagactactccgccgccctagacccagcctacacaaccctcgaattcgaaaacgtccaagtcctaacgatgggcaacgacacatccccctccgagggcaccaacctcaacgcccccaactctctcggcgtctctgccctctgcgccatctgcggcgaccgcgccaccggaaaacactacggagccagctcatgcgacggctgcaaaggattctttcgacgctccgttagaaaaaaccacatgtactcatgccgtttctctcgccaatgcgtcgtcgacaaagacaaacgtaaccagtgccgctactgccgcctaaaaaaatgcttccgcgcaggcatgaaaaaagaagccgtccaaaacgagagagaccgcatatccacccgccgagccgcctacgaagactcttcactaccgtccataaacgccctcctacaagccgaagtcctatcacgacaaataacctcccccgtcagcggcatcaacggcgacatcagagccaagaaaatagcctctatagcagacgtatgcgaatcaatgaaagaacaactcctagtactagtcgaatgggccaaatacattcccgccttctgcgaactgccactcgacgaccaagtggccctactccgtgcccacgccggcgaacatttactcctcggcgccaccaaacgatcaatggtattcaaagacgtactactcctcggcaacgactacatagtcccccgccactgccccgaactcgccgaaatgtcacgtgtctctatccggatcctagacgaactcgtcctccccttccaagaactccaaatcgacgacaacgaatacgcctacctaaaagccatcatattcttcgatcccgacgccaagggtctctccgacccaggaaaaatcaaacgcctacgcgcacaagtacaagtatccctcgaagactacatcaacgaccgacaatacgacagccgcggccgattcggcgaactactccttctcctccccacactacaatcaataacctggcaaatgatcgaacaaatccagttcataaaactctttggcatggccaaaatagacaacctcctccaggaaatgctcctcggaggaagcccctccgacgccccccacgcccaccacccactccacccccacctcatgcaagagcacatgggcaccaacgtcatcgtcgccaacaccatgcccacacacctatcaaacggccaaatgtgtgaatggcccagacctcgcggccaagccgccacacccgaaaccccacaaccctcccccccggggggctcaggctccgaaccctacaaactcctcccaggtgccgtcgccacaatcgtacgacccctctccgccatccctcaaccaacaataaccaaacaagaagtcatctaaggactagtccctgttcccagagcccacttttttttctttttttgaaataaaatagcctgtctttcagatctcaaaggctcttttcagagccaccaaaaaaaaaaaaaaaaaaaaaaaaaaaaaaaaaaaaaaaaaaaaaaaaaaaaaaaaaaaaaaaaaaaaaaaaaaaaaaaaaaaaaaaaaaaaaaaaaaaaa

SEQ ID NO: 3233 - RNA, 1697 nt, synthetic construct
  misc_feature 1..1697: note = mRNA a-1 (hSL-A100) (opt11) from Homo sapiens__NP_000448.3__HNF4A(1-474)(S142A_S143A_S167A_S313A_ S378A_T429A_T432A_S436A_K458R)
  source 1..1697: mol_type = other RNA
aggagagtcccgcagtcggcgtccagcggctctgcttgttcgtgtgtgtgtcgttgcaggccttattcaagcttaccatgcgcctaagcaaaaccctagtcgacatggacatggcagactactccgccgccctcgaccccgcctacaccaccctagaattcgaaaacgttcaggtcctcaccatggggaacgacacatcgccaagcgaaggaaccaaccttaacgccccaaactccctgggcgtctccgccctttgcgccatctgcggagaccgcgccacaggcaaacactatggcgcctccagctgcgacggctgcaaaggcttcttccgacgctcagtacggaaaaaccacatgtactcatgccgcttctcacgccaatgcgtcgtcgacaaagacaaacgcaaccaatgccgctactgccgactcaaaaaatgcttccgcgcaggcatgaaaaaggaagccgtccaaaacgaacgcgaccgtatctcaacccgacgtgctgcatacgaagactcatccctcccctccatcaacgccctactccaggccgaagtcctgagtcgacaaatcacagcccccgtctcaggcatcaacggcgacatccgagcaaagaaaatcgcctctatagccgacgtctgcgaatcaatgaaagaacaactcctcgtcctcgtagaatgggccaaatacatccccgcattctgcgaactacccctcgacgaccaagtcgccctactaagagcccacgccggcgaacaccttctgcttggcgccacaaaacgcagcatggtattcaaagacgtactactcctcggcaacgactacatcgtaccccgacactgccccgaactcgccgaaatgtcccgcgtctccatacgcatcctagacgaactggtcctccccttccaggaactccaaatcgacgacaacgaatacgcctacctcaaagccatcatattcttcgacccagacgcaaaaggcctcagcgaccccggcaaaatcaaaagactccgcgcccaagtacaagtcagcctagaagattacataaacgaccgccaatacgatagcagaggccgattcggcgaactcctcctactcctacccacactacaatcaatcacctggcaaatgatagaacaaatccaattcatcaagctattcggcatggcaaaaattgacaacctactacaagaaatgctcctcggcggcgccccaagcgacgcaccacacgcccaccaccccctccacccgcacctcatgcaagaacacatgggcaccaacgtcatcgtcgccaacacaatgcccacacacctctccaatggacaaatgtgcgaatggccacgcccacgaggccaagcggccgcgcccgaagccccacaacctgccccgcccggaggctctggaagcgaaccctacaaactactccccggcgcagtcgccacgatagtccgcccactatccgccatcccccagcccacaataaccaaacaagaagtcatataaggactagtccctgttcccagagcccacttttttttctttttttgaaataaaatagcctgtctttcagatctcaaaggctcttttcagagccaccaaaaaaaaaaaaaaaaaaaaaaaaaaaaaaaaaaaaaaaaaaaaaaaaaaaaaaaaaaaaaaaaaaaaaaaaaaaaaaaaaaaaaaaaaaaaaaaaaaaaa

SEQ ID NO: 3234 - RNA, 1697 nt, synthetic construct
  misc_feature 1..1697: note = mRNA a-1 (hSL-A100) (opt11) from Homo sapiens__NP_000448.3__HNF4A(1-474)(S142A_S143A_S148A_S167A_ S313A_S378A_T429A_T432A_S436A_K458R)
  source 1..1697: mol_type = other RNA
aggagagtcccgcagtcggcgtccagcggctctgcttgttcgtgtgtgtgtcgttgcaggccttattcaagcttaccatgcgcctttccaaaaccctagtcgacatggacatggccgactactcagccgcactagaccccgcctatactaccctagagttcgaaaacgtccaagtcctcaccatgggcaatgacacctccccatccgaaggcaccaacctcaacgcccccaactcactaggagtctccgccctttgcgccatctgcggcgaccgcgccacaggaaaacactacggcgcgtcaagctgcgatggatgcaaaggtttcttccgtcgttccgtccgcaaaaaccacatgtattcctgccgattctcgcgccaatgcgtcgtcgacaaagacaaacgaaaccaatgccgatactgccgcctcaaaaagtgcttccgcgccggcatgaagaaagaagccgtccaaaacgaacgcgacagaatatcaacccgacgagccgcctacgaagactcagccctcccctcaataaatgccctcctccaagcagaggtcctttccagacagatcaccgcccccgtctccggcatcaacggcgacatcagagccaagaaaatcgcctccatcgccgacgtctgcgaatccatgaaagaacaacttctagttctcgtcgaatgggccaaatacatccccgccttctgcgaactaccccttgacgaccaagtcgctctcctgcgcgcccacgccggcgaacacctccttctcggagcaactaaacgctccatggtgttcaaagacgtcctcctcctcggcaacgactacatcgtcccccgacactgccccgaactagctgaaatgtcacgcgtcagcatcagaatcctcgacgaactcgtcctccccttccaagaactccaaatcgatgacaacgagtacgcctatcttaaagccatcatattcttcgacccagacgcaaaaggtctctccgaccccggcaaaataaaacgactccgcgcccaagtccaagtttccctcgaagactacatcaacgaccgacaatacgattcccgcggccgattcggcgaactcctcctactccttcccaccctccagtccataacatggcaaatgatcgaacaaatccaattcataaaactcttcggcatggccaaaatagacaacctcctccaagagatgctactcggcggtgctccatccgacgccccacacgcacaccaccccctccacccccacctcatgcaagagcacatgggcaccaacgtcatagtagcaaacaccatgcctacccacctatccaacggacaaatgtgcgaatggccccgcccacggggccaagccgccgcccccgaagccccacaacccgccccacccggaggatccggcagcgaaccctacaaactactacccggtgccgtcgccacaatcgtccgccccctatccgccataccacagcccaccatcaccaaacaagaagtcatatagggactagtccctgttcccagagcccacttttttttctttttttgaaataaaatagcctgtctttcagatctcaaaggctcttttcagagccaccaaaaaaaaaaaaaaaaaaaaaaaaaaaaaaaaaaaaaaaaaaaaaaaaaaaaaaaaaaaaaaaaaaaaaaaaaaaaaaaaaaaaaaaaaaaaaaaaaaaaa

SEQ ID NO: 3235 - RNA, 1697 nt, synthetic construct
  misc_feature 1..1697: note = mRNA a-1 (hSL-A100) (opt11) from Homo sapiens__NP_000448.3__HNF4A(1-474)(K106R_K108R_K126R_K127R_ S142A_S143A_S148A_S167A_S313A_S378A_T429A_T432A_S436A_K458R )
  source 1..1697: mol_type = other RNA
aggagagtcccgcagtcggcgtccagcggctctgcttgttcgtgtgtgtgtcgttgcaggccttattcaagcttaccatgcgcctctccaagaccctcgtcgacatggacatggcagactacagcgcagccctagaccccgcctacaccacccttgagttcgaaaacgtccaagtcctaacaatgggaaacgacacctcaccatccgaaggcacaaacctaaacgcccccaactcacttggcgtttcggccctctgcgccatatgcggagaccgcgccaccggcaaacactacggagcatcctcctgcgacggctgtaaaggcttcttcagacgatccgtacgcaaaaaccacatgtactcctgccgcttcagcagacaatgcgtcgtcgaccgcgaccgccgcaaccaatgccgctactgccgcctaaagaaatgcttccgcgcaggcatgcgccgagaagcagtccaaaacgaacgagaccgaataagcacccgcagagccgcgtacgaagactccgccctcccatcaatcaacgcacttctacaagccgaagtactctcccgccaaataaccgccccagtatccggaatcaacggcgacatccgcgccaagaaaatcgcttccatagcagacgtctgtgaatccatgaaagagcaactcctcgtcctcgtcgagtgggccaaatacatccccgccttctgcgagctacccctcgacgaccaagtcgccctcctccgagcccacgctggcgaacacctcctactcggcgccaccaaaagatccatggttttcaaagacgtactccttctgggaaacgactacatcgtacccaggcactgccccgagctagccgaaatgtccagagtctcaatccgcatactcgacgagctcgtccttccctttcaagaacttcaaatagacgacaacgaatacgcatacctgaaagccatcatcttcttcgaccccgacgccaaaggactatccgacccaggcaaaatcaaacgcctacgagcacaagtacaagtctccctagaagactacataaacgaccgccaatacgactcgagaggccgcttcggcgaactactccttctcctccctaccctacaaagcatcacctggcaaatgatcgaacaaatccaattcataaaactcttcggaatggccaaaatcgacaatttactccaggaaatgttactcggcggcgcaccatccgacgcaccccacgcccaccaccccctacacccccacctcatgcaagaacacatgggaaccaatgtcatagtcgccaacacaatgcctacacatctctccaacggccaaatgtgcgaatggccgcgtccccgaggacaagcagccgcccccgaagcaccccagcccgccccgcccggcggatccggatcagaaccctacaaactcctcccaggcgccgtcgcaaccatcgtccgccccctctcagcaatcccccaacccaccatcaccaaacaagaagtcatctaaggactagtccctgttcccagagcccacttttttttctttttttgaaataaaatagcctgtctttcagatctcaaaggctcttttcagagccaccaaaaaaaaaaaaaaaaaaaaaaaaaaaaaaaaaaaaaaaaaaaaaaaaaaaaaaaaaaaaaaaaaaaaaaaaaaaaaaaaaaaaaaaaaaaaaaaaaaaaa

SEQ ID NO: 3236 - RNA, 1697 nt, synthetic construct
  misc_feature 1..1697: note = mRNA a-1 (hSL-A100) (opt11) from Homo sapiens__NP_000448.3__HNF4A(1-474)(S142A_S143A_S148A_T166A_ S167A_S313A_S378A_T429A_T432A_S436A_K458R)
  source 1..1697: mol_type = other RNA
aggagagtcccgcagtcggcgtccagcggctctgcttgttcgtgtgtgtgtcgttgcaggccttattcaagcttaccatgcgcctctccaaaacactcgtcgatatggacatggccgactacagcgctgcccttgaccccgcgtacaccaccctagaattcgaaaacgtccaagttctcaccatgggcaacgacacctccccctcagaaggaaccaacctaaatgcccccaactctctcggcgtctccgctctctgcgccatctgcggcgaccgagccaccggaaaacactacggagcctcctcctgcgacgggtgcaaaggcttcttcagaagatccgtccgcaaaaaccacatgtactcatgccggttctcccgacaatgcgtagtcgacaaagacaaacgcaaccaatgccgctactgccgcctcaaaaaatgctttcgcgccggcatgaagaaagaagcagtacaaaacgaaagagacagaatctcaactcgcagagccgcctacgaagactcggcgctcccctctatcaacgccctgcttcaagccgaagtcctctcacgccaaatcgccgcacccgtatccggaatcaacggcgatatccgcgcaaaaaaaatcgcatccatcgccgacgtctgcgaatccatgaaggaacaactgctagtcctcgtagaatgggccaaatacatccctgccttctgtgaactccccctagacgatcaagtcgccctcctacgcgcccacgccggcgagcacctactacttggagccaccaaacgttctatggtcttcaaagacgtactcttactcggcaacgactacatagtcccccgccactgcccagaactggccgaaatgagccgcgtctcaatacgaatcctagacgaactcgtgctaccattccaagaactacaaatcgacgacaacgaatacgcatacctaaaagctattatcttcttcgaccccgacgccaaaggcctatccgaccccggcaaaataaaacgcctgcgagcccaagtacaagtaagcctcgaagactacatcaacgaccgacagtacgactcccgaggccgcttcggcgaactcctacttctcctccccaccctacaatccatcacctggcaaatgatagaacaaatccaattcatcaaactcttcggaatggcaaaaatcgataacctgctccaagaaatgctcctcggcggagccccaagcgatgcaccacacgcacaccacccactacacccacacctcatgcaagaacacatgggaaccaacgtcatagtcgccaacacaatgccaacccacctatccaacggccaaatgtgcgaatggccccgcccccgcggtcaagcagcagctcccgaagcacctcaaccagccccccccggaggctccggctccgaaccttacaaactcctcccaggagccgtcgccacaatcgtaagacccctctcagccatcccccaaccaaccatcacaaaacaagaagtgatataaggactagtccctgttcccagagcccacttttttttctttttttgaaataaaatagcctgtctttcagatctcaaaggctcttttcagagccaccaaaaaaaaaaaaaaaaaaaaaaaaaaaaaaaaaaaaaaaaaaaaaaaaaaaaaaaaaaaaaaaaaaaaaaaaaaaaaaaaaaaaaaaaaaaaaaaaaaaaa

SEQ ID NO: 3237 - RNA, 1697 nt, synthetic construct
  misc_feature 1..1697: note = mRNA a-1 (hSL-A100) (opt11) from Homo sapiens__NP_000448.3__HNF4A(1-474)(S87A_S142A_S143A_S148A_T 166A_S167A_S313A_S378A_T429A_T432A_S436A_K458R)
  source 1..1697: mol_type = other RNA
aggagagtcccgcagtcggcgtccagcggctctgcttgttcgtgtgtgtgtcgttgcaggccttattcaagcttaccatgcgcctctccaaaaccctcgtcgacatggacatggcagactactctgccgccctcgaccccgcctacacaaccctcgagttcgaaaacgtacaagtcttaaccatgggaaacgacacctcaccatcagaaggtacaaacctcaacgcccctaactcactcggcgtatctgcactatgcgcaatatgcggagaccgtgccactggcaaacactacggagcctcatcatgtgacggctgcaaaggcttcttccgacgtgcagtccgcaaaaaccatatgtactcctgccgattctcccgacaatgcgtcgtagacaaagacaaacgaaaccaatgccggtactgccgcctaaagaaatgcttccgcgccgggatgaagaaagaagccgtacaaaacgaacgagatcgcatctccacacgccgagccgcctacgaagactccgccctcccctccatcaacgccctactccaggccgaagtactgtcgcgccaaatcgccgcgccagtttccggaataaacggcgacatccgcgccaagaaaatcgcctcaatcgcagacgtatgcgaatccatgaaagaacaactcctcgtcctcgtagaatgggccaaatacatccccgcattctgcgaactacccctagatgaccaagtagcactattacgcgctcacgccggagaacacctcctcctcggagccactaaacgctccatggtcttcaaagacgtcctcctcctcggcaacgactacatcgtaccccgccactgccccgaactcgcagaaatgtcaagggtctccataagaatcctagacgagctagtcctaccgttccaagaactccaaatcgacgacaatgaatacgcatacctcaaagccataatcttcttcgacccagacgccaaaggcctctcagaccccggcaaaatcaaacgactacgcgcccaggtccaagtctccctagaagactacatcaacgacagacaatacgacagccgagggagattcggcgaactcctcctactcctccccaccctccaatcaataacatggcaaatgatcgaacaaatccagttcatcaaactcttcggcatggccaaaatcgacaacctactccaagaaatgctcctcggaggcgccccaagcgacgcaccccacgcacaccaccccctccacccacacctcatgcaagaacacatgggaaccaacgtcatagtagcaaacacaatgcccacccacctctcaaacggccaaatgtgcgaatggccccgcccacgaggccaagcagcggcccccgaagctccccaacccgcccctcccggagggtccggcagcgaaccctacaaactcctcccaggcgcagtagccaccatcgtacgcccgctttccgcaatacctcagcccacaatcacaaaacaagaagtaatataaggactagtccctgttcccagagcccacttttttttctttttttgaaataaaatagcctgtctttcagatctcaaaggctcttttcagagccaccaaaaaaaaaaaaaaaaaaaaaaaaaaaaaaaaaaaaaaaaaaaaaaaaaaaaaaaaaaaaaaaaaaaaaaaaaaaaaaaaaaaaaaaaaaaaaaaaaaaaa

SEQ ID NO: 3238 - RNA, 1697 nt, synthetic construct
  misc_feature 1..1697: note = mRNA a-1 (hSL-A100) (opt11) from Homo sapiens__NP_000448.3__HNF4A(1-474)(S87A_K106R_K108R_K126R_K 127R_S142A_S143A_S148A_T166A_S167A_S313A_S378A_T429A_T432A_ S436A_K458R)
  source 1..1697: mol_type = other RNA
aggagagtcccgcagtcggcgtccagcggctctgcttgttcgtgtgtgtgtcgttgcaggccttattcaagcttaccatgcgcctcagcaagacactcgtagacatggacatggccgactactccgccgcacttgaccccgcctataccaccctcgaattcgaaaacgtacaagtactcacaatgggaaacgacacctccccatccgaaggtaccaacttaaacgcccccaactccttaggcgtctccgccctctgcgcaatctgcggcgaccgagctacaggtaaacactacggcgcatcaagctgtgacggctgcaaaggcttcttccgacgagccgtccgcaaaaaccacatgtactcatgcagattctcccgacaatgcgtcgtggacagagaccgacgaaaccaatgccgctactgccgcctcaaaaaatgcttccgcgccggcatgcgacgtgaagcagtccaaaacgaacgtgatcgcataagcactagacgcgccgcctacgaagactccgccctgccctccatcaacgccctactacaagccgaagtccttagcagacaaatagccgccccagtctccggaataaacggagacatacgtgccaaaaaaatagcatccatcgccgacgtatgcgaaagcatgaaagaacaactccttgtcctagtagaatgggctaaatacatccccgcattctgcgaactccccctagacgaccaagtagccctcctccgagcacacgccggcgaacacctcctactcggcgccacaaaaagaagcatggtcttcaaagacgtcctacttctaggaaacgactacatcgtccctcgccactgccccgaactcgccgagatgagtagagtctctatcagaatcctcgacgaactcgtactcccattccaagaactacaaatagacgacaacgaatacgcctacctcaaagcgatcatcttcttcgaccccgacgccaaaggcctatcagaccccggcaaaatcaaaagactccgcgcccaagtacaagtctccctagaagactacatcaacgaccgccagtacgacagccgaggccgattcggcgaactacttctactcctcccaacactacaatcaatcacctggcagatgatcgaacaaatccaattcatcaaactattcggcatggccaaaatagacaaccttctacaagaaatgctcctaggcggcgcccccagcgacgcaccacacgcacaccacccccttcacccccacctaatgcaagagcacatgggcaccaacgtcattgtagccaacacaatgcccacccacctctcgaacggtcaaatgtgcgaatggccccgcccacgcggccaagcagccgcacccgaagcaccccaaccagccccacccggaggatccggttcggaaccctacaaactcctacccggcgccgtggccacaatagtaagacccctctcagcaatcccccaacccaccatcaccaaacaagaagtcatctaaggactagtccctgttcccagagcccacttttttttctttttttgaaataaaatagcctgtctttcagatctcaaaggctcttttcagagccaccaaaaaaaaaaaaaaaaaaaaaaaaaaaaaaaaaaaaaaaaaaaaaaaaaaaaaaaaaaaaaaaaaaaaaaaaaaaaaaaaaaaaaaaaaaaaaaaaaaaaa

SEQ ID NO: 3239 - RNA, 1697 nt, synthetic construct
  misc_feature 1..1697: note = mRNA a-1 (hSL-A100) (opt11) from Homo sapiens__NP_000448.3__HNF4A(1-474)(S87A_K106R_K108R_K126R_K 127R)
  source 1..1697: mol_type = other RNA
aggagagtcccgcagtcggcgtccagcggctctgcttgttcgtgtgtgtgtcgttgcaggccttattcaagcttaccatgcgcctctccaaaacactcgtcgacatggacatggccgactactcagcagccctagaccccgcttacaccaccctcgagttcgaaaacgtacaagtcctcaccatgggcaacgacaccagcccatctgaaggtaccaacctcaacgcaccaaactccctcggcgtttcagctctatgcgccatatgcggagaccgcgccaccggcaaacactacggagcctcctcttgcgacggctgcaaaggcttcttccgcagagccgtacgcaaaaaccacatgtacagctgtagattttcccgccaatgcgtcgtcgaccgcgaccgccgcaaccagtgcagatattgccgactcaagaaatgcttccgcgcaggaatgcgccgcgaagccgtacaaaacgaacgcgaccgcatctccacacgccgctcatcttacgaagactcctccctaccaagcatcaacgcactacttcaagcagaagtcctatcccgacaaatcacctcccccgtctcaggcataaacggcgacataagggcaaagaaaatcgcctccatagccgacgtatgcgaatcaatgaaagaacaactcctagtcctcgtcgaatgggccaaatacatccccgccttctgcgaactgcccctcgacgaccaagtagcacttctccgcgcccacgccggcgaacacctcctactcggcgccaccaaacgttccatggtcttcaaagacgtcctcctacttggtaacgactacatcgtaccccgccactgccctgaactcgcagaaatgtcccgcgtctcaataagaatcctcgacgagctagttctccccttccaagaactacaaatcgacgacaacgaatacgcctacctcaaagccatcatatttttcgaccccgacgccaaaggcctttccgaccccggcaaaataaaacgcctccgctctcaagtccaggtcagcctcgaagactacatcaacgaccgccaatacgactctcgtggccgcttcggagaactactactactcctccccacactacaatccatcacctggcaaatgatcgaacaaatccaattcatcaaactcttcggcatggccaaaattgacaacctactccaagaaatgctcctaggcggctccccatccgacgcaccccacgcccaccaccccctccacccccacctcatgcaagaacacatgggaaccaacgtaatcgtcgcaaacacaatgccaacccacctatccaacggtcaaatgtgcgaatggccacgaccccgcggccaagcagctacccccgaaaccccacaaccctcaccaccaggaggcagcggttccgaaccatacaaactcctacccggggccgtcgccaccatcgtaaaacccctctccgccatcccccaacctacaatcaccaaacaagaagtcatctaaggactagtccctgttcccagagcccacttttttttctttttttgaaataaaatagcctgtctttcagatctcaaaggctcttttcagagccaccaaaaaaaaaaaaaaaaaaaaaaaaaaaaaaaaaaaaaaaaaaaaaaaaaaaaaaaaaaaaaaaaaaaaaaaaaaaaaaaaaaaaaaaaaaaaaaaaaaaaa

SEQ ID NO: 3240 - RNA, 1697 nt, synthetic construct
  misc_feature 1..1697: note = mRNA a-1 (hSL-A100) (opt11) from Homo sapiens__NP_000448.3__HNF4A(1-474)(S87A_K106R_K108R_K126R_K 127R_S142A_S143A_S148A_T166A_S167A_S313A_S378A_T429A_T432A_ S436A_K458R_S461A)
  source 1..1697: mol_type = other RNA
aggagagtcccgcagtcggcgtccagcggctctgcttgttcgtgtgtgtgtcgttgcaggccttattcaagcttaccatgcgcctaagcaaaaccctagtagacatggacatggcagactactcagcagcactagaccccgcctacaccaccctcgaatttgaaaacgttcaagtcctaacaatgggcaacgacacctctcccagcgaaggcacaaacctcaacgcccccaactcactcggggtctccgccctctgcgccatatgcggtgaccgtgcaaccggcaaacactacggcgcctcatcctgcgacggctgcaaaggattcttccgacgcgccgtacgcaaaaaccacatgtactcctgcagattctcacgccaatgcgtcgtggaccgagaccgccgcaaccaatgccgttactgccgcctcaagaaatgcttccgagccggaatgcgaagagaagccgtacaaaacgaacgcgaccgcatctccacacgacgagcagcctacgaagactccgccctaccctccataaacgcactcctccaagccgaagtactctcccgacaaatagccgcaccagtctccggcataaacggagacatccgagcaaagaaaatagcctcaatcgccgacgtatgcgaatcaatgaaagaacaacttctcgtcctcgtcgaatgggccaaatatatacccgccttctgcgaactccccctagacgaccaagtggcccttcttcgcgcccacgccggcgaacacctcctactcggagccaccaaacgctccatggtcttcaaagacgtactactcctcggtaacgactacatcgtcccacgacactgccccgaactagccgaaatgtcacgcgtctccatccgcatcctagacgaactcgtactcccattccaagaactccaaatcgacgacaacgaatacgcatacctcaaagccatcatcttcttcgacccagacgccaaaggcctatccgacccaggaaaaataaaacgcttacgcgcacaagtccaagtctccctcgaagactacatcaacgaccgtcagtacgacagccgggggagattcggcgaactgctactactacttcccaccctccaatccatcacctggcaaatgatagaacaaatacaattcatcaaactattcggcatggccaaaatcgacaacctcctacaagaaatgctactcggcggcgccccctccgacgcaccccacgcccaccaccccctccacccccatctaatgcaagaacacatgggcacaaacgtcatcgttgccaacacaatgcccacccacctttccaacggccaaatgtgcgaatggccacgcccccgtggccaagccgccgcccccgaagccccacaaccggccccaccaggtggatccggctcggaaccctacaaactactcccaggagcggtcgctaccatcgtacgccctttggccgccatcccccaacccacaatcaccaaacaagaagttatctagggactagtccctgttcccagagcccacttttttttctttttttgaaataaaatagcctgtctttcagatctcaaaggctcttttcagagccaccaaaaaaaaaaaaaaaaaaaaaaaaaaaaaaaaaaaaaaaaaaaaaaaaaaaaaaaaaaaaaaaaaaaaaaaaaaaaaaaaaaaaaaaaaaaaaaaaaaaaa

SEQ ID NO: 3241 - RNA, 1697 nt, synthetic construct
  misc_feature 1..1697: note = mRNA a-1 (hSL-A100) (opt11) from Homo sapiens__NP_000448.3__HNF4A(1-474)(S87A_K106R_K108R_K126R_K 127R_S142A_S143A_S148A_T166A_S167A_S313A_S378A_T429A_T432A_ S436A_K458R_S461E)
  source 1..1697: mol_type = other RNA
aggagagtcccgcagtcggcgtccagcggctctgcttgttcgtgtgtgtgtcgttgcaggccttattcaagcttaccatgcgcctctccaaaaccctcgtcgacatggacatggcagactacagcgccgccctcgaccccgcatacaccaccctagagttcgaaaacgtccaagtcctaacgatgggaaacgacacctcaccatccgaaggcacaaacctcaacgccccgaactccctaggagtctcagccctctgcgccatatgcggcgaccgagccacaggcaaacactacggcgcctcatcgtgcgacggatgcaaaggattcttccgacgagctgtccgcaaaaaccacatgtactcctgccgcttctcccgccaatgcgtcgttgaccgcgaccggcgcaaccaatgcagatactgccgactcaagaaatgcttccgcgcaggcatgcgacgagaagccgtccaaaacgaacgcgaccgcatctcaaccagacgcgccgcctacgaagactctgcactccccagcatcaacgccctcctgcaagccgaagtattatcccgacagatcgccgcccccgtatccggcatcaacggcgacatccgcgccaagaaaatcgcctccatcgcagatgtctgcgaaagcatgaaagaacaattactcgtactcgtcgaatgggcaaaatacatccccgcattctgcgaactccccctcgacgaccaagtcgccctattacgcgcccacgcaggagaacaccttctcttaggcgcaacgaaacgcagcatggtcttcaaagacgtcctactcctcggcaacgactacatcgtcccccgtcactgccccgaactcgccgaaatgtcccgcgtatccatccgcatcctcgacgaactcgtcctaccattccaagaactccaaatcgacgacaacgaatacgcctacctcaaagcaatcatcttcttcgaccccgacgcaaaaggactatccgaccccggcaaaatcaaacgcctccgcgcacaagtccaagtctccctcgaagactacataaacgacagacaatacgacagccgaggcagattcggagaacttctcctcctcctccccacactacaatccatcacatggcaaatgatcgaacaaatacaattcatcaaactcttcggcatggcaaaaatcgacaacctgctccaagaaatgctacttggcggagcccccagcgacgccccacacgcacaccaccccctccacccccacctcatgcaagagcacatgggcaccaacgtcatcgtagccaacacaatgcccacacacctctccaacggccaaatgtgcgaatggccccgtccccgcggccaagccgcagcccccgaagcaccacaacccgcacctccaggcggcagcggctctgaaccctacaaactcctccccggcgcagtcgccacaatcgtccgccccctagaggccataccccaacccacaattaccaaacaagaggtaatctaaggactagtccctgttcccagagcccacttttttttctttttttgaaataaaatagcctgtctttcagatctcaaaggctcttttcagagccaccaaaaaaaaaaaaaaaaaaaaaaaaaaaaaaaaaaaaaaaaaaaaaaaaaaaaaaaaaaaaaaaaaaaaaaaaaaaaaaaaaaaaaaaaaaaaaaaaaaaaa

SEQ ID NO: 3242 - RNA, 1697 nt, synthetic construct
  misc_feature 1..1697: note = mRNA a-1 (hSL-A100) (opt11) from Homo sapiens__NP_000448.3__HNF4A(1-474)(S87A_K106R_K108R_K126R_K 127R_S142A_S143A_S148E_T166A_S167E_S313A_S378E_T429E_T432E_ S436E_K458R_S461E)
  source 1..1697: mol_type = other RNA
aggagagtcccgcagtcggcgtccagcggctctgcttgttcgtgtgtgtgtcgttgcaggccttattcaagcttaccatgcgactaagcaagaccctagtagacatggacatggccgactactccgccgccctggatcccgcctacaccacactagaatttgaaaacgtacaagtcctcaccatgggcaacgacacaagccccagcgaagggaccaacctcaacgcgccaaacagcctaggcgtctcagccctatgtgccatctgcggagacagagccaccggcaaacactacggagcctcatcctgcgacggatgcaaaggcttcttccgacgcgccgtccgcaaaaaccacatgtactcctgccgtttctcccgacaatgcgtcgtagaccgcgaccgccgcaaccaatgccgctattgccgcctaaagaaatgcttccgcgccggcatgcgacgcgaagccgtccagaacgagcgcgaccgaatctccacacgtcgcgctgcctacgaagactctgaactcccctcgataaacgcactgctccaagccgaagttctatcacgccaaatagccgaacccgtcagcggcatcaacggcgacatccgcgccaagaaaatcgcatcaatcgcagatgtatgcgaatccatgaaagaacagctcctcgtcctcgtagaatgggctaaatacatccccgccttctgtgagctccccctcgacgaccaggtagccctgctaagagcccatgccggcgaacacctcctccttggcgccactaaacgatcaatggtattcaaagacgtcctcctactaggaaacgactacatagtccccagacactgccccgaacttgcagaaatgagccgagtctccatccgcatcttagacgaactcgtcctcccattccaagaactccagatcgacgacaacgaatacgcataccttaaagcaataatcttcttcgaccccgacgccaaaggactatcagaccccgggaaaattaaaagactccgagcacaagtccaagtctcactcgaagactacatcaacgatcgccaatacgactcacgcggacgatttggcgaactcctcctgttactccccaccctacaaagcatcacctggcaaatgatcgaacaaatccagttcataaaactcttcggaatggccaaaatcgacaacctgctccaagaaatgctcctcggcggcgaaccctccgacgcaccccacgcccaccaccccctccacccacacctaatgcaagaacacatgggaaccaacgtcatagtcgccaacaccatgccaacacacctctcgaacggccaaatgtgcgaatggccccgaccacgcggccaagccgctgaacccgaagaaccccaacccgaacccccaggaggctccggctccgaaccctacaaactcctccctggcgccgtcgcaaccatagtacgccccctagaagctatcccacaacccacaataaccaaacaagaagtcatctgaggactagtccctgttcccagagcccacttttttttctttttttgaaataaaatagcctgtctttcagatctcaaaggctcttttcagagccaccaaaaaaaaaaaaaaaaaaaaaaaaaaaaaaaaaaaaaaaaaaaaaaaaaaaaaaaaaaaaaaaaaaaaaaaaaaaaaaaaaaaaaaaaaaaaaaaaaaaaa

SEQ ID NO: 3243 - RNA, 1697 nt, synthetic construct
  misc_feature 1..1697: note = mRNA a-1 (hSL-A100) (opt11) from Homo sapiens__NP_000448.3__HNF4A(1-474)(S87A_K106R_K108R_K126R_K 127R_S142A_S143A_S148A_T166A_S167A_K179R_K180R_S313A_S378A_ T429A_T432A_S436A_K458R_S461E)
  source 1..1697: mol_type = other RNA
aggagagtcccgcagtcggcgtccagcggctctgcttgttcgtgtgtgtgtcgttgcaggccttattcaagcttaccatgcggctctccaaaactctcgtcgacatggacatggcagactacagcgccgccctcgacccagcctacacaaccctcgaattcgaaaacgttcaagtcctcaccatgggtaacgacacatccccctcagaaggaaccaacctcaacgcacccaactccctcggagtttccgccctatgcgcaatctgcggcgatcgagccaccggcaaacactacggcgcctcgtcttgcgacggctgcaaaggcttcttccgccgcgccgtcagaaaaaaccacatgtactcatgccggttctccagacaatgcgtcgtcgaccgagaccgccgaaaccaatgcaggtactgccgcctgaaaaaatgcttccgcgcaggcatgcgccgcgaagccgtccaaaacgagcgagaccgaatctcaacgcgacgcgccgcctacgaagactcagccctcccatccatcaacgcactactacaagccgaagtactatcccgacaaatagccgcaccagtctcaggaatcaacggagacatacgcgccagacgaatagcctccattgccgacgtatgcgaaagcatgaaagaacaactactcgttctcgtcgagtgggccaaatacattcccgctttctgcgaattacccctagacgaccaagtcgccctcctcagagcccacgcaggcgaacacctcctactcggagccaccaaacgatccatggtcttcaaagacgtcttactcctcggcaacgactacatcgtccccagacactgtcccgaactcgccgaaatgtcccgcgtctccatccgaatcctcgacgaactcgtactccccttccaggaactccaaatcgacgacaacgaatacgcctacctaaaagccatcatttttttcgaccctgatgccaaaggcctctctgaccccggcaaaatcaaacgactacgcgcccaagtccaagtctcactcgaagactacatcaacgatcgccagtacgactcccgaggccgcttcggtgaactcctcctcctcctgcccaccctacaatcaataacttggcaaatgatcgaacaaatacaattcatcaaactcttcggcatggccaaaattgacaacctcctacaagaaatgcttctcggcggagcacccagcgatgccccacacgcccaccaccccctccacccacacctcatgcaagaacacatgggcaccaacgtaatcgtcgccaacacaatgcccacacacctctccaacggacaaatgtgcgaatggccccgcccccgaggccaagcagccgccccagaagcaccccaacccgccccacccggaggctcaggctctgaaccctacaaactcctcccaggagcagtcgcaaccatcgtccggcccctcgaagcaatcccccaacccacaatcacaaaacaagaggtaatctagggactagtccctgttcccagagcccacttttttttctttttttgaaataaaatagcctgtctttcagatctcaaaggctcttttcagagccaccaaaaaaaaaaaaaaaaaaaaaaaaaaaaaaaaaaaaaaaaaaaaaaaaaaaaaaaaaaaaaaaaaaaaaaaaaaaaaaaaaaaaaaaaaaaaaaaaaaaaa

SEQ ID NO: 3244 - RNA, 1697 nt, synthetic construct
  misc_feature 1..1697: note = mRNA a-1 (hSL-A100) (opt11) from Homo sapiens__NP_000448.3__HNF4A(1-474)(S87A_K106R_K108R_K126R_K 127R_S142A_S143A_S148A_T166A_S167A_K300R_K307R_K309R_S313A_ S378A_T429A_T432A_S436A_K458R_S461E)
  source 1..1697: mol_type = other RNA
aggagagtcccgcagtcggcgtccagcggctctgcttgttcgtgtgtgtgtcgttgcaggccttattcaagcttaccatgcgcctatccaaaacactcgttgacatggacatggcagactactccgcagccctcgaccccgcctacaccaccctcgaattcgaaaacgtccaagtcctaacaatgggaaacgacacatccccatcagaagggaccaacctaaacgcccccaactccctcggcgtctccgcactctgcgcaatctgcggcgacagagccaccggaaaacactacggcgcctcctcatgcgacggatgcaaaggattcttccgaagagccgtccgaaaaaaccacatgtactcatgccgattctcgcgccaatgcgtcgtcgatcgcgacagacgcaaccaatgccgatactgcagacttaaaaaatgcttccgtgctggcatgcgacgcgaagctgtccaaaatgagcgcgaccgcatatctacccgaagagccgcctacgaagactcagcactaccctcaatcaacgccctactccaggccgaagtcctatcccgacaaatcgcagcccccgtgtccggcataaacggtgacatccgcgccaaaaaaatcgcctcaatagccgacgtctgtgaaagcatgaaagaacaactactagttctcgtcgaatgggcaaaatacatacccgcattctgcgaactcccactagacgaccaagtggccctcctccgagcccatgcaggagaacacctcctcctcggggccacaaaacgctccatggtgttcaaagacgtactactcctaggaaacgactacatcgtaccccgccactgccccgaactagctgaaatgtcacgcgtctcgatccgcatcctcgacgaactcgtcctaccattccaagaactgcaaatcgacgacaacgagtacgcgtacctaaaagcaataatattcttcgaccccgacgcccgcggcctctccgaccccggaagaatcaggcgactccgcgcccaagtccaagtaagcctcgaagactacatcaacgaccgccaatacgactcacgaggcagattcggcgaactactcctcctcctcccaacacttcaatcaatcacctggcaaatgatcgaacaaatccaattcatcaagctattcggcatggccaaaatcgacaacctcctacaagaaatgctactgggaggcgccccctccgacgccccccacgcccaccaccccctacatccacacctcatgcaggaacatatgggaaccaacgtcatcgtcgcaaacaccatgcccacccacctttccaacggccaaatgtgcgaatggccccgcccccgcggccaagcagccgcccccgaagccccccaacccgcaccacccggcggcagtggctcggaaccctacaaactcctccccggcgccgtagccaccatcgtccgaccactagaagcaataccacaacccaccataaccaaacaagaagtaatctaaggactagtccctgttcccagagcccacttttttttctttttttgaaataaaatagcctgtctttcagatctcaaaggctcttttcagagccaccaaaaaaaaaaaaaaaaaaaaaaaaaaaaaaaaaaaaaaaaaaaaaaaaaaaaaaaaaaaaaaaaaaaaaaaaaaaaaaaaaaaaaaaaaaaaaaaaaaaaa

SEQ ID NO: 3245 - RNA, 1697 nt, synthetic construct
  misc_feature 1..1697: note = mRNA a-1 (hSL-A100) (opt11) from Homo sapiens__NP_000448.3__HNF4A(1-474)(S87A_K106R_K108R_K126R_K 127R_S142A_S143A_S148A_T166A_S167A_S313A_S378A_T429A_T432A_ S436A_K447R_K458R_S461E_K470R)
  source 1..1697: mol_type = other RNA
aggagagtcccgcagtcggcgtccagcggctctgcttgttcgtgtgtgtgtcgttgcaggccttattcaagcttaccatgagactatcaaaaaccctggtggacatggacatggccgactacagcgctgccctcgaccccgcctataccacactagagttcgaaaacgtccaagtcctaaccatgggcaacgacacatccccctccgaaggaacaaacctaaacgcccccaactccctcggtgtgtccgccttatgcgccatctgcggagaccgcgccacaggcaaacactacggcgcatcaagctgcgacggctgtaaaggattcttccgccgcgccgtgcgcaaaaaccacatgtactcatgccgcttctcccgccagtgcgtcgtcgaccgcgaccgccgcaaccaatgccgatactgccgcctcaagaaatgcttccgagccggcatgcgacgagaagcagtccaaaacgaacgcgatcgcatctccacaagacgcgcagcatatgaagactcggccctcccatcaatcaacgccctcctacaagccgaagtactatcccgccaaatcgccgcccccgtctccggcatcaacggcgacatacgcgctaagaaaatcgcctcaatagcagacgtctgcgaatcaatgaaagaacaactgctcgtactcgtggaatgggccaaatacatcccagcgttctgcgaactccccctcgacgaccaagtagcattactacgcgcccacgccggcgaacaccttctactaggagcaaccaaacgatccatggtcttcaaagacgtcctgctcctaggaaatgactacatcgtcccccgccattgccctgaactagcagaaatgtcgcgcgtctcaatccgaatcctcgacgaactcgttctaccattccaagaactacaaatcgacgacaacgaatacgcctaccttaaagcaataatcttcttcgacccagatgcaaaaggcctctccgaccccggcaaaatcaaacgcctacgagcacaagtccaagtctctctcgaagactacatcaacgaccgccaatacgactcacgtggccgcttcggcgaactcctcctcctcctacccacccttcaatcaatcacatggcaaatgatcgaacaaatacaattcataaaactattcggcatggccaaaatcgacaacctcctccaagaaatgctactcggcggtgccccgtccgacgcaccccacgcccaccaccccctccatccacacctcatgcaggaacacatgggaaccaacgtcatcgtcgccaacaccatgcccactcacctcagcaacggacaaatgtgcgaatggccaagaccgcgaggacaagccgccgcccccgaagccccacaacctgcacccccaggaggctccggatcagaaccttaccgcctcctccccggcgccgtcgccacaatcgtacgcccactcgaagccatcccccaaccaaccatcacccgccaagaagtcatctaaggactagtccctgttcccagagcccacttttttttctttttttgaaataaaatagcctgtctttcagatctcaaaggctcttttcagagccaccaaaaaaaaaaaaaaaaaaaaaaaaaaaaaaaaaaaaaaaaaaaaaaaaaaaaaaaaaaaaaaaaaaaaaaaaaaaaaaaaaaaaaaaaaaaaaaaaaaaaa

SEQ ID NO: 3246 - RNA, 1697 nt, synthetic construct
  misc_feature 1..1697: note = mRNA a-1 (hSL-A100) (opt11) from Homo sapiens__NP_000448.3__HNF4A(1-474)(S87A_K106R_K108R_K126R_K 127R_S142A_S143A_S148A_T166A_S167A_K179R_K180R_K234R_K300R_ K307R_K309R_S313A_S378A_T429A_T432A_S436A_K447R_K458R_S461E _K470R)
  source 1..1697: mol_type = other RNA
aggagagtcccgcagtcggcgtccagcggctctgcttgttcgtgtgtgtgtcgttgcaggccttattcaagcttaccatgcgcctttccaaaaccctagtcgacatggacatggccgactactccgcagccctagacccagcgtacaccaccctcgagttcgaaaacgtccaagtactcacaatgggcaacgacacctccccctcggaaggcaccaacctcaacgcccctaactcactcggcgtttccgctctctgcgccatctgcggagaccgagcgacaggaaaacactacggagcctcctcatgcgatggctgcaaaggcttcttccgccgcgcagtacgcaaaaaccacatgtactcatgcagattctcaagacaatgcgtcgtcgaccgcgaccgacgcaaccaatgccgatactgccgcctcaagaaatgcttccgcgccggcatgcgccgagaagcagtccaaaacgaacgcgacagaataagtactcgccgagccgcatacgaagacagcgccctaccatccatcaacgcactcctccaagccgaagtcctatcacgacaaatcgcagctcccgtttccggcatcaacggcgatatccgcgcaagacgaatagcaagcattgcagacgtctgcgaatcaatgaaagaacaactcctcgtcctcgtcgaatgggccaaatacatccccgcattctgcgaactccccctcgacgaccaagtcgccctactaagagcccacgccggcgaacacctcctcctaggcgctacccgacgctccatggtattcaaagacgtcctactcctaggtaacgactacatcgtaccccgccactgccccgaactcgcagaaatgagcagagtttcaatccgcatcctagacgagctagttctccccttccaagaacttcaaatcgacgataacgaatacgcctacctaaaagccatcatcttcttcgacccagacgcccgaggcctctccgacccaggacgaataagaagactacgcgcccaagtacaagtttccctcgaagattacatcaacgacagacagtacgactccagaggccgattcggtgaactcctcctgctactccccaccctccaaagcataacatggcaaatgatcgaacaaatccaattcatcaaactcttcggcatggccaaaatcgacaacctcctacaagaaatgctactgggcggtgcaccctccgacgccccacacgctcaccaccccctccacccccatcttatgcaagaacacatgggaaccaatgtcatcgtcgcaaacacaatgcccacccacctaagcaacggccaaatgtgcgaatggcccagaccacgcggccaagcagccgcccccgaagccccacaaccagcccctcccggaggatcaggatctgaaccctaccgactactccccggagccgtcgccaccatcgtccgccccctcgaagcaataccacaaccgaccataacgcgccaagaagtcatctaaggactagtccctgttcccagagcccacttttttttctttttttgaaataaaatagcctgtctttcagatctcaaaggctcttttcagagccaccaaaaaaaaaaaaaaaaaaaaaaaaaaaaaaaaaaaaaaaaaaaaaaaaaaaaaaaaaaaaaaaaaaaaaaaaaaaaaaaaaaaaaaaaaaaaaaaaaaaaa

SEQ ID NO: 3247 - RNA, 1697 nt, synthetic construct
  misc_feature 1..1697: note = mRNA a-1 (hSL-A100) (opt11) from Homo sapiens__NP_000448.3__HNF4A(1-474)(S87A_S95A_S99A_K106R_K10 8R_K126R_K127R_S142A_S143A_S148A_T166A_S167A_S313A_S378A_T4 29A_T432A_S436A_K458R_S461E)
  source 1..1697: mol_type = other RNA
aggagagtcccgcagtcggcgtccagcggctctgcttgttcgtgtgtgtgtcgttgcaggccttattcaagcttaccatgagactaagcaaaaccctcgtcgacatggacatggccgactacagcgccgccctcgaccccgcatacaccaccctcgaatttgaaaacgtacaagtcctcaccatgggtaacgatacctccccatccgaaggaaccaacctcaacgccccaaactcactaggcgtctccgccctctgcgccatctgcggcgaccgcgccaccggcaaacactacggcgcctcttcctgtgacggatgcaaaggctttttccggcgcgcagtccgcaaaaaccacatgtacgcctgccgtttcgcccgacagtgcgtagtcgaccgcgaccgtcgaaaccaatgcagatactgccgactaaagaaatgcttccgcgccggcatgcgcagagaagcagtacaaaacgaacgagaccgcatctcaacccgccgtgcggcatatgaagactcggccctaccatccatcaacgccctgctccaagccgaagtattatcccgccaaatcgcagcccccgttagtggaatcaacggcgacatccgagccaagaaaatcgcctccatagccgacgtctgcgagagcatgaaagaacaactcctcgtactcgtagaatgggcaaaatacatacccgccttctgcgaactccccctagacgaccaagtagccctactccgagcccacgccggtgaacatctactcctcggagccaccaaaagatccatggtattcaaagacgtcctcctcctaggcaacgactacatcgtcccccgccactgccccgaactcgccgaaatgtcccgcgtctcaatccgcatactggacgagctcgtactccccttccaagaactacaaatcgacgacaacgaatacgcttacctaaaagcaatcatcttcttcgacccagacgcgaaaggcctatcagatcccggcaaaatcaaacgcctacgcgcacaagtacaagtatcccttgaagactacataaacgaccgacaatacgacagccggggccgtttcggagaacttctcctcctcctacccacactccaatccattacctggcaaatgatagaacaaatccaattcatcaaactcttcggaatggccaagatcgacaacctcctccaagaaatgctactcggaggcgcccccagtgacgctccccacgcccatcaccccctccacccccacctaatgcaagaacacatgggcaccaacgtcatagtcgccaacaccatgccaacccacctctcaaacggccaaatgtgcgaatggcctcgccccagaggccaagcggccgcccccgaagccccacaacccgccccacccggcggctccggatcagaaccatacaaactcctacccggcgccgtagccactatcgtacgaccactcgaagccatcccacaacccacaatcaccaaacaagaagtcatctaaggactagtccctgttcccagagcccacttttttttctttttttgaaataaaatagcctgtctttcagatctcaaaggctcttttcagagccaccaaaaaaaaaaaaaaaaaaaaaaaaaaaaaaaaaaaaaaaaaaaaaaaaaaaaaaaaaaaaaaaaaaaaaaaaaaaaaaaaaaaaaaaaaaaaaaaaaaaaa

SEQ ID NO: 3248 - RNA, 1697 nt, synthetic construct
  misc_feature 1..1697: note = mRNA a-1 (hSL-A100) (opt11) from Homo sapiens__NP_000448.3__HNF4A(1-474)(S87A_K106R_K108R_K126R_K 127R_S138A_T139A_S142A_S143A_S148A_T166A_S167A_S313A_S378A_ T429A_T432A_S436A_K458R_S461E)
  source 1..1697: mol_type = other RNA
aggagagtcccgcagtcggcgtccagcggctctgcttgttcgtgtgtgtgtcgttgcaggccttattcaagcttaccatgcgcctctccaaaaccctagtagatatggacatggcagactatagcgcagcactcgaccccgcctacactacccttgaattcgaaaacgtccaagtcctcacaatgggaaacgacacctctccttccgaaggcaccaacctcaacgccccaaactccctcggcgtctccgccttgtgcgccatctgcggcgaccgagccacaggaaaacactacggagcctcctcctgcgatggctgcaaaggcttcttccgccgcgcagtaagaaaaaaccacatgtactcatgccgcttctcccgccagtgcgtcgtagaccgcgaccgccgcaaccaatgccgctactgccgcctcaaaaaatgcttccgagccggaatgcgaagagaagccgtccaaaacgaacgcgaccgcatcgccgcccgacgggccgcatacgaggatagcgccctcccaagcatcaatgctcttctccaagccgaggtcctttcccgtcaaatcgcagcccccgtatccggaatcaacggagacatacgcgccaaaaaaatcgcaagcatcgccgacgtctgcgaaagcatgaaagaacaactcctcgtactcgtcgaatgggccaaatacataccagccttctgcgaactacccctcgacgatcaagtagccctcctacgagcccacgccggagaacacctcctacttggcgccacaaaacgaagcatggttttcaaggacgtcctcctcctcggcaacgactacatagtaccccgccactgccccgaactagcagaaatgtcccgggtatcgatccgcatactagacgaactagtcctcccctttcaagaactccaaatcgatgacaacgaatacgcttacctgaaagcaataatcttcttcgaccctgacgccaaaggcctctccgacccaggaaaaataaaacgcctccgcgcccaagtacaagtctccctagaagactacataaacgaccgacaatacgactcccgaggacgattcggcgaactactattattactacctacactacaatccatcacctggcaaatgatcgaacaaatccaattcatcaaactattcggcatggccaaaatcgacaacctactccaagaaatgctcctaggcggcgcccccagcgacgccccacacgcccaccaccccctccacccccacctaatgcaagaacacatgggcacaaacgtcatagtagccaacaccatgcccacccacctcagcaacggccaaatgtgcgagtggccccgaccacgcggccaagccgcagcccctgaagccccccaacctgccccccccggcggctccggctccgaaccatacaaactactccccggggccgtcgccacaatcgtcagacccctcgaagcaatcccccaacctacaatcaccaaacaagaagtaatttaaggactagtccctgttcccagagcccacttttttttctttttttgaaataaaatagcctgtctttcagatctcaaaggctcttttcagagccaccaaaaaaaaaaaaaaaaaaaaaaaaaaaaaaaaaaaaaaaaaaaaaaaaaaaaaaaaaaaaaaaaaaaaaaaaaaaaaaaaaaaaaaaaaaaaaaaaaaaaa

SEQ ID NO: 3249 - RNA, 1697 nt, synthetic construct
  misc_feature 1..1697: note = mRNA a-1 (hSL-A100) (opt11) from Homo sapiens__NP_000448.3__HNF4A(1-474)(S87A_S95A_S99A_K106R_K10 8R_K126R_K127R_S138A_T139A_S142A_S143A_S148A_T166A_S167A_S3 13A_S378A_T429A_T432A_S436A_K458R_S461E)
  source 1..1697: mol_type = other RNA
aggagagtcccgcagtcggcgtccagcggctctgcttgttcgtgtgtgtgtcgttgcaggccttattcaagcttaccatgcgactaagcaaaaccctagtcgacatggacatggcagactatagcgccgcactcgacccagcctacacaacgctcgagttcgaaaacgttcaagtccttaccatgggcaacgacacctcccccagcgaaggcaccaacctaaacgcccctaactcactcggagtgtccgcactatgcgcaatctgcggggaccgcgccaccggcaaacactacggcgcctccagctgcgacggctgcaaaggcttcttccgccgagccgtccgcaagaaccacatgtacgcctgccgcttcgctcgccaatgcgtcgtagaccgagaccgcagaaaccaatgcagatactgcagactcaagaaatgcttccgcgccggcatgcgacgcgaagccgtacaaaacgaacgcgaccgcatcgccgctcgtcgagcagcctatgaagactcagcccttccctcaataaacgcactactccaagccgaagtcctcagccgacaaatcgccgccccagtctcaggcatcaacggcgacatccgcgccaagaaaatagcctccatcgcggacgtctgcgagtccatgaaagaacaactcctagttctggtcgaatgggctaaatacatccccgcattctgcgaactcccactcgacgaccaagtagccctactccgagcccacgcaggagaacacctactcctaggagccacaaaacgttccatggtatttaaagacgtcctcctactaggcaacgactacatcgtcccccgccactgccccgaactcgccgaaatgtcccgcgtctccatccgcatcctagacgagctcgtactcccattccaagaactccaaatagacgacaacgaatacgcctacctaaaagccatcatcttcttcgatccagacgcaaaaggcctctcagacccaggcaaaatcaaaagacttagagcccaagtccaagtatcactcgaagactacatcaacgaccgacaatacgactcccgcggaaggttcggcgaactcctcctcctcctccccacactacaatccatcacctggcaaatgatagaacaaattcaattcataaaactattcggcatggccaagatagacaacctcctccaagaaatgctcctcggcggagccccctccgacgcaccccacgcccaccaccccctacacccccacctgatgcaagaacacatgggaacaaacgtaatcgtagccaacaccatgccgacacatctctctaacggccaaatgtgcgaatggccacgcccacgcggccaagccgcagcccccgaagcaccacaaccagccccacccggaggctccggatccgaaccctacaagttgctccccggcgccgtagccacaatcgtccgccccctagaggccataccacaacccacaatcacaaaacaagaagtcatataaggactagtccctgttcccagagcccacttttttttctttttttgaaataaaatagcctgtctttcagatctcaaaggctcttttcagagccaccaaaaaaaaaaaaaaaaaaaaaaaaaaaaaaaaaaaaaaaaaaaaaaaaaaaaaaaaaaaaaaaaaaaaaaaaaaaaaaaaaaaaaaaaaaaaaaaaaaaaa

SEQ ID NO: 3250 - RNA, 1697 nt, synthetic construct
  misc_feature 1..1697: note = mRNA a-1 (hSL-A100) (opt28) from Homo sapiens__NP_000448.3__HNF4A(1-474) R9828
  source 1..1697: mol_type = other RNA
aggagagtcccgcagtcggcgtccagcggctctgcttgttcgtgtgtgtgtcgttgcaggccttattcaagcttaccatgcggctgagcaagaccctggtggacatggatatggcagactactccgccgctctggatccagcatatacaactctggagttcgaaaacgtccaggtgctgaccatgggaaatgacacatctcccagtgagggcactaacctgaatgcccctaactcactgggggtgagcgctctgtgcgcaatctgcggagacagggccaccggcaaacactacggggcttcctcttgtgatggatgcaagggctttttcagacgcagcgtccggaaaaatcatatgtacagttgccgattttcaaggcagtgcgtggtggacaaggacaagagaaaccagtgccgctattgtcggctgaaaaagtgcttcagggcaggaatgaaaaaggaagccgtccagaatgagagagatcgaatttccacacggcgcagctcttacgaagacagctccctgccaagtatcaacgctctgctgcaggcagaggtgctgtcaaggcagatcactagccccgtgtctgggattaacggcgatatcagagccaagaaaattgcttccatcgcagacgtctgcgaaagcatgaaggagcagctgctggtgctggtggagtgggccaaatacatccctgcattttgcgaactgccactggacgatcaggtcgctctgctgcgggcccacgcaggagagcatctgctgctgggcgctaccaagcgaagtatggtgttcaaggacgtgctgctgctggggaatgactatattgtccccaggcactgccctgaactggccgagatgtcaagagtgtctatccgcatcctggatgaactggtgctgccattccaggagctgcagattgacgataacgaatacgcatacctgaaagctatcatctttttcgaccccgacgccaagggactgtccgatcctggcaaaattaagcggctgaggagccaggtccaggtgagtctggaggactatatcaatgacagacagtacgatagccgagggcggtttggagaactgctgctgctgctgccaacactgcagtccattacctggcagatgatcgagcagatccagttcattaaactgttcggcatggcaaagatcgacaacctgctgcaggagatgctgctgggagggtcaccctctgatgcccctcatgctcaccacccactgcatccccacctgatgcaggaacatatgggcactaatgtgatcgtcgcaaacacaatgcctacccacctgagcaatggacagatgtgtgagtggccacgccccaggggccaggccgcaactcctgaaaccccacagccctcccctccagggggatctggcagcgagccctacaagctgctgcctggagctgtggccacaattgtgaaaccactgagtgcaatcccccagcctaccattactaagcaggaagtcatctgaggactagtccctgttcccagagcccacttttttttctttttttgaaataaaatagcctgtctttcagatctcaaaggctcttttcagagccaccaaaaaaaaaaaaaaaaaaaaaaaaaaaaaaaaaaaaaaaaaaaaaaaaaaaaaaaaaaaaaaaaaaaaaaaaaaaaaaaaaaaaaaaaaaaaaaaaaaaaa

SEQ ID NO: 3251 - RNA, 1697 nt, synthetic construct
  misc_feature 1..1697: note = mRNA a-1 (hSL-A100) (opt28) from Homo sapiens__NP_000448.3__HNF4A(1-474)(S313A)
  source 1..1697: mol_type = other RNA
aggagagtcccgcagtcggcgtccagcggctctgcttgttcgtgtgtgtgtcgttgcaggccttattcaagcttaccatgcggctgagcaagaccctggtggacatggatatggcagactactccgccgctctggatccagcatatacaactctggagttcgaaaacgtccaggtgctgaccatgggaaatgacacatctccctcagagggcactaacctgaatgcccctaacagtctgggggtgagcgctctgtgcgcaatctgcggagacagggccaccggcaaacactacggggcttcctcttgtgatggatgcaagggctttttcagacgcagcgtccggaaaaatcatatgtactcatgccgatttagtaggcagtgcgtggtggacaaggacaagagaaaccagtgccgctattgtcggctgaaaaagtgcttcagggcaggaatgaaaaaggaagccgtccagaatgagagagatcgaatttccacacggcgcagctcttacgaagacagctccctgccatcaatcaacgctctgctgcaggcagaggtgctgagtaggcagatcactagccccgtgtctgggattaacggcgatatcagagccaagaaaattgcatccatcgctgacgtctgcgaaagcatgaaggagcagctgctggtgctggtggagtgggccaaatacatccctgcattttgcgaactgccactggacgatcaggtcgctctgctgcgggcccacgcaggagagcatctgctgctgggcgctaccaagcgatcaatggtgttcaaggacgtgctgctgctggggaatgactatattgtccccaggcactgccctgaactggccgagatgagtagagtgtctatccgcatcctggatgaactggtgctgccattccaggagctgcagattgacgataacgaatacgcatacctgaaagctatcatctttttcgaccccgacgccaagggactgtccgatcctggcaaaattaagcggctgagggcacaggtccaggtgagcctggaggactatatcaatgacagacagtacgatagccgagggcggtttggagaactgctgctgctgctgccaacactgcagtccattacctggcagatgatcgagcagatccagttcattaaactgttcggcatggccaagatcgacaacctgctgcaggagatgctgctgggagggtcaccctctgatgctcctcatgcacaccacccactgcatccccacctgatgcaggaacatatgggcactaatgtgatcgtcgccaacacaatgcctacccacctgagtaatggacagatgtgtgagtggccacgccccaggggccaggcagctactcctgaaaccccacagcccagccctccagggggatccggctctgagccctacaagctgctgcctggagcagtggccacaattgtgaaaccactgagcgctatcccccagcctaccattactaagcaggaagtcatctgaggactagtccctgttcccagagcccacttttttttctttttttgaaataaaatagcctgtctttcagatctcaaaggctcttttcagagccaccaaaaaaaaaaaaaaaaaaaaaaaaaaaaaaaaaaaaaaaaaaaaaaaaaaaaaaaaaaaaaaaaaaaaaaaaaaaaaaaaaaaaaaaaaaaaaaaaaaaaa

SEQ ID NO: 3252 - RNA, 1697 nt, synthetic construct
  misc_feature 1..1697: note = mRNA a-1 (hSL-A100) (opt28) from Homo sapiens__NP_000448.3__HNF4A(1-474)(S313E)
  source 1..1697: mol_type = other RNA
aggagagtcccgcagtcggcgtccagcggctctgcttgttcgtgtgtgtgtcgttgcaggccttattcaagcttaccatgcggctgagcaagaccctggtggacatggatatggcagactactccgccgctctggatccagcatatacaactctggagttcgaaaacgtccaggtgctgaccatgggaaatgacacatctccctcagagggcactaacctgaatgcccctaacagtctgggggtgagcgctctgtgcgcaatctgcggagacagggccaccggcaaacactacggggcttcctcttgtgatggatgcaagggctttttcagacgcagcgtccggaaaaatcatatgtactcatgccgatttagtaggcagtgcgtggtggacaaggacaagagaaaccagtgccgctattgtcggctgaaaaagtgcttcagggcaggaatgaaaaaggaagccgtccagaatgagagagatcgaatttccacacggcgcagctcttacgaagacagctccctgccatcaatcaacgctctgctgcaggcagaggtgctgagtaggcagatcactagccccgtgtctgggattaacggcgatatcagagccaagaaaattgcatccatcgctgacgtctgcgaaagcatgaaggagcagctgctggtgctggtggagtgggccaaatacatccctgcattttgcgaactgccactggacgatcaggtcgctctgctgcgggcccacgcaggagagcatctgctgctgggcgctaccaagcgatcaatggtgttcaaggacgtgctgctgctggggaatgactatattgtccccaggcactgccctgaactggccgagatgagtagagtgtctatccgcatcctggatgaactggtgctgccattccaggagctgcagattgacgataacgaatacgcatacctgaaagctatcatctttttcgaccccgacgccaagggactgtccgatcctggcaaaattaagcggctgagggagcaggtccaggtgagcctggaagactatatcaatgacagacagtacgatagccgagggcggtttggagagctgctgctgctgctgccaacactgcagtccattacctggcagatgatcgagcagatccagttcattaaactgttcggcatggcaaagatcgacaacctgctgcaggaaatgctgctgggagggtcaccctctgatgcccctcatgctcaccacccactgcatccccacctgatgcaggagcatatgggcactaatgtgatcgtcgcaaacacaatgcctacccacctgagtaatggacagatgtgtgaatggccacgccccaggggccaggccgcaactcctgagaccccacagcccagccctccagggggatccggctctgaaccctacaagctgctgcctggagctgtggcaacaattgtgaaaccactgagcgccatcccccagcctaccattactaagcaggaggtcatctgaggactagtccctgttcccagagcccacttttttttctttttttgaaataaaatagcctgtctttcagatctcaaaggctcttttcagagccaccaaaaaaaaaaaaaaaaaaaaaaaaaaaaaaaaaaaaaaaaaaaaaaaaaaaaaaaaaaaaaaaaaaaaaaaaaaaaaaaaaaaaaaaaaaaaaaaaaaaaa

SEQ ID NO: 3253 - RNA, 1697 nt, synthetic construct
  misc_feature 1..1697: note = mRNA a-1 (hSL-A100) (opt28) from Homo sapiens__NP_000448.3__HNF4A(1-474)(S142A_S143A)
  source 1..1697: mol_type = other RNA
aggagagtcccgcagtcggcgtccagcggctctgcttgttcgtgtgtgtgtcgttgcaggccttattcaagcttaccatgcggctgagcaagaccctggtggacatggatatggcagactactccgccgctctggatccagcatatacaactctggagttcgaaaacgtccaggtgctgaccatgggaaatgacacatctccctcagagggcactaacctgaatgcccctaacagtctgggggtgagcgctctgtgcgcaatctgcggagacagggccaccggcaaacactacggggcttcctcttgtgatggatgcaagggctttttcagacgcagcgtccggaaaaatcatatgtactcatgccgatttagtaggcagtgcgtggtggacaaggacaagagaaaccagtgccgctattgtcggctgaaaaagtgcttcagggcaggaatgaaaaaggaagccgtccagaatgagagagatcgaatttccacacggcgcgctgcatacgaagacagctctctgccaagcatcaacgccctgctgcaggcagaggtgctgtccaggcagatcacttcacccgtgagtgggattaacggcgatatcagagctaagaaaattgccagcatcgcagacgtctgcgaatctatgaaggagcagctgctggtgctggtggagtgggctaaatacatccctgccttttgcgaactgccactggacgatcaggtcgcactgctgcgggctcacgccggagagcatctgctgctgggcgcaaccaagcgatccatggtgttcaaggacgtgctgctgctggggaatgactatattgtccccaggcactgccctgaactggctgagatgagcagagtgtcaatccgcatcctggatgaactggtgctgccattccaggagctgcagattgacgataacgaatacgcctacctgaaagcaatcatctttttcgaccccgacgccaagggactgagtgatcctggcaaaattaagcggctgaggtctcaggtccaggtgtccctggaggactatatcaatgacagacagtacgatagccgagggcggtttggagaactgctgctgctgctgccaacactgcagagcattacctggcagatgatcgagcagatccagttcattaaactgttcggcatggctaagatcgacaacctgctgcaggagatgctgctgggagggtccccctcagatgcacctcatgcccaccacccactgcatccccacctgatgcaggaacatatgggcactaatgtgatcgtcgcaaacacaatgcctacccacctgtctaatggacagatgtgtgagtggccacgccccaggggccaggctgcaactcctgaaaccccacagcccagtcctccagggggaagcggctccgagccctacaagctgctgcctggagccgtggctacaattgtgaaaccactgtctgcaatcccccagcctaccattactaagcaggaagtcatctgaggactagtccctgttcccagagcccacttttttttctttttttgaaataaaatagcctgtctttcagatctcaaaggctcttttcagagccaccaaaaaaaaaaaaaaaaaaaaaaaaaaaaaaaaaaaaaaaaaaaaaaaaaaaaaaaaaaaaaaaaaaaaaaaaaaaaaaaaaaaaaaaaaaaaaaaaaaaaa

SEQ ID NO: 3254 - RNA, 1697 nt, synthetic construct
  misc_feature 1..1697: note = mRNA a-1 (hSL-A100) (opt28) from Homo sapiens__NP_000448.3__HNF4A(1-474)(S142E_S143E)
  source 1..1697: mol_type = other RNA
aggagagtcccgcagtcggcgtccagcggctctgcttgttcgtgtgtgtgtcgttgcaggccttattcaagcttaccatgcggctgagcaagaccctggtggacatggatatggcagactactccgccgctctggatccagcatatacaactctggagttcgaaaacgtccaggtgctgaccatgggaaatgacacatctccctcagagggcactaacctgaatgcccctaacagtctgggggtgagcgctctgtgcgcaatctgcggagacagggccaccggcaaacactacggggcttcctcttgtgatggatgcaagggctttttcagacgcagcgtccggaaaaatcatatgtactcatgccgatttagtaggcagtgcgtggtggacaaggacaagagaaaccagtgccgctattgtcggctgaaaaagtgcttcagggcaggaatgaaaaaggaagccgtccagaatgagagagatcgaatttccacacggcgcgaagagtacgaagacagctctctgccaagcatcaacgctctgctgcaggcagaggtgctgtccaggcagatcacttcacccgtgagtgggattaacggcgatatcagagccaagaaaattgcaagcatcgctgacgtctgcgagtctatgaaggaacagctgctggtgctggtggagtgggccaaatacatccctgcattttgcgaactgccactggacgatcaggtcgctctgctgcgggcccacgcaggagagcatctgctgctgggcgctaccaagcgatccatggtgttcaaggacgtgctgctgctggggaatgactatattgtccccaggcactgccctgaactggccgagatgagcagagtgtcaatccgcatcctggatgaactggtgctgccattccaggagctgcagattgacgataacgaatacgcatacctgaaagctatcatctttttcgaccccgacgccaagggactgagtgatcctggcaaaattaagcggctgaggtctcaggtccaggtgtccctggaggactatatcaatgacagacagtacgatagccgagggcggtttggagagctgctgctgctgctgccaacactgcagagcattacctggcagatgatcgaacagatccagttcattaaactgttcggcatggcaaagatcgacaacctgctgcaggagatgctgctgggagggtccccctcagatgcccctcatgctcaccacccactgcatccccacctgatgcaggaacatatgggcactaatgtgatcgtcgcaaacacaatgcctacccacctgtctaatggacagatgtgtgagtggccacgccccaggggccaggccgcaactcctgaaaccccacagcccagtcctccagggggaagcggctccgagccctacaagctgctgcctggagctgtggcaacaattgtgaaaccactgtctgccatcccccagcctaccattactaagcaggaagtcatctgaggactagtccctgttcccagagcccacttttttttctttttttgaaataaaatagcctgtctttcagatctcaaaggctcttttcagagccaccaaaaaaaaaaaaaaaaaaaaaaaaaaaaaaaaaaaaaaaaaaaaaaaaaaaaaaaaaaaaaaaaaaaaaaaaaaaaaaaaaaaaaaaaaaaaaaaaaaaaa

SEQ ID NO: 3255 - RNA, 1697 nt, synthetic construct
  misc_feature 1..1697: note = mRNA a-1 (hSL-A100) (opt28) from Homo sapiens__NP_000448.3__HNF4A(1-474)(S143A)
  source 1..1697: mol_type = other RNA
aggagagtcccgcagtcggcgtccagcggctctgcttgttcgtgtgtgtgtcgttgcaggccttattcaagcttaccatgcggctgagcaagaccctggtggacatggatatggcagactactccgccgctctggatccagcatatacaactctggagttcgaaaacgtccaggtgctgaccatgggaaatgacacatctccctcagagggcactaacctgaatgcccctaacagtctgggggtgagcgctctgtgcgcaatctgcggagacagggccaccggcaaacactacggggcttcctcttgtgatggatgcaagggctttttcagacgcagcgtccggaaaaatcatatgtactcatgccgatttagtaggcagtgcgtggtggacaaggacaagagaaaccagtgccgctattgtcggctgaaaaagtgcttcagggcaggaatgaaaaaggaagccgtccagaatgagagagatcgaatttccacacggcgcagcgcttacgaagactctagcctgccatccatcaacgcactgctgcaggccgaggtgctgtcaaggcagatcaccagtcccgtgagcgggattaacggcgatatcagagcaaagaaaattgcttctatcgccgacgtctgcgaatccatgaaggagcagctgctggtgctggtggagtgggcaaaatacatccctgctttttgcgaactgccactggacgatcaggtcgccctgctgcgggcacacgctggagagcatctgctgctgggcgccactaagcgaagcatggtgttcaaggacgtgctgctgctggggaatgactatattgtccccaggcactgccctgaactggcagagatgtcaagagtgagtatccgcatcctggatgaactggtgctgccattccaggagctgcagattgacgataacgaatacgcttacctgaaagccatcatctttttcgaccccgacgcaaagggactgtctgatcctggcaaaattaagcggctgaggtcccaggtccaggtgagcctggaggactatatcaatgacagacagtacgatagccgagggcggtttggagaactgctgctgctgctgccaacactgcagtccattacctggcagatgatcgagcagatccagttcattaaactgttcggcatggccaagatcgacaacctgctgcaggagatgctgctgggagggtcaccctctgatgctcctcatgcacaccacccactgcatccccacctgatgcaggaacatatgggcactaatgtgatcgtcgccaacacaatgcctacccacctgagtaatggacagatgtgtgagtggccacgccccaggggccaggcagctactcctgaaaccccacagcccagccctccagggggatccggctctgagccctacaagctgctgcctggagcagtggccacaattgtgaaaccactgagcgctatcccccagcctaccattactaagcaggaagtcatctgaggactagtccctgttcccagagcccacttttttttctttttttgaaataaaatagcctgtctttcagatctcaaaggctcttttcagagccaccaaaaaaaaaaaaaaaaaaaaaaaaaaaaaaaaaaaaaaaaaaaaaaaaaaaaaaaaaaaaaaaaaaaaaaaaaaaaaaaaaaaaaaaaaaaaaaaaaaaaa

SEQ ID NO: 3256 - RNA, 1697 nt, synthetic construct
  misc_feature 1..1697: note = mRNA a-1 (hSL-A100) (opt28) from Homo sapiens__NP_000448.3__HNF4A(1-474)(T166A)
  source 1..1697: mol_type = other RNA
aggagagtcccgcagtcggcgtccagcggctctgcttgttcgtgtgtgtgtcgttgcaggccttattcaagcttaccatgcggctgagcaagaccctggtggacatggatatggcagactactccgccgctctggatccagcatatacaactctggagttcgaaaacgtccaggtgctgaccatgggaaatgacacatctccctcagagggcactaacctgaatgcccctaacagtctgggggtgagcgctctgtgcgcaatctgcggagacagggccaccggcaaacactacggggcttcctcttgtgatggatgcaagggctttttcagacgcagcgtccggaaaaatcatatgtactcatgccgatttagtaggcagtgcgtggtggacaaggacaagagaaaccagtgccgctattgtcggctgaaaaagtgcttcagggcaggaatgaaaaaggaagccgtccagaatgagagagatcgaatttccacacggcgcagctcttacgaagacagctccctgccatcaatcaacgctctgctgcaggcagaggtgctgagtaggcagatcgccagccccgtgtctgggattaacggcgatatcagagcaaagaaaattgcttccatcgccgacgtctgcgaaagcatgaaggagcagctgctggtgctggtggagtgggcaaaatacatccctgctttttgcgaactgccactggacgatcaggtcgccctgctgcgggcacacgctggagagcatctgctgctgggcgccactaagcgatcaatggtgttcaaggacgtgctgctgctggggaatgactatattgtccccaggcactgccctgaactggcagagatgagtagagtgtctatccgcatcctggatgaactggtgctgccattccaggagctgcagattgacgataacgaatacgcttacctgaaagccatcatctttttcgaccccgacgcaaagggactgtccgatcctggcaaaattaagcggctgaggagccaggtccaggtgagcctggaggactatatcaatgacagacagtacgattcccgagggcggtttggagaactgctgctgctgctgccaaccctgcagtcaattacatggcagatgatcgagcagatccagttcattaaactgttcggcatggccaagatcgacaacctgctgcaggagatgctgctgggagggtctcccagtgatgctcctcatgcacaccacccactgcatccccacctgatgcaggaacatatgggcaccaatgtgatcgtcgccaacactatgcctacacacctgagcaatggacagatgtgtgagtggccacgccccaggggccaggcagctacccctgaaactccacagccctcccctccagggggatctggcagcgagccctacaagctgctgcctggagcagtggccaccattgtgaaaccactgtcagctatcccccagcctacaattaccaagcaggaagtcatctgaggactagtccctgttcccagagcccacttttttttctttttttgaaataaaatagcctgtctttcagatctcaaaggctcttttcagagccaccaaaaaaaaaaaaaaaaaaaaaaaaaaaaaaaaaaaaaaaaaaaaaaaaaaaaaaaaaaaaaaaaaaaaaaaaaaaaaaaaaaaaaaaaaaaaaaaaaaaaa

SEQ ID NO: 3257 - RNA, 1697 nt, synthetic construct
  misc_feature 1..1697: note = mRNA a-1 (hSL-A100) (opt28) from Homo sapiens__NP_000448.3__HNF4A(1-474)(S167E)
  source 1..1697: mol_type = other RNA
aggagagtcccgcagtcggcgtccagcggctctgcttgttcgtgtgtgtgtcgttgcaggccttattcaagcttaccatgcggctgagcaagaccctggtggacatggatatggcagactactccgccgctctggatccagcatatacaactctggagttcgaaaacgtccaggtgctgaccatgggaaatgacacatctccctcagagggcactaacctgaatgcccctaacagtctgggggtgagcgctctgtgcgcaatctgcggagacagggccaccggcaaacactacggggcttcctcttgtgatggatgcaagggctttttcagacgcagcgtccggaaaaatcatatgtactcatgccgatttagtaggcagtgcgtggtggacaaggacaagagaaaccagtgccgctattgtcggctgaaaaagtgcttcagggcaggaatgaaaaaggaagccgtccagaatgagagagatcgaatttccacacggcgcagctcttacgaagacagctccctgccatcaatcaacgctctgctgcaggcagaggtgctgagtaggcagatcactgaacccgtgagcgggattaacggcgatatcagagccaagaaaattgcatctatcgctgacgtctgcgagtccatgaaggagcagctgctggtgctggtggaatgggccaaatacatccctgcattttgcgagctgccactggacgatcaggtcgctctgctgcgggcccacgcaggagaacatctgctgctgggcgctaccaagcgaagcatggtgttcaaggacgtgctgctgctggggaatgactatattgtccccaggcactgccctgagctggccgaaatgtcaagagtgagtatccgcatcctggatgagctggtgctgccattccaggaactgcagattgacgataacgagtacgcatacctgaaagctatcatctttttcgaccccgacgccaagggactgtctgatcctggcaaaattaagcggctgaggtcccaggtccaggtgagcctggaagactatatcaatgacagacagtacgatagccgagggcggtttggagagctgctgctgctgctgccaacactgcagtccattacctggcagatgatcgagcagatccagttcattaaactgttcggcatggcaaagatcgacaacctgctgcaggaaatgctgctgggagggtcaccctctgatgcccctcatgctcaccacccactgcatccccacctgatgcaggagcatatgggcactaatgtgatcgtcgcaaacacaatgcctacccacctgagtaatggacagatgtgtgaatggccacgccccaggggccaggccgcaactcctgagaccccacagcccagccctccagggggatccggctctgaaccctacaagctgctgcctggagctgtggcaacaattgtgaaaccactgagcgccatcccccagcctaccattactaagcaggaggtcatctgaggactagtccctgttcccagagcccacttttttttctttttttgaaataaaatagcctgtctttcagatctcaaaggctcttttcagagccaccaaaaaaaaaaaaaaaaaaaaaaaaaaaaaaaaaaaaaaaaaaaaaaaaaaaaaaaaaaaaaaaaaaaaaaaaaaaaaaaaaaaaaaaaaaaaaaaaaaaaa

SEQ ID NO: 3258 - RNA, 1697 nt, synthetic construct
  misc_feature 1..1697: note = mRNA a-1 (hSL-A100) (opt28) from Homo sapiens__NP_000448.3__HNF4A(1-474)(S167A)
  source 1..1697: mol_type = other RNA
aggagagtcccgcagtcggcgtccagcggctctgcttgttcgtgtgtgtgtcgttgcaggccttattcaagcttaccatgcggctgagcaagaccctggtggacatggatatggcagactactccgccgctctggatccagcatatacaactctggagttcgaaaacgtccaggtgctgaccatgggaaatgacacatctccctcagagggcactaacctgaatgcccctaacagtctgggggtgagcgctctgtgcgcaatctgcggagacagggccaccggcaaacactacggggcttcctcttgtgatggatgcaagggctttttcagacgcagcgtccggaaaaatcatatgtactcatgccgatttagtaggcagtgcgtggtggacaaggacaagagaaaccagtgccgctattgtcggctgaaaaagtgcttcagggcaggaatgaaaaaggaagccgtccagaatgagagagatcgaatttccacacggcgcagctcttacgaagacagctccctgccatcaatcaacgctctgctgcaggcagaggtgctgagtaggcagatcactgcccccgtgagcgggattaacggcgatatcagagcaaagaaaattgcttctatcgccgacgtctgcgaatccatgaaggagcagctgctggtgctggtggagtgggcaaaatacatccctgctttttgcgaactgccactggacgatcaggtcgccctgctgcgggcacacgctggagagcatctgctgctgggcgccaccaagcgaagcatggtgttcaaggacgtgctgctgctggggaatgactatattgtccccaggcactgccctgaactggcagagatgtcaagagtgagtatccgcatcctggatgaactggtgctgccattccaggagctgcagattgacgataacgaatacgcttacctgaaagccatcatctttttcgaccccgacgcaaagggactgtctgatcctggcaaaattaagcggctgaggtcccaggtccaggtgagcctggaggactatatcaatgacagacagtacgatagccgagggcggtttggagaactgctgctgctgctgccaacactgcagtccattacctggcagatgatcgagcagatccagttcattaaactgttcggcatggccaagatcgacaacctgctgcaggagatgctgctgggagggtcaccctctgatgctcctcatgcacaccacccactgcatccccacctgatgcaggaacatatgggcactaatgtgatcgtcgccaacacaatgcctacccacctgagtaatggacagatgtgtgagtggccacgccccaggggccaggcagctactcctgaaaccccacagcccagccctccagggggatccggctctgagccctacaagctgctgcctggagcagtggccacaattgtgaaaccactgagcgctatcccccagcctaccattactaagcaggaagtcatctgaggactagtccctgttcccagagcccacttttttttctttttttgaaataaaatagcctgtctttcagatctcaaaggctcttttcagagccaccaaaaaaaaaaaaaaaaaaaaaaaaaaaaaaaaaaaaaaaaaaaaaaaaaaaaaaaaaaaaaaaaaaaaaaaaaaaaaaaaaaaaaaaaaaaaaaaaaaaaa

SEQ ID NO: 3259 - RNA, 1697 nt, synthetic construct
  misc_feature 1..1697: note = mRNA a-1 (hSL-A100) (opt28) from Homo sapiens__NP_000448.3__HNF4A(1-474)(S167A_S378A_T429A_T432A_ S436A)
  source 1..1697: mol_type = other RNA
aggagagtcccgcagtcggcgtccagcggctctgcttgttcgtgtgtgtgtcgttgcaggccttattcaagcttaccatgcggctgagcaagaccctggtggacatggatatggcagactactccgccgctctggatccagcatatacaactctggagttcgaaaacgtccaggtgctgaccatgggaaatgacacatctccctcagagggcactaacctgaatgcccctaacagtctgggggtgagcgctctgtgcgcaatctgcggagacagggccaccggcaaacactacggggcttcctcttgtgatggatgcaagggctttttcagacgcagcgtccggaaaaatcatatgtactcatgccgatttagtaggcagtgcgtggtggacaaggacaagagaaaccagtgccgctattgtcggctgaaaaagtgcttcagggcaggaatgaaaaaggaagccgtccagaatgagagagatcgaatttccacacggcgcagctcttacgaagacagctccctgccatcaatcaacgctctgctgcaggcagaggtgctgagtaggcagatcactgcccccgtgagcgggattaacggcgatatcagagcaaagaaaattgcttctatcgccgacgtctgcgaatccatgaaggagcagctgctggtgctggtggagtgggcaaaatacatccctgctttttgcgaactgccactggacgatcaggtcgccctgctgcgggcacacgctggagagcatctgctgctgggcgccaccaagcgaagcatggtgttcaaggacgtgctgctgctggggaatgactatattgtccccaggcactgccctgaactggcagagatgtcaagagtgagtatccgcatcctggatgaactggtgctgccattccaggagctgcagattgacgataacgaatacgcttacctgaaagccatcatctttttcgaccccgacgcaaagggactgtctgatcctggcaaaattaagcggctgaggtcccaggtccaggtgagcctggaggactatatcaatgacagacagtacgatagccgagggcggtttggagaactgctgctgctgctgccaacactgcagtccattacctggcagatgatcgagcagatccagttcattaaactgttcggcatggccaagatcgacaacctgctgcaggagatgctgctgggaggggctccctcagatgcacctcatgcccaccacccactgcatccccacctgatgcaggaacatatgggcactaatgtgatcgtcgcaaacacaatgcctacccacctgtctaatggacagatgtgtgagtggccacgccccaggggccaggctgcagcccctgaagctccacagcccgcacctccagggggaagtggcagcgagccctacaagctgctgcctggagccgtggctactattgtgaaaccactgtccgcaatcccccagcctaccattacaaagcaggaagtcatctgaggactagtccctgttcccagagcccacttttttttctttttttgaaataaaatagcctgtctttcagatctcaaaggctcttttcagagccaccaaaaaaaaaaaaaaaaaaaaaaaaaaaaaaaaaaaaaaaaaaaaaaaaaaaaaaaaaaaaaaaaaaaaaaaaaaaaaaaaaaaaaaaaaaaaaaaaaaaaa

SEQ ID NO: 3260 - RNA, 1697 nt, synthetic construct
  misc_feature 1..1697: note = mRNA a-1 (hSL-A100) (opt28) from Homo sapiens__NP_000448.3__HNF4A(1-474)(S167E_S378E_T429E_T432E_ S436E)
  source 1..1697: mol_type = other RNA
aggagagtcccgcagtcggcgtccagcggctctgcttgttcgtgtgtgtgtcgttgcaggccttattcaagcttaccatgcggctgagcaagaccctggtggacatggatatggcagactactccgccgctctggatccagcatatacaactctggagttcgaaaacgtccaggtgctgaccatgggaaatgacacatctccctcagagggcactaacctgaatgcccctaacagtctgggggtgagcgctctgtgcgcaatctgcggagacagggccaccggcaaacactacggggcttcctcttgtgatggatgcaagggctttttcagacgcagcgtccggaaaaatcatatgtactcatgccgatttagtaggcagtgcgtggtggacaaggacaagagaaaccagtgccgctattgtcggctgaaaaagtgcttcagggcaggaatgaaaaaggaagccgtccagaatgagagagatcgaatttccacacggcgcagctcttacgaagacagctccctgccatcaatcaacgctctgctgcaggcagaggtgctgagtaggcagatcactgaacccgtgagcgggattaacggcgatatcagagccaagaaaattgcatctatcgctgacgtctgcgagtccatgaaggagcagctgctggtgctggtggaatgggccaaatacatccctgcattttgcgagctgccactggacgatcaggtcgctctgctgcgggcccacgcaggagaacatctgctgctgggcgctaccaagcgaagcatggtgttcaaggacgtgctgctgctggggaatgactatattgtccccaggcactgccctgagctggccgaaatgtcaagagtgagtatccgcatcctggatgagctggtgctgccattccaggaactgcagattgacgataacgagtacgcatacctgaaagctatcatctttttcgaccccgacgccaagggactgtctgatcctggcaaaattaagcggctgaggtcccaggtccaggtgagcctggaagactatatcaatgacagacagtacgatagccgagggcggtttggagagctgctgctgctgctgccaacactgcagtccattacctggcagatgatcgagcagatccagttcattaaactgttcggcatggcaaagatcgacaacctgctgcaggaaatgctgctgggaggggagccctcagatgcccctcatgctcaccacccactgcatccccacctgatgcaggaacatatgggcactaatgtgatcgtcgcaaacacaatgcctacccacctgtctaatggacagatgtgtgagtggccacgccccaggggccaggccgcagaacctgaggaaccacagcccgagcctccagggggaagtggcagcgagccctacaagctgctgcctggagctgtggcaactattgtgaaaccactgtccgccatcccccagcctaccattacaaagcaggaagtcatctgaggactagtccctgttcccagagcccacttttttttctttttttgaaataaaatagcctgtctttcagatctcaaaggctcttttcagagccaccaaaaaaaaaaaaaaaaaaaaaaaaaaaaaaaaaaaaaaaaaaaaaaaaaaaaaaaaaaaaaaaaaaaaaaaaaaaaaaaaaaaaaaaaaaaaaaaaaaaaa

SEQ ID NO: 3261 - RNA, 1697 nt, synthetic construct
  misc_feature 1..1697: note = mRNA a-1 (hSL-A100) (opt28) from Homo sapiens__NP_000448.3__HNF4A(1-474)(S87A)
  source 1..1697: mol_type = other RNA
aggagagtcccgcagtcggcgtccagcggctctgcttgttcgtgtgtgtgtcgttgcaggccttattcaagcttaccatgcggctgagcaagaccctggtggacatggatatggcagactactccgccgctctggatccagcatatacaactctggagttcgaaaacgtccaggtgctgaccatgggaaatgacacatctccctcagagggcactaacctgaatgcccctaacagtctgggggtgagcgctctgtgcgcaatctgcggagacagggccaccggcaaacactacggggcttcctcttgtgatggatgcaagggctttttcagacgcgcagtccggaaaaatcatatgtacagctgccgattttcaaggcagtgcgtggtggacaaggacaagagaaaccagtgccgctattgtcggctgaaaaagtgcttcagggccggaatgaaaaaggaagctgtccagaatgagagagatcgaattagtacacggcgctccagctacgaagactctagcctgccatccatcaacgcactgctgcaggccgaggtgctgtcaaggcagatcaccagtcccgtgagcgggattaacggcgatatcagagcaaagaaaattgcttctatcgccgacgtctgcgaatccatgaaggagcagctgctggtgctggtggagtgggcaaaatacatccctgctttttgcgaactgccactggacgatcaggtcgccctgctgcgggcacacgctggagagcatctgctgctgggcgccactaagcgaagcatggtgttcaaggacgtgctgctgctggggaatgactatattgtccccaggcactgccctgaactggcagagatgtcaagagtgagtatccgcatcctggatgaactggtgctgccattccaggagctgcagattgacgataacgaatacgcttacctgaaagccatcatctttttcgaccccgacgcaaagggactgtctgatcctggcaaaattaagcggctgaggtcccaggtccaggtgagcctggaggactatatcaatgacagacagtacgatagccgagggcggtttggagaactgctgctgctgctgccaacactgcagtccattacctggcagatgatcgagcagatccagttcattaaactgttcggcatggccaagatcgacaacctgctgcaggagatgctgctgggagggtcaccctctgatgctcctcatgcacaccacccactgcatccccacctgatgcaggaacatatgggcactaatgtgatcgtcgccaacacaatgcctacccacctgagtaatggacagatgtgtgagtggccacgccccaggggccaggcagctactcctgaaaccccacagcccagccctccagggggatccggctctgagccctacaagctgctgcctggagcagtggccacaattgtgaaaccactgagcgctatcccccagcctaccattactaagcaggaagtcatctgaggactagtccctgttcccagagcccacttttttttctttttttgaaataaaatagcctgtctttcagatctcaaaggctcttttcagagccaccaaaaaaaaaaaaaaaaaaaaaaaaaaaaaaaaaaaaaaaaaaaaaaaaaaaaaaaaaaaaaaaaaaaaaaaaaaaaaaaaaaaaaaaaaaaaaaaaaaaaa

SEQ ID NO: 3262 - RNA, 1697 nt, synthetic construct
  misc_feature 1..1697: note = mRNA a-1 (hSL-A100) (opt28) from Homo sapiens__NP_000448.3__HNF4A(1-474)(S87E)
  source 1..1697: mol_type = other RNA
aggagagtcccgcagtcggcgtccagcggctctgcttgttcgtgtgtgtgtcgttgcaggccttattcaagcttaccatgcggctgagcaagaccctggtggacatggatatggcagactactccgccgctctggatccagcatatacaactctggagttcgaaaacgtccaggtgctgaccatgggaaatgacacatctccctcagagggcactaacctgaatgcccctaacagtctgggggtgagcgctctgtgcgcaatctgcggagacagggccaccggcaaacactacggggcttcctcttgtgatggatgcaagggctttttcagacgcgaagtccggaaaaatcatatgtacagctgccgattttcaaggcagtgcgtggtggacaaggacaagagaaaccagtgccgctattgtcggctgaaaaagtgcttcagggcaggaatgaaaaaggaggccgtccagaatgaaagagatcgaattagtacacggcgctccagctacgaggactctagcctgccatccatcaacgctctgctgcaggcagaagtgctgtcaaggcagatcaccagtcccgtgagcgggattaacggcgatatcagagccaagaaaattgcatctatcgctgacgtctgcgagtccatgaaggagcagctgctggtgctggtggaatgggccaaatacatccctgcattttgcgagctgccactggacgatcaggtcgctctgctgcgggcccacgcaggagaacatctgctgctgggcgctactaagcgaagcatggtgttcaaggacgtgctgctgctggggaatgactatattgtccccaggcactgccctgagctggccgaaatgtcaagagtgagtatccgcatcctggatgagctggtgctgccattccaggaactgcagattgacgataacgagtacgcatacctgaaagctatcatctttttcgaccccgacgccaagggactgtctgatcctggcaaaattaagcggctgaggtcccaggtccaggtgagcctggaagactatatcaatgacagacagtacgatagccgagggcggtttggagagctgctgctgctgctgccaacactgcagtccattacctggcagatgatcgagcagatccagttcattaaactgttcggcatggcaaagatcgacaacctgctgcaggaaatgctgctgggagggtcaccctctgatgcccctcatgctcaccacccactgcatccccacctgatgcaggagcatatgggcactaatgtgatcgtcgcaaacacaatgcctacccacctgagtaatggacagatgtgtgaatggccacgccccaggggccaggccgcaactcctgagaccccacagcccagccctccagggggatccggctctgaaccctacaagctgctgcctggagctgtggcaacaattgtgaaaccactgagcgccatcccccagcctaccattactaagcaggaggtcatctgaggactagtccctgttcccagagcccacttttttttctttttttgaaataaaatagcctgtctttcagatctcaaaggctcttttcagagccaccaaaaaaaaaaaaaaaaaaaaaaaaaaaaaaaaaaaaaaaaaaaaaaaaaaaaaaaaaaaaaaaaaaaaaaaaaaaaaaaaaaaaaaaaaaaaaaaaaaaaa

SEQ ID NO: 3263 - RNA, 1697 nt, synthetic construct
  misc_feature 1..1697: note = mRNA a-1 (hSL-A100) (opt28) from Homo sapiens__NP_000448.3__HNF4A(1-474)(R2V)
  source 1..1697: mol_type = other RNA
aggagagtcccgcagtcggcgtccagcggctctgcttgttcgtgtgtgtgtcgttgcaggccttattcaagcttaccatggtgctgagcaagaccctggtcgacatggatatggcagactactccgccgctctggatccagcatatacaactctggagttcgaaaacgtccaggtgctgaccatgggaaatgacacatctccctcagagggcactaacctgaatgcccctaacagtctgggggtgagcgctctgtgcgcaatctgcggagaccgggccaccggcaaacactacggggcttcctcttgtgatggatgcaagggctttttcaggagaagcgtgcgcaaaaatcatatgtactcatgccgatttagtcggcagtgcgtggtcgacaaggacaagaggaaccagtgcagatattgtcgcctgaaaaagtgcttccgggcaggaatgaaaaaggaagccgtgcagaatgagagggatagaatttccacacgacggagctcttacgaagacagctccctgccatcaatcaacgctctgctgcaggcagaggtgctgagtcgccagatcactagccccgtctctgggattaacggcgatatcagggccaagaaaattgcatccatcgctgacgtgtgcgaaagcatgaaggagcagctgctggtgctggtcgagtgggccaaatacatccctgcattttgcgaactgccactggacgatcaggtggctctgctgagagcccacgcaggagagcatctgctgctgggcgctaccaagcggtcaatggtgttcaaggacgtcctgctgctggggaatgactatattgtgccccgacactgccctgaactggccgagatgagtagggtgtctatcagaatcctggatgaactggtcctgccattccaggagctgcagattgacgataacgaatacgcatacctgaaagctatcatctttttcgaccccgacgccaagggactgtccgatcctggcaaaattaagcgcctgcggagccaggtccaggtgagcctggaggactatatcaatgacaggcagtacgattccagagggcgatttggagaactgctgctgctgctgccaacactgcagtcaattacctggcagatgatcgagcagatccagttcattaaactgttcggcatggcaaagatcgacaacctgctgcaggagatgctgctgggagggtctcccagtgatgcccctcatgctcaccacccactgcatccccacctgatgcaggaacatatgggcactaatgtgatcgtggcaaacacaatgcctacccacctgagcaatggacagatgtgtgagtggccacggccccgcggccaggccgcaactcctgaaaccccacagccctcccctccagggggatctggcagcgagccctacaagctgctgcctggagctgtggcaacaattgtcaaaccactgtcagccatcccccagcctaccattactaagcaggaagtgatctgaggactagtccctgttcccagagcccacttttttttctttttttgaaataaaatagcctgtctttcagatctcaaaggctcttttcagagccaccaaaaaaaaaaaaaaaaaaaaaaaaaaaaaaaaaaaaaaaaaaaaaaaaaaaaaaaaaaaaaaaaaaaaaaaaaaaaaaaaaaaaaaaaaaaaaaaaaaaaa

SEQ ID NO: 3264 - RNA, 1697 nt, synthetic construct
  misc_feature 1..1697: note = mRNA a-1 (hSL-A100) (opt28) from Homo sapiens__NP_000448.3__HNF4A(1-474)(R2V_K5V)
  source 1..1697: mol_type = other RNA
aggagagtcccgcagtcggcgtccagcggctctgcttgttcgtgtgtgtgtcgttgcaggccttattcaagcttaccatggtgctgagcgtcaccctggtggacatggatatggcagactactccgccgctctggatccagcatatacaactctggagttcgaaaacgtgcaggtcctgaccatgggaaatgacacatctccctcagagggcactaacctgaatgcccctaacagtctgggggtgagcgctctgtgcgcaatctgcggagaccgggccaccggcaagcactacggggcttcctcttgtgatggatgcaaaggctttttcaggagaagcgtgcgcaagaatcatatgtactcatgccgatttagtcggcagtgcgtcgtggacaaagacaagaggaaccagtgcagatattgtcgcctgaagaaatgcttccgggcaggaatgaagaaagaagccgtgcagaatgagagggatagaatttccacacgacggagctcttacgaagacagctccctgccatcaatcaacgctctgctgcaggcagaggtcctgagtcgccagatcactagccccgtgtctgggattaacggcgatatcagggccaagaagattgcatccatcgctgacgtgtgcgaaagcatgaaagagcagctgctggtcctggtggagtgggccaagtacatccctgcattttgcgaactgccactggacgatcaggtggctctgctgagagcccacgcaggagagcatctgctgctgggcgctaccaaacggtcaatggtcttcaaggacgtgctgctgctggggaatgactatattgtgccccgacactgccctgaactggccgagatgagtagggtctctatcagaatcctggatgaactggtgctgccattccaggagctgcagattgacgataacgaatacgcatacctgaaggctatcatctttttcgaccccgacgccaaaggactgtccgatcctggcaagattaaacgcctgcggagccaggtgcaggtcagcctggaggactatatcaatgacaggcagtacgattccagagggcgatttggagaactgctgctgctgctgccaacactgcagtcaattacctggcagatgatcgagcagatccagttcattaagctgttcggcatggcaaaaatcgacaacctgctgcaggagatgctgctgggagggtctcccagtgatgcccctcatgctcaccacccactgcatccccacctgatgcaggaacatatgggcactaatgtgatcgtggcaaacacaatgcctacccacctgagcaatggacagatgtgtgagtggccacggccccgcggccaggccgcaactcctgaaaccccacagccctcccctccagggggatctggcagcgagccctacaagctgctgcctggagctgtcgcaacaattgtgaagccactgtcagccatcccccagcctaccattactaaacaggaagtcatctgaggactagtccctgttcccagagcccacttttttttctttttttgaaataaaatagcctgtctttcagatctcaaaggctcttttcagagccaccaaaaaaaaaaaaaaaaaaaaaaaaaaaaaaaaaaaaaaaaaaaaaaaaaaaaaaaaaaaaaaaaaaaaaaaaaaaaaaaaaaaaaaaaaaaaaaaaaaaaa

SEQ ID NO: 3265 - RNA, 1697 nt, synthetic construct
  misc_feature 1..1697: note = mRNA a-1 (hSL-A100) (opt28) from Homo sapiens__NP_000448.3__HNF4A(1-474)(K179R_K180R)
  source 1..1697: mol_type = other RNA
aggagagtcccgcagtcggcgtccagcggctctgcttgttcgtgtgtgtgtcgttgcaggccttattcaagcttaccatgcggctgagcaagaccctggtggacatggatatggcagactactccgccgctctggatccagcatatacaactctggagttcgaaaacgtccaggtgctgaccatgggaaatgacacatctccctcagagggcactaacctgaatgcccctaacagtctgggggtgagcgctctgtgcgcaatctgcggagacagggccaccggcaaacactacggggcttcctcttgtgatggatgcaagggctttttcagacgcagcgtccggaaaaatcatatgtactcatgccgatttagtaggcagtgcgtggtggacaaggacaagagaaaccagtgccgctattgtcggctgaaaaagtgcttcagggcaggaatgaaaaaggaagccgtccagaatgagagagatcgaatttccacacggcgcagctcttacgaagacagctccctgccatcaatcaacgctctgctgcaggcagaggtgctgagtaggcagatcactagccccgtgtctgggattaacggcgatatcagagcccggcgaattgcatccatcgctgacgtctgcgaaagcatgaaggagcagctgctggtgctggtggagtgggccaaatacatccctgcattttgcgaactgccactggacgatcaggtcgctctgctgagggcccacgcaggagagcatctgctgctgggcgctaccaagagatcaatggtgttcaaagacgtgctgctgctggggaatgactatattgtcccccgccactgccctgaactggccgagatgagtcgggtgtctatcaggatcctggatgaactggtgctgccattccaggagctgcagattgacgataacgaatacgcatacctgaaggctatcatctttttcgaccccgacgccaagggactgtccgatcctggcaaaattaagagactgcgaagccaggtccaggtgagcctggaggactatatcaatgaccggcagtacgattcccgcgggaggtttggagaactgctgctgctgctgccaacactgcagtcaattacctggcagatgatcgagcagatccagttcattaaactgttcggcatggcaaagatcgacaacctgctgcaggagatgctgctgggagggtctcccagtgatgcccctcatgctcaccacccactgcatccccacctgatgcaggaacatatgggcactaatgtgatcgtcgcaaacacaatgcctacccacctgagcaatggacagatgtgtgagtggccaagaccccggggccaggccgcaactcctgaaaccccacagccctcccctccagggggatctggcagcgagccctacaaactgctgcctggagctgtggcaacaattgtgaagccactgtcagccatcccccagcctaccattactaagcaggaagtcatctgaggactagtccctgttcccagagcccacttttttttctttttttgaaataaaatagcctgtctttcagatctcaaaggctcttttcagagccaccaaaaaaaaaaaaaaaaaaaaaaaaaaaaaaaaaaaaaaaaaaaaaaaaaaaaaaaaaaaaaaaaaaaaaaaaaaaaaaaaaaaaaaaaaaaaaaaaaaaaa

SEQ ID NO: 3266 - RNA, 1697 nt, synthetic construct
  misc_feature 1..1697: note = mRNA a-1 (hSL-A100) (opt28) from Homo sapiens__NP_000448.3__HNF4A(1-474)(K234R)
  source 1..1697: mol_type = other RNA
aggagagtcccgcagtcggcgtccagcggctctgcttgttcgtgtgtgtgtcgttgcaggccttattcaagcttaccatgcggctgagcaagaccctggtggacatggatatggcagactactccgccgctctggatccagcatatacaactctggagttcgaaaacgtccaggtgctgaccatgggaaatgacacatctccctcagagggcactaacctgaatgcccctaacagtctgggggtgagcgctctgtgcgcaatctgcggagacagggccaccggcaaacactacggggcttcctcttgtgatggatgcaagggctttttcagacgcagcgtccggaaaaatcatatgtactcatgccgatttagtaggcagtgcgtggtggacaaggacaagagaaaccagtgccgctattgtcggctgaaaaagtgcttcagggcaggaatgaaaaaggaagccgtccagaatgagagagatcgaatttccacacggcgcagctcttacgaagacagctccctgccatcaatcaacgctctgctgcaggcagaggtgctgagtaggcagatcactagccccgtgtctgggattaacggcgatatcagagccaagaaaattgcatccatcgctgacgtctgcgaaagcatgaaggagcagctgctggtgctggtggagtgggccaaatacatccctgcattttgcgaactgccactggacgatcaggtcgctctgctgcgggcccacgcaggagagcatctgctgctgggcgctacccgaaggtcaatggtgttcaaggacgtgctgctgctggggaatgactatattgtccccagacactgccctgaactggccgagatgagtcgcgtgtctatccggatcctggatgaactggtgctgccattccaggagctgcagattgacgataacgaatacgcatacctgaaggctatcatctttttcgaccccgacgccaaaggactgtccgatcctggcaagattaaaaggctgagaagccaggtccaggtgagcctggaggactatatcaatgaccgacagtacgattcccgggggcgctttggagaactgctgctgctgctgccaacactgcagtcaattacctggcagatgatcgagcagatccagttcattaagctgttcggcatggcaaaaatcgacaacctgctgcaggagatgctgctgggagggtctcccagtgatgcccctcatgctcaccacccactgcatccccacctgatgcaggaacatatgggcactaatgtgatcgtcgcaaacacaatgcctacccacctgagcaatggacagatgtgtgagtggccaaggcccagaggccaggccgcaactcctgaaaccccacagccctcccctccagggggatctggcagcgagccctacaagctgctgcctggagctgtggcaacaattgtgaagccactgtcagccatcccccagcctaccattactaaacaggaagtcatctgaggactagtccctgttcccagagcccacttttttttctttttttgaaataaaatagcctgtctttcagatctcaaaggctcttttcagagccaccaaaaaaaaaaaaaaaaaaaaaaaaaaaaaaaaaaaaaaaaaaaaaaaaaaaaaaaaaaaaaaaaaaaaaaaaaaaaaaaaaaaaaaaaaaaaaaaaaaaaa

SEQ ID NO: 3267 - RNA, 1697 nt, synthetic construct
  misc_feature 1..1697: note = mRNA a-1 (hSL-A100) (opt28) from Homo sapiens__NP_000448.3__HNF4A(1-474)(K300R)
  source 1..1697: mol_type = other RNA
aggagagtcccgcagtcggcgtccagcggctctgcttgttcgtgtgtgtgtcgttgcaggccttattcaagcttaccatgcggctgagcaagaccctggtggacatggatatggcagactactccgccgctctggatccagcatatacaactctggagttcgaaaacgtccaggtgctgaccatgggaaatgacacatctccctcagagggcactaacctgaatgcccctaacagtctgggggtgagcgctctgtgcgcaatctgcggagacagggccaccggcaaacactacggggcttcctcttgtgatggatgcaagggctttttcagacgcagcgtccggaaaaatcatatgtactcatgccgatttagtaggcagtgcgtggtggacaaggacaagagaaaccagtgccgctattgtcggctgaaaaagtgcttcagggcaggaatgaaaaaggaagccgtccagaatgagagagatcgaatttccacacggcgcagctcttacgaagacagctccctgccatcaatcaacgctctgctgcaggcagaggtgctgagtaggcagatcactagccccgtgtctgggattaacggcgatatcagagccaagaaaattgcatccatcgctgacgtctgcgaaagcatgaaggagcagctgctggtgctggtggagtgggccaaatacatccctgcattttgcgaactgccactggacgatcaggtcgctctgctgcgggcccacgcaggagagcatctgctgctgggcgctaccaagcgatcaatggtgttcaaggacgtgctgctgctggggaatgactatattgtccccaggcactgccctgaactggccgagatgagtagagtgtctatccgcatcctggatgaactggtgctgccattccaggagctgcagattgacgataacgaatacgcatacctgaaagctatcatctttttcgaccccgacgcccggggactgtccgatcctggcaagattaaaaggctgagaagccaggtccaggtgagcctggaggactatatcaatgaccgacagtacgattcccgggggcgctttggagaactgctgctgctgctgccaacactgcagtcaattacctggcagatgatcgagcagatccagttcattaagctgttcggcatggcaaaaatcgacaacctgctgcaggagatgctgctgggagggtctcccagtgatgcccctcatgctcaccacccactgcatccccacctgatgcaggaacatatgggcactaatgtgatcgtcgcaaacacaatgcctacccacctgagcaatggacagatgtgtgagtggccaaggcccagaggccaggccgcaactcctgaaaccccacagccctcccctccagggggatctggcagcgagccctacaagctgctgcctggagctgtggcaacaattgtgaagccactgtcagccatcccccagcctaccattactaaacaggaagtcatctgaggactagtccctgttcccagagcccacttttttttctttttttgaaataaaatagcctgtctttcagatctcaaaggctcttttcagagccaccaaaaaaaaaaaaaaaaaaaaaaaaaaaaaaaaaaaaaaaaaaaaaaaaaaaaaaaaaaaaaaaaaaaaaaaaaaaaaaaaaaaaaaaaaaaaaaaaaaaaa

SEQ ID NO: 3268 - RNA, 1697 nt, synthetic construct
  misc_feature 1..1697: note = mRNA a-1 (hSL-A100) (opt28) from Homo sapiens__NP_000448.3__HNF4A(1-474)(K300R_K307R_K309R)
  source 1..1697: mol_type = other RNA
aggagagtcccgcagtcggcgtccagcggctctgcttgttcgtgtgtgtgtcgttgcaggccttattcaagcttaccatgcggctgagcaagaccctggtggacatggatatggcagactactccgccgctctggatccagcatatacaactctggagttcgaaaacgtccaggtgctgaccatgggaaatgacacatctccctcagagggcactaacctgaatgcccctaacagtctgggggtgagcgctctgtgcgcaatctgcggagacagggccaccggcaaacactacggggcttcctcttgtgatggatgcaagggctttttcagacgcagcgtccggaaaaatcatatgtactcatgccgatttagtaggcagtgcgtggtggacaaggacaagagaaaccagtgccgctattgtcggctgaaaaagtgcttcagggcaggaatgaaaaaggaagccgtccagaatgagagagatcgaatttccacacggcgcagctcttacgaagacagctccctgccatcaatcaacgctctgctgcaggcagaggtgctgagtaggcagatcactagccccgtgtctgggattaacggcgatatcagagccaagaaaattgcatccatcgctgacgtctgcgaaagcatgaaggagcagctgctggtgctggtggagtgggccaaatacatccctgcattttgcgaactgccactggacgatcaggtcgctctgctgcgggcccacgcaggagagcatctgctgctgggcgctaccaagcgatcaatggtgttcaaggacgtgctgctgctggggaatgactatattgtccccaggcactgccctgaactggccgagatgagtagagtgtctatccgcatcctggatgaactggtgctgccattccaggagctgcagattgacgataacgaatacgcatacctgaaagctatcatctttttcgaccccgacgcccggggactgtccgatcctggcaggattagacgactgcggagccaggtccaggtgagcctggaggactatatcaatgaccgccagtacgattccagggggagatttggagaactgctgctgctgctgccaacactgcagtcaattacctggcagatgatcgagcagatccagttcattaagctgttcggcatggcaaaaatcgacaacctgctgcaggagatgctgctgggagggtctcccagtgatgcccctcatgctcaccacccactgcatccccacctgatgcaggaacatatgggcactaatgtgatcgtcgcaaacacaatgcctacccacctgagcaatggacagatgtgtgagtggccacggccccgcggccaggccgcaactcctgaaaccccacagccctcccctccagggggatctggcagcgagccctacaagctgctgcctggagctgtggcaacaattgtgaaaccactgtcagccatcccccagcctaccattactaagcaggaagtcatctgaggactagtccctgttcccagagcccacttttttttctttttttgaaataaaatagcctgtctttcagatctcaaaggctcttttcagagccaccaaaaaaaaaaaaaaaaaaaaaaaaaaaaaaaaaaaaaaaaaaaaaaaaaaaaaaaaaaaaaaaaaaaaaaaaaaaaaaaaaaaaaaaaaaaaaaaaaaaaa

SEQ ID NO: 3269 - RNA, 1697 nt, synthetic construct
  misc_feature 1..1697: note = mRNA a-1 (hSL-A100) (opt28) from Homo sapiens__NP_000448.3__HNF4A(1-474)(K447R_K470R)
  source 1..1697: mol_type = other RNA
aggagagtcccgcagtcggcgtccagcggctctgcttgttcgtgtgtgtgtcgttgcaggccttattcaagcttaccatgcggctgagcaagaccctggtggacatggatatggcagactactccgccgctctggatccagcatatacaactctggagttcgaaaacgtccaggtgctgaccatgggaaatgacacatctccctcagagggcactaacctgaatgcccctaacagtctgggggtgagcgctctgtgcgcaatctgcggagacagggccaccggcaaacactacggggcttcctcttgtgatggatgcaagggctttttcagacgcagcgtccggaaaaatcatatgtactcatgccgatttagtaggcagtgcgtggtggacaaggacaagagaaaccagtgccgctattgtcggctgaaaaagtgcttcagggcaggaatgaaaaaggaagccgtccagaatgagagagatcgaatttccacacggcgcagctcttacgaagacagctccctgccatcaatcaacgctctgctgcaggcagaggtgctgagtaggcagatcactagccccgtgtctgggattaacggcgatatcagagccaagaaaattgcatccatcgctgacgtctgcgaaagcatgaaggagcagctgctggtgctggtggagtgggccaaatacatccctgcattttgcgaactgccactggacgatcaggtcgctctgctgcgggcccacgcaggagagcatctgctgctgggcgctaccaagcgatcaatggtgttcaaggacgtgctgctgctggggaatgactatattgtccccaggcactgccctgaactggccgagatgagtagagtgtctatccgcatcctggatgaactggtgctgccattccaggagctgcagattgacgataacgaatacgcatacctgaaagctatcatctttttcgaccccgacgccaagggactgtccgatcctggcaaaattaagcggctgaggagccaggtccaggtgagcctggaggactatatcaatgacagacagtacgattcccgagggcggtttggagaactgctgctgctgctgccaacactgcagtcaattacctggcagatgatcgagcagatccagttcattaaactgttcggcatggcaaagatcgacaacctgctgcaggagatgctgctgggagggtctcccagtgatgcccctcatgctcaccacccactgcatccccacctgatgcaggaacatatgggcactaatgtgatcgtcgcaaacacaatgcctacccacctgagcaatggacagatgtgtgagtggccacgccccaggggccaggccgcaactcctgaaaccccacagccctcccctccagggggatctggcagcgagccctacagactgctgcctggagctgtggcaacaattgtgaagccactgtcagccatcccccagcctaccattactcggcaggaagtcatctgaggactagtccctgttcccagagcccacttttttttctttttttgaaataaaatagcctgtctttcagatctcaaaggctcttttcagagccaccaaaaaaaaaaaaaaaaaaaaaaaaaaaaaaaaaaaaaaaaaaaaaaaaaaaaaaaaaaaaaaaaaaaaaaaaaaaaaaaaaaaaaaaaaaaaaaaaaaaaa

SEQ ID NO: 3270 - RNA, 1697 nt, synthetic construct
  misc_feature 1..1697: note = mRNA a-1 (hSL-A100) (opt28) from Homo sapiens__NP_000448.3__HNF4A(1-474)(K458R)
  source 1..1697: mol_type = other RNA
aggagagtcccgcagtcggcgtccagcggctctgcttgttcgtgtgtgtgtcgttgcaggccttattcaagcttaccatgcggctgagcaagaccctggtggacatggatatggcagactactccgccgctctggatccagcatatacaactctggagttcgaaaacgtccaggtgctgaccatgggaaatgacacatctccctcagagggcactaacctgaatgcccctaacagtctgggggtgagcgctctgtgcgcaatctgcggagacagggccaccggcaaacactacggggcttcctcttgtgatggatgcaagggctttttcagacgcagcgtccggaaaaatcatatgtactcatgccgatttagtaggcagtgcgtggtggacaaggacaagagaaaccagtgccgctattgtcggctgaaaaagtgcttcagggcaggaatgaaaaaggaagccgtccagaatgagagagatcgaatttccacacggcgcagctcttacgaagacagctccctgccatcaatcaacgctctgctgcaggcagaggtgctgagtaggcagatcactagccccgtgtctgggattaacggcgatatcagagccaagaaaattgcatccatcgctgacgtctgcgaaagcatgaaggagcagctgctggtgctggtggagtgggccaaatacatccctgcattttgcgaactgccactggacgatcaggtcgctctgctgcgggcccacgcaggagagcatctgctgctgggcgctaccaagcgatcaatggtgttcaaggacgtgctgctgctggggaatgactatattgtccccaggcactgccctgaactggccgagatgagtagagtgtctatccgcatcctggatgaactggtgctgccattccaggagctgcagattgacgataacgaatacgcatacctgaaagctatcatctttttcgaccccgacgccaagggactgtccgatcctggcaaaattaagcggctgaggagccaggtccaggtgagcctggaggactatatcaatgacagacagtacgattcccgagggcggtttggagaactgctgctgctgctgccaacactgcagtcaattacctggcagatgatcgagcagatccagttcattaaactgttcggcatggcaaagatcgacaacctgctgcaggagatgctgctgggagggtctcccagtgatgcccctcatgctcaccacccactgcatccccacctgatgcaggaacatatgggcactaatgtgatcgtcgcaaacacaatgcctacccacctgagcaatggacagatgtgtgagtggccacgccccaggggccaggccgcaactcctgaaaccccacagccctcccctccagggggatctggcagcgagccctacaagctgctgcctggagctgtggcaacaattgtgagaccactgtcagccatcccccagcctaccattactaaacaggaagtcatctgaggactagtccctgttcccagagcccacttttttttctttttttgaaataaaatagcctgtctttcagatctcaaaggctcttttcagagccaccaaaaaaaaaaaaaaaaaaaaaaaaaaaaaaaaaaaaaaaaaaaaaaaaaaaaaaaaaaaaaaaaaaaaaaaaaaaaaaaaaaaaaaaaaaaaaaaaaaaaa

SEQ ID NO: 3271 - RNA, 1697 nt, synthetic construct
  misc_feature 1..1697: note = mRNA a-1 (hSL-A100) (opt28) from Homo sapiens__NP_000448.3__HNF4A(1-474)(K106R_K108R_K126R_K127R)
  source 1..1697: mol_type = other RNA
aggagagtcccgcagtcggcgtccagcggctctgcttgttcgtgtgtgtgtcgttgcaggccttattcaagcttaccatgcggctgagcaagaccctggtggacatggatatggcagactactccgccgctctggatccagcatatacaactctggagttcgaaaacgtccaggtgctgaccatgggaaatgacacatctccctcagagggcactaacctgaatgcccctaacagtctgggggtgagcgctctgtgcgcaatctgcggagacagggccaccggcaaacactacggggcttcctcttgtgatggatgcaagggctttttcagacgcagcgtccggaaaaatcatatgtactcatgccgatttagtaggcagtgcgtggtggacagagaccgccggaaccagtgcaggtattgtagactgaagaagtgcttccgagcaggaatgcggcgcgaagccgtccagaatgagagggatagaatttccacacggcgaagctcttacgaagacagctccctgccatcaatcaacgctctgctgcaggcagaggtgctgagtaggcagatcactagccccgtgtctgggattaacggcgatatcagagccaaaaagattgcatccatcgctgacgtctgcgaaagcatgaaagagcagctgctggtgctggtggagtgggccaagtacatccctgcattttgcgaactgccactggacgatcaggtcgctctgctgcgcgcccacgcaggagagcatctgctgctgggcgctaccaagcggtcaatggtgttcaaagacgtgctgctgctggggaatgactatattgtccccaggcactgccctgaactggccgagatgagtagagtgtctatccgaatcctggatgaactggtgctgccattccaggagctgcagattgacgataacgaatacgcatacctgaaggctatcatctttttcgaccccgacgccaaaggactgtccgatcctggcaagattaagcggctgcgcagccaggtccaggtgagcctggaggactatatcaatgacaggcagtacgattccagagggcggtttggagaactgctgctgctgctgccaacactgcagtcaattacctggcagatgatcgagcagatccagttcattaaactgttcggcatggcaaagatcgacaacctgctgcaggagatgctgctgggagggtctcccagtgatgcccctcatgctcaccacccactgcatccccacctgatgcaggaacatatgggcactaatgtgatcgtcgcaaacacaatgcctacccacctgagcaatggacagatgtgtgagtggccacgccccaggggccaggccgcaactcctgaaaccccacagccctcccctccagggggatctggcagcgagccctacaaactgctgcctggagctgtggcaacaattgtgaagccactgtcagccatcccccagcctaccattactaaacaggaagtcatctgaggactagtccctgttcccagagcccacttttttttctttttttgaaataaaatagcctgtctttcagatctcaaaggctcttttcagagccaccaaaaaaaaaaaaaaaaaaaaaaaaaaaaaaaaaaaaaaaaaaaaaaaaaaaaaaaaaaaaaaaaaaaaaaaaaaaaaaaaaaaaaaaaaaaaaaaaaaaaa

SEQ ID NO: 3272 - RNA, 1697 nt, synthetic construct
  misc_feature 1..1697: note = mRNA a-1 (hSL-A100) (opt28) from Homo sapiens__NP_000448.3__HNF4A(1-474)(E285Q)
  source 1..1697: mol_type = other RNA
aggagagtcccgcagtcggcgtccagcggctctgcttgttcgtgtgtgtgtcgttgcaggccttattcaagcttaccatgcggctgagcaagaccctggtggacatggatatggcagactactccgccgctctggatccagcatatacaactctggagttcgaaaacgtccaggtgctgaccatgggaaatgacacatctccctcagagggcactaacctgaatgcccctaacagtctgggggtgagcgctctgtgcgcaatctgcggagacagggccaccggcaaacactacggggcttcctcttgtgatggatgcaagggctttttcagacgcagcgtccggaaaaatcatatgtactcatgccgatttagtaggcagtgcgtggtggacaaggacaagagaaaccagtgccgctattgtcggctgaaaaagtgcttcagggcaggaatgaaaaaggaagccgtccagaatgagagagatcgaatttccacacggcgcagctcttacgaagacagctccctgccatcaatcaacgctctgctgcaggcagaggtgctgagtaggcagatcactagccccgtgtctgggattaacggcgatatcagagccaagaaaattgcatccatcgctgacgtctgcgaaagcatgaaggagcagctgctggtgctggtggagtgggccaaatacatccctgcattttgcgaactgccactggacgatcaggtcgctctgctgcgggcccacgcaggagagcatctgctgctgggcgctaccaagcgatcaatggtgttcaaggacgtgctgctgctggggaatgactatattgtccccaggcactgccctgaactggccgagatgagtagagtgtctatccgcatcctggatgaactggtgctgccattccaggagctgcagattgacgataaccagtacgcatacctgaaagctatcatctttttcgaccccgacgccaagggactgtccgatcctggcaaaattaagcggctgaggagccaggtccaggtgagcctggaagactatatcaatgacagacagtacgattcccgagggcggtttggagagctgctgctgctgctgccaacactgcagtcaattacctggcagatgatcgaacagatccagttcattaaactgttcggcatggcaaagatcgacaacctgctgcaggagatgctgctgggagggtctcccagtgatgcccctcatgctcaccacccactgcatccccacctgatgcaggagcatatgggcactaatgtgatcgtcgcaaacacaatgcctacccacctgagcaatggacagatgtgtgaatggccacgccccaggggccaggccgcaactcctgagaccccacagccctcccctccagggggatctggcagcgaaccctacaagctgctgcctggagctgtggcaacaattgtgaaaccactgtcagccatcccccagcctaccattactaagcaggaggtcatctgaggactagtccctgttcccagagcccacttttttttctttttttgaaataaaatagcctgtctttcagatctcaaaggctcttttcagagccaccaaaaaaaaaaaaaaaaaaaaaaaaaaaaaaaaaaaaaaaaaaaaaaaaaaaaaaaaaaaaaaaaaaaaaaaaaaaaaaaaaaaaaaaaaaaaaaaaaaaaa

SEQ ID NO: 3273 - RNA, 1697 nt, synthetic construct
  misc_feature 1..1697: note = mRNA a-1 (hSL-A100) (opt28) from Homo sapiens__NP_000448.3__HNF4A(1-474)(T166E)
  source 1..1697: mol_type = other RNA
aggagagtcccgcagtcggcgtccagcggctctgcttgttcgtgtgtgtgtcgttgcaggccttattcaagcttaccatgcggctgagcaagaccctggtggacatggatatggcagactactccgccgctctggatccagcatatacaactctggagttcgaaaacgtccaggtgctgaccatgggaaatgacacatctccctcagagggcactaacctgaatgcccctaacagtctgggggtgagcgctctgtgcgcaatctgcggagacagggccaccggcaaacactacggggcttcctcttgtgatggatgcaagggctttttcagacgcagcgtccggaaaaatcatatgtactcatgccgatttagtaggcagtgcgtggtggacaaggacaagagaaaccagtgccgctattgtcggctgaaaaagtgcttcagggcaggaatgaaaaaggaagccgtccagaatgagagagatcgaatttccacacggcgcagctcttacgaagacagctccctgccatcaatcaacgctctgctgcaggcagaggtgctgagtaggcagatcgaaagccccgtgtctgggattaacggcgatatcagagccaagaaaattgcatccatcgctgacgtctgcgagagcatgaaggagcagctgctggtgctggtggaatgggccaaatacatccctgcattttgcgagctgccactggacgatcaggtcgctctgctgcgggcccacgcaggagaacatctgctgctgggcgctactaagcgatcaatggtgttcaaggacgtgctgctgctggggaatgactatattgtccccaggcactgccctgagctggccgaaatgagtagagtgtctatccgcatcctggatgagctggtgctgccattccaggaactgcagattgacgataacgagtacgcatacctgaaagctatcatctttttcgaccccgacgccaagggactgtccgatcctggcaaaattaagcggctgaggagccaggtccaggtgagcctggaagactatatcaatgacagacagtacgattcccgagggcggtttggagagctgctgctgctgctgccaaccctgcagtcaattacatggcagatgatcgagcagatccagttcattaaactgttcggcatggcaaagatcgacaacctgctgcaggaaatgctgctgggagggtctcccagtgatgcccctcatgctcaccacccactgcatccccacctgatgcaggagcatatgggcaccaatgtgatcgtcgcaaacactatgcctacacacctgagcaatggacagatgtgtgaatggccacgccccaggggccaggccgcaacccctgagactccacagccctcccctccagggggatctggcagcgaaccctacaagctgctgcctggagctgtggcaaccattgtgaaaccactgtcagccatcccccagcctacaattaccaagcaggaggtcatctgaggactagtccctgttcccagagcccacttttttttctttttttgaaataaaatagcctgtctttcagatctcaaaggctcttttcagagccaccaaaaaaaaaaaaaaaaaaaaaaaaaaaaaaaaaaaaaaaaaaaaaaaaaaaaaaaaaaaaaaaaaaaaaaaaaaaaaaaaaaaaaaaaaaaaaaaaaaaaa

SEQ ID NO: 3274 - RNA, 1697 nt, synthetic construct
  misc_feature 1..1697: note = mRNA a-1 (hSL-A100) (opt28) from Homo sapiens__NP_000448.3__HNF4A(1-474)(S148A)
  source 1..1697: mol_type = other RNA
aggagagtcccgcagtcggcgtccagcggctctgcttgttcgtgtgtgtgtcgttgcaggccttattcaagcttaccatgcggctgagcaagaccctggtggacatggatatggcagactactccgccgctctggatccagcatatacaactctggagttcgaaaacgtccaggtgctgaccatgggaaatgacacatctccctcagagggcactaacctgaatgcccctaacagtctgggggtgagcgctctgtgcgcaatctgcggagacagggccaccggcaaacactacggggcttcctcttgtgatggatgcaagggctttttcagacgcagcgtccggaaaaatcatatgtactcatgccgatttagtaggcagtgcgtggtggacaaggacaagagaaaccagtgccgctattgtcggctgaaaaagtgcttcagggcaggaatgaaaaaggaagccgtccagaatgagagagatcgaatttccacacggcgcagctcttacgaagacagcgctctgccatccatcaacgcactgctgcaggccgaggtgctgtcaaggcagatcaccagtcccgtgagcgggattaacggcgatatcagagcaaagaaaattgcttctatcgccgacgtctgcgaatccatgaaggagcagctgctggtgctggtggagtgggcaaaatacatccctgctttttgcgaactgccactggacgatcaggtcgccctgctgcgggcacacgctggagagcatctgctgctgggcgccactaagcgaagcatggtgttcaaggacgtgctgctgctggggaatgactatattgtccccaggcactgccctgaactggcagagatgtcaagagtgagtatccgcatcctggatgaactggtgctgccattccaggagctgcagattgacgataacgaatacgcttacctgaaagccatcatctttttcgaccccgacgcaaagggactgtctgatcctggcaaaattaagcggctgaggtcccaggtccaggtgagcctggaggactatatcaatgacagacagtacgatagccgagggcggtttggagaactgctgctgctgctgccaacactgcagtccattacctggcagatgatcgagcagatccagttcattaaactgttcggcatggccaagatcgacaacctgctgcaggagatgctgctgggagggtcaccctctgatgctcctcatgcacaccacccactgcatccccacctgatgcaggaacatatgggcactaatgtgatcgtcgccaacacaatgcctacccacctgagtaatggacagatgtgtgagtggccacgccccaggggccaggcagctactcctgaaaccccacagcccagccctccagggggatccggctctgagccctacaagctgctgcctggagcagtggccacaattgtgaaaccactgagcgctatcccccagcctaccattactaagcaggaagtcatctgaggactagtccctgttcccagagcccacttttttttctttttttgaaataaaatagcctgtctttcagatctcaaaggctcttttcagagccaccaaaaaaaaaaaaaaaaaaaaaaaaaaaaaaaaaaaaaaaaaaaaaaaaaaaaaaaaaaaaaaaaaaaaaaaaaaaaaaaaaaaaaaaaaaaaaaaaaaaaa

SEQ ID NO: 3275 - RNA, 1697 nt, synthetic construct
  misc_feature 1..1697: note = mRNA a-1 (hSL-A100) (opt28) from Homo sapiens__NP_000448.3__HNF4A(1-474)(S148E)
  source 1..1697: mol_type = other RNA
aggagagtcccgcagtcggcgtccagcggctctgcttgttcgtgtgtgtgtcgttgcaggccttattcaagcttaccatgcggctgagcaagaccctggtggacatggatatggcagactactccgccgctctggatccagcatatacaactctggagttcgaaaacgtccaggtgctgaccatgggaaatgacacatctccctcagagggcactaacctgaatgcccctaacagtctgggggtgagcgctctgtgcgcaatctgcggagacagggccaccggcaaacactacggggcttcctcttgtgatggatgcaagggctttttcagacgcagcgtccggaaaaatcatatgtactcatgccgatttagtaggcagtgcgtggtggacaaggacaagagaaaccagtgccgctattgtcggctgaaaaagtgcttcagggcaggaatgaaaaaggaagccgtccagaatgagagagatcgaatttccacacggcgcagctcttacgaagacagcgagctgccatccatcaacgctctgctgcaggcagaagtgctgtcaaggcagatcaccagtcccgtgagcgggattaacggcgatatcagagccaagaaaattgcatctatcgctgacgtctgcgagtccatgaaggagcagctgctggtgctggtggaatgggccaaatacatccctgcattttgcgagctgccactggacgatcaggtcgctctgctgcgggcccacgcaggagaacatctgctgctgggcgctactaagcgaagcatggtgttcaaggacgtgctgctgctggggaatgactatattgtccccaggcactgccctgagctggccgaaatgtcaagagtgagtatccgcatcctggatgagctggtgctgccattccaggaactgcagattgacgataacgagtacgcatacctgaaagctatcatctttttcgaccccgacgccaagggactgtctgatcctggcaaaattaagcggctgaggtcccaggtccaggtgagcctggaagactatatcaatgacagacagtacgatagccgagggcggtttggagagctgctgctgctgctgccaacactgcagtccattacctggcagatgatcgagcagatccagttcattaaactgttcggcatggcaaagatcgacaacctgctgcaggaaatgctgctgggagggtcaccctctgatgcccctcatgctcaccacccactgcatccccacctgatgcaggagcatatgggcactaatgtgatcgtcgcaaacacaatgcctacccacctgagtaatggacagatgtgtgaatggccacgccccaggggccaggccgcaactcctgagaccccacagcccagccctccagggggatccggctctgaaccctacaagctgctgcctggagctgtggcaacaattgtgaaaccactgagcgccatcccccagcctaccattactaagcaggaggtcatctgaggactagtccctgttcccagagcccacttttttttctttttttgaaataaaatagcctgtctttcagatctcaaaggctcttttcagagccaccaaaaaaaaaaaaaaaaaaaaaaaaaaaaaaaaaaaaaaaaaaaaaaaaaaaaaaaaaaaaaaaaaaaaaaaaaaaaaaaaaaaaaaaaaaaaaaaaaaaaa

SEQ ID NO: 3276 - RNA, 1697 nt, synthetic construct
  misc_feature 1..1697: note = mRNA a-1 (hSL-A100) (opt28) from Homo sapiens__NP_000448.3__HNF4A(1-474)(S183A)
  source 1..1697: mol_type = other RNA
aggagagtcccgcagtcggcgtccagcggctctgcttgttcgtgtgtgtgtcgttgcaggccttattcaagcttaccatgcggctgagcaagaccctggtggacatggatatggcagactactccgccgctctggatccagcatatacaactctggagttcgaaaacgtccaggtgctgaccatgggaaatgacacatctccctcagagggcactaacctgaatgcccctaacagtctgggggtgagcgctctgtgcgcaatctgcggagacagggccaccggcaaacactacggggcttcctcttgtgatggatgcaagggctttttcagacgcagcgtccggaaaaatcatatgtactcatgccgatttagtaggcagtgcgtggtggacaaggacaagagaaaccagtgccgctattgtcggctgaaaaagtgcttcagggcaggaatgaaaaaggaagccgtccagaatgagagagatcgaatttccacacggcgcagctcttacgaagacagctccctgccatcaatcaacgctctgctgcaggcagaggtgctgagtaggcagatcactagccccgtgtctgggattaacggcgatatcagagccaagaaaattgcagctatcgccgacgtctgcgaatccatgaaggagcagctgctggtgctggtggagtgggcaaaatacatccctgctttttgcgaactgccactggacgatcaggtcgccctgctgcgggcacacgctggagagcatctgctgctgggcgccaccaagcgaagcatggtgttcaaggacgtgctgctgctggggaatgactatattgtccccaggcactgccctgaactggcagagatgtcaagagtgagtatccgcatcctggatgaactggtgctgccattccaggagctgcagattgacgataacgaatacgcttacctgaaagccatcatctttttcgaccccgacgcaaagggactgtctgatcctggcaaaattaagcggctgaggtcccaggtccaggtgagcctggaggactatatcaatgacagacagtacgatagccgagggcggtttggagaactgctgctgctgctgccaacactgcagtccattacctggcagatgatcgagcagatccagttcattaaactgttcggcatggccaagatcgacaacctgctgcaggagatgctgctgggagggtcaccctctgatgctcctcatgcacaccacccactgcatccccacctgatgcaggaacatatgggcactaatgtgatcgtcgccaacacaatgcctacccacctgagtaatggacagatgtgtgagtggccacgccccaggggccaggcagctactcctgaaaccccacagcccagccctccagggggatccggctctgagccctacaagctgctgcctggagcagtggccacaattgtgaaaccactgagcgctatcccccagcctaccattactaagcaggaagtcatctgaggactagtccctgttcccagagcccacttttttttctttttttgaaataaaatagcctgtctttcagatctcaaaggctcttttcagagccaccaaaaaaaaaaaaaaaaaaaaaaaaaaaaaaaaaaaaaaaaaaaaaaaaaaaaaaaaaaaaaaaaaaaaaaaaaaaaaaaaaaaaaaaaaaaaaaaaaaaaa

SEQ ID NO: 3277 - RNA, 1697 nt, synthetic construct
  misc_feature 1..1697: note = mRNA a-1 (hSL-A100) (opt28) from Homo sapiens__NP_000448.3__HNF4A(1-474)(S183E)
  source 1..1697: mol_type = other RNA
aggagagtcccgcagtcggcgtccagcggctctgcttgttcgtgtgtgtgtcgttgcaggccttattcaagcttaccatgcggctgagcaagaccctggtggacatggatatggcagactactccgccgctctggatccagcatatacaactctggagttcgaaaacgtccaggtgctgaccatgggaaatgacacatctccctcagagggcactaacctgaatgcccctaacagtctgggggtgagcgctctgtgcgcaatctgcggagacagggccaccggcaaacactacggggcttcctcttgtgatggatgcaagggctttttcagacgcagcgtccggaaaaatcatatgtactcatgccgatttagtaggcagtgcgtggtggacaaggacaagagaaaccagtgccgctattgtcggctgaaaaagtgcttcagggcaggaatgaaaaaggaagccgtccagaatgagagagatcgaatttccacacggcgcagctcttacgaagacagctccctgccatcaatcaacgctctgctgcaggcagaggtgctgagtaggcagatcactagccccgtgtctgggattaacggcgatatcagagccaagaaaattgcagaaatcgctgacgtctgcgagtccatgaaggagcagctgctggtgctggtggaatgggccaaatacatccctgcattttgcgagctgccactggacgatcaggtcgctctgctgcgggcccacgcaggagaacatctgctgctgggcgctaccaagcgaagcatggtgttcaaggacgtgctgctgctggggaatgactatattgtccccaggcactgccctgagctggccgaaatgtcaagagtgagtatccgcatcctggatgagctggtgctgccattccaggaactgcagattgacgataacgagtacgcatacctgaaagctatcatctttttcgaccccgacgccaagggactgtctgatcctggcaaaattaagcggctgaggtcccaggtccaggtgagcctggaagactatatcaatgacagacagtacgatagccgagggcggtttggagagctgctgctgctgctgccaacactgcagtccattacctggcagatgatcgagcagatccagttcattaaactgttcggcatggcaaagatcgacaacctgctgcaggaaatgctgctgggagggtcaccctctgatgcccctcatgctcaccacccactgcatccccacctgatgcaggagcatatgggcactaatgtgatcgtcgcaaacacaatgcctacccacctgagtaatggacagatgtgtgaatggccacgccccaggggccaggccgcaactcctgagaccccacagcccagccctccagggggatccggctctgaaccctacaagctgctgcctggagctgtggcaacaattgtgaaaccactgagcgccatcccccagcctaccattactaagcaggaggtcatctgaggactagtccctgttcccagagcccacttttttttctttttttgaaataaaatagcctgtctttcagatctcaaaggctcttttcagagccaccaaaaaaaaaaaaaaaaaaaaaaaaaaaaaaaaaaaaaaaaaaaaaaaaaaaaaaaaaaaaaaaaaaaaaaaaaaaaaaaaaaaaaaaaaaaaaaaaaaaaa

SEQ ID NO: 3278 - RNA, 1697 nt, synthetic construct
  misc_feature 1..1697: note = mRNA a-1 (hSL-A100) (opt28) from Homo sapiens__NP_000448.3__HNF4A(1-474)(S461A)
  source 1..1697: mol_type = other RNA
aggagagtcccgcagtcggcgtccagcggctctgcttgttcgtgtgtgtgtcgttgcaggccttattcaagcttaccatgcggctgagcaagaccctggtggacatggatatggcagactactccgccgctctggatccagcatatacaactctggagttcgaaaacgtccaggtgctgaccatgggaaatgacacatctccctcagagggcactaacctgaatgcccctaacagtctgggggtgagcgctctgtgcgcaatctgcggagacagggccaccggcaaacactacggggcttcctcttgtgatggatgcaagggctttttcagacgcagcgtccggaaaaatcatatgtactcatgccgatttagtaggcagtgcgtggtggacaaggacaagagaaaccagtgccgctattgtcggctgaaaaagtgcttcagggcaggaatgaaaaaggaagccgtccagaatgagagagatcgaatttccacacggcgcagctcttacgaagacagctccctgccatcaatcaacgctctgctgcaggcagaggtgctgagtaggcagatcactagccccgtgtctgggattaacggcgatatcagagccaagaaaattgcatccatcgctgacgtctgcgaaagcatgaaggagcagctgctggtgctggtggagtgggccaaatacatccctgcattttgcgaactgccactggacgatcaggtcgctctgctgcgggcccacgcaggagagcatctgctgctgggcgctaccaagcgatcaatggtgttcaaggacgtgctgctgctggggaatgactatattgtccccaggcactgccctgaactggccgagatgagtagagtgtctatccgcatcctggatgaactggtgctgccattccaggagctgcagattgacgataacgaatacgcatacctgaaagctatcatctttttcgaccccgacgccaagggactgtccgatcctggcaaaattaagcggctgaggagccaggtccaggtgagcctggaggactatatcaatgacagacagtacgattcccgagggcggtttggagaactgctgctgctgctgccaacactgcagtcaattacctggcagatgatcgagcagatccagttcattaaactgttcggcatggcaaagatcgacaacctgctgcaggagatgctgctgggagggtctcccagtgatgcccctcatgctcaccacccactgcatccccacctgatgcaggaacatatgggcactaatgtgatcgtcgcaaacacaatgcctacccacctgagcaatggacagatgtgtgagtggccacgccccaggggccaggccgcaactcctgaaaccccacagccctcccctccagggggatctggcagcgagccctacaagctgctgcctggagctgtggcaacaattgtgaaaccactggccgctatcccccagcctaccattactaagcaggaagtcatctgaggactagtccctgttcccagagcccacttttttttctttttttgaaataaaatagcctgtctttcagatctcaaaggctcttttcagagccaccaaaaaaaaaaaaaaaaaaaaaaaaaaaaaaaaaaaaaaaaaaaaaaaaaaaaaaaaaaaaaaaaaaaaaaaaaaaaaaaaaaaaaaaaaaaaaaaaaaaaa

SEQ ID NO: 3279 - RNA, 1697 nt, synthetic construct
  misc_feature 1..1697: note = mRNA a-1 (hSL-A100) (opt28) from Homo sapiens__NP_000448.3__HNF4A(1-474)(S461E)
  source 1..1697: mol_type = other RNA
aggagagtcccgcagtcggcgtccagcggctctgcttgttcgtgtgtgtgtcgttgcaggccttattcaagcttaccatgcggctgagcaagaccctggtggacatggatatggcagactactccgccgctctggatccagcatatacaactctggagttcgaaaacgtccaggtgctgaccatgggaaatgacacatctccctcagagggcactaacctgaatgcccctaacagtctgggggtgagcgctctgtgcgcaatctgcggagacagggccaccggcaaacactacggggcttcctcttgtgatggatgcaagggctttttcagacgcagcgtccggaaaaatcatatgtactcatgccgatttagtaggcagtgcgtggtggacaaggacaagagaaaccagtgccgctattgtcggctgaaaaagtgcttcagggcaggaatgaaaaaggaagccgtccagaatgagagagatcgaatttccacacggcgcagctcttacgaagacagctccctgccatcaatcaacgctctgctgcaggcagaggtgctgagtaggcagatcactagccccgtgtctgggattaacggcgatatcagagccaagaaaattgcatccatcgctgacgtctgcgaaagcatgaaggagcagctgctggtgctggtggagtgggccaaatacatccctgcattttgcgaactgccactggacgatcaggtcgctctgctgcgggcccacgcaggagagcatctgctgctgggcgctaccaagcgatcaatggtgttcaaggacgtgctgctgctggggaatgactatattgtccccaggcactgccctgaactggccgagatgagtagagtgtctatccgcatcctggatgaactggtgctgccattccaggagctgcagattgacgataacgaatacgcatacctgaaagctatcatctttttcgaccccgacgccaagggactgtccgatcctggcaaaattaagcggctgaggagccaggtccaggtgagcctggaggactatatcaatgacagacagtacgattcccgagggcggtttggagaactgctgctgctgctgccaacactgcagtcaattacctggcagatgatcgagcagatccagttcattaaactgttcggcatggcaaagatcgacaacctgctgcaggagatgctgctgggagggtctcccagtgatgcccctcatgctcaccacccactgcatccccacctgatgcaggaacatatgggcactaatgtgatcgtcgcaaacacaatgcctacccacctgagcaatggacagatgtgtgagtggccacgccccaggggccaggccgcaactcctgaaaccccacagccctcccctccagggggatctggcagcgagccctacaagctgctgcctggagctgtggcaacaattgtgaaaccactggaagccatcccccagcctaccattactaagcaggaggtcatctgaggactagtccctgttcccagagcccacttttttttctttttttgaaataaaatagcctgtctttcagatctcaaaggctcttttcagagccaccaaaaaaaaaaaaaaaaaaaaaaaaaaaaaaaaaaaaaaaaaaaaaaaaaaaaaaaaaaaaaaaaaaaaaaaaaaaaaaaaaaaaaaaaaaaaaaaaaaaaa

SEQ ID NO: 3280 - RNA, 1697 nt, synthetic construct
  misc_feature 1..1697: note = mRNA a-1 (hSL-A100) (opt28) from Homo sapiens__NP_000448.3__HNF4A(1-474)(S142A_S143A_S313A)
  source 1..1697: mol_type = other RNA
aggagagtcccgcagtcggcgtccagcggctctgcttgttcgtgtgtgtgtcgttgcaggccttattcaagcttaccatgcggctgagcaagaccctggtggacatggatatggcagactactccgccgctctggatccagcatatacaactctggagttcgaaaacgtccaggtgctgaccatgggaaatgacacatctccctcagagggcactaacctgaatgcccctaacagtctgggggtgagcgctctgtgcgcaatctgcggagacagggccaccggcaaacactacggggcttcctcttgtgatggatgcaagggctttttcagacgcagcgtccggaaaaatcatatgtactcatgccgatttagtaggcagtgcgtggtggacaaggacaagagaaaccagtgccgctattgtcggctgaaaaagtgcttcagggcaggaatgaaaaaggaagccgtccagaatgagagagatcgaatttccacacggcgcgctgcatacgaagacagctctctgccaagcatcaacgccctgctgcaggcagaggtgctgtccaggcagatcacttcacccgtgagtgggattaacggcgatatcagagctaagaaaattgccagcatcgcagacgtctgcgaatctatgaaggagcagctgctggtgctggtggagtgggctaaatacatccctgccttttgcgaactgccactggacgatcaggtcgcactgctgcgggctcacgccggagagcatctgctgctgggcgcaaccaagcgatccatggtgttcaaggacgtgctgctgctggggaatgactatattgtccccaggcactgccctgaactggctgagatgagcagagtgtcaatccgcatcctggatgaactggtgctgccattccaggagctgcagattgacgataacgaatacgcctacctgaaagcaatcatctttttcgaccccgacgccaagggactgagtgatcctggcaaaattaagcggctgagggctcaggtccaggtgtctctggaggactatatcaatgacagacagtacgattcccgagggcggtttggagaactgctgctgctgctgccaacactgcagagcattacctggcagatgatcgagcagatccagttcattaaactgttcggcatggcaaagatcgacaacctgctgcaggagatgctgctgggagggagcccctccgatgcccctcatgcacaccacccactgcatccccacctgatgcaggaacatatgggcactaatgtgatcgtcgctaacacaatgcctacccacctgtcaaatggacagatgtgtgagtggccacgccccaggggccaggcagccactcctgaaaccccacagccctctcctccagggggaagtggcagcgagccctacaagctgctgcctggagctgtggcaacaattgtgaaaccactgtccgccatcccccagcctaccattactaagcaggaagtcatctgaggactagtccctgttcccagagcccacttttttttctttttttgaaataaaatagcctgtctttcagatctcaaaggctcttttcagagccaccaaaaaaaaaaaaaaaaaaaaaaaaaaaaaaaaaaaaaaaaaaaaaaaaaaaaaaaaaaaaaaaaaaaaaaaaaaaaaaaaaaaaaaaaaaaaaaaaaaaaa

SEQ ID NO: 3281 - RNA, 1697 nt, synthetic construct
  misc_feature 1..1697: note = mRNA a-1 (hSL-A100) (opt28) from Homo sapiens__NP_000448.3__HNF4A(1-474)(S142A_S143A_S313A_K458R)
  source 1..1697: mol_type = other RNA
aggagagtcccgcagtcggcgtccagcggctctgcttgttcgtgtgtgtgtcgttgcaggccttattcaagcttaccatgcggctgagcaagaccctggtggacatggatatggcagactactccgccgctctggatccagcatatacaactctggagttcgaaaacgtccaggtgctgaccatgggaaatgacacatctccctcagagggcactaacctgaatgcccctaacagtctgggggtgagcgctctgtgcgcaatctgcggagacagggccaccggcaaacactacggggcttcctcttgtgatggatgcaagggctttttcagacgcagcgtccggaaaaatcatatgtactcatgccgatttagtaggcagtgcgtggtggacaaggacaagagaaaccagtgccgctattgtcggctgaaaaagtgcttcagggcaggaatgaaaaaggaagccgtccagaatgagagagatcgaatttccacacggcgcgctgcatacgaagacagctctctgccaagcatcaacgccctgctgcaggcagaggtgctgtccaggcagatcacttcacccgtgagtgggattaacggcgatatcagagctaagaaaattgccagcatcgcagacgtctgcgaatctatgaaggagcagctgctggtgctggtggagtgggctaaatacatccctgccttttgcgaactgccactggacgatcaggtcgcactgctgcgggctcacgccggagagcatctgctgctgggcgcaaccaagcgatccatggtgttcaaggacgtgctgctgctggggaatgactatattgtccccaggcactgccctgaactggctgagatgagcagagtgtcaatccgcatcctggatgaactggtgctgccattccaggagctgcagattgacgataacgaatacgcctacctgaaagcaatcatctttttcgaccccgacgccaagggactgagtgatcctggcaaaattaagcggctgagggctcaggtccaggtgtctctggaggactatatcaatgacagacagtacgattcccgagggcggtttggagaactgctgctgctgctgccaacactgcagagcattacctggcagatgatcgagcagatccagttcattaaactgttcggcatggcaaagatcgacaacctgctgcaggagatgctgctgggagggagcccctccgatgcccctcatgcacaccacccactgcatccccacctgatgcaggaacatatgggcactaatgtgatcgtcgctaacacaatgcctacccacctgtcaaatggacagatgtgtgagtggccacgccccaggggccaggcagccactcctgaaaccccacagccctctcctccagggggaagtggcagcgagccctacaagctgctgcctggagctgtggcaacaattgtgagaccactgtccgccatcccccagcctaccattactaaacaggaagtcatctgaggactagtccctgttcccagagcccacttttttttctttttttgaaataaaatagcctgtctttcagatctcaaaggctcttttcagagccaccaaaaaaaaaaaaaaaaaaaaaaaaaaaaaaaaaaaaaaaaaaaaaaaaaaaaaaaaaaaaaaaaaaaaaaaaaaaaaaaaaaaaaaaaaaaaaaaaaaaaa

SEQ ID NO: 3282 - RNA, 1697 nt, synthetic construct
  misc_feature 1..1697: note = mRNA a-1 (hSL-A100) (opt28) from Homo sapiens__NP_000448.3__HNF4A(1-474)(S142A_S143A_S167A_S313A_ S378A_T429A_T432A_S436A_K458R)
  source 1..1697: mol_type = other RNA
aggagagtcccgcagtcggcgtccagcggctctgcttgttcgtgtgtgtgtcgttgcaggccttattcaagcttaccatgcggctgagcaagaccctggtggacatggatatggcagactactccgccgctctggatccagcatatacaactctggagttcgaaaacgtccaggtgctgaccatgggaaatgacacatctccctcagagggcactaacctgaatgcccctaacagtctgggggtgagcgctctgtgcgcaatctgcggagacagggccaccggcaaacactacggggcttcctcttgtgatggatgcaagggctttttcagacgcagcgtccggaaaaatcatatgtactcatgccgatttagtaggcagtgcgtggtggacaaggacaagagaaaccagtgccgctattgtcggctgaaaaagtgcttcagggcaggaatgaaaaaggaagccgtccagaatgagagagatcgaatttccacacggcgcgctgcatacgaagacagctctctgccaagcatcaacgccctgctgcaggcagaggtgctgtccaggcagatcactgctcccgtgtcagggattaacggcgatatcagagccaagaaaattgcaagtatcgctgacgtctgcgaaagcatgaaggagcagctgctggtgctggtggagtgggccaaatacatccctgcattttgcgaactgccactggacgatcaggtcgctctgctgcgggcccacgcaggagagcatctgctgctgggcgctaccaagcgatctatggtgttcaaggacgtgctgctgctggggaatgactatattgtccccaggcactgccctgaactggccgagatgtccagagtgagcatccgcatcctggatgaactggtgctgccattccaggagctgcagattgacgataacgaatacgcatacctgaaagccatcatctttttcgaccccgacgctaagggactgtcagatcctggcaaaattaagcggctgagggcacaggtccaggtgagtctggaggactatatcaatgacagacagtacgattctcgagggcggtttggagaactgctgctgctgctgccaacactgcagtccattacctggcagatgatcgagcagatccagttcattaaactgttcggcatggccaagatcgacaacctgctgcaggagatgctgctgggaggggcacccagcgatgctcctcatgcacaccacccactgcatccccacctgatgcaggaacatatgggcactaatgtgatcgtcgccaacacaatgcctacccacctgagcaatggacagatgtgtgagtggccacgccccaggggccaggctgcagcccctgaagctccacagcccgcacctccagggggatccggctcagagccctacaagctgctgcctggagccgtggctactattgtgagaccactgtctgcaatcccccagcctaccattacaaaacaggaagtcatctgaggactagtccctgttcccagagcccacttttttttctttttttgaaataaaatagcctgtctttcagatctcaaaggctcttttcagagccaccaaaaaaaaaaaaaaaaaaaaaaaaaaaaaaaaaaaaaaaaaaaaaaaaaaaaaaaaaaaaaaaaaaaaaaaaaaaaaaaaaaaaaaaaaaaaaaaaaaaaa

SEQ ID NO: 3283 - RNA, 1697 nt, synthetic construct
  misc_feature 1..1697: note = mRNA a-1 (hSL-A100) (opt28) from Homo sapiens__NP_000448.3__HNF4A(1-474)(S142A_S143A_S148A_S167A_ S313A_S378A_T429A_T432A_S436A_K458R)
  source 1..1697: mol_type = other RNA
aggagagtcccgcagtcggcgtccagcggctctgcttgttcgtgtgtgtgtcgttgcaggccttattcaagcttaccatgcggctgagcaagaccctggtggacatggatatggcagactactccgccgctctggatccagcatatacaactctggagttcgaaaacgtccaggtgctgaccatgggaaatgacacatctccctcagagggcactaacctgaatgcccctaacagtctgggggtgagcgctctgtgcgcaatctgcggagacagggccaccggcaaacactacggggcttcctcttgtgatggatgcaagggctttttcagacgcagcgtccggaaaaatcatatgtactcatgccgatttagtaggcagtgcgtggtggacaaggacaagagaaaccagtgccgctattgtcggctgaaaaagtgcttcagggcaggaatgaaaaaggaagccgtccagaatgagagagatcgaatttccacacggcgcgctgcatacgaagacagcgccctgccatctatcaacgcactgctgcaggctgaggtgctgagcaggcagatcactgcccccgtgtccgggattaacggcgatatcagagcaaagaaaattgcttcaatcgccgacgtctgcgaaagtatgaaggagcagctgctggtgctggtggagtgggcaaaatacatccctgctttttgcgaactgccactggacgatcaggtcgccctgctgcgggcacacgctggagagcatctgctgctgggcgccaccaagcgaagcatggtgttcaaggacgtgctgctgctggggaatgactatattgtccccaggcactgccctgaactggcagagatgtctagagtgtccatccgcatcctggatgaactggtgctgccattccaggagctgcagattgacgataacgaatacgcctacctgaaagctatcatctttttcgaccccgacgcaaagggactgagcgatcctggcaaaattaagcggctgagggcccaggtccaggtgtcactggaggactatatcaatgacagacagtacgatagtcgagggcggtttggagaactgctgctgctgctgccaacactgcagtctattacctggcagatgatcgagcagatccagttcattaaactgttcggcatggcaaagatcgacaacctgctgcaggagatgctgctgggaggggctccctccgatgcacctcatgcccaccacccactgcatccccacctgatgcaggaacatatgggcactaatgtgatcgtcgctaacacaatgcctacccacctgagcaatggacagatgtgtgagtggccacgccccaggggccaggcagccgctcctgaagcaccacagcccgcccctccagggggaagcggctccgagccctacaagctgctgcctggagctgtggcaactattgtgagaccactgtcagccatcccccagcctaccattacaaaacaggaagtcatctgaggactagtccctgttcccagagcccacttttttttctttttttgaaataaaatagcctgtctttcagatctcaaaggctcttttcagagccaccaaaaaaaaaaaaaaaaaaaaaaaaaaaaaaaaaaaaaaaaaaaaaaaaaaaaaaaaaaaaaaaaaaaaaaaaaaaaaaaaaaaaaaaaaaaaaaaaaaaaa

SEQ ID NO: 3284 - RNA, 1697 nt, synthetic construct
  misc_feature 1..1697: note = mRNA a-1 (hSL-A100) (opt28) from Homo sapiens__NP_000448.3__HNF4A(1-474)(K106R_K108R_K126R_K127R_ S142A_S143A_S148A_S167A_S313A_S378A_T429A_T432A_S436A_K458R )
  source 1..1697: mol_type = other RNA
aggagagtcccgcagtcggcgtccagcggctctgcttgttcgtgtgtgtgtcgttgcaggccttattcaagcttaccatgcggctgagcaagaccctggtggacatggatatggcagactactccgccgctctggatccagcatatacaactctggagttcgaaaacgtccaggtgctgaccatgggaaatgacacatctccctcagagggcactaacctgaatgcccctaacagtctgggggtgagcgctctgtgcgcaatctgcggagacagggccaccggcaaacactacggggcttcctcttgtgatggatgcaagggctttttcagacgcagcgtccggaaaaatcatatgtactcatgccgatttagtaggcagtgcgtggtggacagagaccgccggaaccagtgcaggtattgtagactgaagaagtgcttccgagcaggaatgcggcgcgaagccgtccagaatgagagggatagaatttccacacggcgagctgcatacgaagacagcgccctgccatctatcaacgcactgctgcaggctgaggtgctgagcaggcagatcactgcccccgtgtccgggattaacggcgatatcagagctaaaaagattgcatcaatcgccgacgtctgcgaaagtatgaaagagcagctgctggtgctggtggagtgggcaaagtacatccctgctttttgcgaactgccactggacgatcaggtcgccctgctgcgcgcacacgctggagagcatctgctgctgggcgccaccaagcggagcatggtgttcaaagacgtgctgctgctggggaatgactatattgtccccaggcactgccctgaactggcagagatgtctagagtgtccatccgaatcctggatgaactggtgctgccattccaggagctgcagattgacgataacgaatacgcctacctgaaggctatcatctttttcgaccccgacgcaaaaggactgagcgatcctggcaagattaagcggctgcgcgcccaggtccaggtgtcactggaggactatatcaatgacaggcagtacgatagtagagggcggtttggagaactgctgctgctgctgccaacactgcagtctattacctggcagatgatcgagcagatccagttcattaaactgttcggcatggcaaagatcgacaacctgctgcaggagatgctgctgggaggggctccctccgatgcacctcatgcccaccacccactgcatccccacctgatgcaggaacatatgggcactaatgtgatcgtcgctaacacaatgcctacccacctgagcaatggacagatgtgtgagtggccacgccccaggggccaggcagccgctcctgaagcaccacagcccgcccctccagggggaagcggctccgagccctacaaactgctgcctggagctgtggcaactattgtgagaccactgtcagccatcccccagcctaccattacaaagcaggaagtcatctgaggactagtccctgttcccagagcccacttttttttctttttttgaaataaaatagcctgtctttcagatctcaaaggctcttttcagagccaccaaaaaaaaaaaaaaaaaaaaaaaaaaaaaaaaaaaaaaaaaaaaaaaaaaaaaaaaaaaaaaaaaaaaaaaaaaaaaaaaaaaaaaaaaaaaaaaaaaaaa

SEQ ID NO: 3285 - RNA, 1697 nt, synthetic construct
  misc_feature 1..1697: note = mRNA a-1 (hSL-A100) (opt28) from Homo sapiens__NP_000448.3__HNF4A(1-474)(S142A_S143A_S148A_T166A_ S167A_S313A_S378A_T429A_T432A_S436A_K458R)
  source 1..1697: mol_type = other RNA
aggagagtcccgcagtcggcgtccagcggctctgcttgttcgtgtgtgtgtcgttgcaggccttattcaagcttaccatgcggctgagcaagaccctggtggacatggatatggcagactactccgccgctctggatccagcatatacaactctggagttcgaaaacgtccaggtgctgaccatgggaaatgacacatctccctcagagggcactaacctgaatgcccctaacagtctgggggtgagcgctctgtgcgcaatctgcggagacagggccaccggcaaacactacggggcttcctcttgtgatggatgcaagggctttttcagacgcagcgtccggaaaaatcatatgtactcatgccgatttagtaggcagtgcgtggtggacaaggacaagagaaaccagtgccgctattgtcggctgaaaaagtgcttcagggcaggaatgaaaaaggaagccgtccagaatgagagagatcgaatttccacacggcgcgctgcatacgaagacagcgccctgccatctatcaacgcactgctgcaggctgaggtgctgagcaggcagatcgccgcacccgtgtccgggattaacggcgatatcagagctaagaaaattgcctcaatcgcagacgtctgcgaaagtatgaaggagcagctgctggtgctggtggagtgggctaaatacatccctgccttttgcgaactgccactggacgatcaggtcgcactgctgcgggctcacgccggagagcatctgctgctgggcgcaactaagcgaagcatggtgttcaaggacgtgctgctgctggggaatgactatattgtccccaggcactgccctgaactggccgagatgtctagagtgtccatccgcatcctggatgaactggtgctgccattccaggagctgcagattgacgataacgaatacgcttacctgaaagcaatcatctttttcgaccccgacgccaagggactgagcgatcctggcaaaattaagcggctgagggcacaggtccaggtgtcactggaggactatatcaatgacagacagtacgatagtcgagggcggtttggagaactgctgctgctgctgccaaccctgcagtctattacatggcagatgatcgagcagatccagttcattaaactgttcggcatggctaagatcgacaacctgctgcaggagatgctgctgggaggggcaccctccgatgcccctcatgctcaccacccactgcatccccacctgatgcaggaacatatgggcaccaatgtgatcgtcgcaaacactatgcctacacacctgagcaatggacagatgtgtgagtggccacgccccaggggccaggccgctgcacctgaagccccacagcccgctcctccagggggaagcggctccgagccctacaagctgctgcctggagcagtggccaccattgtgagaccactgtcagcaatcccccagcctactattaccaaacaggaagtcatctgaggactagtccctgttcccagagcccacttttttttctttttttgaaataaaatagcctgtctttcagatctcaaaggctcttttcagagccaccaaaaaaaaaaaaaaaaaaaaaaaaaaaaaaaaaaaaaaaaaaaaaaaaaaaaaaaaaaaaaaaaaaaaaaaaaaaaaaaaaaaaaaaaaaaaaaaaaaaaa

SEQ ID NO: 3286 - RNA, 1697 nt, synthetic construct
  misc_feature 1..1697: note = mRNA a-1 (hSL-A100) (opt28) from Homo sapiens__NP_000448.3__HNF4A(1-474)(S87A_S142A_S143A_S148A_T 166A_S167A_S313A_S378A_T429A_T432A_S436A_K458R)
  source 1..1697: mol_type = other RNA
aggagagtcccgcagtcggcgtccagcggctctgcttgttcgtgtgtgtgtcgttgcaggccttattcaagcttaccatgcggctgagcaagaccctggtggacatggatatggcagactactccgccgctctggatccagcatatacaactctggagttcgaaaacgtccaggtgctgaccatgggaaatgacacatctccctcagagggcactaacctgaatgcccctaacagtctgggggtgagcgctctgtgcgcaatctgcggagacagggccaccggcaaacactacggggcttcctcttgtgatggatgcaagggctttttcagacgcgcagtccggaaaaatcatatgtacagctgccgattttcaaggcagtgcgtggtggacaaggacaagagaaaccagtgccgctattgtcggctgaaaaagtgcttcagggccggaatgaaaaaggaagctgtccagaatgagagagatcgaattagtacacggcgcgcagcctacgaagactccgcactgccaagcatcaacgctctgctgcaggccgaggtgctgtctaggcagatcgcagctcccgtgagcgggattaacggcgatatcagagccaagaaaattgcatccatcgctgacgtctgcgaatcaatgaaggagcagctgctggtgctggtggagtgggccaaatacatccctgcattttgcgaactgccactggacgatcaggtcgctctgctgcgggcccacgcaggagagcatctgctgctgggcgccactaagcgaagtatggtgttcaaggacgtgctgctgctggggaatgactatattgtccccaggcactgccctgaactggctgagatgagcagagtgtctatccgcatcctggatgaactggtgctgccattccaggagctgcagattgacgataacgaatacgcatacctgaaagccatcatctttttcgaccccgacgcaaagggactgtccgatcctggcaaaattaagcggctgagggctcaggtccaggtgagcctggaggactatatcaatgacagacagtacgattcacgagggcggtttggagaactgctgctgctgctgccaaccctgcagagtattacatggcagatgatcgagcagatccagttcattaaactgttcggcatggcaaagatcgacaacctgctgcaggagatgctgctgggaggggccccctctgatgctcctcatgcacaccacccactgcatccccacctgatgcaggaacatatgggcaccaatgtgatcgtcgccaacactatgcctacacacctgtccaatggacagatgtgtgagtggccacgccccaggggccaggctgcagcccctgaagctccacagcccgcacctccagggggaagcggcagcgagccctacaagctgctgcctggagccgtggcaaccattgtgagaccactgtccgctatcccccagcctactattaccaaacaggaagtcatctgaggactagtccctgttcccagagcccacttttttttctttttttgaaataaaatagcctgtctttcagatctcaaaggctcttttcagagccaccaaaaaaaaaaaaaaaaaaaaaaaaaaaaaaaaaaaaaaaaaaaaaaaaaaaaaaaaaaaaaaaaaaaaaaaaaaaaaaaaaaaaaaaaaaaaaaaaaaaaa

SEQ ID NO: 3287 - RNA, 1697 nt, synthetic construct
  misc_feature 1..1697: note = mRNA a-1 (hSL-A100) (opt28) from Homo sapiens__NP_000448.3__HNF4A(1-474)(S87A_K106R_K108R_K126R_K 127R_S142A_S143A_S148A_T166A_S167A_S313A_S378A_T429A_T432A_ S436A_K458R)
  source 1..1697: mol_type = other RNA
aggagagtcccgcagtcggcgtccagcggctctgcttgttcgtgtgtgtgtcgttgcaggccttattcaagcttaccatgcggctgagcaagaccctggtggacatggatatggcagactactccgccgctctggatccagcatatacaactctggagttcgaaaacgtccaggtgctgaccatgggaaatgacacatctccctcagagggcactaacctgaatgcccctaacagtctgggggtgagcgctctgtgcgcaatctgcggagacagggccaccggcaaacactacggggcttcctcttgtgatggatgcaagggctttttcagacgcgcagtccggaaaaatcatatgtacagctgccgattttcaaggcagtgcgtggtggacagagaccgccggaaccagtgcaggtattgtagactgaagaagtgcttccgagccggaatgcggcgcgaagctgtccagaatgagagggatagaattagtacacggcgagcagcctacgaagactccgcactgccaagcatcaacgctctgctgcaggccgaggtgctgtctaggcagatcgcagctcccgtgagcgggattaacggcgatatcagagccaaaaagattgcatccatcgctgacgtctgcgaatcaatgaaagagcagctgctggtgctggtggagtgggccaagtacatccctgcattttgcgaactgccactggacgatcaggtcgctctgctgcgcgcccacgcaggagagcatctgctgctgggcgccactaagcggagtatggtgttcaaagacgtgctgctgctggggaatgactatattgtccccaggcactgccctgaactggctgagatgagcagagtgtctatccgaatcctggatgaactggtgctgccattccaggagctgcagattgacgataacgaatacgcatacctgaaggccatcatctttttcgaccccgacgcaaaaggactgtccgatcctggcaagattaagcggctgcgcgctcaggtccaggtgagcctggaggactatatcaatgacaggcagtacgattcaagagggcggtttggagaactgctgctgctgctgccaaccctgcagagtattacatggcagatgatcgagcagatccagttcattaaactgttcggcatggcaaagatcgacaacctgctgcaggagatgctgctgggaggggccccctctgatgctcctcatgcacaccacccactgcatccccacctgatgcaggaacatatgggcaccaatgtgatcgtcgccaacactatgcctacacacctgtccaatggacagatgtgtgagtggccacgccccaggggccaggctgcagcccctgaagctccacagcccgcacctccagggggaagcggcagcgagccctacaaactgctgcctggagccgtggcaaccattgtgagaccactgtccgctatcccccagcctactattaccaagcaggaagtcatctgaggactagtccctgttcccagagcccacttttttttctttttttgaaataaaatagcctgtctttcagatctcaaaggctcttttcagagccaccaaaaaaaaaaaaaaaaaaaaaaaaaaaaaaaaaaaaaaaaaaaaaaaaaaaaaaaaaaaaaaaaaaaaaaaaaaaaaaaaaaaaaaaaaaaaaaaaaaaaa

SEQ ID NO: 3288 - RNA, 1697 nt, synthetic construct
  misc_feature 1..1697: note = mRNA a-1 (hSL-A100) (opt28) from Homo sapiens__NP_000448.3__HNF4A(1-474)(S87A_K106R_K108R_K126R_K 127R)
  source 1..1697: mol_type = other RNA
aggagagtcccgcagtcggcgtccagcggctctgcttgttcgtgtgtgtgtcgttgcaggccttattcaagcttaccatgcggctgagcaagaccctggtggacatggatatggcagactactccgccgctctggatccagcatatacaactctggagttcgaaaacgtccaggtgctgaccatgggaaatgacacatctccctcagagggcactaacctgaatgcccctaacagtctgggggtgagcgctctgtgcgcaatctgcggagacagggccaccggcaaacactacggggcttcctcttgtgatggatgcaagggctttttcagacgcgcagtccggaaaaatcatatgtacagctgccgattttcaaggcagtgcgtggtggacagagaccgccggaaccagtgcaggtattgtagactgaagaagtgcttccgagccggaatgcggcgcgaagctgtccagaatgagagggatagaattagtacacggcgatccagctacgaagactctagcctgccatccatcaacgcactgctgcaggccgaggtgctgtcaaggcagatcaccagtcccgtgagcgggattaacggcgatatcagagctaaaaagattgcatctatcgccgacgtctgcgaatccatgaaagagcagctgctggtgctggtggagtgggcaaagtacatccctgctttttgcgaactgccactggacgatcaggtcgccctgctgcgcgcacacgctggagagcatctgctgctgggcgccactaagcggagcatggtgttcaaagacgtgctgctgctggggaatgactatattgtccccaggcactgccctgaactggcagagatgtcaagagtgagtatccgaatcctggatgaactggtgctgccattccaggagctgcagattgacgataacgaatacgcttacctgaaggccatcatctttttcgaccccgacgcaaaaggactgtctgatcctggcaagattaagcggctgcgctcccaggtccaggtgagcctggaggactatatcaatgacaggcagtacgatagcagagggcggtttggagaactgctgctgctgctgccaacactgcagtccattacctggcagatgatcgagcagatccagttcattaaactgttcggcatggccaagatcgacaacctgctgcaggagatgctgctgggagggtcaccctctgatgctcctcatgcacaccacccactgcatccccacctgatgcaggaacatatgggcactaatgtgatcgtcgccaacacaatgcctacccacctgagtaatggacagatgtgtgagtggccacgccccaggggccaggcagctactcctgaaaccccacagcccagccctccagggggatccggctctgagccctacaaactgctgcctggagcagtggccacaattgtgaagccactgagcgctatcccccagcctaccattactaaacaggaagtcatctgaggactagtccctgttcccagagcccacttttttttctttttttgaaataaaatagcctgtctttcagatctcaaaggctcttttcagagccaccaaaaaaaaaaaaaaaaaaaaaaaaaaaaaaaaaaaaaaaaaaaaaaaaaaaaaaaaaaaaaaaaaaaaaaaaaaaaaaaaaaaaaaaaaaaaaaaaaaaaa

SEQ ID NO: 3289 - RNA, 1697 nt, synthetic construct
  misc_feature 1..1697: note = mRNA a-1 (hSL-A100) (opt28) from Homo sapiens__NP_000448.3__HNF4A(1-474)(S87A_K106R_K108R_K126R_K 127R_S142A_S143A_S148A_T166A_S167A_S313A_S378A_T429A_T432A_ S436A_K458R_S461A)
  source 1..1697: mol_type = other RNA
aggagagtcccgcagtcggcgtccagcggctctgcttgttcgtgtgtgtgtcgttgcaggccttattcaagcttaccatgcggctgagcaagaccctggtggacatggatatggcagactactccgccgctctggatccagcatatacaactctggagttcgaaaacgtccaggtgctgaccatgggaaatgacacatctccctcagagggcactaacctgaatgcccctaacagtctgggggtgagcgctctgtgcgcaatctgcggagacagggccaccggcaaacactacggggcttcctcttgtgatggatgcaagggctttttcagacgcgcagtccggaaaaatcatatgtacagctgccgattttcaaggcagtgcgtggtggacagagaccgccggaaccagtgcaggtattgtagactgaagaagtgcttccgagccggaatgcggcgcgaagctgtccagaatgagagggatagaattagtacacggcgagcagcctacgaagactccgcactgccaagcatcaacgctctgctgcaggccgaggtgctgtctaggcagatcgcagctcccgtgagcgggattaacggcgatatcagagccaaaaagattgcatccatcgctgacgtctgcgaatcaatgaaagagcagctgctggtgctggtggagtgggccaagtacatccctgcattttgcgaactgccactggacgatcaggtcgctctgctgcgcgcccacgcaggagagcatctgctgctgggcgccactaagcggagtatggtgttcaaagacgtgctgctgctggggaatgactatattgtccccaggcactgccctgaactggctgagatgagcagagtgtctatccgaatcctggatgaactggtgctgccattccaggagctgcagattgacgataacgaatacgcatacctgaaggccatcatctttttcgaccccgacgcaaaaggactgtccgatcctggcaagattaagcggctgcgcgctcaggtccaggtgagcctggaggactatatcaatgacaggcagtacgattcaagagggcggtttggagaactgctgctgctgctgccaaccctgcagagtattacatggcagatgatcgagcagatccagttcattaaactgttcggcatggcaaagatcgacaacctgctgcaggagatgctgctgggaggggccccctctgatgctcctcatgcacaccacccactgcatccccacctgatgcaggaacatatgggcaccaatgtgatcgtcgccaacactatgcctacacacctgtccaatggacagatgtgtgagtggccacgccccaggggccaggctgcagcccctgaagctccacagcccgcacctccagggggaagcggcagcgagccctacaaactgctgcctggagccgtggcaaccattgtgagaccactggctgccatcccccagcctactattaccaagcaggaagtcatctgaggactagtccctgttcccagagcccacttttttttctttttttgaaataaaatagcctgtctttcagatctcaaaggctcttttcagagccaccaaaaaaaaaaaaaaaaaaaaaaaaaaaaaaaaaaaaaaaaaaaaaaaaaaaaaaaaaaaaaaaaaaaaaaaaaaaaaaaaaaaaaaaaaaaaaaaaaaaaa

SEQ ID NO: 3290 - RNA, 1697 nt, synthetic construct
  misc_feature 1..1697: note = mRNA a-1 (hSL-A100) (opt28) from Homo sapiens__NP_000448.3__HNF4A(1-474)(S87A_K106R_K108R_K126R_K 127R_S142A_S143A_S148A_T166A_S167A_S313A_S378A_T429A_T432A_ S436A_K458R_S461E)
  source 1..1697: mol_type = other RNA
aggagagtcccgcagtcggcgtccagcggctctgcttgttcgtgtgtgtgtcgttgcaggccttattcaagcttaccatgcggctgagcaagaccctggtggacatggatatggcagactactccgccgctctggatccagcatatacaactctggagttcgaaaacgtccaggtgctgaccatgggaaatgacacatctccctcagagggcactaacctgaatgcccctaacagtctgggggtgagcgctctgtgcgcaatctgcggagacagggccaccggcaaacactacggggcttcctcttgtgatggatgcaagggctttttcagacgcgcagtccggaaaaatcatatgtacagctgccgattttcaaggcagtgcgtggtggacagagaccgccggaaccagtgcaggtattgtagactgaagaagtgcttccgagccggaatgcggcgcgaagctgtccagaatgagagggatagaattagtacacggcgagcagcctacgaagactccgcactgccaagcatcaacgctctgctgcaggccgaggtgctgtctaggcagatcgcagctcccgtgagcgggattaacggcgatatcagagccaaaaagattgcatccatcgctgacgtctgcgaatcaatgaaagagcagctgctggtgctggtggagtgggccaagtacatccctgcattttgcgaactgccactggacgatcaggtcgctctgctgcgcgcccacgcaggagagcatctgctgctgggcgccactaagcggagtatggtgttcaaagacgtgctgctgctggggaatgactatattgtccccaggcactgccctgaactggctgagatgagcagagtgtctatccgaatcctggatgaactggtgctgccattccaggagctgcagattgacgataacgaatacgcatacctgaaggccatcatctttttcgaccccgacgcaaaaggactgtccgatcctggcaagattaagcggctgcgcgctcaggtccaggtgagcctggaggactatatcaatgacaggcagtacgattcaagagggcggtttggagaactgctgctgctgctgccaaccctgcagagtattacatggcagatgatcgagcagatccagttcattaaactgttcggcatggcaaagatcgacaacctgctgcaggagatgctgctgggaggggccccctctgatgctcctcatgcacaccacccactgcatccccacctgatgcaggaacatatgggcaccaatgtgatcgtcgccaacactatgcctacacacctgtccaatggacagatgtgtgagtggccacgccccaggggccaggctgcagcccctgaagctccacagcccgcacctccagggggaagcggcagcgagccctacaaactgctgcctggagccgtggcaaccattgtgagaccactggaagctatcccccagcctactattaccaagcaggaggtcatctgaggactagtccctgttcccagagcccacttttttttctttttttgaaataaaatagcctgtctttcagatctcaaaggctcttttcagagccaccaaaaaaaaaaaaaaaaaaaaaaaaaaaaaaaaaaaaaaaaaaaaaaaaaaaaaaaaaaaaaaaaaaaaaaaaaaaaaaaaaaaaaaaaaaaaaaaaaaaaa

SEQ ID NO: 3291 - RNA, 1697 nt, synthetic construct
  misc_feature 1..1697: note = mRNA a-1 (hSL-A100) (opt28) from Homo sapiens__NP_000448.3__HNF4A(1-474)(S87A_K106R_K108R_K126R_K 127R_S142A_S143A_S148E_T166A_S167E_S313A_S378E_T429E_T432E_ S436E_K458R_S461E)
  source 1..1697: mol_type = other RNA
aggagagtcccgcagtcggcgtccagcggctctgcttgttcgtgtgtgtgtcgttgcaggccttattcaagcttaccatgcggctgagcaagaccctggtggacatggatatggcagactactccgccgctctggatccagcatatacaactctggagttcgaaaacgtccaggtgctgaccatgggaaatgacacatctccctcagagggcactaacctgaatgcccctaacagtctgggggtgagcgctctgtgcgcaatctgcggagacagggccaccggcaaacactacggggcttcctcttgtgatggatgcaagggctttttcagacgcgcagtccggaaaaatcatatgtacagctgccgattttcaaggcagtgcgtggtggacagagaccgccggaaccagtgcaggtattgtagactgaagaagtgcttccgagccggaatgcggcgcgaagctgtccagaatgagagggatagaattagtacacggcgagcagcctacgaagactccgagctgccaagcatcaacgcactgctgcaggctgaagtgctgtctaggcagatcgccgagcccgtgagcgggattaacggcgatatcagagctaaaaagattgcatccatcgccgacgtctgcgagtcaatgaaagaacagctgctggtgctggtggagtgggcaaagtacatccctgctttttgcgaactgccactggacgatcaggtcgccctgctgcgcgcacacgctggagagcatctgctgctgggcgccactaagcggagtatggtgttcaaagacgtgctgctgctggggaatgactatattgtccccaggcactgccctgaactggcagagatgagcagagtgtctatccgaatcctggatgaactggtgctgccattccaggagctgcagattgacgataacgaatacgcctacctgaaggctatcatctttttcgaccccgacgcaaaaggactgtccgatcctggcaagattaagcggctgcgcgcccaggtccaggtgagcctggaggactatatcaatgacaggcagtacgattcaagagggcggtttggagagctgctgctgctgctgccaaccctgcagagtattacatggcagatgatcgaacagatccagttcattaaactgttcggcatggcaaagatcgacaacctgctgcaggagatgctgctgggaggggaaccctctgatgctcctcatgcacaccacccactgcatccccacctgatgcaggagcatatgggcaccaatgtgatcgtcgccaacactatgcctacacacctgtccaatggacagatgtgtgaatggccacgccccaggggccaggctgcagagcctgaggaaccacagcccgagcctccagggggaagcggcagcgaaccctacaaactgctgcctggagccgtggctaccattgtgagaccactggaggcaatcccccagcctactattaccaagcaggaagtcatctgaggactagtccctgttcccagagcccacttttttttctttttttgaaataaaatagcctgtctttcagatctcaaaggctcttttcagagccaccaaaaaaaaaaaaaaaaaaaaaaaaaaaaaaaaaaaaaaaaaaaaaaaaaaaaaaaaaaaaaaaaaaaaaaaaaaaaaaaaaaaaaaaaaaaaaaaaaaaaa

SEQ ID NO: 3292 - RNA, 1697 nt, synthetic construct
  misc_feature 1..1697: note = mRNA a-1 (hSL-A100) (opt28) from Homo sapiens__NP_000448.3__HNF4A(1-474)(S87A_K106R_K108R_K126R_K 127R_S142A_S143A_S148A_T166A_S167A_K179R_K180R_S313A_S378A_ T429A_T432A_S436A_K458R_S461E)
  source 1..1697: mol_type = other RNA
aggagagtcccgcagtcggcgtccagcggctctgcttgttcgtgtgtgtgtcgttgcaggccttattcaagcttaccatgcggctgagcaagaccctggtggacatggatatggcagactactccgccgctctggatccagcatatacaactctggagttcgaaaacgtccaggtgctgaccatgggaaatgacacatctccctcagagggcactaacctgaatgcccctaacagtctgggggtgagcgctctgtgcgcaatctgcggagacagggccaccggcaaacactacggggcttcctcttgtgatggatgcaagggctttttcagacgcgcagtccggaaaaatcatatgtacagctgccgattttcaaggcagtgcgtggtggacagagaccgccggaaccagtgcaggtattgtagactgaagaagtgcttccgagccggaatgcggcgcgaagctgtccagaatgagagggatagaattagtacacggcgagcagcctacgaagactccgcactgccaagcatcaacgctctgctgcaggccgaggtgctgtctaggcagatcgcagctcccgtgagcgggattaacggcgatatcagagcccgccggattgcatccatcgctgacgtctgcgaatcaatgaaagagcagctgctggtgctggtggagtgggccaagtacatccctgcattttgcgaactgccactggacgatcaggtcgctctgctgagggcccacgcaggagagcatctgctgctgggcgccactaaaagaagtatggtgttcaaggacgtgctgctgctggggaatgactatattgtcccccgacactgccctgaactggctgagatgagccgggtgtctatccgcatcctggatgaactggtgctgccattccaggagctgcagattgacgataacgaatacgcatacctgaaggccatcatctttttcgaccccgacgcaaaaggactgtccgatcctggcaagattaaaaggctgagagctcaggtccaggtgagcctggaggactatatcaatgaccggcagtacgattcacgcgggaggtttggagaactgctgctgctgctgccaaccctgcagagtattacatggcagatgatcgagcagatccagttcattaagctgttcggcatggcaaagatcgacaacctgctgcaggagatgctgctgggaggggccccctctgatgctcctcatgcacaccacccactgcatccccacctgatgcaggaacatatgggcaccaatgtgatcgtcgccaacactatgcctacacacctgtccaatggacagatgtgtgagtggccaagaccccgaggccaggctgcagcccctgaagctccacagcccgcacctccagggggaagcggcagcgagccctacaaactgctgcctggagccgtggcaaccattgtgcggccactggaagctatcccccagcctactattaccaagcaggaggtcatctgaggactagtccctgttcccagagcccacttttttttctttttttgaaataaaatagcctgtctttcagatctcaaaggctcttttcagagccaccaaaaaaaaaaaaaaaaaaaaaaaaaaaaaaaaaaaaaaaaaaaaaaaaaaaaaaaaaaaaaaaaaaaaaaaaaaaaaaaaaaaaaaaaaaaaaaaaaaaaa

SEQ ID NO: 3293 - RNA, 1697 nt, synthetic construct
  misc_feature 1..1697: note = mRNA a-1 (hSL-A100) (opt28) from Homo sapiens__NP_000448.3__HNF4A(1-474)(S87A_K106R_K108R_K126R_K 127R_S142A_S143A_S148A_T166A_S167A_K300R_K307R_K309R_S313A_ S378A_T429A_T432A_S436A_K458R_S461E)
  source 1..1697: mol_type = other RNA
aggagagtcccgcagtcggcgtccagcggctctgcttgttcgtgtgtgtgtcgttgcaggccttattcaagcttaccatgcggctgagcaagaccctggtggacatggatatggcagactactccgccgctctggatccagcatatacaactctggagttcgaaaacgtccaggtgctgaccatgggaaatgacacatctccctcagagggcactaacctgaatgcccctaacagtctgggggtgagcgctctgtgcgcaatctgcggagacagggccaccggcaaacactacggggcttcctcttgtgatggatgcaagggctttttcagacgcgcagtccggaaaaatcatatgtacagctgccgattttcaaggcagtgcgtggtggacagagaccgccggaaccagtgcaggtattgtagactgaagaagtgcttccgagccggaatgcggcgcgaagctgtccagaatgagagggatagaattagtacacggcgagcagcctacgaagactccgcactgccaagcatcaacgctctgctgcaggccgaggtgctgtctaggcagatcgcagctcccgtgagcgggattaacggcgatatcagagccaaaaagattgcatccatcgctgacgtctgcgaatcaatgaaagagcagctgctggtgctggtggagtgggccaagtacatccctgcattttgcgaactgccactggacgatcaggtcgctctgctgcgcgcccacgcaggagagcatctgctgctgggcgccactaagcggagtatggtgttcaaagacgtgctgctgctggggaatgactatattgtccccaggcactgccctgaactggctgagatgagcagagtgtctatccgaatcctggatgaactggtgctgccattccaggagctgcagattgacgataacgaatacgcatacctgaaggccatcatctttttcgaccccgacgcacggggactgtccgatcctggccgcattaggagactgcgggctcaggtccaggtgagcctggaggactatatcaatgaccgccagtacgattcaagggggagatttggagaactgctgctgctgctgccaaccctgcagagtattacatggcagatgatcgagcagatccagttcattaaactgttcggcatggcaaagatcgacaacctgctgcaggagatgctgctgggaggggccccctctgatgctcctcatgcacaccacccactgcatccccacctgatgcaggaacatatgggcaccaatgtgatcgtcgccaacactatgcctacacacctgtccaatggacagatgtgtgagtggccacgaccccggggccaggctgcagcccctgaagctccacagcccgcacctccagggggaagcggcagcgagccctacaagctgctgcctggagccgtggcaaccattgtgaggccactggaagctatcccccagcctactattaccaaacaggaggtcatctgaggactagtccctgttcccagagcccacttttttttctttttttgaaataaaatagcctgtctttcagatctcaaaggctcttttcagagccaccaaaaaaaaaaaaaaaaaaaaaaaaaaaaaaaaaaaaaaaaaaaaaaaaaaaaaaaaaaaaaaaaaaaaaaaaaaaaaaaaaaaaaaaaaaaaaaaaaaaaa

SEQ ID NO: 3294 - RNA, 1697 nt, synthetic construct
  misc_feature 1..1697: note = mRNA a-1 (hSL-A100) (opt28) from Homo sapiens__NP_000448.3__HNF4A(1-474)(S87A_K106R_K108R_K126R_K 127R_S142A_S143A_S148A_T166A_S167A_S313A_S378A_T429A_T432A_ S436A_K447R_K458R_S461E_K470R)
  source 1..1697: mol_type = other RNA
aggagagtcccgcagtcggcgtccagcggctctgcttgttcgtgtgtgtgtcgttgcaggccttattcaagcttaccatgcggctgagcaagaccctggtggacatggatatggcagactactccgccgctctggatccagcatatacaactctggagttcgaaaacgtccaggtgctgaccatgggaaatgacacatctccctcagagggcactaacctgaatgcccctaacagtctgggggtgagcgctctgtgcgcaatctgcggagacagggccaccggcaaacactacggggcttcctcttgtgatggatgcaagggctttttcagacgcgcagtccggaaaaatcatatgtacagctgccgattttcaaggcagtgcgtggtggacagagaccgccggaaccagtgcaggtattgtagactgaagaagtgcttccgagccggaatgcggcgcgaagctgtccagaatgagagggatagaattagtacacggcgagcagcctacgaagactccgcactgccaagcatcaacgctctgctgcaggccgaggtgctgtctaggcagatcgcagctcccgtgagcgggattaacggcgatatcagagccaaaaagattgcatccatcgctgacgtctgcgaatcaatgaaagagcagctgctggtgctggtggagtgggccaagtacatccctgcattttgcgaactgccactggacgatcaggtcgctctgctgcgcgcccacgcaggagagcatctgctgctgggcgccactaagcggagtatggtgttcaaagacgtgctgctgctggggaatgactatattgtccccaggcactgccctgaactggctgagatgagcagagtgtctatccgaatcctggatgaactggtgctgccattccaggagctgcagattgacgataacgaatacgcatacctgaaggccatcatctttttcgaccccgacgcaaaaggactgtccgatcctggcaagattaagcggctgcgcgctcaggtccaggtgagcctggaggactatatcaatgacaggcagtacgattcaagagggcggtttggagaactgctgctgctgctgccaaccctgcagagtattacatggcagatgatcgagcagatccagttcattaaactgttcggcatggcaaagatcgacaacctgctgcaggagatgctgctgggaggggccccctctgatgctcctcatgcacaccacccactgcatccccacctgatgcaggaacatatgggcaccaatgtgatcgtcgccaacactatgcctacacacctgtccaatggacagatgtgtgagtggccacgccccaggggccaggctgcagcccctgaagctccacagcccgcacctccagggggaagcggcagcgagccctacagactgctgcctggagccgtggcaaccattgtgcgaccactggaagctatcccccagcctactattacccggcaggaggtcatctgaggactagtccctgttcccagagcccacttttttttctttttttgaaataaaatagcctgtctttcagatctcaaaggctcttttcagagccaccaaaaaaaaaaaaaaaaaaaaaaaaaaaaaaaaaaaaaaaaaaaaaaaaaaaaaaaaaaaaaaaaaaaaaaaaaaaaaaaaaaaaaaaaaaaaaaaaaaaaa

SEQ ID NO: 3295 - RNA, 1697 nt, synthetic construct
  misc_feature 1..1697: note = mRNA a-1 (hSL-A100) (opt28) from Homo sapiens__NP_000448.3__HNF4A(1-474)(S87A_K106R_K108R_K126R_K 127R_S142A_S143A_S148A_T166A_S167A_K179R_K180R_K234R_K300R_ K307R_K309R_S313A_S378A_T429A_T432A_S436A_K447R_K458R_S461E _K470R)
  source 1..1697: mol_type = other RNA
aggagagtcccgcagtcggcgtccagcggctctgcttgttcgtgtgtgtgtcgttgcaggccttattcaagcttaccatgcggctgagcaagaccctggtggacatggatatggcagactactccgccgctctggatccagcatatacaactctggagttcgaaaacgtccaggtgctgaccatgggaaatgacacatctccctcagagggcactaacctgaatgcccctaacagtctgggggtgagcgctctgtgcgcaatctgcggagacagggccaccggcaaacactacggggcttcctcttgtgatggatgcaagggctttttcagacgcgcagtccggaaaaatcatatgtacagctgccgattttcaaggcagtgcgtggtggacagagaccgccggaaccagtgcaggtattgtagactgaagaagtgcttccgagccggaatgcggcgcgaagctgtccagaatgagagggatagaattagtacacggcgagcagcctacgaagactccgcactgccaagcatcaacgctctgctgcaggccgaggtgctgtctaggcagatcgcagctcccgtgagcgggattaacggcgatatcagagcccgccggattgcatccatcgctgacgtctgcgaatcaatgaaagagcagctgctggtgctggtggagtgggccaagtacatccctgcattttgcgaactgccactggacgatcaggtcgctctgctgagggcccacgcaggagagcatctgctgctgggcgccactagacgaagtatggtgttcaaagacgtgctgctgctggggaatgactatattgtcccccggcactgccctgaactggctgagatgagccgcgtgtctatcaggatcctggatgaactggtgctgccattccaggagctgcagattgacgataacgaatacgcatacctgaaggccatcatctttttcgaccccgacgcaagaggactgtccgatcctggccggattcgcaggctgagagctcaggtccaggtgagcctggaggactatatcaatgaccgacagtacgattcacgggggaggtttggagaactgctgctgctgctgccaaccctgcagagtattacatggcagatgatcgagcagatccagttcattaagctgttcggcatggcaaaaatcgacaacctgctgcaggagatgctgctgggaggggccccctctgatgctcctcatgcacaccacccactgcatccccacctgatgcaggaacatatgggcaccaatgtgatcgtcgccaacactatgcctacacacctgtccaatggacagatgtgtgagtggccaagaccccgcggccaggctgcagcccctgaagctccacagcccgcacctccagggggaagcggcagcgagccctaccggctgctgcctggagccgtggcaaccattgtgcgaccactggaagctatcccccagcctactattaccaggcaggaggtcatctgaggactagtccctgttcccagagcccacttttttttctttttttgaaataaaatagcctgtctttcagatctcaaaggctcttttcagagccaccaaaaaaaaaaaaaaaaaaaaaaaaaaaaaaaaaaaaaaaaaaaaaaaaaaaaaaaaaaaaaaaaaaaaaaaaaaaaaaaaaaaaaaaaaaaaaaaaaaaaa

SEQ ID NO: 3296 - RNA, 1697 nt, synthetic construct
  misc_feature 1..1697: note = mRNA a-1 (hSL-A100) (opt28) from Homo sapiens__NP_000448.3__HNF4A(1-474)(S87A_S95A_S99A_K106R_K10 8R_K126R_K127R_S142A_S143A_S148A_T166A_S167A_S313A_S378A_T4 29A_T432A_S436A_K458R_S461E)
  source 1..1697: mol_type = other RNA
aggagagtcccgcagtcggcgtccagcggctctgcttgttcgtgtgtgtgtcgttgcaggccttattcaagcttaccatgcggctgagcaagaccctggtggacatggatatggcagactactccgccgctctggatccagcatatacaactctggagttcgaaaacgtccaggtgctgaccatgggaaatgacacatctccctcagagggcactaacctgaatgcccctaacagtctgggggtgagcgctctgtgcgcaatctgcggagacagggccaccggcaaacactacggggcttcctcttgtgatggatgcaagggctttttcagacgcgcagtccggaaaaatcatatgtacgcctgccgatttgctaggcagtgcgtggtggacagagaccgccggaaccagtgcaggtattgtagactgaagaagtgcttccgagcaggaatgcggcgcgaagccgtccagaatgagagggatagaattagcacacggcgagcagcttacgaagactcagccctgccaagtatcaacgcactgctgcaggctgaggtgctgtccaggcagatcgccgcacccgtgagcgggattaacggcgatatcagagctaaaaagattgcctctatcgcagacgtctgcgaaagcatgaaagagcagctgctggtgctggtggagtgggctaagtacatccctgccttttgcgaactgccactggacgatcaggtcgcactgctgcgcgcccacgctggagagcatctgctgctgggcgcaactaagcggtccatggtgttcaaagacgtgctgctgctggggaatgactatattgtccccaggcactgccctgaactggccgagatgtcaagagtgagtatccgaatcctggatgaactggtgctgccattccaggagctgcagattgacgataacgaatacgcatacctgaaggctatcatctttttcgaccccgacgcaaaaggactgagcgatcctggcaagattaagcggctgcgcgcccaggtccaggtgtctctggaggactatatcaatgacaggcagtacgattccagagggcggtttggagaactgctgctgctgctgccaaccctgcagagcattacatggcagatgatcgagcagatccagttcattaaactgttcggcatggctaagatcgacaacctgctgcaggagatgctgctgggaggggcaccctcagatgcccctcatgctcaccacccactgcatccccacctgatgcaggaacatatgggcaccaatgtgatcgtcgcaaacactatgcctacacacctgagtaatggacagatgtgtgagtggccacgccccaggggccaggccgctgcacctgaagccccacagcccgcacctccagggggatctggctccgagccctacaaactgctgcctggagctgtggccaccattgtgagaccactggaagcaatcccccagcctactattaccaagcaggaggtcatctgaggactagtccctgttcccagagcccacttttttttctttttttgaaataaaatagcctgtctttcagatctcaaaggctcttttcagagccaccaaaaaaaaaaaaaaaaaaaaaaaaaaaaaaaaaaaaaaaaaaaaaaaaaaaaaaaaaaaaaaaaaaaaaaaaaaaaaaaaaaaaaaaaaaaaaaaaaaaaa

SEQ ID NO: 3297 - RNA, 1697 nt, synthetic construct
  misc_feature 1..1697: note = mRNA a-1 (hSL-A100) (opt28) from Homo sapiens__NP_000448.3__HNF4A(1-474)(S87A_K106R_K108R_K126R_K 127R_S138A_T139A_S142A_S143A_S148A_T166A_S167A_S313A_S378A_ T429A_T432A_S436A_K458R_S461E)
  source 1..1697: mol_type = other RNA
aggagagtcccgcagtcggcgtccagcggctctgcttgttcgtgtgtgtgtcgttgcaggccttattcaagcttaccatgcggctgagcaagaccctggtggacatggatatggcagactactccgccgctctggatccagcatatacaactctggagttcgaaaacgtccaggtgctgaccatgggaaatgacacatctccctcagagggcactaacctgaatgcccctaacagtctgggggtgagcgctctgtgcgcaatctgcggagacagggccaccggcaaacactacggggcttcctcttgtgatggatgcaagggctttttcagacgcgcagtccggaaaaatcatatgtacagctgccgattttcaaggcagtgcgtggtggacagagaccgccggaaccagtgcaggtattgtagactgaagaagtgcttccgagccggaatgcggcgcgaagctgtccagaatgagagggatagaattgcagcccggcgagcagcttacgaagacagtgccctgccatccatcaacgcactgctgcaggctgaggtgctgagcaggcagatcgccgcacccgtgtctgggattaacggcgatatcagagctaaaaagattgccagcatcgcagacgtctgcgaatccatgaaagagcagctgctggtgctggtggagtgggctaagtacatccctgccttttgcgaactgccactggacgatcaggtcgcactgctgcgcgcccacgctggagagcatctgctgctgggcgcaacaaagcggtcaatggtgttcaaagacgtgctgctgctggggaatgactatattgtccccaggcactgccctgaactggccgagatgagtagagtgagcatccgaatcctggatgaactggtgctgccattccaggagctgcagattgacgataacgaatacgcatacctgaaggctatcatctttttcgaccccgacgcaaaaggactgtctgatcctggcaagattaagcggctgcgcgcccaggtccaggtgtccctggaggactatatcaatgacaggcagtacgatagcagagggcggtttggagaactgctgctgctgctgccaactctgcagtcaattacctggcagatgatcgagcagatccagttcattaaactgttcggcatggctaagatcgacaacctgctgcaggagatgctgctgggaggggcacccagtgatgcccctcatgctcaccacccactgcatccccacctgatgcaggaacatatgggcacaaatgtgatcgtcgcaaacaccatgcctactcacctgtctaatggacagatgtgtgagtggccacgccccaggggccaggccgctgcacctgaagccccacagcccgcacctccagggggatccggcagcgagccctacaaactgctgcctggagctgtggccacaattgtgagaccactggaagcaatcccccagcctaccattactaagcaggaggtcatctgaggactagtccctgttcccagagcccacttttttttctttttttgaaataaaatagcctgtctttcagatctcaaaggctcttttcagagccaccaaaaaaaaaaaaaaaaaaaaaaaaaaaaaaaaaaaaaaaaaaaaaaaaaaaaaaaaaaaaaaaaaaaaaaaaaaaaaaaaaaaaaaaaaaaaaaaaaaaaa

SEQ ID NO: 3298 - RNA, 1697 nt, synthetic construct
  misc_feature 1..1697: note = mRNA a-1 (hSL-A100) (opt28) from Homo sapiens__NP_000448.3__HNF4A(1-474)(S87A_S95A_S99A_K106R_K10 8R_K126R_K127R_S138A_T139A_S142A_S143A_S148A_T166A_S167A_S3 13A_S378A_T429A_T432A_S436A_K458R_S461E)
  source 1..1697: mol_type = other RNA
aggagagtcccgcagtcggcgtccagcggctctgcttgttcgtgtgtgtgtcgttgcaggccttattcaagcttaccatgcggctgagcaagaccctggtggacatggatatggcagactactccgccgctctggatccagcatatacaactctggagttcgaaaacgtccaggtgctgaccatgggaaatgacacatctccctcagagggcactaacctgaatgcccctaacagtctgggggtgagcgctctgtgcgcaatctgcggagacagggccaccggcaaacactacggggcttcctcttgtgatggatgcaagggctttttcagacgcgcagtccggaaaaatcatatgtacgcctgccgatttgctaggcagtgcgtggtggacagagaccgccggaaccagtgcaggtattgtagactgaagaagtgcttccgagcaggaatgcggcgcgaagccgtccagaatgagagggatagaattgcagctcggcgagccgcatacgaagacagcgctctgccatcaatcaacgccctgctgcaggcagaggtgctgagtaggcagatcgctgcccccgtgtccgggattaacggcgatatcagagctaaaaagattgcaagcatcgccgacgtctgcgaatctatgaaagagcagctgctggtgctggtggagtgggcaaagtacatccctgccttttgcgaactgccactggacgatcaggtcgctctgctgcgcgcacacgccggagagcatctgctgctgggcgcaacaaagcggagcatggtgttcaaagacgtgctgctgctggggaatgactatattgtccccaggcactgccctgaactggctgagatgtccagagtgtcaatccgaatcctggatgaactggtgctgccattccaggagctgcagattgacgataacgaatacgcatacctgaaggccatcatctttttcgaccccgacgctaaaggactgagtgatcctggcaagattaagcggctgcgcgcacaggtccaggtgagcctggaggactatatcaatgacaggcagtacgattctagagggcggtttggagaactgctgctgctgctgccaactctgcagtccattacctggcagatgatcgagcagatccagttcattaaactgttcggcatggccaagatcgacaacctgctgcaggagatgctgctgggaggggctcccagcgatgcacctcatgcccaccacccactgcatccccacctgatgcaggaacatatgggcacaaatgtgatcgtcgctaacaccatgcctactcacctgtcaaatggacagatgtgtgagtggccacgccccaggggccaggcagccgcacctgaagctccacagcccgcccctccagggggaagtggctctgagccctacaaactgctgcctggagcagtggctacaattgtgagaccactggaagccatcccccagcctaccattactaagcaggaggtcatctgaggactagtccctgttcccagagcccacttttttttctttttttgaaataaaatagcctgtctttcagatctcaaaggctcttttcagagccaccaaaaaaaaaaaaaaaaaaaaaaaaaaaaaaaaaaaaaaaaaaaaaaaaaaaaaaaaaaaaaaaaaaaaaaaaaaaaaaaaaaaaaaaaaaaaaaaaaaaaa

SEQ ID NO: 3299 - RNA, 1697 nt, synthetic construct
  misc_feature 1..1697: note = mRNA a-1 (hSL-A100) (opt29) from Homo sapiens__NP_000448.3__HNF4A(1-474) R9822, R10595
  source 1..1697: mol_type = other RNA
aggagagtcccgcagtcggcgtccagcggctctgcttgttcgtgtgtgtgtcgttgcaggccttattcaagcttaccatgagactgagcaagaccctggtggacatggacatggccgactactctgccgccctggaccctgcctacaccaccctggagttcgaaaacgtgcaagtgctgaccatgggcaacgacaccagccctagcgagggcaccaacctgaacgcccctaatagcctgggagtgtccgccctgtgtgccatctgtggcgatagagccaccggcaagcactacggcgccagctcttgtgatggctgcaagggcttcttccggcggagcgtgcggaagaaccacatgtacagctgccggttcagccggcagtgcgtggtggacaaggataagcggaaccagtgccggtactgcagactgaagaagtgcttcagagccggcatgaagaaagaagccgtgcagaacgagcgggaccggatcagcaccagaagaagcagctacgaggacagcagcctgcccagcatcaacgccctgctgcaggccgaggtgctgagcagacagatcaccagcccagtgtccggcatcaacggcgacatccgggccaagaagatcgccagcattgccgacgtgtgcgagagcatgaaggaacagctgctggtgctggtggaatgggccaagtacatccccgccttttgcgagctgcccctggacgatcaggtggccctgctgagagcacacgccggcgaacatctgctgctgggagccaccaagcggagcatggtgttcaaggacgtgctgctgctgggcaacgactacatcgtgcccagacactgccctgagctggccgagatgagccgggtgtccatcagaatcctggacgaactggtgctgccgtttcaggaactgcagatcgacgacaacgagtacgcctacctgaaggccatcatctttttcgaccccgacgccaagggcctgagcgaccctggcaagatcaagcggctgagaagccaggtgcaagtgtccctggaagattacatcaacgaccggcagtacgacagccggggcagatttggcgaactgctcctgctgctgcccaccctgcagagcatcacctggcagatgatcgagcagatccagttcatcaagctgttcggcatggccaagatcgacaatctgctgcaggaaatgctgctcgggggcagcccttctgatgcccctcatgcccaccaccctctgcaccctcacctgatgcaagaacacatgggcaccaatgtgatcgtggccaacacaatgcccacccacctgagcaacggccagatgtgcgagtggcccagacctagaggacaggccgccacacctgagacacctcagccttctccacctggcggctctggcagcgagccttacaaactgctgcctggcgctgtggccaccatcgtgaaacctctgagcgccatcccccagcccaccatcaccaagcaggaagtgatctgaggactagtccctgttcccagagcccacttttttttctttttttgaaataaaatagcctgtctttcagatctcaaaggctcttttcagagccaccaaaaaaaaaaaaaaaaaaaaaaaaaaaaaaaaaaaaaaaaaaaaaaaaaaaaaaaaaaaaaaaaaaaaaaaaaaaaaaaaaaaaaaaaaaaaaaaaaaaaa

SEQ ID NO: 3300 - RNA, 1697 nt, synthetic construct
  misc_feature 1..1697: note = mRNA a-1 (hSL-A100) (opt29) from Homo sapiens__NP_000448.3__HNF4A(1-474)(S313A)
  source 1..1697: mol_type = other RNA
aggagagtcccgcagtcggcgtccagcggctctgcttgttcgtgtgtgtgtcgttgcaggccttattcaagcttaccatgagactgagcaagaccctggtggacatggacatggccgactactctgccgccctggaccctgcctacaccaccctggagttcgaaaacgtgcaagtgctgaccatgggcaacgacaccagccctagcgagggcaccaacctgaacgcccctaatagcctgggagtgtccgccctgtgtgccatctgtggcgatagagccaccggcaagcactacggcgccagctcttgtgatggctgcaagggcttcttccggcggagcgtgcggaagaaccacatgtacagctgccggttcagccggcagtgcgtggtggacaaggataagcggaaccagtgccggtactgcagactgaagaagtgcttcagagccggcatgaagaaagaagccgtgcagaacgagcgggaccggatcagcaccagaagaagcagctacgaggacagcagcctgcccagcatcaacgccctgctgcaggccgaggtgctgagcagacagatcaccagcccagtgtccggcatcaacggcgacatccgggccaagaagatcgccagcattgccgacgtgtgcgagagcatgaaggaacagctgctggtgctggtggaatgggccaagtacatccccgccttttgcgagctgcccctggacgatcaggtggccctgctgagagcacacgccggcgaacatctgctgctgggagccaccaagcggagcatggtgttcaaggacgtgctgctgctgggcaacgactacatcgtgcccagacactgccctgagctggccgagatgagccgggtgtccatcagaatcctggacgaactggtgctgccgtttcaggaactgcagatcgacgacaacgagtacgcctacctgaaggccatcatctttttcgaccccgacgccaagggcctgagcgaccctggcaagatcaagcggctgagagcccaggtgcaagtgtccctggaagattacatcaacgaccggcagtacgacagccggggcagatttggcgaactgctcctgctgctgcccaccctgcagagcatcacctggcagatgatcgagcagatccagttcatcaagctgttcggcatggccaagatcgacaatctgctgcaggaaatgctgctcgggggcagcccttctgatgcccctcatgcccaccaccctctgcaccctcacctgatgcaagaacacatgggcaccaatgtgatcgtggccaacacaatgcccacccacctgagcaacggccagatgtgcgagtggcccagacctagaggacaggccgccacacctgagacacctcagccttctccacctggcggctctggcagcgagccttacaaactgctgcctggcgctgtggccaccatcgtgaaacctctgagcgccatcccccagcccaccatcaccaagcaggaagtgatctgaggactagtccctgttcccagagcccacttttttttctttttttgaaataaaatagcctgtctttcagatctcaaaggctcttttcagagccaccaaaaaaaaaaaaaaaaaaaaaaaaaaaaaaaaaaaaaaaaaaaaaaaaaaaaaaaaaaaaaaaaaaaaaaaaaaaaaaaaaaaaaaaaaaaaaaaaaaaaa

SEQ ID NO: 3301 - RNA, 1697 nt, synthetic construct
  misc_feature 1..1697: note = mRNA a-1 (hSL-A100) (opt29) from Homo sapiens__NP_000448.3__HNF4A(1-474)(S313E)
  source 1..1697: mol_type = other RNA
aggagagtcccgcagtcggcgtccagcggctctgcttgttcgtgtgtgtgtcgttgcaggccttattcaagcttaccatgagactgagcaagaccctggtggacatggacatggccgactactctgccgccctggaccctgcctacaccaccctggagttcgaaaacgtgcaagtgctgaccatgggcaacgacaccagccctagcgagggcaccaacctgaacgcccctaatagcctgggagtgtccgccctgtgtgccatctgtggcgatagagccaccggcaagcactacggcgccagctcttgtgatggctgcaagggcttcttccggcggagcgtgcggaagaaccacatgtacagctgccggttcagccggcagtgcgtggtggacaaggataagcggaaccagtgccggtactgcagactgaagaagtgcttcagagccggcatgaagaaagaagccgtgcagaacgagcgggaccggatcagcaccagaagaagcagctacgaggacagcagcctgcccagcatcaacgccctgctgcaggccgaggtgctgagcagacagatcaccagcccagtgtccggcatcaacggcgacatccgggccaagaagatcgccagcattgccgacgtgtgcgagagcatgaaggaacagctgctggtgctggtggaatgggccaagtacatccccgccttttgcgagctgcccctggacgatcaggtggccctgctgagagcacacgccggcgaacatctgctgctgggagccaccaagcggagcatggtgttcaaggacgtgctgctgctgggcaacgactacatcgtgcccagacactgccctgagctggccgagatgagccgggtgtccatcagaatcctggacgaactggtgctgccgtttcaggaactgcagatcgacgacaacgagtacgcctacctgaaggccatcatctttttcgaccccgacgccaagggcctgagcgaccctggcaagatcaagcggctgagagaacaggtgcaagtgtccctggaagattacatcaacgaccggcagtacgacagccggggcagatttggcgaactgctcctgctgctgcccaccctgcagagcatcacctggcagatgatcgagcagatccagttcatcaagctgttcggcatggccaagatcgacaatctgctgcaggaaatgctgctcgggggcagcccttctgatgcccctcatgcccaccaccctctgcaccctcacctgatgcaagaacacatgggcaccaatgtgatcgtggccaacacaatgcccacccacctgagcaacggccagatgtgcgagtggcccagacctagaggacaggccgccacacctgagacacctcagccttctccacctggcggctctggcagcgagccttacaaactgctgcctggcgctgtggccaccatcgtgaaacctctgagcgccatcccccagcccaccatcaccaagcaggaagtgatctgaggactagtccctgttcccagagcccacttttttttctttttttgaaataaaatagcctgtctttcagatctcaaaggctcttttcagagccaccaaaaaaaaaaaaaaaaaaaaaaaaaaaaaaaaaaaaaaaaaaaaaaaaaaaaaaaaaaaaaaaaaaaaaaaaaaaaaaaaaaaaaaaaaaaaaaaaaaaaa

SEQ ID NO: 3302 - RNA, 1697 nt, synthetic construct
  misc_feature 1..1697: note = mRNA a-1 (hSL-A100) (opt29) from Homo sapiens__NP_000448.3__HNF4A(1-474)(S142A_S143A)
  source 1..1697: mol_type = other RNA
aggagagtcccgcagtcggcgtccagcggctctgcttgttcgtgtgtgtgtcgttgcaggccttattcaagcttaccatgagactgagcaagaccctggtggacatggacatggccgactactctgccgccctggaccctgcctacaccaccctggagttcgaaaacgtgcaagtgctgaccatgggcaacgacaccagccctagcgagggcaccaacctgaacgcccctaatagcctgggagtgtccgccctgtgtgccatctgtggcgatagagccaccggcaagcactacggcgccagctcttgtgatggctgcaagggcttcttccggcggagcgtgcggaagaaccacatgtacagctgccggttcagccggcagtgcgtggtggacaaggataagcggaaccagtgccggtactgcagactgaagaagtgcttcagagccggcatgaagaaagaagccgtgcagaacgagcgggaccggatcagcaccagaagagccgcctacgaggacagcagcctgcccagcatcaacgccctgctgcaggccgaggtgctgagcagacagatcaccagcccagtgtccggcatcaacggcgacatccgggccaagaagatcgccagcattgccgacgtgtgcgagagcatgaaggaacagctgctggtgctggtggaatgggccaagtacatccccgccttttgcgagctgcccctggacgatcaggtggccctgctgagagcacacgccggcgaacatctgctgctgggagccaccaagcggagcatggtgttcaaggacgtgctgctgctgggcaacgactacatcgtgcccagacactgccctgagctggccgagatgagccgggtgtccatcagaatcctggacgaactggtgctgccgtttcaggaactgcagatcgacgacaacgagtacgcctacctgaaggccatcatctttttcgaccccgacgccaagggcctgagcgaccctggcaagatcaagcggctgagaagccaggtgcaagtgtccctggaagattacatcaacgaccggcagtacgacagccggggcagatttggcgaactgctcctgctgctgcccaccctgcagagcatcacctggcagatgatcgagcagatccagttcatcaagctgttcggcatggccaagatcgacaatctgctgcaggaaatgctgctcgggggcagcccttctgatgcccctcatgcccaccaccctctgcaccctcacctgatgcaagaacacatgggcaccaatgtgatcgtggccaacacaatgcccacccacctgagcaacggccagatgtgcgagtggcccagacctagaggacaggccgccacacctgagacacctcagccttctccacctggcggctctggcagcgagccttacaaactgctgcctggcgctgtggccaccatcgtgaaacctctgagcgccatcccccagcccaccatcaccaagcaggaagtgatctgaggactagtccctgttcccagagcccacttttttttctttttttgaaataaaatagcctgtctttcagatctcaaaggctcttttcagagccaccaaaaaaaaaaaaaaaaaaaaaaaaaaaaaaaaaaaaaaaaaaaaaaaaaaaaaaaaaaaaaaaaaaaaaaaaaaaaaaaaaaaaaaaaaaaaaaaaaaaaa

SEQ ID NO: 3303 - RNA, 1697 nt, synthetic construct
  misc_feature 1..1697: note = mRNA a-1 (hSL-A100) (opt29) from Homo sapiens__NP_000448.3__HNF4A(1-474)(S142E_S143E)
  source 1..1697: mol_type = other RNA
aggagagtcccgcagtcggcgtccagcggctctgcttgttcgtgtgtgtgtcgttgcaggccttattcaagcttaccatgagactgagcaagaccctggtggacatggacatggccgactactctgccgccctggaccctgcctacaccaccctggagttcgaaaacgtgcaagtgctgaccatgggcaacgacaccagccctagcgagggcaccaacctgaacgcccctaatagcctgggagtgtccgccctgtgtgccatctgtggcgatagagccaccggcaagcactacggcgccagctcttgtgatggctgcaagggcttcttccggcggagcgtgcggaagaaccacatgtacagctgccggttcagccggcagtgcgtggtggacaaggataagcggaaccagtgccggtactgcagactgaagaagtgcttcagagccggcatgaagaaagaagccgtgcagaacgagcgggaccggatcagcaccagaagagaagagtacgaggacagcagcctgcccagcatcaacgccctgctgcaggccgaggtgctgagcagacagatcaccagcccagtgtccggcatcaacggcgacatccgggccaagaagatcgccagcattgccgacgtgtgcgagagcatgaaggaacagctgctggtgctggtggaatgggccaagtacatccccgccttttgcgagctgcccctggacgatcaggtggccctgctgagagcacacgccggcgaacatctgctgctgggagccaccaagcggagcatggtgttcaaggacgtgctgctgctgggcaacgactacatcgtgcccagacactgccctgagctggccgagatgagccgggtgtccatcagaatcctggacgaactggtgctgccgtttcaggaactgcagatcgacgacaacgagtacgcctacctgaaggccatcatctttttcgaccccgacgccaagggcctgagcgaccctggcaagatcaagcggctgagaagccaggtgcaagtgtccctggaagattacatcaacgaccggcagtacgacagccggggcagatttggcgaactgctcctgctgctgcccaccctgcagagcatcacctggcagatgatcgagcagatccagttcatcaagctgttcggcatggccaagatcgacaatctgctgcaggaaatgctgctcgggggcagcccttctgatgcccctcatgcccaccaccctctgcaccctcacctgatgcaagaacacatgggcaccaatgtgatcgtggccaacacaatgcccacccacctgagcaacggccagatgtgcgagtggcccagacctagaggacaggccgccacacctgagacacctcagccttctccacctggcggctctggcagcgagccttacaaactgctgcctggcgctgtggccaccatcgtgaaacctctgagcgccatcccccagcccaccatcaccaagcaggaagtgatctgaggactagtccctgttcccagagcccacttttttttctttttttgaaataaaatagcctgtctttcagatctcaaaggctcttttcagagccaccaaaaaaaaaaaaaaaaaaaaaaaaaaaaaaaaaaaaaaaaaaaaaaaaaaaaaaaaaaaaaaaaaaaaaaaaaaaaaaaaaaaaaaaaaaaaaaaaaaaaa

SEQ ID NO: 3304 - RNA, 1697 nt, synthetic construct
  misc_feature 1..1697: note = mRNA a-1 (hSL-A100) (opt29) from Homo sapiens__NP_000448.3__HNF4A(1-474)(S143A)
  source 1..1697: mol_type = other RNA
aggagagtcccgcagtcggcgtccagcggctctgcttgttcgtgtgtgtgtcgttgcaggccttattcaagcttaccatgagactgagcaagaccctggtggacatggacatggccgactactctgccgccctggaccctgcctacaccaccctggagttcgaaaacgtgcaagtgctgaccatgggcaacgacaccagccctagcgagggcaccaacctgaacgcccctaatagcctgggagtgtccgccctgtgtgccatctgtggcgatagagccaccggcaagcactacggcgccagctcttgtgatggctgcaagggcttcttccggcggagcgtgcggaagaaccacatgtacagctgccggttcagccggcagtgcgtggtggacaaggataagcggaaccagtgccggtactgcagactgaagaagtgcttcagagccggcatgaagaaagaagccgtgcagaacgagcgggaccggatcagcaccagaagaagcgcctacgaggacagcagcctgcccagcatcaacgccctgctgcaggccgaggtgctgagcagacagatcaccagcccagtgtccggcatcaacggcgacatccgggccaagaagatcgccagcattgccgacgtgtgcgagagcatgaaggaacagctgctggtgctggtggaatgggccaagtacatccccgccttttgcgagctgcccctggacgatcaggtggccctgctgagagcacacgccggcgaacatctgctgctgggagccaccaagcggagcatggtgttcaaggacgtgctgctgctgggcaacgactacatcgtgcccagacactgccctgagctggccgagatgagccgggtgtccatcagaatcctggacgaactggtgctgccgtttcaggaactgcagatcgacgacaacgagtacgcctacctgaaggccatcatctttttcgaccccgacgccaagggcctgagcgaccctggcaagatcaagcggctgagaagccaggtgcaagtgtccctggaagattacatcaacgaccggcagtacgacagccggggcagatttggcgaactgctcctgctgctgcccaccctgcagagcatcacctggcagatgatcgagcagatccagttcatcaagctgttcggcatggccaagatcgacaatctgctgcaggaaatgctgctcgggggcagcccttctgatgcccctcatgcccaccaccctctgcaccctcacctgatgcaagaacacatgggcaccaatgtgatcgtggccaacacaatgcccacccacctgagcaacggccagatgtgcgagtggcccagacctagaggacaggccgccacacctgagacacctcagccttctccacctggcggctctggcagcgagccttacaaactgctgcctggcgctgtggccaccatcgtgaaacctctgagcgccatcccccagcccaccatcaccaagcaggaagtgatctgaggactagtccctgttcccagagcccacttttttttctttttttgaaataaaatagcctgtctttcagatctcaaaggctcttttcagagccaccaaaaaaaaaaaaaaaaaaaaaaaaaaaaaaaaaaaaaaaaaaaaaaaaaaaaaaaaaaaaaaaaaaaaaaaaaaaaaaaaaaaaaaaaaaaaaaaaaaaaa

SEQ ID NO: 3305 - RNA, 1697 nt, synthetic construct
  misc_feature 1..1697: note = mRNA a-1 (hSL-A100) (opt29) from Homo sapiens__NP_000448.3__HNF4A(1-474)(T166A)
  source 1..1697: mol_type = other RNA
aggagagtcccgcagtcggcgtccagcggctctgcttgttcgtgtgtgtgtcgttgcaggccttattcaagcttaccatgagactgagcaagaccctggtggacatggacatggccgactactctgccgccctggaccctgcctacaccaccctggagttcgaaaacgtgcaagtgctgaccatgggcaacgacaccagccctagcgagggcaccaacctgaacgcccctaatagcctgggagtgtccgccctgtgtgccatctgtggcgatagagccaccggcaagcactacggcgccagctcttgtgatggctgcaagggcttcttccggcggagcgtgcggaagaaccacatgtacagctgccggttcagccggcagtgcgtggtggacaaggataagcggaaccagtgccggtactgcagactgaagaagtgcttcagagccggcatgaagaaagaagccgtgcagaacgagcgggaccggatcagcaccagaagaagcagctacgaggacagcagcctgcccagcatcaacgccctgctgcaggccgaggtgctgagcagacagatcgccagcccagtgtccggcatcaacggcgacatccgggccaagaagatcgccagcattgccgacgtgtgcgagagcatgaaggaacagctgctggtgctggtggaatgggccaagtacatccccgccttttgcgagctgcccctggacgatcaggtggccctgctgagagcacacgccggcgaacatctgctgctgggagccaccaagcggagcatggtgttcaaggacgtgctgctgctgggcaacgactacatcgtgcccagacactgccctgagctggccgagatgagccgggtgtccatcagaatcctggacgaactggtgctgccgtttcaggaactgcagatcgacgacaacgagtacgcctacctgaaggccatcatctttttcgaccccgacgccaagggcctgagcgaccctggcaagatcaagcggctgagaagccaggtgcaagtgtccctggaagattacatcaacgaccggcagtacgacagccggggcagatttggcgaactgctcctgctgctgcccaccctgcagagcatcacctggcagatgatcgagcagatccagttcatcaagctgttcggcatggccaagatcgacaatctgctgcaggaaatgctgctcgggggcagcccttctgatgcccctcatgcccaccaccctctgcaccctcacctgatgcaagaacacatgggcaccaatgtgatcgtggccaacacaatgcccacccacctgagcaacggccagatgtgcgagtggcccagacctagaggacaggccgccacacctgagacacctcagccttctccacctggcggctctggcagcgagccttacaaactgctgcctggcgctgtggccaccatcgtgaaacctctgagcgccatcccccagcccaccatcaccaagcaggaagtgatctgaggactagtccctgttcccagagcccacttttttttctttttttgaaataaaatagcctgtctttcagatctcaaaggctcttttcagagccaccaaaaaaaaaaaaaaaaaaaaaaaaaaaaaaaaaaaaaaaaaaaaaaaaaaaaaaaaaaaaaaaaaaaaaaaaaaaaaaaaaaaaaaaaaaaaaaaaaaaaa

SEQ ID NO: 3306 - RNA, 1697 nt, synthetic construct
  misc_feature 1..1697: note = mRNA a-1 (hSL-A100) (opt29) from Homo sapiens__NP_000448.3__HNF4A(1-474)(S167E)
  source 1..1697: mol_type = other RNA
aggagagtcccgcagtcggcgtccagcggctctgcttgttcgtgtgtgtgtcgttgcaggccttattcaagcttaccatgagactgagcaagaccctggtggacatggacatggccgactactctgccgccctggaccctgcctacaccaccctggagttcgaaaacgtgcaagtgctgaccatgggcaacgacaccagccctagcgagggcaccaacctgaacgcccctaatagcctgggagtgtccgccctgtgtgccatctgtggcgatagagccaccggcaagcactacggcgccagctcttgtgatggctgcaagggcttcttccggcggagcgtgcggaagaaccacatgtacagctgccggttcagccggcagtgcgtggtggacaaggataagcggaaccagtgccggtactgcagactgaagaagtgcttcagagccggcatgaagaaagaagccgtgcagaacgagcgggaccggatcagcaccagaagaagcagctacgaggacagcagcctgcccagcatcaacgccctgctgcaggccgaggtgctgagcagacagatcaccgaaccagtgtccggcatcaacggcgacatccgggccaagaagatcgccagcattgccgacgtgtgcgagagcatgaaggaacagctgctggtgctggtggaatgggccaagtacatccccgccttttgcgagctgcccctggacgatcaggtggccctgctgagagcacacgccggcgaacatctgctgctgggagccaccaagcggagcatggtgttcaaggacgtgctgctgctgggcaacgactacatcgtgcccagacactgccctgagctggccgagatgagccgggtgtccatcagaatcctggacgaactggtgctgccgtttcaggaactgcagatcgacgacaacgagtacgcctacctgaaggccatcatctttttcgaccccgacgccaagggcctgagcgaccctggcaagatcaagcggctgagaagccaggtgcaagtgtccctggaagattacatcaacgaccggcagtacgacagccggggcagatttggcgaactgctcctgctgctgcccaccctgcagagcatcacctggcagatgatcgagcagatccagttcatcaagctgttcggcatggccaagatcgacaatctgctgcaggaaatgctgctcgggggcagcccttctgatgcccctcatgcccaccaccctctgcaccctcacctgatgcaagaacacatgggcaccaatgtgatcgtggccaacacaatgcccacccacctgagcaacggccagatgtgcgagtggcccagacctagaggacaggccgccacacctgagacacctcagccttctccacctggcggctctggcagcgagccttacaaactgctgcctggcgctgtggccaccatcgtgaaacctctgagcgccatcccccagcccaccatcaccaagcaggaagtgatctgaggactagtccctgttcccagagcccacttttttttctttttttgaaataaaatagcctgtctttcagatctcaaaggctcttttcagagccaccaaaaaaaaaaaaaaaaaaaaaaaaaaaaaaaaaaaaaaaaaaaaaaaaaaaaaaaaaaaaaaaaaaaaaaaaaaaaaaaaaaaaaaaaaaaaaaaaaaaaa

SEQ ID NO: 3307 - RNA, 1697 nt, synthetic construct
  misc_feature 1..1697: note = mRNA a-1 (hSL-A100) (opt29) from Homo sapiens__NP_000448.3__HNF4A(1-474)(S167A)
  source 1..1697: mol_type = other RNA
aggagagtcccgcagtcggcgtccagcggctctgcttgttcgtgtgtgtgtcgttgcaggccttattcaagcttaccatgagactgagcaagaccctggtggacatggacatggccgactactctgccgccctggaccctgcctacaccaccctggagttcgaaaacgtgcaagtgctgaccatgggcaacgacaccagccctagcgagggcaccaacctgaacgcccctaatagcctgggagtgtccgccctgtgtgccatctgtggcgatagagccaccggcaagcactacggcgccagctcttgtgatggctgcaagggcttcttccggcggagcgtgcggaagaaccacatgtacagctgccggttcagccggcagtgcgtggtggacaaggataagcggaaccagtgccggtactgcagactgaagaagtgcttcagagccggcatgaagaaagaagccgtgcagaacgagcgggaccggatcagcaccagaagaagcagctacgaggacagcagcctgcccagcatcaacgccctgctgcaggccgaggtgctgagcagacagatcaccgccccagtgtccggcatcaacggcgacatccgggccaagaagatcgccagcattgccgacgtgtgcgagagcatgaaggaacagctgctggtgctggtggaatgggccaagtacatccccgccttttgcgagctgcccctggacgatcaggtggccctgctgagagcacacgccggcgaacatctgctgctgggagccaccaagcggagcatggtgttcaaggacgtgctgctgctgggcaacgactacatcgtgcccagacactgccctgagctggccgagatgagccgggtgtccatcagaatcctggacgaactggtgctgccgtttcaggaactgcagatcgacgacaacgagtacgcctacctgaaggccatcatctttttcgaccccgacgccaagggcctgagcgaccctggcaagatcaagcggctgagaagccaggtgcaagtgtccctggaagattacatcaacgaccggcagtacgacagccggggcagatttggcgaactgctcctgctgctgcccaccctgcagagcatcacctggcagatgatcgagcagatccagttcatcaagctgttcggcatggccaagatcgacaatctgctgcaggaaatgctgctcgggggcagcccttctgatgcccctcatgcccaccaccctctgcaccctcacctgatgcaagaacacatgggcaccaatgtgatcgtggccaacacaatgcccacccacctgagcaacggccagatgtgcgagtggcccagacctagaggacaggccgccacacctgagacacctcagccttctccacctggcggctctggcagcgagccttacaaactgctgcctggcgctgtggccaccatcgtgaaacctctgagcgccatcccccagcccaccatcaccaagcaggaagtgatctgaggactagtccctgttcccagagcccacttttttttctttttttgaaataaaatagcctgtctttcagatctcaaaggctcttttcagagccaccaaaaaaaaaaaaaaaaaaaaaaaaaaaaaaaaaaaaaaaaaaaaaaaaaaaaaaaaaaaaaaaaaaaaaaaaaaaaaaaaaaaaaaaaaaaaaaaaaaaaa

SEQ ID NO: 3308 - RNA, 1697 nt, synthetic construct
  misc_feature 1..1697: note = mRNA a-1 (hSL-A100) (opt29) from Homo sapiens__NP_000448.3__HNF4A(1-474)(S167A_S378A_T429A_T432A_ S436A)
  source 1..1697: mol_type = other RNA
aggagagtcccgcagtcggcgtccagcggctctgcttgttcgtgtgtgtgtcgttgcaggccttattcaagcttaccatgagactgagcaagaccctggtggacatggacatggccgactactctgccgccctggaccctgcctacaccaccctggagttcgaaaacgtgcaagtgctgaccatgggcaacgacaccagccctagcgagggcaccaacctgaacgcccctaatagcctgggagtgtccgccctgtgtgccatctgtggcgatagagccaccggcaagcactacggcgccagctcttgtgatggctgcaagggcttcttccggcggagcgtgcggaagaaccacatgtacagctgccggttcagccggcagtgcgtggtggacaaggataagcggaaccagtgccggtactgcagactgaagaagtgcttcagagccggcatgaagaaagaagccgtgcagaacgagcgggaccggatcagcaccagaagaagcagctacgaggacagcagcctgcccagcatcaacgccctgctgcaggccgaggtgctgagcagacagatcaccgccccagtgtccggcatcaacggcgacatccgggccaagaagatcgccagcattgccgacgtgtgcgagagcatgaaggaacagctgctggtgctggtggaatgggccaagtacatccccgccttttgcgagctgcccctggacgatcaggtggccctgctgagagcacacgccggcgaacatctgctgctgggagccaccaagcggagcatggtgttcaaggacgtgctgctgctgggcaacgactacatcgtgcccagacactgccctgagctggccgagatgagccgggtgtccatcagaatcctggacgaactggtgctgccgtttcaggaactgcagatcgacgacaacgagtacgcctacctgaaggccatcatctttttcgaccccgacgccaagggcctgagcgaccctggcaagatcaagcggctgagaagccaggtgcaagtgtccctggaagattacatcaacgaccggcagtacgacagccggggcagatttggcgaactgctcctgctgctgcccaccctgcagagcatcacctggcagatgatcgagcagatccagttcatcaagctgttcggcatggccaagatcgacaatctgctgcaggaaatgctgctcgggggcgccccttctgatgcccctcatgcccaccaccctctgcaccctcacctgatgcaagaacacatgggcaccaatgtgatcgtggccaacacaatgcccacccacctgagcaacggccagatgtgcgagtggcccagacctagaggacaggccgccgcccctgaggcccctcagcctgccccacctggcggctctggcagcgagccttacaaactgctgcctggcgctgtggccaccatcgtgaaacctctgagcgccatcccccagcccaccatcaccaagcaggaagtgatctgaggactagtccctgttcccagagcccacttttttttctttttttgaaataaaatagcctgtctttcagatctcaaaggctcttttcagagccaccaaaaaaaaaaaaaaaaaaaaaaaaaaaaaaaaaaaaaaaaaaaaaaaaaaaaaaaaaaaaaaaaaaaaaaaaaaaaaaaaaaaaaaaaaaaaaaaaaaaaa

SEQ ID NO: 3309 - RNA, 1697 nt, synthetic construct
  misc_feature 1..1697: note = mRNA a-1 (hSL-A100) (opt29) from Homo sapiens__NP_000448.3__HNF4A(1-474)(S167E_S378E_T429E_T432E_ S436E)
  source 1..1697: mol_type = other RNA
aggagagtcccgcagtcggcgtccagcggctctgcttgttcgtgtgtgtgtcgttgcaggccttattcaagcttaccatgagactgagcaagaccctggtggacatggacatggccgactactctgccgccctggaccctgcctacaccaccctggagttcgaaaacgtgcaagtgctgaccatgggcaacgacaccagccctagcgagggcaccaacctgaacgcccctaatagcctgggagtgtccgccctgtgtgccatctgtggcgatagagccaccggcaagcactacggcgccagctcttgtgatggctgcaagggcttcttccggcggagcgtgcggaagaaccacatgtacagctgccggttcagccggcagtgcgtggtggacaaggataagcggaaccagtgccggtactgcagactgaagaagtgcttcagagccggcatgaagaaagaagccgtgcagaacgagcgggaccggatcagcaccagaagaagcagctacgaggacagcagcctgcccagcatcaacgccctgctgcaggccgaggtgctgagcagacagatcaccgaaccagtgtccggcatcaacggcgacatccgggccaagaagatcgccagcattgccgacgtgtgcgagagcatgaaggaacagctgctggtgctggtggaatgggccaagtacatccccgccttttgcgagctgcccctggacgatcaggtggccctgctgagagcacacgccggcgaacatctgctgctgggagccaccaagcggagcatggtgttcaaggacgtgctgctgctgggcaacgactacatcgtgcccagacactgccctgagctggccgagatgagccgggtgtccatcagaatcctggacgaactggtgctgccgtttcaggaactgcagatcgacgacaacgagtacgcctacctgaaggccatcatctttttcgaccccgacgccaagggcctgagcgaccctggcaagatcaagcggctgagaagccaggtgcaagtgtccctggaagattacatcaacgaccggcagtacgacagccggggcagatttggcgaactgctcctgctgctgcccaccctgcagagcatcacctggcagatgatcgagcagatccagttcatcaagctgttcggcatggccaagatcgacaatctgctgcaggaaatgctgctcgggggcgagccttctgatgcccctcatgcccaccaccctctgcaccctcacctgatgcaagaacacatgggcaccaatgtgatcgtggccaacacaatgcccacccacctgagcaacggccagatgtgcgagtggcccagacctagaggacaggccgccgaacctgaggagcctcagcctgaaccacctggcggctctggcagcgagccttacaaactgctgcctggcgctgtggccaccatcgtgaaacctctgagcgccatcccccagcccaccatcaccaagcaggaagtgatctgaggactagtccctgttcccagagcccacttttttttctttttttgaaataaaatagcctgtctttcagatctcaaaggctcttttcagagccaccaaaaaaaaaaaaaaaaaaaaaaaaaaaaaaaaaaaaaaaaaaaaaaaaaaaaaaaaaaaaaaaaaaaaaaaaaaaaaaaaaaaaaaaaaaaaaaaaaaaaa

SEQ ID NO: 3310 - RNA, 1697 nt, synthetic construct
  misc_feature 1..1697: note = mRNA a-1 (hSL-A100) (opt29) from Homo sapiens__NP_000448.3__HNF4A(1-474)(S87A)
  source 1..1697: mol_type = other RNA
aggagagtcccgcagtcggcgtccagcggctctgcttgttcgtgtgtgtgtcgttgcaggccttattcaagcttaccatgagactgagcaagaccctggtggacatggacatggccgactactctgccgccctggaccctgcctacaccaccctggagttcgaaaacgtgcaagtgctgaccatgggcaacgacaccagccctagcgagggcaccaacctgaacgcccctaatagcctgggagtgtccgccctgtgtgccatctgtggcgatagagccaccggcaagcactacggcgccagctcttgtgatggctgcaagggcttcttccggcgggccgtgcggaagaaccacatgtacagctgccggttcagccggcagtgcgtggtggacaaggataagcggaaccagtgccggtactgcagactgaagaagtgcttcagagccggcatgaagaaagaagccgtgcagaacgagcgggaccggatcagcaccagaagaagcagctacgaggacagcagcctgcccagcatcaacgccctgctgcaggccgaggtgctgagcagacagatcaccagcccagtgtccggcatcaacggcgacatccgggccaagaagatcgccagcattgccgacgtgtgcgagagcatgaaggaacagctgctggtgctggtggaatgggccaagtacatccccgccttttgcgagctgcccctggacgatcaggtggccctgctgagagcacacgccggcgaacatctgctgctgggagccaccaagcggagcatggtgttcaaggacgtgctgctgctgggcaacgactacatcgtgcccagacactgccctgagctggccgagatgagccgggtgtccatcagaatcctggacgaactggtgctgccgtttcaggaactgcagatcgacgacaacgagtacgcctacctgaaggccatcatctttttcgaccccgacgccaagggcctgagcgaccctggcaagatcaagcggctgagaagccaggtgcaagtgtccctggaagattacatcaacgaccggcagtacgacagccggggcagatttggcgaactgctcctgctgctgcccaccctgcagagcatcacctggcagatgatcgagcagatccagttcatcaagctgttcggcatggccaagatcgacaatctgctgcaggaaatgctgctcgggggcagcccttctgatgcccctcatgcccaccaccctctgcaccctcacctgatgcaagaacacatgggcaccaatgtgatcgtggccaacacaatgcccacccacctgagcaacggccagatgtgcgagtggcccagacctagaggacaggccgccacacctgagacacctcagccttctccacctggcggctctggcagcgagccttacaaactgctgcctggcgctgtggccaccatcgtgaaacctctgagcgccatcccccagcccaccatcaccaagcaggaagtgatctgaggactagtccctgttcccagagcccacttttttttctttttttgaaataaaatagcctgtctttcagatctcaaaggctcttttcagagccaccaaaaaaaaaaaaaaaaaaaaaaaaaaaaaaaaaaaaaaaaaaaaaaaaaaaaaaaaaaaaaaaaaaaaaaaaaaaaaaaaaaaaaaaaaaaaaaaaaaaaa

SEQ ID NO: 3311 - RNA, 1697 nt, synthetic construct
  misc_feature 1..1697: note = mRNA a-1 (hSL-A100) (opt29) from Homo sapiens__NP_000448.3__HNF4A(1-474)(S87E)
  source 1..1697: mol_type = other RNA
aggagagtcccgcagtcggcgtccagcggctctgcttgttcgtgtgtgtgtcgttgcaggccttattcaagcttaccatgagactgagcaagaccctggtggacatggacatggccgactactctgccgccctggaccctgcctacaccaccctggagttcgaaaacgtgcaagtgctgaccatgggcaacgacaccagccctagcgagggcaccaacctgaacgcccctaatagcctgggagtgtccgccctgtgtgccatctgtggcgatagagccaccggcaagcactacggcgccagctcttgtgatggctgcaagggcttcttccggcgggaggtgcggaagaaccacatgtacagctgccggttcagccggcagtgcgtggtggacaaggataagcggaaccagtgccggtactgcagactgaagaagtgcttcagagccggcatgaagaaagaagccgtgcagaacgagcgggaccggatcagcaccagaagaagcagctacgaggacagcagcctgcccagcatcaacgccctgctgcaggccgaggtgctgagcagacagatcaccagcccagtgtccggcatcaacggcgacatccgggccaagaagatcgccagcattgccgacgtgtgcgagagcatgaaggaacagctgctggtgctggtggaatgggccaagtacatccccgccttttgcgagctgcccctggacgatcaggtggccctgctgagagcacacgccggcgaacatctgctgctgggagccaccaagcggagcatggtgttcaaggacgtgctgctgctgggcaacgactacatcgtgcccagacactgccctgagctggccgagatgagccgggtgtccatcagaatcctggacgaactggtgctgccgtttcaggaactgcagatcgacgacaacgagtacgcctacctgaaggccatcatctttttcgaccccgacgccaagggcctgagcgaccctggcaagatcaagcggctgagaagccaggtgcaagtgtccctggaagattacatcaacgaccggcagtacgacagccggggcagatttggcgaactgctcctgctgctgcccaccctgcagagcatcacctggcagatgatcgagcagatccagttcatcaagctgttcggcatggccaagatcgacaatctgctgcaggaaatgctgctcgggggcagcccttctgatgcccctcatgcccaccaccctctgcaccctcacctgatgcaagaacacatgggcaccaatgtgatcgtggccaacacaatgcccacccacctgagcaacggccagatgtgcgagtggcccagacctagaggacaggccgccacacctgagacacctcagccttctccacctggcggctctggcagcgagccttacaaactgctgcctggcgctgtggccaccatcgtgaaacctctgagcgccatcccccagcccaccatcaccaagcaggaagtgatctgaggactagtccctgttcccagagcccacttttttttctttttttgaaataaaatagcctgtctttcagatctcaaaggctcttttcagagccaccaaaaaaaaaaaaaaaaaaaaaaaaaaaaaaaaaaaaaaaaaaaaaaaaaaaaaaaaaaaaaaaaaaaaaaaaaaaaaaaaaaaaaaaaaaaaaaaaaaaaa

SEQ ID NO: 3312 - RNA, 1697 nt, synthetic construct
  misc_feature 1..1697: note = mRNA a-1 (hSL-A100) (opt29) from Homo sapiens__NP_000448.3__HNF4A(1-474)(R2V)
  source 1..1697: mol_type = other RNA
aggagagtcccgcagtcggcgtccagcggctctgcttgttcgtgtgtgtgtcgttgcaggccttattcaagcttaccatggtgctgagcaagaccctggtggacatggacatggccgactactctgccgccctggaccctgcctacaccaccctggagttcgaaaacgtgcaagtgctgaccatgggcaacgacaccagccctagcgagggcaccaacctgaacgcccctaatagcctgggagtgtccgccctgtgtgccatctgtggcgatagagccaccggcaagcactacggcgccagctcttgtgatggctgcaagggcttcttccggcggagcgtgcggaagaaccacatgtacagctgccggttcagccggcagtgcgtggtggacaaggataagcggaaccagtgccggtactgcagactgaagaagtgcttcagagccggcatgaagaaagaagccgtgcagaacgagcgggaccggatcagcaccagaagaagcagctacgaggacagcagcctgcccagcatcaacgccctgctgcaggccgaggtgctgagcagacagatcaccagcccagtgtccggcatcaacggcgacatccgggccaagaagatcgccagcattgccgacgtgtgcgagagcatgaaggaacagctgctggtgctggtggaatgggccaagtacatccccgccttttgcgagctgcccctggacgatcaggtggccctgctgagagcacacgccggcgaacatctgctgctgggagccaccaagcggagcatggtgttcaaggacgtgctgctgctgggcaacgactacatcgtgcccagacactgccctgagctggccgagatgagccgggtgtccatcagaatcctggacgaactggtgctgccgtttcaggaactgcagatcgacgacaacgagtacgcctacctgaaggccatcatctttttcgaccccgacgccaagggcctgagcgaccctggcaagatcaagcggctgagaagccaggtgcaagtgtccctggaagattacatcaacgaccggcagtacgacagccggggcagatttggcgaactgctcctgctgctgcccaccctgcagagcatcacctggcagatgatcgagcagatccagttcatcaagctgttcggcatggccaagatcgacaatctgctgcaggaaatgctgctcgggggcagcccttctgatgcccctcatgcccaccaccctctgcaccctcacctgatgcaagaacacatgggcaccaatgtgatcgtggccaacacaatgcccacccacctgagcaacggccagatgtgcgagtggcccagacctagaggacaggccgccacacctgagacacctcagccttctccacctggcggctctggcagcgagccttacaaactgctgcctggcgctgtggccaccatcgtgaaacctctgagcgccatcccccagcccaccatcaccaagcaggaagtgatctgaggactagtccctgttcccagagcccacttttttttctttttttgaaataaaatagcctgtctttcagatctcaaaggctcttttcagagccaccaaaaaaaaaaaaaaaaaaaaaaaaaaaaaaaaaaaaaaaaaaaaaaaaaaaaaaaaaaaaaaaaaaaaaaaaaaaaaaaaaaaaaaaaaaaaaaaaaaaaa

SEQ ID NO: 3313 - RNA, 1697 nt, synthetic construct
  misc_feature 1..1697: note = mRNA a-1 (hSL-A100) (opt29) from Homo sapiens__NP_000448.3__HNF4A(1-474)(R2V_K5V)
  source 1..1697: mol_type = other RNA
aggagagtcccgcagtcggcgtccagcggctctgcttgttcgtgtgtgtgtcgttgcaggccttattcaagcttaccatggtgctgagcgtgaccctggtggacatggacatggccgactactctgccgccctggaccctgcctacaccaccctggagttcgaaaacgtgcaagtgctgaccatgggcaacgacaccagccctagcgagggcaccaacctgaacgcccctaatagcctgggagtgtccgccctgtgtgccatctgtggcgatagagccaccggcaagcactacggcgccagctcttgtgatggctgcaagggcttcttccggcggagcgtgcggaagaaccacatgtacagctgccggttcagccggcagtgcgtggtggacaaggataagcggaaccagtgccggtactgcagactgaagaagtgcttcagagccggcatgaagaaagaagccgtgcagaacgagcgggaccggatcagcaccagaagaagcagctacgaggacagcagcctgcccagcatcaacgccctgctgcaggccgaggtgctgagcagacagatcaccagcccagtgtccggcatcaacggcgacatccgggccaagaagatcgccagcattgccgacgtgtgcgagagcatgaaggaacagctgctggtgctggtggaatgggccaagtacatccccgccttttgcgagctgcccctggacgatcaggtggccctgctgagagcacacgccggcgaacatctgctgctgggagccaccaagcggagcatggtgttcaaggacgtgctgctgctgggcaacgactacatcgtgcccagacactgccctgagctggccgagatgagccgggtgtccatcagaatcctggacgaactggtgctgccgtttcaggaactgcagatcgacgacaacgagtacgcctacctgaaggccatcatctttttcgaccccgacgccaagggcctgagcgaccctggcaagatcaagcggctgagaagccaggtgcaagtgtccctggaagattacatcaacgaccggcagtacgacagccggggcagatttggcgaactgctcctgctgctgcccaccctgcagagcatcacctggcagatgatcgagcagatccagttcatcaagctgttcggcatggccaagatcgacaatctgctgcaggaaatgctgctcgggggcagcccttctgatgcccctcatgcccaccaccctctgcaccctcacctgatgcaagaacacatgggcaccaatgtgatcgtggccaacacaatgcccacccacctgagcaacggccagatgtgcgagtggcccagacctagaggacaggccgccacacctgagacacctcagccttctccacctggcggctctggcagcgagccttacaaactgctgcctggcgctgtggccaccatcgtgaaacctctgagcgccatcccccagcccaccatcaccaagcaggaagtgatctgaggactagtccctgttcccagagcccacttttttttctttttttgaaataaaatagcctgtctttcagatctcaaaggctcttttcagagccaccaaaaaaaaaaaaaaaaaaaaaaaaaaaaaaaaaaaaaaaaaaaaaaaaaaaaaaaaaaaaaaaaaaaaaaaaaaaaaaaaaaaaaaaaaaaaaaaaaaaaa

SEQ ID NO: 3314 - RNA, 1697 nt, synthetic construct
  misc_feature 1..1697: note = mRNA a-1 (hSL-A100) (opt29) from Homo sapiens__NP_000448.3__HNF4A(1-474)(K179R_K180R)
  source 1..1697: mol_type = other RNA
aggagagtcccgcagtcggcgtccagcggctctgcttgttcgtgtgtgtgtcgttgcaggccttattcaagcttaccatgagactgagcaagaccctggtggacatggacatggccgactactctgccgccctggaccctgcctacaccaccctggagttcgaaaacgtgcaagtgctgaccatgggcaacgacaccagccctagcgagggcaccaacctgaacgcccctaatagcctgggagtgtccgccctgtgtgccatctgtggcgatagagccaccggcaagcactacggcgccagctcttgtgatggctgcaagggcttcttccggcggagcgtgcggaagaaccacatgtacagctgccggttcagccggcagtgcgtggtggacaaggataagcggaaccagtgccggtactgcagactgaagaagtgcttcagagccggcatgaagaaagaagccgtgcagaacgagcgggaccggatcagcaccagaagaagcagctacgaggacagcagcctgcccagcatcaacgccctgctgcaggccgaggtgctgagcagacagatcaccagcccagtgtccggcatcaacggcgacatccgggcccggagaatcgccagcattgccgacgtgtgcgagagcatgaaggaacagctgctggtgctggtggaatgggccaagtacatccccgccttttgcgagctgcccctggacgatcaggtggccctgctgagagcacacgccggcgaacatctgctgctgggagccaccaagcggagcatggtgttcaaggacgtgctgctgctgggcaacgactacatcgtgcccagacactgccctgagctggccgagatgagccgggtgtccatcagaatcctggacgaactggtgctgccgtttcaggaactgcagatcgacgacaacgagtacgcctacctgaaggccatcatctttttcgaccccgacgccaagggcctgagcgaccctggcaagatcaagcggctgagaagccaggtgcaagtgtccctggaagattacatcaacgaccggcagtacgacagccggggcagatttggcgaactgctcctgctgctgcccaccctgcagagcatcacctggcagatgatcgagcagatccagttcatcaagctgttcggcatggccaagatcgacaatctgctgcaggaaatgctgctcgggggcagcccttctgatgcccctcatgcccaccaccctctgcaccctcacctgatgcaagaacacatgggcaccaatgtgatcgtggccaacacaatgcccacccacctgagcaacggccagatgtgcgagtggcccagacctagaggacaggccgccacacctgagacacctcagccttctccacctggcggctctggcagcgagccttacaaactgctgcctggcgctgtggccaccatcgtgaaacctctgagcgccatcccccagcccaccatcaccaagcaggaagtgatctgaggactagtccctgttcccagagcccacttttttttctttttttgaaataaaatagcctgtctttcagatctcaaaggctcttttcagagccaccaaaaaaaaaaaaaaaaaaaaaaaaaaaaaaaaaaaaaaaaaaaaaaaaaaaaaaaaaaaaaaaaaaaaaaaaaaaaaaaaaaaaaaaaaaaaaaaaaaaaa

SEQ ID NO: 3315 - RNA, 1697 nt, synthetic construct
  misc_feature 1..1697: note = mRNA a-1 (hSL-A100) (opt29) from Homo sapiens__NP_000448.3__HNF4A(1-474)(K234R)
  source 1..1697: mol_type = other RNA
aggagagtcccgcagtcggcgtccagcggctctgcttgttcgtgtgtgtgtcgttgcaggccttattcaagcttaccatgagactgagcaagaccctggtggacatggacatggccgactactctgccgccctggaccctgcctacaccaccctggagttcgaaaacgtgcaagtgctgaccatgggcaacgacaccagccctagcgagggcaccaacctgaacgcccctaatagcctgggagtgtccgccctgtgtgccatctgtggcgatagagccaccggcaagcactacggcgccagctcttgtgatggctgcaagggcttcttccggcggagcgtgcggaagaaccacatgtacagctgccggttcagccggcagtgcgtggtggacaaggataagcggaaccagtgccggtactgcagactgaagaagtgcttcagagccggcatgaagaaagaagccgtgcagaacgagcgggaccggatcagcaccagaagaagcagctacgaggacagcagcctgcccagcatcaacgccctgctgcaggccgaggtgctgagcagacagatcaccagcccagtgtccggcatcaacggcgacatccgggccaagaagatcgccagcattgccgacgtgtgcgagagcatgaaggaacagctgctggtgctggtggaatgggccaagtacatccccgccttttgcgagctgcccctggacgatcaggtggccctgctgagagcacacgccggcgaacatctgctgctgggagccacccggcggagcatggtgttcaaggacgtgctgctgctgggcaacgactacatcgtgcccagacactgccctgagctggccgagatgagccgggtgtccatcagaatcctggacgaactggtgctgccgtttcaggaactgcagatcgacgacaacgagtacgcctacctgaaggccatcatctttttcgaccccgacgccaagggcctgagcgaccctggcaagatcaagcggctgagaagccaggtgcaagtgtccctggaagattacatcaacgaccggcagtacgacagccggggcagatttggcgaactgctcctgctgctgcccaccctgcagagcatcacctggcagatgatcgagcagatccagttcatcaagctgttcggcatggccaagatcgacaatctgctgcaggaaatgctgctcgggggcagcccttctgatgcccctcatgcccaccaccctctgcaccctcacctgatgcaagaacacatgggcaccaatgtgatcgtggccaacacaatgcccacccacctgagcaacggccagatgtgcgagtggcccagacctagaggacaggccgccacacctgagacacctcagccttctccacctggcggctctggcagcgagccttacaaactgctgcctggcgctgtggccaccatcgtgaaacctctgagcgccatcccccagcccaccatcaccaagcaggaagtgatctgaggactagtccctgttcccagagcccacttttttttctttttttgaaataaaatagcctgtctttcagatctcaaaggctcttttcagagccaccaaaaaaaaaaaaaaaaaaaaaaaaaaaaaaaaaaaaaaaaaaaaaaaaaaaaaaaaaaaaaaaaaaaaaaaaaaaaaaaaaaaaaaaaaaaaaaaaaaaaa

SEQ ID NO: 3316 - RNA, 1697 nt, synthetic construct
  misc_feature 1..1697: note = mRNA a-1 (hSL-A100) (opt29) from Homo sapiens__NP_000448.3__HNF4A(1-474)(K300R)
  source 1..1697: mol_type = other RNA
aggagagtcccgcagtcggcgtccagcggctctgcttgttcgtgtgtgtgtcgttgcaggccttattcaagcttaccatgagactgagcaagaccctggtggacatggacatggccgactactctgccgccctggaccctgcctacaccaccctggagttcgaaaacgtgcaagtgctgaccatgggcaacgacaccagccctagcgagggcaccaacctgaacgcccctaatagcctgggagtgtccgccctgtgtgccatctgtggcgatagagccaccggcaagcactacggcgccagctcttgtgatggctgcaagggcttcttccggcggagcgtgcggaagaaccacatgtacagctgccggttcagccggcagtgcgtggtggacaaggataagcggaaccagtgccggtactgcagactgaagaagtgcttcagagccggcatgaagaaagaagccgtgcagaacgagcgggaccggatcagcaccagaagaagcagctacgaggacagcagcctgcccagcatcaacgccctgctgcaggccgaggtgctgagcagacagatcaccagcccagtgtccggcatcaacggcgacatccgggccaagaagatcgccagcattgccgacgtgtgcgagagcatgaaggaacagctgctggtgctggtggaatgggccaagtacatccccgccttttgcgagctgcccctggacgatcaggtggccctgctgagagcacacgccggcgaacatctgctgctgggagccaccaagcggagcatggtgttcaaggacgtgctgctgctgggcaacgactacatcgtgcccagacactgccctgagctggccgagatgagccgggtgtccatcagaatcctggacgaactggtgctgccgtttcaggaactgcagatcgacgacaacgagtacgcctacctgaaggccatcatctttttcgaccccgacgccagaggcctgagcgaccctggcaagatcaagcggctgagaagccaggtgcaagtgtccctggaagattacatcaacgaccggcagtacgacagccggggcagatttggcgaactgctcctgctgctgcccaccctgcagagcatcacctggcagatgatcgagcagatccagttcatcaagctgttcggcatggccaagatcgacaatctgctgcaggaaatgctgctcgggggcagcccttctgatgcccctcatgcccaccaccctctgcaccctcacctgatgcaagaacacatgggcaccaatgtgatcgtggccaacacaatgcccacccacctgagcaacggccagatgtgcgagtggcccagacctagaggacaggccgccacacctgagacacctcagccttctccacctggcggctctggcagcgagccttacaaactgctgcctggcgctgtggccaccatcgtgaaacctctgagcgccatcccccagcccaccatcaccaagcaggaagtgatctgaggactagtccctgttcccagagcccacttttttttctttttttgaaataaaatagcctgtctttcagatctcaaaggctcttttcagagccaccaaaaaaaaaaaaaaaaaaaaaaaaaaaaaaaaaaaaaaaaaaaaaaaaaaaaaaaaaaaaaaaaaaaaaaaaaaaaaaaaaaaaaaaaaaaaaaaaaaaaa

SEQ ID NO: 3317 - RNA, 1697 nt, synthetic construct
  misc_feature 1..1697: note = mRNA a-1 (hSL-A100) (opt29) from Homo sapiens__NP_000448.3__HNF4A(1-474)(K300R_K307R_K309R)
  source 1..1697: mol_type = other RNA
aggagagtcccgcagtcggcgtccagcggctctgcttgttcgtgtgtgtgtcgttgcaggccttattcaagcttaccatgagactgagcaagaccctggtggacatggacatggccgactactctgccgccctggaccctgcctacaccaccctggagttcgaaaacgtgcaagtgctgaccatgggcaacgacaccagccctagcgagggcaccaacctgaacgcccctaatagcctgggagtgtccgccctgtgtgccatctgtggcgatagagccaccggcaagcactacggcgccagctcttgtgatggctgcaagggcttcttccggcggagcgtgcggaagaaccacatgtacagctgccggttcagccggcagtgcgtggtggacaaggataagcggaaccagtgccggtactgcagactgaagaagtgcttcagagccggcatgaagaaagaagccgtgcagaacgagcgggaccggatcagcaccagaagaagcagctacgaggacagcagcctgcccagcatcaacgccctgctgcaggccgaggtgctgagcagacagatcaccagcccagtgtccggcatcaacggcgacatccgggccaagaagatcgccagcattgccgacgtgtgcgagagcatgaaggaacagctgctggtgctggtggaatgggccaagtacatccccgccttttgcgagctgcccctggacgatcaggtggccctgctgagagcacacgccggcgaacatctgctgctgggagccaccaagcggagcatggtgttcaaggacgtgctgctgctgggcaacgactacatcgtgcccagacactgccctgagctggccgagatgagccgggtgtccatcagaatcctggacgaactggtgctgccgtttcaggaactgcagatcgacgacaacgagtacgcctacctgaaggccatcatctttttcgaccccgacgccagaggcctgagcgaccctggccggatcagacggctgagaagccaggtgcaagtgtccctggaagattacatcaacgaccggcagtacgacagccggggcagatttggcgaactgctcctgctgctgcccaccctgcagagcatcacctggcagatgatcgagcagatccagttcatcaagctgttcggcatggccaagatcgacaatctgctgcaggaaatgctgctcgggggcagcccttctgatgcccctcatgcccaccaccctctgcaccctcacctgatgcaagaacacatgggcaccaatgtgatcgtggccaacacaatgcccacccacctgagcaacggccagatgtgcgagtggcccagacctagaggacaggccgccacacctgagacacctcagccttctccacctggcggctctggcagcgagccttacaaactgctgcctggcgctgtggccaccatcgtgaaacctctgagcgccatcccccagcccaccatcaccaagcaggaagtgatctgaggactagtccctgttcccagagcccacttttttttctttttttgaaataaaatagcctgtctttcagatctcaaaggctcttttcagagccaccaaaaaaaaaaaaaaaaaaaaaaaaaaaaaaaaaaaaaaaaaaaaaaaaaaaaaaaaaaaaaaaaaaaaaaaaaaaaaaaaaaaaaaaaaaaaaaaaaaaaa

SEQ ID NO: 3318 - RNA, 1697 nt, synthetic construct
  misc_feature 1..1697: note = mRNA a-1 (hSL-A100) (opt29) from Homo sapiens__NP_000448.3__HNF4A(1-474)(K447R_K470R)
  source 1..1697: mol_type = other RNA
aggagagtcccgcagtcggcgtccagcggctctgcttgttcgtgtgtgtgtcgttgcaggccttattcaagcttaccatgagactgagcaagaccctggtggacatggacatggccgactactctgccgccctggaccctgcctacaccaccctggagttcgaaaacgtgcaagtgctgaccatgggcaacgacaccagccctagcgagggcaccaacctgaacgcccctaatagcctgggagtgtccgccctgtgtgccatctgtggcgatagagccaccggcaagcactacggcgccagctcttgtgatggctgcaagggcttcttccggcggagcgtgcggaagaaccacatgtacagctgccggttcagccggcagtgcgtggtggacaaggataagcggaaccagtgccggtactgcagactgaagaagtgcttcagagccggcatgaagaaagaagccgtgcagaacgagcgggaccggatcagcaccagaagaagcagctacgaggacagcagcctgcccagcatcaacgccctgctgcaggccgaggtgctgagcagacagatcaccagcccagtgtccggcatcaacggcgacatccgggccaagaagatcgccagcattgccgacgtgtgcgagagcatgaaggaacagctgctggtgctggtggaatgggccaagtacatccccgccttttgcgagctgcccctggacgatcaggtggccctgctgagagcacacgccggcgaacatctgctgctgggagccaccaagcggagcatggtgttcaaggacgtgctgctgctgggcaacgactacatcgtgcccagacactgccctgagctggccgagatgagccgggtgtccatcagaatcctggacgaactggtgctgccgtttcaggaactgcagatcgacgacaacgagtacgcctacctgaaggccatcatctttttcgaccccgacgccaagggcctgagcgaccctggcaagatcaagcggctgagaagccaggtgcaagtgtccctggaagattacatcaacgaccggcagtacgacagccggggcagatttggcgaactgctcctgctgctgcccaccctgcagagcatcacctggcagatgatcgagcagatccagttcatcaagctgttcggcatggccaagatcgacaatctgctgcaggaaatgctgctcgggggcagcccttctgatgcccctcatgcccaccaccctctgcaccctcacctgatgcaagaacacatgggcaccaatgtgatcgtggccaacacaatgcccacccacctgagcaacggccagatgtgcgagtggcccagacctagaggacaggccgccacacctgagacacctcagccttctccacctggcggctctggcagcgagccttaccggctgctgcctggcgctgtggccaccatcgtgaaacctctgagcgccatcccccagcccaccatcacccggcaggaagtgatctgaggactagtccctgttcccagagcccacttttttttctttttttgaaataaaatagcctgtctttcagatctcaaaggctcttttcagagccaccaaaaaaaaaaaaaaaaaaaaaaaaaaaaaaaaaaaaaaaaaaaaaaaaaaaaaaaaaaaaaaaaaaaaaaaaaaaaaaaaaaaaaaaaaaaaaaaaaaaaa

SEQ ID NO: 3319 - RNA, 1697 nt, synthetic construct
  misc_feature 1..1697: note = mRNA a-1 (hSL-A100) (opt29) from Homo sapiens__NP_000448.3__HNF4A(1-474)(K458R)
  source 1..1697: mol_type = other RNA
aggagagtcccgcagtcggcgtccagcggctctgcttgttcgtgtgtgtgtcgttgcaggccttattcaagcttaccatgagactgagcaagaccctggtggacatggacatggccgactactctgccgccctggaccctgcctacaccaccctggagttcgaaaacgtgcaagtgctgaccatgggcaacgacaccagccctagcgagggcaccaacctgaacgcccctaatagcctgggagtgtccgccctgtgtgccatctgtggcgatagagccaccggcaagcactacggcgccagctcttgtgatggctgcaagggcttcttccggcggagcgtgcggaagaaccacatgtacagctgccggttcagccggcagtgcgtggtggacaaggataagcggaaccagtgccggtactgcagactgaagaagtgcttcagagccggcatgaagaaagaagccgtgcagaacgagcgggaccggatcagcaccagaagaagcagctacgaggacagcagcctgcccagcatcaacgccctgctgcaggccgaggtgctgagcagacagatcaccagcccagtgtccggcatcaacggcgacatccgggccaagaagatcgccagcattgccgacgtgtgcgagagcatgaaggaacagctgctggtgctggtggaatgggccaagtacatccccgccttttgcgagctgcccctggacgatcaggtggccctgctgagagcacacgccggcgaacatctgctgctgggagccaccaagcggagcatggtgttcaaggacgtgctgctgctgggcaacgactacatcgtgcccagacactgccctgagctggccgagatgagccgggtgtccatcagaatcctggacgaactggtgctgccgtttcaggaactgcagatcgacgacaacgagtacgcctacctgaaggccatcatctttttcgaccccgacgccaagggcctgagcgaccctggcaagatcaagcggctgagaagccaggtgcaagtgtccctggaagattacatcaacgaccggcagtacgacagccggggcagatttggcgaactgctcctgctgctgcccaccctgcagagcatcacctggcagatgatcgagcagatccagttcatcaagctgttcggcatggccaagatcgacaatctgctgcaggaaatgctgctcgggggcagcccttctgatgcccctcatgcccaccaccctctgcaccctcacctgatgcaagaacacatgggcaccaatgtgatcgtggccaacacaatgcccacccacctgagcaacggccagatgtgcgagtggcccagacctagaggacaggccgccacacctgagacacctcagccttctccacctggcggctctggcagcgagccttacaaactgctgcctggcgctgtggccaccatcgtgagacctctgagcgccatcccccagcccaccatcaccaagcaggaagtgatctgaggactagtccctgttcccagagcccacttttttttctttttttgaaataaaatagcctgtctttcagatctcaaaggctcttttcagagccaccaaaaaaaaaaaaaaaaaaaaaaaaaaaaaaaaaaaaaaaaaaaaaaaaaaaaaaaaaaaaaaaaaaaaaaaaaaaaaaaaaaaaaaaaaaaaaaaaaaaaa

SEQ ID NO: 3320 - RNA, 1697 nt, synthetic construct
  misc_feature 1..1697: note = mRNA a-1 (hSL-A100) (opt29) from Homo sapiens__NP_000448.3__HNF4A(1-474)(K106R_K108R_K126R_K127R)
  source 1..1697: mol_type = other RNA
aggagagtcccgcagtcggcgtccagcggctctgcttgttcgtgtgtgtgtcgttgcaggccttattcaagcttaccatgagactgagcaagaccctggtggacatggacatggccgactactctgccgccctggaccctgcctacaccaccctggagttcgaaaacgtgcaagtgctgaccatgggcaacgacaccagccctagcgagggcaccaacctgaacgcccctaatagcctgggagtgtccgccctgtgtgccatctgtggcgatagagccaccggcaagcactacggcgccagctcttgtgatggctgcaagggcttcttccggcggagcgtgcggaagaaccacatgtacagctgccggttcagccggcagtgcgtggtggaccgggatagacggaaccagtgccggtactgcagactgaagaagtgcttcagagccggcatgcggagagaagccgtgcagaacgagcgggaccggatcagcaccagaagaagcagctacgaggacagcagcctgcccagcatcaacgccctgctgcaggccgaggtgctgagcagacagatcaccagcccagtgtccggcatcaacggcgacatccgggccaagaagatcgccagcattgccgacgtgtgcgagagcatgaaggaacagctgctggtgctggtggaatgggccaagtacatccccgccttttgcgagctgcccctggacgatcaggtggccctgctgagagcacacgccggcgaacatctgctgctgggagccaccaagcggagcatggtgttcaaggacgtgctgctgctgggcaacgactacatcgtgcccagacactgccctgagctggccgagatgagccgggtgtccatcagaatcctggacgaactggtgctgccgtttcaggaactgcagatcgacgacaacgagtacgcctacctgaaggccatcatctttttcgaccccgacgccaagggcctgagcgaccctggcaagatcaagcggctgagaagccaggtgcaagtgtccctggaagattacatcaacgaccggcagtacgacagccggggcagatttggcgaactgctcctgctgctgcccaccctgcagagcatcacctggcagatgatcgagcagatccagttcatcaagctgttcggcatggccaagatcgacaatctgctgcaggaaatgctgctcgggggcagcccttctgatgcccctcatgcccaccaccctctgcaccctcacctgatgcaagaacacatgggcaccaatgtgatcgtggccaacacaatgcccacccacctgagcaacggccagatgtgcgagtggcccagacctagaggacaggccgccacacctgagacacctcagccttctccacctggcggctctggcagcgagccttacaaactgctgcctggcgctgtggccaccatcgtgaaacctctgagcgccatcccccagcccaccatcaccaagcaggaagtgatctgaggactagtccctgttcccagagcccacttttttttctttttttgaaataaaatagcctgtctttcagatctcaaaggctcttttcagagccaccaaaaaaaaaaaaaaaaaaaaaaaaaaaaaaaaaaaaaaaaaaaaaaaaaaaaaaaaaaaaaaaaaaaaaaaaaaaaaaaaaaaaaaaaaaaaaaaaaaaaa

SEQ ID NO: 3321 - RNA, 1697 nt, synthetic construct
  misc_feature 1..1697: note = mRNA a-1 (hSL-A100) (opt29) from Homo sapiens__NP_000448.3__HNF4A(1-474)(E285Q)
  source 1..1697: mol_type = other RNA
aggagagtcccgcagtcggcgtccagcggctctgcttgttcgtgtgtgtgtcgttgcaggccttattcaagcttaccatgagactgagcaagaccctggtggacatggacatggccgactactctgccgccctggaccctgcctacaccaccctggagttcgaaaacgtgcaagtgctgaccatgggcaacgacaccagccctagcgagggcaccaacctgaacgcccctaatagcctgggagtgtccgccctgtgtgccatctgtggcgatagagccaccggcaagcactacggcgccagctcttgtgatggctgcaagggcttcttccggcggagcgtgcggaagaaccacatgtacagctgccggttcagccggcagtgcgtggtggacaaggataagcggaaccagtgccggtactgcagactgaagaagtgcttcagagccggcatgaagaaagaagccgtgcagaacgagcgggaccggatcagcaccagaagaagcagctacgaggacagcagcctgcccagcatcaacgccctgctgcaggccgaggtgctgagcagacagatcaccagcccagtgtccggcatcaacggcgacatccgggccaagaagatcgccagcattgccgacgtgtgcgagagcatgaaggaacagctgctggtgctggtggaatgggccaagtacatccccgccttttgcgagctgcccctggacgatcaggtggccctgctgagagcacacgccggcgaacatctgctgctgggagccaccaagcggagcatggtgttcaaggacgtgctgctgctgggcaacgactacatcgtgcccagacactgccctgagctggccgagatgagccgggtgtccatcagaatcctggacgaactggtgctgccgtttcaggaactgcagatcgacgacaaccagtacgcctacctgaaggccatcatctttttcgaccccgacgccaagggcctgagcgaccctggcaagatcaagcggctgagaagccaggtgcaagtgtccctggaagattacatcaacgaccggcagtacgacagccggggcagatttggcgaactgctcctgctgctgcccaccctgcagagcatcacctggcagatgatcgagcagatccagttcatcaagctgttcggcatggccaagatcgacaatctgctgcaggaaatgctgctcgggggcagcccttctgatgcccctcatgcccaccaccctctgcaccctcacctgatgcaagaacacatgggcaccaatgtgatcgtggccaacacaatgcccacccacctgagcaacggccagatgtgcgagtggcccagacctagaggacaggccgccacacctgagacacctcagccttctccacctggcggctctggcagcgagccttacaaactgctgcctggcgctgtggccaccatcgtgaaacctctgagcgccatcccccagcccaccatcaccaagcaggaagtgatctgaggactagtccctgttcccagagcccacttttttttctttttttgaaataaaatagcctgtctttcagatctcaaaggctcttttcagagccaccaaaaaaaaaaaaaaaaaaaaaaaaaaaaaaaaaaaaaaaaaaaaaaaaaaaaaaaaaaaaaaaaaaaaaaaaaaaaaaaaaaaaaaaaaaaaaaaaaaaaa

SEQ ID NO: 3322 - RNA, 1697 nt, synthetic construct
  misc_feature 1..1697: note = mRNA a-1 (hSL-A100) (opt29) from Homo sapiens__NP_000448.3__HNF4A(1-474)(T166E)
  source 1..1697: mol_type = other RNA
aggagagtcccgcagtcggcgtccagcggctctgcttgttcgtgtgtgtgtcgttgcaggccttattcaagcttaccatgagactgagcaagaccctggtggacatggacatggccgactactctgccgccctggaccctgcctacaccaccctggagttcgaaaacgtgcaagtgctgaccatgggcaacgacaccagccctagcgagggcaccaacctgaacgcccctaatagcctgggagtgtccgccctgtgtgccatctgtggcgatagagccaccggcaagcactacggcgccagctcttgtgatggctgcaagggcttcttccggcggagcgtgcggaagaaccacatgtacagctgccggttcagccggcagtgcgtggtggacaaggataagcggaaccagtgccggtactgcagactgaagaagtgcttcagagccggcatgaagaaagaagccgtgcagaacgagcgggaccggatcagcaccagaagaagcagctacgaggacagcagcctgcccagcatcaacgccctgctgcaggccgaggtgctgagcagacagatcgagagcccagtgtccggcatcaacggcgacatccgggccaagaagatcgccagcattgccgacgtgtgcgagagcatgaaggaacagctgctggtgctggtggaatgggccaagtacatccccgccttttgcgagctgcccctggacgatcaggtggccctgctgagagcacacgccggcgaacatctgctgctgggagccaccaagcggagcatggtgttcaaggacgtgctgctgctgggcaacgactacatcgtgcccagacactgccctgagctggccgagatgagccgggtgtccatcagaatcctggacgaactggtgctgccgtttcaggaactgcagatcgacgacaacgagtacgcctacctgaaggccatcatctttttcgaccccgacgccaagggcctgagcgaccctggcaagatcaagcggctgagaagccaggtgcaagtgtccctggaagattacatcaacgaccggcagtacgacagccggggcagatttggcgaactgctcctgctgctgcccaccctgcagagcatcacctggcagatgatcgagcagatccagttcatcaagctgttcggcatggccaagatcgacaatctgctgcaggaaatgctgctcgggggcagcccttctgatgcccctcatgcccaccaccctctgcaccctcacctgatgcaagaacacatgggcaccaatgtgatcgtggccaacacaatgcccacccacctgagcaacggccagatgtgcgagtggcccagacctagaggacaggccgccacacctgagacacctcagccttctccacctggcggctctggcagcgagccttacaaactgctgcctggcgctgtggccaccatcgtgaaacctctgagcgccatcccccagcccaccatcaccaagcaggaagtgatctgaggactagtccctgttcccagagcccacttttttttctttttttgaaataaaatagcctgtctttcagatctcaaaggctcttttcagagccaccaaaaaaaaaaaaaaaaaaaaaaaaaaaaaaaaaaaaaaaaaaaaaaaaaaaaaaaaaaaaaaaaaaaaaaaaaaaaaaaaaaaaaaaaaaaaaaaaaaaaa

SEQ ID NO: 3323 - RNA, 1697 nt, synthetic construct
  misc_feature 1..1697: note = mRNA a-1 (hSL-A100) (opt29) from Homo sapiens__NP_000448.3__HNF4A(1-474)(S148A)
  source 1..1697: mol_type = other RNA
aggagagtcccgcagtcggcgtccagcggctctgcttgttcgtgtgtgtgtcgttgcaggccttattcaagcttaccatgagactgagcaagaccctggtggacatggacatggccgactactctgccgccctggaccctgcctacaccaccctggagttcgaaaacgtgcaagtgctgaccatgggcaacgacaccagccctagcgagggcaccaacctgaacgcccctaatagcctgggagtgtccgccctgtgtgccatctgtggcgatagagccaccggcaagcactacggcgccagctcttgtgatggctgcaagggcttcttccggcggagcgtgcggaagaaccacatgtacagctgccggttcagccggcagtgcgtggtggacaaggataagcggaaccagtgccggtactgcagactgaagaagtgcttcagagccggcatgaagaaagaagccgtgcagaacgagcgggaccggatcagcaccagaagaagcagctacgaggacagcgccctgcccagcatcaacgccctgctgcaggccgaggtgctgagcagacagatcaccagcccagtgtccggcatcaacggcgacatccgggccaagaagatcgccagcattgccgacgtgtgcgagagcatgaaggaacagctgctggtgctggtggaatgggccaagtacatccccgccttttgcgagctgcccctggacgatcaggtggccctgctgagagcacacgccggcgaacatctgctgctgggagccaccaagcggagcatggtgttcaaggacgtgctgctgctgggcaacgactacatcgtgcccagacactgccctgagctggccgagatgagccgggtgtccatcagaatcctggacgaactggtgctgccgtttcaggaactgcagatcgacgacaacgagtacgcctacctgaaggccatcatctttttcgaccccgacgccaagggcctgagcgaccctggcaagatcaagcggctgagaagccaggtgcaagtgtccctggaagattacatcaacgaccggcagtacgacagccggggcagatttggcgaactgctcctgctgctgcccaccctgcagagcatcacctggcagatgatcgagcagatccagttcatcaagctgttcggcatggccaagatcgacaatctgctgcaggaaatgctgctcgggggcagcccttctgatgcccctcatgcccaccaccctctgcaccctcacctgatgcaagaacacatgggcaccaatgtgatcgtggccaacacaatgcccacccacctgagcaacggccagatgtgcgagtggcccagacctagaggacaggccgccacacctgagacacctcagccttctccacctggcggctctggcagcgagccttacaaactgctgcctggcgctgtggccaccatcgtgaaacctctgagcgccatcccccagcccaccatcaccaagcaggaagtgatctgaggactagtccctgttcccagagcccacttttttttctttttttgaaataaaatagcctgtctttcagatctcaaaggctcttttcagagccaccaaaaaaaaaaaaaaaaaaaaaaaaaaaaaaaaaaaaaaaaaaaaaaaaaaaaaaaaaaaaaaaaaaaaaaaaaaaaaaaaaaaaaaaaaaaaaaaaaaaaa

SEQ ID NO: 3324 - RNA, 1697 nt, synthetic construct
  misc_feature 1..1697: note = mRNA a-1 (hSL-A100) (opt29) from Homo sapiens__NP_000448.3__HNF4A(1-474)(S148E)
  source 1..1697: mol_type = other RNA
aggagagtcccgcagtcggcgtccagcggctctgcttgttcgtgtgtgtgtcgttgcaggccttattcaagcttaccatgagactgagcaagaccctggtggacatggacatggccgactactctgccgccctggaccctgcctacaccaccctggagttcgaaaacgtgcaagtgctgaccatgggcaacgacaccagccctagcgagggcaccaacctgaacgcccctaatagcctgggagtgtccgccctgtgtgccatctgtggcgatagagccaccggcaagcactacggcgccagctcttgtgatggctgcaagggcttcttccggcggagcgtgcggaagaaccacatgtacagctgccggttcagccggcagtgcgtggtggacaaggataagcggaaccagtgccggtactgcagactgaagaagtgcttcagagccggcatgaagaaagaagccgtgcagaacgagcgggaccggatcagcaccagaagaagcagctacgaggacagcgaactgcccagcatcaacgccctgctgcaggccgaggtgctgagcagacagatcaccagcccagtgtccggcatcaacggcgacatccgggccaagaagatcgccagcattgccgacgtgtgcgagagcatgaaggaacagctgctggtgctggtggaatgggccaagtacatccccgccttttgcgagctgcccctggacgatcaggtggccctgctgagagcacacgccggcgaacatctgctgctgggagccaccaagcggagcatggtgttcaaggacgtgctgctgctgggcaacgactacatcgtgcccagacactgccctgagctggccgagatgagccgggtgtccatcagaatcctggacgaactggtgctgccgtttcaggaactgcagatcgacgacaacgagtacgcctacctgaaggccatcatctttttcgaccccgacgccaagggcctgagcgaccctggcaagatcaagcggctgagaagccaggtgcaagtgtccctggaagattacatcaacgaccggcagtacgacagccggggcagatttggcgaactgctcctgctgctgcccaccctgcagagcatcacctggcagatgatcgagcagatccagttcatcaagctgttcggcatggccaagatcgacaatctgctgcaggaaatgctgctcgggggcagcccttctgatgcccctcatgcccaccaccctctgcaccctcacctgatgcaagaacacatgggcaccaatgtgatcgtggccaacacaatgcccacccacctgagcaacggccagatgtgcgagtggcccagacctagaggacaggccgccacacctgagacacctcagccttctccacctggcggctctggcagcgagccttacaaactgctgcctggcgctgtggccaccatcgtgaaacctctgagcgccatcccccagcccaccatcaccaagcaggaagtgatctgaggactagtccctgttcccagagcccacttttttttctttttttgaaataaaatagcctgtctttcagatctcaaaggctcttttcagagccaccaaaaaaaaaaaaaaaaaaaaaaaaaaaaaaaaaaaaaaaaaaaaaaaaaaaaaaaaaaaaaaaaaaaaaaaaaaaaaaaaaaaaaaaaaaaaaaaaaaaaa

SEQ ID NO: 3325 - RNA, 1697 nt, synthetic construct
  misc_feature 1..1697: note = mRNA a-1 (hSL-A100) (opt29) from Homo sapiens__NP_000448.3__HNF4A(1-474)(S183A)
  source 1..1697: mol_type = other RNA
aggagagtcccgcagtcggcgtccagcggctctgcttgttcgtgtgtgtgtcgttgcaggccttattcaagcttaccatgagactgagcaagaccctggtggacatggacatggccgactactctgccgccctggaccctgcctacaccaccctggagttcgaaaacgtgcaagtgctgaccatgggcaacgacaccagccctagcgagggcaccaacctgaacgcccctaatagcctgggagtgtccgccctgtgtgccatctgtggcgatagagccaccggcaagcactacggcgccagctcttgtgatggctgcaagggcttcttccggcggagcgtgcggaagaaccacatgtacagctgccggttcagccggcagtgcgtggtggacaaggataagcggaaccagtgccggtactgcagactgaagaagtgcttcagagccggcatgaagaaagaagccgtgcagaacgagcgggaccggatcagcaccagaagaagcagctacgaggacagcagcctgcccagcatcaacgccctgctgcaggccgaggtgctgagcagacagatcaccagcccagtgtccggcatcaacggcgacatccgggccaagaagatcgccgccattgccgacgtgtgcgagagcatgaaggaacagctgctggtgctggtggaatgggccaagtacatccccgccttttgcgagctgcccctggacgatcaggtggccctgctgagagcacacgccggcgaacatctgctgctgggagccaccaagcggagcatggtgttcaaggacgtgctgctgctgggcaacgactacatcgtgcccagacactgccctgagctggccgagatgagccgggtgtccatcagaatcctggacgaactggtgctgccgtttcaggaactgcagatcgacgacaacgagtacgcctacctgaaggccatcatctttttcgaccccgacgccaagggcctgagcgaccctggcaagatcaagcggctgagaagccaggtgcaagtgtccctggaagattacatcaacgaccggcagtacgacagccggggcagatttggcgaactgctcctgctgctgcccaccctgcagagcatcacctggcagatgatcgagcagatccagttcatcaagctgttcggcatggccaagatcgacaatctgctgcaggaaatgctgctcgggggcagcccttctgatgcccctcatgcccaccaccctctgcaccctcacctgatgcaagaacacatgggcaccaatgtgatcgtggccaacacaatgcccacccacctgagcaacggccagatgtgcgagtggcccagacctagaggacaggccgccacacctgagacacctcagccttctccacctggcggctctggcagcgagccttacaaactgctgcctggcgctgtggccaccatcgtgaaacctctgagcgccatcccccagcccaccatcaccaagcaggaagtgatctgaggactagtccctgttcccagagcccacttttttttctttttttgaaataaaatagcctgtctttcagatctcaaaggctcttttcagagccaccaaaaaaaaaaaaaaaaaaaaaaaaaaaaaaaaaaaaaaaaaaaaaaaaaaaaaaaaaaaaaaaaaaaaaaaaaaaaaaaaaaaaaaaaaaaaaaaaaaaaa

SEQ ID NO: 3326 - RNA, 1697 nt, synthetic construct
  misc_feature 1..1697: note = mRNA a-1 (hSL-A100) (opt29) from Homo sapiens__NP_000448.3__HNF4A(1-474)(S183E)
  source 1..1697: mol_type = other RNA
aggagagtcccgcagtcggcgtccagcggctctgcttgttcgtgtgtgtgtcgttgcaggccttattcaagcttaccatgagactgagcaagaccctggtggacatggacatggccgactactctgccgccctggaccctgcctacaccaccctggagttcgaaaacgtgcaagtgctgaccatgggcaacgacaccagccctagcgagggcaccaacctgaacgcccctaatagcctgggagtgtccgccctgtgtgccatctgtggcgatagagccaccggcaagcactacggcgccagctcttgtgatggctgcaagggcttcttccggcggagcgtgcggaagaaccacatgtacagctgccggttcagccggcagtgcgtggtggacaaggataagcggaaccagtgccggtactgcagactgaagaagtgcttcagagccggcatgaagaaagaagccgtgcagaacgagcgggaccggatcagcaccagaagaagcagctacgaggacagcagcctgcccagcatcaacgccctgctgcaggccgaggtgctgagcagacagatcaccagcccagtgtccggcatcaacggcgacatccgggccaagaagatcgccgagattgccgacgtgtgcgagagcatgaaggaacagctgctggtgctggtggaatgggccaagtacatccccgccttttgcgagctgcccctggacgatcaggtggccctgctgagagcacacgccggcgaacatctgctgctgggagccaccaagcggagcatggtgttcaaggacgtgctgctgctgggcaacgactacatcgtgcccagacactgccctgagctggccgagatgagccgggtgtccatcagaatcctggacgaactggtgctgccgtttcaggaactgcagatcgacgacaacgagtacgcctacctgaaggccatcatctttttcgaccccgacgccaagggcctgagcgaccctggcaagatcaagcggctgagaagccaggtgcaagtgtccctggaagattacatcaacgaccggcagtacgacagccggggcagatttggcgaactgctcctgctgctgcccaccctgcagagcatcacctggcagatgatcgagcagatccagttcatcaagctgttcggcatggccaagatcgacaatctgctgcaggaaatgctgctcgggggcagcccttctgatgcccctcatgcccaccaccctctgcaccctcacctgatgcaagaacacatgggcaccaatgtgatcgtggccaacacaatgcccacccacctgagcaacggccagatgtgcgagtggcccagacctagaggacaggccgccacacctgagacacctcagccttctccacctggcggctctggcagcgagccttacaaactgctgcctggcgctgtggccaccatcgtgaaacctctgagcgccatcccccagcccaccatcaccaagcaggaagtgatctgaggactagtccctgttcccagagcccacttttttttctttttttgaaataaaatagcctgtctttcagatctcaaaggctcttttcagagccaccaaaaaaaaaaaaaaaaaaaaaaaaaaaaaaaaaaaaaaaaaaaaaaaaaaaaaaaaaaaaaaaaaaaaaaaaaaaaaaaaaaaaaaaaaaaaaaaaaaaaa

SEQ ID NO: 3327 - RNA, 1697 nt, synthetic construct
  misc_feature 1..1697: note = mRNA a-1 (hSL-A100) (opt29) from Homo sapiens__NP_000448.3__HNF4A(1-474)(S461A)
  source 1..1697: mol_type = other RNA
aggagagtcccgcagtcggcgtccagcggctctgcttgttcgtgtgtgtgtcgttgcaggccttattcaagcttaccatgagactgagcaagaccctggtggacatggacatggccgactactctgccgccctggaccctgcctacaccaccctggagttcgaaaacgtgcaagtgctgaccatgggcaacgacaccagccctagcgagggcaccaacctgaacgcccctaatagcctgggagtgtccgccctgtgtgccatctgtggcgatagagccaccggcaagcactacggcgccagctcttgtgatggctgcaagggcttcttccggcggagcgtgcggaagaaccacatgtacagctgccggttcagccggcagtgcgtggtggacaaggataagcggaaccagtgccggtactgcagactgaagaagtgcttcagagccggcatgaagaaagaagccgtgcagaacgagcgggaccggatcagcaccagaagaagcagctacgaggacagcagcctgcccagcatcaacgccctgctgcaggccgaggtgctgagcagacagatcaccagcccagtgtccggcatcaacggcgacatccgggccaagaagatcgccagcattgccgacgtgtgcgagagcatgaaggaacagctgctggtgctggtggaatgggccaagtacatccccgccttttgcgagctgcccctggacgatcaggtggccctgctgagagcacacgccggcgaacatctgctgctgggagccaccaagcggagcatggtgttcaaggacgtgctgctgctgggcaacgactacatcgtgcccagacactgccctgagctggccgagatgagccgggtgtccatcagaatcctggacgaactggtgctgccgtttcaggaactgcagatcgacgacaacgagtacgcctacctgaaggccatcatctttttcgaccccgacgccaagggcctgagcgaccctggcaagatcaagcggctgagaagccaggtgcaagtgtccctggaagattacatcaacgaccggcagtacgacagccggggcagatttggcgaactgctcctgctgctgcccaccctgcagagcatcacctggcagatgatcgagcagatccagttcatcaagctgttcggcatggccaagatcgacaatctgctgcaggaaatgctgctcgggggcagcccttctgatgcccctcatgcccaccaccctctgcaccctcacctgatgcaagaacacatgggcaccaatgtgatcgtggccaacacaatgcccacccacctgagcaacggccagatgtgcgagtggcccagacctagaggacaggccgccacacctgagacacctcagccttctccacctggcggctctggcagcgagccttacaaactgctgcctggcgctgtggccaccatcgtgaaacctctggccgccatcccccagcccaccatcaccaagcaggaagtgatctgaggactagtccctgttcccagagcccacttttttttctttttttgaaataaaatagcctgtctttcagatctcaaaggctcttttcagagccaccaaaaaaaaaaaaaaaaaaaaaaaaaaaaaaaaaaaaaaaaaaaaaaaaaaaaaaaaaaaaaaaaaaaaaaaaaaaaaaaaaaaaaaaaaaaaaaaaaaaaa

SEQ ID NO: 3328 - RNA, 1697 nt, synthetic construct
  misc_feature 1..1697: note = mRNA a-1 (hSL-A100) (opt29) from Homo sapiens__NP_000448.3__HNF4A(1-474)(S461E)
  source 1..1697: mol_type = other RNA
aggagagtcccgcagtcggcgtccagcggctctgcttgttcgtgtgtgtgtcgttgcaggccttattcaagcttaccatgagactgagcaagaccctggtggacatggacatggccgactactctgccgccctggaccctgcctacaccaccctggagttcgaaaacgtgcaagtgctgaccatgggcaacgacaccagccctagcgagggcaccaacctgaacgcccctaatagcctgggagtgtccgccctgtgtgccatctgtggcgatagagccaccggcaagcactacggcgccagctcttgtgatggctgcaagggcttcttccggcggagcgtgcggaagaaccacatgtacagctgccggttcagccggcagtgcgtggtggacaaggataagcggaaccagtgccggtactgcagactgaagaagtgcttcagagccggcatgaagaaagaagccgtgcagaacgagcgggaccggatcagcaccagaagaagcagctacgaggacagcagcctgcccagcatcaacgccctgctgcaggccgaggtgctgagcagacagatcaccagcccagtgtccggcatcaacggcgacatccgggccaagaagatcgccagcattgccgacgtgtgcgagagcatgaaggaacagctgctggtgctggtggaatgggccaagtacatccccgccttttgcgagctgcccctggacgatcaggtggccctgctgagagcacacgccggcgaacatctgctgctgggagccaccaagcggagcatggtgttcaaggacgtgctgctgctgggcaacgactacatcgtgcccagacactgccctgagctggccgagatgagccgggtgtccatcagaatcctggacgaactggtgctgccgtttcaggaactgcagatcgacgacaacgagtacgcctacctgaaggccatcatctttttcgaccccgacgccaagggcctgagcgaccctggcaagatcaagcggctgagaagccaggtgcaagtgtccctggaagattacatcaacgaccggcagtacgacagccggggcagatttggcgaactgctcctgctgctgcccaccctgcagagcatcacctggcagatgatcgagcagatccagttcatcaagctgttcggcatggccaagatcgacaatctgctgcaggaaatgctgctcgggggcagcccttctgatgcccctcatgcccaccaccctctgcaccctcacctgatgcaagaacacatgggcaccaatgtgatcgtggccaacacaatgcccacccacctgagcaacggccagatgtgcgagtggcccagacctagaggacaggccgccacacctgagacacctcagccttctccacctggcggctctggcagcgagccttacaaactgctgcctggcgctgtggccaccatcgtgaaacctctggaggccatcccccagcccaccatcaccaagcaggaagtgatctgaggactagtccctgttcccagagcccacttttttttctttttttgaaataaaatagcctgtctttcagatctcaaaggctcttttcagagccaccaaaaaaaaaaaaaaaaaaaaaaaaaaaaaaaaaaaaaaaaaaaaaaaaaaaaaaaaaaaaaaaaaaaaaaaaaaaaaaaaaaaaaaaaaaaaaaaaaaaaa

SEQ ID NO: 3329 - RNA, 1697 nt, synthetic construct
  misc_feature 1..1697: note = mRNA a-1 (hSL-A100) (opt29) from Homo sapiens__NP_000448.3__HNF4A(1-474)(S142A_S143A_S313A)
  source 1..1697: mol_type = other RNA
aggagagtcccgcagtcggcgtccagcggctctgcttgttcgtgtgtgtgtcgttgcaggccttattcaagcttaccatgagactgagcaagaccctggtggacatggacatggccgactactctgccgccctggaccctgcctacaccaccctggagttcgaaaacgtgcaagtgctgaccatgggcaacgacaccagccctagcgagggcaccaacctgaacgcccctaatagcctgggagtgtccgccctgtgtgccatctgtggcgatagagccaccggcaagcactacggcgccagctcttgtgatggctgcaagggcttcttccggcggagcgtgcggaagaaccacatgtacagctgccggttcagccggcagtgcgtggtggacaaggataagcggaaccagtgccggtactgcagactgaagaagtgcttcagagccggcatgaagaaagaagccgtgcagaacgagcgggaccggatcagcaccagaagagccgcctacgaggacagcagcctgcccagcatcaacgccctgctgcaggccgaggtgctgagcagacagatcaccagcccagtgtccggcatcaacggcgacatccgggccaagaagatcgccagcattgccgacgtgtgcgagagcatgaaggaacagctgctggtgctggtggaatgggccaagtacatccccgccttttgcgagctgcccctggacgatcaggtggccctgctgagagcacacgccggcgaacatctgctgctgggagccaccaagcggagcatggtgttcaaggacgtgctgctgctgggcaacgactacatcgtgcccagacactgccctgagctggccgagatgagccgggtgtccatcagaatcctggacgaactggtgctgccgtttcaggaactgcagatcgacgacaacgagtacgcctacctgaaggccatcatctttttcgaccccgacgccaagggcctgagcgaccctggcaagatcaagcggctgagagcccaggtgcaagtgtccctggaagattacatcaacgaccggcagtacgacagccggggcagatttggcgaactgctcctgctgctgcccaccctgcagagcatcacctggcagatgatcgagcagatccagttcatcaagctgttcggcatggccaagatcgacaatctgctgcaggaaatgctgctcgggggcagcccttctgatgcccctcatgcccaccaccctctgcaccctcacctgatgcaagaacacatgggcaccaatgtgatcgtggccaacacaatgcccacccacctgagcaacggccagatgtgcgagtggcccagacctagaggacaggccgccacacctgagacacctcagccttctccacctggcggctctggcagcgagccttacaaactgctgcctggcgctgtggccaccatcgtgaaacctctgagcgccatcccccagcccaccatcaccaagcaggaagtgatctgaggactagtccctgttcccagagcccacttttttttctttttttgaaataaaatagcctgtctttcagatctcaaaggctcttttcagagccaccaaaaaaaaaaaaaaaaaaaaaaaaaaaaaaaaaaaaaaaaaaaaaaaaaaaaaaaaaaaaaaaaaaaaaaaaaaaaaaaaaaaaaaaaaaaaaaaaaaaaa

SEQ ID NO: 3330 - RNA, 1697 nt, synthetic construct
  misc_feature 1..1697: note = mRNA a-1 (hSL-A100) (opt29) from Homo sapiens__NP_000448.3__HNF4A(1-474)(S142A_S143A_S313A_K458R)
  source 1..1697: mol_type = other RNA
aggagagtcccgcagtcggcgtccagcggctctgcttgttcgtgtgtgtgtcgttgcaggccttattcaagcttaccatgagactgagcaagaccctggtggacatggacatggccgactactctgccgccctggaccctgcctacaccaccctggagttcgaaaacgtgcaagtgctgaccatgggcaacgacaccagccctagcgagggcaccaacctgaacgcccctaatagcctgggagtgtccgccctgtgtgccatctgtggcgatagagccaccggcaagcactacggcgccagctcttgtgatggctgcaagggcttcttccggcggagcgtgcggaagaaccacatgtacagctgccggttcagccggcagtgcgtggtggacaaggataagcggaaccagtgccggtactgcagactgaagaagtgcttcagagccggcatgaagaaagaagccgtgcagaacgagcgggaccggatcagcaccagaagagccgcctacgaggacagcagcctgcccagcatcaacgccctgctgcaggccgaggtgctgagcagacagatcaccagcccagtgtccggcatcaacggcgacatccgggccaagaagatcgccagcattgccgacgtgtgcgagagcatgaaggaacagctgctggtgctggtggaatgggccaagtacatccccgccttttgcgagctgcccctggacgatcaggtggccctgctgagagcacacgccggcgaacatctgctgctgggagccaccaagcggagcatggtgttcaaggacgtgctgctgctgggcaacgactacatcgtgcccagacactgccctgagctggccgagatgagccgggtgtccatcagaatcctggacgaactggtgctgccgtttcaggaactgcagatcgacgacaacgagtacgcctacctgaaggccatcatctttttcgaccccgacgccaagggcctgagcgaccctggcaagatcaagcggctgagagcccaggtgcaagtgtccctggaagattacatcaacgaccggcagtacgacagccggggcagatttggcgaactgctcctgctgctgcccaccctgcagagcatcacctggcagatgatcgagcagatccagttcatcaagctgttcggcatggccaagatcgacaatctgctgcaggaaatgctgctcgggggcagcccttctgatgcccctcatgcccaccaccctctgcaccctcacctgatgcaagaacacatgggcaccaatgtgatcgtggccaacacaatgcccacccacctgagcaacggccagatgtgcgagtggcccagacctagaggacaggccgccacacctgagacacctcagccttctccacctggcggctctggcagcgagccttacaaactgctgcctggcgctgtggccaccatcgtgagacctctgagcgccatcccccagcccaccatcaccaagcaggaagtgatctgaggactagtccctgttcccagagcccacttttttttctttttttgaaataaaatagcctgtctttcagatctcaaaggctcttttcagagccaccaaaaaaaaaaaaaaaaaaaaaaaaaaaaaaaaaaaaaaaaaaaaaaaaaaaaaaaaaaaaaaaaaaaaaaaaaaaaaaaaaaaaaaaaaaaaaaaaaaaaa

SEQ ID NO: 3331 - RNA, 1697 nt, synthetic construct
  misc_feature 1..1697: note = mRNA a-1 (hSL-A100) (opt29) from Homo sapiens__NP_000448.3__HNF4A(1-474)(S142A_S143A_S167A_S313A_ S378A_T429A_T432A_S436A_K458R)
  source 1..1697: mol_type = other RNA
aggagagtcccgcagtcggcgtccagcggctctgcttgttcgtgtgtgtgtcgttgcaggccttattcaagcttaccatgagactgagcaagaccctggtggacatggacatggccgactactctgccgccctggaccctgcctacaccaccctggagttcgaaaacgtgcaagtgctgaccatgggcaacgacaccagccctagcgagggcaccaacctgaacgcccctaatagcctgggagtgtccgccctgtgtgccatctgtggcgatagagccaccggcaagcactacggcgccagctcttgtgatggctgcaagggcttcttccggcggagcgtgcggaagaaccacatgtacagctgccggttcagccggcagtgcgtggtggacaaggataagcggaaccagtgccggtactgcagactgaagaagtgcttcagagccggcatgaagaaagaagccgtgcagaacgagcgggaccggatcagcaccagaagagccgcctacgaggacagcagcctgcccagcatcaacgccctgctgcaggccgaggtgctgagcagacagatcaccgccccagtgtccggcatcaacggcgacatccgggccaagaagatcgccagcattgccgacgtgtgcgagagcatgaaggaacagctgctggtgctggtggaatgggccaagtacatccccgccttttgcgagctgcccctggacgatcaggtggccctgctgagagcacacgccggcgaacatctgctgctgggagccaccaagcggagcatggtgttcaaggacgtgctgctgctgggcaacgactacatcgtgcccagacactgccctgagctggccgagatgagccgggtgtccatcagaatcctggacgaactggtgctgccgtttcaggaactgcagatcgacgacaacgagtacgcctacctgaaggccatcatctttttcgaccccgacgccaagggcctgagcgaccctggcaagatcaagcggctgagagcccaggtgcaagtgtccctggaagattacatcaacgaccggcagtacgacagccggggcagatttggcgaactgctcctgctgctgcccaccctgcagagcatcacctggcagatgatcgagcagatccagttcatcaagctgttcggcatggccaagatcgacaatctgctgcaggaaatgctgctcgggggcgccccttctgatgcccctcatgcccaccaccctctgcaccctcacctgatgcaagaacacatgggcaccaatgtgatcgtggccaacacaatgcccacccacctgagcaacggccagatgtgcgagtggcccagacctagaggacaggccgccgcccctgaggcccctcagcctgccccacctggcggctctggcagcgagccttacaaactgctgcctggcgctgtggccaccatcgtgagacctctgagcgccatcccccagcccaccatcaccaagcaggaagtgatctgaggactagtccctgttcccagagcccacttttttttctttttttgaaataaaatagcctgtctttcagatctcaaaggctcttttcagagccaccaaaaaaaaaaaaaaaaaaaaaaaaaaaaaaaaaaaaaaaaaaaaaaaaaaaaaaaaaaaaaaaaaaaaaaaaaaaaaaaaaaaaaaaaaaaaaaaaaaaaa

SEQ ID NO: 3332 - RNA, 1697 nt, synthetic construct
  misc_feature 1..1697: note = mRNA a-1 (hSL-A100) (opt29) from Homo sapiens__NP_000448.3__HNF4A(1-474)(S142A_S143A_S148A_S167A_ S313A_S378A_T429A_T432A_S436A_K458R)
  source 1..1697: mol_type = other RNA
aggagagtcccgcagtcggcgtccagcggctctgcttgttcgtgtgtgtgtcgttgcaggccttattcaagcttaccatgagactgagcaagaccctggtggacatggacatggccgactactctgccgccctggaccctgcctacaccaccctggagttcgaaaacgtgcaagtgctgaccatgggcaacgacaccagccctagcgagggcaccaacctgaacgcccctaatagcctgggagtgtccgccctgtgtgccatctgtggcgatagagccaccggcaagcactacggcgccagctcttgtgatggctgcaagggcttcttccggcggagcgtgcggaagaaccacatgtacagctgccggttcagccggcagtgcgtggtggacaaggataagcggaaccagtgccggtactgcagactgaagaagtgcttcagagccggcatgaagaaagaagccgtgcagaacgagcgggaccggatcagcaccagaagagccgcctacgaggacagcgccctgcccagcatcaacgccctgctgcaggccgaggtgctgagcagacagatcaccgccccagtgtccggcatcaacggcgacatccgggccaagaagatcgccagcattgccgacgtgtgcgagagcatgaaggaacagctgctggtgctggtggaatgggccaagtacatccccgccttttgcgagctgcccctggacgatcaggtggccctgctgagagcacacgccggcgaacatctgctgctgggagccaccaagcggagcatggtgttcaaggacgtgctgctgctgggcaacgactacatcgtgcccagacactgccctgagctggccgagatgagccgggtgtccatcagaatcctggacgaactggtgctgccgtttcaggaactgcagatcgacgacaacgagtacgcctacctgaaggccatcatctttttcgaccccgacgccaagggcctgagcgaccctggcaagatcaagcggctgagagcccaggtgcaagtgtccctggaagattacatcaacgaccggcagtacgacagccggggcagatttggcgaactgctcctgctgctgcccaccctgcagagcatcacctggcagatgatcgagcagatccagttcatcaagctgttcggcatggccaagatcgacaatctgctgcaggaaatgctgctcgggggcgccccttctgatgcccctcatgcccaccaccctctgcaccctcacctgatgcaagaacacatgggcaccaatgtgatcgtggccaacacaatgcccacccacctgagcaacggccagatgtgcgagtggcccagacctagaggacaggccgccgcccctgaggcccctcagcctgccccacctggcggctctggcagcgagccttacaaactgctgcctggcgctgtggccaccatcgtgagacctctgagcgccatcccccagcccaccatcaccaagcaggaagtgatctgaggactagtccctgttcccagagcccacttttttttctttttttgaaataaaatagcctgtctttcagatctcaaaggctcttttcagagccaccaaaaaaaaaaaaaaaaaaaaaaaaaaaaaaaaaaaaaaaaaaaaaaaaaaaaaaaaaaaaaaaaaaaaaaaaaaaaaaaaaaaaaaaaaaaaaaaaaaaaa

SEQ ID NO: 3333 - RNA, 1697 nt, synthetic construct
  misc_feature 1..1697: note = mRNA a-1 (hSL-A100) (opt29) from Homo sapiens__NP_000448.3__HNF4A(1-474)(K106R_K108R_K126R_K127R_ S142A_S143A_S148A_S167A_S313A_S378A_T429A_T432A_S436A_K458R )
  source 1..1697: mol_type = other RNA
aggagagtcccgcagtcggcgtccagcggctctgcttgttcgtgtgtgtgtcgttgcaggccttattcaagcttaccatgagactgagcaagaccctggtggacatggacatggccgactactctgccgccctggaccctgcctacaccaccctggagttcgaaaacgtgcaagtgctgaccatgggcaacgacaccagccctagcgagggcaccaacctgaacgcccctaatagcctgggagtgtccgccctgtgtgccatctgtggcgatagagccaccggcaagcactacggcgccagctcttgtgatggctgcaagggcttcttccggcggagcgtgcggaagaaccacatgtacagctgccggttcagccggcagtgcgtggtggaccgggatagacggaaccagtgccggtactgcagactgaagaagtgcttcagagccggcatgcggagagaagccgtgcagaacgagcgggaccggatcagcaccagaagagccgcctacgaggacagcgccctgcccagcatcaacgccctgctgcaggccgaggtgctgagcagacagatcaccgccccagtgtccggcatcaacggcgacatccgggccaagaagatcgccagcattgccgacgtgtgcgagagcatgaaggaacagctgctggtgctggtggaatgggccaagtacatccccgccttttgcgagctgcccctggacgatcaggtggccctgctgagagcacacgccggcgaacatctgctgctgggagccaccaagcggagcatggtgttcaaggacgtgctgctgctgggcaacgactacatcgtgcccagacactgccctgagctggccgagatgagccgggtgtccatcagaatcctggacgaactggtgctgccgtttcaggaactgcagatcgacgacaacgagtacgcctacctgaaggccatcatctttttcgaccccgacgccaagggcctgagcgaccctggcaagatcaagcggctgagagcccaggtgcaagtgtccctggaagattacatcaacgaccggcagtacgacagccggggcagatttggcgaactgctcctgctgctgcccaccctgcagagcatcacctggcagatgatcgagcagatccagttcatcaagctgttcggcatggccaagatcgacaatctgctgcaggaaatgctgctcgggggcgccccttctgatgcccctcatgcccaccaccctctgcaccctcacctgatgcaagaacacatgggcaccaatgtgatcgtggccaacacaatgcccacccacctgagcaacggccagatgtgcgagtggcccagacctagaggacaggccgccgcccctgaggcccctcagcctgccccacctggcggctctggcagcgagccttacaaactgctgcctggcgctgtggccaccatcgtgagacctctgagcgccatcccccagcccaccatcaccaagcaggaagtgatctgaggactagtccctgttcccagagcccacttttttttctttttttgaaataaaatagcctgtctttcagatctcaaaggctcttttcagagccaccaaaaaaaaaaaaaaaaaaaaaaaaaaaaaaaaaaaaaaaaaaaaaaaaaaaaaaaaaaaaaaaaaaaaaaaaaaaaaaaaaaaaaaaaaaaaaaaaaaaaa

SEQ ID NO: 3334 - RNA, 1697 nt, synthetic construct
  misc_feature 1..1697: note = mRNA a-1 (hSL-A100) (opt29) from Homo sapiens__NP_000448.3__HNF4A(1-474)(S142A_S143A_S148A_T166A_ S167A_S313A_S378A_T429A_T432A_S436A_K458R)
  source 1..1697: mol_type = other RNA
aggagagtcccgcagtcggcgtccagcggctctgcttgttcgtgtgtgtgtcgttgcaggccttattcaagcttaccatgagactgagcaagaccctggtggacatggacatggccgactactctgccgccctggaccctgcctacaccaccctggagttcgaaaacgtgcaagtgctgaccatgggcaacgacaccagccctagcgagggcaccaacctgaacgcccctaatagcctgggagtgtccgccctgtgtgccatctgtggcgatagagccaccggcaagcactacggcgccagctcttgtgatggctgcaagggcttcttccggcggagcgtgcggaagaaccacatgtacagctgccggttcagccggcagtgcgtggtggacaaggataagcggaaccagtgccggtactgcagactgaagaagtgcttcagagccggcatgaagaaagaagccgtgcagaacgagcgggaccggatcagcaccagaagagccgcctacgaggacagcgccctgcccagcatcaacgccctgctgcaggccgaggtgctgagcagacagatcgccgccccagtgtccggcatcaacggcgacatccgggccaagaagatcgccagcattgccgacgtgtgcgagagcatgaaggaacagctgctggtgctggtggaatgggccaagtacatccccgccttttgcgagctgcccctggacgatcaggtggccctgctgagagcacacgccggcgaacatctgctgctgggagccaccaagcggagcatggtgttcaaggacgtgctgctgctgggcaacgactacatcgtgcccagacactgccctgagctggccgagatgagccgggtgtccatcagaatcctggacgaactggtgctgccgtttcaggaactgcagatcgacgacaacgagtacgcctacctgaaggccatcatctttttcgaccccgacgccaagggcctgagcgaccctggcaagatcaagcggctgagagcccaggtgcaagtgtccctggaagattacatcaacgaccggcagtacgacagccggggcagatttggcgaactgctcctgctgctgcccaccctgcagagcatcacctggcagatgatcgagcagatccagttcatcaagctgttcggcatggccaagatcgacaatctgctgcaggaaatgctgctcgggggcgccccttctgatgcccctcatgcccaccaccctctgcaccctcacctgatgcaagaacacatgggcaccaatgtgatcgtggccaacacaatgcccacccacctgagcaacggccagatgtgcgagtggcccagacctagaggacaggccgccgcccctgaggcccctcagcctgccccacctggcggctctggcagcgagccttacaaactgctgcctggcgctgtggccaccatcgtgagacctctgagcgccatcccccagcccaccatcaccaagcaggaagtgatctgaggactagtccctgttcccagagcccacttttttttctttttttgaaataaaatagcctgtctttcagatctcaaaggctcttttcagagccaccaaaaaaaaaaaaaaaaaaaaaaaaaaaaaaaaaaaaaaaaaaaaaaaaaaaaaaaaaaaaaaaaaaaaaaaaaaaaaaaaaaaaaaaaaaaaaaaaaaaaa

SEQ ID NO: 3335 - RNA, 1697 nt, synthetic construct
  misc_feature 1..1697: note = mRNA a-1 (hSL-A100) (opt29) from Homo sapiens__NP_000448.3__HNF4A(1-474)(S87A_S142A_S143A_S148A_T 166A_S167A_S313A_S378A_T429A_T432A_S436A_K458R)
  source 1..1697: mol_type = other RNA
aggagagtcccgcagtcggcgtccagcggctctgcttgttcgtgtgtgtgtcgttgcaggccttattcaagcttaccatgagactgagcaagaccctggtggacatggacatggccgactactctgccgccctggaccctgcctacaccaccctggagttcgaaaacgtgcaagtgctgaccatgggcaacgacaccagccctagcgagggcaccaacctgaacgcccctaatagcctgggagtgtccgccctgtgtgccatctgtggcgatagagccaccggcaagcactacggcgccagctcttgtgatggctgcaagggcttcttccggcgggccgtgcggaagaaccacatgtacagctgccggttcagccggcagtgcgtggtggacaaggataagcggaaccagtgccggtactgcagactgaagaagtgcttcagagccggcatgaagaaagaagccgtgcagaacgagcgggaccggatcagcaccagaagagccgcctacgaggacagcgccctgcccagcatcaacgccctgctgcaggccgaggtgctgagcagacagatcgccgccccagtgtccggcatcaacggcgacatccgggccaagaagatcgccagcattgccgacgtgtgcgagagcatgaaggaacagctgctggtgctggtggaatgggccaagtacatccccgccttttgcgagctgcccctggacgatcaggtggccctgctgagagcacacgccggcgaacatctgctgctgggagccaccaagcggagcatggtgttcaaggacgtgctgctgctgggcaacgactacatcgtgcccagacactgccctgagctggccgagatgagccgggtgtccatcagaatcctggacgaactggtgctgccgtttcaggaactgcagatcgacgacaacgagtacgcctacctgaaggccatcatctttttcgaccccgacgccaagggcctgagcgaccctggcaagatcaagcggctgagagcccaggtgcaagtgtccctggaagattacatcaacgaccggcagtacgacagccggggcagatttggcgaactgctcctgctgctgcccaccctgcagagcatcacctggcagatgatcgagcagatccagttcatcaagctgttcggcatggccaagatcgacaatctgctgcaggaaatgctgctcgggggcgccccttctgatgcccctcatgcccaccaccctctgcaccctcacctgatgcaagaacacatgggcaccaatgtgatcgtggccaacacaatgcccacccacctgagcaacggccagatgtgcgagtggcccagacctagaggacaggccgccgcccctgaggcccctcagcctgccccacctggcggctctggcagcgagccttacaaactgctgcctggcgctgtggccaccatcgtgagacctctgagcgccatcccccagcccaccatcaccaagcaggaagtgatctgaggactagtccctgttcccagagcccacttttttttctttttttgaaataaaatagcctgtctttcagatctcaaaggctcttttcagagccaccaaaaaaaaaaaaaaaaaaaaaaaaaaaaaaaaaaaaaaaaaaaaaaaaaaaaaaaaaaaaaaaaaaaaaaaaaaaaaaaaaaaaaaaaaaaaaaaaaaaaa

SEQ ID NO: 3336 - RNA, 1697 nt, synthetic construct
  misc_feature 1..1697: note = mRNA a-1 (hSL-A100) (opt29) from Homo sapiens__NP_000448.3__HNF4A(1-474)(S87A_K106R_K108R_K126R_K 127R_S142A_S143A_S148A_T166A_S167A_S313A_S378A_T429A_T432A_ S436A_K458R)
  source 1..1697: mol_type = other RNA
aggagagtcccgcagtcggcgtccagcggctctgcttgttcgtgtgtgtgtcgttgcaggccttattcaagcttaccatgagactgagcaagaccctggtggacatggacatggccgactactctgccgccctggaccctgcctacaccaccctggagttcgaaaacgtgcaagtgctgaccatgggcaacgacaccagccctagcgagggcaccaacctgaacgcccctaatagcctgggagtgtccgccctgtgtgccatctgtggcgatagagccaccggcaagcactacggcgccagctcttgtgatggctgcaagggcttcttccggcgggccgtgcggaagaaccacatgtacagctgccggttcagccggcagtgcgtggtggaccgggatagacggaaccagtgccggtactgcagactgaagaagtgcttcagagccggcatgcggagagaagccgtgcagaacgagcgggaccggatcagcaccagaagagccgcctacgaggacagcgccctgcccagcatcaacgccctgctgcaggccgaggtgctgagcagacagatcgccgccccagtgtccggcatcaacggcgacatccgggccaagaagatcgccagcattgccgacgtgtgcgagagcatgaaggaacagctgctggtgctggtggaatgggccaagtacatccccgccttttgcgagctgcccctggacgatcaggtggccctgctgagagcacacgccggcgaacatctgctgctgggagccaccaagcggagcatggtgttcaaggacgtgctgctgctgggcaacgactacatcgtgcccagacactgccctgagctggccgagatgagccgggtgtccatcagaatcctggacgaactggtgctgccgtttcaggaactgcagatcgacgacaacgagtacgcctacctgaaggccatcatctttttcgaccccgacgccaagggcctgagcgaccctggcaagatcaagcggctgagagcccaggtgcaagtgtccctggaagattacatcaacgaccggcagtacgacagccggggcagatttggcgaactgctcctgctgctgcccaccctgcagagcatcacctggcagatgatcgagcagatccagttcatcaagctgttcggcatggccaagatcgacaatctgctgcaggaaatgctgctcgggggcgccccttctgatgcccctcatgcccaccaccctctgcaccctcacctgatgcaagaacacatgggcaccaatgtgatcgtggccaacacaatgcccacccacctgagcaacggccagatgtgcgagtggcccagacctagaggacaggccgccgcccctgaggcccctcagcctgccccacctggcggctctggcagcgagccttacaaactgctgcctggcgctgtggccaccatcgtgagacctctgagcgccatcccccagcccaccatcaccaagcaggaagtgatctgaggactagtccctgttcccagagcccacttttttttctttttttgaaataaaatagcctgtctttcagatctcaaaggctcttttcagagccaccaaaaaaaaaaaaaaaaaaaaaaaaaaaaaaaaaaaaaaaaaaaaaaaaaaaaaaaaaaaaaaaaaaaaaaaaaaaaaaaaaaaaaaaaaaaaaaaaaaaaa

SEQ ID NO: 3337 - RNA, 1697 nt, synthetic construct
  misc_feature 1..1697: note = mRNA a-1 (hSL-A100) (opt29) from Homo sapiens__NP_000448.3__HNF4A(1-474)(S87A_K106R_K108R_K126R_K 127R)
  source 1..1697: mol_type = other RNA
aggagagtcccgcagtcggcgtccagcggctctgcttgttcgtgtgtgtgtcgttgcaggccttattcaagcttaccatgagactgagcaagaccctggtggacatggacatggccgactactctgccgccctggaccctgcctacaccaccctggagttcgaaaacgtgcaagtgctgaccatgggcaacgacaccagccctagcgagggcaccaacctgaacgcccctaatagcctgggagtgtccgccctgtgtgccatctgtggcgatagagccaccggcaagcactacggcgccagctcttgtgatggctgcaagggcttcttccggcgggccgtgcggaagaaccacatgtacagctgccggttcagccggcagtgcgtggtggaccgggatagacggaaccagtgccggtactgcagactgaagaagtgcttcagagccggcatgcggagagaagccgtgcagaacgagcgggaccggatcagcaccagaagaagcagctacgaggacagcagcctgcccagcatcaacgccctgctgcaggccgaggtgctgagcagacagatcaccagcccagtgtccggcatcaacggcgacatccgggccaagaagatcgccagcattgccgacgtgtgcgagagcatgaaggaacagctgctggtgctggtggaatgggccaagtacatccccgccttttgcgagctgcccctggacgatcaggtggccctgctgagagcacacgccggcgaacatctgctgctgggagccaccaagcggagcatggtgttcaaggacgtgctgctgctgggcaacgactacatcgtgcccagacactgccctgagctggccgagatgagccgggtgtccatcagaatcctggacgaactggtgctgccgtttcaggaactgcagatcgacgacaacgagtacgcctacctgaaggccatcatctttttcgaccccgacgccaagggcctgagcgaccctggcaagatcaagcggctgagaagccaggtgcaagtgtccctggaagattacatcaacgaccggcagtacgacagccggggcagatttggcgaactgctcctgctgctgcccaccctgcagagcatcacctggcagatgatcgagcagatccagttcatcaagctgttcggcatggccaagatcgacaatctgctgcaggaaatgctgctcgggggcagcccttctgatgcccctcatgcccaccaccctctgcaccctcacctgatgcaagaacacatgggcaccaatgtgatcgtggccaacacaatgcccacccacctgagcaacggccagatgtgcgagtggcccagacctagaggacaggccgccacacctgagacacctcagccttctccacctggcggctctggcagcgagccttacaaactgctgcctggcgctgtggccaccatcgtgaaacctctgagcgccatcccccagcccaccatcaccaagcaggaagtgatctgaggactagtccctgttcccagagcccacttttttttctttttttgaaataaaatagcctgtctttcagatctcaaaggctcttttcagagccaccaaaaaaaaaaaaaaaaaaaaaaaaaaaaaaaaaaaaaaaaaaaaaaaaaaaaaaaaaaaaaaaaaaaaaaaaaaaaaaaaaaaaaaaaaaaaaaaaaaaaa

SEQ ID NO: 3338 - RNA, 1697 nt, synthetic construct
  misc_feature 1..1697: note = mRNA a-1 (hSL-A100) (opt29) from Homo sapiens__NP_000448.3__HNF4A(1-474)(S87A_K106R_K108R_K126R_K 127R_S142A_S143A_S148A_T166A_S167A_S313A_S378A_T429A_T432A_ S436A_K458R_S461A)
  source 1..1697: mol_type = other RNA
aggagagtcccgcagtcggcgtccagcggctctgcttgttcgtgtgtgtgtcgttgcaggccttattcaagcttaccatgagactgagcaagaccctggtggacatggacatggccgactactctgccgccctggaccctgcctacaccaccctggagttcgaaaacgtgcaagtgctgaccatgggcaacgacaccagccctagcgagggcaccaacctgaacgcccctaatagcctgggagtgtccgccctgtgtgccatctgtggcgatagagccaccggcaagcactacggcgccagctcttgtgatggctgcaagggcttcttccggcgggccgtgcggaagaaccacatgtacagctgccggttcagccggcagtgcgtggtggaccgggatagacggaaccagtgccggtactgcagactgaagaagtgcttcagagccggcatgcggagagaagccgtgcagaacgagcgggaccggatcagcaccagaagagccgcctacgaggacagcgccctgcccagcatcaacgccctgctgcaggccgaggtgctgagcagacagatcgccgccccagtgtccggcatcaacggcgacatccgggccaagaagatcgccagcattgccgacgtgtgcgagagcatgaaggaacagctgctggtgctggtggaatgggccaagtacatccccgccttttgcgagctgcccctggacgatcaggtggccctgctgagagcacacgccggcgaacatctgctgctgggagccaccaagcggagcatggtgttcaaggacgtgctgctgctgggcaacgactacatcgtgcccagacactgccctgagctggccgagatgagccgggtgtccatcagaatcctggacgaactggtgctgccgtttcaggaactgcagatcgacgacaacgagtacgcctacctgaaggccatcatctttttcgaccccgacgccaagggcctgagcgaccctggcaagatcaagcggctgagagcccaggtgcaagtgtccctggaagattacatcaacgaccggcagtacgacagccggggcagatttggcgaactgctcctgctgctgcccaccctgcagagcatcacctggcagatgatcgagcagatccagttcatcaagctgttcggcatggccaagatcgacaatctgctgcaggaaatgctgctcgggggcgccccttctgatgcccctcatgcccaccaccctctgcaccctcacctgatgcaagaacacatgggcaccaatgtgatcgtggccaacacaatgcccacccacctgagcaacggccagatgtgcgagtggcccagacctagaggacaggccgccgcccctgaggcccctcagcctgccccacctggcggctctggcagcgagccttacaaactgctgcctggcgctgtggccaccatcgtgagacctctggccgccatcccccagcccaccatcaccaagcaggaagtgatctgaggactagtccctgttcccagagcccacttttttttctttttttgaaataaaatagcctgtctttcagatctcaaaggctcttttcagagccaccaaaaaaaaaaaaaaaaaaaaaaaaaaaaaaaaaaaaaaaaaaaaaaaaaaaaaaaaaaaaaaaaaaaaaaaaaaaaaaaaaaaaaaaaaaaaaaaaaaaaa

SEQ ID NO: 3339 - RNA, 1697 nt, synthetic construct
  misc_feature 1..1697: note = mRNA a-1 (hSL-A100) (opt29) from Homo sapiens__NP_000448.3__HNF4A(1-474)(S87A_K106R_K108R_K126R_K 127R_S142A_S143A_S148A_T166A_S167A_S313A_S378A_T429A_T432A_ S436A_K458R_S461E)
  source 1..1697: mol_type = other RNA
aggagagtcccgcagtcggcgtccagcggctctgcttgttcgtgtgtgtgtcgttgcaggccttattcaagcttaccatgagactgagcaagaccctggtggacatggacatggccgactactctgccgccctggaccctgcctacaccaccctggagttcgaaaacgtgcaagtgctgaccatgggcaacgacaccagccctagcgagggcaccaacctgaacgcccctaatagcctgggagtgtccgccctgtgtgccatctgtggcgatagagccaccggcaagcactacggcgccagctcttgtgatggctgcaagggcttcttccggcgggccgtgcggaagaaccacatgtacagctgccggttcagccggcagtgcgtggtggaccgggatagacggaaccagtgccggtactgcagactgaagaagtgcttcagagccggcatgcggagagaagccgtgcagaacgagcgggaccggatcagcaccagaagagccgcctacgaggacagcgccctgcccagcatcaacgccctgctgcaggccgaggtgctgagcagacagatcgccgccccagtgtccggcatcaacggcgacatccgggccaagaagatcgccagcattgccgacgtgtgcgagagcatgaaggaacagctgctggtgctggtggaatgggccaagtacatccccgccttttgcgagctgcccctggacgatcaggtggccctgctgagagcacacgccggcgaacatctgctgctgggagccaccaagcggagcatggtgttcaaggacgtgctgctgctgggcaacgactacatcgtgcccagacactgccctgagctggccgagatgagccgggtgtccatcagaatcctggacgaactggtgctgccgtttcaggaactgcagatcgacgacaacgagtacgcctacctgaaggccatcatctttttcgaccccgacgccaagggcctgagcgaccctggcaagatcaagcggctgagagcccaggtgcaagtgtccctggaagattacatcaacgaccggcagtacgacagccggggcagatttggcgaactgctcctgctgctgcccaccctgcagagcatcacctggcagatgatcgagcagatccagttcatcaagctgttcggcatggccaagatcgacaatctgctgcaggaaatgctgctcgggggcgccccttctgatgcccctcatgcccaccaccctctgcaccctcacctgatgcaagaacacatgggcaccaatgtgatcgtggccaacacaatgcccacccacctgagcaacggccagatgtgcgagtggcccagacctagaggacaggccgccgcccctgaggcccctcagcctgccccacctggcggctctggcagcgagccttacaaactgctgcctggcgctgtggccaccatcgtgagacctctggaggccatcccccagcccaccatcaccaagcaggaagtgatctgaggactagtccctgttcccagagcccacttttttttctttttttgaaataaaatagcctgtctttcagatctcaaaggctcttttcagagccaccaaaaaaaaaaaaaaaaaaaaaaaaaaaaaaaaaaaaaaaaaaaaaaaaaaaaaaaaaaaaaaaaaaaaaaaaaaaaaaaaaaaaaaaaaaaaaaaaaaaaa

SEQ ID NO: 3340 - RNA, 1697 nt, synthetic construct
  misc_feature 1..1697: note = mRNA a-1 (hSL-A100) (opt29) from Homo sapiens__NP_000448.3__HNF4A(1-474)(S87A_K106R_K108R_K126R_K 127R_S142A_S143A_S148E_T166A_S167E_S313A_S378E_T429E_T432E_ S436E_K458R_S461E)
  source 1..1697: mol_type = other RNA
aggagagtcccgcagtcggcgtccagcggctctgcttgttcgtgtgtgtgtcgttgcaggccttattcaagcttaccatgagactgagcaagaccctggtggacatggacatggccgactactctgccgccctggaccctgcctacaccaccctggagttcgaaaacgtgcaagtgctgaccatgggcaacgacaccagccctagcgagggcaccaacctgaacgcccctaatagcctgggagtgtccgccctgtgtgccatctgtggcgatagagccaccggcaagcactacggcgccagctcttgtgatggctgcaagggcttcttccggcgggccgtgcggaagaaccacatgtacagctgccggttcagccggcagtgcgtggtggaccgggatagacggaaccagtgccggtactgcagactgaagaagtgcttcagagccggcatgcggagagaagccgtgcagaacgagcgggaccggatcagcaccagaagagccgcctacgaggacagcgaactgcccagcatcaacgccctgctgcaggccgaggtgctgagcagacagatcgccgaaccagtgtccggcatcaacggcgacatccgggccaagaagatcgccagcattgccgacgtgtgcgagagcatgaaggaacagctgctggtgctggtggaatgggccaagtacatccccgccttttgcgagctgcccctggacgatcaggtggccctgctgagagcacacgccggcgaacatctgctgctgggagccaccaagcggagcatggtgttcaaggacgtgctgctgctgggcaacgactacatcgtgcccagacactgccctgagctggccgagatgagccgggtgtccatcagaatcctggacgaactggtgctgccgtttcaggaactgcagatcgacgacaacgagtacgcctacctgaaggccatcatctttttcgaccccgacgccaagggcctgagcgaccctggcaagatcaagcggctgagagcccaggtgcaagtgtccctggaagattacatcaacgaccggcagtacgacagccggggcagatttggcgaactgctcctgctgctgcccaccctgcagagcatcacctggcagatgatcgagcagatccagttcatcaagctgttcggcatggccaagatcgacaatctgctgcaggaaatgctgctcgggggcgagccttctgatgcccctcatgcccaccaccctctgcaccctcacctgatgcaagaacacatgggcaccaatgtgatcgtggccaacacaatgcccacccacctgagcaacggccagatgtgcgagtggcccagacctagaggacaggccgccgaacctgaggagcctcagcctgaaccacctggcggctctggcagcgagccttacaaactgctgcctggcgctgtggccaccatcgtgagacctctggaggccatcccccagcccaccatcaccaagcaggaagtgatctgaggactagtccctgttcccagagcccacttttttttctttttttgaaataaaatagcctgtctttcagatctcaaaggctcttttcagagccaccaaaaaaaaaaaaaaaaaaaaaaaaaaaaaaaaaaaaaaaaaaaaaaaaaaaaaaaaaaaaaaaaaaaaaaaaaaaaaaaaaaaaaaaaaaaaaaaaaaaaa

SEQ ID NO: 3341 - RNA, 1697 nt, synthetic construct
  misc_feature 1..1697: note = mRNA a-1 (hSL-A100) (opt29) from Homo sapiens__NP_000448.3__HNF4A(1-474)(S87A_K106R_K108R_K126R_K 127R_S142A_S143A_S148A_T166A_S167A_K179R_K180R_S313A_S378A_ T429A_T432A_S436A_K458R_S461E)
  source 1..1697: mol_type = other RNA
aggagagtcccgcagtcggcgtccagcggctctgcttgttcgtgtgtgtgtcgttgcaggccttattcaagcttaccatgagactgagcaagaccctggtggacatggacatggccgactactctgccgccctggaccctgcctacaccaccctggagttcgaaaacgtgcaagtgctgaccatgggcaacgacaccagccctagcgagggcaccaacctgaacgcccctaatagcctgggagtgtccgccctgtgtgccatctgtggcgatagagccaccggcaagcactacggcgccagctcttgtgatggctgcaagggcttcttccggcgggccgtgcggaagaaccacatgtacagctgccggttcagccggcagtgcgtggtggaccgggatagacggaaccagtgccggtactgcagactgaagaagtgcttcagagccggcatgcggagagaagccgtgcagaacgagcgggaccggatcagcaccagaagagccgcctacgaggacagcgccctgcccagcatcaacgccctgctgcaggccgaggtgctgagcagacagatcgccgccccagtgtccggcatcaacggcgacatccgggcccggagaatcgccagcattgccgacgtgtgcgagagcatgaaggaacagctgctggtgctggtggaatgggccaagtacatccccgccttttgcgagctgcccctggacgatcaggtggccctgctgagagcacacgccggcgaacatctgctgctgggagccaccaagcggagcatggtgttcaaggacgtgctgctgctgggcaacgactacatcgtgcccagacactgccctgagctggccgagatgagccgggtgtccatcagaatcctggacgaactggtgctgccgtttcaggaactgcagatcgacgacaacgagtacgcctacctgaaggccatcatctttttcgaccccgacgccaagggcctgagcgaccctggcaagatcaagcggctgagagcccaggtgcaagtgtccctggaagattacatcaacgaccggcagtacgacagccggggcagatttggcgaactgctcctgctgctgcccaccctgcagagcatcacctggcagatgatcgagcagatccagttcatcaagctgttcggcatggccaagatcgacaatctgctgcaggaaatgctgctcgggggcgccccttctgatgcccctcatgcccaccaccctctgcaccctcacctgatgcaagaacacatgggcaccaatgtgatcgtggccaacacaatgcccacccacctgagcaacggccagatgtgcgagtggcccagacctagaggacaggccgccgcccctgaggcccctcagcctgccccacctggcggctctggcagcgagccttacaaactgctgcctggcgctgtggccaccatcgtgagacctctggaggccatcccccagcccaccatcaccaagcaggaagtgatctgaggactagtccctgttcccagagcccacttttttttctttttttgaaataaaatagcctgtctttcagatctcaaaggctcttttcagagccaccaaaaaaaaaaaaaaaaaaaaaaaaaaaaaaaaaaaaaaaaaaaaaaaaaaaaaaaaaaaaaaaaaaaaaaaaaaaaaaaaaaaaaaaaaaaaaaaaaaaaa

SEQ ID NO: 3342 - RNA, 1697 nt, synthetic construct
  misc_feature 1..1697: note = mRNA a-1 (hSL-A100) (opt29) from Homo sapiens__NP_000448.3__HNF4A(1-474)(S87A_K106R_K108R_K126R_K 127R_S142A_S143A_S148A_T166A_S167A_K300R_K307R_K309R_S313A_ S378A_T429A_T432A_S436A_K458R_S461E)
  source 1..1697: mol_type = other RNA
aggagagtcccgcagtcggcgtccagcggctctgcttgttcgtgtgtgtgtcgttgcaggccttattcaagcttaccatgagactgagcaagaccctggtggacatggacatggccgactactctgccgccctggaccctgcctacaccaccctggagttcgaaaacgtgcaagtgctgaccatgggcaacgacaccagccctagcgagggcaccaacctgaacgcccctaatagcctgggagtgtccgccctgtgtgccatctgtggcgatagagccaccggcaagcactacggcgccagctcttgtgatggctgcaagggcttcttccggcgggccgtgcggaagaaccacatgtacagctgccggttcagccggcagtgcgtggtggaccgggatagacggaaccagtgccggtactgcagactgaagaagtgcttcagagccggcatgcggagagaagccgtgcagaacgagcgggaccggatcagcaccagaagagccgcctacgaggacagcgccctgcccagcatcaacgccctgctgcaggccgaggtgctgagcagacagatcgccgccccagtgtccggcatcaacggcgacatccgggccaagaagatcgccagcattgccgacgtgtgcgagagcatgaaggaacagctgctggtgctggtggaatgggccaagtacatccccgccttttgcgagctgcccctggacgatcaggtggccctgctgagagcacacgccggcgaacatctgctgctgggagccaccaagcggagcatggtgttcaaggacgtgctgctgctgggcaacgactacatcgtgcccagacactgccctgagctggccgagatgagccgggtgtccatcagaatcctggacgaactggtgctgccgtttcaggaactgcagatcgacgacaacgagtacgcctacctgaaggccatcatctttttcgaccccgacgccagaggcctgagcgaccctggccggatcagacggctgagagcccaggtgcaagtgtccctggaagattacatcaacgaccggcagtacgacagccggggcagatttggcgaactgctcctgctgctgcccaccctgcagagcatcacctggcagatgatcgagcagatccagttcatcaagctgttcggcatggccaagatcgacaatctgctgcaggaaatgctgctcgggggcgccccttctgatgcccctcatgcccaccaccctctgcaccctcacctgatgcaagaacacatgggcaccaatgtgatcgtggccaacacaatgcccacccacctgagcaacggccagatgtgcgagtggcccagacctagaggacaggccgccgcccctgaggcccctcagcctgccccacctggcggctctggcagcgagccttacaaactgctgcctggcgctgtggccaccatcgtgagacctctggaggccatcccccagcccaccatcaccaagcaggaagtgatctgaggactagtccctgttcccagagcccacttttttttctttttttgaaataaaatagcctgtctttcagatctcaaaggctcttttcagagccaccaaaaaaaaaaaaaaaaaaaaaaaaaaaaaaaaaaaaaaaaaaaaaaaaaaaaaaaaaaaaaaaaaaaaaaaaaaaaaaaaaaaaaaaaaaaaaaaaaaaaa

SEQ ID NO: 3343 - RNA, 1697 nt, synthetic construct
  misc_feature 1..1697: note = mRNA a-1 (hSL-A100) (opt29) from Homo sapiens__NP_000448.3__HNF4A(1-474)(S87A_K106R_K108R_K126R_K 127R_S142A_S143A_S148A_T166A_S167A_S313A_S378A_T429A_T432A_ S436A_K447R_K458R_S461E_K470R)
  source 1..1697: mol_type = other RNA
aggagagtcccgcagtcggcgtccagcggctctgcttgttcgtgtgtgtgtcgttgcaggccttattcaagcttaccatgagactgagcaagaccctggtggacatggacatggccgactactctgccgccctggaccctgcctacaccaccctggagttcgaaaacgtgcaagtgctgaccatgggcaacgacaccagccctagcgagggcaccaacctgaacgcccctaatagcctgggagtgtccgccctgtgtgccatctgtggcgatagagccaccggcaagcactacggcgccagctcttgtgatggctgcaagggcttcttccggcgggccgtgcggaagaaccacatgtacagctgccggttcagccggcagtgcgtggtggaccgggatagacggaaccagtgccggtactgcagactgaagaagtgcttcagagccggcatgcggagagaagccgtgcagaacgagcgggaccggatcagcaccagaagagccgcctacgaggacagcgccctgcccagcatcaacgccctgctgcaggccgaggtgctgagcagacagatcgccgccccagtgtccggcatcaacggcgacatccgggccaagaagatcgccagcattgccgacgtgtgcgagagcatgaaggaacagctgctggtgctggtggaatgggccaagtacatccccgccttttgcgagctgcccctggacgatcaggtggccctgctgagagcacacgccggcgaacatctgctgctgggagccaccaagcggagcatggtgttcaaggacgtgctgctgctgggcaacgactacatcgtgcccagacactgccctgagctggccgagatgagccgggtgtccatcagaatcctggacgaactggtgctgccgtttcaggaactgcagatcgacgacaacgagtacgcctacctgaaggccatcatctttttcgaccccgacgccaagggcctgagcgaccctggcaagatcaagcggctgagagcccaggtgcaagtgtccctggaagattacatcaacgaccggcagtacgacagccggggcagatttggcgaactgctcctgctgctgcccaccctgcagagcatcacctggcagatgatcgagcagatccagttcatcaagctgttcggcatggccaagatcgacaatctgctgcaggaaatgctgctcgggggcgccccttctgatgcccctcatgcccaccaccctctgcaccctcacctgatgcaagaacacatgggcaccaatgtgatcgtggccaacacaatgcccacccacctgagcaacggccagatgtgcgagtggcccagacctagaggacaggccgccgcccctgaggcccctcagcctgccccacctggcggctctggcagcgagccttaccggctgctgcctggcgctgtggccaccatcgtgagacctctggaggccatcccccagcccaccatcacccggcaggaagtgatctgaggactagtccctgttcccagagcccacttttttttctttttttgaaataaaatagcctgtctttcagatctcaaaggctcttttcagagccaccaaaaaaaaaaaaaaaaaaaaaaaaaaaaaaaaaaaaaaaaaaaaaaaaaaaaaaaaaaaaaaaaaaaaaaaaaaaaaaaaaaaaaaaaaaaaaaaaaaaaa

SEQ ID NO: 3344 - RNA, 1697 nt, synthetic construct
  misc_feature 1..1697: note = mRNA a-1 (hSL-A100) (opt29) from Homo sapiens__NP_000448.3__HNF4A(1-474)(S87A_K106R_K108R_K126R_K 127R_S142A_S143A_S148A_T166A_S167A_K179R_K180R_K234R_K300R_ K307R_K309R_S313A_S378A_T429A_T432A_S436A_K447R_K458R_S461E _K470R)
  source 1..1697: mol_type = other RNA
aggagagtcccgcagtcggcgtccagcggctctgcttgttcgtgtgtgtgtcgttgcaggccttattcaagcttaccatgagactgagcaagaccctggtggacatggacatggccgactactctgccgccctggaccctgcctacaccaccctggagttcgaaaacgtgcaagtgctgaccatgggcaacgacaccagccctagcgagggcaccaacctgaacgcccctaatagcctgggagtgtccgccctgtgtgccatctgtggcgatagagccaccggcaagcactacggcgccagctcttgtgatggctgcaagggcttcttccggcgggccgtgcggaagaaccacatgtacagctgccggttcagccggcagtgcgtggtggaccgggatagacggaaccagtgccggtactgcagactgaagaagtgcttcagagccggcatgcggagagaagccgtgcagaacgagcgggaccggatcagcaccagaagagccgcctacgaggacagcgccctgcccagcatcaacgccctgctgcaggccgaggtgctgagcagacagatcgccgccccagtgtccggcatcaacggcgacatccgggcccggagaatcgccagcattgccgacgtgtgcgagagcatgaaggaacagctgctggtgctggtggaatgggccaagtacatccccgccttttgcgagctgcccctggacgatcaggtggccctgctgagagcacacgccggcgaacatctgctgctgggagccacccggcggagcatggtgttcaaggacgtgctgctgctgggcaacgactacatcgtgcccagacactgccctgagctggccgagatgagccgggtgtccatcagaatcctggacgaactggtgctgccgtttcaggaactgcagatcgacgacaacgagtacgcctacctgaaggccatcatctttttcgaccccgacgccagaggcctgagcgaccctggccggatcagacggctgagagcccaggtgcaagtgtccctggaagattacatcaacgaccggcagtacgacagccggggcagatttggcgaactgctcctgctgctgcccaccctgcagagcatcacctggcagatgatcgagcagatccagttcatcaagctgttcggcatggccaagatcgacaatctgctgcaggaaatgctgctcgggggcgccccttctgatgcccctcatgcccaccaccctctgcaccctcacctgatgcaagaacacatgggcaccaatgtgatcgtggccaacacaatgcccacccacctgagcaacggccagatgtgcgagtggcccagacctagaggacaggccgccgcccctgaggcccctcagcctgccccacctggcggctctggcagcgagccttaccggctgctgcctggcgctgtggccaccatcgtgagacctctggaggccatcccccagcccaccatcacccggcaggaagtgatctgaggactagtccctgttcccagagcccacttttttttctttttttgaaataaaatagcctgtctttcagatctcaaaggctcttttcagagccaccaaaaaaaaaaaaaaaaaaaaaaaaaaaaaaaaaaaaaaaaaaaaaaaaaaaaaaaaaaaaaaaaaaaaaaaaaaaaaaaaaaaaaaaaaaaaaaaaaaaaa

SEQ ID NO: 3345 - RNA, 1697 nt, synthetic construct
  misc_feature 1..1697: note = mRNA a-1 (hSL-A100) (opt29) from Homo sapiens__NP_000448.3__HNF4A(1-474)(S87A_S95A_S99A_K106R_K10 8R_K126R_K127R_S142A_S143A_S148A_T166A_S167A_S313A_S378A_T4 29A_T432A_S436A_K458R_S461E)
  source 1..1697: mol_type = other RNA
aggagagtcccgcagtcggcgtccagcggctctgcttgttcgtgtgtgtgtcgttgcaggccttattcaagcttaccatgagactgagcaagaccctggtggacatggacatggccgactactctgccgccctggaccctgcctacaccaccctggagttcgaaaacgtgcaagtgctgaccatgggcaacgacaccagccctagcgagggcaccaacctgaacgcccctaatagcctgggagtgtccgccctgtgtgccatctgtggcgatagagccaccggcaagcactacggcgccagctcttgtgatggctgcaagggcttcttccggcgggccgtgcggaagaaccacatgtacgcctgccggttcgcccggcagtgcgtggtggaccgggatagacggaaccagtgccggtactgcagactgaagaagtgcttcagagccggcatgcggagagaagccgtgcagaacgagcgggaccggatcagcaccagaagagccgcctacgaggacagcgccctgcccagcatcaacgccctgctgcaggccgaggtgctgagcagacagatcgccgccccagtgtccggcatcaacggcgacatccgggccaagaagatcgccagcattgccgacgtgtgcgagagcatgaaggaacagctgctggtgctggtggaatgggccaagtacatccccgccttttgcgagctgcccctggacgatcaggtggccctgctgagagcacacgccggcgaacatctgctgctgggagccaccaagcggagcatggtgttcaaggacgtgctgctgctgggcaacgactacatcgtgcccagacactgccctgagctggccgagatgagccgggtgtccatcagaatcctggacgaactggtgctgccgtttcaggaactgcagatcgacgacaacgagtacgcctacctgaaggccatcatctttttcgaccccgacgccaagggcctgagcgaccctggcaagatcaagcggctgagagcccaggtgcaagtgtccctggaagattacatcaacgaccggcagtacgacagccggggcagatttggcgaactgctcctgctgctgcccaccctgcagagcatcacctggcagatgatcgagcagatccagttcatcaagctgttcggcatggccaagatcgacaatctgctgcaggaaatgctgctcgggggcgccccttctgatgcccctcatgcccaccaccctctgcaccctcacctgatgcaagaacacatgggcaccaatgtgatcgtggccaacacaatgcccacccacctgagcaacggccagatgtgcgagtggcccagacctagaggacaggccgccgcccctgaggcccctcagcctgccccacctggcggctctggcagcgagccttacaaactgctgcctggcgctgtggccaccatcgtgagacctctggaggccatcccccagcccaccatcaccaagcaggaagtgatctgaggactagtccctgttcccagagcccacttttttttctttttttgaaataaaatagcctgtctttcagatctcaaaggctcttttcagagccaccaaaaaaaaaaaaaaaaaaaaaaaaaaaaaaaaaaaaaaaaaaaaaaaaaaaaaaaaaaaaaaaaaaaaaaaaaaaaaaaaaaaaaaaaaaaaaaaaaaaaa

SEQ ID NO: 3346 - RNA, 1697 nt, synthetic construct
  misc_feature 1..1697: note = mRNA a-1 (hSL-A100) (opt29) from Homo sapiens__NP_000448.3__HNF4A(1-474)(S87A_K106R_K108R_K126R_K 127R_S138A_T139A_S142A_S143A_S148A_T166A_S167A_S313A_S378A_ T429A_T432A_S436A_K458R_S461E)
  source 1..1697: mol_type = other RNA
aggagagtcccgcagtcggcgtccagcggctctgcttgttcgtgtgtgtgtcgttgcaggccttattcaagcttaccatgagactgagcaagaccctggtggacatggacatggccgactactctgccgccctggaccctgcctacaccaccctggagttcgaaaacgtgcaagtgctgaccatgggcaacgacaccagccctagcgagggcaccaacctgaacgcccctaatagcctgggagtgtccgccctgtgtgccatctgtggcgatagagccaccggcaagcactacggcgccagctcttgtgatggctgcaagggcttcttccggcgggccgtgcggaagaaccacatgtacagctgccggttcagccggcagtgcgtggtggaccgggatagacggaaccagtgccggtactgcagactgaagaagtgcttcagagccggcatgcggagagaagccgtgcagaacgagcgggaccggatcgccgccagaagagccgcctacgaggacagcgccctgcccagcatcaacgccctgctgcaggccgaggtgctgagcagacagatcgccgccccagtgtccggcatcaacggcgacatccgggccaagaagatcgccagcattgccgacgtgtgcgagagcatgaaggaacagctgctggtgctggtggaatgggccaagtacatccccgccttttgcgagctgcccctggacgatcaggtggccctgctgagagcacacgccggcgaacatctgctgctgggagccaccaagcggagcatggtgttcaaggacgtgctgctgctgggcaacgactacatcgtgcccagacactgccctgagctggccgagatgagccgggtgtccatcagaatcctggacgaactggtgctgccgtttcaggaactgcagatcgacgacaacgagtacgcctacctgaaggccatcatctttttcgaccccgacgccaagggcctgagcgaccctggcaagatcaagcggctgagagcccaggtgcaagtgtccctggaagattacatcaacgaccggcagtacgacagccggggcagatttggcgaactgctcctgctgctgcccaccctgcagagcatcacctggcagatgatcgagcagatccagttcatcaagctgttcggcatggccaagatcgacaatctgctgcaggaaatgctgctcgggggcgccccttctgatgcccctcatgcccaccaccctctgcaccctcacctgatgcaagaacacatgggcaccaatgtgatcgtggccaacacaatgcccacccacctgagcaacggccagatgtgcgagtggcccagacctagaggacaggccgccgcccctgaggcccctcagcctgccccacctggcggctctggcagcgagccttacaaactgctgcctggcgctgtggccaccatcgtgagacctctggaggccatcccccagcccaccatcaccaagcaggaagtgatctgaggactagtccctgttcccagagcccacttttttttctttttttgaaataaaatagcctgtctttcagatctcaaaggctcttttcagagccaccaaaaaaaaaaaaaaaaaaaaaaaaaaaaaaaaaaaaaaaaaaaaaaaaaaaaaaaaaaaaaaaaaaaaaaaaaaaaaaaaaaaaaaaaaaaaaaaaaaaaa

SEQ ID NO: 3347 - RNA, 1697 nt, synthetic construct
  misc_feature 1..1697: note = mRNA a-1 (hSL-A100) (opt29) from Homo sapiens__NP_000448.3__HNF4A(1-474)(S87A_S95A_S99A_K106R_K10 8R_K126R_K127R_S138A_T139A_S142A_S143A_S148A_T166A_S167A_S3 13A_S378A_T429A_T432A_S436A_K458R_S461E)
  source 1..1697: mol_type = other RNA
aggagagtcccgcagtcggcgtccagcggctctgcttgttcgtgtgtgtgtcgttgcaggccttattcaagcttaccatgagactgagcaagaccctggtggacatggacatggccgactactctgccgccctggaccctgcctacaccaccctggagttcgaaaacgtgcaagtgctgaccatgggcaacgacaccagccctagcgagggcaccaacctgaacgcccctaatagcctgggagtgtccgccctgtgtgccatctgtggcgatagagccaccggcaagcactacggcgccagctcttgtgatggctgcaagggcttcttccggcgggccgtgcggaagaaccacatgtacgcctgccggttcgcccggcagtgcgtggtggaccgggatagacggaaccagtgccggtactgcagactgaagaagtgcttcagagccggcatgcggagagaagccgtgcagaacgagcgggaccggatcgccgccagaagagccgcctacgaggacagcgccctgcccagcatcaacgccctgctgcaggccgaggtgctgagcagacagatcgccgccccagtgtccggcatcaacggcgacatccgggccaagaagatcgccagcattgccgacgtgtgcgagagcatgaaggaacagctgctggtgctggtggaatgggccaagtacatccccgccttttgcgagctgcccctggacgatcaggtggccctgctgagagcacacgccggcgaacatctgctgctgggagccaccaagcggagcatggtgttcaaggacgtgctgctgctgggcaacgactacatcgtgcccagacactgccctgagctggccgagatgagccgggtgtccatcagaatcctggacgaactggtgctgccgtttcaggaactgcagatcgacgacaacgagtacgcctacctgaaggccatcatctttttcgaccccgacgccaagggcctgagcgaccctggcaagatcaagcggctgagagcccaggtgcaagtgtccctggaagattacatcaacgaccggcagtacgacagccggggcagatttggcgaactgctcctgctgctgcccaccctgcagagcatcacctggcagatgatcgagcagatccagttcatcaagctgttcggcatggccaagatcgacaatctgctgcaggaaatgctgctcgggggcgccccttctgatgcccctcatgcccaccaccctctgcaccctcacctgatgcaagaacacatgggcaccaatgtgatcgtggccaacacaatgcccacccacctgagcaacggccagatgtgcgagtggcccagacctagaggacaggccgccgcccctgaggcccctcagcctgccccacctggcggctctggcagcgagccttacaaactgctgcctggcgctgtggccaccatcgtgagacctctggaggccatcccccagcccaccatcaccaagcaggaagtgatctgaggactagtccctgttcccagagcccacttttttttctttttttgaaataaaatagcctgtctttcagatctcaaaggctcttttcagagccaccaaaaaaaaaaaaaaaaaaaaaaaaaaaaaaaaaaaaaaaaaaaaaaaaaaaaaaaaaaaaaaaaaaaaaaaaaaaaaaaaaaaaaaaaaaaaaaaaaaaaa

SEQ ID NO: 3348 - RNA, 1400 nt, synthetic construct
  misc_feature 1..1400: note = mRNA a-1 (hSL-A100) (wt) from Homo sapiens__NP_000448.3__HNF4A(1-375)
  source 1..1400: mol_type = other RNA
aggagagtcccgcagtcggcgtccagcggctctgcttgttcgtgtgtgtgtcgttgcaggccttattcaagcttaccatgcgactctccaaaaccctcgtcgacatggacatggccgactacagtgctgcactggacccagcctacaccaccctggaatttgagaatgtgcaggtgttgacgatgggcaatgacacgtccccatcagaaggcaccaacctcaacgcgcccaacagcctgggtgtcagcgccctgtgtgccatctgcggggaccgggccacgggcaaacactacggtgcctcgagctgtgacggctgcaagggcttcttccggaggagcgtgcggaagaaccacatgtactcctgcagatttagccggcagtgcgtggtggacaaagacaagaggaaccagtgccgctactgcaggctcaagaaatgcttccgggctggcatgaagaaggaagccgtccagaatgagcgggaccggatcagcactcgaaggtcaagctatgaggacagcagcctgccctccatcaatgcgctcctgcaggcggaggtcctgtcccgacagatcacctcccccgtctccgggatcaacggcgacattcgggcgaagaagattgccagcatcgcagatgtgtgtgagtccatgaaggagcagctgctggttctcgttgagtgggccaagtacatcccagctttctgcgagctccccctggacgaccaggtggccctgctcagagcccatgctggcgagcacctgctgctcggagccaccaagagatccatggtgttcaaggacgtgctgctcctaggcaatgactacattgtccctcggcactgcccggagctggcggagatgagccgggtgtccatacgcatccttgacgagctggtgctgcccttccaggagctgcagatcgatgacaatgagtatgcctacctcaaagccatcatcttctttgacccagatgccaaggggctgagcgatccagggaagatcaagcggctgcgttcccaggtgcaggtgagcttggaggactacatcaacgaccgccagtatgactcgcgtggccgctttggagagctgctgctgctgctgcccaccttgcagagcatcacctggcagatgatcgagcagatccagttcatcaagctcttcggcatggccaagattgacaacctgttgcaggagatgctgctgtgaggactagtccctgttcccagagcccacttttttttctttttttgaaataaaatagcctgtctttcagatctcaaaggctcttttcagagccaccaaaaaaaaaaaaaaaaaaaaaaaaaaaaaaaaaaaaaaaaaaaaaaaaaaaaaaaaaaaaaaaaaaaaaaaaaaaaaaaaaaaaaaaaaaaaaaaaaaaaa

SEQ ID NO: 3349 - RNA, 1400 nt, synthetic construct
  misc_feature 1..1400: note = mRNA a-1 (hSL-A100) (wt mod) from Homo sapiens__NP_000448.3__HNF4A(1-375)
  source 1..1400: mol_type = other RNA
aggagagtcccgcagtcggcgtccagcggctctgcttgttcgtgtgtgtgtcgttgcaggccttattcaagcttaccatgcgactctccaaaaccctcgtcgacatggacatggccgactacagtgctgcactggacccagcctacaccaccctggaatttgagaatgtccaggtgttgacgatgggcaatgacacgtccccatcagaaggcaccaacctcaacgcgcccaacagcctgggtgtgagcgccctgtgtgccatctgcggggaccgggccacgggcaaacactacggtgcctcgagctgtgacggctgcaagggcttcttccggaggagcgtgcggaagaaccacatgtactcctgcagatttagccggcagtgcgtggtggacaaagacaagaggaaccagtgccgctactgcaggctcaagaaatgcttccgggctggcatgaagaaggaagccgtccagaatgagcgggaccggatcagcactcgaaggtcaagctatgaggacagcagcctgccctccatcaatgcgctcctgcaggcggaggtcctgtcccgacagatcacctcccccgtctccgggatcaacggcgacattcgggcgaagaagattgccagcatcgcagatgtgtgtgagtccatgaaggagcagctgctggttctcgttgagtgggccaagtacatcccagctttctgcgagctccccctggacgaccaggtggccctgctcagagcccatgctggcgagcacctcctgctcggagccaccaagagatccatggtgttcaaggacgtgctgctcctaggcaatgactacattgtccctcggcactgcccggagctggcggagatgagccgggtgtccatacgcatccttgacgagctggtgctgcccttccaggagctgcagatcgatgacaatgagtatgcctacctcaaagccatcatcttctttgacccagatgccaaggggctgagcgatccagggaagatcaagcggctgcgttcccaggtccaggtgagcttggaggactacatcaacgaccgccagtatgactcgcgtggccgctttggagagctgctgctgctgctgcccaccttgcagagcatcacctggcagatgatcgagcagatccagttcatcaagctgttcggcatggccaagattgacaacctgttgcaggagatgctgctgtgaggactagtccctgttcccagagcccacttttttttctttttttgaaataaaatagcctgtctttcagatctcaaaggctcttttcagagccaccaaaaaaaaaaaaaaaaaaaaaaaaaaaaaaaaaaaaaaaaaaaaaaaaaaaaaaaaaaaaaaaaaaaaaaaaaaaaaaaaaaaaaaaaaaaaaaaaaaaaa

SEQ ID NO: 3350 - RNA, 1400 nt, synthetic construct
  misc_feature 1..1400: note = mRNA a-1 (hSL-A100) (opt1) from Homo sapiens__NP_000448.3__HNF4A(1-375)
  source 1..1400: mol_type = other RNA
aggagagtcccgcagtcggcgtccagcggctctgcttgttcgtgtgtgtgtcgttgcaggccttattcaagcttaccatgcgcctgagcaagaccctcgtggacatggacatggccgactactccgccgcgctggaccccgcctacaccacgctggagttcgagaacgtccaggtgctcaccatgggcaacgacaccagcccgtccgaggggaccaacctgaacgcccccaacagcctgggcgtgtccgccctctgcgccatctgcggggaccgggcgacgggcaagcactacggggccagctcctgcgacggctgcaagggcttcttccgccggagcgtccgcaagaaccacatgtactcctgccggttcagccgccagtgcgtggtggacaaggacaagcggaaccagtgccgctactgccggctgaagaagtgcttccgcgccgggatgaagaaggaggccgtccagaacgagcgggaccgcatctccacccggcgcagctcctacgaggacagctccctgcccagcatcaacgcgctcctgcaggccgaggtgctgtcccggcagatcaccagccccgtgtccggcatcaacggggacatccgcgccaagaagatcgccagcatcgccgacgtctgcgagagcatgaaggagcagctcctggtgctggtggagtgggcgaagtacatcccggccttctgcgagctccccctggacgaccaggtcgccctgctccgggcccacgccggcgagcacctcctgctgggggcgaccaagcgctccatggtgttcaaggacgtgctgctgctcggcaacgactacatcgtcccccggcactgccccgagctggccgagatgagccgcgtgtccatccggatcctggacgagctcgtgctgccgttccaggagctgcagatcgacgacaacgagtacgcctacctcaaggccatcatcttcttcgaccccgacgccaagggcctgagcgaccccgggaagatcaagcgcctgcgctcccaggtccaggtgagcctcgaggactacatcaacgaccggcagtacgactcccgcggccggttcggggagctgctgctcctgctgcccacgctccagagcatcacctggcagatgatcgagcagatccagttcatcaagctgttcggcatggcgaagatcgacaacctgctccaggagatgctgctgtgaggactagtccctgttcccagagcccacttttttttctttttttgaaataaaatagcctgtctttcagatctcaaaggctcttttcagagccaccaaaaaaaaaaaaaaaaaaaaaaaaaaaaaaaaaaaaaaaaaaaaaaaaaaaaaaaaaaaaaaaaaaaaaaaaaaaaaaaaaaaaaaaaaaaaaaaaaaaaa

SEQ ID NO: 3351 - RNA, 1400 nt, synthetic construct
  misc_feature 1..1400: note = mRNA a-1 (hSL-A100) (opt1) from Homo sapiens__NP_000448.3__HNF4A(1-375)(S313A)
  source 1..1400: mol_type = other RNA
aggagagtcccgcagtcggcgtccagcggctctgcttgttcgtgtgtgtgtcgttgcaggccttattcaagcttaccatgcgcctgagcaagaccctcgtggacatggacatggccgactactccgccgcgctggaccccgcctacaccacgctggagttcgagaacgtccaggtgctcaccatgggcaacgacaccagcccgtccgaggggaccaacctgaacgcccccaacagcctgggcgtgtccgccctctgcgccatctgcggggaccgggcgacgggcaagcactacggggccagctcctgcgacggctgcaagggcttcttccgccggagcgtccgcaagaaccacatgtactcctgccggttcagccgccagtgcgtggtggacaaggacaagcggaaccagtgccgctactgccggctgaagaagtgcttccgcgccgggatgaagaaggaggccgtccagaacgagcgggaccgcatctccacccggcgcagctcctacgaggacagctccctgcccagcatcaacgcgctcctgcaggccgaggtgctgtcccggcagatcaccagccccgtgtccggcatcaacggggacatccgcgccaagaagatcgccagcatcgccgacgtctgcgagagcatgaaggagcagctcctggtgctggtggagtgggcgaagtacatcccggccttctgcgagctccccctggacgaccaggtcgccctgctccgggcccacgccggcgagcacctcctgctgggggcgaccaagcgctccatggtgttcaaggacgtgctgctgctcggcaacgactacatcgtcccccggcactgccccgagctggccgagatgagccgcgtgtccatccggatcctggacgagctcgtgctgccgttccaggagctgcagatcgacgacaacgagtacgcctacctcaaggccatcatcttcttcgaccccgacgccaagggcctgagcgaccccgggaagatcaagcgcctgcgcgcgcaggtccaggtgagcctcgaggactacatcaacgaccggcagtacgactcccgcggccggttcggggagctgctgctcctgctgcccacgctccagagcatcacctggcagatgatcgagcagatccagttcatcaagctgttcggcatggcgaagatcgacaacctgctccaggagatgctgctgtgaggactagtccctgttcccagagcccacttttttttctttttttgaaataaaatagcctgtctttcagatctcaaaggctcttttcagagccaccaaaaaaaaaaaaaaaaaaaaaaaaaaaaaaaaaaaaaaaaaaaaaaaaaaaaaaaaaaaaaaaaaaaaaaaaaaaaaaaaaaaaaaaaaaaaaaaaaaaaa

SEQ ID NO: 3352 - RNA, 1400 nt, synthetic construct
  misc_feature 1..1400: note = mRNA a-1 (hSL-A100) (opt1) from Homo sapiens__NP_000448.3__HNF4A(1-375)(S313E)
  source 1..1400: mol_type = other RNA
aggagagtcccgcagtcggcgtccagcggctctgcttgttcgtgtgtgtgtcgttgcaggccttattcaagcttaccatgcgcctgagcaagaccctcgtggacatggacatggccgactactccgccgcgctggaccccgcctacaccacgctggagttcgagaacgtccaggtgctcaccatgggcaacgacaccagcccgtccgaggggaccaacctgaacgcccccaacagcctgggcgtgtccgccctctgcgccatctgcggggaccgggcgacgggcaagcactacggggccagctcctgcgacggctgcaagggcttcttccgccggagcgtccgcaagaaccacatgtactcctgccggttcagccgccagtgcgtggtggacaaggacaagcggaaccagtgccgctactgccggctgaagaagtgcttccgcgccgggatgaagaaggaggccgtccagaacgagcgggaccgcatctccacccggcgcagctcctacgaggacagctccctgcccagcatcaacgcgctcctgcaggccgaggtgctgtcccggcagatcaccagccccgtgtccggcatcaacggggacatccgcgccaagaagatcgccagcatcgccgacgtctgcgagagcatgaaggagcagctcctggtgctggtggagtgggcgaagtacatcccggccttctgcgagctccccctggacgaccaggtcgccctgctccgggcccacgccggcgagcacctcctgctgggggcgaccaagcgctccatggtgttcaaggacgtgctgctgctcggcaacgactacatcgtcccccggcactgccccgagctggccgagatgagccgcgtgtccatccggatcctggacgagctcgtgctgccgttccaggagctgcagatcgacgacaacgagtacgcctacctcaaggccatcatcttcttcgaccccgacgccaagggcctgagcgaccccgggaagatcaagcgcctgcgcgagcaggtccaggtgagcctcgaggactacatcaacgaccggcagtacgactcccgcggccggttcggggagctgctgctcctgctgcccacgctccagagcatcacctggcagatgatcgagcagatccagttcatcaagctgttcggcatggcgaagatcgacaacctgctccaggagatgctgctgtgaggactagtccctgttcccagagcccacttttttttctttttttgaaataaaatagcctgtctttcagatctcaaaggctcttttcagagccaccaaaaaaaaaaaaaaaaaaaaaaaaaaaaaaaaaaaaaaaaaaaaaaaaaaaaaaaaaaaaaaaaaaaaaaaaaaaaaaaaaaaaaaaaaaaaaaaaaaaaa

SEQ ID NO: 3353 - RNA, 1400 nt, synthetic construct
  misc_feature 1..1400: note = mRNA a-1 (hSL-A100) (opt1) from Homo sapiens__NP_000448.3__HNF4A(1-375)(S142A_S143A)
  source 1..1400: mol_type = other RNA
aggagagtcccgcagtcggcgtccagcggctctgcttgttcgtgtgtgtgtcgttgcaggccttattcaagcttaccatgcgcctgagcaagaccctcgtggacatggacatggccgactactccgccgcgctggaccccgcctacaccacgctggagttcgagaacgtccaggtgctcaccatgggcaacgacaccagcccgtccgaggggaccaacctgaacgcccccaacagcctgggcgtgtccgccctctgcgccatctgcggggaccgggcgacgggcaagcactacggggccagctcctgcgacggctgcaagggcttcttccgccggagcgtccgcaagaaccacatgtactcctgccggttcagccgccagtgcgtggtggacaaggacaagcggaaccagtgccgctactgccggctgaagaagtgcttccgcgccgggatgaagaaggaggccgtccagaacgagcgggaccgcatctccacccggcgcgcggcctacgaggacagctccctgcccagcatcaacgcgctcctgcaggccgaggtgctgtcccggcagatcaccagccccgtgtccggcatcaacggggacatccgcgccaagaagatcgccagcatcgccgacgtctgcgagagcatgaaggagcagctcctggtgctggtggagtgggcgaagtacatcccggccttctgcgagctccccctggacgaccaggtcgccctgctccgggcccacgccggcgagcacctcctgctgggggcgaccaagcgctccatggtgttcaaggacgtgctgctgctcggcaacgactacatcgtcccccggcactgccccgagctggccgagatgagccgcgtgtccatccggatcctggacgagctcgtgctgccgttccaggagctgcagatcgacgacaacgagtacgcctacctcaaggccatcatcttcttcgaccccgacgccaagggcctgagcgaccccgggaagatcaagcgcctgcgctcccaggtccaggtgagcctcgaggactacatcaacgaccggcagtacgactcccgcggccggttcggggagctgctgctcctgctgcccacgctccagagcatcacctggcagatgatcgagcagatccagttcatcaagctgttcggcatggcgaagatcgacaacctgctccaggagatgctgctgtgaggactagtccctgttcccagagcccacttttttttctttttttgaaataaaatagcctgtctttcagatctcaaaggctcttttcagagccaccaaaaaaaaaaaaaaaaaaaaaaaaaaaaaaaaaaaaaaaaaaaaaaaaaaaaaaaaaaaaaaaaaaaaaaaaaaaaaaaaaaaaaaaaaaaaaaaaaaaaa

SEQ ID NO: 3354 - RNA, 1400 nt, synthetic construct
  misc_feature 1..1400: note = mRNA a-1 (hSL-A100) (opt1) from Homo sapiens__NP_000448.3__HNF4A(1-375)(S142E_S143E)
  source 1..1400: mol_type = other RNA
aggagagtcccgcagtcggcgtccagcggctctgcttgttcgtgtgtgtgtcgttgcaggccttattcaagcttaccatgcgcctgagcaagaccctcgtggacatggacatggccgactactccgccgcgctggaccccgcctacaccacgctggagttcgagaacgtccaggtgctcaccatgggcaacgacaccagcccgtccgaggggaccaacctgaacgcccccaacagcctgggcgtgtccgccctctgcgccatctgcggggaccgggcgacgggcaagcactacggggccagctcctgcgacggctgcaagggcttcttccgccggagcgtccgcaagaaccacatgtactcctgccggttcagccgccagtgcgtggtggacaaggacaagcggaaccagtgccgctactgccggctgaagaagtgcttccgcgccgggatgaagaaggaggccgtccagaacgagcgggaccgcatctccacccggcgcgaggagtacgaggacagctccctgcccagcatcaacgcgctcctgcaggccgaggtgctgtcccggcagatcaccagccccgtgtccggcatcaacggggacatccgcgccaagaagatcgccagcatcgccgacgtctgcgagagcatgaaggagcagctcctggtgctggtggagtgggcgaagtacatcccggccttctgcgagctccccctggacgaccaggtcgccctgctccgggcccacgccggcgagcacctcctgctgggggcgaccaagcgctccatggtgttcaaggacgtgctgctgctcggcaacgactacatcgtcccccggcactgccccgagctggccgagatgagccgcgtgtccatccggatcctggacgagctcgtgctgccgttccaggagctgcagatcgacgacaacgagtacgcctacctcaaggccatcatcttcttcgaccccgacgccaagggcctgagcgaccccgggaagatcaagcgcctgcgctcccaggtccaggtgagcctcgaggactacatcaacgaccggcagtacgactcccgcggccggttcggggagctgctgctcctgctgcccacgctccagagcatcacctggcagatgatcgagcagatccagttcatcaagctgttcggcatggcgaagatcgacaacctgctccaggagatgctgctgtgaggactagtccctgttcccagagcccacttttttttctttttttgaaataaaatagcctgtctttcagatctcaaaggctcttttcagagccaccaaaaaaaaaaaaaaaaaaaaaaaaaaaaaaaaaaaaaaaaaaaaaaaaaaaaaaaaaaaaaaaaaaaaaaaaaaaaaaaaaaaaaaaaaaaaaaaaaaaaa

SEQ ID NO: 3355 - RNA, 1400 nt, synthetic construct
  misc_feature 1..1400: note = mRNA a-1 (hSL-A100) (opt1) from Homo sapiens__NP_000448.3__HNF4A(1-375)(S143A)
  source 1..1400: mol_type = other RNA
aggagagtcccgcagtcggcgtccagcggctctgcttgttcgtgtgtgtgtcgttgcaggccttattcaagcttaccatgcgcctgagcaagaccctcgtggacatggacatggccgactactccgccgcgctggaccccgcctacaccacgctggagttcgagaacgtccaggtgctcaccatgggcaacgacaccagcccgtccgaggggaccaacctgaacgcccccaacagcctgggcgtgtccgccctctgcgccatctgcggggaccgggcgacgggcaagcactacggggccagctcctgcgacggctgcaagggcttcttccgccggagcgtccgcaagaaccacatgtactcctgccggttcagccgccagtgcgtggtggacaaggacaagcggaaccagtgccgctactgccggctgaagaagtgcttccgcgccgggatgaagaaggaggccgtccagaacgagcgggaccgcatctccacccggcgcagcgcgtacgaggacagctccctgcccagcatcaacgcgctcctgcaggccgaggtgctgtcccggcagatcaccagccccgtgtccggcatcaacggggacatccgcgccaagaagatcgccagcatcgccgacgtctgcgagagcatgaaggagcagctcctggtgctggtggagtgggcgaagtacatcccggccttctgcgagctccccctggacgaccaggtcgccctgctccgggcccacgccggcgagcacctcctgctgggggcgaccaagcgctccatggtgttcaaggacgtgctgctgctcggcaacgactacatcgtcccccggcactgccccgagctggccgagatgagccgcgtgtccatccggatcctggacgagctcgtgctgccgttccaggagctgcagatcgacgacaacgagtacgcctacctcaaggccatcatcttcttcgaccccgacgccaagggcctgagcgaccccgggaagatcaagcgcctgcgctcccaggtccaggtgagcctcgaggactacatcaacgaccggcagtacgactcccgcggccggttcggggagctgctgctcctgctgcccacgctccagagcatcacctggcagatgatcgagcagatccagttcatcaagctgttcggcatggcgaagatcgacaacctgctccaggagatgctgctgtgaggactagtccctgttcccagagcccacttttttttctttttttgaaataaaatagcctgtctttcagatctcaaaggctcttttcagagccaccaaaaaaaaaaaaaaaaaaaaaaaaaaaaaaaaaaaaaaaaaaaaaaaaaaaaaaaaaaaaaaaaaaaaaaaaaaaaaaaaaaaaaaaaaaaaaaaaaaaaa

SEQ ID NO: 3356 - RNA, 1400 nt, synthetic construct
  misc_feature 1..1400: note = mRNA a-1 (hSL-A100) (opt1) from Homo sapiens__NP_000448.3__HNF4A(1-375)(T166A)
  source 1..1400: mol_type = other RNA
aggagagtcccgcagtcggcgtccagcggctctgcttgttcgtgtgtgtgtcgttgcaggccttattcaagcttaccatgcgcctgagcaagaccctcgtggacatggacatggccgactactccgccgcgctggaccccgcctacaccacgctggagttcgagaacgtccaggtgctcaccatgggcaacgacaccagcccgtccgaggggaccaacctgaacgcccccaacagcctgggcgtgtccgccctctgcgccatctgcggggaccgggcgacgggcaagcactacggggccagctcctgcgacggctgcaagggcttcttccgccggagcgtccgcaagaaccacatgtactcctgccggttcagccgccagtgcgtggtggacaaggacaagcggaaccagtgccgctactgccggctgaagaagtgcttccgcgccgggatgaagaaggaggccgtccagaacgagcgggaccgcatctccacccggcgcagctcctacgaggacagctccctgcccagcatcaacgcgctcctgcaggccgaggtgctgtcccggcagatcgcgagccccgtgtccggcatcaacggggacatccgcgccaagaagatcgccagcatcgccgacgtctgcgagagcatgaaggagcagctcctggtgctggtggagtgggcgaagtacatcccggccttctgcgagctccccctggacgaccaggtcgccctgctccgggcccacgccggcgagcacctcctgctgggggcgaccaagcgctccatggtgttcaaggacgtgctgctgctcggcaacgactacatcgtcccccggcactgccccgagctggccgagatgagccgcgtgtccatccggatcctggacgagctcgtgctgccgttccaggagctgcagatcgacgacaacgagtacgcctacctcaaggccatcatcttcttcgaccccgacgccaagggcctgagcgaccccgggaagatcaagcgcctgcgctcccaggtccaggtgagcctcgaggactacatcaacgaccggcagtacgactcccgcggccggttcggggagctgctgctcctgctgcccacgctccagagcatcacctggcagatgatcgagcagatccagttcatcaagctgttcggcatggcgaagatcgacaacctgctccaggagatgctgctgtgaggactagtccctgttcccagagcccacttttttttctttttttgaaataaaatagcctgtctttcagatctcaaaggctcttttcagagccaccaaaaaaaaaaaaaaaaaaaaaaaaaaaaaaaaaaaaaaaaaaaaaaaaaaaaaaaaaaaaaaaaaaaaaaaaaaaaaaaaaaaaaaaaaaaaaaaaaaaaa

SEQ ID NO: 3357 - RNA, 1400 nt, synthetic construct
  misc_feature 1..1400: note = mRNA a-1 (hSL-A100) (opt1) from Homo sapiens__NP_000448.3__HNF4A(1-375)(S167E)
  source 1..1400: mol_type = other RNA
aggagagtcccgcagtcggcgtccagcggctctgcttgttcgtgtgtgtgtcgttgcaggccttattcaagcttaccatgcgcctgagcaagaccctcgtggacatggacatggccgactactccgccgcgctggaccccgcctacaccacgctggagttcgagaacgtccaggtgctcaccatgggcaacgacaccagcccgtccgaggggaccaacctgaacgcccccaacagcctgggcgtgtccgccctctgcgccatctgcggggaccgggcgacgggcaagcactacggggccagctcctgcgacggctgcaagggcttcttccgccggagcgtccgcaagaaccacatgtactcctgccggttcagccgccagtgcgtggtggacaaggacaagcggaaccagtgccgctactgccggctgaagaagtgcttccgcgccgggatgaagaaggaggccgtccagaacgagcgggaccgcatctccacccggcgcagctcctacgaggacagctccctgcccagcatcaacgcgctcctgcaggccgaggtgctgtcccggcagatcaccgagcccgtgtccggcatcaacggggacatccgcgccaagaagatcgccagcatcgccgacgtctgcgagagcatgaaggagcagctcctggtgctggtggagtgggcgaagtacatcccggccttctgcgagctccccctggacgaccaggtcgccctgctccgggcccacgccggcgagcacctcctgctgggggcgaccaagcgctccatggtgttcaaggacgtgctgctgctcggcaacgactacatcgtcccccggcactgccccgagctggccgagatgagccgcgtgtccatccggatcctggacgagctcgtgctgccgttccaggagctgcagatcgacgacaacgagtacgcctacctcaaggccatcatcttcttcgaccccgacgccaagggcctgagcgaccccgggaagatcaagcgcctgcgctcccaggtccaggtgagcctcgaggactacatcaacgaccggcagtacgactcccgcggccggttcggggagctgctgctcctgctgcccacgctccagagcatcacctggcagatgatcgagcagatccagttcatcaagctgttcggcatggcgaagatcgacaacctgctccaggagatgctgctgtgaggactagtccctgttcccagagcccacttttttttctttttttgaaataaaatagcctgtctttcagatctcaaaggctcttttcagagccaccaaaaaaaaaaaaaaaaaaaaaaaaaaaaaaaaaaaaaaaaaaaaaaaaaaaaaaaaaaaaaaaaaaaaaaaaaaaaaaaaaaaaaaaaaaaaaaaaaaaaa

SEQ ID NO: 3358 - RNA, 1400 nt, synthetic construct
  misc_feature 1..1400: note = mRNA a-1 (hSL-A100) (opt1) from Homo sapiens__NP_000448.3__HNF4A(1-375)(S167A)
  source 1..1400: mol_type = other RNA
aggagagtcccgcagtcggcgtccagcggctctgcttgttcgtgtgtgtgtcgttgcaggccttattcaagcttaccatgcgcctgagcaagaccctcgtggacatggacatggccgactactccgccgcgctggaccccgcctacaccacgctggagttcgagaacgtccaggtgctcaccatgggcaacgacaccagcccgtccgaggggaccaacctgaacgcccccaacagcctgggcgtgtccgccctctgcgccatctgcggggaccgggcgacgggcaagcactacggggccagctcctgcgacggctgcaagggcttcttccgccggagcgtccgcaagaaccacatgtactcctgccggttcagccgccagtgcgtggtggacaaggacaagcggaaccagtgccgctactgccggctgaagaagtgcttccgcgccgggatgaagaaggaggccgtccagaacgagcgggaccgcatctccacccggcgcagctcctacgaggacagctccctgcccagcatcaacgcgctcctgcaggccgaggtgctgtcccggcagatcaccgcgcccgtgtccggcatcaacggggacatccgcgccaagaagatcgccagcatcgccgacgtctgcgagagcatgaaggagcagctcctggtgctggtggagtgggcgaagtacatcccggccttctgcgagctccccctggacgaccaggtcgccctgctccgggcccacgccggcgagcacctcctgctgggggcgaccaagcgctccatggtgttcaaggacgtgctgctgctcggcaacgactacatcgtcccccggcactgccccgagctggccgagatgagccgcgtgtccatccggatcctggacgagctcgtgctgccgttccaggagctgcagatcgacgacaacgagtacgcctacctcaaggccatcatcttcttcgaccccgacgccaagggcctgagcgaccccgggaagatcaagcgcctgcgctcccaggtccaggtgagcctcgaggactacatcaacgaccggcagtacgactcccgcggccggttcggggagctgctgctcctgctgcccacgctccagagcatcacctggcagatgatcgagcagatccagttcatcaagctgttcggcatggcgaagatcgacaacctgctccaggagatgctgctgtgaggactagtccctgttcccagagcccacttttttttctttttttgaaataaaatagcctgtctttcagatctcaaaggctcttttcagagccaccaaaaaaaaaaaaaaaaaaaaaaaaaaaaaaaaaaaaaaaaaaaaaaaaaaaaaaaaaaaaaaaaaaaaaaaaaaaaaaaaaaaaaaaaaaaaaaaaaaaaa

SEQ ID NO: 3359 - RNA, 1400 nt, synthetic construct; identical to SEQ ID NO: 3358
  misc_feature 1..1400: note = mRNA a-1 (hSL-A100) (opt1) from Homo sapiens__NP_000448.3__HNF4A(1-375)(S167A_S378A_T429A_T432A_ S436A)
  source 1..1400: mol_type = other RNA

SEQ ID NO: 3360 - RNA, 1400 nt, synthetic construct; identical to SEQ ID NO: 3357
  misc_feature 1..1400: note = mRNA a-1 (hSL-A100) (opt1) from Homo sapiens__NP_000448.3__HNF4A(1-375)(S167E_S378E_T429E_T432E_ S436E)
  source 1..1400: mol_type = other RNA

SEQ ID NO: 3361 - RNA, 1400 nt, synthetic construct
  misc_feature 1..1400: note = mRNA a-1 (hSL-A100) (opt1) from Homo sapiens__NP_000448.3__HNF4A(1-375)(S87A)
  source 1..1400: mol_type = other RNA
aggagagtcccgcagtcggcgtccagcggctctgcttgttcgtgtgtgtgtcgttgcaggccttattcaagcttaccatgcgcctgagcaagaccctcgtggacatggacatggccgactactccgccgcgctggaccccgcctacaccacgctggagttcgagaacgtccaggtgctcaccatgggcaacgacaccagcccgtccgaggggaccaacctgaacgcccccaacagcctgggcgtgtccgccctctgcgccatctgcggggaccgggcgacgggcaagcactacggggccagctcctgcgacggctgcaagggcttcttccgccgggcggtccgcaagaaccacatgtactcctgccggttcagccgccagtgcgtggtggacaaggacaagcggaaccagtgccgctactgccggctgaagaagtgcttccgcgccgggatgaagaaggaggccgtccagaacgagcgggaccgcatctccacccggcgcagctcctacgaggacagctccctgcccagcatcaacgcgctcctgcaggccgaggtgctgtcccggcagatcaccagccccgtgtccggcatcaacggggacatccgcgccaagaagatcgccagcatcgccgacgtctgcgagagcatgaaggagcagctcctggtgctggtggagtgggcgaagtacatcccggccttctgcgagctccccctggacgaccaggtcgccctgctccgggcccacgccggcgagcacctcctgctgggggcgaccaagcgctccatggtgttcaaggacgtgctgctgctcggcaacgactacatcgtcccccggcactgccccgagctggccgagatgagccgcgtgtccatccggatcctggacgagctcgtgctgccgttccaggagctgcagatcgacgacaacgagtacgcctacctcaaggccatcatcttcttcgaccccgacgccaagggcctgagcgaccccgggaagatcaagcgcctgcgctcccaggtccaggtgagcctcgaggactacatcaacgaccggcagtacgactcccgcggccggttcggggagctgctgctcctgctgcccacgctccagagcatcacctggcagatgatcgagcagatccagttcatcaagctgttcggcatggcgaagatcgacaacctgctccaggagatgctgctgtgaggactagtccctgttcccagagcccacttttttttctttttttgaaataaaatagcctgtctttcagatctcaaaggctcttttcagagccaccaaaaaaaaaaaaaaaaaaaaaaaaaaaaaaaaaaaaaaaaaaaaaaaaaaaaaaaaaaaaaaaaaaaaaaaaaaaaaaaaaaaaaaaaaaaaaaaaaaaaa

SEQ ID NO: 3362 - RNA, 1400 nt, synthetic construct
  misc_feature 1..1400: note = mRNA a-1 (hSL-A100) (opt1) from Homo sapiens__NP_000448.3__HNF4A(1-375)(S87E)
  source 1..1400: mol_type = other RNA
aggagagtcccgcagtcggcgtccagcggctctgcttgttcgtgtgtgtgtcgttgcaggccttattcaagcttaccatgcgcctgagcaagaccctcgtggacatggacatggccgactactccgccgcgctggaccccgcctacaccacgctggagttcgagaacgtccaggtgctcaccatgggcaacgacaccagcccgtccgaggggaccaacctgaacgcccccaacagcctgggcgtgtccgccctctgcgccatctgcggggaccgggcgacgggcaagcactacggggccagctcctgcgacggctgcaagggcttcttccgccgggaggtccgcaagaaccacatgtactcctgccggttcagccgccagtgcgtggtggacaaggacaagcggaaccagtgccgctactgccggctgaagaagtgcttccgcgccgggatgaagaaggaggccgtccagaacgagcgggaccgcatctccacccggcgcagctcctacgaggacagctccctgcccagcatcaacgcgctcctgcaggccgaggtgctgtcccggcagatcaccagccccgtgtccggcatcaacggggacatccgcgccaagaagatcgccagcatcgccgacgtctgcgagagcatgaaggagcagctcctggtgctggtggagtgggcgaagtacatcccggccttctgcgagctccccctggacgaccaggtcgccctgctccgggcccacgccggcgagcacctcctgctgggggcgaccaagcgctccatggtgttcaaggacgtgctgctgctcggcaacgactacatcgtcccccggcactgccccgagctggccgagatgagccgcgtgtccatccggatcctggacgagctcgtgctgccgttccaggagctgcagatcgacgacaacgagtacgcctacctcaaggccatcatcttcttcgaccccgacgccaagggcctgagcgaccccgggaagatcaagcgcctgcgctcccaggtccaggtgagcctcgaggactacatcaacgaccggcagtacgactcccgcggccggttcggggagctgctgctcctgctgcccacgctccagagcatcacctggcagatgatcgagcagatccagttcatcaagctgttcggcatggcgaagatcgacaacctgctccaggagatgctgctgtgaggactagtccctgttcccagagcccacttttttttctttttttgaaataaaatagcctgtctttcagatctcaaaggctcttttcagagccaccaaaaaaaaaaaaaaaaaaaaaaaaaaaaaaaaaaaaaaaaaaaaaaaaaaaaaaaaaaaaaaaaaaaaaaaaaaaaaaaaaaaaaaaaaaaaaaaaaaaaa

SEQ ID NO: 3363 - RNA, 1400 nt, synthetic construct
  misc_feature 1..1400: note = mRNA a-1 (hSL-A100) (opt1) from Homo sapiens__NP_000448.3__HNF4A(1-375)(R2V)
  source 1..1400: mol_type = other RNA
aggagagtcccgcagtcggcgtccagcggctctgcttgttcgtgtgtgtgtcgttgcaggccttattcaagcttaccatggtgctgagcaagaccctcgtggacatggacatggccgactactccgccgcgctggaccccgcctacaccacgctggagttcgagaacgtccaggtgctcaccatgggcaacgacaccagcccgtccgaggggaccaacctgaacgcccccaacagcctgggcgtgtccgccctctgcgccatctgcggggaccgggcgacgggcaagcactacggggccagctcctgcgacggctgcaagggcttcttccgccggagcgtccgcaagaaccacatgtactcctgccggttcagccgccagtgcgtggtggacaaggacaagcggaaccagtgccgctactgccggctgaagaagtgcttccgcgccgggatgaagaaggaggccgtccagaacgagcgggaccgcatctccacccggcgcagctcctacgaggacagctccctgcccagcatcaacgcgctcctgcaggccgaggtgctgtcccggcagatcaccagccccgtgtccggcatcaacggggacatccgcgccaagaagatcgccagcatcgccgacgtctgcgagagcatgaaggagcagctcctggtgctggtggagtgggcgaagtacatcccggccttctgcgagctccccctggacgaccaggtcgccctgctccgggcccacgccggcgagcacctcctgctgggggcgaccaagcgctccatggtgttcaaggacgtgctgctgctcggcaacgactacatcgtcccccggcactgccccgagctggccgagatgagccgcgtgtccatccggatcctggacgagctcgtgctgccgttccaggagctgcagatcgacgacaacgagtacgcctacctcaaggccatcatcttcttcgaccccgacgccaagggcctgagcgaccccgggaagatcaagcgcctgcgctcccaggtccaggtgagcctcgaggactacatcaacgaccggcagtacgactcccgcggccggttcggggagctgctgctcctgctgcccacgctccagagcatcacctggcagatgatcgagcagatccagttcatcaagctgttcggcatggcgaagatcgacaacctgctccaggagatgctgctgtgaggactagtccctgttcccagagcccacttttttttctttttttgaaataaaatagcctgtctttcagatctcaaaggctcttttcagagccaccaaaaaaaaaaaaaaaaaaaaaaaaaaaaaaaaaaaaaaaaaaaaaaaaaaaaaaaaaaaaaaaaaaaaaaaaaaaaaaaaaaaaaaaaaaaaaaaaaaaaa

SEQ ID NO: 3364 - RNA, 1400 nt, synthetic construct
  misc_feature 1..1400: note = mRNA a-1 (hSL-A100) (opt1) from Homo sapiens__NP_000448.3__HNF4A(1-375)(R2V_K5V)
  source 1..1400: mol_type = other RNA
aggagagtcccgcagtcggcgtccagcggctctgcttgttcgtgtgtgtgtcgttgcaggccttattcaagcttaccatggtgctgagcgtgaccctcgtggacatggacatggccgactactccgccgcgctggaccccgcctacaccacgctggagttcgagaacgtccaggtgctcaccatgggcaacgacaccagcccgtccgaggggaccaacctgaacgcccccaacagcctgggcgtgtccgccctctgcgccatctgcggggaccgggcgacgggcaagcactacggggccagctcctgcgacggctgcaagggcttcttccgccggagcgtccgcaagaaccacatgtactcctgccggttcagccgccagtgcgtggtggacaaggacaagcggaaccagtgccgctactgccggctgaagaagtgcttccgcgccgggatgaagaaggaggccgtccagaacgagcgggaccgcatctccacccggcgcagctcctacgaggacagctccctgcccagcatcaacgcgctcctgcaggccgaggtgctgtcccggcagatcaccagccccgtgtccggcatcaacggggacatccgcgccaagaagatcgccagcatcgccgacgtctgcgagagcatgaaggagcagctcctggtgctggtggagtgggcgaagtacatcccggccttctgcgagctccccctggacgaccaggtcgccctgctccgggcccacgccggcgagcacctcctgctgggggcgaccaagcgctccatggtgttcaaggacgtgctgctgctcggcaacgactacatcgtcccccggcactgccccgagctggccgagatgagccgcgtgtccatccggatcctggacgagctcgtgctgccgttccaggagctgcagatcgacgacaacgagtacgcctacctcaaggccatcatcttcttcgaccccgacgccaagggcctgagcgaccccgggaagatcaagcgcctgcgctcccaggtccaggtgagcctcgaggactacatcaacgaccggcagtacgactcccgcggccggttcggggagctgctgctcctgctgcccacgctccagagcatcacctggcagatgatcgagcagatccagttcatcaagctgttcggcatggcgaagatcgacaacctgctccaggagatgctgctgtgaggactagtccctgttcccagagcccacttttttttctttttttgaaataaaatagcctgtctttcagatctcaaaggctcttttcagagccaccaaaaaaaaaaaaaaaaaaaaaaaaaaaaaaaaaaaaaaaaaaaaaaaaaaaaaaaaaaaaaaaaaaaaaaaaaaaaaaaaaaaaaaaaaaaaaaaaaaaaa

SEQ ID NO: 3365 - RNA, 1400 nt, synthetic construct
  misc_feature 1..1400: note = mRNA a-1 (hSL-A100) (opt1) from Homo sapiens__NP_000448.3__HNF4A(1-375)(K179R_K180R)
  source 1..1400: mol_type = other RNA
aggagagtcccgcagtcggcgtccagcggctctgcttgttcgtgtgtgtgtcgttgcaggccttattcaagcttaccatgcgcctgagcaagaccctcgtggacatggacatggccgactactccgccgcgctggaccccgcctacaccacgctggagttcgagaacgtccaggtgctcaccatgggcaacgacaccagcccgtccgaggggaccaacctgaacgcccccaacagcctgggcgtgtccgccctctgcgccatctgcggggaccgggcgacgggcaagcactacggggccagctcctgcgacggctgcaagggcttcttccgccggagcgtccgcaagaaccacatgtactcctgccggttcagccgccagtgcgtggtggacaaggacaagcggaaccagtgccgctactgccggctgaagaagtgcttccgcgccgggatgaagaaggaggccgtccagaacgagcgggaccgcatctccacccggcgcagctcctacgaggacagctccctgcccagcatcaacgcgctcctgcaggccgaggtgctgtcccggcagatcaccagccccgtgtccggcatcaacggggacatccgcgcccggcgcatcgccagcatcgccgacgtctgcgagagcatgaaggagcagctcctggtgctggtggagtgggcgaagtacatcccggccttctgcgagctccccctggacgaccaggtcgccctgctccgggcccacgccggcgagcacctcctgctgggggcgaccaagcgctccatggtgttcaaggacgtgctgctgctcggcaacgactacatcgtcccccggcactgccccgagctggccgagatgagccgcgtgtccatccggatcctggacgagctcgtgctgccgttccaggagctgcagatcgacgacaacgagtacgcctacctcaaggccatcatcttcttcgaccccgacgccaagggcctgagcgaccccgggaagatcaagcgcctgcgctcccaggtccaggtgagcctcgaggactacatcaacgaccggcagtacgactcccgcggccggttcggggagctgctgctcctgctgcccacgctccagagcatcacctggcagatgatcgagcagatccagttcatcaagctgttcggcatggcgaagatcgacaacctgctccaggagatgctgctgtgaggactagtccctgttcccagagcccacttttttttctttttttgaaataaaatagcctgtctttcagatctcaaaggctcttttcagagccaccaaaaaaaaaaaaaaaaaaaaaaaaaaaaaaaaaaaaaaaaaaaaaaaaaaaaaaaaaaaaaaaaaaaaaaaaaaaaaaaaaaaaaaaaaaaaaaaaaaaaa

SEQ ID NO: 3366 - RNA, 1400 nt, synthetic construct
  misc_feature 1..1400: note = mRNA a-1 (hSL-A100) (opt1) from Homo sapiens__NP_000448.3__HNF4A(1-375)(K234R)
  source 1..1400: mol_type = other RNA
aggagagtcccgcagtcggcgtccagcggctctgcttgttcgtgtgtgtgtcgttgcaggccttattcaagcttaccatgcgcctgagcaagaccctcgtggacatggacatggccgactactccgccgcgctggaccccgcctacaccacgctggagttcgagaacgtccaggtgctcaccatgggcaacgacaccagcccgtccgaggggaccaacctgaacgcccccaacagcctgggcgtgtccgccctctgcgccatctgcggggaccgggcgacgggcaagcactacggggccagctcctgcgacggctgcaagggcttcttccgccggagcgtccgcaagaaccacatgtactcctgccggttcagccgccagtgcgtggtggacaaggacaagcggaaccagtgccgctactgccggctgaagaagtgcttccgcgccgggatgaagaaggaggccgtccagaacgagcgggaccgcatctccacccggcgcagctcctacgaggacagctccctgcccagcatcaacgcgctcctgcaggccgaggtgctgtcccggcagatcaccagccccgtgtccggcatcaacggggacatccgcgccaagaagatcgccagcatcgccgacgtctgcgagagcatgaaggagcagctcctggtgctggtggagtgggcgaagtacatcccggccttctgcgagctccccctggacgaccaggtcgccctgctccgggcccacgccggcgagcacctcctgctgggggcgacccgccgctccatggtgttcaaggacgtgctgctgctcggcaacgactacatcgtcccccggcactgccccgagctggccgagatgagccgcgtgtccatccggatcctggacgagctcgtgctgccgttccaggagctgcagatcgacgacaacgagtacgcctacctcaaggccatcatcttcttcgaccccgacgccaagggcctgagcgaccccgggaagatcaagcgcctgcgctcccaggtccaggtgagcctcgaggactacatcaacgaccggcagtacgactcccgcggccggttcggggagctgctgctcctgctgcccacgctccagagcatcacctggcagatgatcgagcagatccagttcatcaagctgttcggcatggcgaagatcgacaacctgctccaggagatgctgctgtgaggactagtccctgttcccagagcccacttttttttctttttttgaaataaaatagcctgtctttcagatctcaaaggctcttttcagagccaccaaaaaaaaaaaaaaaaaaaaaaaaaaaaaaaaaaaaaaaaaaaaaaaaaaaaaaaaaaaaaaaaaaaaaaaaaaaaaaaaaaaaaaaaaaaaaaaaaaaaa

SEQ ID NO: 3367 - RNA, 1400 nt, synthetic construct
  misc_feature 1..1400: note = mRNA a-1 (hSL-A100) (opt1) from Homo sapiens__NP_000448.3__HNF4A(1-375)(K300R)
  source 1..1400: mol_type = other RNA
aggagagtcccgcagtcggcgtccagcggctctgcttgttcgtgtgtgtgtcgttgcaggccttattcaagcttaccatgcgcctgagcaagaccctcgtggacatggacatggccgactactccgccgcgctggaccccgcctacaccacgctggagttcgagaacgtccaggtgctcaccatgggcaacgacaccagcccgtccgaggggaccaacctgaacgcccccaacagcctgggcgtgtccgccctctgcgccatctgcggggaccgggcgacgggcaagcactacggggccagctcctgcgacggctgcaagggcttcttccgccggagcgtccgcaagaaccacatgtactcctgccggttcagccgccagtgcgtggtggacaaggacaagcggaaccagtgccgctactgccggctgaagaagtgcttccgcgccgggatgaagaaggaggccgtccagaacgagcgggaccgcatctccacccggcgcagctcctacgaggacagctccctgcccagcatcaacgcgctcctgcaggccgaggtgctgtcccggcagatcaccagccccgtgtccggcatcaacggggacatccgcgccaagaagatcgccagcatcgccgacgtctgcgagagcatgaaggagcagctcctggtgctggtggagtgggcgaagtacatcccggccttctgcgagctccccctggacgaccaggtcgccctgctccgggcccacgccggcgagcacctcctgctgggggcgaccaagcgctccatggtgttcaaggacgtgctgctgctcggcaacgactacatcgtcccccggcactgccccgagctggccgagatgagccgcgtgtccatccggatcctggacgagctcgtgctgccgttccaggagctgcagatcgacgacaacgagtacgcctacctcaaggccatcatcttcttcgaccccgacgcccgcggcctgagcgaccccgggaagatcaagcgcctgcgctcccaggtccaggtgagcctcgaggactacatcaacgaccggcagtacgactcccgcggccggttcggggagctgctgctcctgctgcccacgctccagagcatcacctggcagatgatcgagcagatccagttcatcaagctgttcggcatggcgaagatcgacaacctgctccaggagatgctgctgtgaggactagtccctgttcccagagcccacttttttttctttttttgaaataaaatagcctgtctttcagatctcaaaggctcttttcagagccaccaaaaaaaaaaaaaaaaaaaaaaaaaaaaaaaaaaaaaaaaaaaaaaaaaaaaaaaaaaaaaaaaaaaaaaaaaaaaaaaaaaaaaaaaaaaaaaaaaaaaa

SEQ ID NO: 3368 - RNA, 1400 nt, synthetic construct
  misc_feature 1..1400: note = mRNA a-1 (hSL-A100) (opt1) from Homo sapiens__NP_000448.3__HNF4A(1-375)(K300R_K307R_K309R)
  source 1..1400: mol_type = other RNA
aggagagtcccgcagtcggcgtccagcggctctgcttgttcgtgtgtgtgtcgttgcaggccttattcaagcttaccatgcgcctgagcaagaccctcgtggacatggacatggccgactactccgccgcgctggaccccgcctacaccacgctggagttcgagaacgtccaggtgctcaccatgggcaacgacaccagcccgtccgaggggaccaacctgaacgcccccaacagcctgggcgtgtccgccctctgcgccatctgcggggaccgggcgacgggcaagcactacggggccagctcctgcgacggctgcaagggcttcttccgccggagcgtccgcaagaaccacatgtactcctgccggttcagccgccagtgcgtggtggacaaggacaagcggaaccagtgccgctactgccggctgaagaagtgcttccgcgccgggatgaagaaggaggccgtccagaacgagcgggaccgcatctccacccggcgcagctcctacgaggacagctccctgcccagcatcaacgcgctcctgcaggccgaggtgctgtcccggcagatcaccagccccgtgtccggcatcaacggggacatccgcgccaagaagatcgccagcatcgccgacgtctgcgagagcatgaaggagcagctcctggtgctggtggagtgggcgaagtacatcccggccttctgcgagctccccctggacgaccaggtcgccctgctccgggcccacgccggcgagcacctcctgctgggggcgaccaagcgctccatggtgttcaaggacgtgctgctgctcggcaacgactacatcgtcccccggcactgccccgagctggccgagatgagccgcgtgtccatccggatcctggacgagctcgtgctgccgttccaggagctgcagatcgacgacaacgagtacgcctacctcaaggccatcatcttcttcgaccccgacgcccgcggcctgagcgaccccgggcgcatccggcgcctgcgctcccaggtccaggtgagcctcgaggactacatcaacgaccggcagtacgactcccgcggccggttcggggagctgctgctcctgctgcccacgctccagagcatcacctggcagatgatcgagcagatccagttcatcaagctgttcggcatggcgaagatcgacaacctgctccaggagatgctgctgtgaggactagtccctgttcccagagcccacttttttttctttttttgaaataaaatagcctgtctttcagatctcaaaggctcttttcagagccaccaaaaaaaaaaaaaaaaaaaaaaaaaaaaaaaaaaaaaaaaaaaaaaaaaaaaaaaaaaaaaaaaaaaaaaaaaaaaaaaaaaaaaaaaaaaaaaaaaaaaa

SEQ ID NO: 3369 - RNA, 1400 nt, synthetic construct; identical to SEQ ID NO: 3350
  misc_feature 1..1400: note = mRNA a-1 (hSL-A100) (opt1) from Homo sapiens__NP_000448.3__HNF4A(1-375)(K447R_K470R)
  source 1..1400: mol_type = other RNA

SEQ ID NO: 3370 - RNA, 1400 nt, synthetic construct; identical to SEQ ID NO: 3350
  misc_feature 1..1400: note = mRNA a-1 (hSL-A100) (opt1) from Homo sapiens__NP_000448.3__HNF4A(1-375)(K458R)
  source 1..1400: mol_type = other RNA

SEQ ID NO: 3371 - RNA, 1400 nt, synthetic construct
  misc_feature 1..1400: note = mRNA a-1 (hSL-A100) (opt1) from Homo sapiens__NP_000448.3__HNF4A(1-375)(K106R_K108R_K126R_K127R)
  source 1..1400: mol_type = other RNA
aggagagtcccgcagtcggcgtccagcggctctgcttgttcgtgtgtgtgtcgttgcaggccttattcaagcttaccatgcgcctgagcaagaccctcgtggacatggacatggccgactactccgccgcgctggaccccgcctacaccacgctggagttcgagaacgtccaggtgctcaccatgggcaacgacaccagcccgtccgaggggaccaacctgaacgcccccaacagcctgggcgtgtccgccctctgcgccatctgcggggaccgggcgacgggcaagcactacggggccagctcctgcgacggctgcaagggcttcttccgccggagcgtccgcaagaaccacatgtactcctgccggttcagccgccagtgcgtggtggaccgcgaccggcggaaccagtgccgctactgccggctgaagaagtgcttccgcgccgggatgcgccgcgaggccgtccagaacgagcgggaccgcatctccacccggcgcagctcctacgaggacagctccctgcccagcatcaacgcgctcctgcaggccgaggtgctgtcccggcagatcaccagccccgtgtccggcatcaacggggacatccgcgccaagaagatcgccagcatcgccgacgtctgcgagagcatgaaggagcagctcctggtgctggtggagtgggcgaagtacatcccggccttctgcgagctccccctggacgaccaggtcgccctgctccgggcccacgccggcgagcacctcctgctgggggcgaccaagcgctccatggtgttcaaggacgtgctgctgctcggcaacgactacatcgtcccccggcactgccccgagctggccgagatgagccgcgtgtccatccggatcctggacgagctcgtgctgccgttccaggagctgcagatcgacgacaacgagtacgcctacctcaaggccatcatcttcttcgaccccgacgccaagggcctgagcgaccccgggaagatcaagcgcctgcgctcccaggtccaggtgagcctcgaggactacatcaacgaccggcagtacgactcccgcggccggttcggggagctgctgctcctgctgcccacgctccagagcatcacctggcagatgatcgagcagatccagttcatcaagctgttcggcatggcgaagatcgacaacctgctccaggagatgctgctgtgaggactagtccctgttcccagagcccacttttttttctttttttgaaataaaatagcctgtctttcagatctcaaaggctcttttcagagccaccaaaaaaaaaaaaaaaaaaaaaaaaaaaaaaaaaaaaaaaaaaaaaaaaaaaaaaaaaaaaaaaaaaaaaaaaaaaaaaaaaaaaaaaaaaaaaaaaaaaaa

SEQ ID NO: 3372 - RNA, 1400 nt, synthetic construct
  misc_feature 1..1400: note = mRNA a-1 (hSL-A100) (opt1) from Homo sapiens__NP_000448.3__HNF4A(1-375)(E285Q)
  source 1..1400: mol_type = other RNA
aggagagtcccgcagtcggcgtccagcggctctgcttgttcgtgtgtgtgtcgttgcaggccttattcaagcttaccatgcgcctgagcaagaccctcgtggacatggacatggccgactactccgccgcgctggaccccgcctacaccacgctggagttcgagaacgtccaggtgctcaccatgggcaacgacaccagcccgtccgaggggaccaacctgaacgcccccaacagcctgggcgtgtccgccctctgcgccatctgcggggaccgggcgacgggcaagcactacggggccagctcctgcgacggctgcaagggcttcttccgccggagcgtccgcaagaaccacatgtactcctgccggttcagccgccagtgcgtggtggacaaggacaagcggaaccagtgccgctactgccggctgaagaagtgcttccgcgccgggatgaagaaggaggccgtccagaacgagcgggaccgcatctccacccggcgcagctcctacgaggacagctccctgcccagcatcaacgcgctcctgcaggccgaggtgctgtcccggcagatcaccagccccgtgtccggcatcaacggggacatccgcgccaagaagatcgccagcatcgccgacgtctgcgagagcatgaaggagcagctcctggtgctggtggagtgggcgaagtacatcccggccttctgcgagctccccctggacgaccaggtcgccctgctccgggcccacgccggcgagcacctcctgctgggggcgaccaagcgctccatggtgttcaaggacgtgctgctgctcggcaacgactacatcgtcccccggcactgccccgagctggccgagatgagccgcgtgtccatccggatcctggacgagctcgtgctgccgttccaggagctgcagatcgacgacaaccagtacgcctacctcaaggccatcatcttcttcgaccccgacgccaagggcctgagcgaccccgggaagatcaagcgcctgcgctcccaggtccaggtgagcctcgaggactacatcaacgaccggcagtacgactcccgcggccggttcggggagctgctgctcctgctgcccacgctccagagcatcacctggcagatgatcgagcagatccagttcatcaagctgttcggcatggcgaagatcgacaacctgctccaggagatgctgctgtgaggactagtccctgttcccagagcccacttttttttctttttttgaaataaaatagcctgtctttcagatctcaaaggctcttttcagagccaccaaaaaaaaaaaaaaaaaaaaaaaaaaaaaaaaaaaaaaaaaaaaaaaaaaaaaaaaaaaaaaaaaaaaaaaaaaaaaaaaaaaaaaaaaaaaaaaaaaaaa

SEQ ID NO: 3373 - RNA, 1400 nt, synthetic construct
  misc_feature 1..1400: note = mRNA a-1 (hSL-A100) (opt1) from Homo sapiens__NP_000448.3__HNF4A(1-375)(T166E)
  source 1..1400: mol_type = other RNA
aggagagtcccgcagtcggcgtccagcggctctgcttgttcgtgtgtgtgtcgttgcaggccttattcaagcttaccatgcgcctgagcaagaccctcgtggacatggacatggccgactactccgccgcgctggaccccgcctacaccacgctggagttcgagaacgtccaggtgctcaccatgggcaacgacaccagcccgtccgaggggaccaacctgaacgcccccaacagcctgggcgtgtccgccctctgcgccatctgcggggaccgggcgacgggcaagcactacggggccagctcctgcgacggctgcaagggcttcttccgccggagcgtccgcaagaaccacatgtactcctgccggttcagccgccagtgcgtggtggacaaggacaagcggaaccagtgccgctactgccggctgaagaagtgcttccgcgccgggatgaagaaggaggccgtccagaacgagcgggaccgcatctccacccggcgcagctcctacgaggacagctccctgcccagcatcaacgcgctcctgcaggccgaggtgctgtcccggcagatcgagagccccgtgtccggcatcaacggggacatccgcgccaagaagatcgccagcatcgccgacgtctgcgagagcatgaaggagcagctcctggtgctggtggagtgggcgaagtacatcccggccttctgcgagctccccctggacgaccaggtcgccctgctccgggcccacgccggcgagcacctcctgctgggggcgaccaagcgctccatggtgttcaaggacgtgctgctgctcggcaacgactacatcgtcccccggcactgccccgagctggccgagatgagccgcgtgtccatccggatcctggacgagctcgtgctgccgttccaggagctgcagatcgacgacaacgagtacgcctacctcaaggccatcatcttcttcgaccccgacgccaagggcctgagcgaccccgggaagatcaagcgcctgcgctcccaggtccaggtgagcctcgaggactacatcaacgaccggcagtacgactcccgcggccggttcggggagctgctgctcctgctgcccacgctccagagcatcacctggcagatgatcgagcagatccagttcatcaagctgttcggcatggcgaagatcgacaacctgctccaggagatgctgctgtgaggactagtccctgttcccagagcccacttttttttctttttttgaaataaaatagcctgtctttcagatctcaaaggctcttttcagagccaccaaaaaaaaaaaaaaaaaaaaaaaaaaaaaaaaaaaaaaaaaaaaaaaaaaaaaaaaaaaaaaaaaaaaaaaaaaaaaaaaaaaaaaaaaaaaaaaaaaaaa

SEQ ID NO: 3374 - RNA, 1400 nt, synthetic construct
  misc_feature 1..1400: note = mRNA a-1 (hSL-A100) (opt1) from Homo sapiens__NP_000448.3__HNF4A(1-375)(S148A)
  source 1..1400: mol_type = other RNA
aggagagtcccgcagtcggcgtccagcggctctgcttgttcgtgtgtgtgtcgttgcaggccttattcaagcttaccatgcgcctgagcaagaccctcgtggacatggacatggccgactactccgccgcgctggaccccgcctacaccacgctggagttcgagaacgtccaggtgctcaccatgggcaacgacaccagcccgtccgaggggaccaacctgaacgcccccaacagcctgggcgtgtccgccctctgcgccatctgcggggaccgggcgacgggcaagcactacggggccagctcctgcgacggctgcaagggcttcttccgccggagcgtccgcaagaaccacatgtactcctgccggttcagccgccagtgcgtggtggacaaggacaagcggaaccagtgccgctactgccggctgaagaagtgcttccgcgccgggatgaagaaggaggccgtccagaacgagcgggaccgcatctccacccggcgcagctcctacgaggacagcgcgctgcccagcatcaacgcgctcctgcaggccgaggtgctgtcccggcagatcaccagccccgtgtccggcatcaacggggacatccgcgccaagaagatcgccagcatcgccgacgtctgcgagagcatgaaggagcagctcctggtgctggtggagtgggcgaagtacatcccggccttctgcgagctccccctggacgaccaggtcgccctgctccgggcccacgccggcgagcacctcctgctgggggcgaccaagcgctccatggtgttcaaggacgtgctgctgctcggcaacgactacatcgtcccccggcactgccccgagctggccgagatgagccgcgtgtccatccggatcctggacgagctcgtgctgccgttccaggagctgcagatcgacgacaacgagtacgcctacctcaaggccatcatcttcttcgaccccgacgccaagggcctgagcgaccccgggaagatcaagcgcctgcgctcccaggtccaggtgagcctcgaggactacatcaacgaccggcagtacgactcccgcggccggttcggggagctgctgctcctgctgcccacgctccagagcatcacctggcagatgatcgagcagatccagttcatcaagctgttcggcatggcgaagatcgacaacctgctccaggagatgctgctgtgaggactagtccctgttcccagagcccacttttttttctttttttgaaataaaatagcctgtctttcagatctcaaaggctcttttcagagccaccaaaaaaaaaaaaaaaaaaaaaaaaaaaaaaaaaaaaaaaaaaaaaaaaaaaaaaaaaaaaaaaaaaaaaaaaaaaaaaaaaaaaaaaaaaaaaaaaaaaaa

SEQ ID NO: 3375 - RNA, 1400 nt, synthetic construct
  misc_feature 1..1400: note = mRNA a-1 (hSL-A100) (opt1) from Homo sapiens__NP_000448.3__HNF4A(1-375)(S148E)
  source 1..1400: mol_type = other RNA
aggagagtcccgcagtcggcgtccagcggctctgcttgttcgtgtgtgtgtcgttgcaggccttattcaagcttaccatgcgcctgagcaagaccctcgtggacatggacatggccgactactccgccgcgctggaccccgcctacaccacgctggagttcgagaacgtccaggtgctcaccatgggcaacgacaccagcccgtccgaggggaccaacctgaacgcccccaacagcctgggcgtgtccgccctctgcgccatctgcggggaccgggcgacgggcaagcactacggggccagctcctgcgacggctgcaagggcttcttccgccggagcgtccgcaagaaccacatgtactcctgccggttcagccgccagtgcgtggtggacaaggacaagcggaaccagtgccgctactgccggctgaagaagtgcttccgcgccgggatgaagaaggaggccgtccagaacgagcgggaccgcatctccacccggcgcagctcctacgaggacagcgagctgcccagcatcaacgcgctcctgcaggccgaggtgctgtcccggcagatcaccagccccgtgtccggcatcaacggggacatccgcgccaagaagatcgccagcatcgccgacgtctgcgagagcatgaaggagcagctcctggtgctggtggagtgggcgaagtacatcccggccttctgcgagctccccctggacgaccaggtcgccctgctccgggcccacgccggcgagcacctcctgctgggggcgaccaagcgctccatggtgttcaaggacgtgctgctgctcggcaacgactacatcgtcccccggcactgccccgagctggccgagatgagccgcgtgtccatccggatcctggacgagctcgtgctgccgttccaggagctgcagatcgacgacaacgagtacgcctacctcaaggccatcatcttcttcgaccccgacgccaagggcctgagcgaccccgggaagatcaagcgcctgcgctcccaggtccaggtgagcctcgaggactacatcaacgaccggcagtacgactcccgcggccggttcggggagctgctgctcctgctgcccacgctccagagcatcacctggcagatgatcgagcagatccagttcatcaagctgttcggcatggcgaagatcgacaacctgctccaggagatgctgctgtgaggactagtccctgttcccagagcccacttttttttctttttttgaaataaaatagcctgtctttcagatctcaaaggctcttttcagagccaccaaaaaaaaaaaaaaaaaaaaaaaaaaaaaaaaaaaaaaaaaaaaaaaaaaaaaaaaaaaaaaaaaaaaaaaaaaaaaaaaaaaaaaaaaaaaaaaaaaaaa

SEQ ID NO: 3376 - RNA, 1400 nt, synthetic construct
  misc_feature 1..1400: note = mRNA a-1 (hSL-A100) (opt1) from Homo sapiens__NP_000448.3__HNF4A(1-375)(S183A)
  source 1..1400: mol_type = other RNA
aggagagtcccgcagtcggcgtccagcggctctgcttgttcgtgtgtgtgtcgttgcaggccttattcaagcttaccatgcgcctgagcaagaccctcgtggacatggacatggccgactactccgccgcgctggaccccgcctacaccacgctggagttcgagaacgtccaggtgctcaccatgggcaacgacaccagcccgtccgaggggaccaacctgaacgcccccaacagcctgggcgtgtccgccctctgcgccatctgcggggaccgggcgacgggcaagcactacggggccagctcctgcgacggctgcaagggcttcttccgccggagcgtccgcaagaaccacatgtactcctgccggttcagccgccagtgcgtggtggacaaggacaagcggaaccagtgccgctactgccggctgaagaagtgcttccgcgccgggatgaagaaggaggccgtccagaacgagcgggaccgcatctccacccggcgcagctcctacgaggacagctccctgcccagcatcaacgcgctcctgcaggccgaggtgctgtcccggcagatcaccagccccgtgtccggcatcaacggggacatccgcgccaagaagatcgccgcgatcgccgacgtctgcgagagcatgaaggagcagctcctggtgctggtggagtgggcgaagtacatcccggccttctgcgagctccccctggacgaccaggtcgccctgctccgggcccacgccggcgagcacctcctgctgggggcgaccaagcgctccatggtgttcaaggacgtgctgctgctcggcaacgactacatcgtcccccggcactgccccgagctggccgagatgagccgcgtgtccatccggatcctggacgagctcgtgctgccgttccaggagctgcagatcgacgacaacgagtacgcctacctcaaggccatcatcttcttcgaccccgacgccaagggcctgagcgaccccgggaagatcaagcgcctgcgctcccaggtccaggtgagcctcgaggactacatcaacgaccggcagtacgactcccgcggccggttcggggagctgctgctcctgctgcccacgctccagagcatcacctggcagatgatcgagcagatccagttcatcaagctgttcggcatggcgaagatcgacaacctgctccaggagatgctgctgtgaggactagtccctgttcccagagcccacttttttttctttttttgaaataaaatagcctgtctttcagatctcaaaggctcttttcagagccaccaaaaaaaaaaaaaaaaaaaaaaaaaaaaaaaaaaaaaaaaaaaaaaaaaaaaaaaaaaaaaaaaaaaaaaaaaaaaaaaaaaaaaaaaaaaaaaaaaaaaa

SEQ ID NO: 3377 - RNA, 1400 nt, synthetic construct
  misc_feature 1..1400: note = mRNA a-1 (hSL-A100) (opt1) from Homo sapiens__NP_000448.3__HNF4A(1-375)(S183E)
  source 1..1400: mol_type = other RNA
aggagagtcccgcagtcggcgtccagcggctctgcttgttcgtgtgtgtgtcgttgcaggccttattcaagcttaccatgcgcctgagcaagaccctcgtggacatggacatggccgactactccgccgcgctggaccccgcctacaccacgctggagttcgagaacgtccaggtgctcaccatgggcaacgacaccagcccgtccgaggggaccaacctgaacgcccccaacagcctgggcgtgtccgccctctgcgccatctgcggggaccgggcgacgggcaagcactacggggccagctcctgcgacggctgcaagggcttcttccgccggagcgtccgcaagaaccacatgtactcctgccggttcagccgccagtgcgtggtggacaaggacaagcggaaccagtgccgctactgccggctgaagaagtgcttccgcgccgggatgaagaaggaggccgtccagaacgagcgggaccgcatctccacccggcgcagctcctacgaggacagctccctgcccagcatcaacgcgctcctgcaggccgaggtgctgtcccggcagatcaccagccccgtgtccggcatcaacggggacatccgcgccaagaagatcgccgagatcgccgacgtctgcgagagcatgaaggagcagctcctggtgctggtggagtgggcgaagtacatcccggccttctgcgagctccccctggacgaccaggtcgccctgctccgggcccacgccggcgagcacctcctgctgggggcgaccaagcgctccatggtgttcaaggacgtgctgctgctcggcaacgactacatcgtcccccggcactgccccgagctggccgagatgagccgcgtgtccatccggatcctggacgagctcgtgctgccgttccaggagctgcagatcgacgacaacgagtacgcctacctcaaggccatcatcttcttcgaccccgacgccaagggcctgagcgaccccgggaagatcaagcgcctgcgctcccaggtccaggtgagcctcgaggactacatcaacgaccggcagtacgactcccgcggccggttcggggagctgctgctcctgctgcccacgctccagagcatcacctggcagatgatcgagcagatccagttcatcaagctgttcggcatggcgaagatcgacaacctgctccaggagatgctgctgtgaggactagtccctgttcccagagcccacttttttttctttttttgaaataaaatagcctgtctttcagatctcaaaggctcttttcagagccaccaaaaaaaaaaaaaaaaaaaaaaaaaaaaaaaaaaaaaaaaaaaaaaaaaaaaaaaaaaaaaaaaaaaaaaaaaaaaaaaaaaaaaaaaaaaaaaaaaaaaa

SEQ ID NO: 3378 - RNA, 1400 nt, synthetic construct; identical to SEQ ID NO: 3350
  misc_feature 1..1400: note = mRNA a-1 (hSL-A100) (opt1) from Homo sapiens__NP_000448.3__HNF4A(1-375)(S461A)
  source 1..1400: mol_type = other RNA

SEQ ID NO: 3379 - RNA, 1400 nt, synthetic construct; identical to SEQ ID NO: 3350
  misc_feature 1..1400: note = mRNA a-1 (hSL-A100) (opt1) from Homo sapiens__NP_000448.3__HNF4A(1-375)(S461E)
  source 1..1400: mol_type = other RNA

SEQ ID NO: 3380 - RNA, 1400 nt, synthetic construct
  misc_feature 1..1400: note = mRNA a-1 (hSL-A100) (opt1) from Homo sapiens__NP_000448.3__HNF4A(1-375)(S142A_S143A_S313A)
  source 1..1400: mol_type = other RNA
aggagagtcccgcagtcggcgtccagcggctctgcttgttcgtgtgtgtgtcgttgcaggccttattcaagcttaccatgcgcctgagcaagaccctcgtggacatggacatggccgactactccgccgcgctggaccccgcctacaccacgctggagttcgagaacgtccaggtgctcaccatgggcaacgacaccagcccgtccgaggggaccaacctgaacgcccccaacagcctgggcgtgtccgccctctgcgccatctgcggggaccgggcgacgggcaagcactacggggccagctcctgcgacggctgcaagggcttcttccgccggagcgtccgcaagaaccacatgtactcctgccggttcagccgccagtgcgtggtggacaaggacaagcggaaccagtgccgctactgccggctgaagaagtgcttccgcgccgggatgaagaaggaggccgtccagaacgagcgggaccgcatctccacccggcgcgcggcctacgaggacagctccctgcccagcatcaacgcgctcctgcaggccgaggtgctgtcccggcagatcaccagccccgtgtccggcatcaacggggacatccgcgccaagaagatcgccagcatcgccgacgtctgcgagagcatgaaggagcagctcctggtgctggtggagtgggcgaagtacatcccggccttctgcgagctccccctggacgaccaggtcgccctgctccgggcccacgccggcgagcacctcctgctgggggcgaccaagcgctccatggtgttcaaggacgtgctgctgctcggcaacgactacatcgtcccccggcactgccccgagctggccgagatgagccgcgtgtccatccggatcctggacgagctcgtgctgccgttccaggagctgcagatcgacgacaacgagtacgcctacctcaaggccatcatcttcttcgaccccgacgccaagggcctgagcgaccccgggaagatcaagcgcctgcgcgcgcaggtccaggtgagcctcgaggactacatcaacgaccggcagtacgactcccgcggccggttcggggagctgctgctcctgctgcccacgctccagagcatcacctggcagatgatcgagcagatccagttcatcaagctgttcggcatggcgaagatcgacaacctgctccaggagatgctgctgtgaggactagtccctgttcccagagcccacttttttttctttttttgaaataaaatagcctgtctttcagatctcaaaggctcttttcagagccaccaaaaaaaaaaaaaaaaaaaaaaaaaaaaaaaaaaaaaaaaaaaaaaaaaaaaaaaaaaaaaaaaaaaaaaaaaaaaaaaaaaaaaaaaaaaaaaaaaaaaa

SEQ ID NO: 3381 - RNA, 1400 nt, synthetic construct; identical to SEQ ID NO: 3380
  misc_feature 1..1400: note = mRNA a-1 (hSL-A100) (opt1) from Homo sapiens__NP_000448.3__HNF4A(1-375)(S142A_S143A_S313A_K458R)
  source 1..1400: mol_type = other RNA

SEQ ID NO: 3382 - RNA, 1400 nt, synthetic construct
  misc_feature 1..1400: note = mRNA a-1 (hSL-A100) (opt1) from Homo sapiens__NP_000448.3__HNF4A(1-375)(S142A_S143A_S167A_S313A_ S378A_T429A_T432A_S436A_K458R)
  source 1..1400: mol_type = other RNA
aggagagtcccgcagtcggcgtccagcggctctgcttgttcgtgtgtgtgtcgttgcaggccttattcaagcttaccatgcgcctgagcaagaccctcgtggacatggacatggccgactactccgccgcgctggaccccgcctacaccacgctggagttcgagaacgtccaggtgctcaccatgggcaacgacaccagcccgtccgaggggaccaacctgaacgcccccaacagcctgggcgtgtccgccctctgcgccatctgcggggaccgggcgacgggcaagcactacggggccagctcctgcgacggctgcaagggcttcttccgccggagcgtccgcaagaaccacatgtactcctgccggttcagccgccagtgcgtggtggacaaggacaagcggaaccagtgccgctactgccggctgaagaagtgcttccgcgccgggatgaagaaggaggccgtccagaacgagcgggaccgcatctccacccggcgcgcggcctacgaggacagctccctgcccagcatcaacgcgctcctgcaggccgaggtgctgtcccggcagatcaccgcgcccgtgtccggcatcaacggggacatccgcgccaagaagatcgccagcatcgccgacgtctgcgagagcatgaaggagcagctcctggtgctggtggagtgggcgaagtacatcccggccttctgcgagctccccctggacgaccaggtcgccctgctccgggcccacgccggcgagcacctcctgctgggggcgaccaagcgctccatggtgttcaaggacgtgctgctgctcggcaacgactacatcgtcccccggcactgccccgagctggccgagatgagccgcgtgtccatccggatcctggacgagctcgtgctgccgttccaggagctgcagatcgacgacaacgagtacgcctacctcaaggccatcatcttcttcgaccccgacgccaagggcctgagcgaccccgggaagatcaagcgcctgcgcgcgcaggtccaggtgagcctcgaggactacatcaacgaccggcagtacgactcccgcggccggttcggggagctgctgctcctgctgcccacgctccagagcatcacctggcagatgatcgagcagatccagttcatcaagctgttcggcatggcgaagatcgacaacctgctccaggagatgctgctgtgaggactagtccctgttcccagagcccacttttttttctttttttgaaataaaatagcctgtctttcagatctcaaaggctcttttcagagccaccaaaaaaaaaaaaaaaaaaaaaaaaaaaaaaaaaaaaaaaaaaaaaaaaaaaaaaaaaaaaaaaaaaaaaaaaaaaaaaaaaaaaaaaaaaaaaaaaaaaaa

SEQ ID NO: 3383 - RNA, 1400 nt, synthetic construct
  misc_feature 1..1400: note = mRNA a-1 (hSL-A100) (opt1) from Homo sapiens__NP_000448.3__HNF4A(1-375)(S142A_S143A_S148A_S167A_ S313A_S378A_T429A_T432A_S436A_K458R)
  source 1..1400: mol_type = other RNA
aggagagtcccgcagtcggcgtccagcggctctgcttgttcgtgtgtgtgtcgttgcaggccttattcaagcttaccatgcgcctgagcaagaccctcgtggacatggacatggccgactactccgccgcgctggaccccgcctacaccacgctggagttcgagaacgtccaggtgctcaccatgggcaacgacaccagcccgtccgaggggaccaacctgaacgcccccaacagcctgggcgtgtccgccctctgcgccatctgcggggaccgggcgacgggcaagcactacggggccagctcctgcgacggctgcaagggcttcttccgccggagcgtccgcaagaaccacatgtactcctgccggttcagccgccagtgcgtggtggacaaggacaagcggaaccagtgccgctactgccggctgaagaagtgcttccgcgccgggatgaagaaggaggccgtccagaacgagcgggaccgcatctccacccggcgcgcggcctacgaggacagcgcgctgcccagcatcaacgcgctcctgcaggccgaggtgctgtcccggcagatcaccgcgcccgtgtccggcatcaacggggacatccgcgccaagaagatcgccagcatcgccgacgtctgcgagagcatgaaggagcagctcctggtgctggtggagtgggcgaagtacatcccggccttctgcgagctccccctggacgaccaggtcgccctgctccgggcccacgccggcgagcacctcctgctgggggcgaccaagcgctccatggtgttcaaggacgtgctgctgctcggcaacgactacatcgtcccccggcactgccccgagctggccgagatgagccgcgtgtccatccggatcctggacgagctcgtgctgccgttccaggagctgcagatcgacgacaacgagtacgcctacctcaaggccatcatcttcttcgaccccgacgccaagggcctgagcgaccccgggaagatcaagcgcctgcgcgcgcaggtccaggtgagcctcgaggactacatcaacgaccggcagtacgactcccgcggccggttcggggagctgctgctcctgctgcccacgctccagagcatcacctggcagatgatcgagcagatccagttcatcaagctgttcggcatggcgaagatcgacaacctgctccaggagatgctgctgtgaggactagtccctgttcccagagcccacttttttttctttttttgaaataaaatagcctgtctttcagatctcaaaggctcttttcagagccaccaaaaaaaaaaaaaaaaaaaaaaaaaaaaaaaaaaaaaaaaaaaaaaaaaaaaaaaaaaaaaaaaaaaaaaaaaaaaaaaaaaaaaaaaaaaaaaaaaaaaa

SEQ ID NO: 3384 - RNA, 1400 nt, synthetic construct
  misc_feature 1..1400: note = mRNA a-1 (hSL-A100) (opt1) from Homo sapiens__NP_000448.3__HNF4A(1-375)(K106R_K108R_K126R_K127R_ S142A_S143A_S148A_S167A_S313A_S378A_T429A_T432A_S436A_K458R )
  source 1..1400: mol_type = other RNA
aggagagtcccgcagtcggcgtccagcggctctgcttgttcgtgtgtgtgtcgttgcaggccttattcaagcttaccatgcgcctgagcaagaccctcgtggacatggacatggccgactactccgccgcgctggaccccgcctacaccacgctggagttcgagaacgtccaggtgctcaccatgggcaacgacaccagcccgtccgaggggaccaacctgaacgcccccaacagcctgggcgtgtccgccctctgcgccatctgcggggaccgggcgacgggcaagcactacggggccagctcctgcgacggctgcaagggcttcttccgccggagcgtccgcaagaaccacatgtactcctgccggttcagccgccagtgcgtggtggaccgcgaccggcggaaccagtgccgctactgccggctgaagaagtgcttccgcgccgggatgcgccgcgaggccgtccagaacgagcgggaccgcatctccacccggcgcgcggcctacgaggacagcgcgctgcccagcatcaacgcgctcctgcaggccgaggtgctgtcccggcagatcaccgcgcccgtgtccggcatcaacggggacatccgcgccaagaagatcgccagcatcgccgacgtctgcgagagcatgaaggagcagctcctggtgctggtggagtgggcgaagtacatcccggccttctgcgagctccccctggacgaccaggtcgccctgctccgggcccacgccggcgagcacctcctgctgggggcgaccaagcgctccatggtgttcaaggacgtgctgctgctcggcaacgactacatcgtcccccggcactgccccgagctggccgagatgagccgcgtgtccatccggatcctggacgagctcgtgctgccgttccaggagctgcagatcgacgacaacgagtacgcctacctcaaggccatcatcttcttcgaccccgacgccaagggcctgagcgaccccgggaagatcaagcgcctgcgcgcgcaggtccaggtgagcctcgaggactacatcaacgaccggcagtacgactcccgcggccggttcggggagctgctgctcctgctgcccacgctccagagcatcacctggcagatgatcgagcagatccagttcatcaagctgttcggcatggcgaagatcgacaacctgctccaggagatgctgctgtgaggactagtccctgttcccagagcccacttttttttctttttttgaaataaaatagcctgtctttcagatctcaaaggctcttttcagagccaccaaaaaaaaaaaaaaaaaaaaaaaaaaaaaaaaaaaaaaaaaaaaaaaaaaaaaaaaaaaaaaaaaaaaaaaaaaaaaaaaaaaaaaaaaaaaaaaaaaaaa

SEQ ID NO: 3385 - RNA, 1400 nt, synthetic construct
  misc_feature 1..1400: note = mRNA a-1 (hSL-A100) (opt1) from Homo sapiens__NP_000448.3__HNF4A(1-375)(S142A_S143A_S148A_T166A_ S167A_S313A_S378A_T429A_T432A_S436A_K458R)
  source 1..1400: mol_type = other RNA
aggagagtcccgcagtcggcgtccagcggctctgcttgttcgtgtgtgtgtcgttgcaggccttattcaagcttaccatgcgcctgagcaagaccctcgtggacatggacatggccgactactccgccgcgctggaccccgcctacaccacgctggagttcgagaacgtccaggtgctcaccatgggcaacgacaccagcccgtccgaggggaccaacctgaacgcccccaacagcctgggcgtgtccgccctctgcgccatctgcggggaccgggcgacgggcaagcactacggggccagctcctgcgacggctgcaagggcttcttccgccggagcgtccgcaagaaccacatgtactcctgccggttcagccgccagtgcgtggtggacaaggacaagcggaaccagtgccgctactgccggctgaagaagtgcttccgcgccgggatgaagaaggaggccgtccagaacgagcgggaccgcatctccacccggcgcgcggcctacgaggacagcgcgctgcccagcatcaacgcgctcctgcaggccgaggtgctgtcccggcagatcgcggcgcccgtgtccggcatcaacggggacatccgcgccaagaagatcgccagcatcgccgacgtctgcgagagcatgaaggagcagctcctggtgctggtggagtgggcgaagtacatcccggccttctgcgagctccccctggacgaccaggtcgccctgctccgggcccacgccggcgagcacctcctgctgggggcgaccaagcgctccatggtgttcaaggacgtgctgctgctcggcaacgactacatcgtcccccggcactgccccgagctggccgagatgagccgcgtgtccatccggatcctggacgagctcgtgctgccgttccaggagctgcagatcgacgacaacgagtacgcctacctcaaggccatcatcttcttcgaccccgacgccaagggcctgagcgaccccgggaagatcaagcgcctgcgcgcgcaggtccaggtgagcctcgaggactacatcaacgaccggcagtacgactcccgcggccggttcggggagctgctgctcctgctgcccacgctccagagcatcacctggcagatgatcgagcagatccagttcatcaagctgttcggcatggcgaagatcgacaacctgctccaggagatgctgctgtgaggactagtccctgttcccagagcccacttttttttctttttttgaaataaaatagcctgtctttcagatctcaaaggctcttttcagagccaccaaaaaaaaaaaaaaaaaaaaaaaaaaaaaaaaaaaaaaaaaaaaaaaaaaaaaaaaaaaaaaaaaaaaaaaaaaaaaaaaaaaaaaaaaaaaaaaaaaaaa

SEQ ID NO: 3386 - RNA, 1400 nt, synthetic construct
  misc_feature 1..1400: note = mRNA a-1 (hSL-A100) (opt1) from Homo sapiens__NP_000448.3__HNF4A(1-375)(S87A_S142A_S143A_S148A_T 166A_S167A_S313A_S378A_T429A_T432A_S436A_K458R)
  source 1..1400: mol_type = other RNA
aggagagtcccgcagtcggcgtccagcggctctgcttgttcgtgtgtgtgtcgttgcaggccttattcaagcttaccatgcgcctgagcaagaccctcgtggacatggacatggccgactactccgccgcgctggaccccgcctacaccacgctggagttcgagaacgtccaggtgctcaccatgggcaacgacaccagcccgtccgaggggaccaacctgaacgcccccaacagcctgggcgtgtccgccctctgcgccatctgcggggaccgggcgacgggcaagcactacggggccagctcctgcgacggctgcaagggcttcttccgccgggcggtccgcaagaaccacatgtactcctgccggttcagccgccagtgcgtggtggacaaggacaagcggaaccagtgccgctactgccggctgaagaagtgcttccgcgccgggatgaagaaggaggccgtccagaacgagcgggaccgcatctccacccggcgcgcggcctacgaggacagcgcgctgcccagcatcaacgcgctcctgcaggccgaggtgctgtcccggcagatcgcggcgcccgtgtccggcatcaacggggacatccgcgccaagaagatcgccagcatcgccgacgtctgcgagagcatgaaggagcagctcctggtgctggtggagtgggcgaagtacatcccggccttctgcgagctccccctggacgaccaggtcgccctgctccgggcccacgccggcgagcacctcctgctgggggcgaccaagcgctccatggtgttcaaggacgtgctgctgctcggcaacgactacatcgtcccccggcactgccccgagctggccgagatgagccgcgtgtccatccggatcctggacgagctcgtgctgccgttccaggagctgcagatcgacgacaacgagtacgcctacctcaaggccatcatcttcttcgaccccgacgccaagggcctgagcgaccccgggaagatcaagcgcctgcgcgcgcaggtccaggtgagcctcgaggactacatcaacgaccggcagtacgactcccgcggccggttcggggagctgctgctcctgctgcccacgctccagagcatcacctggcagatgatcgagcagatccagttcatcaagctgttcggcatggcgaagatcgacaacctgctccaggagatgctgctgtgaggactagtccctgttcccagagcccacttttttttctttttttgaaataaaatagcctgtctttcagatctcaaaggctcttttcagagccaccaaaaaaaaaaaaaaaaaaaaaaaaaaaaaaaaaaaaaaaaaaaaaaaaaaaaaaaaaaaaaaaaaaaaaaaaaaaaaaaaaaaaaaaaaaaaaaaaaaaaa

SEQ ID NO: 3387 - RNA, 1400 nt, synthetic construct
  misc_feature 1..1400: note = mRNA a-1 (hSL-A100) (opt1) from Homo sapiens__NP_000448.3__HNF4A(1-375)(S87A_K106R_K108R_K126R_K 127R_S142A_S143A_S148A_T166A_S167A_S313A_S378A_T429A_T432A_ S436A_K458R)
  source 1..1400: mol_type = other RNA
aggagagtcccgcagtcggcgtccagcggctctgcttgttcgtgtgtgtgtcgttgcaggccttattcaagcttaccatgcgcctgagcaagaccctcgtggacatggacatggccgactactccgccgcgctggaccccgcctacaccacgctggagttcgagaacgtccaggtgctcaccatgggcaacgacaccagcccgtccgaggggaccaacctgaacgcccccaacagcctgggcgtgtccgccctctgcgccatctgcggggaccgggcgacgggcaagcactacggggccagctcctgcgacggctgcaagggcttcttccgccgggcggtccgcaagaaccacatgtactcctgccggttcagccgccagtgcgtggtggaccgcgaccggcggaaccagtgccgctactgccggctgaagaagtgcttccgcgccgggatgcgccgcgaggccgtccagaacgagcgggaccgcatctccacccggcgcgcggcctacgaggacagcgcgctgcccagcatcaacgcgctcctgcaggccgaggtgctgtcccggcagatcgcggcgcccgtgtccggcatcaacggggacatccgcgccaagaagatcgccagcatcgccgacgtctgcgagagcatgaaggagcagctcctggtgctggtggagtgggcgaagtacatcccggccttctgcgagctccccctggacgaccaggtcgccctgctccgggcccacgccggcgagcacctcctgctgggggcgaccaagcgctccatggtgttcaaggacgtgctgctgctcggcaacgactacatcgtcccccggcactgccccgagctggccgagatgagccgcgtgtccatccggatcctggacgagctcgtgctgccgttccaggagctgcagatcgacgacaacgagtacgcctacctcaaggccatcatcttcttcgaccccgacgccaagggcctgagcgaccccgggaagatcaagcgcctgcgcgcgcaggtccaggtgagcctcgaggactacatcaacgaccggcagtacgactcccgcggccggttcggggagctgctgctcctgctgcccacgctccagagcatcacctggcagatgatcgagcagatccagttcatcaagctgttcggcatggcgaagatcgacaacctgctccaggagatgctgctgtgaggactagtccctgttcccagagcccacttttttttctttttttgaaataaaatagcctgtctttcagatctcaaaggctcttttcagagccaccaaaaaaaaaaaaaaaaaaaaaaaaaaaaaaaaaaaaaaaaaaaaaaaaaaaaaaaaaaaaaaaaaaaaaaaaaaaaaaaaaaaaaaaaaaaaaaaaaaaaa

SEQ ID NO: 3388 - RNA, 1400 nt, synthetic construct
  misc_feature 1..1400: note = mRNA a-1 (hSL-A100) (opt1) from Homo sapiens__NP_000448.3__HNF4A(1-375)(S87A_K106R_K108R_K126R_K 127R)
  source 1..1400: mol_type = other RNA
aggagagtcccgcagtcggcgtccagcggctctgcttgttcgtgtgtgtgtcgttgcaggccttattcaagcttaccatgcgcctgagcaagaccctcgtggacatggacatggccgactactccgccgcgctggaccccgcctacaccacgctggagttcgagaacgtccaggtgctcaccatgggcaacgacaccagcccgtccgaggggaccaacctgaacgcccccaacagcctgggcgtgtccgccctctgcgccatctgcggggaccgggcgacgggcaagcactacggggccagctcctgcgacggctgcaagggcttcttccgccgggcggtccgcaagaaccacatgtactcctgccggttcagccgccagtgcgtggtggaccgcgaccggcggaaccagtgccgctactgccggctgaagaagtgcttccgcgccgggatgcgccgggaggccgtccagaacgagcgggaccgcatctccacccggcgcagctcctacgaggacagctccctgcccagcatcaacgcgctcctgcaggccgaggtgctgtcccggcagatcaccagccccgtgtccggcatcaacggggacatccgcgccaagaagatcgccagcatcgccgacgtctgcgagagcatgaaggagcagctcctggtgctggtggagtgggcgaagtacatcccggccttctgcgagctccccctggacgaccaggtcgccctgctccgggcccacgccggcgagcacctcctgctgggggcgaccaagcgctccatggtgttcaaggacgtgctgctgctcggcaacgactacatcgtcccccggcactgccccgagctggccgagatgagccgcgtgtccatccggatcctggacgagctcgtgctgccgttccaggagctgcagatcgacgacaacgagtacgcctacctcaaggccatcatcttcttcgaccccgacgccaagggcctgagcgaccccgggaagatcaagcgcctgcgctcccaggtccaggtgagcctcgaggactacatcaacgaccggcagtacgactcccgcggccggttcggggagctgctgctcctgctgcccacgctccagagcatcacctggcagatgatcgagcagatccagttcatcaagctgttcggcatggcgaagatcgacaacctgctccaggagatgctgctgtgaggactagtccctgttcccagagcccacttttttttctttttttgaaataaaatagcctgtctttcagatctcaaaggctcttttcagagccaccaaaaaaaaaaaaaaaaaaaaaaaaaaaaaaaaaaaaaaaaaaaaaaaaaaaaaaaaaaaaaaaaaaaaaaaaaaaaaaaaaaaaaaaaaaaaaaaaaaaaa

SEQ ID NO: 3389 - RNA, 1400 nt, synthetic construct
  misc_feature 1..1400: note = mRNA a-1 (hSL-A100) (opt1) from Homo sapiens__NP_000448.3__HNF4A(1-375)(S87A_K106R_K108R_K126R_K 127R_S142A_S143A_S148A_T166A_S167A_S313A_S378A_T429A_T432A_ S436A_K458R_S461A)
  source 1..1400: mol_type = other RNA
aggagagtcccgcagtcggcgtccagcggctctgcttgttcgtgtgtgtgtcgttgcaggccttattcaagcttaccatgcgcctgagcaagaccctcgtggacatggacatggccgactactccgccgcgctggaccccgcctacaccacgctggagttcgagaacgtccaggtgctcaccatgggcaacgacaccagcccgtccgaggggaccaacctgaacgcccccaacagcctgggcgtgtccgccctctgcgccatctgcggggaccgggcgacgggcaagcactacggggccagctcctgcgacggctgcaagggcttcttccgccgggcggtccgcaagaaccacatgtactcctgccggttcagccgccagtgcgtggtggaccgcgaccggcggaaccagtgccgctactgccggctgaagaagtgcttccgcgccgggatgcgccgggaggccgtccagaacgagcgggaccgcatctccacccggcgcgccgcctacgaggacagcgccctgcccagcatcaacgcgctcctgcaggccgaggtgctgtcccggcagatcgccgcgcccgtgtccggcatcaacggggacatccgcgccaagaagatcgccagcatcgccgacgtctgcgagagcatgaaggagcagctcctggtgctggtggagtgggcgaagtacatcccggccttctgcgagctccccctggacgaccaggtcgccctgctccgggcccacgccggcgagcacctcctgctgggggcgaccaagcgctccatggtgttcaaggacgtgctgctgctcggcaacgactacatcgtcccccggcactgccccgagctggccgagatgagccgcgtgtccatccggatcctggacgagctcgtgctgccgttccaggagctgcagatcgacgacaacgagtacgcctacctcaaggccatcatcttcttcgaccccgacgccaagggcctgagcgaccccgggaagatcaagcgcctgcgcgcccaggtccaggtgagcctcgaggactacatcaacgaccggcagtacgactcccgcggccggttcggggagctgctgctcctgctgcccacgctccagagcatcacctggcagatgatcgagcagatccagttcatcaagctgttcggcatggcgaagatcgacaacctgctccaggagatgctgctgtgaggactagtccctgttcccagagcccacttttttttctttttttgaaataaaatagcctgtctttcagatctcaaaggctcttttcagagccaccaaaaaaaaaaaaaaaaaaaaaaaaaaaaaaaaaaaaaaaaaaaaaaaaaaaaaaaaaaaaaaaaaaaaaaaaaaaaaaaaaaaaaaaaaaaaaaaaaaaaa

SEQ ID NO: 3390 - RNA, 1400 nt, synthetic construct; identical to SEQ ID NO: 3389
  misc_feature 1..1400: note = mRNA a-1 (hSL-A100) (opt1) from Homo sapiens__NP_000448.3__HNF4A(1-375)(S87A_K106R_K108R_K126R_K 127R_S142A_S143A_S148A_T166A_S167A_S313A_S378A_T429A_T432A_ S436A_K458R_S461E)
  source 1..1400: mol_type = other RNA

SEQ ID NO: 3391 - RNA, 1400 nt, synthetic construct
  misc_feature 1..1400: note = mRNA a-1 (hSL-A100) (opt1) from Homo sapiens__NP_000448.3__HNF4A(1-375)(S87A_K106R_K108R_K126R_K 127R_S142A_S143A_S148E_T166A_S167E_S313A_S378E_T429E_T432E_ S436E_K458R_S461E)
  source 1..1400: mol_type = other RNA
aggagagtcccgcagtcggcgtccagcggctctgcttgttcgtgtgtgtgtcgttgcaggccttattcaagcttaccatgcgcctgagcaagaccctcgtggacatggacatggccgactactccgccgcgctggaccccgcctacaccacgctggagttcgagaacgtccaggtgctcaccatgggcaacgacaccagcccgtccgaggggaccaacctgaacgcccccaacagcctgggcgtgtccgccctctgcgccatctgcggggaccgggcgacgggcaagcactacggggccagctcctgcgacggctgcaagggcttcttccgccgggcggtccgcaagaaccacatgtactcctgccggttcagccgccagtgcgtggtggaccgcgaccggcggaaccagtgccgctactgccggctgaagaagtgcttccgcgccgggatgcgccgggaggccgtccagaacgagcgggaccgcatctccacccggcgcgccgcctacgaggacagcgagctgcccagcatcaacgcgctcctgcaggccgaggtgctgtcccggcagatcgccgagcccgtgtccggcatcaacggggacatccgcgccaagaagatcgccagcatcgccgacgtctgcgagagcatgaaggagcagctcctggtgctggtggagtgggcgaagtacatcccggccttctgcgagctccccctggacgaccaggtcgccctgctccgggcccacgccggcgagcacctcctgctgggggcgaccaagcgctccatggtgttcaaggacgtgctgctgctcggcaacgactacatcgtcccccggcactgccccgagctggccgagatgagccgcgtgtccatccggatcctggacgagctcgtgctgccgttccaggagctgcagatcgacgacaacgagtacgcctacctcaaggccatcatcttcttcgaccccgacgccaagggcctgagcgaccccgggaagatcaagcgcctgcgcgcccaggtccaggtgagcctcgaggactacatcaacgaccggcagtacgactcccgcggccggttcggggagctgctgctcctgctgcccacgctccagagcatcacctggcagatgatcgagcagatccagttcatcaagctgttcggcatggcgaagatcgacaacctgctccaggagatgctgctgtgaggactagtccctgttcccagagcccacttttttttctttttttgaaataaaatagcctgtctttcagatctcaaaggctcttttcagagccaccaaaaaaaaaaaaaaaaaaaaaaaaaaaaaaaaaaaaaaaaaaaaaaaaaaaaaaaaaaaaaaaaaaaaaaaaaaaaaaaaaaaaaaaaaaaaaaaaaaaaa

SEQ ID NO: 3392 - RNA, 1400 nt, synthetic construct
  misc_feature 1..1400: note = mRNA a-1 (hSL-A100) (opt1) from Homo sapiens__NP_000448.3__HNF4A(1-375)(S87A_K106R_K108R_K126R_K 127R_S142A_S143A_S148A_T166A_S167A_K179R_K180R_S313A_S378A_ T429A_T432A_S436A_K458R_S461E)
  source 1..1400: mol_type = other RNA
aggagagtcccgcagtcggcgtccagcggctctgcttgttcgtgtgtgtgtcgttgcaggccttattcaagcttaccatgcgcctgagcaagaccctcgtggacatggacatggccgactactccgccgcgctggaccccgcctacaccacgctggagttcgagaacgtccaggtgctcaccatgggcaacgacaccagcccgtccgaggggaccaacctgaacgcccccaacagcctgggcgtgtccgccctctgcgccatctgcggggaccgggcgacgggcaagcactacggggccagctcctgcgacggctgcaagggcttcttccgccgggcggtccgcaagaaccacatgtactcctgccggttcagccgccagtgcgtggtggaccgcgaccggcggaaccagtgccgctactgccggctgaagaagtgcttccgcgccgggatgcgccgggaggccgtccagaacgagcgggaccgcatctccacccggcgcgccgcctacgaggacagcgccctgcccagcatcaacgcgctcctgcaggccgaggtgctgtcccggcagatcgccgcgcccgtgtccggcatcaacggggacatccgcgcccgccggatcgccagcatcgccgacgtctgcgagagcatgaaggagcagctcctggtgctggtggagtgggcgaagtacatcccggccttctgcgagctccccctggacgaccaggtcgccctgctccgggcccacgccggcgagcacctcctgctgggggcgaccaagcgctccatggtgttcaaggacgtgctgctgctcggcaacgactacatcgtcccccggcactgccccgagctggccgagatgagccgcgtgtccatccggatcctggacgagctcgtgctgccgttccaggagctgcagatcgacgacaacgagtacgcctacctcaaggccatcatcttcttcgaccccgacgccaagggcctgagcgaccccgggaagatcaagcgcctgcgcgcccaggtccaggtgagcctcgaggactacatcaacgaccggcagtacgactcccgcggccggttcggggagctgctgctcctgctgcccacgctccagagcatcacctggcagatgatcgagcagatccagttcatcaagctgttcggcatggcgaagatcgacaacctgctccaggagatgctgctgtgaggactagtccctgttcccagagcccacttttttttctttttttgaaataaaatagcctgtctttcagatctcaaaggctcttttcagagccaccaaaaaaaaaaaaaaaaaaaaaaaaaaaaaaaaaaaaaaaaaaaaaaaaaaaaaaaaaaaaaaaaaaaaaaaaaaaaaaaaaaaaaaaaaaaaaaaaaaaaa

SEQ ID NO: 3393 - RNA, 1400 nt, synthetic construct
  misc_feature 1..1400: note = mRNA a-1 (hSL-A100) (opt1) from Homo sapiens__NP_000448.3__HNF4A(1-375)(S87A_K106R_K108R_K126R_K 127R_S142A_S143A_S148A_T166A_S167A_K300R_K307R_K309R_S313A_ S378A_T429A_T432A_S436A_K458R_S461E)
  source 1..1400: mol_type = other RNA
aggagagtcccgcagtcggcgtccagcggctctgcttgttcgtgtgtgtgtcgttgcaggccttattcaagcttaccatgcgcctgagcaagaccctcgtggacatggacatggccgactactccgccgcgctggaccccgcctacaccacgctggagttcgagaacgtccaggtgctcaccatgggcaacgacaccagcccgtccgaggggaccaacctgaacgcccccaacagcctgggcgtgtccgccctctgcgccatctgcggggaccgggcgacgggcaagcactacggggccagctcctgcgacggctgcaagggcttcttccgccgggcggtccgcaagaaccacatgtactcctgccggttcagccgccagtgcgtggtggaccgcgaccggcggaaccagtgccgctactgccggctgaagaagtgcttccgcgccgggatgcgccgggaggccgtccagaacgagcgggaccgcatctccacccggcgcgccgcctacgaggacagcgccctgcccagcatcaacgcgctcctgcaggccgaggtgctgtcccggcagatcgccgcgcccgtgtccggcatcaacggggacatccgcgccaagaagatcgccagcatcgccgacgtctgcgagagcatgaaggagcagctcctggtgctggtggagtgggcgaagtacatcccggccttctgcgagctccccctggacgaccaggtcgccctgctccgggcccacgccggcgagcacctcctgctgggggcgaccaagcgctccatggtgttcaaggacgtgctgctgctcggcaacgactacatcgtcccccggcactgccccgagctggccgagatgagccgcgtgtccatccggatcctggacgagctcgtgctgccgttccaggagctgcagatcgacgacaacgagtacgcctacctcaaggccatcatcttcttcgaccccgacgcccgcggcctgagcgaccccgggcggatccgccgcctgcgcgcccaggtccaggtgagcctcgaggactacatcaacgaccggcagtacgactcccgcggccggttcggggagctgctgctcctgctgcccacgctccagagcatcacctggcagatgatcgagcagatccagttcatcaagctgttcggcatggcgaagatcgacaacctgctccaggagatgctgctgtgaggactagtccctgttcccagagcccacttttttttctttttttgaaataaaatagcctgtctttcagatctcaaaggctcttttcagagccaccaaaaaaaaaaaaaaaaaaaaaaaaaaaaaaaaaaaaaaaaaaaaaaaaaaaaaaaaaaaaaaaaaaaaaaaaaaaaaaaaaaaaaaaaaaaaaaaaaaaaa

SEQ ID NO: 3394 - RNA, 1400 nt, synthetic construct; identical to SEQ ID NO: 3389
  misc_feature 1..1400: note = mRNA a-1 (hSL-A100) (opt1) from Homo sapiens__NP_000448.3__HNF4A(1-375)(S87A_K106R_K108R_K126R_K 127R_S142A_S143A_S148A_T166A_S167A_S313A_S378A_T429A_T432A_ S436A_K447R_K458R_S461E_K470R)
  source 1..1400: mol_type = other RNA

SEQ ID NO: 3395 - RNA, 1400 nt, synthetic construct
  misc_feature 1..1400: note = mRNA a-1 (hSL-A100) (opt1) from Homo sapiens__NP_000448.3__HNF4A(1-375)(S87A_K106R_K108R_K126R_K 127R_S142A_S143A_S148A_T166A_S167A_K179R_K180R_K234R_K300R_ K307R_K309R_S313A_S378A_T429A_T432A_S436A_K447R_K458R_S461E _K470R)
  source 1..1400: mol_type = other RNA
aggagagtcccgcagtcggcgtccagcggctctgcttgttcgtgtgtgtgtcgttgcaggccttattcaagcttaccatgcgcctgagcaagaccctcgtggacatggacatggccgactactccgccgcgctggaccccgcctacaccacgctggagttcgagaacgtccaggtgctcaccatgggcaacgacaccagcccgtccgaggggaccaacctgaacgcccccaacagcctgggcgtgtccgccctctgcgccatctgcggggaccgggcgacgggcaagcactacggggccagctcctgcgacggctgcaagggcttcttccgccgggcggtccgcaagaaccacatgtactcctgccggttcagccgccagtgcgtggtggaccgcgaccggcggaaccagtgccgctactgccggctgaagaagtgcttccgcgccgggatgcgccgggaggccgtccagaacgagcgggaccgcatctccacccggcgcgccgcctacgaggacagcgccctgcccagcatcaacgcgctcctgcaggccgaggtgctgtcccggcagatcgccgcgcccgtgtccggcatcaacggggacatccgcgcccgccggatcgccagcatcgccgacgtctgcgagagcatgaaggagcagctcctggtgctggtggagtgggcgaagtacatcccggccttctgcgagctccccctggacgaccaggtcgccctgctccgggcccacgccggcgagcacctcctgctgggggcgacccggcgctccatggtgttcaaggacgtgctgctgctcggcaacgactacatcgtcccccggcactgccccgagctggccgagatgagccgcgtgtccatccggatcctggacgagctcgtgctgccgttccaggagctgcagatcgacgacaacgagtacgcctacctcaaggccatcatcttcttcgaccccgacgcccgcggcctgagcgaccccgggcggatccgccgcctgcgcgcccaggtccaggtgagcctcgaggactacatcaacgaccggcagtacgactcccgcggccggttcggggagctgctgctcctgctgcccacgctccagagcatcacctggcagatgatcgagcagatccagttcatcaagctgttcggcatggcgaagatcgacaacctgctccaggagatgctgctgtgaggactagtccctgttcccagagcccacttttttttctttttttgaaataaaatagcctgtctttcagatctcaaaggctcttttcagagccaccaaaaaaaaaaaaaaaaaaaaaaaaaaaaaaaaaaaaaaaaaaaaaaaaaaaaaaaaaaaaaaaaaaaaaaaaaaaaaaaaaaaaaaaaaaaaaaaaaaaaa

SEQ ID NO: 3396 - RNA, 1400 nt, synthetic construct
  misc_feature 1..1400: note = mRNA a-1 (hSL-A100) (opt1) from Homo sapiens__NP_000448.3__HNF4A(1-375)(S87A_S95A_S99A_K106R_K10 8R_K126R_K127R_S142A_S143A_S148A_T166A_S167A_S313A_S378A_T4 29A_T432A_S436A_K458R_S461E)
  source 1..1400: mol_type = other RNA
aggagagtcccgcagtcggcgtccagcggctctgcttgttcgtgtgtgtgtcgttgcaggccttattcaagcttaccatgcgcctgagcaagaccctcgtggacatggacatggccgactactccgccgcgctggaccccgcctacaccacgctggagttcgagaacgtccaggtgctcaccatgggcaacgacaccagcccgtccgaggggaccaacctgaacgcccccaacagcctgggcgtgtccgccctctgcgccatctgcggggaccgggcgacgggcaagcactacggggccagctcctgcgacggctgcaagggcttcttccgccgggcggtccgcaagaaccacatgtacgcctgccggttcgcccgccagtgcgtggtggaccgcgaccggcggaaccagtgccgctactgccggctgaagaagtgcttccgcgccgggatgcgccgggaggccgtccagaacgagcgggaccgcatctccacccggcgcgccgcctacgaggacagcgccctgcccagcatcaacgcgctcctgcaggccgaggtgctgtcccggcagatcgccgcgcccgtgtccggcatcaacggggacatccgcgccaagaagatcgccagcatcgccgacgtctgcgagagcatgaaggagcagctcctggtgctggtggagtgggcgaagtacatcccggccttctgcgagctccccctggacgaccaggtcgccctgctccgggcccacgccggcgagcacctcctgctgggggcgaccaagcgctccatggtgttcaaggacgtgctgctgctcggcaacgactacatcgtcccccggcactgccccgagctggccgagatgagccgcgtgtccatccggatcctggacgagctcgtgctgccgttccaggagctgcagatcgacgacaacgagtacgcctacctcaaggccatcatcttcttcgaccccgacgccaagggcctgagcgaccccgggaagatcaagcgcctgcgcgcccaggtccaggtgagcctcgaggactacatcaacgaccggcagtacgactcccgcggccggttcggggagctgctgctcctgctgcccacgctccagagcatcacctggcagatgatcgagcagatccagttcatcaagctgttcggcatggcgaagatcgacaacctgctccaggagatgctgctgtgaggactagtccctgttcccagagcccacttttttttctttttttgaaataaaatagcctgtctttcagatctcaaaggctcttttcagagccaccaaaaaaaaaaaaaaaaaaaaaaaaaaaaaaaaaaaaaaaaaaaaaaaaaaaaaaaaaaaaaaaaaaaaaaaaaaaaaaaaaaaaaaaaaaaaaaaaaaaaa

SEQ ID NO: 3397 - RNA, 1400 nt, synthetic construct
  misc_feature 1..1400: note = mRNA a-1 (hSL-A100) (opt1) from Homo sapiens__NP_000448.3__HNF4A(1-375)(S87A_K106R_K108R_K126R_K 127R_S138A_T139A_S142A_S143A_S148A_T166A_S167A_S313A_S378A_ T429A_T432A_S436A_K458R_S461E)
  source 1..1400: mol_type = other RNA
aggagagtcccgcagtcggcgtccagcggctctgcttgttcgtgtgtgtgtcgttgcaggccttattcaagcttaccatgcgcctgagcaagaccctcgtggacatggacatggccgactactccgccgcgctggaccccgcctacaccacgctggagttcgagaacgtccaggtgctcaccatgggcaacgacaccagcccgtccgaggggaccaacctgaacgcccccaacagcctgggcgtgtccgccctctgcgccatctgcggggaccgggcgacgggcaagcactacggggccagctcctgcgacggctgcaagggcttcttccgccgggcggtccgcaagaaccacatgtactcctgccggttcagccgccagtgcgtggtggaccgcgaccggcggaaccagtgccgctactgccggctgaagaagtgcttccgcgccgggatgcgccgggaggccgtccagaacgagcgggaccgcatcgccgcccggcgcgccgcctacgaggacagcgccctgcccagcatcaacgcgctcctgcaggccgaggtgctgtcccggcagatcgccgcgcccgtgtccggcatcaacggggacatccgcgccaagaagatcgccagcatcgccgacgtctgcgagagcatgaaggagcagctcctggtgctggtggagtgggcgaagtacatcccggccttctgcgagctccccctggacgaccaggtcgccctgctccgggcccacgccggcgagcacctcctgctgggggcgaccaagcgctccatggtgttcaaggacgtgctgctgctcggcaacgactacatcgtcccccggcactgccccgagctggccgagatgagccgcgtgtccatccggatcctggacgagctcgtgctgccgttccaggagctgcagatcgacgacaacgagtacgcctacctcaaggccatcatcttcttcgaccccgacgccaagggcctgagcgaccccgggaagatcaagcgcctgcgcgcccaggtccaggtgagcctcgaggactacatcaacgaccggcagtacgactcccgcggccggttcggggagctgctgctcctgctgcccacgctccagagcatcacctggcagatgatcgagcagatccagttcatcaagctgttcggcatggcgaagatcgacaacctgctccaggagatgctgctgtgaggactagtccctgttcccagagcccacttttttttctttttttgaaataaaatagcctgtctttcagatctcaaaggctcttttcagagccaccaaaaaaaaaaaaaaaaaaaaaaaaaaaaaaaaaaaaaaaaaaaaaaaaaaaaaaaaaaaaaaaaaaaaaaaaaaaaaaaaaaaaaaaaaaaaaaaaaaaaa

SEQ ID NO: 3398 - RNA, 1400 nt, synthetic construct
  misc_feature 1..1400: note = mRNA a-1 (hSL-A100) (opt1) from Homo sapiens__NP_000448.3__HNF4A(1-375)(S87A_S95A_S99A_K106R_K10 8R_K126R_K127R_S138A_T139A_S142A_S143A_S148A_T166A_S167A_S3 13A_S378A_T429A_T432A_S436A_K458R_S461E)
  source 1..1400: mol_type = other RNA
aggagagtcccgcagtcggcgtccagcggctctgcttgttcgtgtgtgtgtcgttgcaggccttattcaagcttaccatgcgcctgagcaagaccctcgtggacatggacatggccgactactccgccgcgctggaccccgcctacaccacgctggagttcgagaacgtccaggtgctcaccatgggcaacgacaccagcccgtccgaggggaccaacctgaacgcccccaacagcctgggcgtgtccgccctctgcgccatctgcggggaccgggcgacgggcaagcactacggggccagctcctgcgacggctgcaagggcttcttccgccgggcggtccgcaagaaccacatgtacgcctgccggttcgcccgccagtgcgtggtggaccgcgaccggcggaaccagtgccgctactgccggctgaagaagtgcttccgcgccgggatgcgccgggaggccgtccagaacgagcgggaccgcatcgccgcccggcgcgccgcctacgaggacagcgccctgcccagcatcaacgcgctcctgcaggccgaggtgctgtcccggcagatcgccgcgcccgtgtccggcatcaacggggacatccgcgccaagaagatcgccagcatcgccgacgtctgcgagagcatgaaggagcagctcctggtgctggtggagtgggcgaagtacatcccggccttctgcgagctccccctggacgaccaggtcgccctgctccgggcccacgccggcgagcacctcctgctgggggcgaccaagcgctccatggtgttcaaggacgtgctgctgctcggcaacgactacatcgtcccccggcactgccccgagctggccgagatgagccgcgtgtccatccggatcctggacgagctcgtgctgccgttccaggagctgcagatcgacgacaacgagtacgcctacctcaaggccatcatcttcttcgaccccgacgccaagggcctgagcgaccccgggaagatcaagcgcctgcgcgcccaggtccaggtgagcctcgaggactacatcaacgaccggcagtacgactcccgcggccggttcggggagctgctgctcctgctgcccacgctccagagcatcacctggcagatgatcgagcagatccagttcatcaagctgttcggcatggcgaagatcgacaacctgctccaggagatgctgctgtgaggactagtccctgttcccagagcccacttttttttctttttttgaaataaaatagcctgtctttcagatctcaaaggctcttttcagagccaccaaaaaaaaaaaaaaaaaaaaaaaaaaaaaaaaaaaaaaaaaaaaaaaaaaaaaaaaaaaaaaaaaaaaaaaaaaaaaaaaaaaaaaaaaaaaaaaaaaaaa

SEQ ID NO: 3399 - RNA, 1400 nt, synthetic construct; identical to SEQ ID NO: 3350
  misc_feature 1..1400: note = mRNA a-1 (hSL-A100) (opt1) from Homo sapiens__NP_000448.3__HNF4A(1-375)
  source 1..1400: mol_type = other RNA

SEQ ID NO: 3400 - RNA, 1400 nt, synthetic construct
  misc_feature 1..1400: note = mRNA a-1 (hSL-A100) (opt1) from Homo sapiens__NP_000448.3__HNF4A(1-375)(S313A)
  source 1..1400: mol_type = other RNA
aggagagtcccgcagtcggcgtccagcggctctgcttgttcgtgtgtgtgtcgttgcaggccttattcaagcttaccatgcgcctgagcaagaccctcgtggacatggacatggccgactactccgccgcgctggaccccgcctacaccacgctggagttcgagaacgtccaggtgctcaccatgggcaacgacaccagcccgtccgaggggaccaacctgaacgcccccaacagcctgggcgtgtccgccctctgcgccatctgcggggaccgggcgacgggcaagcactacggggccagctcctgcgacggctgcaagggcttcttccgccggagcgtccgcaagaaccacatgtactcctgccggttcagccgccagtgcgtggtggacaaggacaagcggaaccagtgccgctactgccggctgaagaagtgcttccgcgccgggatgaagaaggaggccgtccagaacgagcgggaccgcatctccacccggcgcagctcctacgaggacagctccctgcccagcatcaacgcgctcctgcaggccgaggtgctgtcccggcagatcaccagccccgtgtccggcatcaacggggacatccgcgccaagaagatcgccagcatcgccgacgtctgcgagagcatgaaggagcagctcctggtgctggtggagtgggcgaagtacatcccggccttctgcgagctccccctggacgaccaggtcgccctgctccgggcccacgccggcgagcacctcctgctgggggcgaccaagcgctccatggtgttcaaggacgtgctgctgctcggcaacgactacatcgtcccccggcactgccccgagctggccgagatgagccgcgtgtccatccggatcctggacgagctcgtgctgccgttccaggagctgcagatcgacgacaacgagtacgcctacctcaaggccatcatcttcttcgaccccgacgccaagggcctgagcgaccccgggaagatcaagcgcctgcgcgcgcaggtccaggtgtccctcgaggactacatcaacgaccggcagtacgacagccgcggccggttcggggagctgctgctcctgctgcccacgctccagtccatcacctggcagatgatcgagcagatccagttcatcaagctgttcggcatggccaagatcgacaacctgctccaggagatgctgctgtgaggactagtccctgttcccagagcccacttttttttctttttttgaaataaaatagcctgtctttcagatctcaaaggctcttttcagagccaccaaaaaaaaaaaaaaaaaaaaaaaaaaaaaaaaaaaaaaaaaaaaaaaaaaaaaaaaaaaaaaaaaaaaaaaaaaaaaaaaaaaaaaaaaaaaaaaaaaaaa

SEQ ID NO: 3401 - RNA, 1400 nt, synthetic construct
  misc_feature 1..1400: note = mRNA a-1 (hSL-A100) (opt1) from Homo sapiens__NP_000448.3__HNF4A(1-375)(S313E)
  source 1..1400: mol_type = other RNA
aggagagtcccgcagtcggcgtccagcggctctgcttgttcgtgtgtgtgtcgttgcaggccttattcaagcttaccatgcgcctgagcaagaccctcgtggacatggacatggccgactactccgccgcgctggaccccgcctacaccacgctggagttcgagaacgtccaggtgctcaccatgggcaacgacaccagcccgtccgaggggaccaacctgaacgcccccaacagcctgggcgtgtccgccctctgcgccatctgcggggaccgggcgacgggcaagcactacggggccagctcctgcgacggctgcaagggcttcttccgccggagcgtccgcaagaaccacatgtactcctgccggttcagccgccagtgcgtggtggacaaggacaagcggaaccagtgccgctactgccggctgaagaagtgcttccgcgccgggatgaagaaggaggccgtccagaacgagcgggaccgcatctccacccggcgcagctcctacgaggacagctccctgcccagcatcaacgcgctcctgcaggccgaggtgctgtcccggcagatcaccagccccgtgtccggcatcaacggggacatccgcgccaagaagatcgccagcatcgccgacgtctgcgagagcatgaaggagcagctcctggtgctggtggagtgggcgaagtacatcccggccttctgcgagctccccctggacgaccaggtcgccctgctccgggcccacgccggcgagcacctcctgctgggggcgaccaagcgctccatggtgttcaaggacgtgctgctgctcggcaacgactacatcgtcccccggcactgccccgagctggccgagatgagccgcgtgtccatccggatcctggacgagctcgtgctgccgttccaggagctgcagatcgacgacaacgagtacgcctacctcaaggccatcatcttcttcgaccccgacgccaagggcctgagcgaccccgggaagatcaagcgcctgcgcgagcaggtccaggtgtccctcgaggactacatcaacgaccggcagtacgacagccgcggccggttcggggagctgctgctcctgctgcccacgctccagtccatcacctggcagatgatcgagcagatccagttcatcaagctgttcggcatggcgaagatcgacaacctgctccaggagatgctgctgtgaggactagtccctgttcccagagcccacttttttttctttttttgaaataaaatagcctgtctttcagatctcaaaggctcttttcagagccaccaaaaaaaaaaaaaaaaaaaaaaaaaaaaaaaaaaaaaaaaaaaaaaaaaaaaaaaaaaaaaaaaaaaaaaaaaaaaaaaaaaaaaaaaaaaaaaaaaaaaa

SEQ ID NO: 3402 - RNA, 1400 nt, synthetic construct
  misc_feature 1..1400: note = mRNA a-1 (hSL-A100) (opt1) from Homo sapiens__NP_000448.3__HNF4A(1-375)(S142A_S143A)
  source 1..1400: mol_type = other RNA
aggagagtcccgcagtcggcgtccagcggctctgcttgttcgtgtgtgtgtcgttgcaggccttattcaagcttaccatgcgcctgagcaagaccctcgtggacatggacatggccgactactccgccgcgctggaccccgcctacaccacgctggagttcgagaacgtccaggtgctcaccatgggcaacgacaccagcccgtccgaggggaccaacctgaacgcccccaacagcctgggcgtgtccgccctctgcgccatctgcggggaccgggcgacgggcaagcactacggggccagctcctgcgacggctgcaagggcttcttccgccggagcgtccgcaagaaccacatgtactcctgccggttcagccgccagtgcgtggtggacaaggacaagcggaaccagtgccgctactgccggctgaagaagtgcttccgcgccgggatgaagaaggaggccgtccagaacgagcgggaccgcatctccacccggcgcgcggcctacgaggacagctccctgcccagcatcaacgccctcctgcaggccgaggtgctgtcccggcagatcaccagccccgtgtccggcatcaacggggacatccgcgccaagaagatcgcgagcatcgccgacgtctgcgagtccatgaaggagcagctcctggtgctggtggagtgggccaagtacatcccggccttctgcgagctccccctggacgaccaggtcgccctgctccgggcgcacgccggcgagcacctcctgctgggggccaccaagcgcagcatggtgttcaaggacgtgctgctgctcggcaacgactacatcgtcccccggcactgccccgagctggccgagatgagccgcgtgtccatccggatcctggacgagctcgtgctgccgttccaggagctgcagatcgacgacaacgagtacgcctacctcaaggcgatcatcttcttcgaccccgacgccaagggcctgagcgaccccgggaagatcaagcgcctgcgctcccaggtccaggtgagcctcgaggactacatcaacgaccggcagtacgactcccgcggccggttcggggagctgctgctcctgctgcccacgctccagagcatcacctggcagatgatcgagcagatccagttcatcaagctgttcggcatggccaagatcgacaacctgctccaggagatgctgctgtgaggactagtccctgttcccagagcccacttttttttctttttttgaaataaaatagcctgtctttcagatctcaaaggctcttttcagagccaccaaaaaaaaaaaaaaaaaaaaaaaaaaaaaaaaaaaaaaaaaaaaaaaaaaaaaaaaaaaaaaaaaaaaaaaaaaaaaaaaaaaaaaaaaaaaaaaaaaaaa

SEQ ID NO: 3403 - RNA, 1400 nt, synthetic construct
  misc_feature 1..1400: note = mRNA a-1 (hSL-A100) (opt1) from Homo sapiens__NP_000448.3__HNF4A(1-375)(S142E_S143E)
  source 1..1400: mol_type = other RNA
aggagagtcccgcagtcggcgtccagcggctctgcttgttcgtgtgtgtgtcgttgcaggccttattcaagcttaccatgcgcctgagcaagaccctcgtggacatggacatggccgactactccgccgcgctggaccccgcctacaccacgctggagttcgagaacgtccaggtgctcaccatgggcaacgacaccagcccgtccgaggggaccaacctgaacgcccccaacagcctgggcgtgtccgccctctgcgccatctgcggggaccgggcgacgggcaagcactacggggccagctcctgcgacggctgcaagggcttcttccgccggagcgtccgcaagaaccacatgtactcctgccggttcagccgccagtgcgtggtggacaaggacaagcggaaccagtgccgctactgccggctgaagaagtgcttccgcgccgggatgaagaaggaggccgtccagaacgagcgggaccgcatctccacccggcgcgaggagtacgaggacagctccctgcccagcatcaacgcgctcctgcaggccgaggtgctgtcccggcagatcaccagccccgtgtccggcatcaacggggacatccgcgccaagaagatcgccagcatcgccgacgtctgcgagtccatgaaggagcagctcctggtgctggtggagtgggcgaagtacatcccggccttctgcgagctccccctggacgaccaggtcgccctgctccgggcccacgccggcgagcacctcctgctgggggcgaccaagcgcagcatggtgttcaaggacgtgctgctgctcggcaacgactacatcgtcccccggcactgccccgagctggccgagatgagccgcgtgtccatccggatcctggacgagctcgtgctgccgttccaggagctgcagatcgacgacaacgagtacgcctacctcaaggccatcatcttcttcgaccccgacgccaagggcctgagcgaccccgggaagatcaagcgcctgcgctcccaggtccaggtgagcctcgaggactacatcaacgaccggcagtacgactcccgcggccggttcggggagctgctgctcctgctgcccacgctccagagcatcacctggcagatgatcgagcagatccagttcatcaagctgttcggcatggcgaagatcgacaacctgctccaggagatgctgctgtgaggactagtccctgttcccagagcccacttttttttctttttttgaaataaaatagcctgtctttcagatctcaaaggctcttttcagagccaccaaaaaaaaaaaaaaaaaaaaaaaaaaaaaaaaaaaaaaaaaaaaaaaaaaaaaaaaaaaaaaaaaaaaaaaaaaaaaaaaaaaaaaaaaaaaaaaaaaaaa

SEQ ID NO: 3404 - RNA, 1400 nt, synthetic construct
  misc_feature 1..1400: note = mRNA a-1 (hSL-A100) (opt1) from Homo sapiens__NP_000448.3__HNF4A(1-375)(S143A)
  source 1..1400: mol_type = other RNA
aggagagtcccgcagtcggcgtccagcggctctgcttgttcgtgtgtgtgtcgttgcaggccttattcaagcttaccatgcgcctgagcaagaccctcgtggacatggacatggccgactactccgccgcgctggaccccgcctacaccacgctggagttcgagaacgtccaggtgctcaccatgggcaacgacaccagcccgtccgaggggaccaacctgaacgcccccaacagcctgggcgtgtccgccctctgcgccatctgcggggaccgggcgacgggcaagcactacggggccagctcctgcgacggctgcaagggcttcttccgccggagcgtccgcaagaaccacatgtactcctgccggttcagccgccagtgcgtggtggacaaggacaagcggaaccagtgccgctactgccggctgaagaagtgcttccgcgccgggatgaagaaggaggccgtccagaacgagcgggaccgcatctccacccggcgcagcgcgtacgaggactccagcctgccctccatcaacgccctcctgcaggccgaggtgctgagccggcagatcacctcccccgtgagcggcatcaacggggacatccgcgccaagaagatcgcctccatcgcggacgtctgcgagagcatgaaggagcagctcctggtgctggtggagtgggccaagtacatcccggccttctgcgagctccccctggacgaccaggtcgccctgctccgggcccacgcgggcgagcacctcctgctgggggccaccaagcgcagcatggtgttcaaggacgtgctgctgctcggcaacgactacatcgtcccccggcactgccccgagctggccgagatgtcccgcgtgagcatccggatcctggacgagctcgtgctgccgttccaggagctgcagatcgacgacaacgagtacgcctacctcaaggccatcatcttcttcgaccccgacgcgaagggcctgtccgaccccgggaagatcaagcgcctgcgcagccaggtccaggtgtccctcgaggactacatcaacgaccggcagtacgacagccgcggccggttcggggagctgctgctcctgctgcccacgctccagtccatcacctggcagatgatcgagcagatccagttcatcaagctgttcggcatggccaagatcgacaacctgctccaggagatgctgctgtgaggactagtccctgttcccagagcccacttttttttctttttttgaaataaaatagcctgtctttcagatctcaaaggctcttttcagagccaccaaaaaaaaaaaaaaaaaaaaaaaaaaaaaaaaaaaaaaaaaaaaaaaaaaaaaaaaaaaaaaaaaaaaaaaaaaaaaaaaaaaaaaaaaaaaaaaaaaaaa

SEQ ID NO: 3405 - RNA, 1400 nt, synthetic construct
  misc_feature 1..1400: note = mRNA a-1 (hSL-A100) (opt1) from Homo sapiens__NP_000448.3__HNF4A(1-375)(T166A)
  source 1..1400: mol_type = other RNA
aggagagtcccgcagtcggcgtccagcggctctgcttgttcgtgtgtgtgtcgttgcaggccttattcaagcttaccatgcgcctgagcaagaccctcgtggacatggacatggccgactactccgccgcgctggaccccgcctacaccacgctggagttcgagaacgtccaggtgctcaccatgggcaacgacaccagcccgtccgaggggaccaacctgaacgcccccaacagcctgggcgtgtccgccctctgcgccatctgcggggaccgggcgacgggcaagcactacggggccagctcctgcgacggctgcaagggcttcttccgccggagcgtccgcaagaaccacatgtactcctgccggttcagccgccagtgcgtggtggacaaggacaagcggaaccagtgccgctactgccggctgaagaagtgcttccgcgccgggatgaagaaggaggccgtccagaacgagcgggaccgcatctccacccggcgcagctcctacgaggacagctccctgcccagcatcaacgcgctcctgcaggccgaggtgctgtcccggcagatcgccagccccgtgtccggcatcaacggggacatccgcgccaagaagatcgccagcatcgcggacgtctgcgagagcatgaaggagcagctcctggtgctggtggagtgggccaagtacatcccggccttctgcgagctccccctggacgaccaggtcgccctgctccgggcccacgcgggcgagcacctcctgctgggggccaccaagcgctccatggtgttcaaggacgtgctgctgctcggcaacgactacatcgtcccccggcactgccccgagctggccgagatgagccgcgtgtccatccggatcctggacgagctcgtgctgccgttccaggagctgcagatcgacgacaacgagtacgcctacctcaaggccatcatcttcttcgaccccgacgcgaagggcctgagcgaccccgggaagatcaagcgcctgcgctcccaggtccaggtgagcctcgaggactacatcaacgaccggcagtacgactcccgcggccggttcggggagctgctgctcctgctgcccaccctccagagcatcacgtggcagatgatcgagcagatccagttcatcaagctgttcggcatggccaagatcgacaacctgctccaggagatgctgctgtgaggactagtccctgttcccagagcccacttttttttctttttttgaaataaaatagcctgtctttcagatctcaaaggctcttttcagagccaccaaaaaaaaaaaaaaaaaaaaaaaaaaaaaaaaaaaaaaaaaaaaaaaaaaaaaaaaaaaaaaaaaaaaaaaaaaaaaaaaaaaaaaaaaaaaaaaaaaaaa

SEQ ID NO: 3406 - RNA, 1400 nt, synthetic construct
  misc_feature 1..1400: note = mRNA a-1 (hSL-A100) (opt1) from Homo sapiens__NP_000448.3__HNF4A(1-375)(S167E)
  source 1..1400: mol_type = other RNA
aggagagtcccgcagtcggcgtccagcggctctgcttgttcgtgtgtgtgtcgttgcaggccttattcaagcttaccatgcgcctgagcaagaccctcgtggacatggacatggccgactactccgccgcgctggaccccgcctacaccacgctggagttcgagaacgtccaggtgctcaccatgggcaacgacaccagcccgtccgaggggaccaacctgaacgcccccaacagcctgggcgtgtccgccctctgcgccatctgcggggaccgggcgacgggcaagcactacggggccagctcctgcgacggctgcaagggcttcttccgccggagcgtccgcaagaaccacatgtactcctgccggttcagccgccagtgcgtggtggacaaggacaagcggaaccagtgccgctactgccggctgaagaagtgcttccgcgccgggatgaagaaggaggccgtccagaacgagcgggaccgcatctccacccggcgcagctcctacgaggacagctccctgcccagcatcaacgcgctcctgcaggccgaggtgctgtcccggcagatcaccgagcccgtgagcggcatcaacggggacatccgcgccaagaagatcgcctccatcgccgacgtctgcgagagcatgaaggagcagctcctggtgctggtggagtgggcgaagtacatcccggccttctgcgagctccccctggacgaccaggtcgccctgctccgggcccacgccggcgagcacctcctgctgggggcgaccaagcgcagcatggtgttcaaggacgtgctgctgctcggcaacgactacatcgtcccccggcactgccccgagctggccgagatgtcccgcgtgagcatccggatcctggacgagctcgtgctgccgttccaggagctgcagatcgacgacaacgagtacgcctacctcaaggccatcatcttcttcgaccccgacgccaagggcctgtccgaccccgggaagatcaagcgcctgcgcagccaggtccaggtgtccctcgaggactacatcaacgaccggcagtacgacagccgcggccggttcggggagctgctgctcctgctgcccacgctccagtccatcacctggcagatgatcgagcagatccagttcatcaagctgttcggcatggcgaagatcgacaacctgctccaggagatgctgctgtgaggactagtccctgttcccagagcccacttttttttctttttttgaaataaaatagcctgtctttcagatctcaaaggctcttttcagagccaccaaaaaaaaaaaaaaaaaaaaaaaaaaaaaaaaaaaaaaaaaaaaaaaaaaaaaaaaaaaaaaaaaaaaaaaaaaaaaaaaaaaaaaaaaaaaaaaaaaaaa

SEQ ID NO: 3407 - RNA, 1400 nt, synthetic construct
  misc_feature 1..1400: note = mRNA a-1 (hSL-A100) (opt1) from Homo sapiens__NP_000448.3__HNF4A(1-375)(S167A)
  source 1..1400: mol_type = other RNA
aggagagtcccgcagtcggcgtccagcggctctgcttgttcgtgtgtgtgtcgttgcaggccttattcaagcttaccatgcgcctgagcaagaccctcgtggacatggacatggccgactactccgccgcgctggaccccgcctacaccacgctggagttcgagaacgtccaggtgctcaccatgggcaacgacaccagcccgtccgaggggaccaacctgaacgcccccaacagcctgggcgtgtccgccctctgcgccatctgcggggaccgggcgacgggcaagcactacggggccagctcctgcgacggctgcaagggcttcttccgccggagcgtccgcaagaaccacatgtactcctgccggttcagccgccagtgcgtggtggacaaggacaagcggaaccagtgccgctactgccggctgaagaagtgcttccgcgccgggatgaagaaggaggccgtccagaacgagcgggaccgcatctccacccggcgcagctcctacgaggacagctccctgcccagcatcaacgcgctcctgcaggccgaggtgctgtcccggcagatcaccgcccccgtgagcggcatcaacggggacatccgcgccaagaagatcgcctccatcgcggacgtctgcgagagcatgaaggagcagctcctggtgctggtggagtgggccaagtacatcccggccttctgcgagctccccctggacgaccaggtcgccctgctccgggcccacgcgggcgagcacctcctgctgggggccaccaagcgcagcatggtgttcaaggacgtgctgctgctcggcaacgactacatcgtcccccggcactgccccgagctggccgagatgtcccgcgtgagcatccggatcctggacgagctcgtgctgccgttccaggagctgcagatcgacgacaacgagtacgcctacctcaaggccatcatcttcttcgaccccgacgcgaagggcctgtccgaccccgggaagatcaagcgcctgcgcagccaggtccaggtgtccctcgaggactacatcaacgaccggcagtacgacagccgcggccggttcggggagctgctgctcctgctgcccacgctccagtccatcacctggcagatgatcgagcagatccagttcatcaagctgttcggcatggccaagatcgacaacctgctccaggagatgctgctgtgaggactagtccctgttcccagagcccacttttttttctttttttgaaataaaatagcctgtctttcagatctcaaaggctcttttcagagccaccaaaaaaaaaaaaaaaaaaaaaaaaaaaaaaaaaaaaaaaaaaaaaaaaaaaaaaaaaaaaaaaaaaaaaaaaaaaaaaaaaaaaaaaaaaaaaaaaaaaaa

SEQ ID NO: 3408 - RNA, 1400 nt, synthetic construct; identical to SEQ ID NO: 3407
  misc_feature 1..1400: note = mRNA a-1 (hSL-A100) (opt1) from Homo sapiens__NP_000448.3__HNF4A(1-375)(S167A_S378A_T429A_T432A_ S436A)
  source 1..1400: mol_type = other RNA

SEQ ID NO: 3409 - RNA, 1400 nt, synthetic construct; identical to SEQ ID NO: 3406
  misc_feature 1..1400: note = mRNA a-1 (hSL-A100) (opt1) from Homo sapiens__NP_000448.3__HNF4A(1-375)(S167E_S378E_T429E_T432E_ S436E)
  source 1..1400: mol_type = other RNA

SEQ ID NO: 3410 - RNA, 1400 nt, synthetic construct
  misc_feature 1..1400: note = mRNA a-1 (hSL-A100) (opt1) from Homo sapiens__NP_000448.3__HNF4A(1-375)(S87A)
  source 1..1400: mol_type = other RNA
aggagagtcccgcagtcggcgtccagcggctctgcttgttcgtgtgtgtgtcgttgcaggccttattcaagcttaccatgcgcctgagcaagaccctcgtggacatggacatggccgactactccgccgcgctggaccccgcctacaccacgctggagttcgagaacgtccaggtgctcaccatgggcaacgacaccagcccgtccgaggggaccaacctgaacgcccccaacagcctgggcgtgtccgccctctgcgccatctgcggggaccgggcgacgggcaagcactacggggccagctcctgcgacggctgcaagggcttcttccgccgggccgtccgcaagaaccacatgtacagctgccggttctcccgccagtgcgtggtggacaaggacaagcggaaccagtgccgctactgccggctgaagaagtgcttccgcgccgggatgaagaaggaggcggtccagaacgagcgggaccgcatcagcacccggcgctccagctacgaggactccagcctgccctccatcaacgccctcctgcaggccgaggtgctgagccggcagatcacctcccccgtgagcggcatcaacggggacatccgcgccaagaagatcgcctccatcgcggacgtctgcgagagcatgaaggagcagctcctggtgctggtggagtgggccaagtacatcccggccttctgcgagctccccctggacgaccaggtcgccctgctccgggcccacgcgggcgagcacctcctgctgggggccaccaagcgcagcatggtgttcaaggacgtgctgctgctcggcaacgactacatcgtcccccggcactgccccgagctggccgagatgtcccgcgtgagcatccggatcctggacgagctcgtgctgccgttccaggagctgcagatcgacgacaacgagtacgcctacctcaaggccatcatcttcttcgaccccgacgcgaagggcctgtccgaccccgggaagatcaagcgcctgcgcagccaggtccaggtgtccctcgaggactacatcaacgaccggcagtacgacagccgcggccggttcggggagctgctgctcctgctgcccacgctccagtccatcacctggcagatgatcgagcagatccagttcatcaagctgttcggcatggccaagatcgacaacctgctccaggagatgctgctgtgaggactagtccctgttcccagagcccacttttttttctttttttgaaataaaatagcctgtctttcagatctcaaaggctcttttcagagccaccaaaaaaaaaaaaaaaaaaaaaaaaaaaaaaaaaaaaaaaaaaaaaaaaaaaaaaaaaaaaaaaaaaaaaaaaaaaaaaaaaaaaaaaaaaaaaaaaaaaaa

SEQ ID NO: 3411 - RNA, 1400 nt, synthetic construct
  misc_feature 1..1400: note = mRNA a-1 (hSL-A100) (opt1) from Homo sapiens__NP_000448.3__HNF4A(1-375)(S87E)
  source 1..1400: mol_type = other RNA
aggagagtcccgcagtcggcgtccagcggctctgcttgttcgtgtgtgtgtcgttgcaggccttattcaagcttaccatgcgcctgagcaagaccctcgtggacatggacatggccgactactccgccgcgctggaccccgcctacaccacgctggagttcgagaacgtccaggtgctcaccatgggcaacgacaccagcccgtccgaggggaccaacctgaacgcccccaacagcctgggcgtgtccgccctctgcgccatctgcggggaccgggcgacgggcaagcactacggggccagctcctgcgacggctgcaagggcttcttccgccgggaggtccgcaagaaccacatgtacagctgccggttctcccgccagtgcgtggtggacaaggacaagcggaaccagtgccgctactgccggctgaagaagtgcttccgcgccgggatgaagaaggaggccgtccagaacgagcgggaccgcatcagcacccggcgctccagctacgaggactccagcctgccctccatcaacgcgctcctgcaggccgaggtgctgagccggcagatcacctcccccgtgagcggcatcaacggggacatccgcgccaagaagatcgcctccatcgccgacgtctgcgagagcatgaaggagcagctcctggtgctggtggagtgggcgaagtacatcccggccttctgcgagctccccctggacgaccaggtcgccctgctccgggcccacgccggcgagcacctcctgctgggggcgaccaagcgcagcatggtgttcaaggacgtgctgctgctcggcaacgactacatcgtcccccggcactgccccgagctggccgagatgtcccgcgtgagcatccggatcctggacgagctcgtgctgccgttccaggagctgcagatcgacgacaacgagtacgcctacctcaaggccatcatcttcttcgaccccgacgccaagggcctgtccgaccccgggaagatcaagcgcctgcgcagccaggtccaggtgtccctcgaggactacatcaacgaccggcagtacgacagccgcggccggttcggggagctgctgctcctgctgcccacgctccagtccatcacctggcagatgatcgagcagatccagttcatcaagctgttcggcatggcgaagatcgacaacctgctccaggagatgctgctgtgaggactagtccctgttcccagagcccacttttttttctttttttgaaataaaatagcctgtctttcagatctcaaaggctcttttcagagccaccaaaaaaaaaaaaaaaaaaaaaaaaaaaaaaaaaaaaaaaaaaaaaaaaaaaaaaaaaaaaaaaaaaaaaaaaaaaaaaaaaaaaaaaaaaaaaaaaaaaaa

SEQ ID NO: 3412 - RNA, 1400 nt, synthetic construct
  misc_feature 1..1400: note = mRNA a-1 (hSL-A100) (opt1) from Homo sapiens__NP_000448.3__HNF4A(1-375)(R2V)
  source 1..1400: mol_type = other RNA
aggagagtcccgcagtcggcgtccagcggctctgcttgttcgtgtgtgtgtcgttgcaggccttattcaagcttaccatggtgctgagcaagaccctcgtcgacatggacatggccgactactccgccgcgctggaccccgcctacaccacgctggagttcgagaacgtccaggtgctcaccatgggcaacgacaccagcccgtccgaggggaccaacctgaacgcccccaacagcctgggcgtgtccgccctctgcgccatctgcggggaccgcgcgacgggcaagcactacggggccagctcctgcgacggctgcaagggcttcttccggcgcagcgtgcggaagaaccacatgtactcctgccgcttcagccggcagtgcgtggtcgacaaggacaagcgcaaccagtgccggtactgccgcctgaagaagtgcttccgggccgggatgaagaaggaggccgtgcagaacgagcgcgaccggatctccacccgccggagctcctacgaggacagctccctgcccagcatcaacgcgctcctgcaggccgaggtgctgtcccgccagatcaccagccccgtctccggcatcaacggggacatccgggccaagaagatcgccagcatcgccgacgtgtgcgagagcatgaaggagcagctcctggtgctggtcgagtgggcgaagtacatcccggccttctgcgagctccccctggacgaccaggtggccctgctccgcgcccacgccggcgagcacctcctgctgggggcgaccaagcggtccatggtgttcaaggacgtcctgctgctcggcaacgactacatcgtgccccgccactgccccgagctggccgagatgagccgggtgtccatccgcatcctggacgagctcgtcctgccgttccaggagctgcagatcgacgacaacgagtacgcctacctcaaggccatcatcttcttcgaccccgacgccaagggcctgagcgaccccgggaagatcaagcggctgcgctcccaggtccaggtgagcctcgaggactacatcaacgaccgccagtacgactcccggggccgcttcggggagctgctgctcctgctgcccacgctccagagcatcacctggcagatgatcgagcagatccagttcatcaagctgttcggcatggcgaagatcgacaacctgctccaggagatgctgctgtgaggactagtccctgttcccagagcccacttttttttctttttttgaaataaaatagcctgtctttcagatctcaaaggctcttttcagagccaccaaaaaaaaaaaaaaaaaaaaaaaaaaaaaaaaaaaaaaaaaaaaaaaaaaaaaaaaaaaaaaaaaaaaaaaaaaaaaaaaaaaaaaaaaaaaaaaaaaaaa

SEQ ID NO: 3413 - RNA, 1400 nt, synthetic construct
  misc_feature 1..1400: note = mRNA a-1 (hSL-A100) (opt1) from Homo sapiens__NP_000448.3__HNF4A(1-375)(R2V_K5V)
  source 1..1400: mol_type = other RNA
aggagagtcccgcagtcggcgtccagcggctctgcttgttcgtgtgtgtgtcgttgcaggccttattcaagcttaccatggtgctgagcgtcaccctcgtggacatggacatggccgactactccgccgcgctggaccccgcctacaccacgctggagttcgagaacgtgcaggtcctcaccatgggcaacgacaccagcccgtccgaggggaccaacctgaacgcccccaacagcctgggcgtgtccgccctctgcgccatctgcggggaccgcgcgacgggcaagcactacggggccagctcctgcgacggctgcaagggcttcttccggcgcagcgtgcggaagaaccacatgtactcctgccgcttcagccggcagtgcgtcgtggacaaggacaagcgcaaccagtgccggtactgccgcctgaagaagtgcttccgggccgggatgaagaaggaggccgtgcagaacgagcgcgaccggatctccacccgccggagctcctacgaggacagctccctgcccagcatcaacgcgctcctgcaggccgaggtcctgtcccgccagatcaccagccccgtgtccggcatcaacggggacatccgggccaagaagatcgccagcatcgccgacgtgtgcgagagcatgaaggagcagctcctggtcctggtggagtgggcgaagtacatcccggccttctgcgagctccccctggacgaccaggtggccctgctccgcgcccacgccggcgagcacctcctgctgggggcgaccaagcggtccatggtcttcaaggacgtgctgctgctcggcaacgactacatcgtgccccgccactgccccgagctggccgagatgagccgggtctccatccgcatcctggacgagctcgtgctgccgttccaggagctgcagatcgacgacaacgagtacgcctacctcaaggccatcatcttcttcgaccccgacgccaagggcctgagcgaccccgggaagatcaagcggctgcgctcccaggtgcaggtcagcctcgaggactacatcaacgaccgccagtacgactcccggggccgcttcggggagctgctgctcctgctgcccacgctccagagcatcacctggcagatgatcgagcagatccagttcatcaagctgttcggcatggcgaagatcgacaacctgctccaggagatgctgctgtgaggactagtccctgttcccagagcccacttttttttctttttttgaaataaaatagcctgtctttcagatctcaaaggctcttttcagagccaccaaaaaaaaaaaaaaaaaaaaaaaaaaaaaaaaaaaaaaaaaaaaaaaaaaaaaaaaaaaaaaaaaaaaaaaaaaaaaaaaaaaaaaaaaaaaaaaaaaaaa

SEQ ID NO: 3414 - RNA, 1400 nt, synthetic construct
  misc_feature 1..1400: note = mRNA a-1 (hSL-A100) (opt1) from Homo sapiens__NP_000448.3__HNF4A(1-375)(K179R_K180R)
  source 1..1400: mol_type = other RNA
aggagagtcccgcagtcggcgtccagcggctctgcttgttcgtgtgtgtgtcgttgcaggccttattcaagcttaccatgcgcctgagcaagaccctcgtggacatggacatggccgactactccgccgcgctggaccccgcctacaccacgctggagttcgagaacgtccaggtgctcaccatgggcaacgacaccagcccgtccgaggggaccaacctgaacgcccccaacagcctgggcgtgtccgccctctgcgccatctgcggggaccgggcgacgggcaagcactacggggccagctcctgcgacggctgcaagggcttcttccgccggagcgtccgcaagaaccacatgtactcctgccggttcagccgccagtgcgtggtggacaaggacaagcggaaccagtgccgctactgccggctgaagaagtgcttccgcgccgggatgaagaaggaggccgtccagaacgagcgggaccgcatctccacccggcgcagctcctacgaggacagctccctgcccagcatcaacgcgctcctgcaggccgaggtgctgtcccggcagatcaccagccccgtgtccggcatcaacggggacatccgcgcccggcgcatcgccagcatcgccgacgtctgcgagagcatgaaggagcagctcctggtgctggtggagtgggcgaagtacatcccggccttctgcgagctccccctggacgaccaggtcgccctgctccgggcccacgccggcgagcacctcctgctgggggcgaccaagcgctccatggtgttcaaggacgtgctgctgctcggcaacgactacatcgtcccccggcactgccccgagctggccgagatgagccgcgtgtccatccgcatcctggacgagctcgtgctgccgttccaggagctgcagatcgacgacaacgagtacgcctacctcaaggccatcatcttcttcgaccccgacgccaagggcctgagcgaccccgggaagatcaagcggctgcgctcccaggtccaggtgagcctcgaggactacatcaacgaccggcagtacgactcccgcggccggttcggggagctgctgctcctgctgcccacgctccagagcatcacctggcagatgatcgagcagatccagttcatcaagctgttcggcatggcgaagatcgacaacctgctccaggagatgctgctgtgaggactagtccctgttcccagagcccacttttttttctttttttgaaataaaatagcctgtctttcagatctcaaaggctcttttcagagccaccaaaaaaaaaaaaaaaaaaaaaaaaaaaaaaaaaaaaaaaaaaaaaaaaaaaaaaaaaaaaaaaaaaaaaaaaaaaaaaaaaaaaaaaaaaaaaaaaaaaaa

SEQ ID NO: 3415 - RNA, 1400 nt, synthetic construct
  misc_feature 1..1400: note = mRNA a-1 (hSL-A100) (opt1) from Homo sapiens__NP_000448.3__HNF4A(1-375)(K234R)
  source 1..1400: mol_type = other RNA
aggagagtcccgcagtcggcgtccagcggctctgcttgttcgtgtgtgtgtcgttgcaggccttattcaagcttaccatgcgcctgagcaagaccctcgtggacatggacatggccgactactccgccgcgctggaccccgcctacaccacgctggagttcgagaacgtccaggtgctcaccatgggcaacgacaccagcccgtccgaggggaccaacctgaacgcccccaacagcctgggcgtgtccgccctctgcgccatctgcggggaccgggcgacgggcaagcactacggggccagctcctgcgacggctgcaagggcttcttccgccggagcgtccgcaagaaccacatgtactcctgccggttcagccgccagtgcgtggtggacaaggacaagcggaaccagtgccgctactgccggctgaagaagtgcttccgcgccgggatgaagaaggaggccgtccagaacgagcgggaccgcatctccacccggcgcagctcctacgaggacagctccctgcccagcatcaacgcgctcctgcaggccgaggtgctgtcccggcagatcaccagccccgtgtccggcatcaacggggacatccgcgccaagaagatcgccagcatcgccgacgtctgcgagagcatgaaggagcagctcctggtgctggtggagtgggcgaagtacatcccggccttctgcgagctccccctggacgaccaggtcgccctgctccgggcccacgccggcgagcacctcctgctgggggcgacccgccggtccatggtgttcaaggacgtgctgctgctcggcaacgactacatcgtcccccgccactgccccgagctggccgagatgagccgggtgtccatccgcatcctggacgagctcgtgctgccgttccaggagctgcagatcgacgacaacgagtacgcctacctcaaggccatcatcttcttcgaccccgacgccaagggcctgagcgaccccgggaagatcaagcgcctgcggtcccaggtccaggtgagcctcgaggactacatcaacgaccgccagtacgactcccggggccgcttcggggagctgctgctcctgctgcccacgctccagagcatcacctggcagatgatcgagcagatccagttcatcaagctgttcggcatggcgaagatcgacaacctgctccaggagatgctgctgtgaggactagtccctgttcccagagcccacttttttttctttttttgaaataaaatagcctgtctttcagatctcaaaggctcttttcagagccaccaaaaaaaaaaaaaaaaaaaaaaaaaaaaaaaaaaaaaaaaaaaaaaaaaaaaaaaaaaaaaaaaaaaaaaaaaaaaaaaaaaaaaaaaaaaaaaaaaaaaa

SEQ ID NO: 3416 - RNA, 1400 nt, synthetic construct
  misc_feature 1..1400: note = mRNA a-1 (hSL-A100) (opt1) from Homo sapiens__NP_000448.3__HNF4A(1-375)(K300R)
  source 1..1400: mol_type = other RNA
aggagagtcccgcagtcggcgtccagcggctctgcttgttcgtgtgtgtgtcgttgcaggccttattcaagcttaccatgcgcctgagcaagaccctcgtggacatggacatggccgactactccgccgcgctggaccccgcctacaccacgctggagttcgagaacgtccaggtgctcaccatgggcaacgacaccagcccgtccgaggggaccaacctgaacgcccccaacagcctgggcgtgtccgccctctgcgccatctgcggggaccgggcgacgggcaagcactacggggccagctcctgcgacggctgcaagggcttcttccgccggagcgtccgcaagaaccacatgtactcctgccggttcagccgccagtgcgtggtggacaaggacaagcggaaccagtgccgctactgccggctgaagaagtgcttccgcgccgggatgaagaaggaggccgtccagaacgagcgggaccgcatctccacccggcgcagctcctacgaggacagctccctgcccagcatcaacgcgctcctgcaggccgaggtgctgtcccggcagatcaccagccccgtgtccggcatcaacggggacatccgcgccaagaagatcgccagcatcgccgacgtctgcgagagcatgaaggagcagctcctggtgctggtggagtgggcgaagtacatcccggccttctgcgagctccccctggacgaccaggtcgccctgctccgggcccacgccggcgagcacctcctgctgggggcgaccaagcgctccatggtgttcaaggacgtgctgctgctcggcaacgactacatcgtcccccggcactgccccgagctggccgagatgagccgcgtgtccatccggatcctggacgagctcgtgctgccgttccaggagctgcagatcgacgacaacgagtacgcctacctcaaggccatcatcttcttcgaccccgacgcccgcggcctgagcgaccccgggaagatcaagcgcctgcggtcccaggtccaggtgagcctcgaggactacatcaacgaccgccagtacgactcccggggccgcttcggggagctgctgctcctgctgcccacgctccagagcatcacctggcagatgatcgagcagatccagttcatcaagctgttcggcatggcgaagatcgacaacctgctccaggagatgctgctgtgaggactagtccctgttcccagagcccacttttttttctttttttgaaataaaatagcctgtctttcagatctcaaaggctcttttcagagccaccaaaaaaaaaaaaaaaaaaaaaaaaaaaaaaaaaaaaaaaaaaaaaaaaaaaaaaaaaaaaaaaaaaaaaaaaaaaaaaaaaaaaaaaaaaaaaaaaaaaaa

SEQ ID NO: 3417 - RNA, 1400 nt, synthetic construct
  misc_feature 1..1400: note = mRNA a-1 (hSL-A100) (opt1) from Homo sapiens__NP_000448.3__HNF4A(1-375)(K300R_K307R_K309R)
  source 1..1400: mol_type = other RNA
aggagagtcccgcagtcggcgtccagcggctctgcttgttcgtgtgtgtgtcgttgcaggccttattcaagcttaccatgcgcctgagcaagaccctcgtggacatggacatggccgactactccgccgcgctggaccccgcctacaccacgctggagttcgagaacgtccaggtgctcaccatgggcaacgacaccagcccgtccgaggggaccaacctgaacgcccccaacagcctgggcgtgtccgccctctgcgccatctgcggggaccgggcgacgggcaagcactacggggccagctcctgcgacggctgcaagggcttcttccgccggagcgtccgcaagaaccacatgtactcctgccggttcagccgccagtgcgtggtggacaaggacaagcggaaccagtgccgctactgccggctgaagaagtgcttccgcgccgggatgaagaaggaggccgtccagaacgagcgggaccgcatctccacccggcgcagctcctacgaggacagctccctgcccagcatcaacgcgctcctgcaggccgaggtgctgtcccggcagatcaccagccccgtgtccggcatcaacggggacatccgcgccaagaagatcgccagcatcgccgacgtctgcgagagcatgaaggagcagctcctggtgctggtggagtgggcgaagtacatcccggccttctgcgagctccccctggacgaccaggtcgccctgctccgggcccacgccggcgagcacctcctgctgggggcgaccaagcgctccatggtgttcaaggacgtgctgctgctcggcaacgactacatcgtcccccggcactgccccgagctggccgagatgagccgcgtgtccatccggatcctggacgagctcgtgctgccgttccaggagctgcagatcgacgacaacgagtacgcctacctcaaggccatcatcttcttcgaccccgacgcccgcggcctgagcgaccccgggcgcatccggcgcctgcggtcccaggtccaggtgagcctcgaggactacatcaacgaccgccagtacgactcccggggccgcttcggggagctgctgctcctgctgcccacgctccagagcatcacctggcagatgatcgagcagatccagttcatcaagctgttcggcatggcgaagatcgacaacctgctccaggagatgctgctgtgaggactagtccctgttcccagagcccacttttttttctttttttgaaataaaatagcctgtctttcagatctcaaaggctcttttcagagccaccaaaaaaaaaaaaaaaaaaaaaaaaaaaaaaaaaaaaaaaaaaaaaaaaaaaaaaaaaaaaaaaaaaaaaaaaaaaaaaaaaaaaaaaaaaaaaaaaaaaaa

SEQ ID NO: 3418 - RNA, 1400 nt, synthetic construct; identical to SEQ ID NO: 3350
  misc_feature 1..1400: note = mRNA a-1 (hSL-A100) (opt1) from Homo sapiens__NP_000448.3__HNF4A(1-375)(K447R_K470R)
  source 1..1400: mol_type = other RNA

SEQ ID NO: 3419 - RNA, 1400 nt, synthetic construct; identical to SEQ ID NO: 3350
  misc_feature 1..1400: note = mRNA a-1 (hSL-A100) (opt1) from Homo sapiens__NP_000448.3__HNF4A(1-375)(K458R)
  source 1..1400: mol_type = other RNA

SEQ ID NO: 3420 - RNA, 1400 nt, synthetic construct
  misc_feature 1..1400: note = mRNA a-1 (hSL-A100) (opt1) from Homo sapiens__NP_000448.3__HNF4A(1-375)(K106R_K108R_K126R_K127R)
  source 1..1400: mol_type = other RNA
aggagagtcccgcagtcggcgtccagcggctctgcttgttcgtgtgtgtgtcgttgcaggccttattcaagcttaccatgcgcctgagcaagaccctcgtggacatggacatggccgactactccgccgcgctggaccccgcctacaccacgctggagttcgagaacgtccaggtgctcaccatgggcaacgacaccagcccgtccgaggggaccaacctgaacgcccccaacagcctgggcgtgtccgccctctgcgccatctgcggggaccgggcgacgggcaagcactacggggccagctcctgcgacggctgcaagggcttcttccgccggagcgtccgcaagaaccacatgtactcctgccggttcagccgccagtgcgtggtggaccgggaccgccggaaccagtgccgctactgccggctgaagaagtgcttccgcgccgggatgcggcgcgaggccgtccagaacgagcgggaccgcatctccacccggcgcagctcctacgaggacagctccctgcccagcatcaacgcgctcctgcaggccgaggtgctgtcccggcagatcaccagccccgtgtccggcatcaacggggacatccgcgccaagaagatcgccagcatcgccgacgtctgcgagagcatgaaggagcagctcctggtgctggtggagtgggcgaagtacatcccggccttctgcgagctccccctggacgaccaggtcgccctgctccgggcccacgccggcgagcacctcctgctgggggcgaccaagcgctccatggtgttcaaggacgtgctgctgctcggcaacgactacatcgtcccccgccactgccccgagctggccgagatgagccgggtgtccatccgcatcctggacgagctcgtgctgccgttccaggagctgcagatcgacgacaacgagtacgcctacctcaaggccatcatcttcttcgaccccgacgccaagggcctgagcgaccccgggaagatcaagcggctgcgctcccaggtccaggtgagcctcgaggactacatcaacgaccggcagtacgactcccgcggccggttcggggagctgctgctcctgctgcccacgctccagagcatcacctggcagatgatcgagcagatccagttcatcaagctgttcggcatggcgaagatcgacaacctgctccaggagatgctgctgtgaggactagtccctgttcccagagcccacttttttttctttttttgaaataaaatagcctgtctttcagatctcaaaggctcttttcagagccaccaaaaaaaaaaaaaaaaaaaaaaaaaaaaaaaaaaaaaaaaaaaaaaaaaaaaaaaaaaaaaaaaaaaaaaaaaaaaaaaaaaaaaaaaaaaaaaaaaaaaa

SEQ ID NO: 3421 - RNA, 1400 nt, synthetic construct; identical to SEQ ID NO: 3372
  misc_feature 1..1400: note = mRNA a-1 (hSL-A100) (opt1) from Homo sapiens__NP_000448.3__HNF4A(1-375)(E285Q)
  source 1..1400: mol_type = other RNA

SEQ ID NO: 3422 - RNA, 1400 nt, synthetic construct
  misc_feature 1..1400: note = mRNA a-1 (hSL-A100) (opt1) from Homo sapiens__NP_000448.3__HNF4A(1-375)(T166E)
  source 1..1400: mol_type = other RNA
aggagagtcccgcagtcggcgtccagcggctctgcttgttcgtgtgtgtgtcgttgcaggccttattcaagcttaccatgcgcctgagcaagaccctcgtggacatggacatggccgactactccgccgcgctggaccccgcctacaccacgctggagttcgagaacgtccaggtgctcaccatgggcaacgacaccagcccgtccgaggggaccaacctgaacgcccccaacagcctgggcgtgtccgccctctgcgccatctgcggggaccgggcgacgggcaagcactacggggccagctcctgcgacggctgcaagggcttcttccgccggagcgtccgcaagaaccacatgtactcctgccggttcagccgccagtgcgtggtggacaaggacaagcggaaccagtgccgctactgccggctgaagaagtgcttccgcgccgggatgaagaaggaggccgtccagaacgagcgggaccgcatctccacccggcgcagctcctacgaggacagctccctgcccagcatcaacgcgctcctgcaggccgaggtgctgtcccggcagatcgagagccccgtgtccggcatcaacggggacatccgcgccaagaagatcgccagcatcgccgacgtctgcgagagcatgaaggagcagctcctggtgctggtggagtgggcgaagtacatcccggccttctgcgagctccccctggacgaccaggtcgccctgctccgggcccacgccggcgagcacctcctgctgggggcgaccaagcgctccatggtgttcaaggacgtgctgctgctcggcaacgactacatcgtcccccggcactgccccgagctggccgagatgagccgcgtgtccatccggatcctggacgagctcgtgctgccgttccaggagctgcagatcgacgacaacgagtacgcctacctcaaggccatcatcttcttcgaccccgacgccaagggcctgagcgaccccgggaagatcaagcgcctgcgctcccaggtccaggtgagcctcgaggactacatcaacgaccggcagtacgactcccgcggccggttcggggagctgctgctcctgctgcccaccctccagagcatcacgtggcagatgatcgagcagatccagttcatcaagctgttcggcatggcgaagatcgacaacctgctccaggagatgctgctgtgaggactagtccctgttcccagagcccacttttttttctttttttgaaataaaatagcctgtctttcagatctcaaaggctcttttcagagccaccaaaaaaaaaaaaaaaaaaaaaaaaaaaaaaaaaaaaaaaaaaaaaaaaaaaaaaaaaaaaaaaaaaaaaaaaaaaaaaaaaaaaaaaaaaaaaaaaaaaaa

SEQ ID NO: 3423 - RNA, 1400 nt, synthetic construct
  misc_feature 1..1400: note = mRNA a-1 (hSL-A100) (opt1) from Homo sapiens__NP_000448.3__HNF4A(1-375)(S148A)
  source 1..1400: mol_type = other RNA
aggagagtcccgcagtcggcgtccagcggctctgcttgttcgtgtgtgtgtcgttgcaggccttattcaagcttaccatgcgcctgagcaagaccctcgtggacatggacatggccgactactccgccgcgctggaccccgcctacaccacgctggagttcgagaacgtccaggtgctcaccatgggcaacgacaccagcccgtccgaggggaccaacctgaacgcccccaacagcctgggcgtgtccgccctctgcgccatctgcggggaccgggcgacgggcaagcactacggggccagctcctgcgacggctgcaagggcttcttccgccggagcgtccgcaagaaccacatgtactcctgccggttcagccgccagtgcgtggtggacaaggacaagcggaaccagtgccgctactgccggctgaagaagtgcttccgcgccgggatgaagaaggaggccgtccagaacgagcgggaccgcatctccacccggcgcagctcctacgaggacagcgcgctgccctccatcaacgccctcctgcaggccgaggtgctgagccggcagatcacctcccccgtgagcggcatcaacggggacatccgcgccaagaagatcgcctccatcgcggacgtctgcgagagcatgaaggagcagctcctggtgctggtggagtgggccaagtacatcccggccttctgcgagctccccctggacgaccaggtcgccctgctccgggcccacgcgggcgagcacctcctgctgggggccaccaagcgcagcatggtgttcaaggacgtgctgctgctcggcaacgactacatcgtcccccggcactgccccgagctggccgagatgtcccgcgtgagcatccggatcctggacgagctcgtgctgccgttccaggagctgcagatcgacgacaacgagtacgcctacctcaaggccatcatcttcttcgaccccgacgcgaagggcctgtccgaccccgggaagatcaagcgcctgcgcagccaggtccaggtgtccctcgaggactacatcaacgaccggcagtacgacagccgcggccggttcggggagctgctgctcctgctgcccacgctccagtccatcacctggcagatgatcgagcagatccagttcatcaagctgttcggcatggccaagatcgacaacctgctccaggagatgctgctgtgaggactagtccctgttcccagagcccacttttttttctttttttgaaataaaatagcctgtctttcagatctcaaaggctcttttcagagccaccaaaaaaaaaaaaaaaaaaaaaaaaaaaaaaaaaaaaaaaaaaaaaaaaaaaaaaaaaaaaaaaaaaaaaaaaaaaaaaaaaaaaaaaaaaaaaaaaaaaaa

SEQ ID NO: 3424 - RNA, 1400 nt, synthetic construct
  misc_feature 1..1400: note = mRNA a-1 (hSL-A100) (opt1) from Homo sapiens__NP_000448.3__HNF4A(1-375)(S148E)
  source 1..1400: mol_type = other RNA
aggagagtcccgcagtcggcgtccagcggctctgcttgttcgtgtgtgtgtcgttgcaggccttattcaagcttaccatgcgcctgagcaagaccctcgtggacatggacatggccgactactccgccgcgctggaccccgcctacaccacgctggagttcgagaacgtccaggtgctcaccatgggcaacgacaccagcccgtccgaggggaccaacctgaacgcccccaacagcctgggcgtgtccgccctctgcgccatctgcggggaccgggcgacgggcaagcactacggggccagctcctgcgacggctgcaagggcttcttccgccggagcgtccgcaagaaccacatgtactcctgccggttcagccgccagtgcgtggtggacaaggacaagcggaaccagtgccgctactgccggctgaagaagtgcttccgcgccgggatgaagaaggaggccgtccagaacgagcgggaccgcatctccacccggcgcagctcctacgaggacagcgagctgccctccatcaacgcgctcctgcaggccgaggtgctgagccggcagatcacctcccccgtgagcggcatcaacggggacatccgcgccaagaagatcgcctccatcgccgacgtctgcgagagcatgaaggagcagctcctggtgctggtggagtgggcgaagtacatcccggccttctgcgagctccccctggacgaccaggtcgccctgctccgggcccacgccggcgagcacctcctgctgggggcgaccaagcgcagcatggtgttcaaggacgtgctgctgctcggcaacgactacatcgtcccccggcactgccccgagctggccgagatgtcccgcgtgagcatccggatcctggacgagctcgtgctgccgttccaggagctgcagatcgacgacaacgagtacgcctacctcaaggccatcatcttcttcgaccccgacgccaagggcctgtccgaccccgggaagatcaagcgcctgcgcagccaggtccaggtgtccctcgaggactacatcaacgaccggcagtacgacagccgcggccggttcggggagctgctgctcctgctgcccacgctccagtccatcacctggcagatgatcgagcagatccagttcatcaagctgttcggcatggcgaagatcgacaacctgctccaggagatgctgctgtgaggactagtccctgttcccagagcccacttttttttctttttttgaaataaaatagcctgtctttcagatctcaaaggctcttttcagagccaccaaaaaaaaaaaaaaaaaaaaaaaaaaaaaaaaaaaaaaaaaaaaaaaaaaaaaaaaaaaaaaaaaaaaaaaaaaaaaaaaaaaaaaaaaaaaaaaaaaaaa

SEQ ID NO: 3425 - RNA, 1400 nt, synthetic construct
  misc_feature 1..1400: note = mRNA a-1 (hSL-A100) (opt1) from Homo sapiens__NP_000448.3__HNF4A(1-375)(S183A)
  source 1..1400: mol_type = other RNA
aggagagtcccgcagtcggcgtccagcggctctgcttgttcgtgtgtgtgtcgttgcaggccttattcaagcttaccatgcgcctgagcaagaccctcgtggacatggacatggccgactactccgccgcgctggaccccgcctacaccacgctggagttcgagaacgtccaggtgctcaccatgggcaacgacaccagcccgtccgaggggaccaacctgaacgcccccaacagcctgggcgtgtccgccctctgcgccatctgcggggaccgggcgacgggcaagcactacggggccagctcctgcgacggctgcaagggcttcttccgccggagcgtccgcaagaaccacatgtactcctgccggttcagccgccagtgcgtggtggacaaggacaagcggaaccagtgccgctactgccggctgaagaagtgcttccgcgccgggatgaagaaggaggccgtccagaacgagcgggaccgcatctccacccggcgcagctcctacgaggacagctccctgcccagcatcaacgcgctcctgcaggccgaggtgctgtcccggcagatcaccagccccgtgtccggcatcaacggggacatccgcgccaagaagatcgccgccatcgcggacgtctgcgagagcatgaaggagcagctcctggtgctggtggagtgggccaagtacatcccggccttctgcgagctccccctggacgaccaggtcgccctgctccgggcccacgcgggcgagcacctcctgctgggggccaccaagcgcagcatggtgttcaaggacgtgctgctgctcggcaacgactacatcgtcccccggcactgccccgagctggccgagatgtcccgcgtgagcatccggatcctggacgagctcgtgctgccgttccaggagctgcagatcgacgacaacgagtacgcctacctcaaggccatcatcttcttcgaccccgacgcgaagggcctgtccgaccccgggaagatcaagcgcctgcgcagccaggtccaggtgtccctcgaggactacatcaacgaccggcagtacgacagccgcggccggttcggggagctgctgctcctgctgcccacgctccagtccatcacctggcagatgatcgagcagatccagttcatcaagctgttcggcatggccaagatcgacaacctgctccaggagatgctgctgtgaggactagtccctgttcccagagcccacttttttttctttttttgaaataaaatagcctgtctttcagatctcaaaggctcttttcagagccaccaaaaaaaaaaaaaaaaaaaaaaaaaaaaaaaaaaaaaaaaaaaaaaaaaaaaaaaaaaaaaaaaaaaaaaaaaaaaaaaaaaaaaaaaaaaaaaaaaaaaa

SEQ ID NO: 3426 - RNA, 1400 nt, synthetic construct
  misc_feature 1..1400: note = mRNA a-1 (hSL-A100) (opt1) from Homo sapiens__NP_000448.3__HNF4A(1-375)(S183E)
  source 1..1400: mol_type = other RNA
aggagagtcccgcagtcggcgtccagcggctctgcttgttcgtgtgtgtgtcgttgcaggccttattcaagcttaccatgcgcctgagcaagaccctcgtggacatggacatggccgactactccgccgcgctggaccccgcctacaccacgctggagttcgagaacgtccaggtgctcaccatgggcaacgacaccagcccgtccgaggggaccaacctgaacgcccccaacagcctgggcgtgtccgccctctgcgccatctgcggggaccgggcgacgggcaagcactacggggccagctcctgcgacggctgcaagggcttcttccgccggagcgtccgcaagaaccacatgtactcctgccggttcagccgccagtgcgtggtggacaaggacaagcggaaccagtgccgctactgccggctgaagaagtgcttccgcgccgggatgaagaaggaggccgtccagaacgagcgggaccgcatctccacccggcgcagctcctacgaggacagctccctgcccagcatcaacgcgctcctgcaggccgaggtgctgtcccggcagatcaccagccccgtgtccggcatcaacggggacatccgcgccaagaagatcgccgagatcgccgacgtctgcgagagcatgaaggagcagctcctggtgctggtggagtgggcgaagtacatcccggccttctgcgagctccccctggacgaccaggtcgccctgctccgggcccacgccggcgagcacctcctgctgggggcgaccaagcgcagcatggtgttcaaggacgtgctgctgctcggcaacgactacatcgtcccccggcactgccccgagctggccgagatgtcccgcgtgagcatccggatcctggacgagctcgtgctgccgttccaggagctgcagatcgacgacaacgagtacgcctacctcaaggccatcatcttcttcgaccccgacgccaagggcctgtccgaccccgggaagatcaagcgcctgcgcagccaggtccaggtgtccctcgaggactacatcaacgaccggcagtacgacagccgcggccggttcggggagctgctgctcctgctgcccacgctccagtccatcacctggcagatgatcgagcagatccagttcatcaagctgttcggcatggcgaagatcgacaacctgctccaggagatgctgctgtgaggactagtccctgttcccagagcccacttttttttctttttttgaaataaaatagcctgtctttcagatctcaaaggctcttttcagagccaccaaaaaaaaaaaaaaaaaaaaaaaaaaaaaaaaaaaaaaaaaaaaaaaaaaaaaaaaaaaaaaaaaaaaaaaaaaaaaaaaaaaaaaaaaaaaaaaaaaaaa

SEQ ID NO: 3427 - RNA, 1400 nt, synthetic construct; identical to SEQ ID NO: 3350
  misc_feature 1..1400: note = mRNA a-1 (hSL-A100) (opt1) from Homo sapiens__NP_000448.3__HNF4A(1-375)(S461A)
  source 1..1400: mol_type = other RNA

SEQ ID NO: 3428 - RNA, 1400 nt, synthetic construct; identical to SEQ ID NO: 3350
  misc_feature 1..1400: note = mRNA a-1 (hSL-A100) (opt1) from Homo sapiens__NP_000448.3__HNF4A(1-375)(S461E)
  source 1..1400: mol_type = other RNA

SEQ ID NO: 3429 - RNA, 1400 nt, synthetic construct
  misc_feature 1..1400: note = mRNA a-1 (hSL-A100) (opt1) from Homo sapiens__NP_000448.3__HNF4A(1-375)(S142A_S143A_S313A)
  source 1..1400: mol_type = other RNA
aggagagtcccgcagtcggcgtccagcggctctgcttgttcgtgtgtgtgtcgttgcaggccttattcaagcttaccatgcgcctgagcaagaccctcgtggacatggacatggccgactactccgccgcgctggaccccgcctacaccacgctggagttcgagaacgtccaggtgctcaccatgggcaacgacaccagcccgtccgaggggaccaacctgaacgcccccaacagcctgggcgtgtccgccctctgcgccatctgcggggaccgggcgacgggcaagcactacggggccagctcctgcgacggctgcaagggcttcttccgccggagcgtccgcaagaaccacatgtactcctgccggttcagccgccagtgcgtggtggacaaggacaagcggaaccagtgccgctactgccggctgaagaagtgcttccgcgccgggatgaagaaggaggccgtccagaacgagcgggaccgcatctccacccggcgcgcggcctacgaggacagctccctgcccagcatcaacgccctcctgcaggccgaggtgctgtcccggcagatcaccagccccgtgtccggcatcaacggggacatccgcgccaagaagatcgcgagcatcgccgacgtctgcgagtccatgaaggagcagctcctggtgctggtggagtgggccaagtacatcccggccttctgcgagctccccctggacgaccaggtcgccctgctccgggcgcacgccggcgagcacctcctgctgggggccaccaagcgcagcatggtgttcaaggacgtgctgctgctcggcaacgactacatcgtcccccggcactgccccgagctggccgagatgagccgcgtgtccatccggatcctggacgagctcgtgctgccgttccaggagctgcagatcgacgacaacgagtacgcctacctcaaggcgatcatcttcttcgaccccgacgccaagggcctgagcgaccccgggaagatcaagcgcctgcgcgcccaggtccaggtgtccctcgaggactacatcaacgaccggcagtacgacagccgcggccggttcggggagctgctgctcctgctgcccacgctccagtccatcacctggcagatgatcgagcagatccagttcatcaagctgttcggcatggccaagatcgacaacctgctccaggagatgctgctgtgaggactagtccctgttcccagagcccacttttttttctttttttgaaataaaatagcctgtctttcagatctcaaaggctcttttcagagccaccaaaaaaaaaaaaaaaaaaaaaaaaaaaaaaaaaaaaaaaaaaaaaaaaaaaaaaaaaaaaaaaaaaaaaaaaaaaaaaaaaaaaaaaaaaaaaaaaaaaaa

SEQ ID NO: 3430 - RNA, 1400 nt, synthetic construct; identical to SEQ ID NO: 3429
  misc_feature 1..1400: note = mRNA a-1 (hSL-A100) (opt1) from Homo sapiens__NP_000448.3__HNF4A(1-375)(S142A_S143A_S313A_K458R)
  source 1..1400: mol_type = other RNA

SEQ ID NO: 3431 - RNA, 1400 nt, synthetic construct
  misc_feature 1..1400: note = mRNA a-1 (hSL-A100) (opt1) from Homo sapiens__NP_000448.3__HNF4A(1-375)(S142A_S143A_S167A_S313A_ S378A_T429A_T432A_S436A_K458R)
  source 1..1400: mol_type = other RNA
aggagagtcccgcagtcggcgtccagcggctctgcttgttcgtgtgtgtgtcgttgcaggccttattcaagcttaccatgcgcctgagcaagaccctcgtggacatggacatggccgactactccgccgcgctggaccccgcctacaccacgctggagttcgagaacgtccaggtgctcaccatgggcaacgacaccagcccgtccgaggggaccaacctgaacgcccccaacagcctgggcgtgtccgccctctgcgccatctgcggggaccgggcgacgggcaagcactacggggccagctcctgcgacggctgcaagggcttcttccgccggagcgtccgcaagaaccacatgtactcctgccggttcagccgccagtgcgtggtggacaaggacaagcggaaccagtgccgctactgccggctgaagaagtgcttccgcgccgggatgaagaaggaggccgtccagaacgagcgggaccgcatctccacccggcgcgcggcctacgaggacagctccctgcccagcatcaacgccctcctgcaggccgaggtgctgtcccggcagatcaccgcccccgtgagcggcatcaacggggacatccgcgcgaagaagatcgcctccatcgccgacgtctgcgagagcatgaaggagcagctcctggtgctggtggagtgggccaagtacatcccggccttctgcgagctccccctggacgaccaggtcgcgctgctccgggcccacgccggcgagcacctcctgctgggggccaccaagcgctccatggtgttcaaggacgtgctgctgctcggcaacgactacatcgtcccccggcactgccccgagctggccgagatgagccgcgtgagcatccggatcctggacgagctcgtgctgccgttccaggagctgcagatcgacgacaacgagtacgcgtacctcaaggccatcatcttcttcgaccccgacgccaagggcctgtccgaccccgggaagatcaagcgcctgcgcgcccaggtccaggtgagcctcgaggactacatcaacgaccggcagtacgactcccgcggccggttcggggagctgctgctcctgctgcccacgctccagagcatcacctggcagatgatcgagcagatccagttcatcaagctgttcggcatggccaagatcgacaacctgctccaggagatgctgctgtgaggactagtccctgttcccagagcccacttttttttctttttttgaaataaaatagcctgtctttcagatctcaaaggctcttttcagagccaccaaaaaaaaaaaaaaaaaaaaaaaaaaaaaaaaaaaaaaaaaaaaaaaaaaaaaaaaaaaaaaaaaaaaaaaaaaaaaaaaaaaaaaaaaaaaaaaaaaaaa

SEQ ID NO: 3432 - RNA, 1400 nt, synthetic construct
  misc_feature 1..1400: note = mRNA a-1 (hSL-A100) (opt1) from Homo sapiens__NP_000448.3__HNF4A(1-375)(S142A_S143A_S148A_S167A_ S313A_S378A_T429A_T432A_S436A_K458R)
  source 1..1400: mol_type = other RNA
aggagagtcccgcagtcggcgtccagcggctctgcttgttcgtgtgtgtgtcgttgcaggccttattcaagcttaccatgcgcctgagcaagaccctcgtggacatggacatggccgactactccgccgcgctggaccccgcctacaccacgctggagttcgagaacgtccaggtgctcaccatgggcaacgacaccagcccgtccgaggggaccaacctgaacgcccccaacagcctgggcgtgtccgccctctgcgccatctgcggggaccgggcgacgggcaagcactacggggccagctcctgcgacggctgcaagggcttcttccgccggagcgtccgcaagaaccacatgtactcctgccggttcagccgccagtgcgtggtggacaaggacaagcggaaccagtgccgctactgccggctgaagaagtgcttccgcgccgggatgaagaaggaggccgtccagaacgagcgggaccgcatctccacccggcgcgcggcctacgaggacagcgccctgccctccatcaacgccctcctgcaggccgaggtgctgagccggcagatcaccgcgcccgtgtccggcatcaacggggacatccgcgccaagaagatcgccagcatcgccgacgtctgcgagtccatgaaggagcagctcctggtgctggtggagtgggccaagtacatcccggcgttctgcgagctccccctggacgaccaggtcgccctgctccgggcccacgccggcgagcacctcctgctgggggccaccaagcgcagcatggtgttcaaggacgtgctgctgctcggcaacgactacatcgtcccccggcactgccccgagctggcggagatgtcccgcgtgagcatccggatcctggacgagctcgtgctgccgttccaggagctgcagatcgacgacaacgagtacgcctacctcaaggccatcatcttcttcgaccccgacgccaagggcctgagcgaccccgggaagatcaagcgcctgcgcgcccaggtccaggtgtccctcgaggactacatcaacgaccggcagtacgacagccgcggccggttcggggagctgctgctcctgctgcccacgctccagtccatcacctggcagatgatcgagcagatccagttcatcaagctgttcggcatggcgaagatcgacaacctgctccaggagatgctgctgtgaggactagtccctgttcccagagcccacttttttttctttttttgaaataaaatagcctgtctttcagatctcaaaggctcttttcagagccaccaaaaaaaaaaaaaaaaaaaaaaaaaaaaaaaaaaaaaaaaaaaaaaaaaaaaaaaaaaaaaaaaaaaaaaaaaaaaaaaaaaaaaaaaaaaaaaaaaaaaa

SEQ ID NO: 3433 - RNA, 1400 nt, synthetic construct
  misc_feature 1..1400: note = mRNA a-1 (hSL-A100) (opt1) from Homo sapiens__NP_000448.3__HNF4A(1-375)(K106R_K108R_K126R_K127R_ S142A_S143A_S148A_S167A_S313A_S378A_T429A_T432A_S436A_K458R )
  source 1..1400: mol_type = other RNA
aggagagtcccgcagtcggcgtccagcggctctgcttgttcgtgtgtgtgtcgttgcaggccttattcaagcttaccatgcgcctgagcaagaccctcgtggacatggacatggccgactactccgccgcgctggaccccgcctacaccacgctggagttcgagaacgtccaggtgctcaccatgggcaacgacaccagcccgtccgaggggaccaacctgaacgcccccaacagcctgggcgtgtccgccctctgcgccatctgcggggaccgggcgacgggcaagcactacggggccagctcctgcgacggctgcaagggcttcttccgccggagcgtccgcaagaaccacatgtactcctgccggttcagccgccagtgcgtggtggaccgggaccgccggaaccagtgccgctactgccggctgaagaagtgcttccgcgccgggatgcggcgcgaggccgtccagaacgagcgggaccgcatctccacccggcgcgcggcctacgaggacagcgccctgccctccatcaacgccctcctgcaggccgaggtgctgagccggcagatcaccgcgcccgtgtccggcatcaacggggacatccgcgccaagaagatcgccagcatcgccgacgtctgcgagtccatgaaggagcagctcctggtgctggtggagtgggccaagtacatcccggcgttctgcgagctccccctggacgaccaggtcgccctgctccgggcccacgccggcgagcacctcctgctgggggccaccaagcgcagcatggtgttcaaggacgtgctgctgctcggcaacgactacatcgtcccccgccactgccccgagctggcggagatgtcccgggtgagcatccgcatcctggacgagctcgtgctgccgttccaggagctgcagatcgacgacaacgagtacgcctacctcaaggccatcatcttcttcgaccccgacgccaagggcctgagcgaccccgggaagatcaagcggctgcgcgcccaggtccaggtgtccctcgaggactacatcaacgaccggcagtacgacagccgcggccggttcggggagctgctgctcctgctgcccacgctccagtccatcacctggcagatgatcgagcagatccagttcatcaagctgttcggcatggcgaagatcgacaacctgctccaggagatgctgctgtgaggactagtccctgttcccagagcccacttttttttctttttttgaaataaaatagcctgtctttcagatctcaaaggctcttttcagagccaccaaaaaaaaaaaaaaaaaaaaaaaaaaaaaaaaaaaaaaaaaaaaaaaaaaaaaaaaaaaaaaaaaaaaaaaaaaaaaaaaaaaaaaaaaaaaaaaaaaaaa

SEQ ID NO: 3434 - RNA, 1400 nt, synthetic construct
  misc_feature 1..1400: note = mRNA a-1 (hSL-A100) (opt1) from Homo sapiens__NP_000448.3__HNF4A(1-375)(S142A_S143A_S148A_T166A_ S167A_S313A_S378A_T429A_T432A_S436A_K458R)
  source 1..1400: mol_type = other RNA
aggagagtcccgcagtcggcgtccagcggctctgcttgttcgtgtgtgtgtcgttgcaggccttattcaagcttaccatgcgcctgagcaagaccctcgtggacatggacatggccgactactccgccgcgctggaccccgcctacaccacgctggagttcgagaacgtccaggtgctcaccatgggcaacgacaccagcccgtccgaggggaccaacctgaacgcccccaacagcctgggcgtgtccgccctctgcgccatctgcggggaccgggcgacgggcaagcactacggggccagctcctgcgacggctgcaagggcttcttccgccggagcgtccgcaagaaccacatgtactcctgccggttcagccgccagtgcgtggtggacaaggacaagcggaaccagtgccgctactgccggctgaagaagtgcttccgcgccgggatgaagaaggaggccgtccagaacgagcgggaccgcatctccacccggcgcgcggcctacgaggacagcgccctgccctccatcaacgccctcctgcaggccgaggtgctgagccggcagatcgcggcccccgtgtccggcatcaacggggacatccgcgccaagaagatcgccagcatcgccgacgtctgcgagtccatgaaggagcagctcctggtgctggtggagtgggcgaagtacatcccggccttctgcgagctccccctggacgaccaggtcgccctgctccgggcccacgccggcgagcacctcctgctgggggcgaccaagcgcagcatggtgttcaaggacgtgctgctgctcggcaacgactacatcgtcccccggcactgccccgagctggccgagatgtcccgcgtgagcatccggatcctggacgagctcgtgctgccgttccaggagctgcagatcgacgacaacgagtacgcctacctcaaggccatcatcttcttcgaccccgacgccaagggcctgagcgaccccgggaagatcaagcgcctgcgcgcgcaggtccaggtgtccctcgaggactacatcaacgaccggcagtacgacagccgcggccggttcggggagctgctgctcctgctgcccaccctccagtccatcacgtggcagatgatcgagcagatccagttcatcaagctgttcggcatggccaagatcgacaacctgctccaggagatgctgctgtgaggactagtccctgttcccagagcccacttttttttctttttttgaaataaaatagcctgtctttcagatctcaaaggctcttttcagagccaccaaaaaaaaaaaaaaaaaaaaaaaaaaaaaaaaaaaaaaaaaaaaaaaaaaaaaaaaaaaaaaaaaaaaaaaaaaaaaaaaaaaaaaaaaaaaaaaaaaaaa

SEQ ID NO: 3435 - RNA, 1400 nt, synthetic construct
  misc_feature 1..1400: note = mRNA a-1 (hSL-A100) (opt1) from Homo sapiens__NP_000448.3__HNF4A(1-375)(S87A_S142A_S143A_S148A_T 166A_S167A_S313A_S378A_T429A_T432A_S436A_K458R)
  source 1..1400: mol_type = other RNA
aggagagtcccgcagtcggcgtccagcggctctgcttgttcgtgtgtgtgtcgttgcaggccttattcaagcttaccatgcgcctgagcaagaccctcgtggacatggacatggccgactactccgccgcgctggaccccgcctacaccacgctggagttcgagaacgtccaggtgctcaccatgggcaacgacaccagcccgtccgaggggaccaacctgaacgcccccaacagcctgggcgtgtccgccctctgcgccatctgcggggaccgggcgacgggcaagcactacggggccagctcctgcgacggctgcaagggcttcttccgccgggccgtccgcaagaaccacatgtacagctgccggttctcccgccagtgcgtggtggacaaggacaagcggaaccagtgccgctactgccggctgaagaagtgcttccgcgccgggatgaagaaggaggcggtccagaacgagcgggaccgcatcagcacccggcgcgccgcctacgaggactccgccctgcccagcatcaacgccctcctgcaggcggaggtgctgtcccggcagatcgccgcccccgtgagcggcatcaacggggacatccgcgccaagaagatcgcctccatcgcggacgtctgcgagagcatgaaggagcagctcctggtgctggtggagtgggccaagtacatcccggccttctgcgagctccccctggacgaccaggtcgccctgctccgggcccacgcgggcgagcacctcctgctgggggccaccaagcgctccatggtgttcaaggacgtgctgctgctcggcaacgactacatcgtcccccggcactgccccgagctggccgagatgagccgcgtgtccatccggatcctggacgagctcgtgctgccgttccaggagctgcagatcgacgacaacgagtacgcctacctcaaggccatcatcttcttcgaccccgacgcgaagggcctgagcgaccccgggaagatcaagcgcctgcgcgcccaggtccaggtgagcctcgaggactacatcaacgaccggcagtacgactcccgcggccggttcggggagctgctgctcctgctgcccaccctccagagcatcacgtggcagatgatcgagcagatccagttcatcaagctgttcggcatggccaagatcgacaacctgctccaggagatgctgctgtgaggactagtccctgttcccagagcccacttttttttctttttttgaaataaaatagcctgtctttcagatctcaaaggctcttttcagagccaccaaaaaaaaaaaaaaaaaaaaaaaaaaaaaaaaaaaaaaaaaaaaaaaaaaaaaaaaaaaaaaaaaaaaaaaaaaaaaaaaaaaaaaaaaaaaaaaaaaaaa

SEQ ID NO: 3436 - RNA, 1400 nt, synthetic construct
  misc_feature 1..1400: note = mRNA a-1 (hSL-A100) (opt1) from Homo sapiens__NP_000448.3__HNF4A(1-375)(S87A_K106R_K108R_K126R_K 127R_S142A_S143A_S148A_T166A_S167A_S313A_S378A_T429A_T432A_ S436A_K458R)
  source 1..1400: mol_type = other RNA
aggagagtcccgcagtcggcgtccagcggctctgcttgttcgtgtgtgtgtcgttgcaggccttattcaagcttaccatgcgcctgagcaagaccctcgtggacatggacatggccgactactccgccgcgctggaccccgcctacaccacgctggagttcgagaacgtccaggtgctcaccatgggcaacgacaccagcccgtccgaggggaccaacctgaacgcccccaacagcctgggcgtgtccgccctctgcgccatctgcggggaccgggcgacgggcaagcactacggggccagctcctgcgacggctgcaagggcttcttccgccgggccgtccgcaagaaccacatgtacagctgccggttctcccgccagtgcgtggtggaccgggaccgccggaaccagtgccgctactgccggctgaagaagtgcttccgcgccgggatgcggcgcgaggcggtccagaacgagcgggaccgcatcagcacccggcgcgccgcctacgaggactccgccctgcccagcatcaacgccctcctgcaggcggaggtgctgtcccggcagatcgccgcccccgtgagcggcatcaacggggacatccgcgccaagaagatcgcctccatcgcggacgtctgcgagagcatgaaggagcagctcctggtgctggtggagtgggccaagtacatcccggccttctgcgagctccccctggacgaccaggtcgccctgctccgggcccacgcgggcgagcacctcctgctgggggccaccaagcgctccatggtgttcaaggacgtgctgctgctcggcaacgactacatcgtcccccgccactgccccgagctggccgagatgagccgggtgtccatccgcatcctggacgagctcgtgctgccgttccaggagctgcagatcgacgacaacgagtacgcctacctcaaggccatcatcttcttcgaccccgacgcgaagggcctgagcgaccccgggaagatcaagcggctgcgcgcccaggtccaggtgagcctcgaggactacatcaacgaccggcagtacgactcccgcggccggttcggggagctgctgctcctgctgcccaccctccagagcatcacgtggcagatgatcgagcagatccagttcatcaagctgttcggcatggccaagatcgacaacctgctccaggagatgctgctgtgaggactagtccctgttcccagagcccacttttttttctttttttgaaataaaatagcctgtctttcagatctcaaaggctcttttcagagccaccaaaaaaaaaaaaaaaaaaaaaaaaaaaaaaaaaaaaaaaaaaaaaaaaaaaaaaaaaaaaaaaaaaaaaaaaaaaaaaaaaaaaaaaaaaaaaaaaaaaaa

SEQ ID NO: 3437 - RNA, 1400 nt, synthetic construct
  misc_feature 1..1400: note = mRNA a-1 (hSL-A100) (opt1) from Homo sapiens__NP_000448.3__HNF4A(1-375)(S87A_K106R_K108R_K126R_K 127R)
  source 1..1400: mol_type = other RNA
aggagagtcccgcagtcggcgtccagcggctctgcttgttcgtgtgtgtgtcgttgcaggccttattcaagcttaccatgcgcctgagcaagaccctcgtggacatggacatggccgactactccgccgcgctggaccccgcctacaccacgctggagttcgagaacgtccaggtgctcaccatgggcaacgacaccagcccgtccgaggggaccaacctgaacgcccccaacagcctgggcgtgtccgccctctgcgccatctgcggggaccgggcgacgggcaagcactacggggccagctcctgcgacggctgcaagggcttcttccgccgggccgtccgcaagaaccacatgtacagctgccggttctcccgccagtgcgtggtggaccgggaccgccggaaccagtgccgctactgccggctgaagaagtgcttccgcgccgggatgcggcgcgaggcggtccagaacgagcgggaccgcatcagcacccggcgctccagctacgaggactccagcctgccctccatcaacgccctcctgcaggccgaggtgctgagccggcagatcacctcccccgtgagcggcatcaacggggacatccgcgccaagaagatcgcctccatcgcggacgtctgcgagagcatgaaggagcagctcctggtgctggtggagtgggccaagtacatcccggccttctgcgagctccccctggacgaccaggtcgccctgctccgggcccacgcgggcgagcacctcctgctgggggccaccaagcgcagcatggtgttcaaggacgtgctgctgctcggcaacgactacatcgtcccccgccactgccccgagctggccgagatgtcccgggtgagcatccgcatcctggacgagctcgtgctgccgttccaggagctgcagatcgacgacaacgagtacgcctacctcaaggccatcatcttcttcgaccccgacgcgaagggcctgtccgaccccgggaagatcaagcggctgcgcagccaggtccaggtgtccctcgaggactacatcaacgaccggcagtacgacagccgcggccggttcggggagctgctgctcctgctgcccacgctccagtccatcacctggcagatgatcgagcagatccagttcatcaagctgttcggcatggccaagatcgacaacctgctccaggagatgctgctgtgaggactagtccctgttcccagagcccacttttttttctttttttgaaataaaatagcctgtctttcagatctcaaaggctcttttcagagccaccaaaaaaaaaaaaaaaaaaaaaaaaaaaaaaaaaaaaaaaaaaaaaaaaaaaaaaaaaaaaaaaaaaaaaaaaaaaaaaaaaaaaaaaaaaaaaaaaaaaaa

SEQ ID NO: 3438 - RNA, 1400 nt, synthetic construct; identical to SEQ ID NO: 3436
  misc_feature 1..1400: note = mRNA a-1 (hSL-A100) (opt1) from Homo sapiens__NP_000448.3__HNF4A(1-375)(S87A_K106R_K108R_K126R_K 127R_S142A_S143A_S148A_T166A_S167A_S313A_S378A_T429A_T432A_ S436A_K458R_S461A)
  source 1..1400: mol_type = other RNA

SEQ ID NO: 3439 - RNA, 1400 nt, synthetic construct; identical to SEQ ID NO: 3436
  misc_feature 1..1400: note = mRNA a-1 (hSL-A100) (opt1) from Homo sapiens__NP_000448.3__HNF4A(1-375)(S87A_K106R_K108R_K126R_K 127R_S142A_S143A_S148A_T166A_S167A_S313A_S378A_T429A_T432A_ S436A_K458R_S461E)
  source 1..1400: mol_type = other RNA

SEQ ID NO: 3440 - RNA, 1400 nt, synthetic construct
  misc_feature 1..1400: note = mRNA a-1 (hSL-A100) (opt1) from Homo sapiens__NP_000448.3__HNF4A(1-375)(S87A_K106R_K108R_K126R_K 127R_S142A_S143A_S148E_T166A_S167E_S313A_S378E_T429E_T432E_ S436E_K458R_S461E)
  source 1..1400: mol_type = other RNA
aggagagtcccgcagtcggcgtccagcggctctgcttgttcgtgtgtgtgtcgttgcaggccttattcaagcttaccatgcgcctgagcaagaccctcgtggacatggacatggccgactactccgccgcgctggaccccgcctacaccacgctggagttcgagaacgtccaggtgctcaccatgggcaacgacaccagcccgtccgaggggaccaacctgaacgcccccaacagcctgggcgtgtccgccctctgcgccatctgcggggaccgggcgacgggcaagcactacggggccagctcctgcgacggctgcaagggcttcttccgccgggccgtccgcaagaaccacatgtacagctgccggttctcccgccagtgcgtggtggaccgggaccgccggaaccagtgccgctactgccggctgaagaagtgcttccgcgccgggatgcggcgcgaggcggtccagaacgagcgggaccgcatcagcacccggcgcgccgcctacgaggactccgagctgcccagcatcaacgccctcctgcaggccgaggtgctgtcccggcagatcgcggagcccgtgagcggcatcaacggggacatccgcgccaagaagatcgcctccatcgccgacgtctgcgagagcatgaaggagcagctcctggtgctggtggagtgggccaagtacatcccggcgttctgcgagctccccctggacgaccaggtcgccctgctccgggcccacgccggcgagcacctcctgctgggggccaccaagcgctccatggtgttcaaggacgtgctgctgctcggcaacgactacatcgtcccccgccactgccccgagctggcggagatgagccgggtgtccatccgcatcctggacgagctcgtgctgccgttccaggagctgcagatcgacgacaacgagtacgcctacctcaaggccatcatcttcttcgaccccgacgccaagggcctgagcgaccccgggaagatcaagcggctgcgcgcccaggtccaggtgagcctcgaggactacatcaacgaccggcagtacgactcccgcggccggttcggggagctgctgctcctgctgcccaccctccagagcatcacgtggcagatgatcgagcagatccagttcatcaagctgttcggcatggcgaagatcgacaacctgctccaggagatgctgctgtgaggactagtccctgttcccagagcccacttttttttctttttttgaaataaaatagcctgtctttcagatctcaaaggctcttttcagagccaccaaaaaaaaaaaaaaaaaaaaaaaaaaaaaaaaaaaaaaaaaaaaaaaaaaaaaaaaaaaaaaaaaaaaaaaaaaaaaaaaaaaaaaaaaaaaaaaaaaaaa

SEQ ID NO: 3441 - RNA, 1400 nt, synthetic construct
  misc_feature 1..1400: note = mRNA a-1 (hSL-A100) (opt1) from Homo sapiens__NP_000448.3__HNF4A(1-375)(S87A_K106R_K108R_K126R_K 127R_S142A_S143A_S148A_T166A_S167A_K179R_K180R_S313A_S378A_ T429A_T432A_S436A_K458R_S461E)
  source 1..1400: mol_type = other RNA
aggagagtcccgcagtcggcgtccagcggctctgcttgttcgtgtgtgtgtcgttgcaggccttattcaagcttaccatgcgcctgagcaagaccctcgtggacatggacatggccgactactccgccgcgctggaccccgcctacaccacgctggagttcgagaacgtccaggtgctcaccatgggcaacgacaccagcccgtccgaggggaccaacctgaacgcccccaacagcctgggcgtgtccgccctctgcgccatctgcggggaccgggcgacgggcaagcactacggggccagctcctgcgacggctgcaagggcttcttccgccgggccgtccgcaagaaccacatgtacagctgccggttctcccgccagtgcgtggtggaccgggaccgccggaaccagtgccgctactgccggctgaagaagtgcttccgcgccgggatgcggcgcgaggcggtccagaacgagcgggaccgcatcagcacccggcgcgccgcctacgaggactccgccctgcccagcatcaacgccctcctgcaggcggaggtgctgtcccggcagatcgccgcccccgtgagcggcatcaacggggacatccgcgcccggcgcatcgcctccatcgcggacgtctgcgagagcatgaaggagcagctcctggtgctggtggagtgggccaagtacatcccggccttctgcgagctccccctggacgaccaggtcgccctgctccgcgcccacgcgggcgagcacctcctgctgggggccaccaagcggtccatggtgttcaaggacgtgctgctgctcggcaacgactacatcgtcccccgccactgccccgagctggccgagatgagccgggtgtccatccgcatcctggacgagctcgtgctgccgttccaggagctgcagatcgacgacaacgagtacgcctacctcaaggccatcatcttcttcgaccccgacgcgaagggcctgagcgaccccgggaagatcaagcggctgcgcgcccaggtccaggtgagcctcgaggactacatcaacgaccggcagtacgactcccgcggccggttcggggagctgctgctcctgctgcccaccctccagagcatcacgtggcagatgatcgagcagatccagttcatcaagctgttcggcatggccaagatcgacaacctgctccaggagatgctgctgtgaggactagtccctgttcccagagcccacttttttttctttttttgaaataaaatagcctgtctttcagatctcaaaggctcttttcagagccaccaaaaaaaaaaaaaaaaaaaaaaaaaaaaaaaaaaaaaaaaaaaaaaaaaaaaaaaaaaaaaaaaaaaaaaaaaaaaaaaaaaaaaaaaaaaaaaaaaaaaa

SEQ ID NO: 3442 - RNA, 1400 nt, synthetic construct
  misc_feature 1..1400: note = mRNA a-1 (hSL-A100) (opt1) from Homo sapiens__NP_000448.3__HNF4A(1-375)(S87A_K106R_K108R_K126R_K 127R_S142A_S143A_S148A_T166A_S167A_K300R_K307R_K309R_S313A_ S378A_T429A_T432A_S436A_K458R_S461E)
  source 1..1400: mol_type = other RNA
aggagagtcccgcagtcggcgtccagcggctctgcttgttcgtgtgtgtgtcgttgcaggccttattcaagcttaccatgcgcctgagcaagaccctcgtggacatggacatggccgactactccgccgcgctggaccccgcctacaccacgctggagttcgagaacgtccaggtgctcaccatgggcaacgacaccagcccgtccgaggggaccaacctgaacgcccccaacagcctgggcgtgtccgccctctgcgccatctgcggggaccgggcgacgggcaagcactacggggccagctcctgcgacggctgcaagggcttcttccgccgggccgtccgcaagaaccacatgtacagctgccggttctcccgccagtgcgtggtggaccgggaccgccggaaccagtgccgctactgccggctgaagaagtgcttccgcgccgggatgcggcgcgaggcggtccagaacgagcgggaccgcatcagcacccggcgcgccgcctacgaggactccgccctgcccagcatcaacgccctcctgcaggcggaggtgctgtcccggcagatcgccgcccccgtgagcggcatcaacggggacatccgcgccaagaagatcgcctccatcgcggacgtctgcgagagcatgaaggagcagctcctggtgctggtggagtgggccaagtacatcccggccttctgcgagctccccctggacgaccaggtcgccctgctccgggcccacgcgggcgagcacctcctgctgggggccaccaagcgctccatggtgttcaaggacgtgctgctgctcggcaacgactacatcgtcccccgccactgccccgagctggccgagatgagccgggtgtccatccgcatcctggacgagctcgtgctgccgttccaggagctgcagatcgacgacaacgagtacgcctacctcaaggccatcatcttcttcgaccccgacgcgcggggcctgagcgaccccgggcgcatccggcgcctgcgggcccaggtccaggtgagcctcgaggactacatcaacgaccgccagtacgactcccggggccgcttcggggagctgctgctcctgctgcccaccctccagagcatcacgtggcagatgatcgagcagatccagttcatcaagctgttcggcatggccaagatcgacaacctgctccaggagatgctgctgtgaggactagtccctgttcccagagcccacttttttttctttttttgaaataaaatagcctgtctttcagatctcaaaggctcttttcagagccaccaaaaaaaaaaaaaaaaaaaaaaaaaaaaaaaaaaaaaaaaaaaaaaaaaaaaaaaaaaaaaaaaaaaaaaaaaaaaaaaaaaaaaaaaaaaaaaaaaaaaa

SEQ ID NO: 3443 - RNA, 1400 nt, synthetic construct; identical to SEQ ID NO: 3436
  misc_feature 1..1400: note = mRNA a-1 (hSL-A100) (opt1) from Homo sapiens__NP_000448.3__HNF4A(1-375)(S87A_K106R_K108R_K126R_K 127R_S142A_S143A_S148A_T166A_S167A_S313A_S378A_T429A_T432A_ S436A_K447R_K458R_S461E_K470R)
  source 1..1400: mol_type = other RNA

SEQ ID NO: 3444 - RNA, 1400 nt, synthetic construct
  misc_feature 1..1400: note = mRNA a-1 (hSL-A100) (opt1) from Homo sapiens__NP_000448.3__HNF4A(1-375)(S87A_K106R_K108R_K126R_K 127R_S142A_S143A_S148A_T166A_S167A_K179R_K180R_K234R_K300R_ K307R_K309R_S313A_S378A_T429A_T432A_S436A_K447R_K458R_S461E _K470R)
  source 1..1400: mol_type = other RNA
aggagagtcccgcagtcggcgtccagcggctctgcttgttcgtgtgtgtgtcgttgcaggccttattcaagcttaccatgcgcctgagcaagaccctcgtggacatggacatggccgactactccgccgcgctggaccccgcctacaccacgctggagttcgagaacgtccaggtgctcaccatgggcaacgacaccagcccgtccgaggggaccaacctgaacgcccccaacagcctgggcgtgtccgccctctgcgccatctgcggggaccgggcgacgggcaagcactacggggccagctcctgcgacggctgcaagggcttcttccgccgggccgtccgcaagaaccacatgtacagctgccggttctcccgccagtgcgtggtggaccgggaccgccggaaccagtgccgctactgccggctgaagaagtgcttccgcgccgggatgcggcgcgaggcggtccagaacgagcgggaccgcatcagcacccggcgcgccgcctacgaggactccgccctgcccagcatcaacgccctcctgcaggcggaggtgctgtcccggcagatcgccgcccccgtgagcggcatcaacggggacatccgcgcccggcgcatcgcctccatcgcggacgtctgcgagagcatgaaggagcagctcctggtgctggtggagtgggccaagtacatcccggccttctgcgagctccccctggacgaccaggtcgccctgctccgcgcccacgcgggcgagcacctcctgctgggggccacccggcgctccatggtgttcaaggacgtgctgctgctcggcaacgactacatcgtcccccggcactgccccgagctggccgagatgagccgcgtgtccatccggatcctggacgagctcgtgctgccgttccaggagctgcagatcgacgacaacgagtacgcctacctcaaggccatcatcttcttcgaccccgacgcgcgcggcctgagcgaccccgggcggatccgccggctgcgcgcccaggtccaggtgagcctcgaggactacatcaacgaccggcagtacgactcccgcggccggttcggggagctgctgctcctgctgcccaccctccagagcatcacgtggcagatgatcgagcagatccagttcatcaagctgttcggcatggccaagatcgacaacctgctccaggagatgctgctgtgaggactagtccctgttcccagagcccacttttttttctttttttgaaataaaatagcctgtctttcagatctcaaaggctcttttcagagccaccaaaaaaaaaaaaaaaaaaaaaaaaaaaaaaaaaaaaaaaaaaaaaaaaaaaaaaaaaaaaaaaaaaaaaaaaaaaaaaaaaaaaaaaaaaaaaaaaaaaaa

SEQ ID NO: 3445 - RNA, 1400 nt, synthetic construct
  misc_feature 1..1400: note = mRNA a-1 (hSL-A100) (opt1) from Homo sapiens__NP_000448.3__HNF4A(1-375)(S87A_S95A_S99A_K106R_K10 8R_K126R_K127R_S142A_S143A_S148A_T166A_S167A_S313A_S378A_T4 29A_T432A_S436A_K458R_S461E)
  source 1..1400: mol_type = other RNA
aggagagtcccgcagtcggcgtccagcggctctgcttgttcgtgtgtgtgtcgttgcaggccttattcaagcttaccatgcgcctgagcaagaccctcgtggacatggacatggccgactactccgccgcgctggaccccgcctacaccacgctggagttcgagaacgtccaggtgctcaccatgggcaacgacaccagcccgtccgaggggaccaacctgaacgcccccaacagcctgggcgtgtccgccctctgcgccatctgcggggaccgggcgacgggcaagcactacggggccagctcctgcgacggctgcaagggcttcttccgccgggccgtccgcaagaaccacatgtacgcctgccggttcgcgcgccagtgcgtggtggaccgggaccgccggaaccagtgccgctactgccggctgaagaagtgcttccgcgccgggatgcggcgcgaggccgtccagaacgagcgggaccgcatcagcacccggcgcgccgcctacgaggactccgcgctgcccagcatcaacgccctcctgcaggccgaggtgctgtcccggcagatcgccgcccccgtgagcggcatcaacggggacatccgcgcgaagaagatcgcctccatcgccgacgtctgcgagagcatgaaggagcagctcctggtgctggtggagtgggccaagtacatcccggccttctgcgagctccccctggacgaccaggtcgcgctgctccgggcccacgccggcgagcacctcctgctgggggccaccaagcgctccatggtgttcaaggacgtgctgctgctcggcaacgactacatcgtcccccgccactgccccgagctggccgagatgagccgggtgtccatccgcatcctggacgagctcgtgctgccgttccaggagctgcagatcgacgacaacgagtacgcgtacctcaaggccatcatcttcttcgaccccgacgccaagggcctgagcgaccccgggaagatcaagcggctgcgcgcccaggtccaggtgtccctcgaggactacatcaacgaccggcagtacgacagccgcggccggttcggggagctgctgctcctgctgcccaccctccagagcatcacgtggcagatgatcgagcagatccagttcatcaagctgttcggcatggcgaagatcgacaacctgctccaggagatgctgctgtgaggactagtccctgttcccagagcccacttttttttctttttttgaaataaaatagcctgtctttcagatctcaaaggctcttttcagagccaccaaaaaaaaaaaaaaaaaaaaaaaaaaaaaaaaaaaaaaaaaaaaaaaaaaaaaaaaaaaaaaaaaaaaaaaaaaaaaaaaaaaaaaaaaaaaaaaaaaaaa

SEQ ID NO: 3446 - RNA, 1400 nt, synthetic construct
  misc_feature 1..1400: note = mRNA a-1 (hSL-A100) (opt1) from Homo sapiens__NP_000448.3__HNF4A(1-375)(S87A_K106R_K108R_K126R_K 127R_S138A_T139A_S142A_S143A_S148A_T166A_S167A_S313A_S378A_ T429A_T432A_S436A_K458R_S461E)
  source 1..1400: mol_type = other RNA
aggagagtcccgcagtcggcgtccagcggctctgcttgttcgtgtgtgtgtcgttgcaggccttattcaagcttaccatgcgcctgagcaagaccctcgtggacatggacatggccgactactccgccgcgctggaccccgcctacaccacgctggagttcgagaacgtccaggtgctcaccatgggcaacgacaccagcccgtccgaggggaccaacctgaacgcccccaacagcctgggcgtgtccgccctctgcgccatctgcggggaccgggcgacgggcaagcactacggggccagctcctgcgacggctgcaagggcttcttccgccgggccgtccgcaagaaccacatgtacagctgccggttctcccgccagtgcgtggtggaccgggaccgccggaaccagtgccgctactgccggctgaagaagtgcttccgcgccgggatgcggcgcgaggcggtccagaacgagcgggaccgcatcgccgcccggcgcgccgcctacgaggacagcgcgctgccctccatcaacgccctcctgcaggccgaggtgctgagccggcagatcgccgcccccgtgtccggcatcaacggggacatccgcgcgaagaagatcgccagcatcgccgacgtctgcgagtccatgaaggagcagctcctggtgctggtggagtgggccaagtacatcccggccttctgcgagctccccctggacgaccaggtcgcgctgctccgggcccacgccggcgagcacctcctgctgggggccaccaagcgcagcatggtgttcaaggacgtgctgctgctcggcaacgactacatcgtcccccgccactgccccgagctggccgagatgtcccgggtgagcatccgcatcctggacgagctcgtgctgccgttccaggagctgcagatcgacgacaacgagtacgcgtacctcaaggccatcatcttcttcgaccccgacgccaagggcctgtccgaccccgggaagatcaagcggctgcgcgcccaggtccaggtgagcctcgaggactacatcaacgaccggcagtacgacagccgcggccggttcggggagctgctgctcctgctgcccaccctccagtccatcacctggcagatgatcgagcagatccagttcatcaagctgttcggcatggcgaagatcgacaacctgctccaggagatgctgctgtgaggactagtccctgttcccagagcccacttttttttctttttttgaaataaaatagcctgtctttcagatctcaaaggctcttttcagagccaccaaaaaaaaaaaaaaaaaaaaaaaaaaaaaaaaaaaaaaaaaaaaaaaaaaaaaaaaaaaaaaaaaaaaaaaaaaaaaaaaaaaaaaaaaaaaaaaaaaaaa

SEQ ID NO: 3447 - RNA, 1400 nt, synthetic construct
  misc_feature 1..1400: note = mRNA a-1 (hSL-A100) (opt1) from Homo sapiens__NP_000448.3__HNF4A(1-375)(S87A_S95A_S99A_K106R_K10 8R_K126R_K127R_S138A_T139A_S142A_S143A_S148A_T166A_S167A_S3 13A_S378A_T429A_T432A_S436A_K458R_S461E)
  source 1..1400: mol_type = other RNA
aggagagtcccgcagtcggcgtccagcggctctgcttgttcgtgtgtgtgtcgttgcaggccttattcaagcttaccatgcgcctgagcaagaccctcgtggacatggacatggccgactactccgccgcgctggaccccgcctacaccacgctggagttcgagaacgtccaggtgctcaccatgggcaacgacaccagcccgtccgaggggaccaacctgaacgcccccaacagcctgggcgtgtccgccctctgcgccatctgcggggaccgggcgacgggcaagcactacggggccagctcctgcgacggctgcaagggcttcttccgccgggccgtccgcaagaaccacatgtacgcctgccggttcgcgcgccagtgcgtggtggaccgggaccgccggaaccagtgccgctactgccggctgaagaagtgcttccgcgccgggatgcggcgcgaggccgtccagaacgagcgggaccgcatcgccgcccggcgcgcggcctacgaggacagcgccctgccctccatcaacgccctcctgcaggccgaggtgctgagccggcagatcgcggcccccgtgtccggcatcaacggggacatccgcgccaagaagatcgccagcatcgccgacgtctgcgagtccatgaaggagcagctcctggtgctggtggagtgggcgaagtacatcccggccttctgcgagctccccctggacgaccaggtcgccctgctccgggcccacgccggcgagcacctcctgctgggggcgaccaagcgcagcatggtgttcaaggacgtgctgctgctcggcaacgactacatcgtcccccgccactgccccgagctggccgagatgtcccgggtgagcatccgcatcctggacgagctcgtgctgccgttccaggagctgcagatcgacgacaacgagtacgcctacctcaaggccatcatcttcttcgaccccgacgcgaagggcctgtccgaccccgggaagatcaagcggctgcgcgcccaggtccaggtgagcctcgaggactacatcaacgaccggcagtacgactcccgcggccggttcggggagctgctgctcctgctgcccaccctccagagcatcacctggcagatgatcgagcagatccagttcatcaagctgttcggcatggccaagatcgacaacctgctccaggagatgctgctgtgaggactagtccctgttcccagagcccacttttttttctttttttgaaataaaatagcctgtctttcagatctcaaaggctcttttcagagccaccaaaaaaaaaaaaaaaaaaaaaaaaaaaaaaaaaaaaaaaaaaaaaaaaaaaaaaaaaaaaaaaaaaaaaaaaaaaaaaaaaaaaaaaaaaaaaaaaaaaaa

SEQ ID NO: 3448 - RNA, 1400 nt, synthetic construct
  misc_feature 1..1400: note = mRNA a-1 (hSL-A100) (opt2) from Homo sapiens__NP_000448.3__HNF4A(1-375)
  source 1..1400: mol_type = other RNA
aggagagtcccgcagtcggcgtccagcggctctgcttgttcgtgtgtgtgtcgttgcaggccttattcaagcttaccatgcgcctctccaagaccctcgtcgacatggacatggccgactactccgccgccctcgaccccgcctacaccaccctcgagttcgagaacgtccaggtcctcaccatgggcaacgacacctccccctccgagggcaccaacctcaacgcccccaactccctcggcgtctccgccctctgcgccatctgcggcgaccgcgccaccggcaagcactacggcgcctcctcctgcgacggctgcaagggcttcttccgccgctccgtccgcaagaaccacatgtactcctgccgcttctcccgccagtgcgtcgtcgacaaggacaagcgcaaccagtgccgctactgccgcctcaagaagtgcttccgcgccggcatgaagaaggaggccgtccagaacgagcgcgaccgcatctccacccgccgctcctcctacgaggactcctccctcccctccatcaacgccctcctccaggccgaggtcctctcccgccagatcacctcccccgtctccggcatcaacggcgacatccgcgccaagaagatcgcctccatcgccgacgtctgcgagtccatgaaggagcagctcctcgtcctcgtcgagtgggccaagtacatccccgccttctgcgagctccccctcgacgaccaggtcgccctcctccgcgcccacgccggcgagcacctcctcctcggcgccaccaagcgctccatggtcttcaaggacgtcctcctcctcggcaacgactacatcgtcccccgccactgccccgagctcgccgagatgtcccgcgtctccatccgcatcctcgacgagctcgtcctccccttccaggagctccagatcgacgacaacgagtacgcctacctcaaggccatcatcttcttcgaccccgacgccaagggcctctccgaccccggcaagatcaagcgcctccgctcccaggtccaggtctccctcgaggactacatcaacgaccgccagtacgactcgcgcgggcgcttcggcgagctcctcctcctcctccccaccctccagtccatcacctggcagatgatcgagcagatccagttcatcaagctgttcggcatggccaagatcgacaacctcctccaggagatgctcctctgaggactagtccctgttcccagagcccacttttttttctttttttgaaataaaatagcctgtctttcagatctcaaaggctcttttcagagccaccaaaaaaaaaaaaaaaaaaaaaaaaaaaaaaaaaaaaaaaaaaaaaaaaaaaaaaaaaaaaaaaaaaaaaaaaaaaaaaaaaaaaaaaaaaaaaaaaaaaaa

SEQ ID NO: 3449 - RNA, 1400 nt, synthetic construct
  misc_feature 1..1400: note = mRNA a-1 (hSL-A100) (opt2) from Homo sapiens__NP_000448.3__HNF4A(1-375)(S313A)
  source 1..1400: mol_type = other RNA
aggagagtcccgcagtcggcgtccagcggctctgcttgttcgtgtgtgtgtcgttgcaggccttattcaagcttaccatgcgcctctccaagaccctcgtcgacatggacatggccgactactccgccgccctcgaccccgcctacaccaccctcgagttcgagaacgtccaggtcctcaccatgggcaacgacacctccccctccgagggcaccaacctcaacgcccccaactccctcggcgtctccgccctctgcgccatctgcggcgaccgcgccaccggcaagcactacggcgcctcctcctgcgacggctgcaagggcttcttccgccgctccgtccgcaagaaccacatgtactcctgccgcttctcccgccagtgcgtcgtcgacaaggacaagcgcaaccagtgccgctactgccgcctcaagaagtgcttccgcgccggcatgaagaaggaggccgtccagaacgagcgcgaccgcatctccacccgccgctcctcctacgaggactcctccctcccctccatcaacgccctcctccaggccgaggtcctctcccgccagatcacctcccccgtctccggcatcaacggcgacatccgcgccaagaagatcgcctccatcgccgacgtctgcgagtccatgaaggagcagctcctcgtcctcgtcgagtgggccaagtacatccccgccttctgcgagctccccctcgacgaccaggtcgccctcctccgcgcccacgccggcgagcacctcctcctcggcgccaccaagcgctccatggtcttcaaggacgtcctcctcctcggcaacgactacatcgtcccccgccactgccccgagctcgccgagatgtcccgcgtctccatccgcatcctcgacgagctcgtcctccccttccaggagctccagatcgacgacaacgagtacgcctacctcaaggccatcatcttcttcgaccccgacgccaagggcctctccgaccccggcaagatcaagcgcctccgcgcccaggtccaggtctccctcgaggactacatcaacgaccgccagtacgactcccgcggccgcttcggcgagctcctcctcctcctccccaccctccagtccatcacctggcagatgatcgagcagatccagttcatcaagctcttcggcatggccaagatcgacaacctcctccaggagatgctcctctgaggactagtccctgttcccagagcccacttttttttctttttttgaaataaaatagcctgtctttcagatctcaaaggctcttttcagagccaccaaaaaaaaaaaaaaaaaaaaaaaaaaaaaaaaaaaaaaaaaaaaaaaaaaaaaaaaaaaaaaaaaaaaaaaaaaaaaaaaaaaaaaaaaaaaaaaaaaaaa

SEQ ID NO: 3450 - RNA, 1400 nt, synthetic construct
  misc_feature 1..1400: note = mRNA a-1 (hSL-A100) (opt2) from Homo sapiens__NP_000448.3__HNF4A(1-375)(S313E)
  source 1..1400: mol_type = other RNA
aggagagtcccgcagtcggcgtccagcggctctgcttgttcgtgtgtgtgtcgttgcaggccttattcaagcttaccatgcgcctctccaagaccctcgtcgacatggacatggccgactactccgccgccctcgaccccgcctacaccaccctcgagttcgagaacgtccaggtcctcaccatgggcaacgacacctccccctccgagggcaccaacctcaacgcccccaactccctcggcgtctccgccctctgcgccatctgcggcgaccgcgccaccggcaagcactacggcgcctcctcctgcgacggctgcaagggcttcttccgccgctccgtccgcaagaaccacatgtactcctgccgcttctcccgccagtgcgtcgtcgacaaggacaagcgcaaccagtgccgctactgccgcctcaagaagtgcttccgcgccggcatgaagaaggaggccgtccagaacgagcgcgaccgcatctccacccgccgctcctcctacgaggactcctccctcccctccatcaacgccctcctccaggccgaggtcctctcccgccagatcacctcccccgtctccggcatcaacggcgacatccgcgccaagaagatcgcctccatcgccgacgtctgcgagtccatgaaggagcagctcctcgtcctcgtcgagtgggccaagtacatccccgccttctgcgagctccccctcgacgaccaggtcgccctcctccgcgcccacgccggcgagcacctcctcctcggcgccaccaagcgctccatggtcttcaaggacgtcctcctcctcggcaacgactacatcgtcccccgccactgccccgagctcgccgagatgtcccgcgtctccatccgcatcctcgacgagctcgtcctccccttccaggagctccagatcgacgacaacgagtacgcctacctcaaggccatcatcttcttcgaccccgacgccaagggcctctccgaccccggcaagatcaagcgcctccgcgagcaggtccaggtctccctcgaggactacatcaacgaccgccagtacgactcccgcggccgcttcggcgagctcctcctcctcctccccaccctccagtccatcacctggcagatgatcgagcagatccagttcatcaagctcttcggcatggccaagatcgacaacctcctccaggagatgctcctctgaggactagtccctgttcccagagcccacttttttttctttttttgaaataaaatagcctgtctttcagatctcaaaggctcttttcagagccaccaaaaaaaaaaaaaaaaaaaaaaaaaaaaaaaaaaaaaaaaaaaaaaaaaaaaaaaaaaaaaaaaaaaaaaaaaaaaaaaaaaaaaaaaaaaaaaaaaaaaa

SEQ ID NO: 3451 - RNA, 1400 nt, synthetic construct
  misc_feature 1..1400: note = mRNA a-1 (hSL-A100) (opt2) from Homo sapiens__NP_000448.3__HNF4A(1-375)(S142A_S143A)
  source 1..1400: mol_type = other RNA
aggagagtcccgcagtcggcgtccagcggctctgcttgttcgtgtgtgtgtcgttgcaggccttattcaagcttaccatgcgcctctccaagaccctcgtcgacatggacatggccgactactccgccgccctcgaccccgcctacaccaccctcgagttcgagaacgtccaggtcctcaccatgggcaacgacacctccccctccgagggcaccaacctcaacgcccccaactccctcggcgtctccgccctctgcgccatctgcggcgaccgcgccaccggcaagcactacggcgcctcctcctgcgacggctgcaagggcttcttccgccgctccgtccgcaagaaccacatgtactcctgccgcttctcccgccagtgcgtcgtcgacaaggacaagcgcaaccagtgccgctactgccgcctcaagaagtgcttccgcgccggcatgaagaaggaggccgtccagaacgagcgcgaccgcatctccacccgccgcgccgcctacgaggactcctccctcccctccatcaacgccctcctccaggccgaggtcctctcccgccagatcacctcccccgtctccggcatcaacggcgacatccgcgccaagaagatcgcctccatcgccgacgtctgcgagtccatgaaggagcagctcctcgtcctcgtcgagtgggccaagtacatccccgccttctgcgagctccccctcgacgaccaggtcgccctcctccgcgcccacgccggcgagcacctcctcctcggcgccaccaagcgctccatggtcttcaaggacgtcctcctcctcggcaacgactacatcgtcccccgccactgccccgagctcgccgagatgtcccgcgtctccatccgcatcctcgacgagctcgtcctccccttccaggagctccagatcgacgacaacgagtacgcctacctcaaggccatcatcttcttcgaccccgacgccaagggcctctccgaccccggcaagatcaagcgcctccgctcccaggtccaggtctccctcgaggactacatcaacgaccgccagtacgactcccgcggccgcttcggcgagctcctcctcctcctccccaccctccagtccatcacctggcagatgatcgagcagatccagttcatcaagctcttcggcatggccaagatcgacaacctcctccaggagatgctcctctgaggactagtccctgttcccagagcccacttttttttctttttttgaaataaaatagcctgtctttcagatctcaaaggctcttttcagagccaccaaaaaaaaaaaaaaaaaaaaaaaaaaaaaaaaaaaaaaaaaaaaaaaaaaaaaaaaaaaaaaaaaaaaaaaaaaaaaaaaaaaaaaaaaaaaaaaaaaaaa

SEQ ID NO: 3452 - RNA, 1400 nt, synthetic construct
  misc_feature 1..1400: note = mRNA a-1 (hSL-A100) (opt2) from Homo sapiens__NP_000448.3__HNF4A(1-375)(S142E_S143E)
  source 1..1400: mol_type = other RNA
aggagagtcccgcagtcggcgtccagcggctctgcttgttcgtgtgtgtgtcgttgcaggccttattcaagcttaccatgcgcctctccaagaccctcgtcgacatggacatggccgactactccgccgccctcgaccccgcctacaccaccctcgagttcgagaacgtccaggtcctcaccatgggcaacgacacctccccctccgagggcaccaacctcaacgcccccaactccctcggcgtctccgccctctgcgccatctgcggcgaccgcgccaccggcaagcactacggcgcctcctcctgcgacggctgcaagggcttcttccgccgctccgtccgcaagaaccacatgtactcctgccgcttctcccgccagtgcgtcgtcgacaaggacaagcgcaaccagtgccgctactgccgcctcaagaagtgcttccgcgccggcatgaagaaggaggccgtccagaacgagcgcgaccgcatctccacccgccgcgaggagtacgaggactcctccctcccctccatcaacgccctcctccaggccgaggtcctctcccgccagatcacctcccccgtctccggcatcaacggcgacatccgcgccaagaagatcgcctccatcgccgacgtctgcgagtccatgaaggagcagctcctcgtcctcgtcgagtgggccaagtacatccccgccttctgcgagctccccctcgacgaccaggtcgccctcctccgcgcccacgccggcgagcacctcctcctcggcgccaccaagcgctccatggtcttcaaggacgtcctcctcctcggcaacgactacatcgtcccccgccactgccccgagctcgccgagatgtcccgcgtctccatccgcatcctcgacgagctcgtcctccccttccaggagctccagatcgacgacaacgagtacgcctacctcaaggccatcatcttcttcgaccccgacgccaagggcctctccgaccccggcaagatcaagcgcctccgctcccaggtccaggtctccctcgaggactacatcaacgaccgccagtacgactcccgcggccgcttcggcgagctcctcctcctcctccccaccctccagtccatcacctggcagatgatcgagcagatccagttcatcaagctcttcggcatggccaagatcgacaacctcctccaggagatgctcctctgaggactagtccctgttcccagagcccacttttttttctttttttgaaataaaatagcctgtctttcagatctcaaaggctcttttcagagccaccaaaaaaaaaaaaaaaaaaaaaaaaaaaaaaaaaaaaaaaaaaaaaaaaaaaaaaaaaaaaaaaaaaaaaaaaaaaaaaaaaaaaaaaaaaaaaaaaaaaaa

SEQ ID NO: 3453 - RNA, 1400 nt, synthetic construct
  misc_feature 1..1400: note = mRNA a-1 (hSL-A100) (opt2) from Homo sapiens__NP_000448.3__HNF4A(1-375)(S143A)
  source 1..1400: mol_type = other RNA
aggagagtcccgcagtcggcgtccagcggctctgcttgttcgtgtgtgtgtcgttgcaggccttattcaagcttaccatgcgcctctccaagaccctcgtcgacatggacatggccgactactccgccgccctcgaccccgcctacaccaccctcgagttcgagaacgtccaggtcctcaccatgggcaacgacacctccccctccgagggcaccaacctcaacgcccccaactccctcggcgtctccgccctctgcgccatctgcggcgaccgcgccaccggcaagcactacggcgcctcctcctgcgacggctgcaagggcttcttccgccgctccgtccgcaagaaccacatgtactcctgccgcttctcccgccagtgcgtcgtcgacaaggacaagcgcaaccagtgccgctactgccgcctcaagaagtgcttccgcgccggcatgaagaaggaggccgtccagaacgagcgcgaccgcatctccacccgccgctccgcctacgaggactcctccctcccctccatcaacgccctcctccaggccgaggtcctctcccgccagatcacctcccccgtctccggcatcaacggcgacatccgcgccaagaagatcgcctccatcgccgacgtctgcgagtccatgaaggagcagctcctcgtcctcgtcgagtgggccaagtacatccccgccttctgcgagctccccctcgacgaccaggtcgccctcctccgcgcccacgccggcgagcacctcctcctcggcgccaccaagcgctccatggtcttcaaggacgtcctcctcctcggcaacgactacatcgtcccccgccactgccccgagctcgccgagatgtcccgcgtctccatccgcatcctcgacgagctcgtcctccccttccaggagctccagatcgacgacaacgagtacgcctacctcaaggccatcatcttcttcgaccccgacgccaagggcctctccgaccccggcaagatcaagcgcctccgctcccaggtccaggtctccctcgaggactacatcaacgaccgccagtacgactcccgcggccgcttcggcgagctcctcctcctcctccccaccctccagtccatcacctggcagatgatcgagcagatccagttcatcaagctcttcggcatggccaagatcgacaacctcctccaggagatgctcctctgaggactagtccctgttcccagagcccacttttttttctttttttgaaataaaatagcctgtctttcagatctcaaaggctcttttcagagccaccaaaaaaaaaaaaaaaaaaaaaaaaaaaaaaaaaaaaaaaaaaaaaaaaaaaaaaaaaaaaaaaaaaaaaaaaaaaaaaaaaaaaaaaaaaaaaaaaaaaaa

SEQ ID NO: 3454 - RNA, 1400 nt, synthetic construct
  misc_feature 1..1400: note = mRNA a-1 (hSL-A100) (opt2) from Homo sapiens__NP_000448.3__HNF4A(1-375)(T166A)
  source 1..1400: mol_type = other RNA
aggagagtcccgcagtcggcgtccagcggctctgcttgttcgtgtgtgtgtcgttgcaggccttattcaagcttaccatgcgcctctccaagaccctcgtcgacatggacatggccgactactccgccgccctcgaccccgcctacaccaccctcgagttcgagaacgtccaggtcctcaccatgggcaacgacacctccccctccgagggcaccaacctcaacgcccccaactccctcggcgtctccgccctctgcgccatctgcggcgaccgcgccaccggcaagcactacggcgcctcctcctgcgacggctgcaagggcttcttccgccgctccgtccgcaagaaccacatgtactcctgccgcttctcccgccagtgcgtcgtcgacaaggacaagcgcaaccagtgccgctactgccgcctcaagaagtgcttccgcgccggcatgaagaaggaggccgtccagaacgagcgcgaccgcatctccacccgccgctcctcctacgaggactcctccctcccctccatcaacgccctcctccaggccgaggtcctctcccgccagatcgcctcccccgtctccggcatcaacggcgacatccgcgccaagaagatcgcctccatcgccgacgtctgcgagtccatgaaggagcagctcctcgtcctcgtcgagtgggccaagtacatccccgccttctgcgagctccccctcgacgaccaggtcgccctcctccgcgcccacgccggcgagcacctcctcctcggcgccaccaagcgctccatggtcttcaaggacgtcctcctcctcggcaacgactacatcgtcccccgccactgccccgagctcgccgagatgtcccgcgtctccatccgcatcctcgacgagctcgtcctccccttccaggagctccagatcgacgacaacgagtacgcctacctcaaggccatcatcttcttcgaccccgacgccaagggcctctccgaccccggcaagatcaagcgcctccgctcccaggtccaggtctccctcgaggactacatcaacgaccgccagtacgactcccgcggccgcttcggcgagctcctcctcctcctccccaccctccagtccatcacctggcagatgatcgagcagatccagttcatcaagctcttcggcatggccaagatcgacaacctcctccaggagatgctcctctgaggactagtccctgttcccagagcccacttttttttctttttttgaaataaaatagcctgtctttcagatctcaaaggctcttttcagagccaccaaaaaaaaaaaaaaaaaaaaaaaaaaaaaaaaaaaaaaaaaaaaaaaaaaaaaaaaaaaaaaaaaaaaaaaaaaaaaaaaaaaaaaaaaaaaaaaaaaaaa

SEQ ID NO: 3455 - RNA, 1400 nt, synthetic construct
  misc_feature 1..1400: note = mRNA a-1 (hSL-A100) (opt2) from Homo sapiens__NP_000448.3__HNF4A(1-375)(S167E)
  source 1..1400: mol_type = other RNA
aggagagtcccgcagtcggcgtccagcggctctgcttgttcgtgtgtgtgtcgttgcaggccttattcaagcttaccatgcgcctctccaagaccctcgtcgacatggacatggccgactactccgccgccctcgaccccgcctacaccaccctcgagttcgagaacgtccaggtcctcaccatgggcaacgacacctccccctccgagggcaccaacctcaacgcccccaactccctcggcgtctccgccctctgcgccatctgcggcgaccgcgccaccggcaagcactacggcgcctcctcctgcgacggctgcaagggcttcttccgccgctccgtccgcaagaaccacatgtactcctgccgcttctcccgccagtgcgtcgtcgacaaggacaagcgcaaccagtgccgctactgccgcctcaagaagtgcttccgcgccggcatgaagaaggaggccgtccagaacgagcgcgaccgcatctccacccgccgctcctcctacgaggactcctccctcccctccatcaacgccctcctccaggccgaggtcctctcccgccagatcaccgagcccgtctccggcatcaacggcgacatccgcgccaagaagatcgcctccatcgccgacgtctgcgagtccatgaaggagcagctcctcgtcctcgtcgagtgggccaagtacatccccgccttctgcgagctccccctcgacgaccaggtcgccctcctccgcgcccacgccggcgagcacctcctcctcggcgccaccaagcgctccatggtcttcaaggacgtcctcctcctcggcaacgactacatcgtcccccgccactgccccgagctcgccgagatgtcccgcgtctccatccgcatcctcgacgagctcgtcctccccttccaggagctccagatcgacgacaacgagtacgcctacctcaaggccatcatcttcttcgaccccgacgccaagggcctctccgaccccggcaagatcaagcgcctccgctcccaggtccaggtctccctcgaggactacatcaacgaccgccagtacgactcccgcggccgcttcggcgagctcctcctcctcctccccaccctccagtccatcacctggcagatgatcgagcagatccagttcatcaagctcttcggcatggccaagatcgacaacctcctccaggagatgctcctctgaggactagtccctgttcccagagcccacttttttttctttttttgaaataaaatagcctgtctttcagatctcaaaggctcttttcagagccaccaaaaaaaaaaaaaaaaaaaaaaaaaaaaaaaaaaaaaaaaaaaaaaaaaaaaaaaaaaaaaaaaaaaaaaaaaaaaaaaaaaaaaaaaaaaaaaaaaaaaa

SEQ ID NO: 3456 - RNA, 1400 nt, synthetic construct
  misc_feature 1..1400: note = mRNA a-1 (hSL-A100) (opt2) from Homo sapiens__NP_000448.3__HNF4A(1-375)(S167A)
  source 1..1400: mol_type = other RNA
aggagagtcccgcagtcggcgtccagcggctctgcttgttcgtgtgtgtgtcgttgcaggccttattcaagcttaccatgcgcctctccaagaccctcgtcgacatggacatggccgactactccgccgccctcgaccccgcctacaccaccctcgagttcgagaacgtccaggtcctcaccatgggcaacgacacctccccctccgagggcaccaacctcaacgcccccaactccctcggcgtctccgccctctgcgccatctgcggcgaccgcgccaccggcaagcactacggcgcctcctcctgcgacggctgcaagggcttcttccgccgctccgtccgcaagaaccacatgtactcctgccgcttctcccgccagtgcgtcgtcgacaaggacaagcgcaaccagtgccgctactgccgcctcaagaagtgcttccgcgccggcatgaagaaggaggccgtccagaacgagcgcgaccgcatctccacccgccgctcctcctacgaggactcctccctcccctccatcaacgccctcctccaggccgaggtcctctcccgccagatcaccgcccccgtctccggcatcaacggcgacatccgcgccaagaagatcgcctccatcgccgacgtctgcgagtccatgaaggagcagctcctcgtcctcgtcgagtgggccaagtacatccccgccttctgcgagctccccctcgacgaccaggtcgccctcctccgcgcccacgccggcgagcacctcctcctcggcgccaccaagcgctccatggtcttcaaggacgtcctcctcctcggcaacgactacatcgtcccccgccactgccccgagctcgccgagatgtcccgcgtctccatccgcatcctcgacgagctcgtcctccccttccaggagctccagatcgacgacaacgagtacgcctacctcaaggccatcatcttcttcgaccccgacgccaagggcctctccgaccccggcaagatcaagcgcctccgctcccaggtccaggtctccctcgaggactacatcaacgaccgccagtacgactcccgcggccgcttcggcgagctcctcctcctcctccccaccctccagtccatcacctggcagatgatcgagcagatccagttcatcaagctcttcggcatggccaagatcgacaacctcctccaggagatgctcctctgaggactagtccctgttcccagagcccacttttttttctttttttgaaataaaatagcctgtctttcagatctcaaaggctcttttcagagccaccaaaaaaaaaaaaaaaaaaaaaaaaaaaaaaaaaaaaaaaaaaaaaaaaaaaaaaaaaaaaaaaaaaaaaaaaaaaaaaaaaaaaaaaaaaaaaaaaaaaaa

SEQ ID NO: 3457 - RNA, 1400 nt, synthetic construct; identical to SEQ ID NO: 3456
  misc_feature 1..1400: note = mRNA a-1 (hSL-A100) (opt2) from Homo sapiens__NP_000448.3__HNF4A(1-375)(S167A_S378A_T429A_T432A_ S436A)
  source 1..1400: mol_type = other RNA

SEQ ID NO: 3458 - RNA, 1400 nt, synthetic construct; identical to SEQ ID NO: 3455
  misc_feature 1..1400: note = mRNA a-1 (hSL-A100) (opt2) from Homo sapiens__NP_000448.3__HNF4A(1-375)(S167E_S378E_T429E_T432E_ S436E)
  source 1..1400: mol_type = other RNA

SEQ ID NO: 3459 - RNA, 1400 nt, synthetic construct
  misc_feature 1..1400: note = mRNA a-1 (hSL-A100) (opt2) from Homo sapiens__NP_000448.3__HNF4A(1-375)(S87A)
  source 1..1400: mol_type = other RNA
aggagagtcccgcagtcggcgtccagcggctctgcttgttcgtgtgtgtgtcgttgcaggccttattcaagcttaccatgcgcctctccaagaccctcgtcgacatggacatggccgactactccgccgccctcgaccccgcctacaccaccctcgagttcgagaacgtccaggtcctcaccatgggcaacgacacctccccctccgagggcaccaacctcaacgcccccaactccctcggcgtctccgccctctgcgccatctgcggcgaccgcgccaccggcaagcactacggcgcctcctcctgcgacggctgcaagggcttcttccgccgcgccgtccgcaagaaccacatgtactcctgccgcttctcccgccagtgcgtcgtcgacaaggacaagcgcaaccagtgccgctactgccgcctcaagaagtgcttccgcgccggcatgaagaaggaggccgtccagaacgagcgcgaccgcatctccacccgccgctcctcctacgaggactcctccctcccctccatcaacgccctcctccaggccgaggtcctctcccgccagatcacctcccccgtctccggcatcaacggcgacatccgcgccaagaagatcgcctccatcgccgacgtctgcgagtccatgaaggagcagctcctcgtcctcgtcgagtgggccaagtacatccccgccttctgcgagctccccctcgacgaccaggtcgccctcctccgcgcccacgccggcgagcacctcctcctcggcgccaccaagcgctccatggtcttcaaggacgtcctcctcctcggcaacgactacatcgtcccccgccactgccccgagctcgccgagatgtcccgcgtctccatccgcatcctcgacgagctcgtcctccccttccaggagctccagatcgacgacaacgagtacgcctacctcaaggccatcatcttcttcgaccccgacgccaagggcctctccgaccccggcaagatcaagcgcctccgctcccaggtccaggtctccctcgaggactacatcaacgaccgccagtacgactcccgcggccgcttcggcgagctcctcctcctcctccccaccctccagtccatcacctggcagatgatcgagcagatccagttcatcaagctcttcggcatggccaagatcgacaacctcctccaggagatgctcctctgaggactagtccctgttcccagagcccacttttttttctttttttgaaataaaatagcctgtctttcagatctcaaaggctcttttcagagccaccaaaaaaaaaaaaaaaaaaaaaaaaaaaaaaaaaaaaaaaaaaaaaaaaaaaaaaaaaaaaaaaaaaaaaaaaaaaaaaaaaaaaaaaaaaaaaaaaaaaaa

SEQ ID NO: 3460 - RNA, 1400 nt, synthetic construct
  misc_feature 1..1400: note = mRNA a-1 (hSL-A100) (opt2) from Homo sapiens__NP_000448.3__HNF4A(1-375)(S87E)
  source 1..1400: mol_type = other RNA
aggagagtcccgcagtcggcgtccagcggctctgcttgttcgtgtgtgtgtcgttgcaggccttattcaagcttaccatgcgcctctccaagaccctcgtcgacatggacatggccgactactccgccgccctcgaccccgcctacaccaccctcgagttcgagaacgtccaggtcctcaccatgggcaacgacacctccccctccgagggcaccaacctcaacgcccccaactccctcggcgtctccgccctctgcgccatctgcggcgaccgcgccaccggcaagcactacggcgcctcctcctgcgacggctgcaagggcttcttccgccgcgaggtccgcaagaaccacatgtactcctgccgcttctcccgccagtgcgtcgtcgacaaggacaagcgcaaccagtgccgctactgccgcctcaagaagtgcttccgcgccggcatgaagaaggaggccgtccagaacgagcgcgaccgcatctccacccgccgctcctcctacgaggactcctccctcccctccatcaacgccctcctccaggccgaggtcctctcccgccagatcacctcccccgtctccggcatcaacggcgacatccgcgccaagaagatcgcctccatcgccgacgtctgcgagtccatgaaggagcagctcctcgtcctcgtcgagtgggccaagtacatccccgccttctgcgagctccccctcgacgaccaggtcgccctcctccgcgcccacgccggcgagcacctcctcctcggcgccaccaagcgctccatggtcttcaaggacgtcctcctcctcggcaacgactacatcgtcccccgccactgccccgagctcgccgagatgtcccgcgtctccatccgcatcctcgacgagctcgtcctccccttccaggagctccagatcgacgacaacgagtacgcctacctcaaggccatcatcttcttcgaccccgacgccaagggcctctccgaccccggcaagatcaagcgcctccgctcccaggtccaggtctccctcgaggactacatcaacgaccgccagtacgactcccgcggccgcttcggcgagctcctcctcctcctccccaccctccagtccatcacctggcagatgatcgagcagatccagttcatcaagctcttcggcatggccaagatcgacaacctcctccaggagatgctcctctgaggactagtccctgttcccagagcccacttttttttctttttttgaaataaaatagcctgtctttcagatctcaaaggctcttttcagagccaccaaaaaaaaaaaaaaaaaaaaaaaaaaaaaaaaaaaaaaaaaaaaaaaaaaaaaaaaaaaaaaaaaaaaaaaaaaaaaaaaaaaaaaaaaaaaaaaaaaaaa

SEQ ID NO: 3461 - RNA, 1400 nt, synthetic construct
  misc_feature 1..1400: note = mRNA a-1 (hSL-A100) (opt2) from Homo sapiens__NP_000448.3__HNF4A(1-375)(R2V)
  source 1..1400: mol_type = other RNA
aggagagtcccgcagtcggcgtccagcggctctgcttgttcgtgtgtgtgtcgttgcaggccttattcaagcttaccatggtcctctccaagaccctcgtcgacatggacatggccgactactccgccgccctcgaccccgcctacaccaccctcgagttcgagaacgtccaggtcctcaccatgggcaacgacacctccccctccgagggcaccaacctcaacgcccccaactccctcggcgtctccgccctctgcgccatctgcggcgaccgcgccaccggcaagcactacggcgcctcctcctgcgacggctgcaagggcttcttccgccgctccgtccgcaagaaccacatgtactcctgccgcttctcccgccagtgcgtcgtcgacaaggacaagcgcaaccagtgccgctactgccgcctcaagaagtgcttccgcgccggcatgaagaaggaggccgtccagaacgagcgcgaccgcatctccacccgccgctcctcctacgaggactcctccctcccctccatcaacgccctcctccaggccgaggtcctctcccgccagatcacctcccccgtctccggcatcaacggcgacatccgcgccaagaagatcgcctccatcgccgacgtctgcgagtccatgaaggagcagctcctcgtcctcgtcgagtgggccaagtacatccccgccttctgcgagctccccctcgacgaccaggtcgccctcctccgcgcccacgccggcgagcacctcctcctcggcgccaccaagcgctccatggtcttcaaggacgtcctcctcctcggcaacgactacatcgtcccccgccactgccccgagctcgccgagatgtcccgcgtctccatccgcatcctcgacgagctcgtcctccccttccaggagctccagatcgacgacaacgagtacgcctacctcaaggccatcatcttcttcgaccccgacgccaagggcctctccgaccccggcaagatcaagcgcctccgctcccaggtccaggtctccctcgaggactacatcaacgaccgccagtacgactcccgcggccgcttcggcgagctcctcctcctcctccccaccctccagtccatcacctggcagatgatcgagcagatccagttcatcaagctcttcggcatggccaagatcgacaacctcctccaggagatgctcctctgaggactagtccctgttcccagagcccacttttttttctttttttgaaataaaatagcctgtctttcagatctcaaaggctcttttcagagccaccaaaaaaaaaaaaaaaaaaaaaaaaaaaaaaaaaaaaaaaaaaaaaaaaaaaaaaaaaaaaaaaaaaaaaaaaaaaaaaaaaaaaaaaaaaaaaaaaaaaaa

SEQ ID NO: 3462 - RNA, 1400 nt, synthetic construct
  misc_feature 1..1400: note = mRNA a-1 (hSL-A100) (opt2) from Homo sapiens__NP_000448.3__HNF4A(1-375)(R2V_K5V)
  source 1..1400: mol_type = other RNA
aggagagtcccgcagtcggcgtccagcggctctgcttgttcgtgtgtgtgtcgttgcaggccttattcaagcttaccatggtcctctccgtcaccctcgtcgacatggacatggccgactactccgccgccctcgaccccgcctacaccaccctcgagttcgagaacgtccaggtcctcaccatgggcaacgacacctccccctccgagggcaccaacctcaacgcccccaactccctcggcgtctccgccctctgcgccatctgcggcgaccgcgccaccggcaagcactacggcgcctcctcctgcgacggctgcaagggcttcttccgccgctccgtccgcaagaaccacatgtactcctgccgcttctcccgccagtgcgtcgtcgacaaggacaagcgcaaccagtgccgctactgccgcctcaagaagtgcttccgcgccggcatgaagaaggaggccgtccagaacgagcgcgaccgcatctccacccgccgctcctcctacgaggactcctccctcccctccatcaacgccctcctccaggccgaggtcctctcccgccagatcacctcccccgtctccggcatcaacggcgacatccgcgccaagaagatcgcctccatcgccgacgtctgcgagtccatgaaggagcagctcctcgtcctcgtcgagtgggccaagtacatccccgccttctgcgagctccccctcgacgaccaggtcgccctcctccgcgcccacgccggcgagcacctcctcctcggcgccaccaagcgctccatggtcttcaaggacgtcctcctcctcggcaacgactacatcgtcccccgccactgccccgagctcgccgagatgtcccgcgtctccatccgcatcctcgacgagctcgtcctccccttccaggagctccagatcgacgacaacgagtacgcctacctcaaggccatcatcttcttcgaccccgacgccaagggcctctccgaccccggcaagatcaagcgcctccgctcccaggtccaggtctccctcgaggactacatcaacgaccgccagtacgactcccgcggccgcttcggcgagctcctcctcctcctccccaccctccagtccatcacctggcagatgatcgagcagatccagttcatcaagctcttcggcatggccaagatcgacaacctcctccaggagatgctcctctgaggactagtccctgttcccagagcccacttttttttctttttttgaaataaaatagcctgtctttcagatctcaaaggctcttttcagagccaccaaaaaaaaaaaaaaaaaaaaaaaaaaaaaaaaaaaaaaaaaaaaaaaaaaaaaaaaaaaaaaaaaaaaaaaaaaaaaaaaaaaaaaaaaaaaaaaaaaaaa

SEQ ID NO: 3463 - RNA, 1400 nt, synthetic construct
  misc_feature 1..1400: note = mRNA a-1 (hSL-A100) (opt2) from Homo sapiens__NP_000448.3__HNF4A(1-375)(K179R_K180R)
  source 1..1400: mol_type = other RNA
aggagagtcccgcagtcggcgtccagcggctctgcttgttcgtgtgtgtgtcgttgcaggccttattcaagcttaccatgcgcctctccaagaccctcgtcgacatggacatggccgactactccgccgccctcgaccccgcctacaccaccctcgagttcgagaacgtccaggtcctcaccatgggcaacgacacctccccctccgagggcaccaacctcaacgcccccaactccctcggcgtctccgccctctgcgccatctgcggcgaccgcgccaccggcaagcactacggcgcctcctcctgcgacggctgcaagggcttcttccgccgctccgtccgcaagaaccacatgtactcctgccgcttctcccgccagtgcgtcgtcgacaaggacaagcgcaaccagtgccgctactgccgcctcaagaagtgcttccgcgccggcatgaagaaggaggccgtccagaacgagcgcgaccgcatctccacccgccgctcctcctacgaggactcctccctcccctccatcaacgccctcctccaggccgaggtcctctcccgccagatcacctcccccgtctccggcatcaacggcgacatccgcgcccgccgcatcgcctccatcgccgacgtctgcgagtccatgaaggagcagctcctcgtcctcgtcgagtgggccaagtacatccccgccttctgcgagctccccctcgacgaccaggtcgccctcctccgcgcccacgccggcgagcacctcctcctcggcgccaccaagcgctccatggtcttcaaggacgtcctcctcctcggcaacgactacatcgtcccccgccactgccccgagctcgccgagatgtcccgcgtctccatccgcatcctcgacgagctcgtcctccccttccaggagctccagatcgacgacaacgagtacgcctacctcaaggccatcatcttcttcgaccccgacgccaagggcctctccgaccccggcaagatcaagcgcctccgctcccaggtccaggtctccctcgaggactacatcaacgaccgccagtacgactcccgcggccgcttcggcgagctcctcctcctcctccccaccctccagtccatcacctggcagatgatcgagcagatccagttcatcaagctcttcggcatggccaagatcgacaacctcctccaggagatgctcctctgaggactagtccctgttcccagagcccacttttttttctttttttgaaataaaatagcctgtctttcagatctcaaaggctcttttcagagccaccaaaaaaaaaaaaaaaaaaaaaaaaaaaaaaaaaaaaaaaaaaaaaaaaaaaaaaaaaaaaaaaaaaaaaaaaaaaaaaaaaaaaaaaaaaaaaaaaaaaaa

SEQ ID NO: 3464 - RNA, 1400 nt, synthetic construct
  misc_feature 1..1400: note = mRNA a-1 (hSL-A100) (opt2) from Homo sapiens__NP_000448.3__HNF4A(1-375)(K234R)
  source 1..1400: mol_type = other RNA
aggagagtcccgcagtcggcgtccagcggctctgcttgttcgtgtgtgtgtcgttgcaggccttattcaagcttaccatgcgcctctccaagaccctcgtcgacatggacatggccgactactccgccgccctcgaccccgcctacaccaccctcgagttcgagaacgtccaggtcctcaccatgggcaacgacacctccccctccgagggcaccaacctcaacgcccccaactccctcggcgtctccgccctctgcgccatctgcggcgaccgcgccaccggcaagcactacggcgcctcctcctgcgacggctgcaagggcttcttccgccgctccgtccgcaagaaccacatgtactcctgccgcttctcccgccagtgcgtcgtcgacaaggacaagcgcaaccagtgccgctactgccgcctcaagaagtgcttccgcgccggcatgaagaaggaggccgtccagaacgagcgcgaccgcatctccacccgccgctcctcctacgaggactcctccctcccctccatcaacgccctcctccaggccgaggtcctctcccgccagatcacctcccccgtctccggcatcaacggcgacatccgcgccaagaagatcgcctccatcgccgacgtctgcgagtccatgaaggagcagctcctcgtcctcgtcgagtgggccaagtacatccccgccttctgcgagctccccctcgacgaccaggtcgccctcctccgcgcccacgccggcgagcacctcctcctcggcgccacccgccgctccatggtcttcaaggacgtcctcctcctcggcaacgactacatcgtcccccgccactgccccgagctcgccgagatgtcccgcgtctccatccgcatcctcgacgagctcgtcctccccttccaggagctccagatcgacgacaacgagtacgcctacctcaaggccatcatcttcttcgaccccgacgccaagggcctctccgaccccggcaagatcaagcgcctccgctcccaggtccaggtctccctcgaggactacatcaacgaccgccagtacgactcccgcggccgcttcggcgagctcctcctcctcctccccaccctccagtccatcacctggcagatgatcgagcagatccagttcatcaagctcttcggcatggccaagatcgacaacctcctccaggagatgctcctctgaggactagtccctgttcccagagcccacttttttttctttttttgaaataaaatagcctgtctttcagatctcaaaggctcttttcagagccaccaaaaaaaaaaaaaaaaaaaaaaaaaaaaaaaaaaaaaaaaaaaaaaaaaaaaaaaaaaaaaaaaaaaaaaaaaaaaaaaaaaaaaaaaaaaaaaaaaaaaa

SEQ ID NO: 3465 - RNA, 1400 nt, synthetic construct
  misc_feature 1..1400: note = mRNA a-1 (hSL-A100) (opt2) from Homo sapiens__NP_000448.3__HNF4A(1-375)(K300R)
  source 1..1400: mol_type = other RNA
aggagagtcccgcagtcggcgtccagcggctctgcttgttcgtgtgtgtgtcgttgcaggccttattcaagcttaccatgcgcctctccaagaccctcgtcgacatggacatggccgactactccgccgccctcgaccccgcctacaccaccctcgagttcgagaacgtccaggtcctcaccatgggcaacgacacctccccctccgagggcaccaacctcaacgcccccaactccctcggcgtctccgccctctgcgccatctgcggcgaccgcgccaccggcaagcactacggcgcctcctcctgcgacggctgcaagggcttcttccgccgctccgtccgcaagaaccacatgtactcctgccgcttctcccgccagtgcgtcgtcgacaaggacaagcgcaaccagtgccgctactgccgcctcaagaagtgcttccgcgccggcatgaagaaggaggccgtccagaacgagcgcgaccgcatctccacccgccgctcctcctacgaggactcctccctcccctccatcaacgccctcctccaggccgaggtcctctcccgccagatcacctcccccgtctccggcatcaacggcgacatccgcgccaagaagatcgcctccatcgccgacgtctgcgagtccatgaaggagcagctcctcgtcctcgtcgagtgggccaagtacatccccgccttctgcgagctccccctcgacgaccaggtcgccctcctccgcgcccacgccggcgagcacctcctcctcggcgccaccaagcgctccatggtcttcaaggacgtcctcctcctcggcaacgactacatcgtcccccgccactgccccgagctcgccgagatgtcccgcgtctccatccgcatcctcgacgagctcgtcctccccttccaggagctccagatcgacgacaacgagtacgcctacctcaaggccatcatcttcttcgaccccgacgcccgcggcctctccgaccccggcaagatcaagcgcctccgctcccaggtccaggtctccctcgaggactacatcaacgaccgccagtacgactcccgcggccgcttcggcgagctcctcctcctcctccccaccctccagtccatcacctggcagatgatcgagcagatccagttcatcaagctcttcggcatggccaagatcgacaacctcctccaggagatgctcctctgaggactagtccctgttcccagagcccacttttttttctttttttgaaataaaatagcctgtctttcagatctcaaaggctcttttcagagccaccaaaaaaaaaaaaaaaaaaaaaaaaaaaaaaaaaaaaaaaaaaaaaaaaaaaaaaaaaaaaaaaaaaaaaaaaaaaaaaaaaaaaaaaaaaaaaaaaaaaaa

SEQ ID NO: 3466 - RNA, 1400 nt, synthetic construct
  misc_feature 1..1400: note = mRNA a-1 (hSL-A100) (opt2) from Homo sapiens__NP_000448.3__HNF4A(1-375)(K300R_K307R_K309R)
  source 1..1400: mol_type = other RNA
aggagagtcccgcagtcggcgtccagcggctctgcttgttcgtgtgtgtgtcgttgcaggccttattcaagcttaccatgcgcctctccaagaccctcgtcgacatggacatggccgactactccgccgccctcgaccccgcctacaccaccctcgagttcgagaacgtccaggtcctcaccatgggcaacgacacctccccctccgagggcaccaacctcaacgcccccaactccctcggcgtctccgccctctgcgccatctgcggcgaccgcgccaccggcaagcactacggcgcctcctcctgcgacggctgcaagggcttcttccgccgctccgtccgcaagaaccacatgtactcctgccgcttctcccgccagtgcgtcgtcgacaaggacaagcgcaaccagtgccgctactgccgcctcaagaagtgcttccgcgccggcatgaagaaggaggccgtccagaacgagcgcgaccgcatctccacccgccgctcctcctacgaggactcctccctcccctccatcaacgccctcctccaggccgaggtcctctcccgccagatcacctcccccgtctccggcatcaacggcgacatccgcgccaagaagatcgcctccatcgccgacgtctgcgagtccatgaaggagcagctcctcgtcctcgtcgagtgggccaagtacatccccgccttctgcgagctccccctcgacgaccaggtcgccctcctccgcgcccacgccggcgagcacctcctcctcggcgccaccaagcgctccatggtcttcaaggacgtcctcctcctcggcaacgactacatcgtcccccgccactgccccgagctcgccgagatgtcccgcgtctccatccgcatcctcgacgagctcgtcctccccttccaggagctccagatcgacgacaacgagtacgcctacctcaaggccatcatcttcttcgaccccgacgcccgcggcctctccgaccccggccgcatccgccgcctccgctcccaggtccaggtctccctcgaggactacatcaacgaccgccagtacgactcccgcggccgcttcggcgagctcctcctcctcctccccaccctccagtccatcacctggcagatgatcgagcagatccagttcatcaagctcttcggcatggccaagatcgacaacctcctccaggagatgctcctctgaggactagtccctgttcccagagcccacttttttttctttttttgaaataaaatagcctgtctttcagatctcaaaggctcttttcagagccaccaaaaaaaaaaaaaaaaaaaaaaaaaaaaaaaaaaaaaaaaaaaaaaaaaaaaaaaaaaaaaaaaaaaaaaaaaaaaaaaaaaaaaaaaaaaaaaaaaaaaa

SEQ ID NO: 3467 - RNA, 1400 nt, synthetic construct
  misc_feature 1..1400: note = mRNA a-1 (hSL-A100) (opt2) from Homo sapiens__NP_000448.3__HNF4A(1-375)(K447R_K470R)
  source 1..1400: mol_type = other RNA
aggagagtcccgcagtcggcgtccagcggctctgcttgttcgtgtgtgtgtcgttgcaggccttattcaagcttaccatgcgcctctccaagaccctcgtcgacatggacatggccgactactccgccgccctcgaccccgcctacaccaccctcgagttcgagaacgtccaggtcctcaccatgggcaacgacacctccccctccgagggcaccaacctcaacgcccccaactccctcggcgtctccgccctctgcgccatctgcggcgaccgcgccaccggcaagcactacggcgcctcctcctgcgacggctgcaagggcttcttccgccgctccgtccgcaagaaccacatgtactcctgccgcttctcccgccagtgcgtcgtcgacaaggacaagcgcaaccagtgccgctactgccgcctcaagaagtgcttccgcgccggcatgaagaaggaggccgtccagaacgagcgcgaccgcatctccacccgccgctcctcctacgaggactcctccctcccctccatcaacgccctcctccaggccgaggtcctctcccgccagatcacctcccccgtctccggcatcaacggcgacatccgcgccaagaagatcgcctccatcgccgacgtctgcgagtccatgaaggagcagctcctcgtcctcgtcgagtgggccaagtacatccccgccttctgcgagctccccctcgacgaccaggtcgccctcctccgcgcccacgccggcgagcacctcctcctcggcgccaccaagcgctccatggtcttcaaggacgtcctcctcctcggcaacgactacatcgtcccccgccactgccccgagctcgccgagatgtcccgcgtctccatccgcatcctcgacgagctcgtcctccccttccaggagctccagatcgacgacaacgagtacgcctacctcaaggccatcatcttcttcgaccccgacgccaagggcctctccgaccccggcaagatcaagcgcctccgctcccaggtccaggtctccctcgaggactacatcaacgaccgccagtacgactcccgcggccgcttcggcgagctcctcctcctcctccccaccctccagtccatcacctggcagatgatcgagcagatccagttcatcaagctcttcggcatggccaagatcgacaacctcctccaggagatgctcctctgaggactagtccctgttcccagagcccacttttttttctttttttgaaataaaatagcctgtctttcagatctcaaaggctcttttcagagccaccaaaaaaaaaaaaaaaaaaaaaaaaaaaaaaaaaaaaaaaaaaaaaaaaaaaaaaaaaaaaaaaaaaaaaaaaaaaaaaaaaaaaaaaaaaaaaaaaaaaaa

SEQ ID NO: 3468 - RNA, 1400 nt, synthetic construct; identical to SEQ ID NO: 3467
  misc_feature 1..1400: note = mRNA a-1 (hSL-A100) (opt2) from Homo sapiens__NP_000448.3__HNF4A(1-375)(K458R)
  source 1..1400: mol_type = other RNA

SEQ ID NO: 3469 - RNA, 1400 nt, synthetic construct
  misc_feature 1..1400: note = mRNA a-1 (hSL-A100) (opt2) from Homo sapiens__NP_000448.3__HNF4A(1-375)(K106R_K108R_K126R_K127R)
  source 1..1400: mol_type = other RNA
aggagagtcccgcagtcggcgtccagcggctctgcttgttcgtgtgtgtgtcgttgcaggccttattcaagcttaccatgcgcctctccaagaccctcgtcgacatggacatggccgactactccgccgccctcgaccccgcctacaccaccctcgagttcgagaacgtccaggtcctcaccatgggcaacgacacctccccctccgagggcaccaacctcaacgcccccaactccctcggcgtctccgccctctgcgccatctgcggcgaccgcgccaccggcaagcactacggcgcctcctcctgcgacggctgcaagggcttcttccgccgctccgtccgcaagaaccacatgtactcctgccgcttctcccgccagtgcgtcgtcgaccgcgaccgccgcaaccagtgccgctactgccgcctcaagaagtgcttccgcgccggcatgcgccgcgaggccgtccagaacgagcgcgaccgcatctccacccgccgctcctcctacgaggactcctccctcccctccatcaacgccctcctccaggccgaggtcctctcccgccagatcacctcccccgtctccggcatcaacggcgacatccgcgccaagaagatcgcctccatcgccgacgtctgcgagtccatgaaggagcagctcctcgtcctcgtcgagtgggccaagtacatccccgccttctgcgagctccccctcgacgaccaggtcgccctcctccgcgcccacgccggcgagcacctcctcctcggcgccaccaagcgctccatggtcttcaaggacgtcctcctcctcggcaacgactacatcgtcccccgccactgccccgagctcgccgagatgtcccgcgtctccatccgcatcctcgacgagctcgtcctccccttccaggagctccagatcgacgacaacgagtacgcctacctcaaggccatcatcttcttcgaccccgacgccaagggcctctccgaccccggcaagatcaagcgcctccgctcccaggtccaggtctccctcgaggactacatcaacgaccgccagtacgactcccgcggccgcttcggcgagctcctcctcctcctccccaccctccagtccatcacctggcagatgatcgagcagatccagttcatcaagctcttcggcatggccaagatcgacaacctcctccaggagatgctcctctgaggactagtccctgttcccagagcccacttttttttctttttttgaaataaaatagcctgtctttcagatctcaaaggctcttttcagagccaccaaaaaaaaaaaaaaaaaaaaaaaaaaaaaaaaaaaaaaaaaaaaaaaaaaaaaaaaaaaaaaaaaaaaaaaaaaaaaaaaaaaaaaaaaaaaaaaaaaaaa

SEQ ID NO: 3470 - RNA, 1400 nt, synthetic construct
  misc_feature 1..1400: note = mRNA a-1 (hSL-A100) (opt2) from Homo sapiens__NP_000448.3__HNF4A(1-375)(E285Q)
  source 1..1400: mol_type = other RNA
aggagagtcccgcagtcggcgtccagcggctctgcttgttcgtgtgtgtgtcgttgcaggccttattcaagcttaccatgcgcctctccaagaccctcgtcgacatggacatggccgactactccgccgccctcgaccccgcctacaccaccctcgagttcgagaacgtccaggtcctcaccatgggcaacgacacctccccctccgagggcaccaacctcaacgcccccaactccctcggcgtctccgccctctgcgccatctgcggcgaccgcgccaccggcaagcactacggcgcctcctcctgcgacggctgcaagggcttcttccgccgctccgtccgcaagaaccacatgtactcctgccgcttctcccgccagtgcgtcgtcgacaaggacaagcgcaaccagtgccgctactgccgcctcaagaagtgcttccgcgccggcatgaagaaggaggccgtccagaacgagcgcgaccgcatctccacccgccgctcctcctacgaggactcctccctcccctccatcaacgccctcctccaggccgaggtcctctcccgccagatcacctcccccgtctccggcatcaacggcgacatccgcgccaagaagatcgcctccatcgccgacgtctgcgagtccatgaaggagcagctcctcgtcctcgtcgagtgggccaagtacatccccgccttctgcgagctccccctcgacgaccaggtcgccctcctccgcgcccacgccggcgagcacctcctcctcggcgccaccaagcgctccatggtcttcaaggacgtcctcctcctcggcaacgactacatcgtcccccgccactgccccgagctcgccgagatgtcccgcgtctccatccgcatcctcgacgagctcgtcctccccttccaggagctccagatcgacgacaaccagtacgcctacctcaaggccatcatcttcttcgaccccgacgccaagggcctctccgaccccggcaagatcaagcgcctccgctcccaggtccaggtctccctcgaggactacatcaacgaccgccagtacgactcccgcggccgcttcggcgagctcctcctcctcctccccaccctccagtccatcacctggcagatgatcgagcagatccagttcatcaagctcttcggcatggccaagatcgacaacctcctccaggagatgctcctctgaggactagtccctgttcccagagcccacttttttttctttttttgaaataaaatagcctgtctttcagatctcaaaggctcttttcagagccaccaaaaaaaaaaaaaaaaaaaaaaaaaaaaaaaaaaaaaaaaaaaaaaaaaaaaaaaaaaaaaaaaaaaaaaaaaaaaaaaaaaaaaaaaaaaaaaaaaaaaa

SEQ ID NO: 3471 - RNA, 1400 nt, synthetic construct
  misc_feature 1..1400: note = mRNA a-1 (hSL-A100) (opt2) from Homo sapiens__NP_000448.3__HNF4A(1-375)(T166E)
  source 1..1400: mol_type = other RNA
aggagagtcccgcagtcggcgtccagcggctctgcttgttcgtgtgtgtgtcgttgcaggccttattcaagcttaccatgcgcctctccaagaccctcgtcgacatggacatggccgactactccgccgccctcgaccccgcctacaccaccctcgagttcgagaacgtccaggtcctcaccatgggcaacgacacctccccctccgagggcaccaacctcaacgcccccaactccctcggcgtctccgccctctgcgccatctgcggcgaccgcgccaccggcaagcactacggcgcctcctcctgcgacggctgcaagggcttcttccgccgctccgtccgcaagaaccacatgtactcctgccgcttctcccgccagtgcgtcgtcgacaaggacaagcgcaaccagtgccgctactgccgcctcaagaagtgcttccgcgccggcatgaagaaggaggccgtccagaacgagcgcgaccgcatctccacccgccgctcctcctacgaggactcctccctcccctccatcaacgccctcctccaggccgaggtcctctcccgccagatcgagtcccccgtctccggcatcaacggcgacatccgcgccaagaagatcgcctccatcgccgacgtctgcgagtccatgaaggagcagctcctcgtcctcgtcgagtgggccaagtacatccccgccttctgcgagctccccctcgacgaccaggtcgccctcctccgcgcccacgccggcgagcacctcctcctcggcgccaccaagcgctccatggtcttcaaggacgtcctcctcctcggcaacgactacatcgtcccccgccactgccccgagctcgccgagatgtcccgcgtctccatccgcatcctcgacgagctcgtcctccccttccaggagctccagatcgacgacaacgagtacgcctacctcaaggccatcatcttcttcgaccccgacgccaagggcctctccgaccccggcaagatcaagcgcctccgctcccaggtccaggtctccctcgaggactacatcaacgaccgccagtacgactcccgcggccgcttcggcgagctcctcctcctcctccccaccctccagtccatcacctggcagatgatcgagcagatccagttcatcaagctcttcggcatggccaagatcgacaacctcctccaggagatgctcctctgaggactagtccctgttcccagagcccacttttttttctttttttgaaataaaatagcctgtctttcagatctcaaaggctcttttcagagccaccaaaaaaaaaaaaaaaaaaaaaaaaaaaaaaaaaaaaaaaaaaaaaaaaaaaaaaaaaaaaaaaaaaaaaaaaaaaaaaaaaaaaaaaaaaaaaaaaaaaaa

SEQ ID NO: 3472 - RNA, 1400 nt, synthetic construct
  misc_feature 1..1400: note = mRNA a-1 (hSL-A100) (opt2) from Homo sapiens__NP_000448.3__HNF4A(1-375)(S148A)
  source 1..1400: mol_type = other RNA
aggagagtcccgcagtcggcgtccagcggctctgcttgttcgtgtgtgtgtcgttgcaggccttattcaagcttaccatgcgcctctccaagaccctcgtcgacatggacatggccgactactccgccgccctcgaccccgcctacaccaccctcgagttcgagaacgtccaggtcctcaccatgggcaacgacacctccccctccgagggcaccaacctcaacgcccccaactccctcggcgtctccgccctctgcgccatctgcggcgaccgcgccaccggcaagcactacggcgcctcctcctgcgacggctgcaagggcttcttccgccgctccgtccgcaagaaccacatgtactcctgccgcttctcccgccagtgcgtcgtcgacaaggacaagcgcaaccagtgccgctactgccgcctcaagaagtgcttccgcgccggcatgaagaaggaggccgtccagaacgagcgcgaccgcatctccacccgccgctcctcctacgaggactccgccctcccctccatcaacgccctcctccaggccgaggtcctctcccgccagatcacctcccccgtctccggcatcaacggcgacatccgcgccaagaagatcgcctccatcgccgacgtctgcgagtccatgaaggagcagctcctcgtcctcgtcgagtgggccaagtacatccccgccttctgcgagctccccctcgacgaccaggtcgccctcctccgcgcccacgccggcgagcacctcctcctcggcgccaccaagcgctccatggtcttcaaggacgtcctcctcctcggcaacgactacatcgtcccccgccactgccccgagctcgccgagatgtcccgcgtctccatccgcatcctcgacgagctcgtcctccccttccaggagctccagatcgacgacaacgagtacgcctacctcaaggccatcatcttcttcgaccccgacgccaagggcctctccgaccccggcaagatcaagcgcctccgctcccaggtccaggtctccctcgaggactacatcaacgaccgccagtacgactcccgcggccgcttcggcgagctcctcctcctcctccccaccctccagtccatcacctggcagatgatcgagcagatccagttcatcaagctcttcggcatggccaagatcgacaacctcctccaggagatgctcctctgaggactagtccctgttcccagagcccacttttttttctttttttgaaataaaatagcctgtctttcagatctcaaaggctcttttcagagccaccaaaaaaaaaaaaaaaaaaaaaaaaaaaaaaaaaaaaaaaaaaaaaaaaaaaaaaaaaaaaaaaaaaaaaaaaaaaaaaaaaaaaaaaaaaaaaaaaaaaaa

SEQ ID NO: 3473 - RNA, 1400 nt, synthetic construct
  misc_feature 1..1400: note = mRNA a-1 (hSL-A100) (opt2) from Homo sapiens__NP_000448.3__HNF4A(1-375)(S148E)
  source 1..1400: mol_type = other RNA
aggagagtcccgcagtcggcgtccagcggctctgcttgttcgtgtgtgtgtcgttgcaggccttattcaagcttaccatgcgcctctccaagaccctcgtcgacatggacatggccgactactccgccgccctcgaccccgcctacaccaccctcgagttcgagaacgtccaggtcctcaccatgggcaacgacacctccccctccgagggcaccaacctcaacgcccccaactccctcggcgtctccgccctctgcgccatctgcggcgaccgcgccaccggcaagcactacggcgcctcctcctgcgacggctgcaagggcttcttccgccgctccgtccgcaagaaccacatgtactcctgccgcttctcccgccagtgcgtcgtcgacaaggacaagcgcaaccagtgccgctactgccgcctcaagaagtgcttccgcgccggcatgaagaaggaggccgtccagaacgagcgcgaccgcatctccacccgccgctcctcctacgaggactccgagctcccctccatcaacgccctcctccaggccgaggtcctctcccgccagatcacctcccccgtctccggcatcaacggcgacatccgcgccaagaagatcgcctccatcgccgacgtctgcgagtccatgaaggagcagctcctcgtcctcgtcgagtgggccaagtacatccccgccttctgcgagctccccctcgacgaccaggtcgccctcctccgcgcccacgccggcgagcacctcctcctcggcgccaccaagcgctccatggtcttcaaggacgtcctcctcctcggcaacgactacatcgtcccccgccactgccccgagctcgccgagatgtcccgcgtctccatccgcatcctcgacgagctcgtcctccccttccaggagctccagatcgacgacaacgagtacgcctacctcaaggccatcatcttcttcgaccccgacgccaagggcctctccgaccccggcaagatcaagcgcctccgctcccaggtccaggtctccctcgaggactacatcaacgaccgccagtacgactcccgcggccgcttcggcgagctcctcctcctcctccccaccctccagtccatcacctggcagatgatcgagcagatccagttcatcaagctcttcggcatggccaagatcgacaacctcctccaggagatgctcctctgaggactagtccctgttcccagagcccacttttttttctttttttgaaataaaatagcctgtctttcagatctcaaaggctcttttcagagccaccaaaaaaaaaaaaaaaaaaaaaaaaaaaaaaaaaaaaaaaaaaaaaaaaaaaaaaaaaaaaaaaaaaaaaaaaaaaaaaaaaaaaaaaaaaaaaaaaaaaaa

SEQ ID NO: 3474 - RNA, 1400 nt, synthetic construct
  misc_feature 1..1400: note = mRNA a-1 (hSL-A100) (opt2) from Homo sapiens__NP_000448.3__HNF4A(1-375)(S183A)
  source 1..1400: mol_type = other RNA
aggagagtcccgcagtcggcgtccagcggctctgcttgttcgtgtgtgtgtcgttgcaggccttattcaagcttaccatgcgcctctccaagaccctcgtcgacatggacatggccgactactccgccgccctcgaccccgcctacaccaccctcgagttcgagaacgtccaggtcctcaccatgggcaacgacacctccccctccgagggcaccaacctcaacgcccccaactccctcggcgtctccgccctctgcgccatctgcggcgaccgcgccaccggcaagcactacggcgcctcctcctgcgacggctgcaagggcttcttccgccgctccgtccgcaagaaccacatgtactcctgccgcttctcccgccagtgcgtcgtcgacaaggacaagcgcaaccagtgccgctactgccgcctcaagaagtgcttccgcgccggcatgaagaaggaggccgtccagaacgagcgcgaccgcatctccacccgccgctcctcctacgaggactcctccctcccctccatcaacgccctcctccaggccgaggtcctctcccgccagatcacctcccccgtctccggcatcaacggcgacatccgcgccaagaagatcgccgccatcgccgacgtctgcgagtccatgaaggagcagctcctcgtcctcgtcgagtgggccaagtacatccccgccttctgcgagctccccctcgacgaccaggtcgccctcctccgcgcccacgccggcgagcacctcctcctcggcgccaccaagcgctccatggtcttcaaggacgtcctcctcctcggcaacgactacatcgtcccccgccactgccccgagctcgccgagatgtcccgcgtctccatccgcatcctcgacgagctcgtcctccccttccaggagctccagatcgacgacaacgagtacgcctacctcaaggccatcatcttcttcgaccccgacgccaagggcctctccgaccccggcaagatcaagcgcctccgctcccaggtccaggtctccctcgaggactacatcaacgaccgccagtacgactcccgcggccgcttcggcgagctcctcctcctcctccccaccctccagtccatcacctggcagatgatcgagcagatccagttcatcaagctcttcggcatggccaagatcgacaacctcctccaggagatgctcctctgaggactagtccctgttcccagagcccacttttttttctttttttgaaataaaatagcctgtctttcagatctcaaaggctcttttcagagccaccaaaaaaaaaaaaaaaaaaaaaaaaaaaaaaaaaaaaaaaaaaaaaaaaaaaaaaaaaaaaaaaaaaaaaaaaaaaaaaaaaaaaaaaaaaaaaaaaaaaaa

SEQ ID NO: 3475 - RNA, 1400 nt, synthetic construct
  misc_feature 1..1400: note = mRNA a-1 (hSL-A100) (opt2) from Homo sapiens__NP_000448.3__HNF4A(1-375)(S183E)
  source 1..1400: mol_type = other RNA
aggagagtcccgcagtcggcgtccagcggctctgcttgttcgtgtgtgtgtcgttgcaggccttattcaagcttaccatgcgcctctccaagaccctcgtcgacatggacatggccgactactccgccgccctcgaccccgcctacaccaccctcgagttcgagaacgtccaggtcctcaccatgggcaacgacacctccccctccgagggcaccaacctcaacgcccccaactccctcggcgtctccgccctctgcgccatctgcggcgaccgcgccaccggcaagcactacggcgcctcctcctgcgacggctgcaagggcttcttccgccgctccgtccgcaagaaccacatgtactcctgccgcttctcccgccagtgcgtcgtcgacaaggacaagcgcaaccagtgccgctactgccgcctcaagaagtgcttccgcgccggcatgaagaaggaggccgtccagaacgagcgcgaccgcatctccacccgccgctcctcctacgaggactcctccctcccctccatcaacgccctcctccaggccgaggtcctctcccgccagatcacctcccccgtctccggcatcaacggcgacatccgcgccaagaagatcgccgagatcgccgacgtctgcgagtccatgaaggagcagctcctcgtcctcgtcgagtgggccaagtacatccccgccttctgcgagctccccctcgacgaccaggtcgccctcctccgcgcccacgccggcgagcacctcctcctcggcgccaccaagcgctccatggtcttcaaggacgtcctcctcctcggcaacgactacatcgtcccccgccactgccccgagctcgccgagatgtcccgcgtctccatccgcatcctcgacgagctcgtcctccccttccaggagctccagatcgacgacaacgagtacgcctacctcaaggccatcatcttcttcgaccccgacgccaagggcctctccgaccccggcaagatcaagcgcctccgctcccaggtccaggtctccctcgaggactacatcaacgaccgccagtacgactcccgcggccgcttcggcgagctcctcctcctcctccccaccctccagtccatcacctggcagatgatcgagcagatccagttcatcaagctcttcggcatggccaagatcgacaacctcctccaggagatgctcctctgaggactagtccctgttcccagagcccacttttttttctttttttgaaataaaatagcctgtctttcagatctcaaaggctcttttcagagccaccaaaaaaaaaaaaaaaaaaaaaaaaaaaaaaaaaaaaaaaaaaaaaaaaaaaaaaaaaaaaaaaaaaaaaaaaaaaaaaaaaaaaaaaaaaaaaaaaaaaaa

SEQ ID NO: 3476 - RNA, 1400 nt, synthetic construct; identical to SEQ ID NO: 3467
  misc_feature 1..1400: note = mRNA a-1 (hSL-A100) (opt2) from Homo sapiens__NP_000448.3__HNF4A(1-375)(S461A)
  source 1..1400: mol_type = other RNA

SEQ ID NO: 3477 - RNA, 1400 nt, synthetic construct; identical to SEQ ID NO: 3467
  misc_feature 1..1400: note = mRNA a-1 (hSL-A100) (opt2) from Homo sapiens__NP_000448.3__HNF4A(1-375)(S461E)
  source 1..1400: mol_type = other RNA

SEQ ID NO: 3478 - RNA, 1400 nt, synthetic construct
  misc_feature 1..1400: note = mRNA a-1 (hSL-A100) (opt2) from Homo sapiens__NP_000448.3__HNF4A(1-375)(S142A_S143A_S313A)
  source 1..1400: mol_type = other RNA
aggagagtcccgcagtcggcgtccagcggctctgcttgttcgtgtgtgtgtcgttgcaggccttattcaagcttaccatgcgcctctccaagaccctcgtcgacatggacatggccgactactccgccgccctcgaccccgcctacaccaccctcgagttcgagaacgtccaggtcctcaccatgggcaacgacacctccccctccgagggcaccaacctcaacgcccccaactccctcggcgtctccgccctctgcgccatctgcggcgaccgcgccaccggcaagcactacggcgcctcctcctgcgacggctgcaagggcttcttccgccgctccgtccgcaagaaccacatgtactcctgccgcttctcccgccagtgcgtcgtcgacaaggacaagcgcaaccagtgccgctactgccgcctcaagaagtgcttccgcgccggcatgaagaaggaggccgtccagaacgagcgcgaccgcatctccacccgccgcgccgcctacgaggactcctccctcccctccatcaacgccctcctccaggccgaggtcctctcccgccagatcacctcccccgtctccggcatcaacggcgacatccgcgccaagaagatcgcctccatcgccgacgtctgcgagtccatgaaggagcagctcctcgtcctcgtcgagtgggccaagtacatccccgccttctgcgagctccccctcgacgaccaggtcgccctcctccgcgcccacgccggcgagcacctcctcctcggcgccaccaagcgctccatggtcttcaaggacgtcctcctcctcggcaacgactacatcgtcccccgccactgccccgagctcgccgagatgtcccgcgtctccatccgcatcctcgacgagctcgtcctccccttccaggagctccagatcgacgacaacgagtacgcctacctcaaggccatcatcttcttcgaccccgacgccaagggcctctccgaccccggcaagatcaagcgcctccgcgcccaggtccaggtctccctcgaggactacatcaacgaccgccagtacgactcccgcggccgcttcggcgagctcctcctcctcctccccaccctccagtccatcacctggcagatgatcgagcagatccagttcatcaagctcttcggcatggccaagatcgacaacctcctccaggagatgctcctctgaggactagtccctgttcccagagcccacttttttttctttttttgaaataaaatagcctgtctttcagatctcaaaggctcttttcagagccaccaaaaaaaaaaaaaaaaaaaaaaaaaaaaaaaaaaaaaaaaaaaaaaaaaaaaaaaaaaaaaaaaaaaaaaaaaaaaaaaaaaaaaaaaaaaaaaaaaaaaa

SEQ ID NO: 3479 - RNA, 1400 nt, synthetic construct; identical to SEQ ID NO: 3478
  misc_feature 1..1400: note = mRNA a-1 (hSL-A100) (opt2) from Homo sapiens__NP_000448.3__HNF4A(1-375)(S142A_S143A_S313A_K458R)
  source 1..1400: mol_type = other RNA

SEQ ID NO: 3480 - RNA, 1400 nt, synthetic construct
  misc_feature 1..1400: note = mRNA a-1 (hSL-A100) (opt2) from Homo sapiens__NP_000448.3__HNF4A(1-375)(S142A_S143A_S167A_S313A_ S378A_T429A_T432A_S436A_K458R)
  source 1..1400: mol_type = other RNA
aggagagtcccgcagtcggcgtccagcggctctgcttgttcgtgtgtgtgtcgttgcaggccttattcaagcttaccatgcgcctctccaagaccctcgtcgacatggacatggccgactactccgccgccctcgaccccgcctacaccaccctcgagttcgagaacgtccaggtcctcaccatgggcaacgacacctccccctccgagggcaccaacctcaacgcccccaactccctcggcgtctccgccctctgcgccatctgcggcgaccgcgccaccggcaagcactacggcgcctcctcctgcgacggctgcaagggcttcttccgccgctccgtccgcaagaaccacatgtactcctgccgcttctcccgccagtgcgtcgtcgacaaggacaagcgcaaccagtgccgctactgccgcctcaagaagtgcttccgcgccggcatgaagaaggaggccgtccagaacgagcgcgaccgcatctccacccgccgcgccgcctacgaggactcctccctcccctccatcaacgccctcctccaggccgaggtcctctcccgccagatcaccgcccccgtctccggcatcaacggcgacatccgcgccaagaagatcgcctccatcgccgacgtctgcgagtccatgaaggagcagctcctcgtcctcgtcgagtgggccaagtacatccccgccttctgcgagctccccctcgacgaccaggtcgccctcctccgcgcccacgccggcgagcacctcctcctcggcgccaccaagcgctccatggtcttcaaggacgtcctcctcctcggcaacgactacatcgtcccccgccactgccccgagctcgccgagatgtcccgcgtctccatccgcatcctcgacgagctcgtcctccccttccaggagctccagatcgacgacaacgagtacgcctacctcaaggccatcatcttcttcgaccccgacgccaagggcctctccgaccccggcaagatcaagcgcctccgcgcccaggtccaggtctccctcgaggactacatcaacgaccgccagtacgactcccgcggccgcttcggcgagctcctcctcctcctccccaccctccagtccatcacctggcagatgatcgagcagatccagttcatcaagctcttcggcatggccaagatcgacaacctcctccaggagatgctcctctgaggactagtccctgttcccagagcccacttttttttctttttttgaaataaaatagcctgtctttcagatctcaaaggctcttttcagagccaccaaaaaaaaaaaaaaaaaaaaaaaaaaaaaaaaaaaaaaaaaaaaaaaaaaaaaaaaaaaaaaaaaaaaaaaaaaaaaaaaaaaaaaaaaaaaaaaaaaaaa

SEQ ID NO: 3481 - RNA, 1400 nt, synthetic construct
  misc_feature 1..1400: note = mRNA a-1 (hSL-A100) (opt2) from Homo sapiens__NP_000448.3__HNF4A(1-375)(S142A_S143A_S148A_S167A_ S313A_S378A_T429A_T432A_S436A_K458R)
  source 1..1400: mol_type = other RNA
aggagagtcccgcagtcggcgtccagcggctctgcttgttcgtgtgtgtgtcgttgcaggccttattcaagcttaccatgcgcctctccaagaccctcgtcgacatggacatggccgactactccgccgccctcgaccccgcctacaccaccctcgagttcgagaacgtccaggtcctcaccatgggcaacgacacctccccctccgagggcaccaacctcaacgcccccaactccctcggcgtctccgccctctgcgccatctgcggcgaccgcgccaccggcaagcactacggcgcctcctcctgcgacggctgcaagggcttcttccgccgctccgtccgcaagaaccacatgtactcctgccgcttctcccgccagtgcgtcgtcgacaaggacaagcgcaaccagtgccgctactgccgcctcaagaagtgcttccgcgccggcatgaagaaggaggccgtccagaacgagcgcgaccgcatctccacccgccgcgccgcctacgaggactccgccctcccctccatcaacgccctcctccaggccgaggtcctctcccgccagatcaccgcccccgtctccggcatcaacggcgacatccgcgccaagaagatcgcctccatcgccgacgtctgcgagtccatgaaggagcagctcctcgtcctcgtcgagtgggccaagtacatccccgccttctgcgagctccccctcgacgaccaggtcgccctcctccgcgcccacgccggcgagcacctcctcctcggcgccaccaagcgctccatggtcttcaaggacgtcctcctcctcggcaacgactacatcgtcccccgccactgccccgagctcgccgagatgtcccgcgtctccatccgcatcctcgacgagctcgtcctccccttccaggagctccagatcgacgacaacgagtacgcctacctcaaggccatcatcttcttcgaccccgacgccaagggcctctccgaccccggcaagatcaagcgcctccgcgcccaggtccaggtctccctcgaggactacatcaacgaccgccagtacgactcccgcggccgcttcggcgagctcctcctcctcctccccaccctccagtccatcacctggcagatgatcgagcagatccagttcatcaagctcttcggcatggccaagatcgacaacctcctccaggagatgctcctctgaggactagtccctgttcccagagcccacttttttttctttttttgaaataaaatagcctgtctttcagatctcaaaggctcttttcagagccaccaaaaaaaaaaaaaaaaaaaaaaaaaaaaaaaaaaaaaaaaaaaaaaaaaaaaaaaaaaaaaaaaaaaaaaaaaaaaaaaaaaaaaaaaaaaaaaaaaaaaa

SEQ ID NO: 3482 - RNA, 1400 nt, synthetic construct
  misc_feature 1..1400: note = mRNA a-1 (hSL-A100) (opt2) from Homo sapiens__NP_000448.3__HNF4A(1-375)(K106R_K108R_K126R_K127R_ S142A_S143A_S148A_S167A_S313A_S378A_T429A_T432A_S436A_K458R )
  source 1..1400: mol_type = other RNA
aggagagtcccgcagtcggcgtccagcggctctgcttgttcgtgtgtgtgtcgttgcaggccttattcaagcttaccatgcgcctctccaagaccctcgtcgacatggacatggccgactactccgccgccctcgaccccgcctacaccaccctcgagttcgagaacgtccaggtcctcaccatgggcaacgacacctccccctccgagggcaccaacctcaacgcccccaactccctcggcgtctccgccctctgcgccatctgcggcgaccgcgccaccggcaagcactacggcgcctcctcctgcgacggctgcaagggcttcttccgccgctccgtccgcaagaaccacatgtactcctgccgcttctcccgccagtgcgtcgtcgaccgcgaccgccgcaaccagtgccgctactgccgcctcaagaagtgcttccgcgccggcatgcgccgcgaggccgtccagaacgagcgcgaccgcatctccacccgccgcgccgcctacgaggactccgccctcccctccatcaacgccctcctccaggccgaggtcctctcccgccagatcaccgcccccgtctccggcatcaacggcgacatccgcgccaagaagatcgcctccatcgccgacgtctgcgagtccatgaaggagcagctcctcgtcctcgtcgagtgggccaagtacatccccgccttctgcgagctccccctcgacgaccaggtcgccctcctccgcgcccacgccggcgagcacctcctcctcggcgccaccaagcgctccatggtcttcaaggacgtcctcctcctcggcaacgactacatcgtcccccgccactgccccgagctcgccgagatgtcccgcgtctccatccgcatcctcgacgagctcgtcctccccttccaggagctccagatcgacgacaacgagtacgcctacctcaaggccatcatcttcttcgaccccgacgccaagggcctctccgaccccggcaagatcaagcgcctccgcgcccaggtccaggtctccctcgaggactacatcaacgaccgccagtacgactcccgcggccgcttcggcgagctcctcctcctcctccccaccctccagtccatcacctggcagatgatcgagcagatccagttcatcaagctcttcggcatggccaagatcgacaacctcctccaggagatgctcctctgaggactagtccctgttcccagagcccacttttttttctttttttgaaataaaatagcctgtctttcagatctcaaaggctcttttcagagccaccaaaaaaaaaaaaaaaaaaaaaaaaaaaaaaaaaaaaaaaaaaaaaaaaaaaaaaaaaaaaaaaaaaaaaaaaaaaaaaaaaaaaaaaaaaaaaaaaaaaaa

SEQ ID NO: 3483 - RNA, 1400 nt, synthetic construct
  misc_feature 1..1400: note = mRNA a-1 (hSL-A100) (opt2) from Homo sapiens__NP_000448.3__HNF4A(1-375)(S142A_S143A_S148A_T166A_ S167A_S313A_S378A_T429A_T432A_S436A_K458R)
  source 1..1400: mol_type = other RNA
aggagagtcccgcagtcggcgtccagcggctctgcttgttcgtgtgtgtgtcgttgcaggccttattcaagcttaccatgcgcctctccaagaccctcgtcgacatggacatggccgactactccgccgccctcgaccccgcctacaccaccctcgagttcgagaacgtccaggtcctcaccatgggcaacgacacctccccctccgagggcaccaacctcaacgcccccaactccctcggcgtctccgccctctgcgccatctgcggcgaccgcgccaccggcaagcactacggcgcctcctcctgcgacggctgcaagggcttcttccgccgctccgtccgcaagaaccacatgtactcctgccgcttctcccgccagtgcgtcgtcgacaaggacaagcgcaaccagtgccgctactgccgcctcaagaagtgcttccgcgccggcatgaagaaggaggccgtccagaacgagcgcgaccgcatctccacccgccgcgccgcctacgaggactccgccctcccctccatcaacgccctcctccaggccgaggtcctctcccgccagatcgccgcccccgtctccggcatcaacggcgacatccgcgccaagaagatcgcctccatcgccgacgtctgcgagtccatgaaggagcagctcctcgtcctcgtcgagtgggccaagtacatccccgccttctgcgagctccccctcgacgaccaggtcgccctcctccgcgcccacgccggcgagcacctcctcctcggcgccaccaagcgctccatggtcttcaaggacgtcctcctcctcggcaacgactacatcgtcccccgccactgccccgagctcgccgagatgtcccgcgtctccatccgcatcctcgacgagctcgtcctccccttccaggagctccagatcgacgacaacgagtacgcctacctcaaggccatcatcttcttcgaccccgacgccaagggcctctccgaccccggcaagatcaagcgcctccgcgcccaggtccaggtctccctcgaggactacatcaacgaccgccagtacgactcccgcggccgcttcggcgagctcctcctcctcctccccaccctccagtccatcacctggcagatgatcgagcagatccagttcatcaagctcttcggcatggccaagatcgacaacctcctccaggagatgctcctctgaggactagtccctgttcccagagcccacttttttttctttttttgaaataaaatagcctgtctttcagatctcaaaggctcttttcagagccaccaaaaaaaaaaaaaaaaaaaaaaaaaaaaaaaaaaaaaaaaaaaaaaaaaaaaaaaaaaaaaaaaaaaaaaaaaaaaaaaaaaaaaaaaaaaaaaaaaaaaa

SEQ ID NO: 3484 - RNA, 1400 nt, synthetic construct
  misc_feature 1..1400: note = mRNA a-1 (hSL-A100) (opt2) from Homo sapiens__NP_000448.3__HNF4A(1-375)(S87A_S142A_S143A_S148A_T 166A_S167A_S313A_S378A_T429A_T432A_S436A_K458R)
  source 1..1400: mol_type = other RNA
aggagagtcccgcagtcggcgtccagcggctctgcttgttcgtgtgtgtgtcgttgcaggccttattcaagcttaccatgcgcctctccaagaccctcgtcgacatggacatggccgactactccgccgccctcgaccccgcctacaccaccctcgagttcgagaacgtccaggtcctcaccatgggcaacgacacctccccctccgagggcaccaacctcaacgcccccaactccctcggcgtctccgccctctgcgccatctgcggcgaccgcgccaccggcaagcactacggcgcctcctcctgcgacggctgcaagggcttcttccgccgcgccgtccgcaagaaccacatgtactcctgccgcttctcccgccagtgcgtcgtcgacaaggacaagcgcaaccagtgccgctactgccgcctcaagaagtgcttccgcgccggcatgaagaaggaggccgtccagaacgagcgcgaccgcatctccacccgccgcgccgcctacgaggactccgccctcccctccatcaacgccctcctccaggccgaggtcctctcccgccagatcgccgcccccgtctccggcatcaacggcgacatccgcgccaagaagatcgcctccatcgccgacgtctgcgagtccatgaaggagcagctcctcgtcctcgtcgagtgggccaagtacatccccgccttctgcgagctccccctcgacgaccaggtcgccctcctccgcgcccacgccggcgagcacctcctcctcggcgccaccaagcgctccatggtcttcaaggacgtcctcctcctcggcaacgactacatcgtcccccgccactgccccgagctcgccgagatgtcccgcgtctccatccgcatcctcgacgagctcgtcctccccttccaggagctccagatcgacgacaacgagtacgcctacctcaaggccatcatcttcttcgaccccgacgccaagggcctctccgaccccggcaagatcaagcgcctccgcgcccaggtccaggtctccctcgaggactacatcaacgaccgccagtacgactcccgcggccgcttcggcgagctcctcctcctcctccccaccctccagtccatcacctggcagatgatcgagcagatccagttcatcaagctcttcggcatggccaagatcgacaacctcctccaggagatgctcctctgaggactagtccctgttcccagagcccacttttttttctttttttgaaataaaatagcctgtctttcagatctcaaaggctcttttcagagccaccaaaaaaaaaaaaaaaaaaaaaaaaaaaaaaaaaaaaaaaaaaaaaaaaaaaaaaaaaaaaaaaaaaaaaaaaaaaaaaaaaaaaaaaaaaaaaaaaaaaaa

SEQ ID NO: 3485 - RNA, 1400 nt, synthetic construct
  misc_feature 1..1400: note = mRNA a-1 (hSL-A100) (opt2) from Homo sapiens__NP_000448.3__HNF4A(1-375)(S87A_K106R_K108R_K126R_K 127R_S142A_S143A_S148A_T166A_S167A_S313A_S378A_T429A_T432A_ S436A_K458R)
  source 1..1400: mol_type = other RNA
aggagagtcccgcagtcggcgtccagcggctctgcttgttcgtgtgtgtgtcgttgcaggccttattcaagcttaccatgcgcctctccaagaccctcgtcgacatggacatggccgactactccgccgccctcgaccccgcctacaccaccctcgagttcgagaacgtccaggtcctcaccatgggcaacgacacctccccctccgagggcaccaacctcaacgcccccaactccctcggcgtctccgccctctgcgccatctgcggcgaccgcgccaccggcaagcactacggcgcctcctcctgcgacggctgcaagggcttcttccgccgcgccgtccgcaagaaccacatgtactcctgccgcttctcccgccagtgcgtcgtcgaccgcgaccgccgcaaccagtgccgctactgccgcctcaagaagtgcttccgcgccggcatgcgccgcgaggccgtccagaacgagcgcgaccgcatctccacccgccgcgccgcctacgaggactccgccctcccctccatcaacgccctcctccaggccgaggtcctctcccgccagatcgccgcccccgtctccggcatcaacggcgacatccgcgccaagaagatcgcctccatcgccgacgtctgcgagtccatgaaggagcagctcctcgtcctcgtcgagtgggccaagtacatccccgccttctgcgagctccccctcgacgaccaggtcgccctcctccgcgcccacgccggcgagcacctcctcctcggcgccaccaagcgctccatggtcttcaaggacgtcctcctcctcggcaacgactacatcgtcccccgccactgccccgagctcgccgagatgtcccgcgtctccatccgcatcctcgacgagctcgtcctccccttccaggagctccagatcgacgacaacgagtacgcctacctcaaggccatcatcttcttcgaccccgacgccaagggcctctccgaccccggcaagatcaagcgcctccgcgcccaggtccaggtctccctcgaggactacatcaacgaccgccagtacgactcccgcggccgcttcggcgagctcctcctcctcctccccaccctccagtccatcacctggcagatgatcgagcagatccagttcatcaagctcttcggcatggccaagatcgacaacctcctccaggagatgctcctctgaggactagtccctgttcccagagcccacttttttttctttttttgaaataaaatagcctgtctttcagatctcaaaggctcttttcagagccaccaaaaaaaaaaaaaaaaaaaaaaaaaaaaaaaaaaaaaaaaaaaaaaaaaaaaaaaaaaaaaaaaaaaaaaaaaaaaaaaaaaaaaaaaaaaaaaaaaaaaa

SEQ ID NO: 3486 - RNA, 1400 nt, synthetic construct
  misc_feature 1..1400: note = mRNA a-1 (hSL-A100) (opt2) from Homo sapiens__NP_000448.3__HNF4A(1-375)(S87A_K106R_K108R_K126R_K 127R)
  source 1..1400: mol_type = other RNA
aggagagtcccgcagtcggcgtccagcggctctgcttgttcgtgtgtgtgtcgttgcaggccttattcaagcttaccatgcgcctctccaagaccctcgtcgacatggacatggccgactactccgccgccctcgaccccgcctacaccaccctcgagttcgagaacgtccaggtcctcaccatgggcaacgacacctccccctccgagggcaccaacctcaacgcccccaactccctcggcgtctccgccctctgcgccatctgcggcgaccgcgccaccggcaagcactacggcgcctcctcctgcgacggctgcaagggcttcttccgccgcgccgtccgcaagaaccacatgtactcctgccgcttctcccgccagtgcgtcgtcgaccgcgaccgccgcaaccagtgccgctactgccgcctcaagaagtgcttccgcgccggcatgcgccgcgaggccgtccagaacgagcgcgaccgcatctccacccgccgctcctcctacgaggactcctccctcccctccatcaacgccctcctccaggccgaggtcctctcccgccagatcacctcccccgtctccggcatcaacggcgacatccgcgccaagaagatcgcctccatcgccgacgtctgcgagtccatgaaggagcagctcctcgtcctcgtcgagtgggccaagtacatccccgccttctgcgagctccccctcgacgaccaggtcgccctcctccgcgcccacgccggcgagcacctcctcctcggcgccaccaagcgctccatggtcttcaaggacgtcctcctcctcggcaacgactacatcgtcccccgccactgccccgagctcgccgagatgtcccgcgtctccatccgcatcctcgacgagctcgtcctccccttccaggagctccagatcgacgacaacgagtacgcctacctcaaggccatcatcttcttcgaccccgacgccaagggcctctccgaccccggcaagatcaagcgcctccgctcccaggtccaggtctccctcgaggactacatcaacgaccgccagtacgactcccgcggccgcttcggcgagctcctcctcctcctccccaccctccagtccatcacctggcagatgatcgagcagatccagttcatcaagctcttcggcatggccaagatcgacaacctcctccaggagatgctcctctgaggactagtccctgttcccagagcccacttttttttctttttttgaaataaaatagcctgtctttcagatctcaaaggctcttttcagagccaccaaaaaaaaaaaaaaaaaaaaaaaaaaaaaaaaaaaaaaaaaaaaaaaaaaaaaaaaaaaaaaaaaaaaaaaaaaaaaaaaaaaaaaaaaaaaaaaaaaaaa

SEQ ID NO: 3487 - RNA, 1400 nt, synthetic construct; identical to SEQ ID NO: 3485
  misc_feature 1..1400: note = mRNA a-1 (hSL-A100) (opt2) from Homo sapiens__NP_000448.3__HNF4A(1-375)(S87A_K106R_K108R_K126R_K 127R_S142A_S143A_S148A_T166A_S167A_S313A_S378A_T429A_T432A_ S436A_K458R_S461A)
  source 1..1400: mol_type = other RNA

SEQ ID NO: 3488 - RNA, 1400 nt, synthetic construct; identical to SEQ ID NO: 3485
  misc_feature 1..1400: note = mRNA a-1 (hSL-A100) (opt2) from Homo sapiens__NP_000448.3__HNF4A(1-375)(S87A_K106R_K108R_K126R_K 127R_S142A_S143A_S148A_T166A_S167A_S313A_S378A_T429A_T432A_ S436A_K458R_S461E)
  source 1..1400: mol_type = other RNA

SEQ ID NO: 3489 - RNA, 1400 nt, synthetic construct
  misc_feature 1..1400: note = mRNA a-1 (hSL-A100) (opt2) from Homo sapiens__NP_000448.3__HNF4A(1-375)(S87A_K106R_K108R_K126R_K 127R_S142A_S143A_S148E_T166A_S167E_S313A_S378E_T429E_T432E_ S436E_K458R_S461E)
  source 1..1400: mol_type = other RNA
aggagagtcccgcagtcggcgtccagcggctctgcttgttcgtgtgtgtgtcgttgcaggccttattcaagcttaccatgcgcctctccaagaccctcgtcgacatggacatggccgactactccgccgccctcgaccccgcctacaccaccctcgagttcgagaacgtccaggtcctcaccatgggcaacgacacctccccctccgagggcaccaacctcaacgcccccaactccctcggcgtctccgccctctgcgccatctgcggcgaccgcgccaccggcaagcactacggcgcctcctcctgcgacggctgcaagggcttcttccgccgcgccgtccgcaagaaccacatgtactcctgccgcttctcccgccagtgcgtcgtcgaccgcgaccgccgcaaccagtgccgctactgccgcctcaagaagtgcttccgcgccggcatgcgccgcgaggccgtccagaacgagcgcgaccgcatctccacccgccgcgccgcctacgaggactccgagctcccctccatcaacgccctcctccaggccgaggtcctctcccgccagatcgccgagcccgtctccggcatcaacggcgacatccgcgccaagaagatcgcctccatcgccgacgtctgcgagtccatgaaggagcagctcctcgtcctcgtcgagtgggccaagtacatccccgccttctgcgagctccccctcgacgaccaggtcgccctcctccgcgcccacgccggcgagcacctcctcctcggcgccaccaagcgctccatggtcttcaaggacgtcctcctcctcggcaacgactacatcgtcccccgccactgccccgagctcgccgagatgtcccgcgtctccatccgcatcctcgacgagctcgtcctccccttccaggagctccagatcgacgacaacgagtacgcctacctcaaggccatcatcttcttcgaccccgacgccaagggcctctccgaccccggcaagatcaagcgcctccgcgcccaggtccaggtctccctcgaggactacatcaacgaccgccagtacgactcccgcggccgcttcggcgagctcctcctcctcctccccaccctccagtccatcacctggcagatgatcgagcagatccagttcatcaagctcttcggcatggccaagatcgacaacctcctccaggagatgctcctctgaggactagtccctgttcccagagcccacttttttttctttttttgaaataaaatagcctgtctttcagatctcaaaggctcttttcagagccaccaaaaaaaaaaaaaaaaaaaaaaaaaaaaaaaaaaaaaaaaaaaaaaaaaaaaaaaaaaaaaaaaaaaaaaaaaaaaaaaaaaaaaaaaaaaaaaaaaaaaa

SEQ ID NO: 3490 - RNA, 1400 nt, synthetic construct
  misc_feature 1..1400: note = mRNA a-1 (hSL-A100) (opt2) from Homo sapiens__NP_000448.3__HNF4A(1-375)(S87A_K106R_K108R_K126R_K 127R_S142A_S143A_S148A_T166A_S167A_K179R_K180R_S313A_S378A_ T429A_T432A_S436A_K458R_S461E)
  source 1..1400: mol_type = other RNA
aggagagtcccgcagtcggcgtccagcggctctgcttgttcgtgtgtgtgtcgttgcaggccttattcaagcttaccatgcgcctctccaagaccctcgtcgacatggacatggccgactactccgccgccctcgaccccgcctacaccaccctcgagttcgagaacgtccaggtcctcaccatgggcaacgacacctccccctccgagggcaccaacctcaacgcccccaactccctcggcgtctccgccctctgcgccatctgcggcgaccgcgccaccggcaagcactacggcgcctcctcctgcgacggctgcaagggcttcttccgccgcgccgtccgcaagaaccacatgtactcctgccgcttctcccgccagtgcgtcgtcgaccgcgaccgccgcaaccagtgccgctactgccgcctcaagaagtgcttccgcgccggcatgcgccgcgaggccgtccagaacgagcgcgaccgcatctccacccgccgcgccgcctacgaggactccgccctcccctccatcaacgccctcctccaggccgaggtcctctcccgccagatcgccgcccccgtctccggcatcaacggcgacatccgcgcccgccgcatcgcctccatcgccgacgtctgcgagtccatgaaggagcagctcctcgtcctcgtcgagtgggccaagtacatccccgccttctgcgagctccccctcgacgaccaggtcgccctcctccgcgcccacgccggcgagcacctcctcctcggcgccaccaagcgctccatggtcttcaaggacgtcctcctcctcggcaacgactacatcgtcccccgccactgccccgagctcgccgagatgtcccgcgtctccatccgcatcctcgacgagctcgtcctccccttccaggagctccagatcgacgacaacgagtacgcctacctcaaggccatcatcttcttcgaccccgacgccaagggcctctccgaccccggcaagatcaagcgcctccgcgcccaggtccaggtctccctcgaggactacatcaacgaccgccagtacgactcccgcggccgcttcggcgagctcctcctcctcctccccaccctccagtccatcacctggcagatgatcgagcagatccagttcatcaagctcttcggcatggccaagatcgacaacctcctccaggagatgctcctctgaggactagtccctgttcccagagcccacttttttttctttttttgaaataaaatagcctgtctttcagatctcaaaggctcttttcagagccaccaaaaaaaaaaaaaaaaaaaaaaaaaaaaaaaaaaaaaaaaaaaaaaaaaaaaaaaaaaaaaaaaaaaaaaaaaaaaaaaaaaaaaaaaaaaaaaaaaaaaa

SEQ ID NO: 3491 - RNA, 1400 nt, synthetic construct
  misc_feature 1..1400: note = mRNA a-1 (hSL-A100) (opt2) from Homo sapiens__NP_000448.3__HNF4A(1-375)(S87A_K106R_K108R_K126R_K 127R_S142A_S143A_S148A_T166A_S167A_K300R_K307R_K309R_S313A_ S378A_T429A_T432A_S436A_K458R_S461E)
  source 1..1400: mol_type = other RNA
aggagagtcccgcagtcggcgtccagcggctctgcttgttcgtgtgtgtgtcgttgcaggccttattcaagcttaccatgcgcctctccaagaccctcgtcgacatggacatggccgactactccgccgccctcgaccccgcctacaccaccctcgagttcgagaacgtccaggtcctcaccatgggcaacgacacctccccctccgagggcaccaacctcaacgcccccaactccctcggcgtctccgccctctgcgccatctgcggcgaccgcgccaccggcaagcactacggcgcctcctcctgcgacggctgcaagggcttcttccgccgcgccgtccgcaagaaccacatgtactcctgccgcttctcccgccagtgcgtcgtcgaccgcgaccgccgcaaccagtgccgctactgccgcctcaagaagtgcttccgcgccggcatgcgccgcgaggccgtccagaacgagcgcgaccgcatctccacccgccgcgccgcctacgaggactccgccctcccctccatcaacgccctcctccaggccgaggtcctctcccgccagatcgccgcccccgtctccggcatcaacggcgacatccgcgccaagaagatcgcctccatcgccgacgtctgcgagtccatgaaggagcagctcctcgtcctcgtcgagtgggccaagtacatccccgccttctgcgagctccccctcgacgaccaggtcgccctcctccgcgcccacgccggcgagcacctcctcctcggcgccaccaagcgctccatggtcttcaaggacgtcctcctcctcggcaacgactacatcgtcccccgccactgccccgagctcgccgagatgtcccgcgtctccatccgcatcctcgacgagctcgtcctccccttccaggagctccagatcgacgacaacgagtacgcctacctcaaggccatcatcttcttcgaccccgacgcccgcggcctctccgaccccggccgcatccgccgcctccgcgcccaggtccaggtctccctcgaggactacatcaacgaccgccagtacgactcccgcggccgcttcggcgagctcctcctcctcctccccaccctccagtccatcacctggcagatgatcgagcagatccagttcatcaagctcttcggcatggccaagatcgacaacctcctccaggagatgctcctctgaggactagtccctgttcccagagcccacttttttttctttttttgaaataaaatagcctgtctttcagatctcaaaggctcttttcagagccaccaaaaaaaaaaaaaaaaaaaaaaaaaaaaaaaaaaaaaaaaaaaaaaaaaaaaaaaaaaaaaaaaaaaaaaaaaaaaaaaaaaaaaaaaaaaaaaaaaaaaa

SEQ ID NO: 3492 - RNA, 1400 nt, synthetic construct; identical to SEQ ID NO: 3485
  misc_feature 1..1400: note = mRNA a-1 (hSL-A100) (opt2) from Homo sapiens__NP_000448.3__HNF4A(1-375)(S87A_K106R_K108R_K126R_K 127R_S142A_S143A_S148A_T166A_S167A_S313A_S378A_T429A_T432A_ S436A_K447R_K458R_S461E_K470R)
  source 1..1400: mol_type = other RNA

SEQ ID NO: 3493 - RNA, 1400 nt, synthetic construct
  misc_feature 1..1400: note = mRNA a-1 (hSL-A100) (opt2) from Homo sapiens__NP_000448.3__HNF4A(1-375)(S87A_K106R_K108R_K126R_K 127R_S142A_S143A_S148A_T166A_S167A_K179R_K180R_K234R_K300R_ K307R_K309R_S313A_S378A_T429A_T432A_S436A_K447R_K458R_S461E _K470R)
  source 1..1400: mol_type = other RNA
aggagagtcccgcagtcggcgtccagcggctctgcttgttcgtgtgtgtgtcgttgcaggccttattcaagcttaccatgcgcctctccaagaccctcgtcgacatggacatggccgactactccgccgccctcgaccccgcctacaccaccctcgagttcgagaacgtccaggtcctcaccatgggcaacgacacctccccctccgagggcaccaacctcaacgcccccaactccctcggcgtctccgccctctgcgccatctgcggcgaccgcgccaccggcaagcactacggcgcctcctcctgcgacggctgcaagggcttcttccgccgcgccgtccgcaagaaccacatgtactcctgccgcttctcccgccagtgcgtcgtcgaccgcgaccgccgcaaccagtgccgctactgccgcctcaagaagtgcttccgcgccggcatgcgccgcgaggccgtccagaacgagcgcgaccgcatctccacccgccgcgccgcctacgaggactccgccctcccctccatcaacgccctcctccaggccgaggtcctctcccgccagatcgccgcccccgtctccggcatcaacggcgacatccgcgcccgccgcatcgcctccatcgccgacgtctgcgagtccatgaaggagcagctcctcgtcctcgtcgagtgggccaagtacatccccgccttctgcgagctccccctcgacgaccaggtcgccctcctccgcgcccacgccggcgagcacctcctcctcggcgccacccgccgctccatggtcttcaaggacgtcctcctcctcggcaacgactacatcgtcccccgccactgccccgagctcgccgagatgtcccgcgtctccatccgcatcctcgacgagctcgtcctccccttccaggagctccagatcgacgacaacgagtacgcctacctcaaggccatcatcttcttcgaccccgacgcccgcggcctctccgaccccggccgcatccgccgcctccgcgcccaggtccaggtctccctcgaggactacatcaacgaccgccagtacgactcccgcggccgcttcggcgagctcctcctcctcctccccaccctccagtccatcacctggcagatgatcgagcagatccagttcatcaagctcttcggcatggccaagatcgacaacctcctccaggagatgctcctctgaggactagtccctgttcccagagcccacttttttttctttttttgaaataaaatagcctgtctttcagatctcaaaggctcttttcagagccaccaaaaaaaaaaaaaaaaaaaaaaaaaaaaaaaaaaaaaaaaaaaaaaaaaaaaaaaaaaaaaaaaaaaaaaaaaaaaaaaaaaaaaaaaaaaaaaaaaaaaa

SEQ ID NO: 3494 - RNA, 1400 nt, synthetic construct
  misc_feature 1..1400: note = mRNA a-1 (hSL-A100) (opt2) from Homo sapiens__NP_000448.3__HNF4A(1-375)(S87A_S95A_S99A_K106R_K10 8R_K126R_K127R_S142A_S143A_S148A_T166A_S167A_S313A_S378A_T4 29A_T432A_S436A_K458R_S461E)
  source 1..1400: mol_type = other RNA
aggagagtcccgcagtcggcgtccagcggctctgcttgttcgtgtgtgtgtcgttgcaggccttattcaagcttaccatgcgcctctccaagaccctcgtcgacatggacatggccgactactccgccgccctcgaccccgcctacaccaccctcgagttcgagaacgtccaggtcctcaccatgggcaacgacacctccccctccgagggcaccaacctcaacgcccccaactccctcggcgtctccgccctctgcgccatctgcggcgaccgcgccaccggcaagcactacggcgcctcctcctgcgacggctgcaagggcttcttccgccgcgccgtccgcaagaaccacatgtacgcctgccgcttcgcccgccagtgcgtcgtcgaccgcgaccgccgcaaccagtgccgctactgccgcctcaagaagtgcttccgcgccggcatgcgccgcgaggccgtccagaacgagcgcgaccgcatctccacccgccgcgccgcctacgaggactccgccctcccctccatcaacgccctcctccaggccgaggtcctctcccgccagatcgccgcccccgtctccggcatcaacggcgacatccgcgccaagaagatcgcctccatcgccgacgtctgcgagtccatgaaggagcagctcctcgtcctcgtcgagtgggccaagtacatccccgccttctgcgagctccccctcgacgaccaggtcgccctcctccgcgcccacgccggcgagcacctcctcctcggcgccaccaagcgctccatggtcttcaaggacgtcctcctcctcggcaacgactacatcgtcccccgccactgccccgagctcgccgagatgtcccgcgtctccatccgcatcctcgacgagctcgtcctccccttccaggagctccagatcgacgacaacgagtacgcctacctcaaggccatcatcttcttcgaccccgacgccaagggcctctccgaccccggcaagatcaagcgcctccgcgcccaggtccaggtctccctcgaggactacatcaacgaccgccagtacgactcccgcggccgcttcggcgagctcctcctcctcctccccaccctccagtccatcacctggcagatgatcgagcagatccagttcatcaagctcttcggcatggccaagatcgacaacctcctccaggagatgctcctctgaggactagtccctgttcccagagcccacttttttttctttttttgaaataaaatagcctgtctttcagatctcaaaggctcttttcagagccaccaaaaaaaaaaaaaaaaaaaaaaaaaaaaaaaaaaaaaaaaaaaaaaaaaaaaaaaaaaaaaaaaaaaaaaaaaaaaaaaaaaaaaaaaaaaaaaaaaaaaa

SEQ ID NO: 3495 - RNA, 1400 nt, synthetic construct
  misc_feature 1..1400: note = mRNA a-1 (hSL-A100) (opt2) from Homo sapiens__NP_000448.3__HNF4A(1-375)(S87A_K106R_K108R_K126R_K 127R_S138A_T139A_S142A_S143A_S148A_T166A_S167A_S313A_S378A_ T429A_T432A_S436A_K458R_S461E)
  source 1..1400: mol_type = other RNA
aggagagtcccgcagtcggcgtccagcggctctgcttgttcgtgtgtgtgtcgttgcaggccttattcaagcttaccatgcgcctctccaagaccctcgtcgacatggacatggccgactactccgccgccctcgaccccgcctacaccaccctcgagttcgagaacgtccaggtcctcaccatgggcaacgacacctccccctccgagggcaccaacctcaacgcccccaactccctcggcgtctccgccctctgcgccatctgcggcgaccgcgccaccggcaagcactacggcgcctcctcctgcgacggctgcaagggcttcttccgccgcgccgtccgcaagaaccacatgtactcctgccgcttctcccgccagtgcgtcgtcgaccgcgaccgccgcaaccagtgccgctactgccgcctcaagaagtgcttccgcgccggcatgcgccgcgaggccgtccagaacgagcgcgaccgcatcgccgcccgccgcgccgcctacgaggactccgccctcccctccatcaacgccctcctccaggccgaggtcctctcccgccagatcgccgcccccgtctccggcatcaacggcgacatccgcgccaagaagatcgcctccatcgccgacgtctgcgagtccatgaaggagcagctcctcgtcctcgtcgagtgggccaagtacatccccgccttctgcgagctccccctcgacgaccaggtcgccctcctccgcgcccacgccggcgagcacctcctcctcggcgccaccaagcgctccatggtcttcaaggacgtcctcctcctcggcaacgactacatcgtcccccgccactgccccgagctcgccgagatgtcccgcgtctccatccgcatcctcgacgagctcgtcctccccttccaggagctccagatcgacgacaacgagtacgcctacctcaaggccatcatcttcttcgaccccgacgccaagggcctctccgaccccggcaagatcaagcgcctccgcgcccaggtccaggtctccctcgaggactacatcaacgaccgccagtacgactcccgcggccgcttcggcgagctcctcctcctcctccccaccctccagtccatcacctggcagatgatcgagcagatccagttcatcaagctcttcggcatggccaagatcgacaacctcctccaggagatgctcctctgaggactagtccctgttcccagagcccacttttttttctttttttgaaataaaatagcctgtctttcagatctcaaaggctcttttcagagccaccaaaaaaaaaaaaaaaaaaaaaaaaaaaaaaaaaaaaaaaaaaaaaaaaaaaaaaaaaaaaaaaaaaaaaaaaaaaaaaaaaaaaaaaaaaaaaaaaaaaaa

SEQ ID NO: 3496 - RNA, 1400 nt, synthetic construct
  misc_feature 1..1400: note = mRNA a-1 (hSL-A100) (opt2) from Homo sapiens__NP_000448.3__HNF4A(1-375)(S87A_S95A_S99A_K106R_K10 8R_K126R_K127R_S138A_T139A_S142A_S143A_S148A_T166A_S167A_S3 13A_S378A_T429A_T432A_S436A_K458R_S461E)
  source 1..1400: mol_type = other RNA
aggagagtcccgcagtcggcgtccagcggctctgcttgttcgtgtgtgtgtcgttgcaggccttattcaagcttaccatgcgcctctccaagaccctcgtcgacatggacatggccgactactccgccgccctcgaccccgcctacaccaccctcgagttcgagaacgtccaggtcctcaccatgggcaacgacacctccccctccgagggcaccaacctcaacgcccccaactccctcggcgtctccgccctctgcgccatctgcggcgaccgcgccaccggcaagcactacggcgcctcctcctgcgacggctgcaagggcttcttccgccgcgccgtccgcaagaaccacatgtacgcctgccgcttcgcccgccagtgcgtcgtcgaccgcgaccgccgcaaccagtgccgctactgccgcctcaagaagtgcttccgcgccggcatgcgccgcgaggccgtccagaacgagcgcgaccgcatcgccgcccgccgcgccgcctacgaggactccgccctcccctccatcaacgccctcctccaggccgaggtcctctcccgccagatcgccgcccccgtctccggcatcaacggcgacatccgcgccaagaagatcgcctccatcgccgacgtctgcgagtccatgaaggagcagctcctcgtcctcgtcgagtgggccaagtacatccccgccttctgcgagctccccctcgacgaccaggtcgccctcctccgcgcccacgccggcgagcacctcctcctcggcgccaccaagcgctccatggtcttcaaggacgtcctcctcctcggcaacgactacatcgtcccccgccactgccccgagctcgccgagatgtcccgcgtctccatccgcatcctcgacgagctcgtcctccccttccaggagctccagatcgacgacaacgagtacgcctacctcaaggccatcatcttcttcgaccccgacgccaagggcctctccgaccccggcaagatcaagcgcctccgcgcccaggtccaggtctccctcgaggactacatcaacgaccgccagtacgactcccgcggccgcttcggcgagctcctcctcctcctccccaccctccagtccatcacctggcagatgatcgagcagatccagttcatcaagctcttcggcatggccaagatcgacaacctcctccaggagatgctcctctgaggactagtccctgttcccagagcccacttttttttctttttttgaaataaaatagcctgtctttcagatctcaaaggctcttttcagagccaccaaaaaaaaaaaaaaaaaaaaaaaaaaaaaaaaaaaaaaaaaaaaaaaaaaaaaaaaaaaaaaaaaaaaaaaaaaaaaaaaaaaaaaaaaaaaaaaaaaaaa

SEQ ID NO: 3497 - RNA, 1400 nt, synthetic construct
  misc_feature 1..1400: note = mRNA a-1 (hSL-A100) (opt3) from Homo sapiens__NP_000448.3__HNF4A(1-375)
  source 1..1400: mol_type = other RNA
aggagagtcccgcagtcggcgtccagcggctctgcttgttcgtgtgtgtgtcgttgcaggccttattcaagcttaccatgagactgagcaagaccctcgtggacatggatatggccgactactccgctgcacttgatcccgcctatacaactctggagttcgaaaacgtccaggttttgacgatgggcaatgacacctctccttcagaggggacaaacttaaatgcgccaaacagtctgggagtgagcgctctatgcgccatctgtggtgatagggcaactggcaaacactacggggcctcctcttgcgacggatgtaagggctttttccggcgctcggtacgtaaaaatcatatgtattcatgccgatttagcagacaatgtgtggtcgataaggacaaaaggaaccagtgccggtactgtcgcctcaagaagtgcttcagagctggtatgaaaaaggaagcagtgcagaatgagagggatcggattagtacccgccgatcctcttatgaagacagctccctgccgtcaataaacgcccttctgcaggctgaggttttgagtagacaaatcacaagccccgtgtctgggattaatggagatatcagggccaaaaagattgcgtccatcgcagacgtctgtgagtcaatgaaagaacagctcctggtgctggtagagtgggccaagtacatacctgctttttgcgaactcccattagatgaccaggttgccctgcttcgggcacacgctggcgagcatttgctgctaggcgccaccaagcgtagcatggtgttcaaagacgtcctcctgcttgggaacgattatatcgtgccccgccactgtcctgagctggcggaaatgagtagagtgtctattaggatcttggacgagctcgtcctgccatttcaggaattacaaattgatgacaatgagtacgcctacctgaaggcaatcatattctttgatcccgacgctaaaggactctccgatcctggtaagattaaacggcttcgaagccaggttcaggtgtcgctggaagactatatcaacgatcgccagtacgactctagaggcaggttcggggagttgctactgctcctgccaactcttcaatccattacatggcagatgatcgagcagatccaatttattaagctgttcggaatggccaaaatagataatttgctccaggaaatgctgttatgaggactagtccctgttcccagagcccacttttttttctttttttgaaataaaatagcctgtctttcagatctcaaaggctcttttcagagccaccaaaaaaaaaaaaaaaaaaaaaaaaaaaaaaaaaaaaaaaaaaaaaaaaaaaaaaaaaaaaaaaaaaaaaaaaaaaaaaaaaaaaaaaaaaaaaaaaaaaaa

SEQ ID NO: 3498 - RNA, 1400 nt, synthetic construct
  misc_feature 1..1400: note = mRNA a-1 (hSL-A100) (opt3) from Homo sapiens__NP_000448.3__HNF4A(1-375)(S313A)
  source 1..1400: mol_type = other RNA
aggagagtcccgcagtcggcgtccagcggctctgcttgttcgtgtgtgtgtcgttgcaggccttattcaagcttaccatgagactgagcaagaccctcgtggacatggatatggccgactactccgctgcacttgatcccgcctatacaactctggagttcgaaaacgtccaggttttgacgatgggcaatgacacctctccttcagaggggacaaacttaaatgcgccaaacagtctgggagtgagcgctctatgcgccatctgtggtgatagggcaactggcaaacactacggggcctcctcttgcgacggatgtaagggctttttccggcgctcggtacgtaaaaatcatatgtattcatgccgatttagcagacaatgtgtggtcgataaggacaaaaggaaccagtgccggtactgtcgcctcaagaagtgcttcagagctggtatgaaaaaggaagcagtgcagaatgagagggatcggattagtacccgccgatcctcttatgaagacagctccctgccgtcaataaacgcccttctgcaggctgaggttttgagtagacaaatcacaagccccgtgtctgggattaatggagatatcagggccaaaaagattgcgtccatcgcagacgtctgtgagtcaatgaaagaacagctcctggtgctggtagagtgggccaagtacatacctgctttttgcgaactcccattagatgaccaggttgccctgcttcgggcacacgctggcgagcatttgctgctaggcgccaccaagcgtagcatggtgttcaaagacgtcctcctgcttgggaacgattatatcgtgccccgccactgtcctgagctggcggaaatgagtagagtgtctattaggatcttggacgagctcgtcctgccatttcaggaattacaaattgatgacaatgagtacgcctacctgaaggcaatcatattctttgatcccgacgctaaaggactctccgatcctggtaagattaaacggcttcgagcccaggttcaggtgagcctggaagactatatcaacgatcgccagtacgactcgagaggcaggttcggggagttgctactgctcctgccaactcttcaatctattacatggcagatgatcgagcagatccaatttattaagctgttcggaatggctaaaatagataatttgctccaggaaatgctgttatgaggactagtccctgttcccagagcccacttttttttctttttttgaaataaaatagcctgtctttcagatctcaaaggctcttttcagagccaccaaaaaaaaaaaaaaaaaaaaaaaaaaaaaaaaaaaaaaaaaaaaaaaaaaaaaaaaaaaaaaaaaaaaaaaaaaaaaaaaaaaaaaaaaaaaaaaaaaaaa

SEQ ID NO: 3499 - RNA, 1400 nt, synthetic construct
  misc_feature 1..1400: note = mRNA a-1 (hSL-A100) (opt3) from Homo sapiens__NP_000448.3__HNF4A(1-375)(S313E)
  source 1..1400: mol_type = other RNA
aggagagtcccgcagtcggcgtccagcggctctgcttgttcgtgtgtgtgtcgttgcaggccttattcaagcttaccatgagactgagcaagaccctcgtggacatggatatggccgactactccgctgcacttgatcccgcctatacaactctggagttcgaaaacgtccaggttttgacgatgggcaatgacacctctccttcagaggggacaaacttaaatgcgccaaacagtctgggagtgagcgctctatgcgccatctgtggtgatagggcaactggcaaacactacggggcctcctcttgcgacggatgtaagggctttttccggcgctcggtacgtaaaaatcatatgtattcatgccgatttagcagacaatgtgtggtcgataaggacaaaaggaaccagtgccggtactgtcgcctcaagaagtgcttcagagctggtatgaaaaaggaagcagtgcagaatgagagggatcggattagtacccgccgatcctcttatgaagacagctccctgccgtcaataaacgcccttctgcaggctgaggttttgagtagacaaatcacaagccccgtgtctgggattaatggagatatcagggccaaaaagattgcgtccatcgcagacgtctgtgagtcaatgaaagaacagctcctggtgctggtagagtgggccaagtacatacctgctttttgcgaactcccattagatgaccaggttgccctgcttcgggcacacgctggcgagcatttgctgctaggcgccaccaagcgtagcatggtgttcaaagacgtcctcctgcttgggaacgattatatcgtgccccgccactgtcctgagctggcggaaatgagtagagtgtctattaggatcttggacgagctcgtcctgccatttcaggaattacaaattgatgacaatgagtacgcctacctgaaggcaatcatattctttgatcccgacgctaaaggactctccgatcctggtaagattaaacggcttcgagaacaggttcaggtgagcctggaggactatatcaacgatcgccagtacgactcgagaggcaggttcggggagttgctactgctcctgccaactcttcaatctattacatggcagatgatcgaacagatccaatttattaagctgttcggaatggccaaaatagataatttgctccaggagatgctgttatgaggactagtccctgttcccagagcccacttttttttctttttttgaaataaaatagcctgtctttcagatctcaaaggctcttttcagagccaccaaaaaaaaaaaaaaaaaaaaaaaaaaaaaaaaaaaaaaaaaaaaaaaaaaaaaaaaaaaaaaaaaaaaaaaaaaaaaaaaaaaaaaaaaaaaaaaaaaaaa

SEQ ID NO: 3500 - RNA, 1400 nt, synthetic construct
  misc_feature 1..1400: note = mRNA a-1 (hSL-A100) (opt3) from Homo sapiens__NP_000448.3__HNF4A(1-375)(S142A_S143A)
  source 1..1400: mol_type = other RNA
aggagagtcccgcagtcggcgtccagcggctctgcttgttcgtgtgtgtgtcgttgcaggccttattcaagcttaccatgagactgagcaagaccctcgtggacatggatatggccgactactccgctgcacttgatcccgcctatacaactctggagttcgaaaacgtccaggttttgacgatgggcaatgacacctctccttcagaggggacaaacttaaatgcgccaaacagtctgggagtgagcgctctatgcgccatctgtggtgatagggcaactggcaaacactacggggcctcctcttgcgacggatgtaagggctttttccggcgctcggtacgtaaaaatcatatgtattcatgccgatttagcagacaatgtgtggtcgataaggacaaaaggaaccagtgccggtactgtcgcctcaagaagtgcttcagagctggtatgaaaaaggaagcagtgcagaatgagagggatcggattagtacccgccgagccgcttatgaagactcctctctgccgagcataaacgcccttctgcaggcggaggttttgtccagacaaatcacatcacccgtgagtgggattaatggagatatcagggccaaaaagattgcaagcatcgctgacgtctgtgagtctatgaaagaacagctcctggtgctggtagagtgggccaagtacatacctgcattttgcgaactcccattagatgaccaggttgctctgcttcgggcccacgcgggcgagcatttgctgctaggcgccaccaagcgttccatggtgttcaaagacgtcctcctgcttgggaacgattatatcgtgccccgccactgtcctgagctggcagaaatgtcaagagtgagcattaggatcttggacgagctcgtcctgccatttcaggaattacaaattgatgacaatgagtacgcttacctgaaggccatcatattctttgatcccgacgctaaaggactcagtgatcctggtaagattaaacggcttcgatctcaggttcaggtgtccctggaagactatatcaacgatcgccagtacgacagcagaggcaggttcggggagttgctactgctcctgccaactcttcaatcgattacatggcagatgatcgagcagatccaatttattaagctgttcggaatggccaaaatagataatttgctccaggaaatgctgttatgaggactagtccctgttcccagagcccacttttttttctttttttgaaataaaatagcctgtctttcagatctcaaaggctcttttcagagccaccaaaaaaaaaaaaaaaaaaaaaaaaaaaaaaaaaaaaaaaaaaaaaaaaaaaaaaaaaaaaaaaaaaaaaaaaaaaaaaaaaaaaaaaaaaaaaaaaaaaaa

SEQ ID NO: 3501 - RNA, 1400 nt, synthetic construct
  misc_feature 1..1400: note = mRNA a-1 (hSL-A100) (opt3) from Homo sapiens__NP_000448.3__HNF4A(1-375)(S142E_S143E)
  source 1..1400: mol_type = other RNA
aggagagtcccgcagtcggcgtccagcggctctgcttgttcgtgtgtgtgtcgttgcaggccttattcaagcttaccatgagactgagcaagaccctcgtggacatggatatggccgactactccgctgcacttgatcccgcctatacaactctggagttcgaaaacgtccaggttttgacgatgggcaatgacacctctccttcagaggggacaaacttaaatgcgccaaacagtctgggagtgagcgctctatgcgccatctgtggtgatagggcaactggcaaacactacggggcctcctcttgcgacggatgtaagggctttttccggcgctcggtacgtaaaaatcatatgtattcatgccgatttagcagacaatgtgtggtcgataaggacaaaaggaaccagtgccggtactgtcgcctcaagaagtgcttcagagctggtatgaaaaaggaagcagtgcagaatgagagggatcggattagtacccgccgagaagagtatgaggactcctctctgccgagcataaacgcccttctgcaggctgaagttttgtccagacaaatcacatcacccgtgagtgggattaatggagatatcagggccaaaaagattgcgagcatcgcagacgtctgtgagtctatgaaagaacagctcctggtgctggtagagtgggccaagtacatacctgctttttgcgagctcccattagatgaccaggttgccctgcttcgggcacacgctggcgaacatttgctgctaggcgccaccaagcgttccatggtgttcaaagacgtcctcctgcttgggaacgattatatcgtgccccgccactgtcctgagctggcggaaatgtcaagagtgagcattaggatcttggacgagctcgtcctgccatttcaggaattacaaattgatgacaatgagtacgcctacctgaaggcaatcatattctttgatcccgacgctaaaggactcagtgatcctggtaagattaaacggcttcgatctcaggttcaggtgtccctggaggactatatcaacgatcgccagtacgacagcagaggcaggttcggggaattgctactgctcctgccaactcttcaatcgattacatggcagatgatcgagcagatccaatttattaagctgttcggaatggccaaaatagataatttgctccaggaaatgctgttatgaggactagtccctgttcccagagcccacttttttttctttttttgaaataaaatagcctgtctttcagatctcaaaggctcttttcagagccaccaaaaaaaaaaaaaaaaaaaaaaaaaaaaaaaaaaaaaaaaaaaaaaaaaaaaaaaaaaaaaaaaaaaaaaaaaaaaaaaaaaaaaaaaaaaaaaaaaaaaa

SEQ ID NO: 3502 - RNA, 1400 nt, synthetic construct
  misc_feature 1..1400: note = mRNA a-1 (hSL-A100) (opt3) from Homo sapiens__NP_000448.3__HNF4A(1-375)(S143A)
  source 1..1400: mol_type = other RNA
aggagagtcccgcagtcggcgtccagcggctctgcttgttcgtgtgtgtgtcgttgcaggccttattcaagcttaccatgagactgagcaagaccctcgtggacatggatatggccgactactccgctgcacttgatcccgcctatacaactctggagttcgaaaacgtccaggttttgacgatgggcaatgacacctctccttcagaggggacaaacttaaatgcgccaaacagtctgggagtgagcgctctatgcgccatctgtggtgatagggcaactggcaaacactacggggcctcctcttgcgacggatgtaagggctttttccggcgctcggtacgtaaaaatcatatgtattcatgccgatttagcagacaatgtgtggtcgataaggacaaaaggaaccagtgccggtactgtcgcctcaagaagtgcttcagagctggtatgaaaaaggaagcagtgcagaatgagagggatcggattagtacccgccgatccgcctatgaagactctagcctgccgtccataaacgcccttctgcaggccgaggttttgtcaagacaaatcacaagtcccgtgagcgggattaatggagatatcagggcgaaaaagattgcatctatcgccgacgtctgtgagtccatgaaagaacagctcctggtgctggtagagtgggctaagtacatacctgccttttgcgaactcccattagatgaccaggttgcactgcttcgggctcacgccggcgagcatttgctgctaggcgcgaccaagcgttcaatggtgttcaaagacgtcctcctgcttgggaacgattatatcgtgccccgccactgtcctgagctggccgaaatgagcagagtgagtattaggatcttggacgagctcgtcctgccatttcaggaattacaaattgatgacaatgagtacgcatacctgaaggctatcatattctttgatcccgacgccaaaggactctctgatcctggtaagattaaacggcttcgatcccaggttcaggtgagcctggaagactatatcaacgatcgccagtacgactcgagaggcaggttcggggagttgctactgctcctgccaactcttcaatctattacatggcagatgatcgagcagatccaatttattaagctgttcggaatggctaaaatagataatttgctccaggaaatgctgttatgaggactagtccctgttcccagagcccacttttttttctttttttgaaataaaatagcctgtctttcagatctcaaaggctcttttcagagccaccaaaaaaaaaaaaaaaaaaaaaaaaaaaaaaaaaaaaaaaaaaaaaaaaaaaaaaaaaaaaaaaaaaaaaaaaaaaaaaaaaaaaaaaaaaaaaaaaaaaaa

SEQ ID NO: 3503 - RNA, 1400 nt, synthetic construct
  misc_feature 1..1400: note = mRNA a-1 (hSL-A100) (opt3) from Homo sapiens__NP_000448.3__HNF4A(1-375)(T166A)
  source 1..1400: mol_type = other RNA
aggagagtcccgcagtcggcgtccagcggctctgcttgttcgtgtgtgtgtcgttgcaggccttattcaagcttaccatgagactgagcaagaccctcgtggacatggatatggccgactactccgctgcacttgatcccgcctatacaactctggagttcgaaaacgtccaggttttgacgatgggcaatgacacctctccttcagaggggacaaacttaaatgcgccaaacagtctgggagtgagcgctctatgcgccatctgtggtgatagggcaactggcaaacactacggggcctcctcttgcgacggatgtaagggctttttccggcgctcggtacgtaaaaatcatatgtattcatgccgatttagcagacaatgtgtggtcgataaggacaaaaggaaccagtgccggtactgtcgcctcaagaagtgcttcagagctggtatgaaaaaggaagcagtgcagaatgagagggatcggattagtacccgccgatcctcttatgaagacagctccctgccgtcaataaacgcccttctgcaggctgaggttttgagtagacaaatcgccagccccgtgtctgggattaatggagatatcagggcgaaaaagattgcatccatcgccgacgtctgtgagtcaatgaaagaacagctcctggtgctggtagagtgggctaagtacatacctgccttttgcgaactcccattagatgaccaggttgcactgcttcgggctcacgccggcgagcatttgctgctaggcgcgacaaagcgtagcatggtgttcaaagacgtcctcctgcttgggaacgattatatcgtgccccgccactgtcctgagctggccgaaatgagtagagtgtctattaggatcttggacgagctcgtcctgccatttcaggaattacaaattgatgacaatgagtacgcatacctgaaggctatcatattctttgatcccgacgccaaaggactctccgatcctggtaagattaaacggcttcgaagccaggttcaggtgtcgctggaagactatatcaacgatcgccagtacgactctagaggcaggttcggggagttgctactgctcctgccaacccttcaatccattacttggcagatgatcgagcagatccaatttattaagctgttcggaatggctaaaatagataatttgctccaggaaatgctgttatgaggactagtccctgttcccagagcccacttttttttctttttttgaaataaaatagcctgtctttcagatctcaaaggctcttttcagagccaccaaaaaaaaaaaaaaaaaaaaaaaaaaaaaaaaaaaaaaaaaaaaaaaaaaaaaaaaaaaaaaaaaaaaaaaaaaaaaaaaaaaaaaaaaaaaaaaaaaaaa

SEQ ID NO: 3504 - RNA, 1400 nt, synthetic construct
  misc_feature 1..1400: note = mRNA a-1 (hSL-A100) (opt3) from Homo sapiens__NP_000448.3__HNF4A(1-375)(S167E)
  source 1..1400: mol_type = other RNA
aggagagtcccgcagtcggcgtccagcggctctgcttgttcgtgtgtgtgtcgttgcaggccttattcaagcttaccatgagactgagcaagaccctcgtggacatggatatggccgactactccgctgcacttgatcccgcctatacaactctggagttcgaaaacgtccaggttttgacgatgggcaatgacacctctccttcagaggggacaaacttaaatgcgccaaacagtctgggagtgagcgctctatgcgccatctgtggtgatagggcaactggcaaacactacggggcctcctcttgcgacggatgtaagggctttttccggcgctcggtacgtaaaaatcatatgtattcatgccgatttagcagacaatgtgtggtcgataaggacaaaaggaaccagtgccggtactgtcgcctcaagaagtgcttcagagctggtatgaaaaaggaagcagtgcagaatgagagggatcggattagtacccgccgatcctcttatgaagacagctccctgccgtcaataaacgcccttctgcaggctgaggttttgagtagacaaatcacagagcccgtgagcgggattaatggagatatcagggccaaaaagattgcgtctatcgcagacgtctgtgaatccatgaaagagcagctcctggtgctggtagaatgggccaagtacatacctgctttttgcgagctcccattagatgaccaggttgccctgcttcgggcacacgctggcgagcatttgctgctaggcgccaccaagcgttcaatggtgttcaaagacgtcctcctgcttgggaacgattatatcgtgccccgccactgtcctgaactggcggagatgagcagagtgagtattaggatcttggacgaactcgtcctgccatttcaggagttacaaattgatgacaatgaatacgcctacctgaaggcaatcatattctttgatcccgacgctaaaggactctctgatcctggtaagattaaacggcttcgatcccaggttcaggtgagcctggaggactatatcaacgatcgccagtacgactcgagaggcaggttcggggagttgctactgctcctgccaactcttcaatctattacatggcagatgatcgaacagatccaatttattaagctgttcggaatggccaaaatagataatttgctccaggagatgctgttatgaggactagtccctgttcccagagcccacttttttttctttttttgaaataaaatagcctgtctttcagatctcaaaggctcttttcagagccaccaaaaaaaaaaaaaaaaaaaaaaaaaaaaaaaaaaaaaaaaaaaaaaaaaaaaaaaaaaaaaaaaaaaaaaaaaaaaaaaaaaaaaaaaaaaaaaaaaaaaa

SEQ ID NO: 3505 - RNA, 1400 nt, synthetic construct
  misc_feature 1..1400: note = mRNA a-1 (hSL-A100) (opt3) from Homo sapiens__NP_000448.3__HNF4A(1-375)(S167A)
  source 1..1400: mol_type = other RNA
aggagagtcccgcagtcggcgtccagcggctctgcttgttcgtgtgtgtgtcgttgcaggccttattcaagcttaccatgagactgagcaagaccctcgtggacatggatatggccgactactccgctgcacttgatcccgcctatacaactctggagttcgaaaacgtccaggttttgacgatgggcaatgacacctctccttcagaggggacaaacttaaatgcgccaaacagtctgggagtgagcgctctatgcgccatctgtggtgatagggcaactggcaaacactacggggcctcctcttgcgacggatgtaagggctttttccggcgctcggtacgtaaaaatcatatgtattcatgccgatttagcagacaatgtgtggtcgataaggacaaaaggaaccagtgccggtactgtcgcctcaagaagtgcttcagagctggtatgaaaaaggaagcagtgcagaatgagagggatcggattagtacccgccgatcctcttatgaagacagctccctgccgtcaataaacgcccttctgcaggctgaggttttgagtagacaaatcacagcccccgtgagcgggattaatggagatatcagggcgaaaaagattgcatctatcgccgacgtctgtgagtccatgaaagaacagctcctggtgctggtagagtgggctaagtacatacctgccttttgcgaactcccattagatgaccaggttgcactgcttcgggctcacgccggcgagcatttgctgctaggcgcgaccaagcgttcaatggtgttcaaagacgtcctcctgcttgggaacgattatatcgtgccccgccactgtcctgagctggccgaaatgagcagagtgagtattaggatcttggacgagctcgtcctgccatttcaggaattacaaattgatgacaatgagtacgcatacctgaaggctatcatattctttgatcccgacgccaaaggactctctgatcctggtaagattaaacggcttcgatcccaggttcaggtgagcctggaagactatatcaacgatcgccagtacgactcgagaggcaggttcggggagttgctactgctcctgccaactcttcaatctattacatggcagatgatcgagcagatccaatttattaagctgttcggaatggctaaaatagataatttgctccaggaaatgctgttatgaggactagtccctgttcccagagcccacttttttttctttttttgaaataaaatagcctgtctttcagatctcaaaggctcttttcagagccaccaaaaaaaaaaaaaaaaaaaaaaaaaaaaaaaaaaaaaaaaaaaaaaaaaaaaaaaaaaaaaaaaaaaaaaaaaaaaaaaaaaaaaaaaaaaaaaaaaaaaa

SEQ ID NO: 3506 - RNA, 1400 nt, synthetic construct; identical to SEQ ID NO: 3505
  misc_feature 1..1400: note = mRNA a-1 (hSL-A100) (opt3) from Homo sapiens__NP_000448.3__HNF4A(1-375)(S167A_S378A_T429A_T432A_ S436A)
  source 1..1400: mol_type = other RNA

SEQ ID NO: 3507 - RNA, 1400 nt, synthetic construct; identical to SEQ ID NO: 3504
  misc_feature 1..1400: note = mRNA a-1 (hSL-A100) (opt3) from Homo sapiens__NP_000448.3__HNF4A(1-375)(S167E_S378E_T429E_T432E_ S436E)
  source 1..1400: mol_type = other RNA

SEQ ID NO: 3508 - RNA, 1400 nt, synthetic construct
  misc_feature 1..1400: note = mRNA a-1 (hSL-A100) (opt3) from Homo sapiens__NP_000448.3__HNF4A(1-375)(S87A)
  source 1..1400: mol_type = other RNA
aggagagtcccgcagtcggcgtccagcggctctgcttgttcgtgtgtgtgtcgttgcaggccttattcaagcttaccatgagactgagcaagaccctcgtggacatggatatggccgactactccgctgcacttgatcccgcctatacaactctggagttcgaaaacgtccaggttttgacgatgggcaatgacacctctccttcagaggggacaaacttaaatgcgccaaacagtctgggagtgagcgctctatgcgccatctgtggtgatagggcaactggcaaacactacggggcctcctcttgcgacggatgtaagggctttttccggcgcgctgtacgtaaaaatcatatgtattcgtgccgattttcaagacaatgtgtggtcgataaggacaaaaggaaccagtgccggtactgtcgcctcaagaagtgcttcagagcaggtatgaaaaaggaagccgtgcagaatgagagggatcggattagcacccgccgaagttcctatgaagactctagcctgccgtccataaacgcccttctgcaggccgaggttttgtcaagacaaatcacaagtcccgtgagcgggattaatggagatatcagggcgaaaaagattgcatctatcgccgacgtctgtgagtccatgaaagaacagctcctggtgctggtagagtgggctaagtacatacctgccttttgcgaactcccattagatgaccaggttgcactgcttcgggctcacgccggcgagcatttgctgctaggcgcgaccaagcgttcaatggtgttcaaagacgtcctcctgcttgggaacgattatatcgtgccccgccactgtcctgagctggccgaaatgagcagagtgagtattaggatcttggacgagctcgtcctgccatttcaggaattacaaattgatgacaatgagtacgcatacctgaaggctatcatattctttgatcccgacgccaaaggactctctgatcctggtaagattaaacggcttcgatcccaggttcaggtgagcctggaagactatatcaacgatcgccagtacgactcgagaggcaggttcggggagttgctactgctcctgccaactcttcaatctattacatggcagatgatcgagcagatccaatttattaagctgttcggaatggctaaaatagataatttgctccaggaaatgctgttatgaggactagtccctgttcccagagcccacttttttttctttttttgaaataaaatagcctgtctttcagatctcaaaggctcttttcagagccaccaaaaaaaaaaaaaaaaaaaaaaaaaaaaaaaaaaaaaaaaaaaaaaaaaaaaaaaaaaaaaaaaaaaaaaaaaaaaaaaaaaaaaaaaaaaaaaaaaaaaa

SEQ ID NO: 3509 - RNA, 1400 nt, synthetic construct
  misc_feature 1..1400: note = mRNA a-1 (hSL-A100) (opt3) from Homo sapiens__NP_000448.3__HNF4A(1-375)(S87E)
  source 1..1400: mol_type = other RNA
aggagagtcccgcagtcggcgtccagcggctctgcttgttcgtgtgtgtgtcgttgcaggccttattcaagcttaccatgagactgagcaagaccctcgtggacatggatatggccgactactccgctgcacttgatcccgcctatacaactctggagttcgaaaacgtccaggttttgacgatgggcaatgacacctctccttcagaggggacaaacttaaatgcgccaaacagtctgggagtgagcgctctatgcgccatctgtggtgatagggcaactggcaaacactacggggcctcctcttgcgacggatgtaagggctttttccggcgcgaagtacgtaaaaatcatatgtattcgtgccgattttcaagacaatgtgtggtcgataaggacaaaaggaaccagtgccggtactgtcgcctcaagaagtgcttcagagctggtatgaaaaaggaggcagtgcagaatgaaagggatcggattagcacccgccgaagttcctatgaggactctagcctgccgtccataaacgcccttctgcaggctgaggttttgtcaagacaaatcacaagtcccgtgagcgggattaatggagatatcagggccaaaaagattgcgtctatcgcagacgtctgtgaatccatgaaagagcagctcctggtgctggtagaatgggccaagtacatacctgctttttgcgagctcccattagatgaccaggttgccctgcttcgggcacacgctggcgagcatttgctgctaggcgccaccaagcgttcaatggtgttcaaagacgtcctcctgcttgggaacgattatatcgtgccccgccactgtcctgaactggcggagatgagcagagtgagtattaggatcttggacgaactcgtcctgccatttcaggagttacaaattgatgacaatgaatacgcctacctgaaggcaatcatattctttgatcccgacgctaaaggactctctgatcctggtaagattaaacggcttcgatcccaggttcaggtgagcctggaggactatatcaacgatcgccagtacgactcgagaggcaggttcggggagttgctactgctcctgccaactcttcaatctattacatggcagatgatcgaacagatccaatttattaagctgttcggaatggccaaaatagataatttgctccaggagatgctgttatgaggactagtccctgttcccagagcccacttttttttctttttttgaaataaaatagcctgtctttcagatctcaaaggctcttttcagagccaccaaaaaaaaaaaaaaaaaaaaaaaaaaaaaaaaaaaaaaaaaaaaaaaaaaaaaaaaaaaaaaaaaaaaaaaaaaaaaaaaaaaaaaaaaaaaaaaaaaaaa

SEQ ID NO: 3510 - RNA, 1400 nt, synthetic construct
  misc_feature 1..1400: note = mRNA a-1 (hSL-A100) (opt3) from Homo sapiens__NP_000448.3__HNF4A(1-375)(R2V)
  source 1..1400: mol_type = other RNA
aggagagtcccgcagtcggcgtccagcggctctgcttgttcgtgtgtgtgtcgttgcaggccttattcaagcttaccatggtgctgagcaagaccctcgtcgacatggatatggccgactactccgctgcacttgatcccgcctatacaactctggagttcgaaaacgttcaggtgttgacgatgggcaatgacacctctccttcagaggggacaaacttaaatgcgccaaacagtctgggagtaagcgctctatgcgccatctgtggtgatagagcaactggcaaacactacggggcctcctcttgcgacggatgtaagggctttttcaggcggtcggtgcgcaaaaatcatatgtattcatgccgatttagccgtcaatgtgtcgtggataaggacaaaagaaaccagtgcaggtactgtcggctcaagaagtgcttccgcgctggtatgaaaaaggaagcagttcagaatgagagagataggattagtacccggcgctcctcttatgaagacagctccctgccgtcaataaacgcccttctgcaggctgaggtgttgagtcgacaaatcacaagccccgtctctgggattaatggagatatcagagccaaaaagattgcgtccatcgcagacgtgtgtgagtcaatgaaagaacagctcctggtactggttgagtgggccaagtacatacctgctttttgcgaactcccattagatgaccaggtggccctgcttagggcacacgctggcgagcatttgctgctaggcgccaccaagcggagcatggtcttcaaagacgtgctcctgcttgggaacgattatatcgtgccccgtcactgtcctgagctggcggaaatgagtcgcgtctctattagaatcttggacgagctcgttctgccatttcaggaattacaaattgatgacaatgagtacgcctacctgaaggcaatcatattctttgatcccgacgctaaaggactctccgatcctggtaagattaaaaggcttcggagccaggtgcaggtatcgctggaagactatatcaacgatcgacagtacgactctcgcggcagattcggggagttgctactgctcctgccaactcttcaatccattacatggcagatgatcgagcagatccaatttattaagctgttcggaatggccaaaatagataatttgctccaggaaatgctgttatgaggactagtccctgttcccagagcccacttttttttctttttttgaaataaaatagcctgtctttcagatctcaaaggctcttttcagagccaccaaaaaaaaaaaaaaaaaaaaaaaaaaaaaaaaaaaaaaaaaaaaaaaaaaaaaaaaaaaaaaaaaaaaaaaaaaaaaaaaaaaaaaaaaaaaaaaaaaaaa

SEQ ID NO: 3511 - RNA, 1400 nt, synthetic construct
  misc_feature 1..1400: note = mRNA a-1 (hSL-A100) (opt3) from Homo sapiens__NP_000448.3__HNF4A(1-375)(R2V_K5V)
  source 1..1400: mol_type = other RNA
aggagagtcccgcagtcggcgtccagcggctctgcttgttcgtgtgtgtgtcgttgcaggccttattcaagcttaccatggtgctgagcgtcaccctcgttgacatggatatggccgactactccgctgcacttgatcccgcctatacaactctggagttcgaaaacgtgcaggtattgacgatgggcaatgacacctctccttcagaggggacaaacttaaatgcgccaaacagtctgggagtgagcgctctatgcgccatctgtggtgatagagcaactggcaagcactacggggcctcctcttgcgacggatgtaaaggctttttcaggcggtcggtccgcaagaatcatatgtattcatgccgatttagccgtcaatgtgtggttgataaagacaagagaaaccagtgcaggtactgtcggctcaaaaagtgcttccgcgctggtatgaagaaagaagcagtgcagaatgagagagataggattagtacccggcgctcctcttatgaagacagctccctgccgtcaataaacgcccttctgcaggctgaggtcttgagtcgacaaatcacaagccccgtgtctgggattaatggagatatcagagccaagaaaattgcgtccatcgcagacgtatgtgagtcaatgaaggaacagctcctggttctggtggagtgggccaaatacatacctgctttttgcgaactcccattagatgaccaggtcgccctgcttagggcacacgctggcgagcatttgctgctaggcgccaccaagcggagcatggtgttcaaggacgtgctcctgcttgggaacgattatatcgtcccccgtcactgtcctgagctggcggaaatgagtcgcgtttctattagaatcttggacgagctcgtgctgccatttcaggaattacaaattgatgacaatgagtacgcctacctgaaagcaatcatattctttgatcccgacgctaagggactctccgatcctggtaaaattaagaggcttcggagccaggtacaggtgtcgctggaagactatatcaacgatcgacagtacgactctcgcggcagattcggggagttgctactgctcctgccaactcttcaatccattacatggcagatgatcgagcagatccaatttattaaactgttcggaatggccaagatagataatttgctccaggaaatgctgttatgaggactagtccctgttcccagagcccacttttttttctttttttgaaataaaatagcctgtctttcagatctcaaaggctcttttcagagccaccaaaaaaaaaaaaaaaaaaaaaaaaaaaaaaaaaaaaaaaaaaaaaaaaaaaaaaaaaaaaaaaaaaaaaaaaaaaaaaaaaaaaaaaaaaaaaaaaaaaaa

SEQ ID NO: 3512 - RNA, 1400 nt, synthetic construct
  misc_feature 1..1400: note = mRNA a-1 (hSL-A100) (opt3) from Homo sapiens__NP_000448.3__HNF4A(1-375)(K179R_K180R)
  source 1..1400: mol_type = other RNA
aggagagtcccgcagtcggcgtccagcggctctgcttgttcgtgtgtgtgtcgttgcaggccttattcaagcttaccatgagactgagcaagaccctcgtggacatggatatggccgactactccgctgcacttgatcccgcctatacaactctggagttcgaaaacgtccaggttttgacgatgggcaatgacacctctccttcagaggggacaaacttaaatgcgccaaacagtctgggagtgagcgctctatgcgccatctgtggtgatagggcaactggcaaacactacggggcctcctcttgcgacggatgtaagggctttttccggcgctcggtacgtaaaaatcatatgtattcatgccgatttagcagacaatgtgtggtcgataaggacaaaaggaaccagtgccggtactgtcgcctcaagaagtgcttcagagctggtatgaaaaaggaagcagtgcagaatgagagggatcggattagtacccgccgatcctcttatgaagacagctccctgccgtcaataaacgcccttctgcaggctgaggttttgagtagacaaatcacaagccccgtgtctgggattaatggagatatcagggcccggcgtattgcgtccatcgcagacgtctgtgagtcaatgaaagaacagctcctggtgctggtagagtgggccaagtacatacctgctttttgcgaactcccattagatgaccaggttgccctgcttcgcgcacacgctggcgagcatttgctgctaggcgccaccaaaagaagcatggtgttcaaggacgtcctcctgcttgggaacgattatatcgtgcccaggcactgtcctgagctggcggaaatgagtcgggtgtctattcgaatcttggacgagctcgtcctgccatttcaggaattacaaattgatgacaatgagtacgcctacctgaaggcaatcatattctttgatcccgacgctaaaggactctccgatcctggtaagattaaacgccttagaagccaggttcaggtgtcgctggaagactatatcaacgataggcagtacgactctcggggccgcttcggggagttgctactgctcctgccaactcttcaatccattacatggcagatgatcgagcagatccaatttattaagctgttcggaatggccaaaatagataatttgctccaggaaatgctgttatgaggactagtccctgttcccagagcccacttttttttctttttttgaaataaaatagcctgtctttcagatctcaaaggctcttttcagagccaccaaaaaaaaaaaaaaaaaaaaaaaaaaaaaaaaaaaaaaaaaaaaaaaaaaaaaaaaaaaaaaaaaaaaaaaaaaaaaaaaaaaaaaaaaaaaaaaaaaaaa

SEQ ID NO: 3513 - RNA, 1400 nt, synthetic construct
  misc_feature 1..1400: note = mRNA a-1 (hSL-A100) (opt3) from Homo sapiens__NP_000448.3__HNF4A(1-375)(K234R)
  source 1..1400: mol_type = other RNA
aggagagtcccgcagtcggcgtccagcggctctgcttgttcgtgtgtgtgtcgttgcaggccttattcaagcttaccatgagactgagcaagaccctcgtggacatggatatggccgactactccgctgcacttgatcccgcctatacaactctggagttcgaaaacgtccaggttttgacgatgggcaatgacacctctccttcagaggggacaaacttaaatgcgccaaacagtctgggagtgagcgctctatgcgccatctgtggtgatagggcaactggcaaacactacggggcctcctcttgcgacggatgtaagggctttttccggcgctcggtacgtaaaaatcatatgtattcatgccgatttagcagacaatgtgtggtcgataaggacaaaaggaaccagtgccggtactgtcgcctcaagaagtgcttcagagctggtatgaaaaaggaagcagtgcagaatgagagggatcggattagtacccgccgatcctcttatgaagacagctccctgccgtcaataaacgcccttctgcaggctgaggttttgagtagacaaatcacaagccccgtgtctgggattaatggagatatcagggccaaaaagattgcgtccatcgcagacgtctgtgagtcaatgaaagaacagctcctggtgctggtagagtgggccaagtacatacctgctttttgcgaactcccattagatgaccaggttgccctgcttcgggcacacgctggcgagcatttgctgctaggcgccacccgtcgcagcatggtgttcaaggacgtcctcctgcttgggaacgattatatcgtgcccagacactgtcctgagctggcggaaatgagtagggtgtctattcggatcttggacgagctcgtcctgccatttcaggaattacaaattgatgacaatgagtacgcctacctgaaagcaatcatattctttgatcccgacgctaagggactctccgatcctggtaaaattaagcgacttcgcagccaggttcaggtgtcgctggaagactatatcaacgatagacagtacgactctaggggccggttcggggagttgctactgctcctgccaactcttcaatccattacatggcagatgatcgagcagatccaatttattaaactgttcggaatggccaagatagataatttgctccaggaaatgctgttatgaggactagtccctgttcccagagcccacttttttttctttttttgaaataaaatagcctgtctttcagatctcaaaggctcttttcagagccaccaaaaaaaaaaaaaaaaaaaaaaaaaaaaaaaaaaaaaaaaaaaaaaaaaaaaaaaaaaaaaaaaaaaaaaaaaaaaaaaaaaaaaaaaaaaaaaaaaaaaa

SEQ ID NO: 3514 - RNA, 1400 nt, synthetic construct
  misc_feature 1..1400: note = mRNA a-1 (hSL-A100) (opt3) from Homo sapiens__NP_000448.3__HNF4A(1-375)(K300R)
  source 1..1400: mol_type = other RNA
aggagagtcccgcagtcggcgtccagcggctctgcttgttcgtgtgtgtgtcgttgcaggccttattcaagcttaccatgagactgagcaagaccctcgtggacatggatatggccgactactccgctgcacttgatcccgcctatacaactctggagttcgaaaacgtccaggttttgacgatgggcaatgacacctctccttcagaggggacaaacttaaatgcgccaaacagtctgggagtgagcgctctatgcgccatctgtggtgatagggcaactggcaaacactacggggcctcctcttgcgacggatgtaagggctttttccggcgctcggtacgtaaaaatcatatgtattcatgccgatttagcagacaatgtgtggtcgataaggacaaaaggaaccagtgccggtactgtcgcctcaagaagtgcttcagagctggtatgaaaaaggaagcagtgcagaatgagagggatcggattagtacccgccgatcctcttatgaagacagctccctgccgtcaataaacgcccttctgcaggctgaggttttgagtagacaaatcacaagccccgtgtctgggattaatggagatatcagggccaaaaagattgcgtccatcgcagacgtctgtgagtcaatgaaagaacagctcctggtgctggtagagtgggccaagtacatacctgctttttgcgaactcccattagatgaccaggttgccctgcttcgggcacacgctggcgagcatttgctgctaggcgccaccaagcgtagcatggtgttcaaagacgtcctcctgcttgggaacgattatatcgtgccccgccactgtcctgagctggcggaaatgagtagagtgtctattaggatcttggacgagctcgtcctgccatttcaggaattacaaattgatgacaatgagtacgcctacctgaaggcaatcatattctttgatcccgacgctcggggactctccgatcctggtaaaattaagcgacttcgcagccaggttcaggtgtcgctggaagactatatcaacgatagacagtacgactctaggggccggttcggggagttgctactgctcctgccaactcttcaatccattacatggcagatgatcgagcagatccaatttattaaactgttcggaatggccaagatagataatttgctccaggaaatgctgttatgaggactagtccctgttcccagagcccacttttttttctttttttgaaataaaatagcctgtctttcagatctcaaaggctcttttcagagccaccaaaaaaaaaaaaaaaaaaaaaaaaaaaaaaaaaaaaaaaaaaaaaaaaaaaaaaaaaaaaaaaaaaaaaaaaaaaaaaaaaaaaaaaaaaaaaaaaaaaaa

SEQ ID NO: 3515 - RNA, 1400 nt, synthetic construct
  misc_feature 1..1400: note = mRNA a-1 (hSL-A100) (opt3) from Homo sapiens__NP_000448.3__HNF4A(1-375)(K300R_K307R_K309R)
  source 1..1400: mol_type = other RNA
aggagagtcccgcagtcggcgtccagcggctctgcttgttcgtgtgtgtgtcgttgcaggccttattcaagcttaccatgagactgagcaagaccctcgtggacatggatatggccgactactccgctgcacttgatcccgcctatacaactctggagttcgaaaacgtccaggttttgacgatgggcaatgacacctctccttcagaggggacaaacttaaatgcgccaaacagtctgggagtgagcgctctatgcgccatctgtggtgatagggcaactggcaaacactacggggcctcctcttgcgacggatgtaagggctttttccggcgctcggtacgtaaaaatcatatgtattcatgccgatttagcagacaatgtgtggtcgataaggacaaaaggaaccagtgccggtactgtcgcctcaagaagtgcttcagagctggtatgaaaaaggaagcagtgcagaatgagagggatcggattagtacccgccgatcctcttatgaagacagctccctgccgtcaataaacgcccttctgcaggctgaggttttgagtagacaaatcacaagccccgtgtctgggattaatggagatatcagggccaaaaagattgcgtccatcgcagacgtctgtgagtcaatgaaagaacagctcctggtgctggtagagtgggccaagtacatacctgctttttgcgaactcccattagatgaccaggttgccctgcttcgggcacacgctggcgagcatttgctgctaggcgccaccaagcgtagcatggtgttcaaagacgtcctcctgcttgggaacgattatatcgtgccccgccactgtcctgagctggcggaaatgagtagagtgtctattaggatcttggacgagctcgtcctgccatttcaggaattacaaattgatgacaatgagtacgcctacctgaaggcaatcatattctttgatcccgacgctcggggactctccgatcctggtcgcattcgaagacttaggagccaggttcaggtgtcgctggaagactatatcaacgatcggcagtacgactctcgcggcagattcggggagttgctactgctcctgccaactcttcaatccattacatggcagatgatcgagcagatccaatttattaaactgttcggaatggccaagatagataatttgctccaggaaatgctgttatgaggactagtccctgttcccagagcccacttttttttctttttttgaaataaaatagcctgtctttcagatctcaaaggctcttttcagagccaccaaaaaaaaaaaaaaaaaaaaaaaaaaaaaaaaaaaaaaaaaaaaaaaaaaaaaaaaaaaaaaaaaaaaaaaaaaaaaaaaaaaaaaaaaaaaaaaaaaaaa

SEQ ID NO: 3516 - RNA, 1400 nt, synthetic construct; identical to SEQ ID NO: 3497
  misc_feature 1..1400: note = mRNA a-1 (hSL-A100) (opt3) from Homo sapiens__NP_000448.3__HNF4A(1-375)(K447R_K470R)
  source 1..1400: mol_type = other RNA

SEQ ID NO: 3517 - RNA, 1400 nt, synthetic construct; identical to SEQ ID NO: 3497
  misc_feature 1..1400: note = mRNA a-1 (hSL-A100) (opt3) from Homo sapiens__NP_000448.3__HNF4A(1-375)(K458R)
  source 1..1400: mol_type = other RNA

SEQ ID NO: 3518 - RNA, 1400 nt, synthetic construct
  misc_feature 1..1400: note = mRNA a-1 (hSL-A100) (opt3) from Homo sapiens__NP_000448.3__HNF4A(1-375)(K106R_K108R_K126R_K127R)
  source 1..1400: mol_type = other RNA
aggagagtcccgcagtcggcgtccagcggctctgcttgttcgtgtgtgtgtcgttgcaggccttattcaagcttaccatgagactgagcaagaccctcgtggacatggatatggccgactactccgctgcacttgatcccgcctatacaactctggagttcgaaaacgtccaggttttgacgatgggcaatgacacctctccttcagaggggacaaacttaaatgcgccaaacagtctgggagtgagcgctctatgcgccatctgtggtgatagggcaactggcaaacactacggggcctcctcttgcgacggatgtaagggctttttccggcgctcggtacgtaaaaatcatatgtattcatgccgatttagcagacaatgtgtggtcgatagggaccggcgcaaccagtgcagatactgtaggctcaagaaatgcttccgggctggtatgcgccgagaagcagtgcagaatgagagagataggattagtacccggcgttcctcttatgaagacagctccctgccgtcaataaacgcccttctgcaggctgaggttttgagtcgccaaatcacaagccccgtgtctgggattaatggagatatcagagccaagaagattgcgtccatcgcagacgtctgtgagtcaatgaaagaacagctcctggtgctggtagagtgggccaagtacatacctgctttttgcgaactcccattagatgaccaggttgccctgcttagggcacacgctggcgagcatttgctgctaggcgccaccaaacggagcatggtgttcaaggacgtcctcctgcttgggaacgattatatcgtgccccgacactgtcctgagctggcggaaatgagtcgcgtgtctattagaatcttggacgagctcgtcctgccatttcaggaattacaaattgatgacaatgagtacgcctacctgaaagcaatcatattctttgatcccgacgctaagggactctccgatcctggtaagattaaaaggcttcggagccaggttcaggtgtcgctggaagactatatcaacgatcgccagtacgactctagaggcaggttcggggagttgctactgctcctgccaactcttcaatccattacatggcagatgatcgagcagatccaatttattaagctgttcggaatggccaaaatagataatttgctccaggaaatgctgttatgaggactagtccctgttcccagagcccacttttttttctttttttgaaataaaatagcctgtctttcagatctcaaaggctcttttcagagccaccaaaaaaaaaaaaaaaaaaaaaaaaaaaaaaaaaaaaaaaaaaaaaaaaaaaaaaaaaaaaaaaaaaaaaaaaaaaaaaaaaaaaaaaaaaaaaaaaaaaaa

SEQ ID NO: 3519 - RNA, 1400 nt, synthetic construct
  misc_feature 1..1400: note = mRNA a-1 (hSL-A100) (opt3) from Homo sapiens__NP_000448.3__HNF4A(1-375)(E285Q)
  source 1..1400: mol_type = other RNA
aggagagtcccgcagtcggcgtccagcggctctgcttgttcgtgtgtgtgtcgttgcaggccttattcaagcttaccatgagactgagcaagaccctcgtggacatggatatggccgactactccgctgcacttgatcccgcctatacaactctggagttcgaaaacgtccaggttttgacgatgggcaatgacacctctccttcagaggggacaaacttaaatgcgccaaacagtctgggagtgagcgctctatgcgccatctgtggtgatagggcaactggcaaacactacggggcctcctcttgcgacggatgtaagggctttttccggcgctcggtacgtaaaaatcatatgtattcatgccgatttagcagacaatgtgtggtcgataaggacaaaaggaaccagtgccggtactgtcgcctcaagaagtgcttcagagctggtatgaaaaaggaagcagtgcagaatgagagggatcggattagtacccgccgatcctcttatgaagacagctccctgccgtcaataaacgcccttctgcaggctgaggttttgagtagacaaatcacaagccccgtgtctgggattaatggagatatcagggccaaaaagattgcgtccatcgcagacgtctgtgagtcaatgaaagaacagctcctggtgctggtagagtgggccaagtacatacctgctttttgcgaactcccattagatgaccaggttgccctgcttcgggcacacgctggcgagcatttgctgctaggcgccaccaagcgtagcatggtgttcaaagacgtcctcctgcttgggaacgattatatcgtgccccgccactgtcctgagctggcggaaatgagtagagtgtctattaggatcttggacgagctcgtcctgccatttcaggaattacaaattgatgacaatcagtacgcctacctgaaggcaatcatattctttgatcccgacgctaaaggactctccgatcctggtaagattaaacggcttcgaagccaggttcaggtgtcgctggaggactatatcaacgatcgccaatacgactctagaggcaggttcggggaattgctactgctcctgccaactcttcagtccattacatggcagatgatcgagcaaatccagtttattaagctgttcggaatggccaaaatagataatttgctccaggagatgctgttatgaggactagtccctgttcccagagcccacttttttttctttttttgaaataaaatagcctgtctttcagatctcaaaggctcttttcagagccaccaaaaaaaaaaaaaaaaaaaaaaaaaaaaaaaaaaaaaaaaaaaaaaaaaaaaaaaaaaaaaaaaaaaaaaaaaaaaaaaaaaaaaaaaaaaaaaaaaaaaa

SEQ ID NO: 3520 - RNA, 1400 nt, synthetic construct
  misc_feature 1..1400: note = mRNA a-1 (hSL-A100) (opt3) from Homo sapiens__NP_000448.3__HNF4A(1-375)(T166E)
  source 1..1400: mol_type = other RNA
aggagagtcccgcagtcggcgtccagcggctctgcttgttcgtgtgtgtgtcgttgcaggccttattcaagcttaccatgagactgagcaagaccctcgtggacatggatatggccgactactccgctgcacttgatcccgcctatacaactctggagttcgaaaacgtccaggttttgacgatgggcaatgacacctctccttcagaggggacaaacttaaatgcgccaaacagtctgggagtgagcgctctatgcgccatctgtggtgatagggcaactggcaaacactacggggcctcctcttgcgacggatgtaagggctttttccggcgctcggtacgtaaaaatcatatgtattcatgccgatttagcagacaatgtgtggtcgataaggacaaaaggaaccagtgccggtactgtcgcctcaagaagtgcttcagagctggtatgaaaaaggaagcagtgcagaatgagagggatcggattagtacccgccgatcctcttatgaagacagctccctgccgtcaataaacgcccttctgcaggctgaggttttgagtagacaaatcgagagccccgtgtctgggattaatggagatatcagggccaaaaagattgcgtccatcgcagacgtctgtgaatcaatgaaagagcagctcctggtgctggtagaatgggccaagtacatacctgctttttgcgagctcccattagatgaccaggttgccctgcttcgggcacacgctggcgagcatttgctgctaggcgccacaaagcgtagcatggtgttcaaagacgtcctcctgcttgggaacgattatatcgtgccccgccactgtcctgaactggcggagatgagtagagtgtctattaggatcttggacgaactcgtcctgccatttcaggagttacaaattgatgacaatgaatacgcctacctgaaggcaatcatattctttgatcccgacgctaaaggactctccgatcctggtaagattaaacggcttcgaagccaggttcaggtgtcgctggaggactatatcaacgatcgccagtacgactctagaggcaggttcggggagttgctactgctcctgccaacccttcaatccattacttggcagatgatcgaacagatccaatttattaagctgttcggaatggccaaaatagataatttgctccaggagatgctgttatgaggactagtccctgttcccagagcccacttttttttctttttttgaaataaaatagcctgtctttcagatctcaaaggctcttttcagagccaccaaaaaaaaaaaaaaaaaaaaaaaaaaaaaaaaaaaaaaaaaaaaaaaaaaaaaaaaaaaaaaaaaaaaaaaaaaaaaaaaaaaaaaaaaaaaaaaaaaaaa

SEQ ID NO: 3521 - RNA, 1400 nt, synthetic construct
  misc_feature 1..1400: note = mRNA a-1 (hSL-A100) (opt3) from Homo sapiens__NP_000448.3__HNF4A(1-375)(S148A)
  source 1..1400: mol_type = other RNA
aggagagtcccgcagtcggcgtccagcggctctgcttgttcgtgtgtgtgtcgttgcaggccttattcaagcttaccatgagactgagcaagaccctcgtggacatggatatggccgactactccgctgcacttgatcccgcctatacaactctggagttcgaaaacgtccaggttttgacgatgggcaatgacacctctccttcagaggggacaaacttaaatgcgccaaacagtctgggagtgagcgctctatgcgccatctgtggtgatagggcaactggcaaacactacggggcctcctcttgcgacggatgtaagggctttttccggcgctcggtacgtaaaaatcatatgtattcatgccgatttagcagacaatgtgtggtcgataaggacaaaaggaaccagtgccggtactgtcgcctcaagaagtgcttcagagctggtatgaaaaaggaagcagtgcagaatgagagggatcggattagtacccgccgatcctcttatgaagacagcgccctgccgtccataaacgcccttctgcaggccgaggttttgtcaagacaaatcacaagtcccgtgagcgggattaatggagatatcagggcgaaaaagattgcatctatcgccgacgtctgtgagtccatgaaagaacagctcctggtgctggtagagtgggctaagtacatacctgccttttgcgaactcccattagatgaccaggttgcactgcttcgggctcacgccggcgagcatttgctgctaggcgcgaccaagcgttcaatggtgttcaaagacgtcctcctgcttgggaacgattatatcgtgccccgccactgtcctgagctggccgaaatgagcagagtgagtattaggatcttggacgagctcgtcctgccatttcaggaattacaaattgatgacaatgagtacgcatacctgaaggctatcatattctttgatcccgacgccaaaggactctctgatcctggtaagattaaacggcttcgatcccaggttcaggtgagcctggaagactatatcaacgatcgccagtacgactcgagaggcaggttcggggagttgctactgctcctgccaactcttcaatctattacatggcagatgatcgagcagatccaatttattaagctgttcggaatggctaaaatagataatttgctccaggaaatgctgttatgaggactagtccctgttcccagagcccacttttttttctttttttgaaataaaatagcctgtctttcagatctcaaaggctcttttcagagccaccaaaaaaaaaaaaaaaaaaaaaaaaaaaaaaaaaaaaaaaaaaaaaaaaaaaaaaaaaaaaaaaaaaaaaaaaaaaaaaaaaaaaaaaaaaaaaaaaaaaaa

SEQ ID NO: 3522 - RNA, 1400 nt, synthetic construct
  misc_feature 1..1400: note = mRNA a-1 (hSL-A100) (opt3) from Homo sapiens__NP_000448.3__HNF4A(1-375)(S148E)
  source 1..1400: mol_type = other RNA
aggagagtcccgcagtcggcgtccagcggctctgcttgttcgtgtgtgtgtcgttgcaggccttattcaagcttaccatgagactgagcaagaccctcgtggacatggatatggccgactactccgctgcacttgatcccgcctatacaactctggagttcgaaaacgtccaggttttgacgatgggcaatgacacctctccttcagaggggacaaacttaaatgcgccaaacagtctgggagtgagcgctctatgcgccatctgtggtgatagggcaactggcaaacactacggggcctcctcttgcgacggatgtaagggctttttccggcgctcggtacgtaaaaatcatatgtattcatgccgatttagcagacaatgtgtggtcgataaggacaaaaggaaccagtgccggtactgtcgcctcaagaagtgcttcagagctggtatgaaaaaggaagcagtgcagaatgagagggatcggattagtacccgccgatcctcttatgaagacagcgagctgccgtccataaacgcccttctgcaggctgaggttttgtcaagacaaatcacaagtcccgtgagcgggattaatggagatatcagggccaaaaagattgcgtctatcgcagacgtctgtgaatccatgaaagagcagctcctggtgctggtagaatgggccaagtacatacctgctttttgcgagctcccattagatgaccaggttgccctgcttcgggcacacgctggcgagcatttgctgctaggcgccaccaagcgttcaatggtgttcaaagacgtcctcctgcttgggaacgattatatcgtgccccgccactgtcctgaactggcggagatgagcagagtgagtattaggatcttggacgaactcgtcctgccatttcaggagttacaaattgatgacaatgaatacgcctacctgaaggcaatcatattctttgatcccgacgctaaaggactctctgatcctggtaagattaaacggcttcgatcccaggttcaggtgagcctggaggactatatcaacgatcgccagtacgactcgagaggcaggttcggggagttgctactgctcctgccaactcttcaatctattacatggcagatgatcgaacagatccaatttattaagctgttcggaatggccaaaatagataatttgctccaggagatgctgttatgaggactagtccctgttcccagagcccacttttttttctttttttgaaataaaatagcctgtctttcagatctcaaaggctcttttcagagccaccaaaaaaaaaaaaaaaaaaaaaaaaaaaaaaaaaaaaaaaaaaaaaaaaaaaaaaaaaaaaaaaaaaaaaaaaaaaaaaaaaaaaaaaaaaaaaaaaaaaaa

SEQ ID NO: 3523 - RNA, 1400 nt, synthetic construct
  misc_feature 1..1400: note = mRNA a-1 (hSL-A100) (opt3) from Homo sapiens__NP_000448.3__HNF4A(1-375)(S183A)
  source 1..1400: mol_type = other RNA
aggagagtcccgcagtcggcgtccagcggctctgcttgttcgtgtgtgtgtcgttgcaggccttattcaagcttaccatgagactgagcaagaccctcgtggacatggatatggccgactactccgctgcacttgatcccgcctatacaactctggagttcgaaaacgtccaggttttgacgatgggcaatgacacctctccttcagaggggacaaacttaaatgcgccaaacagtctgggagtgagcgctctatgcgccatctgtggtgatagggcaactggcaaacactacggggcctcctcttgcgacggatgtaagggctttttccggcgctcggtacgtaaaaatcatatgtattcatgccgatttagcagacaatgtgtggtcgataaggacaaaaggaaccagtgccggtactgtcgcctcaagaagtgcttcagagctggtatgaaaaaggaagcagtgcagaatgagagggatcggattagtacccgccgatcctcttatgaagacagctccctgccgtcaataaacgcccttctgcaggctgaggttttgagtagacaaatcacaagccccgtgtctgggattaatggagatatcagggccaaaaagattgcggcaatcgccgacgtctgtgagtccatgaaagaacagctcctggtgctggtagagtgggctaagtacatacctgccttttgcgaactcccattagatgaccaggttgcactgcttcgggctcacgccggcgagcatttgctgctaggcgcgaccaagcgttcaatggtgttcaaagacgtcctcctgcttgggaacgattatatcgtgccccgccactgtcctgagctggccgaaatgagcagagtgagtattaggatcttggacgagctcgtcctgccatttcaggaattacaaattgatgacaatgagtacgcatacctgaaggctatcatattctttgatcccgacgccaaaggactctctgatcctggtaagattaaacggcttcgatcccaggttcaggtgagcctggaagactatatcaacgatcgccagtacgactcgagaggcaggttcggggagttgctactgctcctgccaactcttcaatctattacatggcagatgatcgagcagatccaatttattaagctgttcggaatggctaaaatagataatttgctccaggaaatgctgttatgaggactagtccctgttcccagagcccacttttttttctttttttgaaataaaatagcctgtctttcagatctcaaaggctcttttcagagccaccaaaaaaaaaaaaaaaaaaaaaaaaaaaaaaaaaaaaaaaaaaaaaaaaaaaaaaaaaaaaaaaaaaaaaaaaaaaaaaaaaaaaaaaaaaaaaaaaaaaaa

SEQ ID NO: 3524 - RNA, 1400 nt, synthetic construct
  misc_feature 1..1400: note = mRNA a-1 (hSL-A100) (opt3) from Homo sapiens__NP_000448.3__HNF4A(1-375)(S183E)
  source 1..1400: mol_type = other RNA
aggagagtcccgcagtcggcgtccagcggctctgcttgttcgtgtgtgtgtcgttgcaggccttattcaagcttaccatgagactgagcaagaccctcgtggacatggatatggccgactactccgctgcacttgatcccgcctatacaactctggagttcgaaaacgtccaggttttgacgatgggcaatgacacctctccttcagaggggacaaacttaaatgcgccaaacagtctgggagtgagcgctctatgcgccatctgtggtgatagggcaactggcaaacactacggggcctcctcttgcgacggatgtaagggctttttccggcgctcggtacgtaaaaatcatatgtattcatgccgatttagcagacaatgtgtggtcgataaggacaaaaggaaccagtgccggtactgtcgcctcaagaagtgcttcagagctggtatgaaaaaggaagcagtgcagaatgagagggatcggattagtacccgccgatcctcttatgaagacagctccctgccgtcaataaacgcccttctgcaggctgaggttttgagtagacaaatcacaagccccgtgtctgggattaatggagatatcagggccaaaaagattgcggagatcgcagacgtctgtgaatccatgaaagagcagctcctggtgctggtagaatgggccaagtacatacctgctttttgcgagctcccattagatgaccaggttgccctgcttcgggcacacgctggcgagcatttgctgctaggcgccaccaagcgttcaatggtgttcaaagacgtcctcctgcttgggaacgattatatcgtgccccgccactgtcctgaactggcggagatgagcagagtgagtattaggatcttggacgaactcgtcctgccatttcaggagttacaaattgatgacaatgaatacgcctacctgaaggcaatcatattctttgatcccgacgctaaaggactctctgatcctggtaagattaaacggcttcgatcccaggttcaggtgagcctggaggactatatcaacgatcgccagtacgactcgagaggcaggttcggggagttgctactgctcctgccaactcttcaatctattacatggcagatgatcgaacagatccaatttattaagctgttcggaatggccaaaatagataatttgctccaggagatgctgttatgaggactagtccctgttcccagagcccacttttttttctttttttgaaataaaatagcctgtctttcagatctcaaaggctcttttcagagccaccaaaaaaaaaaaaaaaaaaaaaaaaaaaaaaaaaaaaaaaaaaaaaaaaaaaaaaaaaaaaaaaaaaaaaaaaaaaaaaaaaaaaaaaaaaaaaaaaaaaaa

SEQ ID NO: 3525 - RNA, 1400 nt, synthetic construct; identical to SEQ ID NO: 3497
  misc_feature 1..1400: note = mRNA a-1 (hSL-A100) (opt3) from Homo sapiens__NP_000448.3__HNF4A(1-375)(S461A)
  source 1..1400: mol_type = other RNA

SEQ ID NO: 3526 - RNA, 1400 nt, synthetic construct; identical to SEQ ID NO: 3497
  misc_feature 1..1400: note = mRNA a-1 (hSL-A100) (opt3) from Homo sapiens__NP_000448.3__HNF4A(1-375)(S461E)
  source 1..1400: mol_type = other RNA

SEQ ID NO: 3527 - RNA, 1400 nt, synthetic construct
  misc_feature 1..1400: note = mRNA a-1 (hSL-A100) (opt3) from Homo sapiens__NP_000448.3__HNF4A(1-375)(S142A_S143A_S313A)
  source 1..1400: mol_type = other RNA
aggagagtcccgcagtcggcgtccagcggctctgcttgttcgtgtgtgtgtcgttgcaggccttattcaagcttaccatgagactgagcaagaccctcgtggacatggatatggccgactactccgctgcacttgatcccgcctatacaactctggagttcgaaaacgtccaggttttgacgatgggcaatgacacctctccttcagaggggacaaacttaaatgcgccaaacagtctgggagtgagcgctctatgcgccatctgtggtgatagggcaactggcaaacactacggggcctcctcttgcgacggatgtaagggctttttccggcgctcggtacgtaaaaatcatatgtattcatgccgatttagcagacaatgtgtggtcgataaggacaaaaggaaccagtgccggtactgtcgcctcaagaagtgcttcagagctggtatgaaaaaggaagcagtgcagaatgagagggatcggattagtacccgccgagccgcttatgaagactcctctctgccgagcataaacgcccttctgcaggcggaggttttgtccagacaaatcacatcacccgtgagtgggattaatggagatatcagggccaaaaagattgccagcatcgctgacgtctgtgagtctatgaaagaacagctcctggtgctggtagagtgggccaagtacatacctgcattttgcgaactcccattagatgaccaggttgctctgcttcgggcccacgcgggcgagcatttgctgctaggcgccaccaagcgttccatggtgttcaaagacgtcctcctgcttgggaacgattatatcgtgccccgccactgtcctgagctggcagaaatgtcaagagtgagcattaggatcttggacgagctcgtcctgccatttcaggaattacaaattgatgacaatgagtacgcttacctgaaggccatcatattctttgatcccgacgctaaaggactcagtgatcctggtaagattaaacggcttcgagcccaggttcaggtgtctctggaagactatatcaacgatcgccagtacgactccagaggcaggttcggggagttgctactgctcctgccaactcttcaaagcattacatggcagatgatcgagcagatccaatttattaagctgttcggaatggcaaaaatagataatttgctccaggaaatgctgttatgaggactagtccctgttcccagagcccacttttttttctttttttgaaataaaatagcctgtctttcagatctcaaaggctcttttcagagccaccaaaaaaaaaaaaaaaaaaaaaaaaaaaaaaaaaaaaaaaaaaaaaaaaaaaaaaaaaaaaaaaaaaaaaaaaaaaaaaaaaaaaaaaaaaaaaaaaaaaaa

SEQ ID NO: 3528 - RNA, 1400 nt, synthetic construct; identical to SEQ ID NO: 3527
  misc_feature 1..1400: note = mRNA a-1 (hSL-A100) (opt3) from Homo sapiens__NP_000448.3__HNF4A(1-375)(S142A_S143A_S313A_K458R)
  source 1..1400: mol_type = other RNA

SEQ ID NO: 3529 - RNA, 1400 nt, synthetic construct
  misc_feature 1..1400: note = mRNA a-1 (hSL-A100) (opt3) from Homo sapiens__NP_000448.3__HNF4A(1-375)(S142A_S143A_S167A_S313A_ S378A_T429A_T432A_S436A_K458R)
  source 1..1400: mol_type = other RNA
aggagagtcccgcagtcggcgtccagcggctctgcttgttcgtgtgtgtgtcgttgcaggccttattcaagcttaccatgagactgagcaagaccctcgtggacatggatatggccgactactccgctgcacttgatcccgcctatacaactctggagttcgaaaacgtccaggttttgacgatgggcaatgacacctctccttcagaggggacaaacttaaatgcgccaaacagtctgggagtgagcgctctatgcgccatctgtggtgatagggcaactggcaaacactacggggcctcctcttgcgacggatgtaagggctttttccggcgctcggtacgtaaaaatcatatgtattcatgccgatttagcagacaatgtgtggtcgataaggacaaaaggaaccagtgccggtactgtcgcctcaagaagtgcttcagagctggtatgaaaaaggaagcagtgcagaatgagagggatcggattagtacccgccgagccgcttatgaagactcctctctgccgagcataaacgcccttctgcaggcggaggttttgtccagacaaatcacagcacccgtgtcagggattaatggagatatcagggccaaaaagattgctagtatcgccgacgtctgtgagagcatgaaagaacagctcctggtgctggtagagtgggcaaagtacatacctgctttttgcgaactcccattagatgaccaggttgccctgcttcgggcgcacgccggcgagcatttgctgctaggcgcaaccaagcgttctatggtgttcaaagacgtcctcctgcttgggaacgattatatcgtgccccgccactgtcctgagctggctgaaatgtccagagtgtcaattaggatcttggacgagctcgtcctgccatttcaggaattacaaattgatgacaatgagtacgcctacctgaaggctatcatattctttgatcccgacgccaaaggactcagcgatcctggtaagattaaacggcttcgagcacaggttcaggtgagtctggaagactatatcaacgatcgccagtacgactctagaggcaggttcggggagttgctactgctcctgccaactcttcaatccattacatggcagatgatcgagcagatccaatttattaagctgttcggaatggccaaaatagataatttgctccaggaaatgctgttatgaggactagtccctgttcccagagcccacttttttttctttttttgaaataaaatagcctgtctttcagatctcaaaggctcttttcagagccaccaaaaaaaaaaaaaaaaaaaaaaaaaaaaaaaaaaaaaaaaaaaaaaaaaaaaaaaaaaaaaaaaaaaaaaaaaaaaaaaaaaaaaaaaaaaaaaaaaaaaa

SEQ ID NO: 3530 - RNA, 1400 nt, synthetic construct
  misc_feature 1..1400: note = mRNA a-1 (hSL-A100) (opt3) from Homo sapiens__NP_000448.3__HNF4A(1-375)(S142A_S143A_S148A_S167A_ S313A_S378A_T429A_T432A_S436A_K458R)
  source 1..1400: mol_type = other RNA
aggagagtcccgcagtcggcgtccagcggctctgcttgttcgtgtgtgtgtcgttgcaggccttattcaagcttaccatgagactgagcaagaccctcgtggacatggatatggccgactactccgctgcacttgatcccgcctatacaactctggagttcgaaaacgtccaggttttgacgatgggcaatgacacctctccttcagaggggacaaacttaaatgcgccaaacagtctgggagtgagcgctctatgcgccatctgtggtgatagggcaactggcaaacactacggggcctcctcttgcgacggatgtaagggctttttccggcgctcggtacgtaaaaatcatatgtattcatgccgatttagcagacaatgtgtggtcgataaggacaaaaggaaccagtgccggtactgtcgcctcaagaagtgcttcagagctggtatgaaaaaggaagcagtgcagaatgagagggatcggattagtacccgccgagccgcttatgaagactccgccctgccgtctataaacgcgcttctgcaggcagaggttttgagcagacaaatcacagcccccgtgtccgggattaatggagatatcagggctaaaaagattgcctcaatcgcagacgtctgtgagagtatgaaagaacagctcctggtgctggtagagtgggctaagtacatacctgccttttgcgaactcccattagatgaccaggttgcgctgcttcgggcccacgcaggcgagcatttgctgctaggcgctaccaagcgtagcatggtgttcaaagacgtcctcctgcttgggaacgattatatcgtgccccgccactgtcctgagctggccgaaatgtctagagtgtccattaggatcttggacgagctcgtcctgccatttcaggaattacaaattgatgacaatgagtacgcttacctgaaggccatcatattctttgatcccgacgcaaaaggactctcagatcctggtaagattaaacggcttcgagcccaggttcaggtgagcctggaagactatatcaacgatcgccagtacgacagtagaggcaggttcggggagttgctactgctcctgccaactcttcaatctattacatggcagatgatcgagcagatccaatttattaagctgttcggaatggctaaaatagataatttgctccaggaaatgctgttatgaggactagtccctgttcccagagcccacttttttttctttttttgaaataaaatagcctgtctttcagatctcaaaggctcttttcagagccaccaaaaaaaaaaaaaaaaaaaaaaaaaaaaaaaaaaaaaaaaaaaaaaaaaaaaaaaaaaaaaaaaaaaaaaaaaaaaaaaaaaaaaaaaaaaaaaaaaaaaa

SEQ ID NO: 3531 - RNA, 1400 nt, synthetic construct
  misc_feature 1..1400: note = mRNA a-1 (hSL-A100) (opt3) from Homo sapiens__NP_000448.3__HNF4A(1-375)(K106R_K108R_K126R_K127R_ S142A_S143A_S148A_S167A_S313A_S378A_T429A_T432A_S436A_K458R )
  source 1..1400: mol_type = other RNA
aggagagtcccgcagtcggcgtccagcggctctgcttgttcgtgtgtgtgtcgttgcaggccttattcaagcttaccatgagactgagcaagaccctcgtggacatggatatggccgactactccgctgcacttgatcccgcctatacaactctggagttcgaaaacgtccaggttttgacgatgggcaatgacacctctccttcagaggggacaaacttaaatgcgccaaacagtctgggagtgagcgctctatgcgccatctgtggtgatagggcaactggcaaacactacggggcctcctcttgcgacggatgtaagggctttttccggcgctcggtacgtaaaaatcatatgtattcatgccgatttagcagacaatgtgtggtcgatagggaccggcgcaaccagtgcagatactgtaggctcaagaaatgcttccgggctggtatgcgccgagaagcagtgcagaatgagagagataggattagtacccggcgtgccgcttatgaagactccgccctgccgtctataaacgcgcttctgcaggcagaggttttgagccgccaaatcacagcccccgtgtccgggattaatggagatatcagagctaagaagattgcctcaatcgcagacgtctgtgagagtatgaaagaacagctcctggtgctggtagagtgggctaagtacatacctgccttttgcgaactcccattagatgaccaggttgcgctgcttagggcccacgcaggcgagcatttgctgctaggcgctaccaaacggagcatggtgttcaaggacgtcctcctgcttgggaacgattatatcgtgccccgacactgtcctgagctggccgaaatgtctcgcgtgtccattagaatcttggacgagctcgtcctgccatttcaggaattacaaattgatgacaatgagtacgcttacctgaaagccatcatattctttgatcccgacgcaaagggactctcagatcctggtaagattaaaaggcttcgggcccaggttcaggtgagcctggaagactatatcaacgatcgccagtacgacagtagaggcaggttcggggagttgctactgctcctgccaactcttcaatctattacatggcagatgatcgagcagatccaatttattaagctgttcggaatggctaaaatagataatttgctccaggaaatgctgttatgaggactagtccctgttcccagagcccacttttttttctttttttgaaataaaatagcctgtctttcagatctcaaaggctcttttcagagccaccaaaaaaaaaaaaaaaaaaaaaaaaaaaaaaaaaaaaaaaaaaaaaaaaaaaaaaaaaaaaaaaaaaaaaaaaaaaaaaaaaaaaaaaaaaaaaaaaaaaaa

SEQ ID NO: 3532 - RNA, 1400 nt, synthetic construct
  misc_feature 1..1400: note = mRNA a-1 (hSL-A100) (opt3) from Homo sapiens__NP_000448.3__HNF4A(1-375)(S142A_S143A_S148A_T166A_ S167A_S313A_S378A_T429A_T432A_S436A_K458R)
  source 1..1400: mol_type = other RNA
aggagagtcccgcagtcggcgtccagcggctctgcttgttcgtgtgtgtgtcgttgcaggccttattcaagcttaccatgagactgagcaagaccctcgtggacatggatatggccgactactccgctgcacttgatcccgcctatacaactctggagttcgaaaacgtccaggttttgacgatgggcaatgacacctctccttcagaggggacaaacttaaatgcgccaaacagtctgggagtgagcgctctatgcgccatctgtggtgatagggcaactggcaaacactacggggcctcctcttgcgacggatgtaagggctttttccggcgctcggtacgtaaaaatcatatgtattcatgccgatttagcagacaatgtgtggtcgataaggacaaaaggaaccagtgccggtactgtcgcctcaagaagtgcttcagagctggtatgaaaaaggaagcagtgcagaatgagagggatcggattagtacccgccgagccgcttatgaagactccgccctgccgtctataaacgcgcttctgcaggcagaggttttgagcagacaaatcgccgctcccgtgtccgggattaatggagatatcagggccaaaaagattgcatcaatcgctgacgtctgtgagagtatgaaagaacagctcctggtgctggtagagtgggccaagtacatacctgcgttttgcgaactcccattagatgaccaggttgccctgcttcgggcacacgctggcgagcatttgctgctaggcgccacaaagcgtagcatggtgttcaaagacgtcctcctgcttgggaacgattatatcgtgccccgccactgtcctgagctggctgaaatgtctagagtgtccattaggatcttggacgagctcgtcctgccatttcaggaattacaaattgatgacaatgagtacgcctacctgaaggcaatcatattctttgatcccgacgccaaaggactctcagatcctggtaagattaaacggcttcgagctcaggttcaggtgagcctggaagactatatcaacgatcgccagtacgacagtagaggcaggttcggggagttgctactgctcctgccaacccttcaatctattacttggcagatgatcgagcagatccaatttattaagctgttcggaatggcgaaaatagataatttgctccaggaaatgctgttatgaggactagtccctgttcccagagcccacttttttttctttttttgaaataaaatagcctgtctttcagatctcaaaggctcttttcagagccaccaaaaaaaaaaaaaaaaaaaaaaaaaaaaaaaaaaaaaaaaaaaaaaaaaaaaaaaaaaaaaaaaaaaaaaaaaaaaaaaaaaaaaaaaaaaaaaaaaaaaa

SEQ ID NO: 3533 - RNA, 1400 nt, synthetic construct
  misc_feature 1..1400: note = mRNA a-1 (hSL-A100) (opt3) from Homo sapiens__NP_000448.3__HNF4A(1-375)(S87A_S142A_S143A_S148A_T 166A_S167A_S313A_S378A_T429A_T432A_S436A_K458R)
  source 1..1400: mol_type = other RNA
aggagagtcccgcagtcggcgtccagcggctctgcttgttcgtgtgtgtgtcgttgcaggccttattcaagcttaccatgagactgagcaagaccctcgtggacatggatatggccgactactccgctgcacttgatcccgcctatacaactctggagttcgaaaacgtccaggttttgacgatgggcaatgacacctctccttcagaggggacaaacttaaatgcgccaaacagtctgggagtgagcgctctatgcgccatctgtggtgatagggcaactggcaaacactacggggcctcctcttgcgacggatgtaagggctttttccggcgcgctgtacgtaaaaatcatatgtattcgtgccgattttcaagacaatgtgtggtcgataaggacaaaaggaaccagtgccggtactgtcgcctcaagaagtgcttcagagcaggtatgaaaaaggaagccgtgcagaatgagagggatcggattagcacccgccgagctgcctatgaagacagtgcgctgccgtccataaacgcacttctgcaggccgaggttttgtctagacaaatcgctgcccccgtgagcgggattaatggagatatcagggctaaaaagattgcatccatcgccgacgtctgtgagtcaatgaaagaacagctcctggtgctggtagagtgggcgaagtacatacctgccttttgcgaactcccattagatgaccaggttgcactgcttcgggctcacgccggcgagcatttgctgctaggcgctacaaagcgtagtatggtgttcaaagacgtcctcctgcttgggaacgattatatcgtgccccgccactgtcctgagctggccgaaatgagcagagtgtctattaggatcttggacgagctcgtcctgccatttcaggaattacaaattgatgacaatgagtacgcatacctgaaggccatcatattctttgatcccgacgctaaaggactctccgatcctggtaagattaaacggcttcgagcgcaggttcaggtgtcactggaagactatatcaacgatcgccagtacgacagcagaggcaggttcggggagttgctactgctcctgccaacccttcaaagtattacttggcagatgatcgagcagatccaatttattaagctgttcggaatggcaaaaatagataatttgctccaggaaatgctgttatgaggactagtccctgttcccagagcccacttttttttctttttttgaaataaaatagcctgtctttcagatctcaaaggctcttttcagagccaccaaaaaaaaaaaaaaaaaaaaaaaaaaaaaaaaaaaaaaaaaaaaaaaaaaaaaaaaaaaaaaaaaaaaaaaaaaaaaaaaaaaaaaaaaaaaaaaaaaaaa

SEQ ID NO: 3534 - RNA, 1400 nt, synthetic construct
  misc_feature 1..1400: note = mRNA a-1 (hSL-A100) (opt3) from Homo sapiens__NP_000448.3__HNF4A(1-375)(S87A_K106R_K108R_K126R_K 127R_S142A_S143A_S148A_T166A_S167A_S313A_S378A_T429A_T432A_ S436A_K458R)
  source 1..1400: mol_type = other RNA
aggagagtcccgcagtcggcgtccagcggctctgcttgttcgtgtgtgtgtcgttgcaggccttattcaagcttaccatgagactgagcaagaccctcgtggacatggatatggccgactactccgctgcacttgatcccgcctatacaactctggagttcgaaaacgtccaggttttgacgatgggcaatgacacctctccttcagaggggacaaacttaaatgcgccaaacagtctgggagtgagcgctctatgcgccatctgtggtgatagggcaactggcaaacactacggggcctcctcttgcgacggatgtaagggctttttccggcgcgctgtacgtaaaaatcatatgtattcgtgccgattttcaagacaatgtgtggtcgatagggaccggcgcaaccagtgcagatactgtaggctcaagaaatgcttccgggcaggtatgcgccgagaagccgtgcagaatgagagagataggattagcacccggcgtgctgcctatgaagacagtgcgctgccgtccataaacgcacttctgcaggccgaggttttgtctcgccaaatcgctgcccccgtgagcgggattaatggagatatcagagcaaagaagattgcttccatcgccgacgtctgtgagtcaatgaaagaacagctcctggtgctggtagagtgggcgaagtacatacctgccttttgcgaactcccattagatgaccaggttgcactgcttagggctcacgccggcgagcatttgctgctaggcgctacaaaacggagtatggtgttcaaggacgtcctcctgcttgggaacgattatatcgtgccccgacactgtcctgagctggccgaaatgagccgcgtgtctattagaatcttggacgagctcgtcctgccatttcaggaattacaaattgatgacaatgagtacgcatacctgaaagccatcatattctttgatcccgacgctaagggactctccgatcctggtaagattaaaaggcttcgggcgcaggttcaggtgtcactggaagactatatcaacgatcgccagtacgacagcagaggcaggttcggggagttgctactgctcctgccaacccttcaaagtattacttggcagatgatcgagcagatccaatttattaagctgttcggaatggcaaaaatagataatttgctccaggaaatgctgttatgaggactagtccctgttcccagagcccacttttttttctttttttgaaataaaatagcctgtctttcagatctcaaaggctcttttcagagccaccaaaaaaaaaaaaaaaaaaaaaaaaaaaaaaaaaaaaaaaaaaaaaaaaaaaaaaaaaaaaaaaaaaaaaaaaaaaaaaaaaaaaaaaaaaaaaaaaaaaaa

SEQ ID NO: 3535 - RNA, 1400 nt, synthetic construct
  misc_feature 1..1400: note = mRNA a-1 (hSL-A100) (opt3) from Homo sapiens__NP_000448.3__HNF4A(1-375)(S87A_K106R_K108R_K126R_K 127R)
  source 1..1400: mol_type = other RNA
aggagagtcccgcagtcggcgtccagcggctctgcttgttcgtgtgtgtgtcgttgcaggccttattcaagcttaccatgagactgagcaagaccctcgtggacatggatatggccgactactccgctgcacttgatcccgcctatacaactctggagttcgaaaacgtccaggttttgacgatgggcaatgacacctctccttcagaggggacaaacttaaatgcgccaaacagtctgggagtgagcgctctatgcgccatctgtggtgatagggcaactggcaaacactacggggcctcctcttgcgacggatgtaagggctttttccggcgcgctgtacgtaaaaatcatatgtattcgtgccgattttcaagacaatgtgtggtcgatagggaccggcgcaaccagtgcagatactgtaggctcaagaaatgcttccgggcaggtatgcgccgagaagccgtgcagaatgagagagataggattagcacccggcgtagttcctatgaagactctagcctgccgtccataaacgcccttctgcaggccgaggttttgtcacgccaaatcacaagtcccgtgagcgggattaatggagatatcagagcgaagaagattgcatctatcgccgacgtctgtgagtccatgaaagaacagctcctggtgctggtagagtgggctaagtacatacctgccttttgcgaactcccattagatgaccaggttgcactgcttagggctcacgccggcgagcatttgctgctaggcgcgaccaaacggtcaatggtgttcaaggacgtcctcctgcttgggaacgattatatcgtgccccgacactgtcctgagctggccgaaatgagccgcgtgagtattagaatcttggacgagctcgtcctgccatttcaggaattacaaattgatgacaatgagtacgcatacctgaaagctatcatattctttgatcccgacgccaagggactctctgatcctggtaagattaaaaggcttcggtcccaggttcaggtgagcctggaagactatatcaacgatcgccagtacgactcgagaggcaggttcggggagttgctactgctcctgccaactcttcaatctattacatggcagatgatcgagcagatccaatttattaagctgttcggaatggctaaaatagataatttgctccaggaaatgctgttatgaggactagtccctgttcccagagcccacttttttttctttttttgaaataaaatagcctgtctttcagatctcaaaggctcttttcagagccaccaaaaaaaaaaaaaaaaaaaaaaaaaaaaaaaaaaaaaaaaaaaaaaaaaaaaaaaaaaaaaaaaaaaaaaaaaaaaaaaaaaaaaaaaaaaaaaaaaaaaa

SEQ ID NO: 3536 - RNA, 1400 nt, synthetic construct; identical to SEQ ID NO: 3534
  misc_feature 1..1400: note = mRNA a-1 (hSL-A100) (opt3) from Homo sapiens__NP_000448.3__HNF4A(1-375)(S87A_K106R_K108R_K126R_K 127R_S142A_S143A_S148A_T166A_S167A_S313A_S378A_T429A_T432A_ S436A_K458R_S461A)
  source 1..1400: mol_type = other RNA

SEQ ID NO: 3537 - RNA, 1400 nt, synthetic construct; identical to SEQ ID NO: 3534
  misc_feature 1..1400: note = mRNA a-1 (hSL-A100) (opt3) from Homo sapiens__NP_000448.3__HNF4A(1-375)(S87A_K106R_K108R_K126R_K 127R_S142A_S143A_S148A_T166A_S167A_S313A_S378A_T429A_T432A_ S436A_K458R_S461E)
  source 1..1400: mol_type = other RNA

SEQ ID NO: 3538 - RNA, 1400 nt, synthetic construct
  misc_feature 1..1400: note = mRNA a-1 (hSL-A100) (opt3) from Homo sapiens__NP_000448.3__HNF4A(1-375)(S87A_K106R_K108R_K126R_K 127R_S142A_S143A_S148E_T166A_S167E_S313A_S378E_T429E_T432E_ S436E_K458R_S461E)
  source 1..1400: mol_type = other RNA
aggagagtcccgcagtcggcgtccagcggctctgcttgttcgtgtgtgtgtcgttgcaggccttattcaagcttaccatgagactgagcaagaccctcgtggacatggatatggccgactactccgctgcacttgatcccgcctatacaactctggagttcgaaaacgtccaggttttgacgatgggcaatgacacctctccttcagaggggacaaacttaaatgcgccaaacagtctgggagtgagcgctctatgcgccatctgtggtgatagggcaactggcaaacactacggggcctcctcttgcgacggatgtaagggctttttccggcgcgctgtacgtaaaaatcatatgtattcgtgccgattttcaagacaatgtgtggtcgatagggaccggcgcaaccagtgcagatactgtaggctcaagaaatgcttccgggcaggtatgcgccgagaagccgtgcagaatgagagagataggattagcacccggcgtgctgcctatgaagacagtgagctgccgtccataaacgcgcttctgcaggcagaggttttgtctcgccaaatcgccgaacccgtgagcgggattaatggagatatcagagctaagaagattgcctccatcgcagacgtctgtgagtcaatgaaagaacagctcctggtgctggtagagtgggctaagtacatacctgccttttgcgagctcccattagatgaccaggttgcgctgcttagggcccacgcaggcgaacatttgctgctaggcgctacaaaacggagtatggtgttcaaggacgtcctcctgcttgggaacgattatatcgtgccccgacactgtcctgagctggccgaaatgagccgcgtgtctattagaatcttggacgagctcgtcctgccatttcaggaattacaaattgatgacaatgagtacgcttacctgaaagccatcatattctttgatcccgacgcaaagggactctccgatcctggtaagattaaaaggcttcgggcccaggttcaggtgtcactggaggactatatcaacgatcgccagtacgacagcagaggcaggttcggggaattgctactgctcctgccaacccttcaaagtattacttggcagatgatcgagcagatccaatttattaagctgttcggaatggctaaaatagataatttgctccaggaaatgctgttatgaggactagtccctgttcccagagcccacttttttttctttttttgaaataaaatagcctgtctttcagatctcaaaggctcttttcagagccaccaaaaaaaaaaaaaaaaaaaaaaaaaaaaaaaaaaaaaaaaaaaaaaaaaaaaaaaaaaaaaaaaaaaaaaaaaaaaaaaaaaaaaaaaaaaaaaaaaaaaa

SEQ ID NO: 3539 - RNA, 1400 nt, synthetic construct
  misc_feature 1..1400: note = mRNA a-1 (hSL-A100) (opt3) from Homo sapiens__NP_000448.3__HNF4A(1-375)(S87A_K106R_K108R_K126R_K 127R_S142A_S143A_S148A_T166A_S167A_K179R_K180R_S313A_S378A_ T429A_T432A_S436A_K458R_S461E)
  source 1..1400: mol_type = other RNA
aggagagtcccgcagtcggcgtccagcggctctgcttgttcgtgtgtgtgtcgttgcaggccttattcaagcttaccatgagactgagcaagaccctcgtggacatggatatggccgactactccgctgcacttgatcccgcctatacaactctggagttcgaaaacgtccaggttttgacgatgggcaatgacacctctccttcagaggggacaaacttaaatgcgccaaacagtctgggagtgagcgctctatgcgccatctgtggtgatagggcaactggcaaacactacggggcctcctcttgcgacggatgtaagggctttttccggcgcgctgtacgtaaaaatcatatgtattcgtgccgattttcaagacaatgtgtggtcgatagggaccggcgcaaccagtgcagatactgtaggctcaagaaatgcttccgggcaggtatgcgccgagaagccgtgcagaatgagagagataggattagcacccggcgtgctgcctatgaagacagtgcgctgccgtccataaacgcacttctgcaggccgaggttttgtctcgccaaatcgctgcccccgtgagcgggattaatggagatatcagagcaaggcggattgcttccatcgccgacgtctgtgagtcaatgaaggaacagctcctggtgctggtagagtgggcgaagtacatacctgccttttgcgaactcccattagatgaccaggttgcactgcttcgagctcacgccggcgagcatttgctgctaggcgctacaaaacgcagtatggtgttcaaggacgtcctcctgcttgggaacgattatatcgtgcccagacactgtcctgagctggccgaaatgagcagggtgtctattcggatcttggacgagctcgtcctgccatttcaggaattacaaattgatgacaatgagtacgcatacctgaaagccatcatattctttgatcccgacgctaagggactctccgatcctggtaaaattaagcgccttagagcgcaggttcaggtgtcactggaagactatatcaacgataggcagtacgacagccgtggccggttcggggagttgctactgctcctgccaacccttcaaagtattacttggcagatgatcgagcagatccaatttattaagctgttcggaatggcaaaaatagataatttgctccaggaaatgctgttatgaggactagtccctgttcccagagcccacttttttttctttttttgaaataaaatagcctgtctttcagatctcaaaggctcttttcagagccaccaaaaaaaaaaaaaaaaaaaaaaaaaaaaaaaaaaaaaaaaaaaaaaaaaaaaaaaaaaaaaaaaaaaaaaaaaaaaaaaaaaaaaaaaaaaaaaaaaaaaa

SEQ ID NO: 3540 - RNA, 1400 nt, synthetic construct
  misc_feature 1..1400: note = mRNA a-1 (hSL-A100) (opt3) from Homo sapiens__NP_000448.3__HNF4A(1-375)(S87A_K106R_K108R_K126R_K 127R_S142A_S143A_S148A_T166A_S167A_K300R_K307R_K309R_S313A_ S378A_T429A_T432A_S436A_K458R_S461E)
  source 1..1400: mol_type = other RNA
aggagagtcccgcagtcggcgtccagcggctctgcttgttcgtgtgtgtgtcgttgcaggccttattcaagcttaccatgagactgagcaagaccctcgtggacatggatatggccgactactccgctgcacttgatcccgcctatacaactctggagttcgaaaacgtccaggttttgacgatgggcaatgacacctctccttcagaggggacaaacttaaatgcgccaaacagtctgggagtgagcgctctatgcgccatctgtggtgatagggcaactggcaaacactacggggcctcctcttgcgacggatgtaagggctttttccggcgcgctgtacgtaaaaatcatatgtattcgtgccgattttcaagacaatgtgtggtcgatagggaccggcgcaaccagtgcagatactgtaggctcaagaaatgcttccgggcaggtatgcgccgagaagccgtgcagaatgagagagataggattagcacccggcgtgctgcctatgaagacagtgcgctgccgtccataaacgcacttctgcaggccgaggttttgtctcgccaaatcgctgcccccgtgagcgggattaatggagatatcagagcaaagaagattgcttccatcgccgacgtctgtgagtcaatgaaagaacagctcctggtgctggtagagtgggcgaagtacatacctgccttttgcgaactcccattagatgaccaggttgcactgcttagggctcacgccggcgagcatttgctgctaggcgctacaaaacggagtatggtgttcaaggacgtcctcctgcttgggaacgattatatcgtgccccgacactgtcctgagctggccgaaatgagccgcgtgtctattagaatcttggacgagctcgtcctgccatttcaggaattacaaattgatgacaatgagtacgcatacctgaaagccatcatattctttgatcccgacgctaggggactctccgatcctggtcggattcgcagacttagggcgcaggttcaggtgtcactggaagactatatcaacgatcgtcagtacgacagccggggccgattcggggagttgctactgctcctgccaacccttcaaagtattacttggcagatgatcgagcagatccaatttattaagctgttcggaatggcaaagatagataatttgctccaggaaatgctgttatgaggactagtccctgttcccagagcccacttttttttctttttttgaaataaaatagcctgtctttcagatctcaaaggctcttttcagagccaccaaaaaaaaaaaaaaaaaaaaaaaaaaaaaaaaaaaaaaaaaaaaaaaaaaaaaaaaaaaaaaaaaaaaaaaaaaaaaaaaaaaaaaaaaaaaaaaaaaaaa

SEQ ID NO: 3541 - RNA, 1400 nt, synthetic construct; identical to SEQ ID NO: 3534
  misc_feature 1..1400: note = mRNA a-1 (hSL-A100) (opt3) from Homo sapiens__NP_000448.3__HNF4A(1-375)(S87A_K106R_K108R_K126R_K 127R_S142A_S143A_S148A_T166A_S167A_S313A_S378A_T429A_T432A_ S436A_K447R_K458R_S461E_K470R)
  source 1..1400: mol_type = other RNA

SEQ ID NO: 3542 - RNA, 1400 nt, synthetic construct
  misc_feature 1..1400: note = mRNA a-1 (hSL-A100) (opt3) from Homo sapiens__NP_000448.3__HNF4A(1-375)(S87A_K106R_K108R_K126R_K 127R_S142A_S143A_S148A_T166A_S167A_K179R_K180R_K234R_K300R_ K307R_K309R_S313A_S378A_T429A_T432A_S436A_K447R_K458R_S461E _K470R)
  source 1..1400: mol_type = other RNA
aggagagtcccgcagtcggcgtccagcggctctgcttgttcgtgtgtgtgtcgttgcaggccttattcaagcttaccatgagactgagcaagaccctcgtggacatggatatggccgactactccgctgcacttgatcccgcctatacaactctggagttcgaaaacgtccaggttttgacgatgggcaatgacacctctccttcagaggggacaaacttaaatgcgccaaacagtctgggagtgagcgctctatgcgccatctgtggtgatagggcaactggcaaacactacggggcctcctcttgcgacggatgtaagggctttttccggcgcgctgtacgtaaaaatcatatgtattcgtgccgattttcaagacaatgtgtggtcgatagggaccggcgcaaccagtgcagatactgtaggctcaagaaatgcttccgggcaggtatgcgccgagaagccgtgcagaatgagagagataggattagcacccggcgtgctgcctatgaagacagtgcgctgccgtccataaacgcacttctgcaggccgaggttttgtctcgccaaatcgctgcccccgtgagcgggattaatggagatatcagagcaaggcggattgcttccatcgccgacgtctgtgagtcaatgaaggaacagctcctggtgctggtagagtgggcgaagtacatacctgccttttgcgaactcccattagatgaccaggttgcactgcttcgagctcacgccggcgagcatttgctgctaggcgctacacgcagaagtatggtgttcaaagacgtcctcctgcttgggaacgattatatcgtgcccaggcactgtcctgagctggccgaaatgagccgggtgtctattcgcatcttggacgagctcgtcctgccatttcaggaattacaaattgatgacaatgagtacgcatacctgaaggccatcatattctttgatcccgacgctagaggactctccgatcctggtaggattcgtcggcttcgagcgcaggttcaggtgtcactggaagactatatcaacgatagacagtacgacagcaggggccgcttcggggagttgctactgctcctgccaacccttcaaagtattacttggcagatgatcgagcagatccaatttattaaactgttcggaatggcaaagatagataatttgctccaggaaatgctgttatgaggactagtccctgttcccagagcccacttttttttctttttttgaaataaaatagcctgtctttcagatctcaaaggctcttttcagagccaccaaaaaaaaaaaaaaaaaaaaaaaaaaaaaaaaaaaaaaaaaaaaaaaaaaaaaaaaaaaaaaaaaaaaaaaaaaaaaaaaaaaaaaaaaaaaaaaaaaaaa

SEQ ID NO: 3543 - RNA, 1400 nt, synthetic construct
  misc_feature 1..1400: note = mRNA a-1 (hSL-A100) (opt3) from Homo sapiens__NP_000448.3__HNF4A(1-375)(S87A_S95A_S99A_K106R_K10 8R_K126R_K127R_S142A_S143A_S148A_T166A_S167A_S313A_S378A_T4 29A_T432A_S436A_K458R_S461E)
  source 1..1400: mol_type = other RNA
aggagagtcccgcagtcggcgtccagcggctctgcttgttcgtgtgtgtgtcgttgcaggccttattcaagcttaccatgagactgagcaagaccctcgtggacatggatatggccgactactccgctgcacttgatcccgcctatacaactctggagttcgaaaacgtccaggttttgacgatgggcaatgacacctctccttcagaggggacaaacttaaatgcgccaaacagtctgggagtgagcgctctatgcgccatctgtggtgatagggcaactggcaaacactacggggcctcctcttgcgacggatgtaagggctttttccggcgcgctgtacgtaaaaatcatatgtatgcatgccgatttgccagacaatgtgtggtcgatagggaccggcgcaaccagtgcagatactgtaggctcaagaaatgcttccgggctggtatgcgccgagaagccgtgcagaatgagagagataggatttcgacccggcgtgcggcatatgaagactcagccctgccgagcataaacgcccttctgcaggccgaggttttgagtcgccaaatcgcagctcccgtgtccgggattaatggagatatcagagccaagaagattgcgtctatcgccgacgtctgtgagagcatgaaagaacagctcctggtgctggtagagtgggcaaagtacatacctgctttttgcgaactcccattagatgaccaggttgccctgcttagggctcacgccggcgagcatttgctgctaggcgcaacaaaacggtccatggtgttcaaggacgtcctcctgcttgggaacgattatatcgtgccccgacactgtcctgagctggccgaaatgtcacgcgtgagtattagaatcttggacgagctcgtcctgccatttcaggaattacaaattgatgacaatgagtacgcttacctgaaagcgatcatattctttgatcccgacgcaaagggactcagcgatcctggtaagattaaaaggcttcgggcccaggttcaggtgtctctggaagactatatcaacgatcgccagtacgactccagaggcaggttcggggagttgctactgctcctgccaacccttcaatcaattacttggcagatgatcgagcagatccaatttattaagctgttcggaatggctaaaatagataatttgctccaggaaatgctgttatgaggactagtccctgttcccagagcccacttttttttctttttttgaaataaaatagcctgtctttcagatctcaaaggctcttttcagagccaccaaaaaaaaaaaaaaaaaaaaaaaaaaaaaaaaaaaaaaaaaaaaaaaaaaaaaaaaaaaaaaaaaaaaaaaaaaaaaaaaaaaaaaaaaaaaaaaaaaaaa

SEQ ID NO: 3544 - RNA, 1400 nt, synthetic construct
  misc_feature 1..1400: note = mRNA a-1 (hSL-A100) (opt3) from Homo sapiens__NP_000448.3__HNF4A(1-375)(S87A_K106R_K108R_K126R_K 127R_S138A_T139A_S142A_S143A_S148A_T166A_S167A_S313A_S378A_ T429A_T432A_S436A_K458R_S461E)
  source 1..1400: mol_type = other RNA
aggagagtcccgcagtcggcgtccagcggctctgcttgttcgtgtgtgtgtcgttgcaggccttattcaagcttaccatgagactgagcaagaccctcgtggacatggatatggccgactactccgctgcacttgatcccgcctatacaactctggagttcgaaaacgtccaggttttgacgatgggcaatgacacctctccttcagaggggacaaacttaaatgcgccaaacagtctgggagtgagcgctctatgcgccatctgtggtgatagggcaactggcaaacactacggggcctcctcttgcgacggatgtaagggctttttccggcgcgctgtacgtaaaaatcatatgtattcgtgccgattttcaagacaatgtgtggtcgatagggaccggcgcaaccagtgcagatactgtaggctcaagaaatgcttccgggcaggtatgcgccgagaagccgtgcagaatgagagagataggattgctgcccggcgtgcggcatatgaagacagcgccctgccgagtataaacgcccttctgcaggccgaggttttgtcccgccaaatcgcagctcccgtgtctgggattaatggagatatcagagccaagaagattgcgagcatcgccgacgtctgtgagtccatgaaagaacagctcctggtgctggtagagtgggcaaagtacatacctgctttttgcgaactcccattagatgaccaggttgccctgcttagggctcacgccggcgagcatttgctgctaggcgcaaccaaacggtcaatggtgttcaaggacgtcctcctgcttgggaacgattatatcgtgccccgacactgtcctgagctggccgaaatgagtcgcgtgagcattagaatcttggacgagctcgtcctgccatttcaggaattacaaattgatgacaatgagtacgcttacctgaaagcgatcatattctttgatcccgacgcaaagggactctctgatcctggtaagattaaaaggcttcgggcccaggttcaggtgtccctggaagactatatcaacgatcgccagtacgactcaagaggcaggttcggggagttgctactgctcctgccaacacttcaaagcattacctggcagatgatcgagcagatccaatttattaagctgttcggaatggctaaaatagataatttgctccaggaaatgctgttatgaggactagtccctgttcccagagcccacttttttttctttttttgaaataaaatagcctgtctttcagatctcaaaggctcttttcagagccaccaaaaaaaaaaaaaaaaaaaaaaaaaaaaaaaaaaaaaaaaaaaaaaaaaaaaaaaaaaaaaaaaaaaaaaaaaaaaaaaaaaaaaaaaaaaaaaaaaaaaa

SEQ ID NO: 3545 - RNA, 1400 nt, synthetic construct
  misc_feature 1..1400: note = mRNA a-1 (hSL-A100) (opt3) from Homo sapiens__NP_000448.3__HNF4A(1-375)(S87A_S95A_S99A_K106R_K10 8R_K126R_K127R_S138A_T139A_S142A_S143A_S148A_T166A_S167A_S3 13A_S378A_T429A_T432A_S436A_K458R_S461E)
  source 1..1400: mol_type = other RNA
aggagagtcccgcagtcggcgtccagcggctctgcttgttcgtgtgtgtgtcgttgcaggccttattcaagcttaccatgagactgagcaagaccctcgtggacatggatatggccgactactccgctgcacttgatcccgcctatacaactctggagttcgaaaacgtccaggttttgacgatgggcaatgacacctctccttcagaggggacaaacttaaatgcgccaaacagtctgggagtgagcgctctatgcgccatctgtggtgatagggcaactggcaaacactacggggcctcctcttgcgacggatgtaagggctttttccggcgcgctgtacgtaaaaatcatatgtatgcatgccgatttgccagacaatgtgtggtcgatagggaccggcgcaaccagtgcagatactgtaggctcaagaaatgcttccgggctggtatgcgccgagaagccgtgcagaatgagagagataggattgcggcacggcgtgccgcttatgaagactcggccctgccgtcaataaacgcacttctgcaggctgaggttttgagccgccaaatcgccgcgcccgtgagtgggattaatggagatatcagagccaagaagattgcatccatcgctgacgtctgtgagtctatgaaagaacagctcctggtgctggtagagtgggccaagtacatacctgctttttgcgaactcccattagatgaccaggttgccctgcttagggcacacgccggcgagcatttgctgctaggcgctaccaaacggagcatggtgttcaaggacgtcctcctgcttgggaacgattatatcgtgccccgacactgtcctgagctggcggaaatgtcccgcgtgtcaattagaatcttggacgagctcgtcctgccatttcaggaattacaaattgatgacaatgagtacgcatacctgaaagccatcatattctttgatcccgacgctaagggactcagtgatcctggtaagattaaaaggcttcgggcccaggttcaggtgagcctggaagactatatcaacgatcgccagtacgactctagaggcaggttcggggagttgctactgctcctgccaacacttcaatccattacctggcagatgatcgagcagatccaatttattaagctgttcggaatggcaaaaatagataatttgctccaggaaatgctgttatgaggactagtccctgttcccagagcccacttttttttctttttttgaaataaaatagcctgtctttcagatctcaaaggctcttttcagagccaccaaaaaaaaaaaaaaaaaaaaaaaaaaaaaaaaaaaaaaaaaaaaaaaaaaaaaaaaaaaaaaaaaaaaaaaaaaaaaaaaaaaaaaaaaaaaaaaaaaaaa

SEQ ID NO: 3546 - RNA, 1400 nt, synthetic construct
  misc_feature 1..1400: note = mRNA a-1 (hSL-A100) (opt4) from Homo sapiens__NP_000448.3__HNF4A(1-375)
  source 1..1400: mol_type = other RNA
aggagagtcccgcagtcggcgtccagcggctctgcttgttcgtgtgtgtgtcgttgcaggccttattcaagcttaccatgagactgagcaagaccctggtggacatggacatggccgactacagcgccgccctggaccccgcctacaccaccctggagttcgagaacgtgcaggtgctgaccatgggcaacgacaccagccccagcgagggcaccaacctgaacgcccccaacagcctgggcgtgagcgccctgtgcgccatctgcggcgacagagccaccggcaagcactacggcgccagcagctgcgacggctgcaagggcttcttcagaagaagcgtgagaaagaaccacatgtacagctgcagattcagcagacagtgcgtggtggacaaggacaagagaaaccagtgcagatactgcagactgaagaagtgcttcagagccggcatgaagaaggaggccgtgcagaacgagagagacagaatcagcaccagaagaagcagctacgaggacagcagcctgcccagcatcaacgccctgctgcaggccgaggtgctgagcagacagatcaccagccccgtgagcggcatcaacggcgacatcagagccaagaagatcgccagcatcgccgacgtgtgcgagagcatgaaggagcagctgctggtgctggtggagtgggccaagtacatccccgccttctgcgagctgcccctggacgaccaggtggccctgctgagagcccacgccggcgagcacctgctgctgggcgccaccaagagaagcatggtgttcaaggacgtgctgctgctgggcaacgactacatcgtgcccagacactgccccgagctggccgagatgagcagagtgagcatcagaatcctggacgagctggtgctgcccttccaggagctgcagatcgacgacaacgagtacgcctacctgaaggccatcatcttcttcgaccccgacgccaagggcctgagcgaccccggcaagatcaagagactgagaagccaggtgcaggtgagcctggaggactacatcaacgacagacagtacgacagcagaggcagattcggcgagctgctgctgctgctgcccaccctgcagagcatcacctggcagatgatcgagcagatccagttcatcaagctgttcggcatggccaagatcgacaacctgctgcaggagatgctgctgtgaggactagtccctgttcccagagcccacttttttttctttttttgaaataaaatagcctgtctttcagatctcaaaggctcttttcagagccaccaaaaaaaaaaaaaaaaaaaaaaaaaaaaaaaaaaaaaaaaaaaaaaaaaaaaaaaaaaaaaaaaaaaaaaaaaaaaaaaaaaaaaaaaaaaaaaaaaaaaa

SEQ ID NO: 3547 - RNA, 1400 nt, synthetic construct
  misc_feature 1..1400: note = mRNA a-1 (hSL-A100) (opt4) from Homo sapiens__NP_000448.3__HNF4A(1-375)(S313A)
  source 1..1400: mol_type = other RNA
aggagagtcccgcagtcggcgtccagcggctctgcttgttcgtgtgtgtgtcgttgcaggccttattcaagcttaccatgagactgagcaagaccctggtggacatggacatggccgactacagcgccgccctggaccccgcctacaccaccctggagttcgagaacgtgcaggtgctgaccatgggcaacgacaccagccccagcgagggcaccaacctgaacgcccccaacagcctgggcgtgagcgccctgtgcgccatctgcggcgacagagccaccggcaagcactacggcgccagcagctgcgacggctgcaagggcttcttcagaagaagcgtgagaaagaaccacatgtacagctgcagattcagcagacagtgcgtggtggacaaggacaagagaaaccagtgcagatactgcagactgaagaagtgcttcagagccggcatgaagaaggaggccgtgcagaacgagagagacagaatcagcaccagaagaagcagctacgaggacagcagcctgcccagcatcaacgccctgctgcaggccgaggtgctgagcagacagatcaccagccccgtgagcggcatcaacggcgacatcagagccaagaagatcgccagcatcgccgacgtgtgcgagagcatgaaggagcagctgctggtgctggtggagtgggccaagtacatccccgccttctgcgagctgcccctggacgaccaggtggccctgctgagagcccacgccggcgagcacctgctgctgggcgccaccaagagaagcatggtgttcaaggacgtgctgctgctgggcaacgactacatcgtgcccagacactgccccgagctggccgagatgagcagagtgagcatcagaatcctggacgagctggtgctgcccttccaggagctgcagatcgacgacaacgagtacgcctacctgaaggccatcatcttcttcgaccccgacgccaagggcctgagcgaccccggcaagatcaagagactgagagcccaggtgcaggtgagcctggaggactacatcaacgacagacagtacgacagcagaggcagattcggcgagctgctgctgctgctgcccaccctgcagagcatcacctggcagatgatcgagcagatccagttcatcaagctgttcggcatggccaagatcgacaacctgctgcaggagatgctgctgtgaggactagtccctgttcccagagcccacttttttttctttttttgaaataaaatagcctgtctttcagatctcaaaggctcttttcagagccaccaaaaaaaaaaaaaaaaaaaaaaaaaaaaaaaaaaaaaaaaaaaaaaaaaaaaaaaaaaaaaaaaaaaaaaaaaaaaaaaaaaaaaaaaaaaaaaaaaaaaa

SEQ ID NO: 3548 - RNA, 1400 nt, synthetic construct
  misc_feature 1..1400: note = mRNA a-1 (hSL-A100) (opt4) from Homo sapiens__NP_000448.3__HNF4A(1-375)(S313E)
  source 1..1400: mol_type = other RNA
aggagagtcccgcagtcggcgtccagcggctctgcttgttcgtgtgtgtgtcgttgcaggccttattcaagcttaccatgagactgagcaagaccctggtggacatggacatggccgactacagcgccgccctggaccccgcctacaccaccctggagttcgagaacgtgcaggtgctgaccatgggcaacgacaccagccccagcgagggcaccaacctgaacgcccccaacagcctgggcgtgagcgccctgtgcgccatctgcggcgacagagccaccggcaagcactacggcgccagcagctgcgacggctgcaagggcttcttcagaagaagcgtgagaaagaaccacatgtacagctgcagattcagcagacagtgcgtggtggacaaggacaagagaaaccagtgcagatactgcagactgaagaagtgcttcagagccggcatgaagaaggaggccgtgcagaacgagagagacagaatcagcaccagaagaagcagctacgaggacagcagcctgcccagcatcaacgccctgctgcaggccgaggtgctgagcagacagatcaccagccccgtgagcggcatcaacggcgacatcagagccaagaagatcgccagcatcgccgacgtgtgcgagagcatgaaggagcagctgctggtgctggtggagtgggccaagtacatccccgccttctgcgagctgcccctggacgaccaggtggccctgctgagagcccacgccggcgagcacctgctgctgggcgccaccaagagaagcatggtgttcaaggacgtgctgctgctgggcaacgactacatcgtgcccagacactgccccgagctggccgagatgagcagagtgagcatcagaatcctggacgagctggtgctgcccttccaggagctgcagatcgacgacaacgagtacgcctacctgaaggccatcatcttcttcgaccccgacgccaagggcctgagcgaccccggcaagatcaagagactgagagagcaggtgcaggtgagcctggaggactacatcaacgacagacagtacgacagcagaggcagattcggcgagctgctgctgctgctgcccaccctgcagagcatcacctggcagatgatcgagcagatccagttcatcaagctgttcggcatggccaagatcgacaacctgctgcaggagatgctgctgtgaggactagtccctgttcccagagcccacttttttttctttttttgaaataaaatagcctgtctttcagatctcaaaggctcttttcagagccaccaaaaaaaaaaaaaaaaaaaaaaaaaaaaaaaaaaaaaaaaaaaaaaaaaaaaaaaaaaaaaaaaaaaaaaaaaaaaaaaaaaaaaaaaaaaaaaaaaaaaa

SEQ ID NO: 3549 - RNA, 1400 nt, synthetic construct
  misc_feature 1..1400: note = mRNA a-1 (hSL-A100) (opt4) from Homo sapiens__NP_000448.3__HNF4A(1-375)(S142A_S143A)
  source 1..1400: mol_type = other RNA
aggagagtcccgcagtcggcgtccagcggctctgcttgttcgtgtgtgtgtcgttgcaggccttattcaagcttaccatgagactgagcaagaccctggtggacatggacatggccgactacagcgccgccctggaccccgcctacaccaccctggagttcgagaacgtgcaggtgctgaccatgggcaacgacaccagccccagcgagggcaccaacctgaacgcccccaacagcctgggcgtgagcgccctgtgcgccatctgcggcgacagagccaccggcaagcactacggcgccagcagctgcgacggctgcaagggcttcttcagaagaagcgtgagaaagaaccacatgtacagctgcagattcagcagacagtgcgtggtggacaaggacaagagaaaccagtgcagatactgcagactgaagaagtgcttcagagccggcatgaagaaggaggccgtgcagaacgagagagacagaatcagcaccagaagagccgcctacgaggacagcagcctgcccagcatcaacgccctgctgcaggccgaggtgctgagcagacagatcaccagccccgtgagcggcatcaacggcgacatcagagccaagaagatcgccagcatcgccgacgtgtgcgagagcatgaaggagcagctgctggtgctggtggagtgggccaagtacatccccgccttctgcgagctgcccctggacgaccaggtggccctgctgagagcccacgccggcgagcacctgctgctgggcgccaccaagagaagcatggtgttcaaggacgtgctgctgctgggcaacgactacatcgtgcccagacactgccccgagctggccgagatgagcagagtgagcatcagaatcctggacgagctggtgctgcccttccaggagctgcagatcgacgacaacgagtacgcctacctgaaggccatcatcttcttcgaccccgacgccaagggcctgagcgaccccggcaagatcaagagactgagaagccaggtgcaggtgagcctggaggactacatcaacgacagacagtacgacagcagaggcagattcggcgagctgctgctgctgctgcccaccctgcagagcatcacctggcagatgatcgagcagatccagttcatcaagctgttcggcatggccaagatcgacaacctgctgcaggagatgctgctgtgaggactagtccctgttcccagagcccacttttttttctttttttgaaataaaatagcctgtctttcagatctcaaaggctcttttcagagccaccaaaaaaaaaaaaaaaaaaaaaaaaaaaaaaaaaaaaaaaaaaaaaaaaaaaaaaaaaaaaaaaaaaaaaaaaaaaaaaaaaaaaaaaaaaaaaaaaaaaaa

SEQ ID NO: 3550 - RNA, 1400 nt, synthetic construct
  misc_feature 1..1400: note = mRNA a-1 (hSL-A100) (opt4) from Homo sapiens__NP_000448.3__HNF4A(1-375)(S142E_S143E)
  source 1..1400: mol_type = other RNA
aggagagtcccgcagtcggcgtccagcggctctgcttgttcgtgtgtgtgtcgttgcaggccttattcaagcttaccatgagactgagcaagaccctggtggacatggacatggccgactacagcgccgccctggaccccgcctacaccaccctggagttcgagaacgtgcaggtgctgaccatgggcaacgacaccagccccagcgagggcaccaacctgaacgcccccaacagcctgggcgtgagcgccctgtgcgccatctgcggcgacagagccaccggcaagcactacggcgccagcagctgcgacggctgcaagggcttcttcagaagaagcgtgagaaagaaccacatgtacagctgcagattcagcagacagtgcgtggtggacaaggacaagagaaaccagtgcagatactgcagactgaagaagtgcttcagagccggcatgaagaaggaggccgtgcagaacgagagagacagaatcagcaccagaagagaggagtacgaggacagcagcctgcccagcatcaacgccctgctgcaggccgaggtgctgagcagacagatcaccagccccgtgagcggcatcaacggcgacatcagagccaagaagatcgccagcatcgccgacgtgtgcgagagcatgaaggagcagctgctggtgctggtggagtgggccaagtacatccccgccttctgcgagctgcccctggacgaccaggtggccctgctgagagcccacgccggcgagcacctgctgctgggcgccaccaagagaagcatggtgttcaaggacgtgctgctgctgggcaacgactacatcgtgcccagacactgccccgagctggccgagatgagcagagtgagcatcagaatcctggacgagctggtgctgcccttccaggagctgcagatcgacgacaacgagtacgcctacctgaaggccatcatcttcttcgaccccgacgccaagggcctgagcgaccccggcaagatcaagagactgagaagccaggtgcaggtgagcctggaggactacatcaacgacagacagtacgacagcagaggcagattcggcgagctgctgctgctgctgcccaccctgcagagcatcacctggcagatgatcgagcagatccagttcatcaagctgttcggcatggccaagatcgacaacctgctgcaggagatgctgctgtgaggactagtccctgttcccagagcccacttttttttctttttttgaaataaaatagcctgtctttcagatctcaaaggctcttttcagagccaccaaaaaaaaaaaaaaaaaaaaaaaaaaaaaaaaaaaaaaaaaaaaaaaaaaaaaaaaaaaaaaaaaaaaaaaaaaaaaaaaaaaaaaaaaaaaaaaaaaaaa

SEQ ID NO: 3551 - RNA, 1400 nt, synthetic construct
  misc_feature 1..1400: note = mRNA a-1 (hSL-A100) (opt4) from Homo sapiens__NP_000448.3__HNF4A(1-375)(S143A)
  source 1..1400: mol_type = other RNA
aggagagtcccgcagtcggcgtccagcggctctgcttgttcgtgtgtgtgtcgttgcaggccttattcaagcttaccatgagactgagcaagaccctggtggacatggacatggccgactacagcgccgccctggaccccgcctacaccaccctggagttcgagaacgtgcaggtgctgaccatgggcaacgacaccagccccagcgagggcaccaacctgaacgcccccaacagcctgggcgtgagcgccctgtgcgccatctgcggcgacagagccaccggcaagcactacggcgccagcagctgcgacggctgcaagggcttcttcagaagaagcgtgagaaagaaccacatgtacagctgcagattcagcagacagtgcgtggtggacaaggacaagagaaaccagtgcagatactgcagactgaagaagtgcttcagagccggcatgaagaaggaggccgtgcagaacgagagagacagaatcagcaccagaagaagcgcctacgaggacagcagcctgcccagcatcaacgccctgctgcaggccgaggtgctgagcagacagatcaccagccccgtgagcggcatcaacggcgacatcagagccaagaagatcgccagcatcgccgacgtgtgcgagagcatgaaggagcagctgctggtgctggtggagtgggccaagtacatccccgccttctgcgagctgcccctggacgaccaggtggccctgctgagagcccacgccggcgagcacctgctgctgggcgccaccaagagaagcatggtgttcaaggacgtgctgctgctgggcaacgactacatcgtgcccagacactgccccgagctggccgagatgagcagagtgagcatcagaatcctggacgagctggtgctgcccttccaggagctgcagatcgacgacaacgagtacgcctacctgaaggccatcatcttcttcgaccccgacgccaagggcctgagcgaccccggcaagatcaagagactgagaagccaggtgcaggtgagcctggaggactacatcaacgacagacagtacgacagcagaggcagattcggcgagctgctgctgctgctgcccaccctgcagagcatcacctggcagatgatcgagcagatccagttcatcaagctgttcggcatggccaagatcgacaacctgctgcaggagatgctgctgtgaggactagtccctgttcccagagcccacttttttttctttttttgaaataaaatagcctgtctttcagatctcaaaggctcttttcagagccaccaaaaaaaaaaaaaaaaaaaaaaaaaaaaaaaaaaaaaaaaaaaaaaaaaaaaaaaaaaaaaaaaaaaaaaaaaaaaaaaaaaaaaaaaaaaaaaaaaaaaa

SEQ ID NO: 3552 - RNA, 1400 nt, synthetic construct
  misc_feature 1..1400: note = mRNA a-1 (hSL-A100) (opt4) from Homo sapiens__NP_000448.3__HNF4A(1-375)(T166A)
  source 1..1400: mol_type = other RNA
aggagagtcccgcagtcggcgtccagcggctctgcttgttcgtgtgtgtgtcgttgcaggccttattcaagcttaccatgagactgagcaagaccctggtggacatggacatggccgactacagcgccgccctggaccccgcctacaccaccctggagttcgagaacgtgcaggtgctgaccatgggcaacgacaccagccccagcgagggcaccaacctgaacgcccccaacagcctgggcgtgagcgccctgtgcgccatctgcggcgacagagccaccggcaagcactacggcgccagcagctgcgacggctgcaagggcttcttcagaagaagcgtgagaaagaaccacatgtacagctgcagattcagcagacagtgcgtggtggacaaggacaagagaaaccagtgcagatactgcagactgaagaagtgcttcagagccggcatgaagaaggaggccgtgcagaacgagagagacagaatcagcaccagaagaagcagctacgaggacagcagcctgcccagcatcaacgccctgctgcaggccgaggtgctgagcagacagatcgccagccccgtgagcggcatcaacggcgacatcagagccaagaagatcgccagcatcgccgacgtgtgcgagagcatgaaggagcagctgctggtgctggtggagtgggccaagtacatccccgccttctgcgagctgcccctggacgaccaggtggccctgctgagagcccacgccggcgagcacctgctgctgggcgccaccaagagaagcatggtgttcaaggacgtgctgctgctgggcaacgactacatcgtgcccagacactgccccgagctggccgagatgagcagagtgagcatcagaatcctggacgagctggtgctgcccttccaggagctgcagatcgacgacaacgagtacgcctacctgaaggccatcatcttcttcgaccccgacgccaagggcctgagcgaccccggcaagatcaagagactgagaagccaggtgcaggtgagcctggaggactacatcaacgacagacagtacgacagcagaggcagattcggcgagctgctgctgctgctgcccaccctgcagagcatcacctggcagatgatcgagcagatccagttcatcaagctgttcggcatggccaagatcgacaacctgctgcaggagatgctgctgtgaggactagtccctgttcccagagcccacttttttttctttttttgaaataaaatagcctgtctttcagatctcaaaggctcttttcagagccaccaaaaaaaaaaaaaaaaaaaaaaaaaaaaaaaaaaaaaaaaaaaaaaaaaaaaaaaaaaaaaaaaaaaaaaaaaaaaaaaaaaaaaaaaaaaaaaaaaaaaa

SEQ ID NO: 3553 - RNA, 1400 nt, synthetic construct
  misc_feature 1..1400: note = mRNA a-1 (hSL-A100) (opt4) from Homo sapiens__NP_000448.3__HNF4A(1-375)(S167E)
  source 1..1400: mol_type = other RNA
aggagagtcccgcagtcggcgtccagcggctctgcttgttcgtgtgtgtgtcgttgcaggccttattcaagcttaccatgagactgagcaagaccctggtggacatggacatggccgactacagcgccgccctggaccccgcctacaccaccctggagttcgagaacgtgcaggtgctgaccatgggcaacgacaccagccccagcgagggcaccaacctgaacgcccccaacagcctgggcgtgagcgccctgtgcgccatctgcggcgacagagccaccggcaagcactacggcgccagcagctgcgacggctgcaagggcttcttcagaagaagcgtgagaaagaaccacatgtacagctgcagattcagcagacagtgcgtggtggacaaggacaagagaaaccagtgcagatactgcagactgaagaagtgcttcagagccggcatgaagaaggaggccgtgcagaacgagagagacagaatcagcaccagaagaagcagctacgaggacagcagcctgcccagcatcaacgccctgctgcaggccgaggtgctgagcagacagatcaccgagcccgtgagcggcatcaacggcgacatcagagccaagaagatcgccagcatcgccgacgtgtgcgagagcatgaaggagcagctgctggtgctggtggagtgggccaagtacatccccgccttctgcgagctgcccctggacgaccaggtggccctgctgagagcccacgccggcgagcacctgctgctgggcgccaccaagagaagcatggtgttcaaggacgtgctgctgctgggcaacgactacatcgtgcccagacactgccccgagctggccgagatgagcagagtgagcatcagaatcctggacgagctggtgctgcccttccaggagctgcagatcgacgacaacgagtacgcctacctgaaggccatcatcttcttcgaccccgacgccaagggcctgagcgaccccggcaagatcaagagactgagaagccaggtgcaggtgagcctggaggactacatcaacgacagacagtacgacagcagaggcagattcggcgagctgctgctgctgctgcccaccctgcagagcatcacctggcagatgatcgagcagatccagttcatcaagctgttcggcatggccaagatcgacaacctgctgcaggagatgctgctgtgaggactagtccctgttcccagagcccacttttttttctttttttgaaataaaatagcctgtctttcagatctcaaaggctcttttcagagccaccaaaaaaaaaaaaaaaaaaaaaaaaaaaaaaaaaaaaaaaaaaaaaaaaaaaaaaaaaaaaaaaaaaaaaaaaaaaaaaaaaaaaaaaaaaaaaaaaaaaaa

SEQ ID NO: 3554 - RNA, 1400 nt, synthetic construct
  misc_feature 1..1400: note = mRNA a-1 (hSL-A100) (opt4) from Homo sapiens__NP_000448.3__HNF4A(1-375)(S167A)
  source 1..1400: mol_type = other RNA
aggagagtcccgcagtcggcgtccagcggctctgcttgttcgtgtgtgtgtcgttgcaggccttattcaagcttaccatgagactgagcaagaccctggtggacatggacatggccgactacagcgccgccctggaccccgcctacaccaccctggagttcgagaacgtgcaggtgctgaccatgggcaacgacaccagccccagcgagggcaccaacctgaacgcccccaacagcctgggcgtgagcgccctgtgcgccatctgcggcgacagagccaccggcaagcactacggcgccagcagctgcgacggctgcaagggcttcttcagaagaagcgtgagaaagaaccacatgtacagctgcagattcagcagacagtgcgtggtggacaaggacaagagaaaccagtgcagatactgcagactgaagaagtgcttcagagccggcatgaagaaggaggccgtgcagaacgagagagacagaatcagcaccagaagaagcagctacgaggacagcagcctgcccagcatcaacgccctgctgcaggccgaggtgctgagcagacagatcaccgcccccgtgagcggcatcaacggcgacatcagagccaagaagatcgccagcatcgccgacgtgtgcgagagcatgaaggagcagctgctggtgctggtggagtgggccaagtacatccccgccttctgcgagctgcccctggacgaccaggtggccctgctgagagcccacgccggcgagcacctgctgctgggcgccaccaagagaagcatggtgttcaaggacgtgctgctgctgggcaacgactacatcgtgcccagacactgccccgagctggccgagatgagcagagtgagcatcagaatcctggacgagctggtgctgcccttccaggagctgcagatcgacgacaacgagtacgcctacctgaaggccatcatcttcttcgaccccgacgccaagggcctgagcgaccccggcaagatcaagagactgagaagccaggtgcaggtgagcctggaggactacatcaacgacagacagtacgacagcagaggcagattcggcgagctgctgctgctgctgcccaccctgcagagcatcacctggcagatgatcgagcagatccagttcatcaagctgttcggcatggccaagatcgacaacctgctgcaggagatgctgctgtgaggactagtccctgttcccagagcccacttttttttctttttttgaaataaaatagcctgtctttcagatctcaaaggctcttttcagagccaccaaaaaaaaaaaaaaaaaaaaaaaaaaaaaaaaaaaaaaaaaaaaaaaaaaaaaaaaaaaaaaaaaaaaaaaaaaaaaaaaaaaaaaaaaaaaaaaaaaaaa

SEQ ID NO: 3555 - RNA, 1400 nt, synthetic construct; identical to SEQ ID NO: 3554
  misc_feature 1..1400: note = mRNA a-1 (hSL-A100) (opt4) from Homo sapiens__NP_000448.3__HNF4A(1-375)(S167A_S378A_T429A_T432A_ S436A)
  source 1..1400: mol_type = other RNA

SEQ ID NO: 3556 - RNA, 1400 nt, synthetic construct; identical to SEQ ID NO: 3553
  misc_feature 1..1400: note = mRNA a-1 (hSL-A100) (opt4) from Homo sapiens__NP_000448.3__HNF4A(1-375)(S167E_S378E_T429E_T432E_ S436E)
  source 1..1400: mol_type = other RNA

SEQ ID NO: 3557 - RNA, 1400 nt, synthetic construct
  misc_feature 1..1400: note = mRNA a-1 (hSL-A100) (opt4) from Homo sapiens__NP_000448.3__HNF4A(1-375)(S87A)
  source 1..1400: mol_type = other RNA
aggagagtcccgcagtcggcgtccagcggctctgcttgttcgtgtgtgtgtcgttgcaggccttattcaagcttaccatgagactgagcaagaccctggtggacatggacatggccgactacagcgccgccctggaccccgcctacaccaccctggagttcgagaacgtgcaggtgctgaccatgggcaacgacaccagccccagcgagggcaccaacctgaacgcccccaacagcctgggcgtgagcgccctgtgcgccatctgcggcgacagagccaccggcaagcactacggcgccagcagctgcgacggctgcaagggcttcttcagaagagccgtgagaaagaaccacatgtacagctgcagattcagcagacagtgcgtggtggacaaggacaagagaaaccagtgcagatactgcagactgaagaagtgcttcagagccggcatgaagaaggaggccgtgcagaacgagagagacagaatcagcaccagaagaagcagctacgaggacagcagcctgcccagcatcaacgccctgctgcaggccgaggtgctgagcagacagatcaccagccccgtgagcggcatcaacggcgacatcagagccaagaagatcgccagcatcgccgacgtgtgcgagagcatgaaggagcagctgctggtgctggtggagtgggccaagtacatccccgccttctgcgagctgcccctggacgaccaggtggccctgctgagagcccacgccggcgagcacctgctgctgggcgccaccaagagaagcatggtgttcaaggacgtgctgctgctgggcaacgactacatcgtgcccagacactgccccgagctggccgagatgagcagagtgagcatcagaatcctggacgagctggtgctgcccttccaggagctgcagatcgacgacaacgagtacgcctacctgaaggccatcatcttcttcgaccccgacgccaagggcctgagcgaccccggcaagatcaagagactgagaagccaggtgcaggtgagcctggaggactacatcaacgacagacagtacgacagcagaggcagattcggcgagctgctgctgctgctgcccaccctgcagagcatcacctggcagatgatcgagcagatccagttcatcaagctgttcggcatggccaagatcgacaacctgctgcaggagatgctgctgtgaggactagtccctgttcccagagcccacttttttttctttttttgaaataaaatagcctgtctttcagatctcaaaggctcttttcagagccaccaaaaaaaaaaaaaaaaaaaaaaaaaaaaaaaaaaaaaaaaaaaaaaaaaaaaaaaaaaaaaaaaaaaaaaaaaaaaaaaaaaaaaaaaaaaaaaaaaaaaa

SEQ ID NO: 3558 - RNA, 1400 nt, synthetic construct
  misc_feature 1..1400: note = mRNA a-1 (hSL-A100) (opt4) from Homo sapiens__NP_000448.3__HNF4A(1-375)(S87E)
  source 1..1400: mol_type = other RNA
aggagagtcccgcagtcggcgtccagcggctctgcttgttcgtgtgtgtgtcgttgcaggccttattcaagcttaccatgagactgagcaagaccctggtggacatggacatggccgactacagcgccgccctggaccccgcctacaccaccctggagttcgagaacgtgcaggtgctgaccatgggcaacgacaccagccccagcgagggcaccaacctgaacgcccccaacagcctgggcgtgagcgccctgtgcgccatctgcggcgacagagccaccggcaagcactacggcgccagcagctgcgacggctgcaagggcttcttcagaagagaggtgagaaagaaccacatgtacagctgcagattcagcagacagtgcgtggtggacaaggacaagagaaaccagtgcagatactgcagactgaagaagtgcttcagagccggcatgaagaaggaggccgtgcagaacgagagagacagaatcagcaccagaagaagcagctacgaggacagcagcctgcccagcatcaacgccctgctgcaggccgaggtgctgagcagacagatcaccagccccgtgagcggcatcaacggcgacatcagagccaagaagatcgccagcatcgccgacgtgtgcgagagcatgaaggagcagctgctggtgctggtggagtgggccaagtacatccccgccttctgcgagctgcccctggacgaccaggtggccctgctgagagcccacgccggcgagcacctgctgctgggcgccaccaagagaagcatggtgttcaaggacgtgctgctgctgggcaacgactacatcgtgcccagacactgccccgagctggccgagatgagcagagtgagcatcagaatcctggacgagctggtgctgcccttccaggagctgcagatcgacgacaacgagtacgcctacctgaaggccatcatcttcttcgaccccgacgccaagggcctgagcgaccccggcaagatcaagagactgagaagccaggtgcaggtgagcctggaggactacatcaacgacagacagtacgacagcagaggcagattcggcgagctgctgctgctgctgcccaccctgcagagcatcacctggcagatgatcgagcagatccagttcatcaagctgttcggcatggccaagatcgacaacctgctgcaggagatgctgctgtgaggactagtccctgttcccagagcccacttttttttctttttttgaaataaaatagcctgtctttcagatctcaaaggctcttttcagagccaccaaaaaaaaaaaaaaaaaaaaaaaaaaaaaaaaaaaaaaaaaaaaaaaaaaaaaaaaaaaaaaaaaaaaaaaaaaaaaaaaaaaaaaaaaaaaaaaaaaaaa

SEQ ID NO: 3559 - RNA, 1400 nt, synthetic construct
  misc_feature 1..1400: note = mRNA a-1 (hSL-A100) (opt4) from Homo sapiens__NP_000448.3__HNF4A(1-375)(R2V)
  source 1..1400: mol_type = other RNA
aggagagtcccgcagtcggcgtccagcggctctgcttgttcgtgtgtgtgtcgttgcaggccttattcaagcttaccatggtgctgagcaagaccctggtggacatggacatggccgactacagcgccgccctggaccccgcctacaccaccctggagttcgagaacgtgcaggtgctgaccatgggcaacgacaccagccccagcgagggcaccaacctgaacgcccccaacagcctgggcgtgagcgccctgtgcgccatctgcggcgacagagccaccggcaagcactacggcgccagcagctgcgacggctgcaagggcttcttcagaagaagcgtgagaaagaaccacatgtacagctgcagattcagcagacagtgcgtggtggacaaggacaagagaaaccagtgcagatactgcagactgaagaagtgcttcagagccggcatgaagaaggaggccgtgcagaacgagagagacagaatcagcaccagaagaagcagctacgaggacagcagcctgcccagcatcaacgccctgctgcaggccgaggtgctgagcagacagatcaccagccccgtgagcggcatcaacggcgacatcagagccaagaagatcgccagcatcgccgacgtgtgcgagagcatgaaggagcagctgctggtgctggtggagtgggccaagtacatccccgccttctgcgagctgcccctggacgaccaggtggccctgctgagagcccacgccggcgagcacctgctgctgggcgccaccaagagaagcatggtgttcaaggacgtgctgctgctgggcaacgactacatcgtgcccagacactgccccgagctggccgagatgagcagagtgagcatcagaatcctggacgagctggtgctgcccttccaggagctgcagatcgacgacaacgagtacgcctacctgaaggccatcatcttcttcgaccccgacgccaagggcctgagcgaccccggcaagatcaagagactgagaagccaggtgcaggtgagcctggaggactacatcaacgacagacagtacgacagcagaggcagattcggcgagctgctgctgctgctgcccaccctgcagagcatcacctggcagatgatcgagcagatccagttcatcaagctgttcggcatggccaagatcgacaacctgctgcaggagatgctgctgtgaggactagtccctgttcccagagcccacttttttttctttttttgaaataaaatagcctgtctttcagatctcaaaggctcttttcagagccaccaaaaaaaaaaaaaaaaaaaaaaaaaaaaaaaaaaaaaaaaaaaaaaaaaaaaaaaaaaaaaaaaaaaaaaaaaaaaaaaaaaaaaaaaaaaaaaaaaaaaa

SEQ ID NO: 3560 - RNA, 1400 nt, synthetic construct
  misc_feature 1..1400: note = mRNA a-1 (hSL-A100) (opt4) from Homo sapiens__NP_000448.3__HNF4A(1-375)(R2V_K5V)
  source 1..1400: mol_type = other RNA
aggagagtcccgcagtcggcgtccagcggctctgcttgttcgtgtgtgtgtcgttgcaggccttattcaagcttaccatggtgctgagcgtgaccctggtggacatggacatggccgactacagcgccgccctggaccccgcctacaccaccctggagttcgagaacgtgcaggtgctgaccatgggcaacgacaccagccccagcgagggcaccaacctgaacgcccccaacagcctgggcgtgagcgccctgtgcgccatctgcggcgacagagccaccggcaagcactacggcgccagcagctgcgacggctgcaagggcttcttcagaagaagcgtgagaaagaaccacatgtacagctgcagattcagcagacagtgcgtggtggacaaggacaagagaaaccagtgcagatactgcagactgaagaagtgcttcagagccggcatgaagaaggaggccgtgcagaacgagagagacagaatcagcaccagaagaagcagctacgaggacagcagcctgcccagcatcaacgccctgctgcaggccgaggtgctgagcagacagatcaccagccccgtgagcggcatcaacggcgacatcagagccaagaagatcgccagcatcgccgacgtgtgcgagagcatgaaggagcagctgctggtgctggtggagtgggccaagtacatccccgccttctgcgagctgcccctggacgaccaggtggccctgctgagagcccacgccggcgagcacctgctgctgggcgccaccaagagaagcatggtgttcaaggacgtgctgctgctgggcaacgactacatcgtgcccagacactgccccgagctggccgagatgagcagagtgagcatcagaatcctggacgagctggtgctgcccttccaggagctgcagatcgacgacaacgagtacgcctacctgaaggccatcatcttcttcgaccccgacgccaagggcctgagcgaccccggcaagatcaagagactgagaagccaggtgcaggtgagcctggaggactacatcaacgacagacagtacgacagcagaggcagattcggcgagctgctgctgctgctgcccaccctgcagagcatcacctggcagatgatcgagcagatccagttcatcaagctgttcggcatggccaagatcgacaacctgctgcaggagatgctgctgtgaggactagtccctgttcccagagcccacttttttttctttttttgaaataaaatagcctgtctttcagatctcaaaggctcttttcagagccaccaaaaaaaaaaaaaaaaaaaaaaaaaaaaaaaaaaaaaaaaaaaaaaaaaaaaaaaaaaaaaaaaaaaaaaaaaaaaaaaaaaaaaaaaaaaaaaaaaaaaa

SEQ ID NO: 3561 - RNA, 1400 nt, synthetic construct
  misc_feature 1..1400: note = mRNA a-1 (hSL-A100) (opt4) from Homo sapiens__NP_000448.3__HNF4A(1-375)(K179R_K180R)
  source 1..1400: mol_type = other RNA
aggagagtcccgcagtcggcgtccagcggctctgcttgttcgtgtgtgtgtcgttgcaggccttattcaagcttaccatgagactgagcaagaccctggtggacatggacatggccgactacagcgccgccctggaccccgcctacaccaccctggagttcgagaacgtgcaggtgctgaccatgggcaacgacaccagccccagcgagggcaccaacctgaacgcccccaacagcctgggcgtgagcgccctgtgcgccatctgcggcgacagagccaccggcaagcactacggcgccagcagctgcgacggctgcaagggcttcttcagaagaagcgtgagaaagaaccacatgtacagctgcagattcagcagacagtgcgtggtggacaaggacaagagaaaccagtgcagatactgcagactgaagaagtgcttcagagccggcatgaagaaggaggccgtgcagaacgagagagacagaatcagcaccagaagaagcagctacgaggacagcagcctgcccagcatcaacgccctgctgcaggccgaggtgctgagcagacagatcaccagccccgtgagcggcatcaacggcgacatcagagccagaagaatcgccagcatcgccgacgtgtgcgagagcatgaaggagcagctgctggtgctggtggagtgggccaagtacatccccgccttctgcgagctgcccctggacgaccaggtggccctgctgagagcccacgccggcgagcacctgctgctgggcgccaccaagagaagcatggtgttcaaggacgtgctgctgctgggcaacgactacatcgtgcccagacactgccccgagctggccgagatgagcagagtgagcatcagaatcctggacgagctggtgctgcccttccaggagctgcagatcgacgacaacgagtacgcctacctgaaggccatcatcttcttcgaccccgacgccaagggcctgagcgaccccggcaagatcaagagactgagaagccaggtgcaggtgagcctggaggactacatcaacgacagacagtacgacagcagaggcagattcggcgagctgctgctgctgctgcccaccctgcagagcatcacctggcagatgatcgagcagatccagttcatcaagctgttcggcatggccaagatcgacaacctgctgcaggagatgctgctgtgaggactagtccctgttcccagagcccacttttttttctttttttgaaataaaatagcctgtctttcagatctcaaaggctcttttcagagccaccaaaaaaaaaaaaaaaaaaaaaaaaaaaaaaaaaaaaaaaaaaaaaaaaaaaaaaaaaaaaaaaaaaaaaaaaaaaaaaaaaaaaaaaaaaaaaaaaaaaaa

SEQ ID NO: 3562 - RNA, 1400 nt, synthetic construct
  misc_feature 1..1400: note = mRNA a-1 (hSL-A100) (opt4) from Homo sapiens__NP_000448.3__HNF4A(1-375)(K234R)
  source 1..1400: mol_type = other RNA
aggagagtcccgcagtcggcgtccagcggctctgcttgttcgtgtgtgtgtcgttgcaggccttattcaagcttaccatgagactgagcaagaccctggtggacatggacatggccgactacagcgccgccctggaccccgcctacaccaccctggagttcgagaacgtgcaggtgctgaccatgggcaacgacaccagccccagcgagggcaccaacctgaacgcccccaacagcctgggcgtgagcgccctgtgcgccatctgcggcgacagagccaccggcaagcactacggcgccagcagctgcgacggctgcaagggcttcttcagaagaagcgtgagaaagaaccacatgtacagctgcagattcagcagacagtgcgtggtggacaaggacaagagaaaccagtgcagatactgcagactgaagaagtgcttcagagccggcatgaagaaggaggccgtgcagaacgagagagacagaatcagcaccagaagaagcagctacgaggacagcagcctgcccagcatcaacgccctgctgcaggccgaggtgctgagcagacagatcaccagccccgtgagcggcatcaacggcgacatcagagccaagaagatcgccagcatcgccgacgtgtgcgagagcatgaaggagcagctgctggtgctggtggagtgggccaagtacatccccgccttctgcgagctgcccctggacgaccaggtggccctgctgagagcccacgccggcgagcacctgctgctgggcgccaccagaagaagcatggtgttcaaggacgtgctgctgctgggcaacgactacatcgtgcccagacactgccccgagctggccgagatgagcagagtgagcatcagaatcctggacgagctggtgctgcccttccaggagctgcagatcgacgacaacgagtacgcctacctgaaggccatcatcttcttcgaccccgacgccaagggcctgagcgaccccggcaagatcaagagactgagaagccaggtgcaggtgagcctggaggactacatcaacgacagacagtacgacagcagaggcagattcggcgagctgctgctgctgctgcccaccctgcagagcatcacctggcagatgatcgagcagatccagttcatcaagctgttcggcatggccaagatcgacaacctgctgcaggagatgctgctgtgaggactagtccctgttcccagagcccacttttttttctttttttgaaataaaatagcctgtctttcagatctcaaaggctcttttcagagccaccaaaaaaaaaaaaaaaaaaaaaaaaaaaaaaaaaaaaaaaaaaaaaaaaaaaaaaaaaaaaaaaaaaaaaaaaaaaaaaaaaaaaaaaaaaaaaaaaaaaaa

SEQ ID NO: 3563 - RNA, 1400 nt, synthetic construct
  misc_feature 1..1400: note = mRNA a-1 (hSL-A100) (opt4) from Homo sapiens__NP_000448.3__HNF4A(1-375)(K300R)
  source 1..1400: mol_type = other RNA
aggagagtcccgcagtcggcgtccagcggctctgcttgttcgtgtgtgtgtcgttgcaggccttattcaagcttaccatgagactgagcaagaccctggtggacatggacatggccgactacagcgccgccctggaccccgcctacaccaccctggagttcgagaacgtgcaggtgctgaccatgggcaacgacaccagccccagcgagggcaccaacctgaacgcccccaacagcctgggcgtgagcgccctgtgcgccatctgcggcgacagagccaccggcaagcactacggcgccagcagctgcgacggctgcaagggcttcttcagaagaagcgtgagaaagaaccacatgtacagctgcagattcagcagacagtgcgtggtggacaaggacaagagaaaccagtgcagatactgcagactgaagaagtgcttcagagccggcatgaagaaggaggccgtgcagaacgagagagacagaatcagcaccagaagaagcagctacgaggacagcagcctgcccagcatcaacgccctgctgcaggccgaggtgctgagcagacagatcaccagccccgtgagcggcatcaacggcgacatcagagccaagaagatcgccagcatcgccgacgtgtgcgagagcatgaaggagcagctgctggtgctggtggagtgggccaagtacatccccgccttctgcgagctgcccctggacgaccaggtggccctgctgagagcccacgccggcgagcacctgctgctgggcgccaccaagagaagcatggtgttcaaggacgtgctgctgctgggcaacgactacatcgtgcccagacactgccccgagctggccgagatgagcagagtgagcatcagaatcctggacgagctggtgctgcccttccaggagctgcagatcgacgacaacgagtacgcctacctgaaggccatcatcttcttcgaccccgacgccagaggcctgagcgaccccggcaagatcaagagactgagaagccaggtgcaggtgagcctggaggactacatcaacgacagacagtacgacagcagaggcagattcggcgagctgctgctgctgctgcccaccctgcagagcatcacctggcagatgatcgagcagatccagttcatcaagctgttcggcatggccaagatcgacaacctgctgcaggagatgctgctgtgaggactagtccctgttcccagagcccacttttttttctttttttgaaataaaatagcctgtctttcagatctcaaaggctcttttcagagccaccaaaaaaaaaaaaaaaaaaaaaaaaaaaaaaaaaaaaaaaaaaaaaaaaaaaaaaaaaaaaaaaaaaaaaaaaaaaaaaaaaaaaaaaaaaaaaaaaaaaaa

SEQ ID NO: 3564 - RNA, 1400 nt, synthetic construct
  misc_feature 1..1400: note = mRNA a-1 (hSL-A100) (opt4) from Homo sapiens__NP_000448.3__HNF4A(1-375)(K300R_K307R_K309R)
  source 1..1400: mol_type = other RNA
aggagagtcccgcagtcggcgtccagcggctctgcttgttcgtgtgtgtgtcgttgcaggccttattcaagcttaccatgagactgagcaagaccctggtggacatggacatggccgactacagcgccgccctggaccccgcctacaccaccctggagttcgagaacgtgcaggtgctgaccatgggcaacgacaccagccccagcgagggcaccaacctgaacgcccccaacagcctgggcgtgagcgccctgtgcgccatctgcggcgacagagccaccggcaagcactacggcgccagcagctgcgacggctgcaagggcttcttcagaagaagcgtgagaaagaaccacatgtacagctgcagattcagcagacagtgcgtggtggacaaggacaagagaaaccagtgcagatactgcagactgaagaagtgcttcagagccggcatgaagaaggaggccgtgcagaacgagagagacagaatcagcaccagaagaagcagctacgaggacagcagcctgcccagcatcaacgccctgctgcaggccgaggtgctgagcagacagatcaccagccccgtgagcggcatcaacggcgacatcagagccaagaagatcgccagcatcgccgacgtgtgcgagagcatgaaggagcagctgctggtgctggtggagtgggccaagtacatccccgccttctgcgagctgcccctggacgaccaggtggccctgctgagagcccacgccggcgagcacctgctgctgggcgccaccaagagaagcatggtgttcaaggacgtgctgctgctgggcaacgactacatcgtgcccagacactgccccgagctggccgagatgagcagagtgagcatcagaatcctggacgagctggtgctgcccttccaggagctgcagatcgacgacaacgagtacgcctacctgaaggccatcatcttcttcgaccccgacgccagaggcctgagcgaccccggcagaatcagaagactgagaagccaggtgcaggtgagcctggaggactacatcaacgacagacagtacgacagcagaggcagattcggcgagctgctgctgctgctgcccaccctgcagagcatcacctggcagatgatcgagcagatccagttcatcaagctgttcggcatggccaagatcgacaacctgctgcaggagatgctgctgtgaggactagtccctgttcccagagcccacttttttttctttttttgaaataaaatagcctgtctttcagatctcaaaggctcttttcagagccaccaaaaaaaaaaaaaaaaaaaaaaaaaaaaaaaaaaaaaaaaaaaaaaaaaaaaaaaaaaaaaaaaaaaaaaaaaaaaaaaaaaaaaaaaaaaaaaaaaaaaa

SEQ ID NO: 3565 - RNA, 1400 nt, synthetic construct; identical to SEQ ID NO: 3546
  misc_feature 1..1400: note = mRNA a-1 (hSL-A100) (opt4) from Homo sapiens__NP_000448.3__HNF4A(1-375)(K447R_K470R)
  source 1..1400: mol_type = other RNA

SEQ ID NO: 3566 - RNA, 1400 nt, synthetic construct; identical to SEQ ID NO: 3546
  misc_feature 1..1400: note = mRNA a-1 (hSL-A100) (opt4) from Homo sapiens__NP_000448.3__HNF4A(1-375)(K458R)
  source 1..1400: mol_type = other RNA

SEQ ID NO: 3567 - RNA, 1400 nt, synthetic construct
  misc_feature 1..1400: note = mRNA a-1 (hSL-A100) (opt4) from Homo sapiens__NP_000448.3__HNF4A(1-375)(K106R_K108R_K126R_K127R)
  source 1..1400: mol_type = other RNA
aggagagtcccgcagtcggcgtccagcggctctgcttgttcgtgtgtgtgtcgttgcaggccttattcaagcttaccatgagactgagcaagaccctggtggacatggacatggccgactacagcgccgccctggaccccgcctacaccaccctggagttcgagaacgtgcaggtgctgaccatgggcaacgacaccagccccagcgagggcaccaacctgaacgcccccaacagcctgggcgtgagcgccctgtgcgccatctgcggcgacagagccaccggcaagcactacggcgccagcagctgcgacggctgcaagggcttcttcagaagaagcgtgagaaagaaccacatgtacagctgcagattcagcagacagtgcgtggtggacagagacagaagaaaccagtgcagatactgcagactgaagaagtgcttcagagccggcatgagaagagaggccgtgcagaacgagagagacagaatcagcaccagaagaagcagctacgaggacagcagcctgcccagcatcaacgccctgctgcaggccgaggtgctgagcagacagatcaccagccccgtgagcggcatcaacggcgacatcagagccaagaagatcgccagcatcgccgacgtgtgcgagagcatgaaggagcagctgctggtgctggtggagtgggccaagtacatccccgccttctgcgagctgcccctggacgaccaggtggccctgctgagagcccacgccggcgagcacctgctgctgggcgccaccaagagaagcatggtgttcaaggacgtgctgctgctgggcaacgactacatcgtgcccagacactgccccgagctggccgagatgagcagagtgagcatcagaatcctggacgagctggtgctgcccttccaggagctgcagatcgacgacaacgagtacgcctacctgaaggccatcatcttcttcgaccccgacgccaagggcctgagcgaccccggcaagatcaagagactgagaagccaggtgcaggtgagcctggaggactacatcaacgacagacagtacgacagcagaggcagattcggcgagctgctgctgctgctgcccaccctgcagagcatcacctggcagatgatcgagcagatccagttcatcaagctgttcggcatggccaagatcgacaacctgctgcaggagatgctgctgtgaggactagtccctgttcccagagcccacttttttttctttttttgaaataaaatagcctgtctttcagatctcaaaggctcttttcagagccaccaaaaaaaaaaaaaaaaaaaaaaaaaaaaaaaaaaaaaaaaaaaaaaaaaaaaaaaaaaaaaaaaaaaaaaaaaaaaaaaaaaaaaaaaaaaaaaaaaaaaa

SEQ ID NO: 3568 - RNA, 1400 nt, synthetic construct
  misc_feature 1..1400: note = mRNA a-1 (hSL-A100) (opt4) from Homo sapiens__NP_000448.3__HNF4A(1-375)(E285Q)
  source 1..1400: mol_type = other RNA
aggagagtcccgcagtcggcgtccagcggctctgcttgttcgtgtgtgtgtcgttgcaggccttattcaagcttaccatgagactgagcaagaccctggtggacatggacatggccgactacagcgccgccctggaccccgcctacaccaccctggagttcgagaacgtgcaggtgctgaccatgggcaacgacaccagccccagcgagggcaccaacctgaacgcccccaacagcctgggcgtgagcgccctgtgcgccatctgcggcgacagagccaccggcaagcactacggcgccagcagctgcgacggctgcaagggcttcttcagaagaagcgtgagaaagaaccacatgtacagctgcagattcagcagacagtgcgtggtggacaaggacaagagaaaccagtgcagatactgcagactgaagaagtgcttcagagccggcatgaagaaggaggccgtgcagaacgagagagacagaatcagcaccagaagaagcagctacgaggacagcagcctgcccagcatcaacgccctgctgcaggccgaggtgctgagcagacagatcaccagccccgtgagcggcatcaacggcgacatcagagccaagaagatcgccagcatcgccgacgtgtgcgagagcatgaaggagcagctgctggtgctggtggagtgggccaagtacatccccgccttctgcgagctgcccctggacgaccaggtggccctgctgagagcccacgccggcgagcacctgctgctgggcgccaccaagagaagcatggtgttcaaggacgtgctgctgctgggcaacgactacatcgtgcccagacactgccccgagctggccgagatgagcagagtgagcatcagaatcctggacgagctggtgctgcccttccaggagctgcagatcgacgacaaccagtacgcctacctgaaggccatcatcttcttcgaccccgacgccaagggcctgagcgaccccggcaagatcaagagactgagaagccaggtgcaggtgagcctggaggactacatcaacgacagacagtacgacagcagaggcagattcggcgagctgctgctgctgctgcccaccctgcagagcatcacctggcagatgatcgagcagatccagttcatcaagctgttcggcatggccaagatcgacaacctgctgcaggagatgctgctgtgaggactagtccctgttcccagagcccacttttttttctttttttgaaataaaatagcctgtctttcagatctcaaaggctcttttcagagccaccaaaaaaaaaaaaaaaaaaaaaaaaaaaaaaaaaaaaaaaaaaaaaaaaaaaaaaaaaaaaaaaaaaaaaaaaaaaaaaaaaaaaaaaaaaaaaaaaaaaaa

SEQ ID NO: 3569 - RNA, 1400 nt, synthetic construct
  misc_feature 1..1400: note = mRNA a-1 (hSL-A100) (opt4) from Homo sapiens__NP_000448.3__HNF4A(1-375)(T166E)
  source 1..1400: mol_type = other RNA
aggagagtcccgcagtcggcgtccagcggctctgcttgttcgtgtgtgtgtcgttgcaggccttattcaagcttaccatgagactgagcaagaccctggtggacatggacatggccgactacagcgccgccctggaccccgcctacaccaccctggagttcgagaacgtgcaggtgctgaccatgggcaacgacaccagccccagcgagggcaccaacctgaacgcccccaacagcctgggcgtgagcgccctgtgcgccatctgcggcgacagagccaccggcaagcactacggcgccagcagctgcgacggctgcaagggcttcttcagaagaagcgtgagaaagaaccacatgtacagctgcagattcagcagacagtgcgtggtggacaaggacaagagaaaccagtgcagatactgcagactgaagaagtgcttcagagccggcatgaagaaggaggccgtgcagaacgagagagacagaatcagcaccagaagaagcagctacgaggacagcagcctgcccagcatcaacgccctgctgcaggccgaggtgctgagcagacagatcgagagccccgtgagcggcatcaacggcgacatcagagccaagaagatcgccagcatcgccgacgtgtgcgagagcatgaaggagcagctgctggtgctggtggagtgggccaagtacatccccgccttctgcgagctgcccctggacgaccaggtggccctgctgagagcccacgccggcgagcacctgctgctgggcgccaccaagagaagcatggtgttcaaggacgtgctgctgctgggcaacgactacatcgtgcccagacactgccccgagctggccgagatgagcagagtgagcatcagaatcctggacgagctggtgctgcccttccaggagctgcagatcgacgacaacgagtacgcctacctgaaggccatcatcttcttcgaccccgacgccaagggcctgagcgaccccggcaagatcaagagactgagaagccaggtgcaggtgagcctggaggactacatcaacgacagacagtacgacagcagaggcagattcggcgagctgctgctgctgctgcccaccctgcagagcatcacctggcagatgatcgagcagatccagttcatcaagctgttcggcatggccaagatcgacaacctgctgcaggagatgctgctgtgaggactagtccctgttcccagagcccacttttttttctttttttgaaataaaatagcctgtctttcagatctcaaaggctcttttcagagccaccaaaaaaaaaaaaaaaaaaaaaaaaaaaaaaaaaaaaaaaaaaaaaaaaaaaaaaaaaaaaaaaaaaaaaaaaaaaaaaaaaaaaaaaaaaaaaaaaaaaaa

SEQ ID NO: 3570 - RNA, 1400 nt, synthetic construct
  misc_feature 1..1400: note = mRNA a-1 (hSL-A100) (opt4) from Homo sapiens__NP_000448.3__HNF4A(1-375)(S148A)
  source 1..1400: mol_type = other RNA
aggagagtcccgcagtcggcgtccagcggctctgcttgttcgtgtgtgtgtcgttgcaggccttattcaagcttaccatgagactgagcaagaccctggtggacatggacatggccgactacagcgccgccctggaccccgcctacaccaccctggagttcgagaacgtgcaggtgctgaccatgggcaacgacaccagccccagcgagggcaccaacctgaacgcccccaacagcctgggcgtgagcgccctgtgcgccatctgcggcgacagagccaccggcaagcactacggcgccagcagctgcgacggctgcaagggcttcttcagaagaagcgtgagaaagaaccacatgtacagctgcagattcagcagacagtgcgtggtggacaaggacaagagaaaccagtgcagatactgcagactgaagaagtgcttcagagccggcatgaagaaggaggccgtgcagaacgagagagacagaatcagcaccagaagaagcagctacgaggacagcgccctgcccagcatcaacgccctgctgcaggccgaggtgctgagcagacagatcaccagccccgtgagcggcatcaacggcgacatcagagccaagaagatcgccagcatcgccgacgtgtgcgagagcatgaaggagcagctgctggtgctggtggagtgggccaagtacatccccgccttctgcgagctgcccctggacgaccaggtggccctgctgagagcccacgccggcgagcacctgctgctgggcgccaccaagagaagcatggtgttcaaggacgtgctgctgctgggcaacgactacatcgtgcccagacactgccccgagctggccgagatgagcagagtgagcatcagaatcctggacgagctggtgctgcccttccaggagctgcagatcgacgacaacgagtacgcctacctgaaggccatcatcttcttcgaccccgacgccaagggcctgagcgaccccggcaagatcaagagactgagaagccaggtgcaggtgagcctggaggactacatcaacgacagacagtacgacagcagaggcagattcggcgagctgctgctgctgctgcccaccctgcagagcatcacctggcagatgatcgagcagatccagttcatcaagctgttcggcatggccaagatcgacaacctgctgcaggagatgctgctgtgaggactagtccctgttcccagagcccacttttttttctttttttgaaataaaatagcctgtctttcagatctcaaaggctcttttcagagccaccaaaaaaaaaaaaaaaaaaaaaaaaaaaaaaaaaaaaaaaaaaaaaaaaaaaaaaaaaaaaaaaaaaaaaaaaaaaaaaaaaaaaaaaaaaaaaaaaaaaaa

SEQ ID NO: 3571 - RNA, 1400 nt, synthetic construct
  misc_feature 1..1400: note = mRNA a-1 (hSL-A100) (opt4) from Homo sapiens__NP_000448.3__HNF4A(1-375)(S148E)
  source 1..1400: mol_type = other RNA
aggagagtcccgcagtcggcgtccagcggctctgcttgttcgtgtgtgtgtcgttgcaggccttattcaagcttaccatgagactgagcaagaccctggtggacatggacatggccgactacagcgccgccctggaccccgcctacaccaccctggagttcgagaacgtgcaggtgctgaccatgggcaacgacaccagccccagcgagggcaccaacctgaacgcccccaacagcctgggcgtgagcgccctgtgcgccatctgcggcgacagagccaccggcaagcactacggcgccagcagctgcgacggctgcaagggcttcttcagaagaagcgtgagaaagaaccacatgtacagctgcagattcagcagacagtgcgtggtggacaaggacaagagaaaccagtgcagatactgcagactgaagaagtgcttcagagccggcatgaagaaggaggccgtgcagaacgagagagacagaatcagcaccagaagaagcagctacgaggacagcgagctgcccagcatcaacgccctgctgcaggccgaggtgctgagcagacagatcaccagccccgtgagcggcatcaacggcgacatcagagccaagaagatcgccagcatcgccgacgtgtgcgagagcatgaaggagcagctgctggtgctggtggagtgggccaagtacatccccgccttctgcgagctgcccctggacgaccaggtggccctgctgagagcccacgccggcgagcacctgctgctgggcgccaccaagagaagcatggtgttcaaggacgtgctgctgctgggcaacgactacatcgtgcccagacactgccccgagctggccgagatgagcagagtgagcatcagaatcctggacgagctggtgctgcccttccaggagctgcagatcgacgacaacgagtacgcctacctgaaggccatcatcttcttcgaccccgacgccaagggcctgagcgaccccggcaagatcaagagactgagaagccaggtgcaggtgagcctggaggactacatcaacgacagacagtacgacagcagaggcagattcggcgagctgctgctgctgctgcccaccctgcagagcatcacctggcagatgatcgagcagatccagttcatcaagctgttcggcatggccaagatcgacaacctgctgcaggagatgctgctgtgaggactagtccctgttcccagagcccacttttttttctttttttgaaataaaatagcctgtctttcagatctcaaaggctcttttcagagccaccaaaaaaaaaaaaaaaaaaaaaaaaaaaaaaaaaaaaaaaaaaaaaaaaaaaaaaaaaaaaaaaaaaaaaaaaaaaaaaaaaaaaaaaaaaaaaaaaaaaaa

SEQ ID NO: 3572 - RNA, 1400 nt, synthetic construct
  misc_feature 1..1400: note = mRNA a-1 (hSL-A100) (opt4) from Homo sapiens__NP_000448.3__HNF4A(1-375)(S183A)
  source 1..1400: mol_type = other RNA
aggagagtcccgcagtcggcgtccagcggctctgcttgttcgtgtgtgtgtcgttgcaggccttattcaagcttaccatgagactgagcaagaccctggtggacatggacatggccgactacagcgccgccctggaccccgcctacaccaccctggagttcgagaacgtgcaggtgctgaccatgggcaacgacaccagccccagcgagggcaccaacctgaacgcccccaacagcctgggcgtgagcgccctgtgcgccatctgcggcgacagagccaccggcaagcactacggcgccagcagctgcgacggctgcaagggcttcttcagaagaagcgtgagaaagaaccacatgtacagctgcagattcagcagacagtgcgtggtggacaaggacaagagaaaccagtgcagatactgcagactgaagaagtgcttcagagccggcatgaagaaggaggccgtgcagaacgagagagacagaatcagcaccagaagaagcagctacgaggacagcagcctgcccagcatcaacgccctgctgcaggccgaggtgctgagcagacagatcaccagccccgtgagcggcatcaacggcgacatcagagccaagaagatcgccgccatcgccgacgtgtgcgagagcatgaaggagcagctgctggtgctggtggagtgggccaagtacatccccgccttctgcgagctgcccctggacgaccaggtggccctgctgagagcccacgccggcgagcacctgctgctgggcgccaccaagagaagcatggtgttcaaggacgtgctgctgctgggcaacgactacatcgtgcccagacactgccccgagctggccgagatgagcagagtgagcatcagaatcctggacgagctggtgctgcccttccaggagctgcagatcgacgacaacgagtacgcctacctgaaggccatcatcttcttcgaccccgacgccaagggcctgagcgaccccggcaagatcaagagactgagaagccaggtgcaggtgagcctggaggactacatcaacgacagacagtacgacagcagaggcagattcggcgagctgctgctgctgctgcccaccctgcagagcatcacctggcagatgatcgagcagatccagttcatcaagctgttcggcatggccaagatcgacaacctgctgcaggagatgctgctgtgaggactagtccctgttcccagagcccacttttttttctttttttgaaataaaatagcctgtctttcagatctcaaaggctcttttcagagccaccaaaaaaaaaaaaaaaaaaaaaaaaaaaaaaaaaaaaaaaaaaaaaaaaaaaaaaaaaaaaaaaaaaaaaaaaaaaaaaaaaaaaaaaaaaaaaaaaaaaaa

SEQ ID NO: 3573 - RNA, 1400 nt, synthetic construct
  misc_feature 1..1400: note = mRNA a-1 (hSL-A100) (opt4) from Homo sapiens__NP_000448.3__HNF4A(1-375)(S183E)
  source 1..1400: mol_type = other RNA
aggagagtcccgcagtcggcgtccagcggctctgcttgttcgtgtgtgtgtcgttgcaggccttattcaagcttaccatgagactgagcaagaccctggtggacatggacatggccgactacagcgccgccctggaccccgcctacaccaccctggagttcgagaacgtgcaggtgctgaccatgggcaacgacaccagccccagcgagggcaccaacctgaacgcccccaacagcctgggcgtgagcgccctgtgcgccatctgcggcgacagagccaccggcaagcactacggcgccagcagctgcgacggctgcaagggcttcttcagaagaagcgtgagaaagaaccacatgtacagctgcagattcagcagacagtgcgtggtggacaaggacaagagaaaccagtgcagatactgcagactgaagaagtgcttcagagccggcatgaagaaggaggccgtgcagaacgagagagacagaatcagcaccagaagaagcagctacgaggacagcagcctgcccagcatcaacgccctgctgcaggccgaggtgctgagcagacagatcaccagccccgtgagcggcatcaacggcgacatcagagccaagaagatcgccgagatcgccgacgtgtgcgagagcatgaaggagcagctgctggtgctggtggagtgggccaagtacatccccgccttctgcgagctgcccctggacgaccaggtggccctgctgagagcccacgccggcgagcacctgctgctgggcgccaccaagagaagcatggtgttcaaggacgtgctgctgctgggcaacgactacatcgtgcccagacactgccccgagctggccgagatgagcagagtgagcatcagaatcctggacgagctggtgctgcccttccaggagctgcagatcgacgacaacgagtacgcctacctgaaggccatcatcttcttcgaccccgacgccaagggcctgagcgaccccggcaagatcaagagactgagaagccaggtgcaggtgagcctggaggactacatcaacgacagacagtacgacagcagaggcagattcggcgagctgctgctgctgctgcccaccctgcagagcatcacctggcagatgatcgagcagatccagttcatcaagctgttcggcatggccaagatcgacaacctgctgcaggagatgctgctgtgaggactagtccctgttcccagagcccacttttttttctttttttgaaataaaatagcctgtctttcagatctcaaaggctcttttcagagccaccaaaaaaaaaaaaaaaaaaaaaaaaaaaaaaaaaaaaaaaaaaaaaaaaaaaaaaaaaaaaaaaaaaaaaaaaaaaaaaaaaaaaaaaaaaaaaaaaaaaaa

SEQ ID NO: 3574 - RNA, 1400 nt, synthetic construct; identical to SEQ ID NO: 3546
  misc_feature 1..1400: note = mRNA a-1 (hSL-A100) (opt4) from Homo sapiens__NP_000448.3__HNF4A(1-375)(S461A)
  source 1..1400: mol_type = other RNA

SEQ ID NO: 3575 - RNA, 1400 nt, synthetic construct; identical to SEQ ID NO: 3546
  misc_feature 1..1400: note = mRNA a-1 (hSL-A100) (opt4) from Homo sapiens__NP_000448.3__HNF4A(1-375)(S461E)
  source 1..1400: mol_type = other RNA

SEQ ID NO: 3576 - RNA, 1400 nt, synthetic construct
  misc_feature 1..1400: note = mRNA a-1 (hSL-A100) (opt4) from Homo sapiens__NP_000448.3__HNF4A(1-375)(S142A_S143A_S313A)
  source 1..1400: mol_type = other RNA
aggagagtcccgcagtcggcgtccagcggctctgcttgttcgtgtgtgtgtcgttgcaggccttattcaagcttaccatgagactgagcaagaccctggtggacatggacatggccgactacagcgccgccctggaccccgcctacaccaccctggagttcgagaacgtgcaggtgctgaccatgggcaacgacaccagccccagcgagggcaccaacctgaacgcccccaacagcctgggcgtgagcgccctgtgcgccatctgcggcgacagagccaccggcaagcactacggcgccagcagctgcgacggctgcaagggcttcttcagaagaagcgtgagaaagaaccacatgtacagctgcagattcagcagacagtgcgtggtggacaaggacaagagaaaccagtgcagatactgcagactgaagaagtgcttcagagccggcatgaagaaggaggccgtgcagaacgagagagacagaatcagcaccagaagagccgcctacgaggacagcagcctgcccagcatcaacgccctgctgcaggccgaggtgctgagcagacagatcaccagccccgtgagcggcatcaacggcgacatcagagccaagaagatcgccagcatcgccgacgtgtgcgagagcatgaaggagcagctgctggtgctggtggagtgggccaagtacatccccgccttctgcgagctgcccctggacgaccaggtggccctgctgagagcccacgccggcgagcacctgctgctgggcgccaccaagagaagcatggtgttcaaggacgtgctgctgctgggcaacgactacatcgtgcccagacactgccccgagctggccgagatgagcagagtgagcatcagaatcctggacgagctggtgctgcccttccaggagctgcagatcgacgacaacgagtacgcctacctgaaggccatcatcttcttcgaccccgacgccaagggcctgagcgaccccggcaagatcaagagactgagagcccaggtgcaggtgagcctggaggactacatcaacgacagacagtacgacagcagaggcagattcggcgagctgctgctgctgctgcccaccctgcagagcatcacctggcagatgatcgagcagatccagttcatcaagctgttcggcatggccaagatcgacaacctgctgcaggagatgctgctgtgaggactagtccctgttcccagagcccacttttttttctttttttgaaataaaatagcctgtctttcagatctcaaaggctcttttcagagccaccaaaaaaaaaaaaaaaaaaaaaaaaaaaaaaaaaaaaaaaaaaaaaaaaaaaaaaaaaaaaaaaaaaaaaaaaaaaaaaaaaaaaaaaaaaaaaaaaaaaaa

SEQ ID NO: 3577 - RNA, 1400 nt, synthetic construct; identical to SEQ ID NO: 3576
  misc_feature 1..1400: note = mRNA a-1 (hSL-A100) (opt4) from Homo sapiens__NP_000448.3__HNF4A(1-375)(S142A_S143A_S313A_K458R)
  source 1..1400: mol_type = other RNA

SEQ ID NO: 3578 - RNA, 1400 nt, synthetic construct
  misc_feature 1..1400: note = mRNA a-1 (hSL-A100) (opt4) from Homo sapiens__NP_000448.3__HNF4A(1-375)(S142A_S143A_S167A_S313A_ S378A_T429A_T432A_S436A_K458R)
  source 1..1400: mol_type = other RNA
aggagagtcccgcagtcggcgtccagcggctctgcttgttcgtgtgtgtgtcgttgcaggccttattcaagcttaccatgagactgagcaagaccctggtggacatggacatggccgactacagcgccgccctggaccccgcctacaccaccctggagttcgagaacgtgcaggtgctgaccatgggcaacgacaccagccccagcgagggcaccaacctgaacgcccccaacagcctgggcgtgagcgccctgtgcgccatctgcggcgacagagccaccggcaagcactacggcgccagcagctgcgacggctgcaagggcttcttcagaagaagcgtgagaaagaaccacatgtacagctgcagattcagcagacagtgcgtggtggacaaggacaagagaaaccagtgcagatactgcagactgaagaagtgcttcagagccggcatgaagaaggaggccgtgcagaacgagagagacagaatcagcaccagaagagccgcctacgaggacagcagcctgcccagcatcaacgccctgctgcaggccgaggtgctgagcagacagatcaccgcccccgtgagcggcatcaacggcgacatcagagccaagaagatcgccagcatcgccgacgtgtgcgagagcatgaaggagcagctgctggtgctggtggagtgggccaagtacatccccgccttctgcgagctgcccctggacgaccaggtggccctgctgagagcccacgccggcgagcacctgctgctgggcgccaccaagagaagcatggtgttcaaggacgtgctgctgctgggcaacgactacatcgtgcccagacactgccccgagctggccgagatgagcagagtgagcatcagaatcctggacgagctggtgctgcccttccaggagctgcagatcgacgacaacgagtacgcctacctgaaggccatcatcttcttcgaccccgacgccaagggcctgagcgaccccggcaagatcaagagactgagagcccaggtgcaggtgagcctggaggactacatcaacgacagacagtacgacagcagaggcagattcggcgagctgctgctgctgctgcccaccctgcagagcatcacctggcagatgatcgagcagatccagttcatcaagctgttcggcatggccaagatcgacaacctgctgcaggagatgctgctgtgaggactagtccctgttcccagagcccacttttttttctttttttgaaataaaatagcctgtctttcagatctcaaaggctcttttcagagccaccaaaaaaaaaaaaaaaaaaaaaaaaaaaaaaaaaaaaaaaaaaaaaaaaaaaaaaaaaaaaaaaaaaaaaaaaaaaaaaaaaaaaaaaaaaaaaaaaaaaaa

SEQ ID NO: 3579 - RNA, 1400 nt, synthetic construct
  misc_feature 1..1400: note = mRNA a-1 (hSL-A100) (opt4) from Homo sapiens__NP_000448.3__HNF4A(1-375)(S142A_S143A_S148A_S167A_ S313A_S378A_T429A_T432A_S436A_K458R)
  source 1..1400: mol_type = other RNA
aggagagtcccgcagtcggcgtccagcggctctgcttgttcgtgtgtgtgtcgttgcaggccttattcaagcttaccatgagactgagcaagaccctggtggacatggacatggccgactacagcgccgccctggaccccgcctacaccaccctggagttcgagaacgtgcaggtgctgaccatgggcaacgacaccagccccagcgagggcaccaacctgaacgcccccaacagcctgggcgtgagcgccctgtgcgccatctgcggcgacagagccaccggcaagcactacggcgccagcagctgcgacggctgcaagggcttcttcagaagaagcgtgagaaagaaccacatgtacagctgcagattcagcagacagtgcgtggtggacaaggacaagagaaaccagtgcagatactgcagactgaagaagtgcttcagagccggcatgaagaaggaggccgtgcagaacgagagagacagaatcagcaccagaagagccgcctacgaggacagcgccctgcccagcatcaacgccctgctgcaggccgaggtgctgagcagacagatcaccgcccccgtgagcggcatcaacggcgacatcagagccaagaagatcgccagcatcgccgacgtgtgcgagagcatgaaggagcagctgctggtgctggtggagtgggccaagtacatccccgccttctgcgagctgcccctggacgaccaggtggccctgctgagagcccacgccggcgagcacctgctgctgggcgccaccaagagaagcatggtgttcaaggacgtgctgctgctgggcaacgactacatcgtgcccagacactgccccgagctggccgagatgagcagagtgagcatcagaatcctggacgagctggtgctgcccttccaggagctgcagatcgacgacaacgagtacgcctacctgaaggccatcatcttcttcgaccccgacgccaagggcctgagcgaccccggcaagatcaagagactgagagcccaggtgcaggtgagcctggaggactacatcaacgacagacagtacgacagcagaggcagattcggcgagctgctgctgctgctgcccaccctgcagagcatcacctggcagatgatcgagcagatccagttcatcaagctgttcggcatggccaagatcgacaacctgctgcaggagatgctgctgtgaggactagtccctgttcccagagcccacttttttttctttttttgaaataaaatagcctgtctttcagatctcaaaggctcttttcagagccaccaaaaaaaaaaaaaaaaaaaaaaaaaaaaaaaaaaaaaaaaaaaaaaaaaaaaaaaaaaaaaaaaaaaaaaaaaaaaaaaaaaaaaaaaaaaaaaaaaaaaa

SEQ ID NO: 3580 - RNA, 1400 nt, synthetic construct
  misc_feature 1..1400: note = mRNA a-1 (hSL-A100) (opt4) from Homo sapiens__NP_000448.3__HNF4A(1-375)(K106R_K108R_K126R_K127R_ S142A_S143A_S148A_S167A_S313A_S378A_T429A_T432A_S436A_K458R )
  source 1..1400: mol_type = other RNA
aggagagtcccgcagtcggcgtccagcggctctgcttgttcgtgtgtgtgtcgttgcaggccttattcaagcttaccatgagactgagcaagaccctggtggacatggacatggccgactacagcgccgccctggaccccgcctacaccaccctggagttcgagaacgtgcaggtgctgaccatgggcaacgacaccagccccagcgagggcaccaacctgaacgcccccaacagcctgggcgtgagcgccctgtgcgccatctgcggcgacagagccaccggcaagcactacggcgccagcagctgcgacggctgcaagggcttcttcagaagaagcgtgagaaagaaccacatgtacagctgcagattcagcagacagtgcgtggtggacagagacagaagaaaccagtgcagatactgcagactgaagaagtgcttcagagccggcatgagaagagaggccgtgcagaacgagagagacagaatcagcaccagaagagccgcctacgaggacagcgccctgcccagcatcaacgccctgctgcaggccgaggtgctgagcagacagatcaccgcccccgtgagcggcatcaacggcgacatcagagccaagaagatcgccagcatcgccgacgtgtgcgagagcatgaaggagcagctgctggtgctggtggagtgggccaagtacatccccgccttctgcgagctgcccctggacgaccaggtggccctgctgagagcccacgccggcgagcacctgctgctgggcgccaccaagagaagcatggtgttcaaggacgtgctgctgctgggcaacgactacatcgtgcccagacactgccccgagctggccgagatgagcagagtgagcatcagaatcctggacgagctggtgctgcccttccaggagctgcagatcgacgacaacgagtacgcctacctgaaggccatcatcttcttcgaccccgacgccaagggcctgagcgaccccggcaagatcaagagactgagagcccaggtgcaggtgagcctggaggactacatcaacgacagacagtacgacagcagaggcagattcggcgagctgctgctgctgctgcccaccctgcagagcatcacctggcagatgatcgagcagatccagttcatcaagctgttcggcatggccaagatcgacaacctgctgcaggagatgctgctgtgaggactagtccctgttcccagagcccacttttttttctttttttgaaataaaatagcctgtctttcagatctcaaaggctcttttcagagccaccaaaaaaaaaaaaaaaaaaaaaaaaaaaaaaaaaaaaaaaaaaaaaaaaaaaaaaaaaaaaaaaaaaaaaaaaaaaaaaaaaaaaaaaaaaaaaaaaaaaaa

SEQ ID NO: 3581 - RNA, 1400 nt, synthetic construct
  misc_feature 1..1400: note = mRNA a-1 (hSL-A100) (opt4) from Homo sapiens__NP_000448.3__HNF4A(1-375)(S142A_S143A_S148A_T166A_ S167A_S313A_S378A_T429A_T432A_S436A_K458R)
  source 1..1400: mol_type = other RNA
aggagagtcccgcagtcggcgtccagcggctctgcttgttcgtgtgtgtgtcgttgcaggccttattcaagcttaccatgagactgagcaagaccctggtggacatggacatggccgactacagcgccgccctggaccccgcctacaccaccctggagttcgagaacgtgcaggtgctgaccatgggcaacgacaccagccccagcgagggcaccaacctgaacgcccccaacagcctgggcgtgagcgccctgtgcgccatctgcggcgacagagccaccggcaagcactacggcgccagcagctgcgacggctgcaagggcttcttcagaagaagcgtgagaaagaaccacatgtacagctgcagattcagcagacagtgcgtggtggacaaggacaagagaaaccagtgcagatactgcagactgaagaagtgcttcagagccggcatgaagaaggaggccgtgcagaacgagagagacagaatcagcaccagaagagccgcctacgaggacagcgccctgcccagcatcaacgccctgctgcaggccgaggtgctgagcagacagatcgccgcccccgtgagcggcatcaacggcgacatcagagccaagaagatcgccagcatcgccgacgtgtgcgagagcatgaaggagcagctgctggtgctggtggagtgggccaagtacatccccgccttctgcgagctgcccctggacgaccaggtggccctgctgagagcccacgccggcgagcacctgctgctgggcgccaccaagagaagcatggtgttcaaggacgtgctgctgctgggcaacgactacatcgtgcccagacactgccccgagctggccgagatgagcagagtgagcatcagaatcctggacgagctggtgctgcccttccaggagctgcagatcgacgacaacgagtacgcctacctgaaggccatcatcttcttcgaccccgacgccaagggcctgagcgaccccggcaagatcaagagactgagagcccaggtgcaggtgagcctggaggactacatcaacgacagacagtacgacagcagaggcagattcggcgagctgctgctgctgctgcccaccctgcagagcatcacctggcagatgatcgagcagatccagttcatcaagctgttcggcatggccaagatcgacaacctgctgcaggagatgctgctgtgaggactagtccctgttcccagagcccacttttttttctttttttgaaataaaatagcctgtctttcagatctcaaaggctcttttcagagccaccaaaaaaaaaaaaaaaaaaaaaaaaaaaaaaaaaaaaaaaaaaaaaaaaaaaaaaaaaaaaaaaaaaaaaaaaaaaaaaaaaaaaaaaaaaaaaaaaaaaaa

SEQ ID NO: 3582 - RNA, 1400 nt, synthetic construct
  misc_feature 1..1400: note = mRNA a-1 (hSL-A100) (opt4) from Homo sapiens__NP_000448.3__HNF4A(1-375)(S87A_S142A_S143A_S148A_T 166A_S167A_S313A_S378A_T429A_T432A_S436A_K458R)
  source 1..1400: mol_type = other RNA
aggagagtcccgcagtcggcgtccagcggctctgcttgttcgtgtgtgtgtcgttgcaggccttattcaagcttaccatgagactgagcaagaccctggtggacatggacatggccgactacagcgccgccctggaccccgcctacaccaccctggagttcgagaacgtgcaggtgctgaccatgggcaacgacaccagccccagcgagggcaccaacctgaacgcccccaacagcctgggcgtgagcgccctgtgcgccatctgcggcgacagagccaccggcaagcactacggcgccagcagctgcgacggctgcaagggcttcttcagaagagccgtgagaaagaaccacatgtacagctgcagattcagcagacagtgcgtggtggacaaggacaagagaaaccagtgcagatactgcagactgaagaagtgcttcagagccggcatgaagaaggaggccgtgcagaacgagagagacagaatcagcaccagaagagccgcctacgaggacagcgccctgcccagcatcaacgccctgctgcaggccgaggtgctgagcagacagatcgccgcccccgtgagcggcatcaacggcgacatcagagccaagaagatcgccagcatcgccgacgtgtgcgagagcatgaaggagcagctgctggtgctggtggagtgggccaagtacatccccgccttctgcgagctgcccctggacgaccaggtggccctgctgagagcccacgccggcgagcacctgctgctgggcgccaccaagagaagcatggtgttcaaggacgtgctgctgctgggcaacgactacatcgtgcccagacactgccccgagctggccgagatgagcagagtgagcatcagaatcctggacgagctggtgctgcccttccaggagctgcagatcgacgacaacgagtacgcctacctgaaggccatcatcttcttcgaccccgacgccaagggcctgagcgaccccggcaagatcaagagactgagagcccaggtgcaggtgagcctggaggactacatcaacgacagacagtacgacagcagaggcagattcggcgagctgctgctgctgctgcccaccctgcagagcatcacctggcagatgatcgagcagatccagttcatcaagctgttcggcatggccaagatcgacaacctgctgcaggagatgctgctgtgaggactagtccctgttcccagagcccacttttttttctttttttgaaataaaatagcctgtctttcagatctcaaaggctcttttcagagccaccaaaaaaaaaaaaaaaaaaaaaaaaaaaaaaaaaaaaaaaaaaaaaaaaaaaaaaaaaaaaaaaaaaaaaaaaaaaaaaaaaaaaaaaaaaaaaaaaaaaaa

SEQ ID NO: 3583 - RNA, 1400 nt, synthetic construct
  misc_feature 1..1400: note = mRNA a-1 (hSL-A100) (opt4) from Homo sapiens__NP_000448.3__HNF4A(1-375)(S87A_K106R_K108R_K126R_K 127R_S142A_S143A_S148A_T166A_S167A_S313A_S378A_T429A_T432A_ S436A_K458R)
  source 1..1400: mol_type = other RNA
aggagagtcccgcagtcggcgtccagcggctctgcttgttcgtgtgtgtgtcgttgcaggccttattcaagcttaccatgagactgagcaagaccctggtggacatggacatggccgactacagcgccgccctggaccccgcctacaccaccctggagttcgagaacgtgcaggtgctgaccatgggcaacgacaccagccccagcgagggcaccaacctgaacgcccccaacagcctgggcgtgagcgccctgtgcgccatctgcggcgacagagccaccggcaagcactacggcgccagcagctgcgacggctgcaagggcttcttcagaagagccgtgagaaagaaccacatgtacagctgcagattcagcagacagtgcgtggtggacagagacagaagaaaccagtgcagatactgcagactgaagaagtgcttcagagccggcatgagaagagaggccgtgcagaacgagagagacagaatcagcaccagaagagccgcctacgaggacagcgccctgcccagcatcaacgccctgctgcaggccgaggtgctgagcagacagatcgccgcccccgtgagcggcatcaacggcgacatcagagccaagaagatcgccagcatcgccgacgtgtgcgagagcatgaaggagcagctgctggtgctggtggagtgggccaagtacatccccgccttctgcgagctgcccctggacgaccaggtggccctgctgagagcccacgccggcgagcacctgctgctgggcgccaccaagagaagcatggtgttcaaggacgtgctgctgctgggcaacgactacatcgtgcccagacactgccccgagctggccgagatgagcagagtgagcatcagaatcctggacgagctggtgctgcccttccaggagctgcagatcgacgacaacgagtacgcctacctgaaggccatcatcttcttcgaccccgacgccaagggcctgagcgaccccggcaagatcaagagactgagagcccaggtgcaggtgagcctggaggactacatcaacgacagacagtacgacagcagaggcagattcggcgagctgctgctgctgctgcccaccctgcagagcatcacctggcagatgatcgagcagatccagttcatcaagctgttcggcatggccaagatcgacaacctgctgcaggagatgctgctgtgaggactagtccctgttcccagagcccacttttttttctttttttgaaataaaatagcctgtctttcagatctcaaaggctcttttcagagccaccaaaaaaaaaaaaaaaaaaaaaaaaaaaaaaaaaaaaaaaaaaaaaaaaaaaaaaaaaaaaaaaaaaaaaaaaaaaaaaaaaaaaaaaaaaaaaaaaaaaaa

SEQ ID NO: 3584 - RNA, 1400 nt, synthetic construct
  misc_feature 1..1400: note = mRNA a-1 (hSL-A100) (opt4) from Homo sapiens__NP_000448.3__HNF4A(1-375)(S87A_K106R_K108R_K126R_K 127R)
  source 1..1400: mol_type = other RNA
aggagagtcccgcagtcggcgtccagcggctctgcttgttcgtgtgtgtgtcgttgcaggccttattcaagcttaccatgagactgagcaagaccctggtggacatggacatggccgactacagcgccgccctggaccccgcctacaccaccctggagttcgagaacgtgcaggtgctgaccatgggcaacgacaccagccccagcgagggcaccaacctgaacgcccccaacagcctgggcgtgagcgccctgtgcgccatctgcggcgacagagccaccggcaagcactacggcgccagcagctgcgacggctgcaagggcttcttcagaagagccgtgagaaagaaccacatgtacagctgcagattcagcagacagtgcgtggtggacagagacagaagaaaccagtgcagatactgcagactgaagaagtgcttcagagccggcatgagaagagaggccgtgcagaacgagagagacagaatcagcaccagaagaagcagctacgaggacagcagcctgcccagcatcaacgccctgctgcaggccgaggtgctgagcagacagatcaccagccccgtgagcggcatcaacggcgacatcagagccaagaagatcgccagcatcgccgacgtgtgcgagagcatgaaggagcagctgctggtgctggtggagtgggccaagtacatccccgccttctgcgagctgcccctggacgaccaggtggccctgctgagagcccacgccggcgagcacctgctgctgggcgccaccaagagaagcatggtgttcaaggacgtgctgctgctgggcaacgactacatcgtgcccagacactgccccgagctggccgagatgagcagagtgagcatcagaatcctggacgagctggtgctgcccttccaggagctgcagatcgacgacaacgagtacgcctacctgaaggccatcatcttcttcgaccccgacgccaagggcctgagcgaccccggcaagatcaagagactgagaagccaggtgcaggtgagcctggaggactacatcaacgacagacagtacgacagcagaggcagattcggcgagctgctgctgctgctgcccaccctgcagagcatcacctggcagatgatcgagcagatccagttcatcaagctgttcggcatggccaagatcgacaacctgctgcaggagatgctgctgtgaggactagtccctgttcccagagcccacttttttttctttttttgaaataaaatagcctgtctttcagatctcaaaggctcttttcagagccaccaaaaaaaaaaaaaaaaaaaaaaaaaaaaaaaaaaaaaaaaaaaaaaaaaaaaaaaaaaaaaaaaaaaaaaaaaaaaaaaaaaaaaaaaaaaaaaaaaaaaa

SEQ ID NO: 3585 - RNA, 1400 nt, synthetic construct; identical to SEQ ID NO: 3583
  misc_feature 1..1400: note = mRNA a-1 (hSL-A100) (opt4) from Homo sapiens__NP_000448.3__HNF4A(1-375)(S87A_K106R_K108R_K126R_K 127R_S142A_S143A_S148A_T166A_S167A_S313A_S378A_T429A_T432A_ S436A_K458R_S461A)
  source 1..1400: mol_type = other RNA

SEQ ID NO: 3586 - RNA, 1400 nt, synthetic construct; identical to SEQ ID NO: 3583
  misc_feature 1..1400: note = mRNA a-1 (hSL-A100) (opt4) from Homo sapiens__NP_000448.3__HNF4A(1-375)(S87A_K106R_K108R_K126R_K 127R_S142A_S143A_S148A_T166A_S167A_S313A_S378A_T429A_T432A_ S436A_K458R_S461E)
  source 1..1400: mol_type = other RNA

SEQ ID NO: 3587 - RNA, 1400 nt, synthetic construct
  misc_feature 1..1400: note = mRNA a-1 (hSL-A100) (opt4) from Homo sapiens__NP_000448.3__HNF4A(1-375)(S87A_K106R_K108R_K126R_K 127R_S142A_S143A_S148E_T166A_S167E_S313A_S378E_T429E_T432E_ S436E_K458R_S461E)
  source 1..1400: mol_type = other RNA
aggagagtcccgcagtcggcgtccagcggctctgcttgttcgtgtgtgtgtcgttgcaggccttattcaagcttaccatgagactgagcaagaccctggtggacatggacatggccgactacagcgccgccctggaccccgcctacaccaccctggagttcgagaacgtgcaggtgctgaccatgggcaacgacaccagccccagcgagggcaccaacctgaacgcccccaacagcctgggcgtgagcgccctgtgcgccatctgcggcgacagagccaccggcaagcactacggcgccagcagctgcgacggctgcaagggcttcttcagaagagccgtgagaaagaaccacatgtacagctgcagattcagcagacagtgcgtggtggacagagacagaagaaaccagtgcagatactgcagactgaagaagtgcttcagagccggcatgagaagagaggccgtgcagaacgagagagacagaatcagcaccagaagagccgcctacgaggacagcgagctgcccagcatcaacgccctgctgcaggccgaggtgctgagcagacagatcgccgagcccgtgagcggcatcaacggcgacatcagagccaagaagatcgccagcatcgccgacgtgtgcgagagcatgaaggagcagctgctggtgctggtggagtgggccaagtacatccccgccttctgcgagctgcccctggacgaccaggtggccctgctgagagcccacgccggcgagcacctgctgctgggcgccaccaagagaagcatggtgttcaaggacgtgctgctgctgggcaacgactacatcgtgcccagacactgccccgagctggccgagatgagcagagtgagcatcagaatcctggacgagctggtgctgcccttccaggagctgcagatcgacgacaacgagtacgcctacctgaaggccatcatcttcttcgaccccgacgccaagggcctgagcgaccccggcaagatcaagagactgagagcccaggtgcaggtgagcctggaggactacatcaacgacagacagtacgacagcagaggcagattcggcgagctgctgctgctgctgcccaccctgcagagcatcacctggcagatgatcgagcagatccagttcatcaagctgttcggcatggccaagatcgacaacctgctgcaggagatgctgctgtgaggactagtccctgttcccagagcccacttttttttctttttttgaaataaaatagcctgtctttcagatctcaaaggctcttttcagagccaccaaaaaaaaaaaaaaaaaaaaaaaaaaaaaaaaaaaaaaaaaaaaaaaaaaaaaaaaaaaaaaaaaaaaaaaaaaaaaaaaaaaaaaaaaaaaaaaaaaaaa

SEQ ID NO: 3588 - RNA, 1400 nt, synthetic construct
  misc_feature 1..1400: note = mRNA a-1 (hSL-A100) (opt4) from Homo sapiens__NP_000448.3__HNF4A(1-375)(S87A_K106R_K108R_K126R_K 127R_S142A_S143A_S148A_T166A_S167A_K179R_K180R_S313A_S378A_ T429A_T432A_S436A_K458R_S461E)
  source 1..1400: mol_type = other RNA
aggagagtcccgcagtcggcgtccagcggctctgcttgttcgtgtgtgtgtcgttgcaggccttattcaagcttaccatgagactgagcaagaccctggtggacatggacatggccgactacagcgccgccctggaccccgcctacaccaccctggagttcgagaacgtgcaggtgctgaccatgggcaacgacaccagccccagcgagggcaccaacctgaacgcccccaacagcctgggcgtgagcgccctgtgcgccatctgcggcgacagagccaccggcaagcactacggcgccagcagctgcgacggctgcaagggcttcttcagaagagccgtgagaaagaaccacatgtacagctgcagattcagcagacagtgcgtggtggacagagacagaagaaaccagtgcagatactgcagactgaagaagtgcttcagagccggcatgagaagagaggccgtgcagaacgagagagacagaatcagcaccagaagagccgcctacgaggacagcgccctgcccagcatcaacgccctgctgcaggccgaggtgctgagcagacagatcgccgcccccgtgagcggcatcaacggcgacatcagagccagaagaatcgccagcatcgccgacgtgtgcgagagcatgaaggagcagctgctggtgctggtggagtgggccaagtacatccccgccttctgcgagctgcccctggacgaccaggtggccctgctgagagcccacgccggcgagcacctgctgctgggcgccaccaagagaagcatggtgttcaaggacgtgctgctgctgggcaacgactacatcgtgcccagacactgccccgagctggccgagatgagcagagtgagcatcagaatcctggacgagctggtgctgcccttccaggagctgcagatcgacgacaacgagtacgcctacctgaaggccatcatcttcttcgaccccgacgccaagggcctgagcgaccccggcaagatcaagagactgagagcccaggtgcaggtgagcctggaggactacatcaacgacagacagtacgacagcagaggcagattcggcgagctgctgctgctgctgcccaccctgcagagcatcacctggcagatgatcgagcagatccagttcatcaagctgttcggcatggccaagatcgacaacctgctgcaggagatgctgctgtgaggactagtccctgttcccagagcccacttttttttctttttttgaaataaaatagcctgtctttcagatctcaaaggctcttttcagagccaccaaaaaaaaaaaaaaaaaaaaaaaaaaaaaaaaaaaaaaaaaaaaaaaaaaaaaaaaaaaaaaaaaaaaaaaaaaaaaaaaaaaaaaaaaaaaaaaaaaaaa

SEQ ID NO: 3589 - RNA, 1400 nt, synthetic construct
  misc_feature 1..1400: note = mRNA a-1 (hSL-A100) (opt4) from Homo sapiens__NP_000448.3__HNF4A(1-375)(S87A_K106R_K108R_K126R_K 127R_S142A_S143A_S148A_T166A_S167A_K300R_K307R_K309R_S313A_ S378A_T429A_T432A_S436A_K458R_S461E)
  source 1..1400: mol_type = other RNA
aggagagtcccgcagtcggcgtccagcggctctgcttgttcgtgtgtgtgtcgttgcaggccttattcaagcttaccatgagactgagcaagaccctggtggacatggacatggccgactacagcgccgccctggaccccgcctacaccaccctggagttcgagaacgtgcaggtgctgaccatgggcaacgacaccagccccagcgagggcaccaacctgaacgcccccaacagcctgggcgtgagcgccctgtgcgccatctgcggcgacagagccaccggcaagcactacggcgccagcagctgcgacggctgcaagggcttcttcagaagagccgtgagaaagaaccacatgtacagctgcagattcagcagacagtgcgtggtggacagagacagaagaaaccagtgcagatactgcagactgaagaagtgcttcagagccggcatgagaagagaggccgtgcagaacgagagagacagaatcagcaccagaagagccgcctacgaggacagcgccctgcccagcatcaacgccctgctgcaggccgaggtgctgagcagacagatcgccgcccccgtgagcggcatcaacggcgacatcagagccaagaagatcgccagcatcgccgacgtgtgcgagagcatgaaggagcagctgctggtgctggtggagtgggccaagtacatccccgccttctgcgagctgcccctggacgaccaggtggccctgctgagagcccacgccggcgagcacctgctgctgggcgccaccaagagaagcatggtgttcaaggacgtgctgctgctgggcaacgactacatcgtgcccagacactgccccgagctggccgagatgagcagagtgagcatcagaatcctggacgagctggtgctgcccttccaggagctgcagatcgacgacaacgagtacgcctacctgaaggccatcatcttcttcgaccccgacgccagaggcctgagcgaccccggcagaatcagaagactgagagcccaggtgcaggtgagcctggaggactacatcaacgacagacagtacgacagcagaggcagattcggcgagctgctgctgctgctgcccaccctgcagagcatcacctggcagatgatcgagcagatccagttcatcaagctgttcggcatggccaagatcgacaacctgctgcaggagatgctgctgtgaggactagtccctgttcccagagcccacttttttttctttttttgaaataaaatagcctgtctttcagatctcaaaggctcttttcagagccaccaaaaaaaaaaaaaaaaaaaaaaaaaaaaaaaaaaaaaaaaaaaaaaaaaaaaaaaaaaaaaaaaaaaaaaaaaaaaaaaaaaaaaaaaaaaaaaaaaaaaa

SEQ ID NO: 3590 - RNA, 1400 nt, synthetic construct; identical to SEQ ID NO: 3583
  misc_feature 1..1400: note = mRNA a-1 (hSL-A100) (opt4) from Homo sapiens__NP_000448.3__HNF4A(1-375)(S87A_K106R_K108R_K126R_K 127R_S142A_S143A_S148A_T166A_S167A_S313A_S378A_T429A_T432A_ S436A_K447R_K458R_S461E_K470R)
  source 1..1400: mol_type = other RNA

SEQ ID NO: 3591 - RNA, 1400 nt, synthetic construct
  misc_feature 1..1400: note = mRNA a-1 (hSL-A100) (opt4) from Homo sapiens__NP_000448.3__HNF4A(1-375)(S87A_K106R_K108R_K126R_K 127R_S142A_S143A_S148A_T166A_S167A_K179R_K180R_K234R_K300R_ K307R_K309R_S313A_S378A_T429A_T432A_S436A_K447R_K458R_S461E _K470R)
  source 1..1400: mol_type = other RNA
aggagagtcccgcagtcggcgtccagcggctctgcttgttcgtgtgtgtgtcgttgcaggccttattcaagcttaccatgagactgagcaagaccctggtggacatggacatggccgactacagcgccgccctggaccccgcctacaccaccctggagttcgagaacgtgcaggtgctgaccatgggcaacgacaccagccccagcgagggcaccaacctgaacgcccccaacagcctgggcgtgagcgccctgtgcgccatctgcggcgacagagccaccggcaagcactacggcgccagcagctgcgacggctgcaagggcttcttcagaagagccgtgagaaagaaccacatgtacagctgcagattcagcagacagtgcgtggtggacagagacagaagaaaccagtgcagatactgcagactgaagaagtgcttcagagccggcatgagaagagaggccgtgcagaacgagagagacagaatcagcaccagaagagccgcctacgaggacagcgccctgcccagcatcaacgccctgctgcaggccgaggtgctgagcagacagatcgccgcccccgtgagcggcatcaacggcgacatcagagccagaagaatcgccagcatcgccgacgtgtgcgagagcatgaaggagcagctgctggtgctggtggagtgggccaagtacatccccgccttctgcgagctgcccctggacgaccaggtggccctgctgagagcccacgccggcgagcacctgctgctgggcgccaccagaagaagcatggtgttcaaggacgtgctgctgctgggcaacgactacatcgtgcccagacactgccccgagctggccgagatgagcagagtgagcatcagaatcctggacgagctggtgctgcccttccaggagctgcagatcgacgacaacgagtacgcctacctgaaggccatcatcttcttcgaccccgacgccagaggcctgagcgaccccggcagaatcagaagactgagagcccaggtgcaggtgagcctggaggactacatcaacgacagacagtacgacagcagaggcagattcggcgagctgctgctgctgctgcccaccctgcagagcatcacctggcagatgatcgagcagatccagttcatcaagctgttcggcatggccaagatcgacaacctgctgcaggagatgctgctgtgaggactagtccctgttcccagagcccacttttttttctttttttgaaataaaatagcctgtctttcagatctcaaaggctcttttcagagccaccaaaaaaaaaaaaaaaaaaaaaaaaaaaaaaaaaaaaaaaaaaaaaaaaaaaaaaaaaaaaaaaaaaaaaaaaaaaaaaaaaaaaaaaaaaaaaaaaaaaaa

SEQ ID NO: 3592 - RNA, 1400 nt, synthetic construct
  misc_feature 1..1400: note = mRNA a-1 (hSL-A100) (opt4) from Homo sapiens__NP_000448.3__HNF4A(1-375)(S87A_S95A_S99A_K106R_K10 8R_K126R_K127R_S142A_S143A_S148A_T166A_S167A_S313A_S378A_T4 29A_T432A_S436A_K458R_S461E)
  source 1..1400: mol_type = other RNA
aggagagtcccgcagtcggcgtccagcggctctgcttgttcgtgtgtgtgtcgttgcaggccttattcaagcttaccatgagactgagcaagaccctggtggacatggacatggccgactacagcgccgccctggaccccgcctacaccaccctggagttcgagaacgtgcaggtgctgaccatgggcaacgacaccagccccagcgagggcaccaacctgaacgcccccaacagcctgggcgtgagcgccctgtgcgccatctgcggcgacagagccaccggcaagcactacggcgccagcagctgcgacggctgcaagggcttcttcagaagagccgtgagaaagaaccacatgtacgcctgcagattcgccagacagtgcgtggtggacagagacagaagaaaccagtgcagatactgcagactgaagaagtgcttcagagccggcatgagaagagaggccgtgcagaacgagagagacagaatcagcaccagaagagccgcctacgaggacagcgccctgcccagcatcaacgccctgctgcaggccgaggtgctgagcagacagatcgccgcccccgtgagcggcatcaacggcgacatcagagccaagaagatcgccagcatcgccgacgtgtgcgagagcatgaaggagcagctgctggtgctggtggagtgggccaagtacatccccgccttctgcgagctgcccctggacgaccaggtggccctgctgagagcccacgccggcgagcacctgctgctgggcgccaccaagagaagcatggtgttcaaggacgtgctgctgctgggcaacgactacatcgtgcccagacactgccccgagctggccgagatgagcagagtgagcatcagaatcctggacgagctggtgctgcccttccaggagctgcagatcgacgacaacgagtacgcctacctgaaggccatcatcttcttcgaccccgacgccaagggcctgagcgaccccggcaagatcaagagactgagagcccaggtgcaggtgagcctggaggactacatcaacgacagacagtacgacagcagaggcagattcggcgagctgctgctgctgctgcccaccctgcagagcatcacctggcagatgatcgagcagatccagttcatcaagctgttcggcatggccaagatcgacaacctgctgcaggagatgctgctgtgaggactagtccctgttcccagagcccacttttttttctttttttgaaataaaatagcctgtctttcagatctcaaaggctcttttcagagccaccaaaaaaaaaaaaaaaaaaaaaaaaaaaaaaaaaaaaaaaaaaaaaaaaaaaaaaaaaaaaaaaaaaaaaaaaaaaaaaaaaaaaaaaaaaaaaaaaaaaaa

SEQ ID NO: 3593 - RNA, 1400 nt, synthetic construct
  misc_feature 1..1400: note = mRNA a-1 (hSL-A100) (opt4) from Homo sapiens__NP_000448.3__HNF4A(1-375)(S87A_K106R_K108R_K126R_K 127R_S138A_T139A_S142A_S143A_S148A_T166A_S167A_S313A_S378A_ T429A_T432A_S436A_K458R_S461E)
  source 1..1400: mol_type = other RNA
aggagagtcccgcagtcggcgtccagcggctctgcttgttcgtgtgtgtgtcgttgcaggccttattcaagcttaccatgagactgagcaagaccctggtggacatggacatggccgactacagcgccgccctggaccccgcctacaccaccctggagttcgagaacgtgcaggtgctgaccatgggcaacgacaccagccccagcgagggcaccaacctgaacgcccccaacagcctgggcgtgagcgccctgtgcgccatctgcggcgacagagccaccggcaagcactacggcgccagcagctgcgacggctgcaagggcttcttcagaagagccgtgagaaagaaccacatgtacagctgcagattcagcagacagtgcgtggtggacagagacagaagaaaccagtgcagatactgcagactgaagaagtgcttcagagccggcatgagaagagaggccgtgcagaacgagagagacagaatcgccgccagaagagccgcctacgaggacagcgccctgcccagcatcaacgccctgctgcaggccgaggtgctgagcagacagatcgccgcccccgtgagcggcatcaacggcgacatcagagccaagaagatcgccagcatcgccgacgtgtgcgagagcatgaaggagcagctgctggtgctggtggagtgggccaagtacatccccgccttctgcgagctgcccctggacgaccaggtggccctgctgagagcccacgccggcgagcacctgctgctgggcgccaccaagagaagcatggtgttcaaggacgtgctgctgctgggcaacgactacatcgtgcccagacactgccccgagctggccgagatgagcagagtgagcatcagaatcctggacgagctggtgctgcccttccaggagctgcagatcgacgacaacgagtacgcctacctgaaggccatcatcttcttcgaccccgacgccaagggcctgagcgaccccggcaagatcaagagactgagagcccaggtgcaggtgagcctggaggactacatcaacgacagacagtacgacagcagaggcagattcggcgagctgctgctgctgctgcccaccctgcagagcatcacctggcagatgatcgagcagatccagttcatcaagctgttcggcatggccaagatcgacaacctgctgcaggagatgctgctgtgaggactagtccctgttcccagagcccacttttttttctttttttgaaataaaatagcctgtctttcagatctcaaaggctcttttcagagccaccaaaaaaaaaaaaaaaaaaaaaaaaaaaaaaaaaaaaaaaaaaaaaaaaaaaaaaaaaaaaaaaaaaaaaaaaaaaaaaaaaaaaaaaaaaaaaaaaaaaaa

SEQ ID NO: 3594 - RNA, 1400 nt, synthetic construct
  misc_feature 1..1400: note = mRNA a-1 (hSL-A100) (opt4) from Homo sapiens__NP_000448.3__HNF4A(1-375)(S87A_S95A_S99A_K106R_K10 8R_K126R_K127R_S138A_T139A_S142A_S143A_S148A_T166A_S167A_S3 13A_S378A_T429A_T432A_S436A_K458R_S461E)
  source 1..1400: mol_type = other RNA
aggagagtcccgcagtcggcgtccagcggctctgcttgttcgtgtgtgtgtcgttgcaggccttattcaagcttaccatgagactgagcaagaccctggtggacatggacatggccgactacagcgccgccctggaccccgcctacaccaccctggagttcgagaacgtgcaggtgctgaccatgggcaacgacaccagccccagcgagggcaccaacctgaacgcccccaacagcctgggcgtgagcgccctgtgcgccatctgcggcgacagagccaccggcaagcactacggcgccagcagctgcgacggctgcaagggcttcttcagaagagccgtgagaaagaaccacatgtacgcctgcagattcgccagacagtgcgtggtggacagagacagaagaaaccagtgcagatactgcagactgaagaagtgcttcagagccggcatgagaagagaggccgtgcagaacgagagagacagaatcgccgccagaagagccgcctacgaggacagcgccctgcccagcatcaacgccctgctgcaggccgaggtgctgagcagacagatcgccgcccccgtgagcggcatcaacggcgacatcagagccaagaagatcgccagcatcgccgacgtgtgcgagagcatgaaggagcagctgctggtgctggtggagtgggccaagtacatccccgccttctgcgagctgcccctggacgaccaggtggccctgctgagagcccacgccggcgagcacctgctgctgggcgccaccaagagaagcatggtgttcaaggacgtgctgctgctgggcaacgactacatcgtgcccagacactgccccgagctggccgagatgagcagagtgagcatcagaatcctggacgagctggtgctgcccttccaggagctgcagatcgacgacaacgagtacgcctacctgaaggccatcatcttcttcgaccccgacgccaagggcctgagcgaccccggcaagatcaagagactgagagcccaggtgcaggtgagcctggaggactacatcaacgacagacagtacgacagcagaggcagattcggcgagctgctgctgctgctgcccaccctgcagagcatcacctggcagatgatcgagcagatccagttcatcaagctgttcggcatggccaagatcgacaacctgctgcaggagatgctgctgtgaggactagtccctgttcccagagcccacttttttttctttttttgaaataaaatagcctgtctttcagatctcaaaggctcttttcagagccaccaaaaaaaaaaaaaaaaaaaaaaaaaaaaaaaaaaaaaaaaaaaaaaaaaaaaaaaaaaaaaaaaaaaaaaaaaaaaaaaaaaaaaaaaaaaaaaaaaaaaa

SEQ ID NO: 3595 - RNA, 1400 nt, synthetic construct
  misc_feature 1..1400: note = mRNA a-1 (hSL-A100) (opt5) from Homo sapiens__NP_000448.3__HNF4A(1-375)
  source 1..1400: mol_type = other RNA
aggagagtcccgcagtcggcgtccagcggctctgcttgttcgtgtgtgtgtcgttgcaggccttattcaagcttaccatgagactgagcaagaccctcgtggacatggatatggccgactactccgctgccctggatcccgcgtatacaacgcttgagttcgaaaacgtccaggttctgaccatgggcaatgacacatctcctagcgaggggaccaacctcaatgctccgaactccctgggagtgtctgccctttgcgccatctgtggcgatcgggctacagggaaacactacggagccagctcctgcgacggctgtaaggggtttttccgcagatctgtgcggaaaaatcatatgtatagctgccgcttttccagacaatgtgtcgtggataaggacaaacggaaccagtgccgctactgtagactgaagaagtgcttccgggctggaatgaaaaaggaagccgttcagaatgagcgcgatagaattagcacccggcgcagctcctatgaagacagctctctcccctccatcaacgcgctgctgcaggccgaggtgctcagcagacaaattacatctcctgtctccggcatcaatggcgatattcgggctaaaaagatcgccagcatcgctgacgtgtgtgagtccatgaaagaacagctgcttgttctggtggagtgggccaagtacattcccgcgttttgcgaactccctctggatgaccaggtcgcccttctgcgcgctcacgccggggagcatctcctgctgggagctaccaagagatctatggtgttcaaagacgtgctcctgcttggcaacgattatatcgtcccccggcactgtcctgagctggccgaaatgagcagagtttccattcgcatcctcgacgagctggtgcttccgtttcaggaactgcaaattgatgacaatgagtacgcctacctcaaggctatcattttctttgatcccgacgcgaaagggctgagcgatcctggaaagatcaaacggctgagatctcaggtgcaggtctccctcgaagactatatcaacgatcgccagtacgacagccggggcagattcggggagctgcttctgctcctgcccacgcttcaatctattacctggcagatgatcgagcagattcaatttatcaagctgttcggaatggccaaaattgataatctcctgcaggaaatgctgctctgaggactagtccctgttcccagagcccacttttttttctttttttgaaataaaatagcctgtctttcagatctcaaaggctcttttcagagccaccaaaaaaaaaaaaaaaaaaaaaaaaaaaaaaaaaaaaaaaaaaaaaaaaaaaaaaaaaaaaaaaaaaaaaaaaaaaaaaaaaaaaaaaaaaaaaaaaaaaaa

SEQ ID NO: 3596 - RNA, 1400 nt, synthetic construct
  misc_feature 1..1400: note = mRNA a-1 (hSL-A100) (opt5) from Homo sapiens__NP_000448.3__HNF4A(1-375)(S313A)
  source 1..1400: mol_type = other RNA
aggagagtcccgcagtcggcgtccagcggctctgcttgttcgtgtgtgtgtcgttgcaggccttattcaagcttaccatgagactgagcaagaccctcgtggacatggatatggccgactactccgctgccctggatcccgcgtatacaacgcttgagttcgaaaacgtccaggttctgaccatgggcaatgacacatctcctagcgaggggaccaacctcaatgctccgaactccctgggagtgtctgccctttgcgccatctgtggcgatcgggctacagggaaacactacggagccagctcctgcgacggctgtaaggggtttttccgcagatctgtgcggaaaaatcatatgtatagctgccgcttttccagacaatgtgtcgtggataaggacaaacggaaccagtgccgctactgtagactgaagaagtgcttccgggctggaatgaaaaaggaagccgttcagaatgagcgcgatagaattagcacccggagatcttcctatgaagacagctctctcccctccatcaacgcgctgctgcaggccgaggtgctcagccgccaaattacatctcctgtctccggcatcaatggcgatattcgggctaaaaagatcgccagcatcgctgacgtgtgtgagtccatgaaagaacagctgcttgttctggtggagtgggccaagtacattcccgcgttttgcgaactccctctggatgaccaggtcgcccttctgcgcgctcacgccggggagcatctcctgctgggagctaccaagagatctatggtgttcaaagacgtgctcctgcttggcaacgattatatcgtcccccggcactgtcctgagctggccgaaatgagcagagtttccattcgcatcctcgacgagctggtgcttccgtttcaggaactgcaaattgatgacaatgagtacgcctacctcaaggctatcattttctttgatcccgacgcgaaagggctgagcgatcctggaaagatcaaacggctgagagcccaggtgcaggtctctctcgaagactatatcaacgatcgccagtacgactcccggggcagattcggggagctgcttctgctcctgcccacgcttcaaagcattacctggcagatgatcgagcagattcaatttatcaagctgttcggaatggctaaaattgataatctcctgcaggaaatgctgctctgaggactagtccctgttcccagagcccacttttttttctttttttgaaataaaatagcctgtctttcagatctcaaaggctcttttcagagccaccaaaaaaaaaaaaaaaaaaaaaaaaaaaaaaaaaaaaaaaaaaaaaaaaaaaaaaaaaaaaaaaaaaaaaaaaaaaaaaaaaaaaaaaaaaaaaaaaaaaaa

SEQ ID NO: 3597 - RNA, 1400 nt, synthetic construct
  misc_feature 1..1400: note = mRNA a-1 (hSL-A100) (opt5) from Homo sapiens__NP_000448.3__HNF4A(1-375)(S313E)
  source 1..1400: mol_type = other RNA
aggagagtcccgcagtcggcgtccagcggctctgcttgttcgtgtgtgtgtcgttgcaggccttattcaagcttaccatgagactgagcaagaccctcgtggacatggatatggccgactactccgctgccctggatcccgcgtatacaacgcttgagttcgaaaacgtccaggttctgaccatgggcaatgacacatctcctagcgaggggaccaacctcaatgctccgaactccctgggagtgtctgccctttgcgccatctgtggcgatcgggctacagggaaacactacggagccagctcctgcgacggctgtaaggggtttttccgcagatctgtgcggaaaaatcatatgtatagctgccgcttttccagacaatgtgtcgtggataaggacaaacggaaccagtgccgctactgtagactgaagaagtgcttccgggctggaatgaaaaaggaagccgttcagaatgagcgcgatagaattagcacccggagatcttcctatgaagacagctctctcccctccatcaacgcgctgctgcaggccgaggtgctcagccgccaaattacatctcctgtctccggcatcaatggcgatattcgggctaaaaagatcgccagcatcgctgacgtgtgtgagtccatgaaagaacagctgcttgttctggtggagtgggccaagtacattcccgcgttttgcgaactccctctggatgaccaggtcgcccttctgcgcgctcacgccggggagcatctcctgctgggagctaccaagagatctatggtgttcaaagacgtgctcctgcttggcaacgattatatcgtcccccggcactgtcctgagctggccgaaatgagcagagtttccattcgcatcctcgacgagctggtgcttccgtttcaggaactgcaaattgatgacaatgagtacgcctacctcaaggctatcattttctttgatcccgacgcgaaagggctgagcgatcctggaaagatcaaacggctgagagaacaggtgcaggtctctctcgaggactatatcaacgatcgccagtacgactcccggggcagattcggggagctgcttctgctcctgcccacgcttcaaagcattacctggcagatgatcgaacagattcaatttatcaagctgttcggaatggccaaaattgataatctcctgcaggagatgctgctctgaggactagtccctgttcccagagcccacttttttttctttttttgaaataaaatagcctgtctttcagatctcaaaggctcttttcagagccaccaaaaaaaaaaaaaaaaaaaaaaaaaaaaaaaaaaaaaaaaaaaaaaaaaaaaaaaaaaaaaaaaaaaaaaaaaaaaaaaaaaaaaaaaaaaaaaaaaaaaa

SEQ ID NO: 3598 - RNA, 1400 nt, synthetic construct
  misc_feature 1..1400: note = mRNA a-1 (hSL-A100) (opt5) from Homo sapiens__NP_000448.3__HNF4A(1-375)(S142A_S143A)
  source 1..1400: mol_type = other RNA
aggagagtcccgcagtcggcgtccagcggctctgcttgttcgtgtgtgtgtcgttgcaggccttattcaagcttaccatgagactgagcaagaccctcgtggacatggatatggccgactactccgctgccctggatcccgcgtatacaacgcttgagttcgaaaacgtccaggttctgaccatgggcaatgacacatctcctagcgaggggaccaacctcaatgctccgaactccctgggagtgtctgccctttgcgccatctgtggcgatcgggctacagggaaacactacggagccagctcctgcgacggctgtaaggggtttttccgcagatctgtgcggaaaaatcatatgtatagctgccgcttttccagacaatgtgtcgtggataaggacaaacggaaccagtgccgctactgtagactgaagaagtgcttccgggctggaatgaaaaaggaagccgttcagaatgagcgcgatagaattagcacccggcgcgcggcctatgaagactcttccctccccagcatcaacgctctgctgcaggccgaggtgctctctagacaaattacatcccctgtcagcggcatcaatggcgatattcgggctaaaaagatcgcctctatcgcggacgtgtgtgagtccatgaaagaacagctgcttgttctggtggagtgggccaagtacattcccgctttttgcgaactccctctggatgaccaggtcgcccttctgcgcgctcacgccggggagcatctcctgctgggagccaccaagagaagcatggtgttcaaagacgtgctcctgcttggcaacgattatatcgtcccccggcactgtcctgagctggctgaaatgtccagagtttctattcgcatcctcgacgagctggtgcttccgtttcaggaactgcaaattgatgacaatgagtacgcgtacctcaaggccatcattttctttgatcccgacgctaaagggctgagcgatcctggaaagatcaaacggctgagatcccaggtgcaggtcagcctcgaagactatatcaacgatcgccagtacgactctcggggcagattcggggagctgcttctgctcctgcccacgcttcaatccattacctggcagatgatcgagcagattcaatttatcaagctgttcggaatggccaaaattgataatctcctgcaggaaatgctgctctgaggactagtccctgttcccagagcccacttttttttctttttttgaaataaaatagcctgtctttcagatctcaaaggctcttttcagagccaccaaaaaaaaaaaaaaaaaaaaaaaaaaaaaaaaaaaaaaaaaaaaaaaaaaaaaaaaaaaaaaaaaaaaaaaaaaaaaaaaaaaaaaaaaaaaaaaaaaaaa

SEQ ID NO: 3599 - RNA, 1400 nt, synthetic construct
  misc_feature 1..1400: note = mRNA a-1 (hSL-A100) (opt5) from Homo sapiens__NP_000448.3__HNF4A(1-375)(S142E_S143E)
  source 1..1400: mol_type = other RNA
aggagagtcccgcagtcggcgtccagcggctctgcttgttcgtgtgtgtgtcgttgcaggccttattcaagcttaccatgagactgagcaagaccctcgtggacatggatatggccgactactccgctgccctggatcccgcgtatacaacgcttgagttcgaaaacgtccaggttctgaccatgggcaatgacacatctcctagcgaggggaccaacctcaatgctccgaactccctgggagtgtctgccctttgcgccatctgtggcgatcgggctacagggaaacactacggagccagctcctgcgacggctgtaaggggtttttccgcagatctgtgcggaaaaatcatatgtatagctgccgcttttccagacaatgtgtcgtggataaggacaaacggaaccagtgccgctactgtagactgaagaagtgcttccgggctggaatgaaaaaggaagccgttcagaatgagcgcgatagaattagcacccggcgcgaagagtatgaggactcttccctccccagcatcaacgcgctgctgcaggccgaagtgctctctagacaaattacatcccctgtcagcggcatcaatggcgatattcgggctaaaaagatcgcctctatcgctgacgtgtgtgagtccatgaaagaacagctgcttgttctggtggagtgggccaagtacattcccgcgttttgcgagctccctctggatgaccaggtcgcccttctgcgcgctcacgccggggaacatctcctgctgggagctaccaagagaagcatggtgttcaaagacgtgctcctgcttggcaacgattatatcgtcccccggcactgtcctgagctggccgaaatgtccagagtttctattcgcatcctcgacgagctggtgcttccgtttcaggaactgcaaattgatgacaatgagtacgcctacctcaaggctatcattttctttgatcccgacgcgaaagggctgagcgatcctggaaagatcaaacggctgagatcccaggtgcaggtcagcctcgaggactatatcaacgatcgccagtacgactctcggggcagattcggggaactgcttctgctcctgcccacgcttcaatccattacctggcagatgatcgagcagattcaatttatcaagctgttcggaatggccaaaattgataatctcctgcaggaaatgctgctctgaggactagtccctgttcccagagcccacttttttttctttttttgaaataaaatagcctgtctttcagatctcaaaggctcttttcagagccaccaaaaaaaaaaaaaaaaaaaaaaaaaaaaaaaaaaaaaaaaaaaaaaaaaaaaaaaaaaaaaaaaaaaaaaaaaaaaaaaaaaaaaaaaaaaaaaaaaaaaa

SEQ ID NO: 3600 - RNA, 1400 nt, synthetic construct
  misc_feature 1..1400: note = mRNA a-1 (hSL-A100) (opt5) from Homo sapiens__NP_000448.3__HNF4A(1-375)(S143A)
  source 1..1400: mol_type = other RNA
aggagagtcccgcagtcggcgtccagcggctctgcttgttcgtgtgtgtgtcgttgcaggccttattcaagcttaccatgagactgagcaagaccctcgtggacatggatatggccgactactccgctgccctggatcccgcgtatacaacgcttgagttcgaaaacgtccaggttctgaccatgggcaatgacacatctcctagcgaggggaccaacctcaatgctccgaactccctgggagtgtctgccctttgcgccatctgtggcgatcgggctacagggaaacactacggagccagctcctgcgacggctgtaaggggtttttccgcagatctgtgcggaaaaatcatatgtatagctgccgcttttccagacaatgtgtcgtggataaggacaaacggaaccagtgccgctactgtagactgaagaagtgcttccgggctggaatgaaaaaggaagccgttcagaatgagcgcgatagaattagcacccggcgctctgcgtatgaagactccagcctcccctctatcaacgccctgctgcaggctgaggtgctctccagacaaattacaagccctgtctctggcatcaatggcgatattcgggccaaaaagatcgcttccatcgccgacgtgtgtgagagcatgaaagaacagctgcttgttctggtggagtgggcgaagtacattcccgccttttgcgaactccctctggatgaccaggtcgcccttctgcgcgcccacgctggggagcatctcctgctgggagccaccaagagatccatggtgttcaaagacgtgctcctgcttggcaacgattatatcgtcccccggcactgtcctgagctggccgaaatgtctagagttagcattcgcatcctcgacgagctggtgcttccgtttcaggaactgcaaattgatgacaatgagtacgcttacctcaaggcgatcattttctttgatcccgacgccaaagggctgtccgatcctggaaagatcaaacggctgagaagccaggtgcaggtctctctcgaagactatatcaacgatcgccagtacgactcccggggcagattcggggagctgcttctgctcctgcccacgcttcaaagcattacctggcagatgatcgagcagattcaatttatcaagctgttcggaatggctaaaattgataatctcctgcaggaaatgctgctctgaggactagtccctgttcccagagcccacttttttttctttttttgaaataaaatagcctgtctttcagatctcaaaggctcttttcagagccaccaaaaaaaaaaaaaaaaaaaaaaaaaaaaaaaaaaaaaaaaaaaaaaaaaaaaaaaaaaaaaaaaaaaaaaaaaaaaaaaaaaaaaaaaaaaaaaaaaaaaa

SEQ ID NO: 3601 - RNA, 1400 nt, synthetic construct
  misc_feature 1..1400: note = mRNA a-1 (hSL-A100) (opt5) from Homo sapiens__NP_000448.3__HNF4A(1-375)(T166A)
  source 1..1400: mol_type = other RNA
aggagagtcccgcagtcggcgtccagcggctctgcttgttcgtgtgtgtgtcgttgcaggccttattcaagcttaccatgagactgagcaagaccctcgtggacatggatatggccgactactccgctgccctggatcccgcgtatacaacgcttgagttcgaaaacgtccaggttctgaccatgggcaatgacacatctcctagcgaggggaccaacctcaatgctccgaactccctgggagtgtctgccctttgcgccatctgtggcgatcgggctacagggaaacactacggagccagctcctgcgacggctgtaaggggtttttccgcagatctgtgcggaaaaatcatatgtatagctgccgcttttccagacaatgtgtcgtggataaggacaaacggaaccagtgccgctactgtagactgaagaagtgcttccgggctggaatgaaaaaggaagccgttcagaatgagcgcgatagaattagcacccggcgcagctcctatgaagacagctctctcccctccatcaacgcgctgctgcaggccgaggtgctcagcagacaaattgcttctcctgtctccggcatcaatggcgatattcgggccaaaaagatcgctagcatcgccgacgtgtgtgagtccatgaaagaacagctgcttgttctggtggagtgggcgaagtacattcccgccttttgcgaactccctctggatgaccaggtcgcccttctgcgcgcccacgctggggagcatctcctgctgggagccacaaagagatctatggtgttcaaagacgtgctcctgcttggcaacgattatatcgtcccccggcactgtcctgagctggccgaaatgagcagagtttccattcgcatcctcgacgagctggtgcttccgtttcaggaactgcaaattgatgacaatgagtacgcttacctcaaggcgatcattttctttgatcccgacgccaaagggctgagcgatcctggaaagatcaaacggctgagatctcaggtgcaggtctccctcgaagactatatcaacgatcgccagtacgacagccggggcagattcggggagctgcttctgctcctgcccacccttcaatctattacgtggcagatgatcgagcagattcaatttatcaagctgttcggaatggctaaaattgataatctcctgcaggaaatgctgctctgaggactagtccctgttcccagagcccacttttttttctttttttgaaataaaatagcctgtctttcagatctcaaaggctcttttcagagccaccaaaaaaaaaaaaaaaaaaaaaaaaaaaaaaaaaaaaaaaaaaaaaaaaaaaaaaaaaaaaaaaaaaaaaaaaaaaaaaaaaaaaaaaaaaaaaaaaaaaaa

SEQ ID NO: 3602 - RNA, 1400 nt, synthetic construct
  misc_feature 1..1400: note = mRNA a-1 (hSL-A100) (opt5) from Homo sapiens__NP_000448.3__HNF4A(1-375)(S167E)
  source 1..1400: mol_type = other RNA
aggagagtcccgcagtcggcgtccagcggctctgcttgttcgtgtgtgtgtcgttgcaggccttattcaagcttaccatgagactgagcaagaccctcgtggacatggatatggccgactactccgctgccctggatcccgcgtatacaacgcttgagttcgaaaacgtccaggttctgaccatgggcaatgacacatctcctagcgaggggaccaacctcaatgctccgaactccctgggagtgtctgccctttgcgccatctgtggcgatcgggctacagggaaacactacggagccagctcctgcgacggctgtaaggggtttttccgcagatctgtgcggaaaaatcatatgtatagctgccgcttttccagacaatgtgtcgtggataaggacaaacggaaccagtgccgctactgtagactgaagaagtgcttccgggctggaatgaaaaaggaagccgttcagaatgagcgcgatagaattagcacccggagatcttcctatgaagacagctctctcccctccatcaacgcgctgctgcaggccgaggtgctcagccgccaaattacagagcctgtctctggcatcaatggcgatattcgggctaaaaagatcgcctccatcgctgacgtgtgtgaaagcatgaaagagcagctgcttgttctggtggaatgggccaagtacattcccgcgttttgcgagctccctctggatgaccaggtcgcccttctgcgcgctcacgccggggagcatctcctgctgggagctaccaagagatccatggtgttcaaagacgtgctcctgcttggcaacgattatatcgtcccccggcactgtcctgaactggccgagatgtctagagttagcattcgcatcctcgacgaactggtgcttccgtttcaggagctgcaaattgatgacaatgaatacgcctacctcaaggctatcattttctttgatcccgacgcgaaagggctgtccgatcctggaaagatcaaacggctgagaagccaggtgcaggtctctctcgaggactatatcaacgatcgccagtacgactcccggggcagattcggggagctgcttctgctcctgcccacgcttcaaagcattacctggcagatgatcgaacagattcaatttatcaagctgttcggaatggccaaaattgataatctcctgcaggagatgctgctctgaggactagtccctgttcccagagcccacttttttttctttttttgaaataaaatagcctgtctttcagatctcaaaggctcttttcagagccaccaaaaaaaaaaaaaaaaaaaaaaaaaaaaaaaaaaaaaaaaaaaaaaaaaaaaaaaaaaaaaaaaaaaaaaaaaaaaaaaaaaaaaaaaaaaaaaaaaaaaa

SEQ ID NO: 3603 - RNA, 1400 nt, synthetic construct
  misc_feature 1..1400: note = mRNA a-1 (hSL-A100) (opt5) from Homo sapiens__NP_000448.3__HNF4A(1-375)(S167A)
  source 1..1400: mol_type = other RNA
aggagagtcccgcagtcggcgtccagcggctctgcttgttcgtgtgtgtgtcgttgcaggccttattcaagcttaccatgagactgagcaagaccctcgtggacatggatatggccgactactccgctgccctggatcccgcgtatacaacgcttgagttcgaaaacgtccaggttctgaccatgggcaatgacacatctcctagcgaggggaccaacctcaatgctccgaactccctgggagtgtctgccctttgcgccatctgtggcgatcgggctacagggaaacactacggagccagctcctgcgacggctgtaaggggtttttccgcagatctgtgcggaaaaatcatatgtatagctgccgcttttccagacaatgtgtcgtggataaggacaaacggaaccagtgccgctactgtagactgaagaagtgcttccgggctggaatgaaaaaggaagccgttcagaatgagcgcgatagaattagcacccggagatcttcctatgaagacagctctctcccctccatcaacgcgctgctgcaggccgaggtgctcagccgccaaattacagctcctgtctctggcatcaatggcgatattcgggccaaaaagatcgcttccatcgccgacgtgtgtgagagcatgaaagaacagctgcttgttctggtggagtgggcgaagtacattcccgccttttgcgaactccctctggatgaccaggtcgcccttctgcgcgcccacgctggggagcatctcctgctgggagccaccaagagatccatggtgttcaaagacgtgctcctgcttggcaacgattatatcgtcccccggcactgtcctgagctggccgaaatgtctagagttagcattcgcatcctcgacgagctggtgcttccgtttcaggaactgcaaattgatgacaatgagtacgcttacctcaaggcgatcattttctttgatcccgacgccaaagggctgtccgatcctggaaagatcaaacggctgagaagccaggtgcaggtctctctcgaagactatatcaacgatcgccagtacgactcccggggcagattcggggagctgcttctgctcctgcccacgcttcaaagcattacctggcagatgatcgagcagattcaatttatcaagctgttcggaatggctaaaattgataatctcctgcaggaaatgctgctctgaggactagtccctgttcccagagcccacttttttttctttttttgaaataaaatagcctgtctttcagatctcaaaggctcttttcagagccaccaaaaaaaaaaaaaaaaaaaaaaaaaaaaaaaaaaaaaaaaaaaaaaaaaaaaaaaaaaaaaaaaaaaaaaaaaaaaaaaaaaaaaaaaaaaaaaaaaaaaa

SEQ ID NO: 3604 - RNA, 1400 nt, synthetic construct; identical to SEQ ID NO: 3603
  misc_feature 1..1400: note = mRNA a-1 (hSL-A100) (opt5) from Homo sapiens__NP_000448.3__HNF4A(1-375)(S167A_S378A_T429A_T432A_ S436A)
  source 1..1400: mol_type = other RNA

SEQ ID NO: 3605 - RNA, 1400 nt, synthetic construct; identical to SEQ ID NO: 3602
  misc_feature 1..1400: note = mRNA a-1 (hSL-A100) (opt5) from Homo sapiens__NP_000448.3__HNF4A(1-375)(S167E_S378E_T429E_T432E_ S436E)
  source 1..1400: mol_type = other RNA

SEQ ID NO: 3606 - RNA, 1400 nt, synthetic construct
  misc_feature 1..1400: note = mRNA a-1 (hSL-A100) (opt5) from Homo sapiens__NP_000448.3__HNF4A(1-375)(S87A)
  source 1..1400: mol_type = other RNA
aggagagtcccgcagtcggcgtccagcggctctgcttgttcgtgtgtgtgtcgttgcaggccttattcaagcttaccatgagactgagcaagaccctcgtggacatggatatggccgactactccgctgccctggatcccgcgtatacaacgcttgagttcgaaaacgtccaggttctgaccatgggcaatgacacatctcctagcgaggggaccaacctcaatgctccgaactccctgggagtgtctgccctttgcgccatctgtggcgatcgggctacagggaaacactacggagccagctcctgcgacggctgtaaggggtttttccgcagagctgtgcggaaaaatcatatgtattcttgccgctttagcagacaatgtgtcgtggataaggacaaacggaaccagtgccgctactgtagactgaagaagtgcttccgggccggaatgaaaaaggaagcggttcagaatgagcgcgatagaatttccacccggcgcagctcttatgaagactccagcctcccctctatcaacgccctgctgcaggctgaggtgctctccagacaaattacaagccctgtctctggcatcaatggcgatattcgggccaaaaagatcgcttccatcgccgacgtgtgtgagagcatgaaagaacagctgcttgttctggtggagtgggcgaagtacattcccgccttttgcgaactccctctggatgaccaggtcgcccttctgcgcgcccacgctggggagcatctcctgctgggagccaccaagagatccatggtgttcaaagacgtgctcctgcttggcaacgattatatcgtcccccggcactgtcctgagctggccgaaatgtctagagttagcattcgcatcctcgacgagctggtgcttccgtttcaggaactgcaaattgatgacaatgagtacgcttacctcaaggcgatcattttctttgatcccgacgccaaagggctgtccgatcctggaaagatcaaacggctgagaagccaggtgcaggtctctctcgaagactatatcaacgatcgccagtacgactcccggggcagattcggggagctgcttctgctcctgcccacgcttcaaagcattacctggcagatgatcgagcagattcaatttatcaagctgttcggaatggctaaaattgataatctcctgcaggaaatgctgctctgaggactagtccctgttcccagagcccacttttttttctttttttgaaataaaatagcctgtctttcagatctcaaaggctcttttcagagccaccaaaaaaaaaaaaaaaaaaaaaaaaaaaaaaaaaaaaaaaaaaaaaaaaaaaaaaaaaaaaaaaaaaaaaaaaaaaaaaaaaaaaaaaaaaaaaaaaaaaaa

SEQ ID NO: 3607 - RNA, 1400 nt, synthetic construct
  misc_feature 1..1400: note = mRNA a-1 (hSL-A100) (opt5) from Homo sapiens__NP_000448.3__HNF4A(1-375)(S87E)
  source 1..1400: mol_type = other RNA
aggagagtcccgcagtcggcgtccagcggctctgcttgttcgtgtgtgtgtcgttgcaggccttattcaagcttaccatgagactgagcaagaccctcgtggacatggatatggccgactactccgctgccctggatcccgcgtatacaacgcttgagttcgaaaacgtccaggttctgaccatgggcaatgacacatctcctagcgaggggaccaacctcaatgctccgaactccctgggagtgtctgccctttgcgccatctgtggcgatcgggctacagggaaacactacggagccagctcctgcgacggctgtaaggggtttttccgcagagaagtgcggaaaaatcatatgtattcttgccgctttagcagacaatgtgtcgtggataaggacaaacggaaccagtgccgctactgtagactgaagaagtgcttccgggctggaatgaaaaaggaggccgttcagaatgaacgcgatagaatttccacccggcgcagctcttatgaggactccagcctcccctctatcaacgcgctgctgcaggccgaggtgctctccagacaaattacaagccctgtctctggcatcaatggcgatattcgggctaaaaagatcgcctccatcgctgacgtgtgtgaaagcatgaaagagcagctgcttgttctggtggaatgggccaagtacattcccgcgttttgcgagctccctctggatgaccaggtcgcccttctgcgcgctcacgccggggagcatctcctgctgggagctaccaagagatccatggtgttcaaagacgtgctcctgcttggcaacgattatatcgtcccccggcactgtcctgaactggccgagatgtctagagttagcattcgcatcctcgacgaactggtgcttccgtttcaggagctgcaaattgatgacaatgaatacgcctacctcaaggctatcattttctttgatcccgacgcgaaagggctgtccgatcctggaaagatcaaacggctgagaagccaggtgcaggtctctctcgaggactatatcaacgatcgccagtacgactcccggggcagattcggggagctgcttctgctcctgcccacgcttcaaagcattacctggcagatgatcgaacagattcaatttatcaagctgttcggaatggccaaaattgataatctcctgcaggagatgctgctctgaggactagtccctgttcccagagcccacttttttttctttttttgaaataaaatagcctgtctttcagatctcaaaggctcttttcagagccaccaaaaaaaaaaaaaaaaaaaaaaaaaaaaaaaaaaaaaaaaaaaaaaaaaaaaaaaaaaaaaaaaaaaaaaaaaaaaaaaaaaaaaaaaaaaaaaaaaaaaa

SEQ ID NO: 3608 - RNA, 1400 nt, synthetic construct
  misc_feature 1..1400: note = mRNA a-1 (hSL-A100) (opt5) from Homo sapiens__NP_000448.3__HNF4A(1-375)(R2V)
  source 1..1400: mol_type = other RNA
aggagagtcccgcagtcggcgtccagcggctctgcttgttcgtgtgtgtgtcgttgcaggccttattcaagcttaccatggtgctgagcaagaccctcgtcgacatggatatggccgactactccgctgccctggatcccgcgtatacaacgcttgagttcgaaaacgttcaggtgctgaccatgggcaatgacacatctcctagcgaggggaccaacctcaatgctccgaactccctgggagtgtctgccctttgcgccatctgtggcgatagagctacagggaaacactacggagccagctcctgcgacggctgtaaggggtttttccggcgctctgtccggaaaaatcatatgtatagctgcagattttcccgccaatgtgtggttgataaggacaaaagaaaccagtgccggtactgtcgcctgaagaagtgcttcagagctggaatgaaaaaggaagccgtgcagaatgagcgggatcgcattagcaccagacggtcttcctatgaagacagctctctcccctccatcaacgcgctgctgcaggccgaggtcctcagccgccaaattacatctcctgtgtccggcatcaatggcgatattagagctaaaaagatcgccagcatcgctgacgtttgtgagtccatgaaagaacagctgcttgtgctggtcgagtgggccaagtacattcccgcgttttgcgaactccctctggatgaccaggtggcccttctgcgggctcacgccggggagcatctcctgctgggagctaccaagcgctctatggtgttcaaagacgtcctcctgcttggcaacgattatatcgttcccagacactgtcctgagctggccgaaatgagccgggtgtccattagaatcctcgacgagctggtgcttccgtttcaggaactgcaaattgatgacaatgagtacgcctacctcaaggctatcattttctttgatcccgacgcgaaagggctgagcgatcctggaaagatcaaacgcctgcggtctcaggtccaggtgtccctcgaagactatatcaacgatagacagtacgacagccgcggccggttcggggagctgcttctgctcctgcccacgcttcaatctattacctggcagatgatcgagcagattcaatttatcaagctgttcggaatggccaaaattgataatctcctgcaggaaatgctgctctgaggactagtccctgttcccagagcccacttttttttctttttttgaaataaaatagcctgtctttcagatctcaaaggctcttttcagagccaccaaaaaaaaaaaaaaaaaaaaaaaaaaaaaaaaaaaaaaaaaaaaaaaaaaaaaaaaaaaaaaaaaaaaaaaaaaaaaaaaaaaaaaaaaaaaaaaaaaaaa

SEQ ID NO: 3609 - RNA, 1400 nt, synthetic construct
  misc_feature 1..1400: note = mRNA a-1 (hSL-A100) (opt5) from Homo sapiens__NP_000448.3__HNF4A(1-375)(R2V_K5V)
  source 1..1400: mol_type = other RNA
aggagagtcccgcagtcggcgtccagcggctctgcttgttcgtgtgtgtgtcgttgcaggccttattcaagcttaccatggtgctgagcgtcaccctcgttgacatggatatggccgactactccgctgccctggatcccgcgtatacaacgcttgagttcgaaaacgtccaggtgctgaccatgggcaatgacacatctcctagcgaggggaccaacctcaatgctccgaactccctgggagtgtctgccctttgcgccatctgtggcgatagagctacagggaagcactacggagccagctcctgcgacggctgtaaagggtttttccggcgctctgtgagaaagaatcatatgtatagctgccggttttcccgccaatgtgttgtggataaagacaagagaaaccagtgccggtactgtcgcctgaaaaagtgcttcagagctggaatgaagaaagaagccgtccagaatgagcgggatcgcattagcaccagacggtcttcctatgaagacagctctctcccctccatcaacgcgctgctgcaggccgaggtgctcagccgccaaattacatctcctgtttccggcatcaatggcgatattagagctaagaaaatcgccagcatcgctgacgtgtgtgagtccatgaaggaacagctgcttgtcctggtggagtgggccaaatacattcccgcgttttgcgaactccctctggatgaccaggtggcccttctgcgggctcacgccggggagcatctcctgctgggagctaccaagcgctctatggtcttcaaggacgttctcctgcttggcaacgattatatcgtgcccagacactgtcctgagctggccgaaatgagccgggtgtccattagaatcctcgacgagctggtccttccgtttcaggaactgcaaattgatgacaatgagtacgcctacctcaaagctatcattttctttgatcccgacgcgaaggggctgagcgatcctggaaaaatcaagcgcctgcggtctcaggtgcaggtttccctcgaagactatatcaacgatagacagtacgacagccgcggccggttcggggagctgcttctgctcctgcccacgcttcaatctattacctggcagatgatcgagcagattcaatttatcaaactgttcggaatggccaagattgataatctcctgcaggaaatgctgctctgaggactagtccctgttcccagagcccacttttttttctttttttgaaataaaatagcctgtctttcagatctcaaaggctcttttcagagccaccaaaaaaaaaaaaaaaaaaaaaaaaaaaaaaaaaaaaaaaaaaaaaaaaaaaaaaaaaaaaaaaaaaaaaaaaaaaaaaaaaaaaaaaaaaaaaaaaaaaaa

SEQ ID NO: 3610 - RNA, 1400 nt, synthetic construct
  misc_feature 1..1400: note = mRNA a-1 (hSL-A100) (opt5) from Homo sapiens__NP_000448.3__HNF4A(1-375)(K179R_K180R)
  source 1..1400: mol_type = other RNA
aggagagtcccgcagtcggcgtccagcggctctgcttgttcgtgtgtgtgtcgttgcaggccttattcaagcttaccatgagactgagcaagaccctcgtggacatggatatggccgactactccgctgccctggatcccgcgtatacaacgcttgagttcgaaaacgtccaggttctgaccatgggcaatgacacatctcctagcgaggggaccaacctcaatgctccgaactccctgggagtgtctgccctttgcgccatctgtggcgatcgggctacagggaaacactacggagccagctcctgcgacggctgtaaggggtttttccgcagatctgtgcggaaaaatcatatgtatagctgccgcttttccagacaatgtgtcgtggataaggacaaacggaaccagtgccgctactgtagactgaagaagtgcttccgggctggaatgaaaaaggaagccgttcagaatgagcgcgatagaattagcacccggcgcagctcctatgaagacagctctctcccctccatcaacgcgctgctgcaggccgaggtgctcagcagacaaattacatctcctgtctccggcatcaatggcgatattcgggctcgcagaatcgccagcatcgctgacgtgtgtgagtccatgaaagaacagctgcttgttctggtggagtgggccaagtacattcccgcgttttgcgaactccctctggatgaccaggtcgcccttctgcgggctcacgccggggagcatctcctgctgggagctaccaaaagatctatggtgttcaaggacgtgctcctgcttggcaacgattatatcgtcccccgccactgtcctgagctggccgaaatgagccgggtttccattagaatcctcgacgagctggtgcttccgtttcaggaactgcaaattgatgacaatgagtacgcctacctcaaggctatcattttctttgatcccgacgcgaaagggctgagcgatcctggaaagatcaaacgcctgcggtctcaggtgcaggtctccctcgaagactatatcaacgatagacagtacgacagccgcggccggttcggggagctgcttctgctcctgcccacgcttcaatctattacctggcagatgatcgagcagattcaatttatcaagctgttcggaatggccaaaattgataatctcctgcaggaaatgctgctctgaggactagtccctgttcccagagcccacttttttttctttttttgaaataaaatagcctgtctttcagatctcaaaggctcttttcagagccaccaaaaaaaaaaaaaaaaaaaaaaaaaaaaaaaaaaaaaaaaaaaaaaaaaaaaaaaaaaaaaaaaaaaaaaaaaaaaaaaaaaaaaaaaaaaaaaaaaaaaa

SEQ ID NO: 3611 - RNA, 1400 nt, synthetic construct
  misc_feature 1..1400: note = mRNA a-1 (hSL-A100) (opt5) from Homo sapiens__NP_000448.3__HNF4A(1-375)(K234R)
  source 1..1400: mol_type = other RNA
aggagagtcccgcagtcggcgtccagcggctctgcttgttcgtgtgtgtgtcgttgcaggccttattcaagcttaccatgagactgagcaagaccctcgtggacatggatatggccgactactccgctgccctggatcccgcgtatacaacgcttgagttcgaaaacgtccaggttctgaccatgggcaatgacacatctcctagcgaggggaccaacctcaatgctccgaactccctgggagtgtctgccctttgcgccatctgtggcgatcgggctacagggaaacactacggagccagctcctgcgacggctgtaaggggtttttccgcagatctgtgcggaaaaatcatatgtatagctgccgcttttccagacaatgtgtcgtggataaggacaaacggaaccagtgccgctactgtagactgaagaagtgcttccgggctggaatgaaaaaggaagccgttcagaatgagcgcgatagaattagcacccggcgcagctcctatgaagacagctctctcccctccatcaacgcgctgctgcaggccgaggtgctcagcagacaaattacatctcctgtctccggcatcaatggcgatattcgggctaaaaagatcgccagcatcgctgacgtgtgtgagtccatgaaagaacagctgcttgttctggtggagtgggccaagtacattcccgcgttttgcgaactccctctggatgaccaggtcgcccttctgcgcgctcacgccggggagcatctcctgctgggagctaccagacggtctatggtgttcaaggacgtgctcctgcttggcaacgattatatcgtccccagacactgtcctgagctggccgaaatgagccgcgtttccattcggatcctcgacgagctggtgcttccgtttcaggaactgcaaattgatgacaatgagtacgcctacctcaaagctatcattttctttgatcccgacgcgaaggggctgagcgatcctggaaaaatcaagagactgcgctctcaggtgcaggtctccctcgaagactatatcaacgatcggcagtacgacagcagaggccgcttcggggagctgcttctgctcctgcccacgcttcaatctattacctggcagatgatcgagcagattcaatttatcaaactgttcggaatggccaagattgataatctcctgcaggaaatgctgctctgaggactagtccctgttcccagagcccacttttttttctttttttgaaataaaatagcctgtctttcagatctcaaaggctcttttcagagccaccaaaaaaaaaaaaaaaaaaaaaaaaaaaaaaaaaaaaaaaaaaaaaaaaaaaaaaaaaaaaaaaaaaaaaaaaaaaaaaaaaaaaaaaaaaaaaaaaaaaaa

SEQ ID NO: 3612 - RNA, 1400 nt, synthetic construct
  misc_feature 1..1400: note = mRNA a-1 (hSL-A100) (opt5) from Homo sapiens__NP_000448.3__HNF4A(1-375)(K300R)
  source 1..1400: mol_type = other RNA
aggagagtcccgcagtcggcgtccagcggctctgcttgttcgtgtgtgtgtcgttgcaggccttattcaagcttaccatgagactgagcaagaccctcgtggacatggatatggccgactactccgctgccctggatcccgcgtatacaacgcttgagttcgaaaacgtccaggttctgaccatgggcaatgacacatctcctagcgaggggaccaacctcaatgctccgaactccctgggagtgtctgccctttgcgccatctgtggcgatcgggctacagggaaacactacggagccagctcctgcgacggctgtaaggggtttttccgcagatctgtgcggaaaaatcatatgtatagctgccgcttttccagacaatgtgtcgtggataaggacaaacggaaccagtgccgctactgtagactgaagaagtgcttccgggctggaatgaaaaaggaagccgttcagaatgagcgcgatagaattagcacccggcgcagctcctatgaagacagctctctcccctccatcaacgcgctgctgcaggccgaggtgctcagcagacaaattacatctcctgtctccggcatcaatggcgatattcgggctaaaaagatcgccagcatcgctgacgtgtgtgagtccatgaaagaacagctgcttgttctggtggagtgggccaagtacattcccgcgttttgcgaactccctctggatgaccaggtcgcccttctgcgcgctcacgccggggagcatctcctgctgggagctaccaagagatctatggtgttcaaagacgtgctcctgcttggcaacgattatatcgtcccccggcactgtcctgagctggccgaaatgagcagagtttccattcgcatcctcgacgagctggtgcttccgtttcaggaactgcaaattgatgacaatgagtacgcctacctcaaggctatcattttctttgatcccgacgcgcgggggctgagcgatcctggaaaaatcaagagactgcgctctcaggtgcaggtctccctcgaagactatatcaacgatcggcagtacgacagcagaggccgcttcggggagctgcttctgctcctgcccacgcttcaatctattacctggcagatgatcgagcagattcaatttatcaaactgttcggaatggccaagattgataatctcctgcaggaaatgctgctctgaggactagtccctgttcccagagcccacttttttttctttttttgaaataaaatagcctgtctttcagatctcaaaggctcttttcagagccaccaaaaaaaaaaaaaaaaaaaaaaaaaaaaaaaaaaaaaaaaaaaaaaaaaaaaaaaaaaaaaaaaaaaaaaaaaaaaaaaaaaaaaaaaaaaaaaaaaaaaa

SEQ ID NO: 3613 - RNA, 1400 nt, synthetic construct
  misc_feature 1..1400: note = mRNA a-1 (hSL-A100) (opt5) from Homo sapiens__NP_000448.3__HNF4A(1-375)(K300R_K307R_K309R)
  source 1..1400: mol_type = other RNA
aggagagtcccgcagtcggcgtccagcggctctgcttgttcgtgtgtgtgtcgttgcaggccttattcaagcttaccatgagactgagcaagaccctcgtggacatggatatggccgactactccgctgccctggatcccgcgtatacaacgcttgagttcgaaaacgtccaggttctgaccatgggcaatgacacatctcctagcgaggggaccaacctcaatgctccgaactccctgggagtgtctgccctttgcgccatctgtggcgatcgggctacagggaaacactacggagccagctcctgcgacggctgtaaggggtttttccgcagatctgtgcggaaaaatcatatgtatagctgccgcttttccagacaatgtgtcgtggataaggacaaacggaaccagtgccgctactgtagactgaagaagtgcttccgggctggaatgaaaaaggaagccgttcagaatgagcgcgatagaattagcacccggcgcagctcctatgaagacagctctctcccctccatcaacgcgctgctgcaggccgaggtgctcagcagacaaattacatctcctgtctccggcatcaatggcgatattcgggctaaaaagatcgccagcatcgctgacgtgtgtgagtccatgaaagaacagctgcttgttctggtggagtgggccaagtacattcccgcgttttgcgaactccctctggatgaccaggtcgcccttctgcgcgctcacgccggggagcatctcctgctgggagctaccaagagatctatggtgttcaaagacgtgctcctgcttggcaacgattatatcgtcccccggcactgtcctgagctggccgaaatgagcagagtttccattcgcatcctcgacgagctggtgcttccgtttcaggaactgcaaattgatgacaatgagtacgcctacctcaaggctatcattttctttgatcccgacgcgcgggggctgagcgatcctggaagaatccgccggctgagatctcaggtgcaggtctccctcgaagactatatcaacgatcgccagtacgacagccggggcagattcggggagctgcttctgctcctgcccacgcttcaatctattacctggcagatgatcgagcagattcaatttatcaaactgttcggaatggccaagattgataatctcctgcaggaaatgctgctctgaggactagtccctgttcccagagcccacttttttttctttttttgaaataaaatagcctgtctttcagatctcaaaggctcttttcagagccaccaaaaaaaaaaaaaaaaaaaaaaaaaaaaaaaaaaaaaaaaaaaaaaaaaaaaaaaaaaaaaaaaaaaaaaaaaaaaaaaaaaaaaaaaaaaaaaaaaaaaa

SEQ ID NO: 3614 - RNA, 1400 nt, synthetic construct; identical to SEQ ID NO: 3595
  misc_feature 1..1400: note = mRNA a-1 (hSL-A100) (opt5) from Homo sapiens__NP_000448.3__HNF4A(1-375)(K447R_K470R)
  source 1..1400: mol_type = other RNA

SEQ ID NO: 3615 - RNA, 1400 nt, synthetic construct; identical to SEQ ID NO: 3595
  misc_feature 1..1400: note = mRNA a-1 (hSL-A100) (opt5) from Homo sapiens__NP_000448.3__HNF4A(1-375)(K458R)
  source 1..1400: mol_type = other RNA

SEQ ID NO: 3616 - RNA, 1400 nt, synthetic construct
  misc_feature 1..1400: note = mRNA a-1 (hSL-A100) (opt5) from Homo sapiens__NP_000448.3__HNF4A(1-375)(K106R_K108R_K126R_K127R)
  source 1..1400: mol_type = other RNA
aggagagtcccgcagtcggcgtccagcggctctgcttgttcgtgtgtgtgtcgttgcaggccttattcaagcttaccatgagactgagcaagaccctcgtggacatggatatggccgactactccgctgccctggatcccgcgtatacaacgcttgagttcgaaaacgtccaggttctgaccatgggcaatgacacatctcctagcgaggggaccaacctcaatgctccgaactccctgggagtgtctgccctttgcgccatctgtggcgatcgggctacagggaaacactacggagccagctcctgcgacggctgtaaggggtttttccgcagatctgtgcggaaaaatcatatgtatagctgccgcttttccagacaatgtgtcgtggatcgggaccgcagaaaccagtgccggtactgtcgcctgaagaaatgcttcagagctggaatgcggcgcgaagccgttcagaatgagagagatcggattagcacccgcagatcttcctatgaagacagctctctcccctccatcaacgcgctgctgcaggccgaggtgctcagccggcaaattacatctcctgtctccggcatcaatggcgatattagagctaagaagatcgccagcatcgctgacgtgtgtgagtccatgaaagaacagctgcttgttctggtggagtgggccaagtacattcccgcgttttgcgaactccctctggatgaccaggtcgcccttctgcgcgctcacgccggggagcatctcctgctgggagctaccaaacggtctatggtgttcaaggacgtgctcctgcttggcaacgattatatcgtccccagacactgtcctgagctggccgaaatgagccgcgtttccattcggatcctcgacgagctggtgcttccgtttcaggaactgcaaattgatgacaatgagtacgcctacctcaaagctatcattttctttgatcccgacgcgaaggggctgagcgatcctggaaagatcaaaagactgcgctctcaggtgcaggtctccctcgaagactatatcaacgatcggcagtacgacagcagaggccgcttcggggagctgcttctgctcctgcccacgcttcaatctattacctggcagatgatcgagcagattcaatttatcaagctgttcggaatggccaaaattgataatctcctgcaggaaatgctgctctgaggactagtccctgttcccagagcccacttttttttctttttttgaaataaaatagcctgtctttcagatctcaaaggctcttttcagagccaccaaaaaaaaaaaaaaaaaaaaaaaaaaaaaaaaaaaaaaaaaaaaaaaaaaaaaaaaaaaaaaaaaaaaaaaaaaaaaaaaaaaaaaaaaaaaaaaaaaaaa

SEQ ID NO: 3617 - RNA, 1400 nt, synthetic construct
  misc_feature 1..1400: note = mRNA a-1 (hSL-A100) (opt5) from Homo sapiens__NP_000448.3__HNF4A(1-375)(E285Q)
  source 1..1400: mol_type = other RNA
aggagagtcccgcagtcggcgtccagcggctctgcttgttcgtgtgtgtgtcgttgcaggccttattcaagcttaccatgagactgagcaagaccctcgtggacatggatatggccgactactccgctgccctggatcccgcgtatacaacgcttgagttcgaaaacgtccaggttctgaccatgggcaatgacacatctcctagcgaggggaccaacctcaatgctccgaactccctgggagtgtctgccctttgcgccatctgtggcgatcgggctacagggaaacactacggagccagctcctgcgacggctgtaaggggtttttccgcagatctgtgcggaaaaatcatatgtatagctgccgcttttccagacaatgtgtcgtggataaggacaaacggaaccagtgccgctactgtagactgaagaagtgcttccgggctggaatgaaaaaggaagccgttcagaatgagcgcgatagaattagcacccggcgcagctcctatgaagacagctctctcccctccatcaacgcgctgctgcaggccgaggtgctcagcagacaaattacatctcctgtctccggcatcaatggcgatattcgggctaaaaagatcgccagcatcgctgacgtgtgtgagtccatgaaagaacagctgcttgttctggtggagtgggccaagtacattcccgcgttttgcgaactccctctggatgaccaggtcgcccttctgcgcgctcacgccggggagcatctcctgctgggagctaccaagagatctatggtgttcaaagacgtgctcctgcttggcaacgattatatcgtcccccggcactgtcctgagctggccgaaatgagcagagtttccattcgcatcctcgacgagctggtgcttccgtttcaggaactgcaaattgatgacaatcagtacgcctacctcaaggctatcattttctttgatcccgacgcgaaagggctgagcgatcctggaaagatcaaacggctgagatctcaggtgcaggtctccctcgaggactatatcaacgatcgccaatacgacagccggggcagattcggggaactgcttctgctcctgcccacgcttcagtctattacctggcagatgatcgagcaaattcagtttatcaagctgttcggaatggccaaaattgataatctcctgcaggagatgctgctctgaggactagtccctgttcccagagcccacttttttttctttttttgaaataaaatagcctgtctttcagatctcaaaggctcttttcagagccaccaaaaaaaaaaaaaaaaaaaaaaaaaaaaaaaaaaaaaaaaaaaaaaaaaaaaaaaaaaaaaaaaaaaaaaaaaaaaaaaaaaaaaaaaaaaaaaaaaaaaa

SEQ ID NO: 3618 - RNA, 1400 nt, synthetic construct
  misc_feature 1..1400: note = mRNA a-1 (hSL-A100) (opt5) from Homo sapiens__NP_000448.3__HNF4A(1-375)(T166E)
  source 1..1400: mol_type = other RNA
aggagagtcccgcagtcggcgtccagcggctctgcttgttcgtgtgtgtgtcgttgcaggccttattcaagcttaccatgagactgagcaagaccctcgtggacatggatatggccgactactccgctgccctggatcccgcgtatacaacgcttgagttcgaaaacgtccaggttctgaccatgggcaatgacacatctcctagcgaggggaccaacctcaatgctccgaactccctgggagtgtctgccctttgcgccatctgtggcgatcgggctacagggaaacactacggagccagctcctgcgacggctgtaaggggtttttccgcagatctgtgcggaaaaatcatatgtatagctgccgcttttccagacaatgtgtcgtggataaggacaaacggaaccagtgccgctactgtagactgaagaagtgcttccgggctggaatgaaaaaggaagccgttcagaatgagcgcgatagaattagcacccggcgcagctcctatgaagacagctctctcccctccatcaacgcgctgctgcaggccgaggtgctcagcagacaaattgagtctcctgtctccggcatcaatggcgatattcgggctaaaaagatcgccagcatcgctgacgtgtgtgaatccatgaaagagcagctgcttgttctggtggaatgggccaagtacattcccgcgttttgcgagctccctctggatgaccaggtcgcccttctgcgcgctcacgccggggagcatctcctgctgggagctacaaagagatctatggtgttcaaagacgtgctcctgcttggcaacgattatatcgtcccccggcactgtcctgaactggccgagatgagcagagtttccattcgcatcctcgacgaactggtgcttccgtttcaggagctgcaaattgatgacaatgaatacgcctacctcaaggctatcattttctttgatcccgacgcgaaagggctgagcgatcctggaaagatcaaacggctgagatctcaggtgcaggtctccctcgaggactatatcaacgatcgccagtacgacagccggggcagattcggggagctgcttctgctcctgcccacccttcaatctattacgtggcagatgatcgaacagattcaatttatcaagctgttcggaatggccaaaattgataatctcctgcaggagatgctgctctgaggactagtccctgttcccagagcccacttttttttctttttttgaaataaaatagcctgtctttcagatctcaaaggctcttttcagagccaccaaaaaaaaaaaaaaaaaaaaaaaaaaaaaaaaaaaaaaaaaaaaaaaaaaaaaaaaaaaaaaaaaaaaaaaaaaaaaaaaaaaaaaaaaaaaaaaaaaaaa

SEQ ID NO: 3619 - RNA, 1400 nt, synthetic construct
  misc_feature 1..1400: note = mRNA a-1 (hSL-A100) (opt5) from Homo sapiens__NP_000448.3__HNF4A(1-375)(S148A)
  source 1..1400: mol_type = other RNA
aggagagtcccgcagtcggcgtccagcggctctgcttgttcgtgtgtgtgtcgttgcaggccttattcaagcttaccatgagactgagcaagaccctcgtggacatggatatggccgactactccgctgccctggatcccgcgtatacaacgcttgagttcgaaaacgtccaggttctgaccatgggcaatgacacatctcctagcgaggggaccaacctcaatgctccgaactccctgggagtgtctgccctttgcgccatctgtggcgatcgggctacagggaaacactacggagccagctcctgcgacggctgtaaggggtttttccgcagatctgtgcggaaaaatcatatgtatagctgccgcttttccagacaatgtgtcgtggataaggacaaacggaaccagtgccgctactgtagactgaagaagtgcttccgggctggaatgaaaaaggaagccgttcagaatgagcgcgatagaattagcacccggagatcttcctatgaagacagcgcgctcccctctatcaacgccctgctgcaggctgaggtgctctcccgccaaattacaagccctgtctctggcatcaatggcgatattcgggccaaaaagatcgcttccatcgccgacgtgtgtgagagcatgaaagaacagctgcttgttctggtggagtgggcgaagtacattcccgccttttgcgaactccctctggatgaccaggtcgcccttctgcgcgcccacgctggggagcatctcctgctgggagccaccaagagatccatggtgttcaaagacgtgctcctgcttggcaacgattatatcgtcccccggcactgtcctgagctggccgaaatgtctagagttagcattcgcatcctcgacgagctggtgcttccgtttcaggaactgcaaattgatgacaatgagtacgcttacctcaaggcgatcattttctttgatcccgacgccaaagggctgtccgatcctggaaagatcaaacggctgagaagccaggtgcaggtctctctcgaagactatatcaacgatcgccagtacgactcccggggcagattcggggagctgcttctgctcctgcccacgcttcaaagcattacctggcagatgatcgagcagattcaatttatcaagctgttcggaatggctaaaattgataatctcctgcaggaaatgctgctctgaggactagtccctgttcccagagcccacttttttttctttttttgaaataaaatagcctgtctttcagatctcaaaggctcttttcagagccaccaaaaaaaaaaaaaaaaaaaaaaaaaaaaaaaaaaaaaaaaaaaaaaaaaaaaaaaaaaaaaaaaaaaaaaaaaaaaaaaaaaaaaaaaaaaaaaaaaaaaa

SEQ ID NO: 3620 - RNA, 1400 nt, synthetic construct
  misc_feature 1..1400: note = mRNA a-1 (hSL-A100) (opt5) from Homo sapiens__NP_000448.3__HNF4A(1-375)(S148E)
  source 1..1400: mol_type = other RNA
aggagagtcccgcagtcggcgtccagcggctctgcttgttcgtgtgtgtgtcgttgcaggccttattcaagcttaccatgagactgagcaagaccctcgtggacatggatatggccgactactccgctgccctggatcccgcgtatacaacgcttgagttcgaaaacgtccaggttctgaccatgggcaatgacacatctcctagcgaggggaccaacctcaatgctccgaactccctgggagtgtctgccctttgcgccatctgtggcgatcgggctacagggaaacactacggagccagctcctgcgacggctgtaaggggtttttccgcagatctgtgcggaaaaatcatatgtatagctgccgcttttccagacaatgtgtcgtggataaggacaaacggaaccagtgccgctactgtagactgaagaagtgcttccgggctggaatgaaaaaggaagccgttcagaatgagcgcgatagaattagcacccggagatcttcctatgaagacagcgagctcccctctatcaacgcgctgctgcaggccgaggtgctctcccgccaaattacaagccctgtctctggcatcaatggcgatattcgggctaaaaagatcgcctccatcgctgacgtgtgtgaaagcatgaaagagcagctgcttgttctggtggaatgggccaagtacattcccgcgttttgcgagctccctctggatgaccaggtcgcccttctgcgcgctcacgccggggagcatctcctgctgggagctaccaagagatccatggtgttcaaagacgtgctcctgcttggcaacgattatatcgtcccccggcactgtcctgaactggccgagatgtctagagttagcattcgcatcctcgacgaactggtgcttccgtttcaggagctgcaaattgatgacaatgaatacgcctacctcaaggctatcattttctttgatcccgacgcgaaagggctgtccgatcctggaaagatcaaacggctgagaagccaggtgcaggtctctctcgaggactatatcaacgatcgccagtacgactcccggggcagattcggggagctgcttctgctcctgcccacgcttcaaagcattacctggcagatgatcgaacagattcaatttatcaagctgttcggaatggccaaaattgataatctcctgcaggagatgctgctctgaggactagtccctgttcccagagcccacttttttttctttttttgaaataaaatagcctgtctttcagatctcaaaggctcttttcagagccaccaaaaaaaaaaaaaaaaaaaaaaaaaaaaaaaaaaaaaaaaaaaaaaaaaaaaaaaaaaaaaaaaaaaaaaaaaaaaaaaaaaaaaaaaaaaaaaaaaaaaa

SEQ ID NO: 3621 - RNA, 1400 nt, synthetic construct
  misc_feature 1..1400: note = mRNA a-1 (hSL-A100) (opt5) from Homo sapiens__NP_000448.3__HNF4A(1-375)(S183A)
  source 1..1400: mol_type = other RNA
aggagagtcccgcagtcggcgtccagcggctctgcttgttcgtgtgtgtgtcgttgcaggccttattcaagcttaccatgagactgagcaagaccctcgtggacatggatatggccgactactccgctgccctggatcccgcgtatacaacgcttgagttcgaaaacgtccaggttctgaccatgggcaatgacacatctcctagcgaggggaccaacctcaatgctccgaactccctgggagtgtctgccctttgcgccatctgtggcgatcgggctacagggaaacactacggagccagctcctgcgacggctgtaaggggtttttccgcagatctgtgcggaaaaatcatatgtatagctgccgcttttccagacaatgtgtcgtggataaggacaaacggaaccagtgccgctactgtagactgaagaagtgcttccgggctggaatgaaaaaggaagccgttcagaatgagcgcgatagaattagcacccggagatcttcctatgaagacagctctctcccctccatcaacgcgctgctgcaggccgaggtgctcagccgccaaattacatctcctgtctccggcatcaatggcgatattcgggctaaaaagatcgccgctatcgccgacgtgtgtgagagcatgaaagaacagctgcttgttctggtggagtgggcgaagtacattcccgccttttgcgaactccctctggatgaccaggtcgcccttctgcgcgcccacgctggggagcatctcctgctgggagccaccaagagatccatggtgttcaaagacgtgctcctgcttggcaacgattatatcgtcccccggcactgtcctgagctggccgaaatgtctagagttagcattcgcatcctcgacgagctggtgcttccgtttcaggaactgcaaattgatgacaatgagtacgcttacctcaaggcgatcattttctttgatcccgacgccaaagggctgtccgatcctggaaagatcaaacggctgagaagccaggtgcaggtctctctcgaagactatatcaacgatcgccagtacgactcccggggcagattcggggagctgcttctgctcctgcccacgcttcaaagcattacctggcagatgatcgagcagattcaatttatcaagctgttcggaatggctaaaattgataatctcctgcaggaaatgctgctctgaggactagtccctgttcccagagcccacttttttttctttttttgaaataaaatagcctgtctttcagatctcaaaggctcttttcagagccaccaaaaaaaaaaaaaaaaaaaaaaaaaaaaaaaaaaaaaaaaaaaaaaaaaaaaaaaaaaaaaaaaaaaaaaaaaaaaaaaaaaaaaaaaaaaaaaaaaaaaa

SEQ ID NO: 3622 - RNA, 1400 nt, synthetic construct
  misc_feature 1..1400: note = mRNA a-1 (hSL-A100) (opt5) from Homo sapiens__NP_000448.3__HNF4A(1-375)(S183E)
  source 1..1400: mol_type = other RNA
aggagagtcccgcagtcggcgtccagcggctctgcttgttcgtgtgtgtgtcgttgcaggccttattcaagcttaccatgagactgagcaagaccctcgtggacatggatatggccgactactccgctgccctggatcccgcgtatacaacgcttgagttcgaaaacgtccaggttctgaccatgggcaatgacacatctcctagcgaggggaccaacctcaatgctccgaactccctgggagtgtctgccctttgcgccatctgtggcgatcgggctacagggaaacactacggagccagctcctgcgacggctgtaaggggtttttccgcagatctgtgcggaaaaatcatatgtatagctgccgcttttccagacaatgtgtcgtggataaggacaaacggaaccagtgccgctactgtagactgaagaagtgcttccgggctggaatgaaaaaggaagccgttcagaatgagcgcgatagaattagcacccggagatcttcctatgaagacagctctctcccctccatcaacgcgctgctgcaggccgaggtgctcagccgccaaattacatctcctgtctccggcatcaatggcgatattcgggctaaaaagatcgccgagatcgctgacgtgtgtgaaagcatgaaagagcagctgcttgttctggtggaatgggccaagtacattcccgcgttttgcgagctccctctggatgaccaggtcgcccttctgcgcgctcacgccggggagcatctcctgctgggagctaccaagagatccatggtgttcaaagacgtgctcctgcttggcaacgattatatcgtcccccggcactgtcctgaactggccgagatgtctagagttagcattcgcatcctcgacgaactggtgcttccgtttcaggagctgcaaattgatgacaatgaatacgcctacctcaaggctatcattttctttgatcccgacgcgaaagggctgtccgatcctggaaagatcaaacggctgagaagccaggtgcaggtctctctcgaggactatatcaacgatcgccagtacgactcccggggcagattcggggagctgcttctgctcctgcccacgcttcaaagcattacctggcagatgatcgaacagattcaatttatcaagctgttcggaatggccaaaattgataatctcctgcaggagatgctgctctgaggactagtccctgttcccagagcccacttttttttctttttttgaaataaaatagcctgtctttcagatctcaaaggctcttttcagagccaccaaaaaaaaaaaaaaaaaaaaaaaaaaaaaaaaaaaaaaaaaaaaaaaaaaaaaaaaaaaaaaaaaaaaaaaaaaaaaaaaaaaaaaaaaaaaaaaaaaaaa

SEQ ID NO: 3623 - RNA, 1400 nt, synthetic construct; identical to SEQ ID NO: 3595
  misc_feature 1..1400: note = mRNA a-1 (hSL-A100) (opt5) from Homo sapiens__NP_000448.3__HNF4A(1-375)(S461A)
  source 1..1400: mol_type = other RNA

SEQ ID NO: 3624 - RNA, 1400 nt, synthetic construct; identical to SEQ ID NO: 3595
  misc_feature 1..1400: note = mRNA a-1 (hSL-A100) (opt5) from Homo sapiens__NP_000448.3__HNF4A(1-375)(S461E)
  source 1..1400: mol_type = other RNA

SEQ ID NO: 3625 - RNA, 1400 nt, synthetic construct
  misc_feature 1..1400: note = mRNA a-1 (hSL-A100) (opt5) from Homo sapiens__NP_000448.3__HNF4A(1-375)(S142A_S143A_S313A)
  source 1..1400: mol_type = other RNA
aggagagtcccgcagtcggcgtccagcggctctgcttgttcgtgtgtgtgtcgttgcaggccttattcaagcttaccatgagactgagcaagaccctcgtggacatggatatggccgactactccgctgccctggatcccgcgtatacaacgcttgagttcgaaaacgtccaggttctgaccatgggcaatgacacatctcctagcgaggggaccaacctcaatgctccgaactccctgggagtgtctgccctttgcgccatctgtggcgatcgggctacagggaaacactacggagccagctcctgcgacggctgtaaggggtttttccgcagatctgtgcggaaaaatcatatgtatagctgccgcttttccagacaatgtgtcgtggataaggacaaacggaaccagtgccgctactgtagactgaagaagtgcttccgggctggaatgaaaaaggaagccgttcagaatgagcgcgatagaattagcacccggcgcgcggcctatgaagactcttccctccccagcatcaacgctctgctgcaggccgaggtgctctctagacaaattacatcccctgtcagcggcatcaatggcgatattcgggctaaaaagatcgcctctatcgcggacgtgtgtgagtccatgaaagaacagctgcttgttctggtggagtgggccaagtacattcccgctttttgcgaactccctctggatgaccaggtcgcccttctgcgcgctcacgccggggagcatctcctgctgggagccaccaagagaagcatggtgttcaaagacgtgctcctgcttggcaacgattatatcgtcccccggcactgtcctgagctggctgaaatgtccagagtttctattcgcatcctcgacgagctggtgcttccgtttcaggaactgcaaattgatgacaatgagtacgcgtacctcaaggccatcattttctttgatcccgacgctaaagggctgagcgatcctggaaagatcaaacggctgagagcccaggtgcaggtctccctcgaagactatatcaacgatcgccagtacgacagccggggcagattcggggagctgcttctgctcctgcccacgcttcaatctattacctggcagatgatcgagcagattcaatttatcaagctgttcggaatggccaaaattgataatctcctgcaggaaatgctgctctgaggactagtccctgttcccagagcccacttttttttctttttttgaaataaaatagcctgtctttcagatctcaaaggctcttttcagagccaccaaaaaaaaaaaaaaaaaaaaaaaaaaaaaaaaaaaaaaaaaaaaaaaaaaaaaaaaaaaaaaaaaaaaaaaaaaaaaaaaaaaaaaaaaaaaaaaaaaaaa

SEQ ID NO: 3626 - RNA, 1400 nt, synthetic construct; identical to SEQ ID NO: 3625
  misc_feature 1..1400: note = mRNA a-1 (hSL-A100) (opt5) from Homo sapiens__NP_000448.3__HNF4A(1-375)(S142A_S143A_S313A_K458R)
  source 1..1400: mol_type = other RNA

SEQ ID NO: 3627 - RNA, 1400 nt, synthetic construct
  misc_feature 1..1400: note = mRNA a-1 (hSL-A100) (opt5) from Homo sapiens__NP_000448.3__HNF4A(1-375)(S142A_S143A_S167A_S313A_ S378A_T429A_T432A_S436A_K458R)
  source 1..1400: mol_type = other RNA
aggagagtcccgcagtcggcgtccagcggctctgcttgttcgtgtgtgtgtcgttgcaggccttattcaagcttaccatgagactgagcaagaccctcgtggacatggatatggccgactactccgctgccctggatcccgcgtatacaacgcttgagttcgaaaacgtccaggttctgaccatgggcaatgacacatctcctagcgaggggaccaacctcaatgctccgaactccctgggagtgtctgccctttgcgccatctgtggcgatcgggctacagggaaacactacggagccagctcctgcgacggctgtaaggggtttttccgcagatctgtgcggaaaaatcatatgtatagctgccgcttttccagacaatgtgtcgtggataaggacaaacggaaccagtgccgctactgtagactgaagaagtgcttccgggctggaatgaaaaaggaagccgttcagaatgagcgcgatagaattagcacccggcgcgcggcctatgaagactcttccctccccagcatcaacgctctgctgcaggccgaggtgctctctagacaaattacagctcctgtctccggcatcaatggcgatattcgggccaaaaagatcgcgagcatcgccgacgtgtgtgagtctatgaaagaacagctgcttgttctggtggagtgggctaagtacattcccgccttttgcgaactccctctggatgaccaggtcgcccttctgcgcgcccacgccggggagcatctcctgctgggagctaccaagagatccatggtgttcaaagacgtgctcctgcttggcaacgattatatcgtcccccggcactgtcctgagctggcggaaatgagcagagtttccattcgcatcctcgacgagctggtgcttccgtttcaggaactgcaaattgatgacaatgagtacgcctacctcaaggctatcattttctttgatcccgacgccaaagggctgtctgatcctggaaagatcaaacggctgagagcccaggtgcaggtcagcctcgaagactatatcaacgatcgccagtacgactcccggggcagattcggggagctgcttctgctcctgcccacgcttcaaagcattacctggcagatgatcgagcagattcaatttatcaagctgttcggaatggctaaaattgataatctcctgcaggaaatgctgctctgaggactagtccctgttcccagagcccacttttttttctttttttgaaataaaatagcctgtctttcagatctcaaaggctcttttcagagccaccaaaaaaaaaaaaaaaaaaaaaaaaaaaaaaaaaaaaaaaaaaaaaaaaaaaaaaaaaaaaaaaaaaaaaaaaaaaaaaaaaaaaaaaaaaaaaaaaaaaaa

SEQ ID NO: 3628 - RNA, 1400 nt, synthetic construct
  misc_feature 1..1400: note = mRNA a-1 (hSL-A100) (opt5) from Homo sapiens__NP_000448.3__HNF4A(1-375)(S142A_S143A_S148A_S167A_ S313A_S378A_T429A_T432A_S436A_K458R)
  source 1..1400: mol_type = other RNA
aggagagtcccgcagtcggcgtccagcggctctgcttgttcgtgtgtgtgtcgttgcaggccttattcaagcttaccatgagactgagcaagaccctcgtggacatggatatggccgactactccgctgccctggatcccgcgtatacaacgcttgagttcgaaaacgtccaggttctgaccatgggcaatgacacatctcctagcgaggggaccaacctcaatgctccgaactccctgggagtgtctgccctttgcgccatctgtggcgatcgggctacagggaaacactacggagccagctcctgcgacggctgtaaggggtttttccgcagatctgtgcggaaaaatcatatgtatagctgccgcttttccagacaatgtgtcgtggataaggacaaacggaaccagtgccgctactgtagactgaagaagtgcttccgggctggaatgaaaaaggaagccgttcagaatgagcgcgatagaattagcacccggcgcgcggcctatgaagactctgctctcccctccatcaacgccctgctgcaggctgaggtgctcagcagacaaattacagcccctgtctctggcatcaatggcgatattcgggcgaaaaagatcgcctccatcgctgacgtgtgtgagagcatgaaagaacagctgcttgttctggtggagtgggccaagtacattcccgctttttgcgaactccctctggatgaccaggtcgcccttctgcgcgcccacgctggggagcatctcctgctgggagcgaccaagagatctatggtgttcaaagacgtgctcctgcttggcaacgattatatcgtcccccggcactgtcctgagctggccgaaatgtccagagttagcattcgcatcctcgacgagctggtgcttccgtttcaggaactgcaaattgatgacaatgagtacgcttacctcaaggccatcattttctttgatcccgacgccaaagggctgtccgatcctggaaagatcaaacggctgagagctcaggtgcaggtctctctcgaagactatatcaacgatcgccagtacgacagccggggcagattcggggagctgcttctgctcctgcccacgcttcaatccattacctggcagatgatcgagcagattcaatttatcaagctgttcggaatggccaaaattgataatctcctgcaggaaatgctgctctgaggactagtccctgttcccagagcccacttttttttctttttttgaaataaaatagcctgtctttcagatctcaaaggctcttttcagagccaccaaaaaaaaaaaaaaaaaaaaaaaaaaaaaaaaaaaaaaaaaaaaaaaaaaaaaaaaaaaaaaaaaaaaaaaaaaaaaaaaaaaaaaaaaaaaaaaaaaaaa

SEQ ID NO: 3629 - RNA, 1400 nt, synthetic construct
  misc_feature 1..1400: note = mRNA a-1 (hSL-A100) (opt5) from Homo sapiens__NP_000448.3__HNF4A(1-375)(K106R_K108R_K126R_K127R_ S142A_S143A_S148A_S167A_S313A_S378A_T429A_T432A_S436A_K458R )
  source 1..1400: mol_type = other RNA
aggagagtcccgcagtcggcgtccagcggctctgcttgttcgtgtgtgtgtcgttgcaggccttattcaagcttaccatgagactgagcaagaccctcgtggacatggatatggccgactactccgctgccctggatcccgcgtatacaacgcttgagttcgaaaacgtccaggttctgaccatgggcaatgacacatctcctagcgaggggaccaacctcaatgctccgaactccctgggagtgtctgccctttgcgccatctgtggcgatcgggctacagggaaacactacggagccagctcctgcgacggctgtaaggggtttttccgcagatctgtgcggaaaaatcatatgtatagctgccgcttttccagacaatgtgtcgtggatcgggaccgcagaaaccagtgccggtactgtcgcctgaagaaatgcttcagagctggaatgcggcgcgaagccgttcagaatgagagagatcggattagcacccgcagagcggcctatgaagactctgctctcccctccatcaacgccctgctgcaggctgaggtgctcagccggcaaattacagcccctgtctctggcatcaatggcgatattagagcgaagaagatcgcctccatcgctgacgtgtgtgagagcatgaaagaacagctgcttgttctggtggagtgggccaagtacattcccgctttttgcgaactccctctggatgaccaggtcgcccttctgcgcgcccacgctggggagcatctcctgctgggagcgaccaaacggtctatggtgttcaaggacgtgctcctgcttggcaacgattatatcgtccccagacactgtcctgagctggccgaaatgtcccgcgttagcattcggatcctcgacgagctggtgcttccgtttcaggaactgcaaattgatgacaatgagtacgcttacctcaaagccatcattttctttgatcccgacgccaaggggctgtccgatcctggaaagatcaaaagactgcgcgctcaggtgcaggtctctctcgaagactatatcaacgatcggcagtacgacagcagaggccgcttcggggagctgcttctgctcctgcccacgcttcaatccattacctggcagatgatcgagcagattcaatttatcaagctgttcggaatggccaaaattgataatctcctgcaggaaatgctgctctgaggactagtccctgttcccagagcccacttttttttctttttttgaaataaaatagcctgtctttcagatctcaaaggctcttttcagagccaccaaaaaaaaaaaaaaaaaaaaaaaaaaaaaaaaaaaaaaaaaaaaaaaaaaaaaaaaaaaaaaaaaaaaaaaaaaaaaaaaaaaaaaaaaaaaaaaaaaaaa

SEQ ID NO: 3630 - RNA, 1400 nt, synthetic construct
  misc_feature 1..1400: note = mRNA a-1 (hSL-A100) (opt5) from Homo sapiens__NP_000448.3__HNF4A(1-375)(S142A_S143A_S148A_T166A_ S167A_S313A_S378A_T429A_T432A_S436A_K458R)
  source 1..1400: mol_type = other RNA
aggagagtcccgcagtcggcgtccagcggctctgcttgttcgtgtgtgtgtcgttgcaggccttattcaagcttaccatgagactgagcaagaccctcgtggacatggatatggccgactactccgctgccctggatcccgcgtatacaacgcttgagttcgaaaacgtccaggttctgaccatgggcaatgacacatctcctagcgaggggaccaacctcaatgctccgaactccctgggagtgtctgccctttgcgccatctgtggcgatcgggctacagggaaacactacggagccagctcctgcgacggctgtaaggggtttttccgcagatctgtgcggaaaaatcatatgtatagctgccgcttttccagacaatgtgtcgtggataaggacaaacggaaccagtgccgctactgtagactgaagaagtgcttccgggctggaatgaaaaaggaagccgttcagaatgagcgcgatagaattagcacccggcgcgcggcctatgaagactctgctctcccctccatcaacgccctgctgcaggctgaggtgctcagcagacaaattgccgcgcctgtctctggcatcaatggcgatattcgggccaaaaagatcgcttccatcgccgacgtgtgtgagagcatgaaagaacagctgcttgttctggtggagtgggctaagtacattcccgccttttgcgaactccctctggatgaccaggtcgcccttctgcgcgctcacgcgggggagcatctcctgctgggagccacaaagagatctatggtgttcaaagacgtgctcctgcttggcaacgattatatcgtcccccggcactgtcctgagctggctgaaatgtccagagttagcattcgcatcctcgacgagctggtgcttccgtttcaggaactgcaaattgatgacaatgagtacgcctacctcaaggccatcattttctttgatcccgacgctaaagggctgtccgatcctggaaagatcaaacggctgagagcccaggtgcaggtctctctcgaagactatatcaacgatcgccagtacgacagccggggcagattcggggagctgcttctgctcctgcccacccttcaatccattacgtggcagatgatcgagcagattcaatttatcaagctgttcggaatggcgaaaattgataatctcctgcaggaaatgctgctctgaggactagtccctgttcccagagcccacttttttttctttttttgaaataaaatagcctgtctttcagatctcaaaggctcttttcagagccaccaaaaaaaaaaaaaaaaaaaaaaaaaaaaaaaaaaaaaaaaaaaaaaaaaaaaaaaaaaaaaaaaaaaaaaaaaaaaaaaaaaaaaaaaaaaaaaaaaaaaa

SEQ ID NO: 3631 - RNA, 1400 nt, synthetic construct
  misc_feature 1..1400: note = mRNA a-1 (hSL-A100) (opt5) from Homo sapiens__NP_000448.3__HNF4A(1-375)(S87A_S142A_S143A_S148A_T 166A_S167A_S313A_S378A_T429A_T432A_S436A_K458R)
  source 1..1400: mol_type = other RNA
aggagagtcccgcagtcggcgtccagcggctctgcttgttcgtgtgtgtgtcgttgcaggccttattcaagcttaccatgagactgagcaagaccctcgtggacatggatatggccgactactccgctgccctggatcccgcgtatacaacgcttgagttcgaaaacgtccaggttctgaccatgggcaatgacacatctcctagcgaggggaccaacctcaatgctccgaactccctgggagtgtctgccctttgcgccatctgtggcgatcgggctacagggaaacactacggagccagctcctgcgacggctgtaaggggtttttccgcagagctgtgcggaaaaatcatatgtattcttgccgctttagcagacaatgtgtcgtggataaggacaaacggaaccagtgccgctactgtagactgaagaagtgcttccgggccggaatgaaaaaggaagcggttcagaatgagcgcgatagaatttccacccggcgcgccgcttatgaagacagcgccctcccctctatcaacgctctgctgcaggccgaggtgctctccagacaaattgcggcccctgtcagcggcatcaatggcgatattcgggctaaaaagatcgcctctatcgctgacgtgtgtgagtccatgaaagaacagctgcttgttctggtggagtgggccaagtacattcccgccttttgcgaactccctctggatgaccaggtcgcccttctgcgcgcgcacgccggggagcatctcctgctgggagctacaaagagaagcatggtgttcaaagacgtgctcctgcttggcaacgattatatcgtcccccggcactgtcctgagctggccgaaatgtctagagtttccattcgcatcctcgacgagctggtgcttccgtttcaggaactgcaaattgatgacaatgagtacgcctacctcaaggctatcattttctttgatcccgacgccaaagggctgagcgatcctggaaagatcaaacggctgagagctcaggtgcaggtctccctcgaagactatatcaacgatcgccagtacgactctcggggcagattcggggagctgcttctgctcctgcccacccttcaaagcattacgtggcagatgatcgagcagattcaatttatcaagctgttcggaatggcgaaaattgataatctcctgcaggaaatgctgctctgaggactagtccctgttcccagagcccacttttttttctttttttgaaataaaatagcctgtctttcagatctcaaaggctcttttcagagccaccaaaaaaaaaaaaaaaaaaaaaaaaaaaaaaaaaaaaaaaaaaaaaaaaaaaaaaaaaaaaaaaaaaaaaaaaaaaaaaaaaaaaaaaaaaaaaaaaaaaaa

SEQ ID NO: 3632 - RNA, 1400 nt, synthetic construct
  misc_feature 1..1400: note = mRNA a-1 (hSL-A100) (opt5) from Homo sapiens__NP_000448.3__HNF4A(1-375)(S87A_K106R_K108R_K126R_K 127R_S142A_S143A_S148A_T166A_S167A_S313A_S378A_T429A_T432A_ S436A_K458R)
  source 1..1400: mol_type = other RNA
aggagagtcccgcagtcggcgtccagcggctctgcttgttcgtgtgtgtgtcgttgcaggccttattcaagcttaccatgagactgagcaagaccctcgtggacatggatatggccgactactccgctgccctggatcccgcgtatacaacgcttgagttcgaaaacgtccaggttctgaccatgggcaatgacacatctcctagcgaggggaccaacctcaatgctccgaactccctgggagtgtctgccctttgcgccatctgtggcgatcgggctacagggaaacactacggagccagctcctgcgacggctgtaaggggtttttccgcagagctgtgcggaaaaatcatatgtattcttgccgctttagcagacaatgtgtcgtggatcgggaccgcagaaaccagtgccggtactgtcgcctgaagaaatgcttcagagccggaatgcggcgcgaagcggttcagaatgagagagatcggatttccacccgcagagccgcttatgaagacagcgccctcccctctatcaacgctctgctgcaggccgaggtgctctcccggcaaattgcggcccctgtcagcggcatcaatggcgatattagagctaagaagatcgcctctatcgctgacgtgtgtgagtccatgaaagaacagctgcttgttctggtggagtgggccaagtacattcccgccttttgcgaactccctctggatgaccaggtcgcccttctgcgcgcgcacgccggggagcatctcctgctgggagctacaaaacggagcatggtgttcaaggacgtgctcctgcttggcaacgattatatcgtccccagacactgtcctgagctggccgaaatgtctcgcgtttccattcggatcctcgacgagctggtgcttccgtttcaggaactgcaaattgatgacaatgagtacgcctacctcaaagctatcattttctttgatcccgacgccaaggggctgagcgatcctggaaagatcaaaagactgcgcgctcaggtgcaggtctccctcgaagactatatcaacgatcggcagtacgactctagaggccgcttcggggagctgcttctgctcctgcccacccttcaaagcattacgtggcagatgatcgagcagattcaatttatcaagctgttcggaatggcgaaaattgataatctcctgcaggaaatgctgctctgaggactagtccctgttcccagagcccacttttttttctttttttgaaataaaatagcctgtctttcagatctcaaaggctcttttcagagccaccaaaaaaaaaaaaaaaaaaaaaaaaaaaaaaaaaaaaaaaaaaaaaaaaaaaaaaaaaaaaaaaaaaaaaaaaaaaaaaaaaaaaaaaaaaaaaaaaaaaaa

SEQ ID NO: 3633 - RNA, 1400 nt, synthetic construct
  misc_feature 1..1400: note = mRNA a-1 (hSL-A100) (opt5) from Homo sapiens__NP_000448.3__HNF4A(1-375)(S87A_K106R_K108R_K126R_K 127R)
  source 1..1400: mol_type = other RNA
aggagagtcccgcagtcggcgtccagcggctctgcttgttcgtgtgtgtgtcgttgcaggccttattcaagcttaccatgagactgagcaagaccctcgtggacatggatatggccgactactccgctgccctggatcccgcgtatacaacgcttgagttcgaaaacgtccaggttctgaccatgggcaatgacacatctcctagcgaggggaccaacctcaatgctccgaactccctgggagtgtctgccctttgcgccatctgtggcgatcgggctacagggaaacactacggagccagctcctgcgacggctgtaaggggtttttccgcagagctgtgcggaaaaatcatatgtattcttgccgctttagcagacaatgtgtcgtggatcgggaccgcagaaaccagtgccggtactgtcgcctgaagaaatgcttcagagccggaatgcggcgcgaagcggttcagaatgagagagatcggatttccacccgcagaagctcttatgaagactccagcctcccctctatcaacgccctgctgcaggctgaggtgctctcccggcaaattacaagccctgtctctggcatcaatggcgatattagagccaagaagatcgcttccatcgccgacgtgtgtgagagcatgaaagaacagctgcttgttctggtggagtgggcgaagtacattcccgccttttgcgaactccctctggatgaccaggtcgcccttctgcgcgcccacgctggggagcatctcctgctgggagccaccaaacggtccatggtgttcaaggacgtgctcctgcttggcaacgattatatcgtccccagacactgtcctgagctggccgaaatgtctcgcgttagcattcggatcctcgacgagctggtgcttccgtttcaggaactgcaaattgatgacaatgagtacgcttacctcaaagcgatcattttctttgatcccgacgccaaggggctgtccgatcctggaaagatcaaaagactgcgcagccaggtgcaggtctctctcgaagactatatcaacgatcggcagtacgactccagaggccgcttcggggagctgcttctgctcctgcccacgcttcaaagcattacctggcagatgatcgagcagattcaatttatcaagctgttcggaatggctaaaattgataatctcctgcaggaaatgctgctctgaggactagtccctgttcccagagcccacttttttttctttttttgaaataaaatagcctgtctttcagatctcaaaggctcttttcagagccaccaaaaaaaaaaaaaaaaaaaaaaaaaaaaaaaaaaaaaaaaaaaaaaaaaaaaaaaaaaaaaaaaaaaaaaaaaaaaaaaaaaaaaaaaaaaaaaaaaaaaa

SEQ ID NO: 3634 - RNA, 1400 nt, synthetic construct; identical to SEQ ID NO: 3632
  misc_feature 1..1400: note = mRNA a-1 (hSL-A100) (opt5) from Homo sapiens__NP_000448.3__HNF4A(1-375)(S87A_K106R_K108R_K126R_K 127R_S142A_S143A_S148A_T166A_S167A_S313A_S378A_T429A_T432A_ S436A_K458R_S461A)
  source 1..1400: mol_type = other RNA

SEQ ID NO: 3635 - RNA, 1400 nt, synthetic construct; identical to SEQ ID NO: 3632
  misc_feature 1..1400: note = mRNA a-1 (hSL-A100) (opt5) from Homo sapiens__NP_000448.3__HNF4A(1-375)(S87A_K106R_K108R_K126R_K 127R_S142A_S143A_S148A_T166A_S167A_S313A_S378A_T429A_T432A_ S436A_K458R_S461E)
  source 1..1400: mol_type = other RNA

SEQ ID NO: 3636 - RNA, 1400 nt, synthetic construct
  misc_feature 1..1400: note = mRNA a-1 (hSL-A100) (opt5) from Homo sapiens__NP_000448.3__HNF4A(1-375)(S87A_K106R_K108R_K126R_K 127R_S142A_S143A_S148E_T166A_S167E_S313A_S378E_T429E_T432E_ S436E_K458R_S461E)
  source 1..1400: mol_type = other RNA
aggagagtcccgcagtcggcgtccagcggctctgcttgttcgtgtgtgtgtcgttgcaggccttattcaagcttaccatgagactgagcaagaccctcgtggacatggatatggccgactactccgctgccctggatcccgcgtatacaacgcttgagttcgaaaacgtccaggttctgaccatgggcaatgacacatctcctagcgaggggaccaacctcaatgctccgaactccctgggagtgtctgccctttgcgccatctgtggcgatcgggctacagggaaacactacggagccagctcctgcgacggctgtaaggggtttttccgcagagctgtgcggaaaaatcatatgtattcttgccgctttagcagacaatgtgtcgtggatcgggaccgcagaaaccagtgccggtactgtcgcctgaagaaatgcttcagagccggaatgcggcgcgaagcggttcagaatgagagagatcggatttccacccgcagagccgcttatgaagacagcgagctcccctctatcaacgccctgctgcaggctgaggtgctctcccggcaaattgccgaacctgtcagcggcatcaatggcgatattagagcgaagaagatcgcctctatcgctgacgtgtgtgagtccatgaaagaacagctgcttgttctggtggagtgggccaagtacattcccgctttttgcgagctccctctggatgaccaggtcgcccttctgcgcgcccacgctggggaacatctcctgctgggagcgacaaaacggagcatggtgttcaaggacgtgctcctgcttggcaacgattatatcgtccccagacactgtcctgagctggccgaaatgtctcgcgtttccattcggatcctcgacgagctggtgcttccgtttcaggaactgcaaattgatgacaatgagtacgcttacctcaaagccatcattttctttgatcccgacgccaaggggctgagcgatcctggaaagatcaaaagactgcgcgctcaggtgcaggtctccctcgaggactatatcaacgatcggcagtacgactctagaggccgcttcggggaactgcttctgctcctgcccacccttcaaagcattacgtggcagatgatcgagcagattcaatttatcaagctgttcggaatggccaaaattgataatctcctgcaggaaatgctgctctgaggactagtccctgttcccagagcccacttttttttctttttttgaaataaaatagcctgtctttcagatctcaaaggctcttttcagagccaccaaaaaaaaaaaaaaaaaaaaaaaaaaaaaaaaaaaaaaaaaaaaaaaaaaaaaaaaaaaaaaaaaaaaaaaaaaaaaaaaaaaaaaaaaaaaaaaaaaaaa

SEQ ID NO: 3637 - RNA, 1400 nt, synthetic construct
  misc_feature 1..1400: note = mRNA a-1 (hSL-A100) (opt5) from Homo sapiens__NP_000448.3__HNF4A(1-375)(S87A_K106R_K108R_K126R_K 127R_S142A_S143A_S148A_T166A_S167A_K179R_K180R_S313A_S378A_ T429A_T432A_S436A_K458R_S461E)
  source 1..1400: mol_type = other RNA
aggagagtcccgcagtcggcgtccagcggctctgcttgttcgtgtgtgtgtcgttgcaggccttattcaagcttaccatgagactgagcaagaccctcgtggacatggatatggccgactactccgctgccctggatcccgcgtatacaacgcttgagttcgaaaacgtccaggttctgaccatgggcaatgacacatctcctagcgaggggaccaacctcaatgctccgaactccctgggagtgtctgccctttgcgccatctgtggcgatcgggctacagggaaacactacggagccagctcctgcgacggctgtaaggggtttttccgcagagctgtgcggaaaaatcatatgtattcttgccgctttagcagacaatgtgtcgtggatcgggaccgcagaaaccagtgccggtactgtcgcctgaagaaatgcttcagagccggaatgcggcgcgaagcggttcagaatgagagagatcggatttccacccgcagagccgcttatgaagacagcgccctcccctctatcaacgctctgctgcaggccgaggtgctctcccggcaaattgcggcccctgtcagcggcatcaatggcgatattagagctcgccggatcgcctctatcgctgacgtgtgtgagtccatgaaggaacagctgcttgttctggtggagtgggccaagtacattcccgccttttgcgaactccctctggatgaccaggtcgcccttctgagagcgcacgccggggagcatctcctgctgggagctacaaaacgcagcatggtgttcaaggacgtgctcctgcttggcaacgattatatcgtcccccggcactgtcctgagctggccgaaatgtctagagtttccattcgcatcctcgacgagctggtgcttccgtttcaggaactgcaaattgatgacaatgagtacgcctacctcaaagctatcattttctttgatcccgacgccaaggggctgagcgatcctggaaaaatcaagcggctgagagctcaggtgcaggtctccctcgaagactatatcaacgatcgccagtacgactctcggggcagattcggggagctgcttctgctcctgcccacccttcaaagcattacgtggcagatgatcgagcagattcaatttatcaagctgttcggaatggcgaaaattgataatctcctgcaggaaatgctgctctgaggactagtccctgttcccagagcccacttttttttctttttttgaaataaaatagcctgtctttcagatctcaaaggctcttttcagagccaccaaaaaaaaaaaaaaaaaaaaaaaaaaaaaaaaaaaaaaaaaaaaaaaaaaaaaaaaaaaaaaaaaaaaaaaaaaaaaaaaaaaaaaaaaaaaaaaaaaaaa

SEQ ID NO: 3638 - RNA, 1400 nt, synthetic construct
  misc_feature 1..1400: note = mRNA a-1 (hSL-A100) (opt5) from Homo sapiens__NP_000448.3__HNF4A(1-375)(S87A_K106R_K108R_K126R_K 127R_S142A_S143A_S148A_T166A_S167A_K300R_K307R_K309R_S313A_ S378A_T429A_T432A_S436A_K458R_S461E)
  source 1..1400: mol_type = other RNA
aggagagtcccgcagtcggcgtccagcggctctgcttgttcgtgtgtgtgtcgttgcaggccttattcaagcttaccatgagactgagcaagaccctcgtggacatggatatggccgactactccgctgccctggatcccgcgtatacaacgcttgagttcgaaaacgtccaggttctgaccatgggcaatgacacatctcctagcgaggggaccaacctcaatgctccgaactccctgggagtgtctgccctttgcgccatctgtggcgatcgggctacagggaaacactacggagccagctcctgcgacggctgtaaggggtttttccgcagagctgtgcggaaaaatcatatgtattcttgccgctttagcagacaatgtgtcgtggatcgggaccgcagaaaccagtgccggtactgtcgcctgaagaaatgcttcagagccggaatgcggcgcgaagcggttcagaatgagagagatcggatttccacccgcagagccgcttatgaagacagcgccctcccctctatcaacgctctgctgcaggccgaggtgctctcccggcaaattgcggcccctgtcagcggcatcaatggcgatattagagctaagaagatcgcctctatcgctgacgtgtgtgagtccatgaaagaacagctgcttgttctggtggagtgggccaagtacattcccgccttttgcgaactccctctggatgaccaggtcgcccttctgcgcgcgcacgccggggagcatctcctgctgggagctacaaaacggagcatggtgttcaaggacgtgctcctgcttggcaacgattatatcgtccccagacactgtcctgagctggccgaaatgtctcgcgtttccattcggatcctcgacgagctggtgcttccgtttcaggaactgcaaattgatgacaatgagtacgcctacctcaaagctatcattttctttgatcccgacgccagagggctgagcgatcctggacgcatccggagactgcgcgctcaggtgcaggtctccctcgaagactatatcaacgatcggcagtacgactctagaggccgcttcggggagctgcttctgctcctgcccacccttcaaagcattacgtggcagatgatcgagcagattcaatttatcaagctgttcggaatggcgaagattgataatctcctgcaggaaatgctgctctgaggactagtccctgttcccagagcccacttttttttctttttttgaaataaaatagcctgtctttcagatctcaaaggctcttttcagagccaccaaaaaaaaaaaaaaaaaaaaaaaaaaaaaaaaaaaaaaaaaaaaaaaaaaaaaaaaaaaaaaaaaaaaaaaaaaaaaaaaaaaaaaaaaaaaaaaaaaaaa

SEQ ID NO: 3639 - RNA, 1400 nt, synthetic construct; identical to SEQ ID NO: 3632
  misc_feature 1..1400: note = mRNA a-1 (hSL-A100) (opt5) from Homo sapiens__NP_000448.3__HNF4A(1-375)(S87A_K106R_K108R_K126R_K 127R_S142A_S143A_S148A_T166A_S167A_S313A_S378A_T429A_T432A_ S436A_K447R_K458R_S461E_K470R)
  source 1..1400: mol_type = other RNA

SEQ ID NO: 3640 - RNA, 1400 nt, synthetic construct
  misc_feature 1..1400: note = mRNA a-1 (hSL-A100) (opt5) from Homo sapiens__NP_000448.3__HNF4A(1-375)(S87A_K106R_K108R_K126R_K 127R_S142A_S143A_S148A_T166A_S167A_K179R_K180R_K234R_K300R_ K307R_K309R_S313A_S378A_T429A_T432A_S436A_K447R_K458R_S461E _K470R)
  source 1..1400: mol_type = other RNA
aggagagtcccgcagtcggcgtccagcggctctgcttgttcgtgtgtgtgtcgttgcaggccttattcaagcttaccatgagactgagcaagaccctcgtggacatggatatggccgactactccgctgccctggatcccgcgtatacaacgcttgagttcgaaaacgtccaggttctgaccatgggcaatgacacatctcctagcgaggggaccaacctcaatgctccgaactccctgggagtgtctgccctttgcgccatctgtggcgatcgggctacagggaaacactacggagccagctcctgcgacggctgtaaggggtttttccgcagagctgtgcggaaaaatcatatgtattcttgccgctttagcagacaatgtgtcgtggatcgggaccgcagaaaccagtgccggtactgtcgcctgaagaaatgcttcagagccggaatgcggcgcgaagcggttcagaatgagagagatcggatttccacccgcagagccgcttatgaagacagcgccctcccctctatcaacgctctgctgcaggccgaggtgctctcccggcaaattgcggcccctgtcagcggcatcaatggcgatattagagctcgccggatcgcctctatcgctgacgtgtgtgagtccatgaaggaacagctgcttgttctggtggagtgggccaagtacattcccgccttttgcgaactccctctggatgaccaggtcgcccttctgagagcgcacgccggggagcatctcctgctgggagctacacgccggagcatggtgttcaaagacgtgctcctgcttggcaacgattatatcgtccccagacactgtcctgagctggccgaaatgtctcgcgtttccattcggatcctcgacgagctggtgcttccgtttcaggaactgcaaattgatgacaatgagtacgcctacctcaaggctatcattttctttgatcccgacgccagagggctgagcgatcctggacgcatccggagactgcgcgctcaggtgcaggtctccctcgaagactatatcaacgatcggcagtacgactctagaggccggttcggggagctgcttctgctcctgcccacccttcaaagcattacgtggcagatgatcgagcagattcaatttatcaaactgttcggaatggcgaagattgataatctcctgcaggaaatgctgctctgaggactagtccctgttcccagagcccacttttttttctttttttgaaataaaatagcctgtctttcagatctcaaaggctcttttcagagccaccaaaaaaaaaaaaaaaaaaaaaaaaaaaaaaaaaaaaaaaaaaaaaaaaaaaaaaaaaaaaaaaaaaaaaaaaaaaaaaaaaaaaaaaaaaaaaaaaaaaaa

SEQ ID NO: 3641 - RNA, 1400 nt, synthetic construct
  misc_feature 1..1400: note = mRNA a-1 (hSL-A100) (opt5) from Homo sapiens__NP_000448.3__HNF4A(1-375)(S87A_S95A_S99A_K106R_K10 8R_K126R_K127R_S142A_S143A_S148A_T166A_S167A_S313A_S378A_T4 29A_T432A_S436A_K458R_S461E)
  source 1..1400: mol_type = other RNA
aggagagtcccgcagtcggcgtccagcggctctgcttgttcgtgtgtgtgtcgttgcaggccttattcaagcttaccatgagactgagcaagaccctcgtggacatggatatggccgactactccgctgccctggatcccgcgtatacaacgcttgagttcgaaaacgtccaggttctgaccatgggcaatgacacatctcctagcgaggggaccaacctcaatgctccgaactccctgggagtgtctgccctttgcgccatctgtggcgatcgggctacagggaaacactacggagccagctcctgcgacggctgtaaggggtttttccgcagagctgtgcggaaaaatcatatgtatgcctgccgctttgcgagacaatgtgtcgtggatcgggaccgcagaaaccagtgccggtactgtcgcctgaagaaatgcttcagagccggaatgcggcgcgaagctgttcagaatgagagagatcggatttctacccgcagagccgcttatgaagacagcgccctcccctccatcaacgcgctgctgcaggccgaggtgctcagccggcaaattgctgcccctgtctctggcatcaatggcgatattagagctaagaagatcgcctccatcgccgacgtgtgtgagagcatgaaagaacagctgcttgttctggtggagtgggctaagtacattcccgcgttttgcgaactccctctggatgaccaggtcgcccttctgcgcgctcacgccggggagcatctcctgctgggagccacaaaacggtctatggtgttcaaggacgtgctcctgcttggcaacgattatatcgtccccagacactgtcctgagctggctgaaatgtcccgcgttagcattcggatcctcgacgagctggtgcttccgtttcaggaactgcaaattgatgacaatgagtacgcctacctcaaagcgatcattttctttgatcccgacgctaaggggctgtctgatcctggaaagatcaaaagactgcgcgcccaggtgcaggtctccctcgaagactatatcaacgatcggcagtacgacagcagaggccgcttcggggagctgcttctgctcctgcccacccttcaatccattacgtggcagatgatcgagcagattcaatttatcaagctgttcggaatggccaaaattgataatctcctgcaggaaatgctgctctgaggactagtccctgttcccagagcccacttttttttctttttttgaaataaaatagcctgtctttcagatctcaaaggctcttttcagagccaccaaaaaaaaaaaaaaaaaaaaaaaaaaaaaaaaaaaaaaaaaaaaaaaaaaaaaaaaaaaaaaaaaaaaaaaaaaaaaaaaaaaaaaaaaaaaaaaaaaaaa

SEQ ID NO: 3642 - RNA, 1400 nt, synthetic construct
  misc_feature 1..1400: note = mRNA a-1 (hSL-A100) (opt5) from Homo sapiens__NP_000448.3__HNF4A(1-375)(S87A_K106R_K108R_K126R_K 127R_S138A_T139A_S142A_S143A_S148A_T166A_S167A_S313A_S378A_ T429A_T432A_S436A_K458R_S461E)
  source 1..1400: mol_type = other RNA
aggagagtcccgcagtcggcgtccagcggctctgcttgttcgtgtgtgtgtcgttgcaggccttattcaagcttaccatgagactgagcaagaccctcgtggacatggatatggccgactactccgctgccctggatcccgcgtatacaacgcttgagttcgaaaacgtccaggttctgaccatgggcaatgacacatctcctagcgaggggaccaacctcaatgctccgaactccctgggagtgtctgccctttgcgccatctgtggcgatcgggctacagggaaacactacggagccagctcctgcgacggctgtaaggggtttttccgcagagctgtgcggaaaaatcatatgtattcttgccgctttagcagacaatgtgtcgtggatcgggaccgcagaaaccagtgccggtactgtcgcctgaagaaatgcttcagagccggaatgcggcgcgaagcggttcagaatgagagagatcggattgccgctcgcagagccgcttatgaagactccgccctccccagcatcaacgcgctgctgcaggccgaggtgctctctcggcaaattgctgcccctgtctccggcatcaatggcgatattagagctaagaagatcgccagcatcgccgacgtgtgtgagtctatgaaagaacagctgcttgttctggtggagtgggctaagtacattcccgcgttttgcgaactccctctggatgaccaggtcgcccttctgcgcgctcacgccggggagcatctcctgctgggagccaccaaacggtccatggtgttcaaggacgtgctcctgcttggcaacgattatatcgtccccagacactgtcctgagctggctgaaatgagccgcgtttctattcggatcctcgacgagctggtgcttccgtttcaggaactgcaaattgatgacaatgagtacgcctacctcaaagcgatcattttctttgatcccgacgctaaggggctgtccgatcctggaaagatcaaaagactgcgcgcccaggtgcaggtcagcctcgaagactatatcaacgatcggcagtacgactccagaggccgcttcggggagctgcttctgctcctgcccacacttcaatctattacctggcagatgatcgagcagattcaatttatcaagctgttcggaatggccaaaattgataatctcctgcaggaaatgctgctctgaggactagtccctgttcccagagcccacttttttttctttttttgaaataaaatagcctgtctttcagatctcaaaggctcttttcagagccaccaaaaaaaaaaaaaaaaaaaaaaaaaaaaaaaaaaaaaaaaaaaaaaaaaaaaaaaaaaaaaaaaaaaaaaaaaaaaaaaaaaaaaaaaaaaaaaaaaaaaa

SEQ ID NO: 3643 - RNA, 1400 nt, synthetic construct
  misc_feature 1..1400: note = mRNA a-1 (hSL-A100) (opt5) from Homo sapiens__NP_000448.3__HNF4A(1-375)(S87A_S95A_S99A_K106R_K10 8R_K126R_K127R_S138A_T139A_S142A_S143A_S148A_T166A_S167A_S3 13A_S378A_T429A_T432A_S436A_K458R_S461E)
  source 1..1400: mol_type = other RNA
aggagagtcccgcagtcggcgtccagcggctctgcttgttcgtgtgtgtgtcgttgcaggccttattcaagcttaccatgagactgagcaagaccctcgtggacatggatatggccgactactccgctgccctggatcccgcgtatacaacgcttgagttcgaaaacgtccaggttctgaccatgggcaatgacacatctcctagcgaggggaccaacctcaatgctccgaactccctgggagtgtctgccctttgcgccatctgtggcgatcgggctacagggaaacactacggagccagctcctgcgacggctgtaaggggtttttccgcagagctgtgcggaaaaatcatatgtatgcctgccgctttgcgagacaatgtgtcgtggatcgggaccgcagaaaccagtgccggtactgtcgcctgaagaaatgcttcagagccggaatgcggcgcgaagctgttcagaatgagagagatcggattgccgctcgcagagccgcgtatgaagactctgccctccccagcatcaacgctctgctgcaggccgaggtgctctcccggcaaattgctgcccctgtcagcggcatcaatggcgatattagagccaagaagatcgcttctatcgcggacgtgtgtgagtccatgaaagaacagctgcttgttctggtggagtgggccaagtacattcccgctttttgcgaactccctctggatgaccaggtcgcccttctgcgcgcccacgctggggagcatctcctgctgggagccaccaaacggagcatggtgttcaaggacgtgctcctgcttggcaacgattatatcgtccccagacactgtcctgagctggcggaaatgtctcgcgtttccattcggatcctcgacgagctggtgcttccgtttcaggaactgcaaattgatgacaatgagtacgcttacctcaaagccatcattttctttgatcccgacgccaaggggctgagcgatcctggaaagatcaaaagactgcgcgctcaggtgcaggtctctctcgaagactatatcaacgatcggcagtacgactccagaggccgcttcggggagctgcttctgctcctgcccacacttcaaagcattacctggcagatgatcgagcagattcaatttatcaagctgttcggaatggccaaaattgataatctcctgcaggaaatgctgctctgaggactagtccctgttcccagagcccacttttttttctttttttgaaataaaatagcctgtctttcagatctcaaaggctcttttcagagccaccaaaaaaaaaaaaaaaaaaaaaaaaaaaaaaaaaaaaaaaaaaaaaaaaaaaaaaaaaaaaaaaaaaaaaaaaaaaaaaaaaaaaaaaaaaaaaaaaaaaaa

SEQ ID NO: 3644 - RNA, 1400 nt, synthetic construct
  misc_feature 1..1400: note = mRNA a-1 (hSL-A100) (opt11) from Homo sapiens__NP_000448.3__HNF4A(1-375)
  source 1..1400: mol_type = other RNA
aggagagtcccgcagtcggcgtccagcggctctgcttgttcgtgtgtgtgtcgttgcaggccttattcaagcttaccatgcgtctttccaaaacactcgtagacatggacatggcagactacagcgccgccctcgacccagcctacaccaccctcgaatttgaaaacgtccaagtcctaactatgggaaacgacacatcaccctcagaaggtacaaacctcaacgcccccaactcgctaggcgtctccgcactatgcgcaatctgcggcgaccgtgccaccggcaaacactacggagcctcatcctgcgacggttgtaaaggcttcttccgacgcagcgtcagaaaaaaccacatgtactcctgccgcttctcccgtcaatgcgtcgtcgacaaagacaaacgcaaccaatgccggtactgccgcctaaaaaaatgcttccgcgcaggcatgaaaaaagaagcagtccaaaacgaacgcgaccgcatatcaacccgtcgatcatcatacgaagactcctccctccccagcatcaacgccctcctccaagcagaagtactaagccggcaaataacatccccagtcagcggcatcaacggagacatacgagccaaaaaaatagcttcaatcgccgacgtctgcgaatccatgaaagagcaactactggtcctcgtcgaatgggctaaatacatcccggccttctgcgaactccccctcgacgatcaagtcgcccttctaagagcccacgccggcgaacacctcctcttaggcgcaaccaaacgcagcatggtattcaaagacgtactgctcctcggcaacgattacatcgtcccacgacattgccccgagctcgcagaaatgtcccgagtctccatccgcatactcgacgaactcgtactccccttccaagaactccaaatagacgacaatgaatacgcatacctcaaagcaatcatcttcttcgaccccgacgccaaaggactcagcgacccaggcaaaatcaaacgcctacgatcacaagtacaagtttcacttgaagactacatcaacgacagacaatacgactcaagaggtcgtttcggagaactactcctactactaccaaccctccaaagcataacctggcaaatgatagaacaaatacaatttataaaactcttcggcatggccaaaatcgacaatctcctacaagaaatgctcctctgaggactagtccctgttcccagagcccacttttttttctttttttgaaataaaatagcctgtctttcagatctcaaaggctcttttcagagccaccaaaaaaaaaaaaaaaaaaaaaaaaaaaaaaaaaaaaaaaaaaaaaaaaaaaaaaaaaaaaaaaaaaaaaaaaaaaaaaaaaaaaaaaaaaaaaaaaaaaaa

SEQ ID NO: 3645 - RNA, 1400 nt, synthetic construct
  misc_feature 1..1400: note = mRNA a-1 (hSL-A100) (opt11) from Homo sapiens__NP_000448.3__HNF4A(1-375)(S313A)
  source 1..1400: mol_type = other RNA
aggagagtcccgcagtcggcgtccagcggctctgcttgttcgtgtgtgtgtcgttgcaggccttattcaagcttaccatgcgtctctcaaaaaccctagtcgacatggacatggccgactattctgcagccctagacccagcctacaccaccctcgaattcgaaaacgtacaagtactcaccatgggcaacgatacctccccatctgaaggcaccaacctcaacgcacccaactctctcggagtctccgccctatgcgcaatctgcggcgaccgagccactggaaaacactacggcgcctcctcttgcgacggatgcaaaggcttcttccgaagatcagtccgaaaaaaccacatgtactcatgccgcttctcgcgccaatgcgtcgtcgacaaagacaaacgtaaccaatgcagatactgccgactcaaaaaatgcttccgcgccggcatgaaaaaagaagccgtccagaacgaacgcgaccgcatctcaaccagacgctcgagctacgaagactcctccctaccctccatcaacgccctactccaagcagaagtactatcccgccaaataacctcccccgtcagcggcatcaacggcgacatcagagccaaaaaaatcgcctcaatcgccgacgtatgcgagagcatgaaagaacagctccttgtcctagtagaatgggccaaatacatcccagccttctgcgaactccccctcgacgaccaagtcgccctactcagagcccacgccggcgaacacctcctcctcggcgctaccaagcgatctatggtattcaaggatgtacttctactcggaaacgactacatcgtaccacgccactgcccagaactagccgaaatgtcccgcgtatccatccgaatcctcgatgaactcgtactccccttccaagaactacaaattgacgacaatgaatacgcctacttaaaagccatcatattcttcgaccccgacgccaaaggtctgtccgacccaggcaaaatcaaacgactacgggcccaagtccaagtatcactcgaagactacatcaacgaccgccaatacgactcacgcggccgcttcggcgagctcctcctccttctcccaaccctacaatccataacctggcaaatgatcgaacaaatccaattcataaaactcttcggcatggcaaaaattgacaaccttctccaagaaatgctcctgtgaggactagtccctgttcccagagcccacttttttttctttttttgaaataaaatagcctgtctttcagatctcaaaggctcttttcagagccaccaaaaaaaaaaaaaaaaaaaaaaaaaaaaaaaaaaaaaaaaaaaaaaaaaaaaaaaaaaaaaaaaaaaaaaaaaaaaaaaaaaaaaaaaaaaaaaaaaaaaa

SEQ ID NO: 3646 - RNA, 1400 nt, synthetic construct
  misc_feature 1..1400: note = mRNA a-1 (hSL-A100) (opt11) from Homo sapiens__NP_000448.3__HNF4A(1-375)(S313E)
  source 1..1400: mol_type = other RNA
aggagagtcccgcagtcggcgtccagcggctctgcttgttcgtgtgtgtgtcgttgcaggccttattcaagcttaccatgcgcctgtccaaaaccctcgtcgacatggacatggctgactactccgccgccctcgaccccgcatacaccacactcgaattcgaaaacgtccaggtcctcaccatgggaaacgacacctccccctcagaaggaaccaacctaaacgctcccaactcccttggcgtctccgccctctgcgcaatatgcggagaccgcgccaccggaaaacactacggcgcctcatcctgcgacggttgcaaaggcttcttccgccgatccgtccgcaaaaaccacatgtattcctgccgcttctcgcgacagtgcgtagtcgacaaagataaacgaaaccaatgccgatactgccgccttaaaaaatgcttccgcgccggaatgaaaaaagaagcagtccaaaacgaacgagaccgcatcagcacccgtaggagctcatacgaggactcgagcctcccctcgatcaacgccttactccaagccgaagtactgtcccgccagatcacctcacccgtctccggcatcaacggagacatcagagccaaaaaaatagcatcgatcgccgacgtatgcgagtccatgaaagaacaactcctagtactagtcgaatgggccaaatacatcccagcattctgcgaactacccctagatgatcaagtagccctactacgagcccacgccggcgaacacctcctcctcggggccaccaaacgatcaatggtcttcaaagacgtcctcctcctcggcaacgactacatcgtaccccgccactgcccagaactcgcagaaatgtcacgcgtctcaatccgcatcctggacgaacttgtactcccattccaagaactacaaatagacgacaacgaatacgcatacctgaaagcaatcatctttttcgaccccgacgccaaaggcctatctgaccccggtaaaataaaacgcctccgcgaacaagtacaagtctctctcgaagactacatcaacgaccgccagtacgacagccggggacgcttcggcgaacttctcctcctcctccccactctacaaagcatcacctggcaaatgatcgaacaaatacaattcatcaaactcttcggaatggcaaaaatcgacaacctcctccaagaaatgctcctctgaggactagtccctgttcccagagcccacttttttttctttttttgaaataaaatagcctgtctttcagatctcaaaggctcttttcagagccaccaaaaaaaaaaaaaaaaaaaaaaaaaaaaaaaaaaaaaaaaaaaaaaaaaaaaaaaaaaaaaaaaaaaaaaaaaaaaaaaaaaaaaaaaaaaaaaaaaaaaa

SEQ ID NO: 3647 - RNA, 1400 nt, synthetic construct
  misc_feature 1..1400: note = mRNA a-1 (hSL-A100) (opt11) from Homo sapiens__NP_000448.3__HNF4A(1-375)(S142A_S143A)
  source 1..1400: mol_type = other RNA
aggagagtcccgcagtcggcgtccagcggctctgcttgttcgtgtgtgtgtcgttgcaggccttattcaagcttaccatgcgcctatcaaaaacactggtcgacatggacatggcagactattctgccgccctggaccccgcctacactacactcgagttcgaaaacgtccaagtactcaccatgggaaacgacacctccccctccgaaggcaccaacttaaacgcccccaactcccttggggtctccgctctctgcgcaatctgcggagacagagccaccggtaaacactacggagcctcctcctgcgacggatgcaaaggcttcttccgccgctcagtacgcaaaaaccacatgtatagttgccgcttctctcgccagtgcgtggtcgacaaagacaaacgcaaccaatgccgatactgccgcctcaaaaagtgcttccgcgccggaatgaagaaagaagctgtccaaaacgaacgcgaccgcatctcaacccgcagagcggcatacgaagacagctcgctaccctccataaacgccctccttcaagccgaagtcctatcccgacagatcacctcccccgtctctggaataaacggcgacatccgcgcaaagaaaatcgcctccatcgccgacgtatgcgaatccatgaaagaacaactcctagtgctagtagaatgggccaaatacatacccgccttctgcgagctccccctagacgaccaagtagccctactccgcgcacacgcaggcgaacacctcctcctcggcgccaccaaacgatcaatggtcttcaaagacgtactactcctcggcaatgactacatcgtcccacgacactgccccgaattagcagaaatgtcgcgagtctccatacgcatcctagacgaactcgtactccctttccaagaactacaaatcgatgacaacgaatacgcatacctcaaagccatcatcttcttcgacccagacgccaaaggcctttccgatcccggcaaaatcaaaagactacgctcacaagtacaagtctccctcgaagattacatcaacgaccgccaatacgactcacgcggccgcttcggagaactcctactactcctcccaaccctacaatccatcacctggcaaatgatcgaacaaatccagttcattaaactcttcggaatggccaaaatcgataacctcctacaagaaatgctcctatgaggactagtccctgttcccagagcccacttttttttctttttttgaaataaaatagcctgtctttcagatctcaaaggctcttttcagagccaccaaaaaaaaaaaaaaaaaaaaaaaaaaaaaaaaaaaaaaaaaaaaaaaaaaaaaaaaaaaaaaaaaaaaaaaaaaaaaaaaaaaaaaaaaaaaaaaaaaaaa

SEQ ID NO: 3648 - RNA, 1400 nt, synthetic construct
  misc_feature 1..1400: note = mRNA a-1 (hSL-A100) (opt11) from Homo sapiens__NP_000448.3__HNF4A(1-375)(S142E_S143E)
  source 1..1400: mol_type = other RNA
aggagagtcccgcagtcggcgtccagcggctctgcttgttcgtgtgtgtgtcgttgcaggccttattcaagcttaccatgcgcctatccaaaaccctagtcgacatggacatggcagactactccgccgccctcgacccagcatacaccacactcgaattcgaaaacgtccaagtgctaaccatgggcaacgacaccagcccgtccgaaggcacaaacctcaacgcccccaactcccttggtgtctcagccctctgcgcaatctgcggcgaccgtgccaccggtaaacactatggcgcctcatcctgcgacggctgcaaaggcttcttcagacgatcggtacgcaaaaaccacatgtactcatgtcgcttctcccgacaatgtgtagtggacaaagacaaaagaaaccaatgccgctactgccgcctcaaaaaatgcttccgcgcaggcatgaaaaaagaagccgtccagaatgaacgagaccgcataagcacccgccgagaagaatatgaagactcctcacttccctcaatcaacgccctactccaagccgaagtactatcacggcaaatcacaagccccgtctcaggaataaacggagacatccgcgccaaaaaaattgcctccatcgcggacgtatgcgaaagcatgaaagaacaactactcgtactcgtcgaatgggcaaaatacatccccgcattctgcgaactccccctcgacgaccaagtagccctgctcagagcacacgccggagaacaccttctcctcggcgccaccaaacgctccatggtcttcaaagacgtcctcctcctagggaacgactacatagtaccacgacactgcccagaactagccgaaatgtccagagtatcaatccgaatcctcgacgaactcgtcctccccttccaagaactacaaatcgacgacaacgaatacgcctacctaaaagccatcatattcttcgatcccgacgcaaaaggcctctccgaccccggcaaaatcaagcgactacgatcacaagtacaagtctccctggaagactacatcaacgaccgccaatacgacagccgcggaagattcggcgaactcctgctactactccccaccctacaatccatcacctggcaaatgatagaacaaatacaattcatcaaactcttcggcatggctaaaatcgacaacctcctacaagaaatgctactatgaggactagtccctgttcccagagcccacttttttttctttttttgaaataaaatagcctgtctttcagatctcaaaggctcttttcagagccaccaaaaaaaaaaaaaaaaaaaaaaaaaaaaaaaaaaaaaaaaaaaaaaaaaaaaaaaaaaaaaaaaaaaaaaaaaaaaaaaaaaaaaaaaaaaaaaaaaaaaa

SEQ ID NO: 3649 - RNA, 1400 nt, synthetic construct
  misc_feature 1..1400: note = mRNA a-1 (hSL-A100) (opt11) from Homo sapiens__NP_000448.3__HNF4A(1-375)(S143A)
  source 1..1400: mol_type = other RNA
aggagagtcccgcagtcggcgtccagcggctctgcttgttcgtgtgtgtgtcgttgcaggccttattcaagcttaccatgcgactctccaagaccctcgtagacatggatatggcagactacagcgccgccctagatccagcttacaccaccctcgaattcgaaaacgttcaagtcctaacgatgggcaacgacacctcaccatcagaaggcaccaacctcaacgcccccaactccctcggagtctcagccctctgcgcaatctgcggcgaccgcgccaccggcaaacactacggagcctcgtcctgcgacggatgcaaaggattcttcaggcgctccgtacggaaaaaccacatgtactcttgtcgtttctcccgccaatgcgtagtcgacaaagacaaacgcaaccaatgccgctactgtcgcctcaaaaaatgcttccgcgccggcatgaagaaagaagccgtccaaaacgaacgcgaccgcatctccacccgcaggtccgcctacgaagactccagcctaccctccatcaacgcactactccaagccgaagtcctctcccgccaaatcacgtctcccgtctcaggaatcaacggcgacatccgcgctaagaaaatagcatctatcgccgacgtctgtgaatccatgaaagaacaactactcgtactggtagaatgggccaaatacatccccgccttctgcgaacttcccctcgacgaccaagttgcactcctccgagcccacgccggggaacacctactcctcggagccaccaaacgctcaatggtcttcaaagacgtactcctcctcggcaacgactacatcgtgccacgccactgccccgaactagccgaaatgtcccgggtctccattcgaatcctcgacgaactcgtcctccccttccaagaactccaaatagacgacaacgaatacgcttacctcaaagcaataatcttcttcgacccagatgccaaaggcctcagcgacccgggcaagattaaacgcctccgctctcaagtccaagtctcccttgaagactacatcaacgaccgccaatacgactcccgcggtcgattcggggaactactcctactcctcccaacactacaatccatcacctggcaaatgatcgaacaaatccaattcatcaaactcttcggcatggccaaaatcgacaacctcctacaggaaatgctcctatgaggactagtccctgttcccagagcccacttttttttctttttttgaaataaaatagcctgtctttcagatctcaaaggctcttttcagagccaccaaaaaaaaaaaaaaaaaaaaaaaaaaaaaaaaaaaaaaaaaaaaaaaaaaaaaaaaaaaaaaaaaaaaaaaaaaaaaaaaaaaaaaaaaaaaaaaaaaaaa

SEQ ID NO: 3650 - RNA, 1400 nt, synthetic construct
  misc_feature 1..1400: note = mRNA a-1 (hSL-A100) (opt11) from Homo sapiens__NP_000448.3__HNF4A(1-375)(T166A)
  source 1..1400: mol_type = other RNA
aggagagtcccgcagtcggcgtccagcggctctgcttgttcgtgtgtgtgtcgttgcaggccttattcaagcttaccatgaggctcagcaaaactctagtcgacatggacatggccgactactcagccgcactcgaccccgcatataccacactagagttcgaaaacgtccaagttctcaccatgggaaacgacacttccccctcagaaggcacaaacctcaacgcacccaactccctaggagtctccgccctatgcgcgatctgtggcgaccgagcaaccggcaagcattacggcgcatcctcctgcgacggatgcaaaggcttcttccgccgatccgtccgaaagaaccacatgtactcctgccgattctcccgccaatgcgtagttgacaaagacaaacgcaatcaatgccgatactgccgcctcaagaaatgcttccgagcaggaatgaagaaagaagccgtccaaaacgaacgcgatcgcatatccacccgccgctcctcctacgaagactcctccctcccctccatcaacgcactcctccaagcggaagtactctcacgccaaatcgcgtccccagtctccggcataaacggagacatccgcgccaagaaaatagcctcaatcgctgacgtctgcgaatctatgaaagaacagctcctcgtcctagtcgaatgggccaaatacatccccgccttctgcgaactcccactagacgaccaagtggcactcctccgcgcccacgccggcgaacacctactactcggagccaccaaacgctccatggtgttcaaagacgtactactcctcggaaatgactacatcgtcccccgacactgccccgaactcgccgaaatgtccagggtctccatccgcatcctcgacgaactggtcctcccattccaagaactccaaatcgacgacaacgaatacgcctacctaaaagccatcatcttcttcgaccccgacgccaaaggcctatccgacccgggcaaaatcaaacgactccgctcccaagtccaagtctcactcgaagactacatcaacgatagacagtacgactcacgcggtagattcggagaactcctactcctactccccacactccaatccataacctggcaaatgatagaacaaatacaattcatcaaactcttcggcatggccaaaatcgacaacctactccaggaaatgctcttatgaggactagtccctgttcccagagcccacttttttttctttttttgaaataaaatagcctgtctttcagatctcaaaggctcttttcagagccaccaaaaaaaaaaaaaaaaaaaaaaaaaaaaaaaaaaaaaaaaaaaaaaaaaaaaaaaaaaaaaaaaaaaaaaaaaaaaaaaaaaaaaaaaaaaaaaaaaaaaa

SEQ ID NO: 3651 - RNA, 1400 nt, synthetic construct
  misc_feature 1..1400: note = mRNA a-1 (hSL-A100) (opt11) from Homo sapiens__NP_000448.3__HNF4A(1-375)(S167E)
  source 1..1400: mol_type = other RNA
aggagagtcccgcagtcggcgtccagcggctctgcttgttcgtgtgtgtgtcgttgcaggccttattcaagcttaccatgcgcctctccaaaaccctcgtcgacatggacatggcagactactctgcagctctcgaccccgcctataccacgctcgaattcgaaaacgtacaagtcctcaccatgggaaacgacacctccccctctgaaggcaccaacctcaacgcacccaacagccttggcgtcagcgccttatgcgccatttgcggagaccgcgccaccggcaaacactacggagcatcctcatgcgacggctgcaaaggcttcttccgccgatcagtccgaaaaaaccacatgtactcctgccgcttctctcgccagtgcgtagtcgataaagataaaagaaatcaatgccgctactgccgcctcaaaaaatgcttccgcgccggcatgaaaaaagaagcagttcaaaacgaacgcgaccgaatctccacccgccgctcatcctacgaagactcttccctcccctctataaacgccctcctccaagccgaagtactctcacgccaaatcaccgaacctgtctccggcattaacggagacatacgcgccaagaaaatagccagcatcgccgacgtctgcgaatcaatgaaagaacaactcctcgtcctagtcgaatgggccaaatacatccccgcattctgcgaacttcccctcgacgaccaagtcgccctcctccgtgcccatgcaggcgaacacctcctcctcggcgccaccaaacgctccatggtctttaaagacgtcctcctcctgggcaacgactacatcgtcccccgacactgcccagaactcgccgagatgagccgcgtgtccatacgcatactcgacgaactcgtcctccccttccaagaactccagatagacgataacgaatacgcatacctaaaagccataatattcttcgaccccgacgctaaaggtctctcagacccaggaaaaatcaaacgtctcagaagccaagtccaagtctcactcgaagactacatcaacgaccgccaatacgactctcgcggccgcttcggcgaactcctcttattactcccaacactccaatcaatcacctggcaaatgatcgaacaaatacaatttatcaaactcttcggcatggctaaaatcgacaatctcctccaagaaatgctcctctgaggactagtccctgttcccagagcccacttttttttctttttttgaaataaaatagcctgtctttcagatctcaaaggctcttttcagagccaccaaaaaaaaaaaaaaaaaaaaaaaaaaaaaaaaaaaaaaaaaaaaaaaaaaaaaaaaaaaaaaaaaaaaaaaaaaaaaaaaaaaaaaaaaaaaaaaaaaaaa

SEQ ID NO: 3652 - RNA, 1400 nt, synthetic construct
  misc_feature 1..1400: note = mRNA a-1 (hSL-A100) (opt11) from Homo sapiens__NP_000448.3__HNF4A(1-375)(S167A)
  source 1..1400: mol_type = other RNA
aggagagtcccgcagtcggcgtccagcggctctgcttgttcgtgtgtgtgtcgttgcaggccttattcaagcttaccatgcggctctcaaaaaccctagtcgacatggacatggccgactactcagctgccctagaccccgcatacaccacactagaattcgaaaatgtccaagtactaaccatgggcaacgacacctcaccctccgaaggtaccaacctcaacgcgcccaactccctcggcgtctcagccctctgcgccatctgcggcgaccgcgcgaccggcaaacactacggtgcctcctcatgcgacggatgcaaaggcttcttccgacgctcagtccgcaaaaaccacatgtactcctgccgcttctcacgacaatgcgtcgttgacaaagacaaacgcaaccaatgccgctactgccgcctcaaaaaatgcttccgcgcaggaatgaaaaaagaagcagttcaaaacgaacgcgaccgcatctcaacccgcagatcatcatacgaagactcatccctaccatcaataaacgccctcctacaagccgaagtcctctccagacaaatcaccgcccccgtctcaggcataaacggcgacatccgtgcaaaaaaaatcgcctccatcgctgacgtctgcgaatccatgaaagaacaactccttgtcctcgtcgaatgggccaaatacattcctgccttctgcgaactccccctcgacgaccaagtcgcactactcagagcccacgcaggcgaacacctcctcctcggagcaacaaaacgctccatggtcttcaaagacgtcctcctactcggaaatgactacatcgtccccagacactgccccgaactcgctgaaatgtcaagagtctccatacgaatactagacgaactagtcctacccttccaagaactgcaaatagacgacaacgaatacgcctacctcaaagccatcatattcttcgaccccgacgccaagggactctcagaccccggcaaaatcaaacgcctacgctcccaagtgcaagtcagcctcgaagactacataaacgatcgccagtacgactcacgaggacgattcggagaactcctcctcctcctcccaacactccagtccatcacctggcaaatgatcgaacaaatccaatttatcaaactcttcggcatggccaaaatcgacaacctactacaagaaatgctcctctgaggactagtccctgttcccagagcccacttttttttctttttttgaaataaaatagcctgtctttcagatctcaaaggctcttttcagagccaccaaaaaaaaaaaaaaaaaaaaaaaaaaaaaaaaaaaaaaaaaaaaaaaaaaaaaaaaaaaaaaaaaaaaaaaaaaaaaaaaaaaaaaaaaaaaaaaaaaaaa

SEQ ID NO: 3653 - RNA, 1400 nt, synthetic construct
  misc_feature 1..1400: note = mRNA a-1 (hSL-A100) (opt11) from Homo sapiens__NP_000448.3__HNF4A(1-375)(S167A_S378A_T429A_T432A_ S436A)
  source 1..1400: mol_type = other RNA
aggagagtcccgcagtcggcgtccagcggctctgcttgttcgtgtgtgtgtcgttgcaggccttattcaagcttaccatgcgcctctccaaaaccctcgttgacatggatatggcggactactccgccgcactcgacccagcctacaccaccctagaatttgaaaacgtccaagtactaaccatgggcaacgacacaagcccctccgaaggcacaaatctcaacgcccccaactcactaggcgtctcagccctatgtgctatctgcggcgaccgcgccaccggcaaacactacggcgcatcatcatgtgacggatgcaaaggattcttccgacgctccgtccgaaagaaccacatgtactcctgccgattcagcagacaatgtgttgtcgacaaagacaaacgcaaccaatgtcgctactgccgcctcaaaaaatgctttagagccggaatgaaaaaagaagccgtccaaaacgaacgcgaccgcatctccacacgccgaagctcatacgaagactcatctctcccctccatcaacgcactcctccaagccgaagtcctatctcgccaaatcaccgcacccgtctccggcatcaacggcgacatacgcgccaaaaaaatagcctccatagcagacgtatgcgaatccatgaaagagcaactcctcgtgctagtcgaatgggccaaatacatccccgccttctgcgagctcccactagacgaccaagtcgccctcctccgcgcccacgccggcgaacacctgctcctaggcgccaccaaaagaagcatggtattcaaagacgtcctactcctcggcaacgactatatagtccctcgccactgtccagaactcgcagaaatgtccagagtcagcatccgaatcctcgacgaactcgtcctacccttccaagaactacaaatcgacgacaacgaatacgcctaccttaaagccatcatcttcttcgaccccgacgccaaaggcctatccgaccccggcaaaatcaaacgcttacgatcccaagtccaggtcagcctcgaagactacataaacgaccgccaatacgactcacgcggccgcttcggcgaactactcctcctcctcccaaccctccaaagcatcacctggcaaatgatagaacaaatacaattcatcaaacttttcggcatggccaaaatcgacaaccttttacaagaaatgctactctgaggactagtccctgttcccagagcccacttttttttctttttttgaaataaaatagcctgtctttcagatctcaaaggctcttttcagagccaccaaaaaaaaaaaaaaaaaaaaaaaaaaaaaaaaaaaaaaaaaaaaaaaaaaaaaaaaaaaaaaaaaaaaaaaaaaaaaaaaaaaaaaaaaaaaaaaaaaaaa

SEQ ID NO: 3654 - RNA, 1400 nt, synthetic construct
  misc_feature 1..1400: note = mRNA a-1 (hSL-A100) (opt11) from Homo sapiens__NP_000448.3__HNF4A(1-375)(S167E_S378E_T429E_T432E_ S436E)
  source 1..1400: mol_type = other RNA
aggagagtcccgcagtcggcgtccagcggctctgcttgttcgtgtgtgtgtcgttgcaggccttattcaagcttaccatgcgactatctaaaactctcgtagacatggacatggccgactactcggccgccctcgaccccgcatacaccacgctcgagttcgaaaacgttcaagtcctcacaatgggcaacgacacctccccctcagaaggcaccaacctcaacgctccaaactccctaggggtctccgcactctgcgcaatctgcggcgaccgtgccaccggcaaacattacggcgcctcatcctgcgacggctgcaaaggattcttccggcgatccgtccgaaagaaccacatgtacagctgcagattcagccgacaatgcgtcgtggacaaagataaacgcaaccaatgccgctactgccgactcaagaaatgcttccgcgcaggcatgaagaaagaagcagtacaaaacgaacgcgaccgcatctcaacaagacgtagctcctacgaagactcaagcctcccatccatcaacgccctcctccaagccgaagtactctcacgtcaaatcaccgaacccgtgtcaggaatcaacggcgacatccgcgccaagaaaatcgcctccatcgcagacgtctgcgaatccatgaaagaacaactcctcgtcctggtcgaatgggctaaatacatccccgcattctgcgaactccccctagatgaccaagtcgccctactgcgcgcccacgcaggcgaacatctattactcggcgccaccaaacgcagcatggtattcaaagacgtcctcctcctcggcaacgactacatagtcccacgccactgcccagaactggccgaaatgagccgagtctctatccgcatactcgacgagctagtcctccccttccaagaactccaaattgacgacaacgaatacgcctacctcaaagccatcatattcttcgaccccgacgcgaaaggcctatccgaccccggtaaaatcaaaagactacgctcacaagtccaagtctcccttgaagactacatcaacgaccgccagtacgacagccgcggccgcttcggcgaactacttctcctcctccccaccctccaatccatcacctggcaaatgatcgaacaaatccaattcataaaactattcggaatggccaaaatcgacaacctcctgcaagaaatgctcctctgaggactagtccctgttcccagagcccacttttttttctttttttgaaataaaatagcctgtctttcagatctcaaaggctcttttcagagccaccaaaaaaaaaaaaaaaaaaaaaaaaaaaaaaaaaaaaaaaaaaaaaaaaaaaaaaaaaaaaaaaaaaaaaaaaaaaaaaaaaaaaaaaaaaaaaaaaaaaaa

SEQ ID NO: 3655 - RNA, 1400 nt, synthetic construct
  misc_feature 1..1400: note = mRNA a-1 (hSL-A100) (opt11) from Homo sapiens__NP_000448.3__HNF4A(1-375)(S87A)
  source 1..1400: mol_type = other RNA
aggagagtcccgcagtcggcgtccagcggctctgcttgttcgtgtgtgtgtcgttgcaggccttattcaagcttaccatgcgcctaagcaaaacattagtcgacatggacatggccgactactccgccgcactcgacccagcatacaccacattagagttcgaaaacgtccaagtcctcacaatgggcaacgacacctcaccctcagagggcaccaatctcaacgccccaaactcactcggagtaagtgcactatgcgcgatctgcggcgaccgcgccaccggcaaacactacggcgcatcctcctgcgacggctgcaaaggattcttccgacgcgccgtccgcaaaaaccacatgtactcatgccgcttctcacgccagtgcgtcgtagacaaagacaaacgcaatcaatgccgctactgccgactcaagaaatgcttccgcgccggaatgaagaaagaagcagtacaaaacgaacgcgaccgaatctccacccgccgctcctcctacgaagattcctccctcccctccatcaacgccctactccaagccgaagtactctcccgccaaatcacctctccagtttccggcataaacggcgacatacgagcaaagaaaattgcatctatcgccgacgtctgcgaatcgatgaaagagcaactcctagtactcgtagaatgggccaaatacatccccgcattctgcgaactcccacttgacgaccaagtcgcccttctccgagcacacgccggcgaacatctcctgctcggcgctacaaaaagaagcatggtcttcaaagacgtcctcctactcggcaacgactacatcgtcccccgccactgccccgaactagccgaaatgagccgagtctccatcagaatcctcgacgaactcgtactccccttccaagaactccaaatagacgacaacgaatatgcatacctcaaagcaatcatattcttcgaccccgacgccaaaggactttccgaccccggcaaaataaaacgcctccgatcccaagtacaggtctccctcgaagactacatcaacgacagacaatacgacagccgtggacgattcggagagttactcctactacttcccacccttcagtcaatcacctggcaaatgatagaacaaatccaattcatcaaactgttcggaatggctaaaatcgacaacctgctacaagaaatgctcctctgaggactagtccctgttcccagagcccacttttttttctttttttgaaataaaatagcctgtctttcagatctcaaaggctcttttcagagccaccaaaaaaaaaaaaaaaaaaaaaaaaaaaaaaaaaaaaaaaaaaaaaaaaaaaaaaaaaaaaaaaaaaaaaaaaaaaaaaaaaaaaaaaaaaaaaaaaaaaaa

SEQ ID NO: 3656 - RNA, 1400 nt, synthetic construct
  misc_feature 1..1400: note = mRNA a-1 (hSL-A100) (opt11) from Homo sapiens__NP_000448.3__HNF4A(1-375)(S87E)
  source 1..1400: mol_type = other RNA
aggagagtcccgcagtcggcgtccagcggctctgcttgttcgtgtgtgtgtcgttgcaggccttattcaagcttaccatgcgcctatccaaaaccctagtcgacatggacatggcagactattcagccgcactagatcccgcctatacaacactcgaattcgaaaacgtgcaggtcctcaccatgggcaacgacacctccccctccgaaggaaccaacctaaacgcaccaaattccctcggcgtctccgccctttgcgccatatgtggggaccgcgcaacaggaaaacactacggcgcctcctcctgcgacggatgcaaaggattcttccgacgcgaagtcagaaaaaaccacatgtactcatgtcgattctcccgccagtgcgtcgtcgacaaagacaaaagaaaccaatgcagatactgtcgcctaaaaaaatgcttccgcgccggaatgaaaaaggaagcagtacagaacgaacgcgaccgcatctccaccagacgctcctcctacgaagactcatccctgccctcgatcaacgcacttctccaagccgaggtcctatcaagacaaatcacttctccagtatccggcatcaatggcgacatccgcgccaaaaaaatcgcctcaatcgccgacgtctgcgagtccatgaaagaacaactactagtccttgtagaatgggctaaatatattcccgccttctgcgaacttcccctagacgaccaagtagcactcctccgcgctcacgccggcgagcacctactactcggcgcaaccaaaagatcaatggtcttcaaagacgtcctcctcctgggcaacgactacatcgtcccccgacactgccccgaactcgcggaaatgtcccgcgtcagcatccgcatcctcgacgaactcgtactccccttccaagaactacaaatcgacgacaacgaatacgcctacctcaaagcgataatcttcttcgacccagacgccaaaggtctatccgacccaggaaaaatcaaacgtctccgctctcaagtacaagtctctctcgaagactacataaacgaccgccaatacgactccagaggccggttcggcgaactcctcctcctactccccacactccaaagcatcacctggcaaatgatcgaacaaatccaattcataaaactattcggcatggccaaaatagacaacctgctacaagaaatgctcctctgaggactagtccctgttcccagagcccacttttttttctttttttgaaataaaatagcctgtctttcagatctcaaaggctcttttcagagccaccaaaaaaaaaaaaaaaaaaaaaaaaaaaaaaaaaaaaaaaaaaaaaaaaaaaaaaaaaaaaaaaaaaaaaaaaaaaaaaaaaaaaaaaaaaaaaaaaaaaaa

SEQ ID NO: 3657 - RNA, 1400 nt, synthetic construct
  misc_feature 1..1400: note = mRNA a-1 (hSL-A100) (opt11) from Homo sapiens__NP_000448.3__HNF4A(1-375)(R2V)
  source 1..1400: mol_type = other RNA
aggagagtcccgcagtcggcgtccagcggctctgcttgttcgtgtgtgtgtcgttgcaggccttattcaagcttaccatggtactctccaagaccctagtcgacatggacatggccgactactccgccgccctagacccagcctacaccactctagagttcgaaaacgtccaagtcctcacaatgggaaacgacacctccccctccgaaggcacaaacctcaacgcccccaactccctcggcgtctccgccctatgcgccatatgcggagaccgagccaccggcaagcactacggcgcttcctcctgcgacggatgcaaaggcttcttccggagaagcgtccggaaaaaccacatgtattcctgccgattctcacgccaatgcgtagtcgacaaagacaaacgcaaccaatgccgctactgccgccttaagaaatgtttcagagccggaatgaagaaagaagccgtccaaaacgaacgcgaccgcataagcacccgccgctcctcatacgaagacagcagcctcccctccatcaacgccctcctccaagcagaagtgctctcccgacaaatcaccagccccgtaagcggaatcaacggcgacatacgcgccaagaaaatcgcctccatcgccgacgtctgcgaatcaatgaaagaacaactactcgtccttgtagaatgggccaaatacatccccgccttctgcgagctcccactcgacgaccaagtcgccctcctccgcgcacacgccggtgaacatctcctactaggagcaaccaaacgatcaatggtattcaaagacgtcctcctcctcggtaacgactacatagtcccaagacactgccccgaactagccgaaatgtcacgcgtctccatccgcatcctagacgaactcgtccttccctttcaagaactacaaatcgacgacaacgaatacgcctacctcaaagccatcatcttcttcgacccagacgcaaaaggactctcagaccccggcaaaatcaaacgcctccgctcccaagtccaagtcagcctcgaagactacatcaacgacagacaatacgactcacgaggccgcttcggagaactactactcttgctccccacactacaatcgataacctggcaaatgatcgaacaaatccaatttatcaaactattcggaatggcaaaaatagacaaccttctgcaagaaatgctcctttgaggactagtccctgttcccagagcccacttttttttctttttttgaaataaaatagcctgtctttcagatctcaaaggctcttttcagagccaccaaaaaaaaaaaaaaaaaaaaaaaaaaaaaaaaaaaaaaaaaaaaaaaaaaaaaaaaaaaaaaaaaaaaaaaaaaaaaaaaaaaaaaaaaaaaaaaaaaaaa

SEQ ID NO: 3658 - RNA, 1400 nt, synthetic construct
  misc_feature 1..1400: note = mRNA a-1 (hSL-A100) (opt11) from Homo sapiens__NP_000448.3__HNF4A(1-375)(R2V_K5V)
  source 1..1400: mol_type = other RNA
aggagagtcccgcagtcggcgtccagcggctctgcttgttcgtgtgtgtgtcgttgcaggccttattcaagcttaccatggtcctcagcgtcaccctcgtcgacatggacatggccgactactccgcagccctcgaccccgcctacaccacactagaatttgaaaacgtccaagtcctgaccatgggcaacgacacctccccctcagaaggtaccaacctcaacgcacccaactcgctcggcgtatcagccctttgtgccatctgcggtgatcgcgcaaccggaaaacactacggcgcatcctcatgcgacggctgcaaaggcttcttccgccgatccgtccgtaaaaaccatatgtactcctgtcgattctcccgccaatgtgtcgtagataaagacaaacgcaaccaatgcagatactgccgcctaaaaaaatgcttccgggcaggtatgaagaaagaagcagtccaaaacgaacgcgaccgcatcagcacccgccgctcctcctacgaagactcgtccctcccatccatcaacgccctactccaagccgaagtcttatcccgacaaatcacttcccccgtctccggcataaacggcgacatccgcgcaaaaaaaatcgcctccatagccgacgtctgcgaatcaatgaaagaacaactcctagtccttgtcgaatgggccaaatacatccccgcattctgcgaactcccactcgatgaccaggtagccctcctccgcgcccacgcgggtgaacacctcctcctcggggccaccaaacgctccatggtattcaaagacgtcctcctcctcggaaacgactacatcgtcccacgccattgccccgagctagccgaaatgtctagagtctccatacgcatcctcgacgaactcgtactccccttccaagaactccaaattgatgacaacgaatacgcctacctcaaagcaatcatcttcttcgaccccgacgccaaagggctctccgacccaggaaaaatcaaacgcctcagatcccaagtccaggtatcactcgaagactacatcaacgaccgacaatacgactcccgaggccgtttcggcgaactcctactcctcttaccaaccctacaatccatcacatggcaaatgatcgaacaaattcaattcatcaaactcttcggaatggccaaaatcgacaatctcctacaagaaatgctcctctgaggactagtccctgttcccagagcccacttttttttctttttttgaaataaaatagcctgtctttcagatctcaaaggctcttttcagagccaccaaaaaaaaaaaaaaaaaaaaaaaaaaaaaaaaaaaaaaaaaaaaaaaaaaaaaaaaaaaaaaaaaaaaaaaaaaaaaaaaaaaaaaaaaaaaaaaaaaaaa

SEQ ID NO: 3659 - RNA, 1400 nt, synthetic construct
  misc_feature 1..1400: note = mRNA a-1 (hSL-A100) (opt11) from Homo sapiens__NP_000448.3__HNF4A(1-375)(K179R_K180R)
  source 1..1400: mol_type = other RNA
aggagagtcccgcagtcggcgtccagcggctctgcttgttcgtgtgtgtgtcgttgcaggccttattcaagcttaccatgcgcctctccaaaacacttgtcgacatggacatggccgactactccgccgcactcgaccccgcctacaccacccttgaattcgaaaacgtccaagtcctcaccatgggaaacgacacctccccctccgaaggaaccaacctaaacgcccccaactccctaggcgtctccgccctctgcgcaatatgcggagaccgcgcaaccggcaaacattacggcgcttcctcctgtgacggttgcaaaggatttttccgccgatccgtccgtaaaaaccacatgtactcctgccgcttcagccgacaatgcgtggtagataaagacaaacgcaaccaatgccgttactgccgactcaaaaaatgcttccgagccggaatgaaaaaagaagcagtccaaaacgaacgcgaccgcatctctacacgcagatcttcatatgaagatagcagcctccccagcatcaacgccctcctccaagccgaagtcctctcccgacaaatcacctccccagtaagcggcataaatggcgacatccgtgcccggcgcatcgcatcaatcgccgacgtatgcgaatcaatgaaagaacaactactagtcctcgtcgaatgggcaaaatacatacccgcattctgcgaactccccctcgacgaccaagtagccctcctacgcgcccacgccggagaacacctactcctcggggccacgaaacgatccatggtcttcaaagacgtcctactcctcggaaatgactacatagtccccaggcactgccccgaactcgccgaaatgtcccgcgtctcaattcgaatcctagacgaactcgtcctacccttccaagaactccaaatagacgacaacgaatacgcttacctcaaagccattatcttcttcgacccagacgccaaaggactctccgacccgggaaaaataaaacgactacgcagccaagtccaagtctccttagaagactacatcaacgaccgccagtacgactcccgcggccgattcggagagcttctcctactcctccccaccctccaatccatcacatggcaaatgatcgaacaaatccaattcataaaactcttcggcatggccaaaatcgataatctactccaagaaatgctcctctgaggactagtccctgttcccagagcccacttttttttctttttttgaaataaaatagcctgtctttcagatctcaaaggctcttttcagagccaccaaaaaaaaaaaaaaaaaaaaaaaaaaaaaaaaaaaaaaaaaaaaaaaaaaaaaaaaaaaaaaaaaaaaaaaaaaaaaaaaaaaaaaaaaaaaaaaaaaaaa

SEQ ID NO: 3660 - RNA, 1400 nt, synthetic construct
  misc_feature 1..1400: note = mRNA a-1 (hSL-A100) (opt11) from Homo sapiens__NP_000448.3__HNF4A(1-375)(K234R)
  source 1..1400: mol_type = other RNA
aggagagtcccgcagtcggcgtccagcggctctgcttgttcgtgtgtgtgtcgttgcaggccttattcaagcttaccatgcgcctatctaaaacacttgtagacatggacatggccgactactcagccgcactcgaccccgcctacaccaccttagagttcgagaacgtccaagtcctcacgatgggcaatgacacctccccatccgaaggcaccaaccttaacgcacccaactccctcggagtatccgccctctgcgccatctgcggcgaccgcgccacaggcaaacactacggagcctcatcctgcgacggctgcaaaggcttcttccgacgctccgtcagaaaaaaccacatgtactcctgccgattctcccgtcaatgcgtagtcgacaaagacaaacgcaaccaatgccgatactgccgcctcaaaaagtgcttccgagccggcatgaaaaaagaagccgtccagaacgagcgcgaccgaatctccacaagaagatcatcatacgaagactcctccctcccctccatcaacgccctactccaagccgaagtcctctccagacaaatcacaagccccgtatccggtatcaacggcgacataagagccaaaaaaatcgcctccatagccgacgtctgcgaatccatgaaagaacaactcctcgtgctcgtagaatgggccaaatacattcccgccttctgcgaactccctctcgacgaccaggtcgctctactcagggctcacgccggcgaacacctcctcctcggcgcaacccgccgctccatggtattcaaagacgtcctactactcggaaacgactacatcgttccccgccactgcccagagctcgctgaaatgtctcgcgtctccatccgcatcctcgacgaactcgtcctcccattccaagaactccaaatcgacgacaacgaatacgcctacctaaaagccataatcttcttcgaccccgacgcaaaaggactctccgacccagggaaaattaaacgactccgctcccaagtacaggtaagcctcgaagactacatcaacgaccgccaatacgattcccgaggccgcttcggcgaacttctcctactactacccaccctacagtccatcacctggcaaatgatcgaacaaatccaattcatcaaacttttcggaatggccaaaatcgacaacctcctccaagaaatgctcctctgaggactagtccctgttcccagagcccacttttttttctttttttgaaataaaatagcctgtctttcagatctcaaaggctcttttcagagccaccaaaaaaaaaaaaaaaaaaaaaaaaaaaaaaaaaaaaaaaaaaaaaaaaaaaaaaaaaaaaaaaaaaaaaaaaaaaaaaaaaaaaaaaaaaaaaaaaaaaaa

SEQ ID NO: 3661 - RNA, 1400 nt, synthetic construct
  misc_feature 1..1400: note = mRNA a-1 (hSL-A100) (opt11) from Homo sapiens__NP_000448.3__HNF4A(1-375)(K300R)
  source 1..1400: mol_type = other RNA
aggagagtcccgcagtcggcgtccagcggctctgcttgttcgtgtgtgtgtcgttgcaggccttattcaagcttaccatgcgcctctcaaaaaccctagtagacatggacatggcagactactccgccgccctcgaccccgcatacaccaccctcgagttcgaaaacgtacaagtcctcactatgggaaacgacacctccccctcggaaggcaccaacctcaacgcccccaactcccttggggtcagtgcactatgcgccatctgcggcgatagagccaccggaaagcactacggcgcctcctcatgcgacggctgcaaaggcttcttccgccgatccgtccgcaaaaaccacatgtactcatgcagattcagcagacaatgcgtcgtcgacaaagacaagagaaaccagtgccgatactgccgcctcaagaaatgtttccgcgccggcatgaagaaagaagcagtccaaaacgaacgcgaccgcatctccacccgccgctcatcctacgaagactccagcctaccctccataaatgccctactccaagcagaagtcctctcccgccaaataacctccccagtatccggaatcaacggcgacatccgcgccaagaaaatcgcctcaatagcagacgtctgcgaatccatgaaagaacaactacttgtcttagtagaatgggccaaatacatccccgccttttgcgaactaccccttgacgaccaagtcgccctcctccgcgcacacgccggcgaacacctattactaggcgccactaaacgctccatggtcttcaaagacgtactcctcctcggcaacgactatatcgtcccccgacactgccccgaactcgccgaaatgtcccgcgtctcaatacgaatcctcgacgaactcgtcctccccttccaagaactacagatcgacgacaacgaatacgcctacctcaaagcaatcatcttcttcgaccccgacgcccgcggcctatccgaccctggcaaaatcaaacgcctgcgctcccaagtacaagtgtccctcgaagactacatcaacgaccgacagtacgattcccgaggccgattcggcgaactcctcctcctactcccaacactccaatccatcacctggcaaatgatcgaacaaatccaattcattaaactcttcggcatggcaaaaatcgacaacctcctacaagaaatgctcctctgaggactagtccctgttcccagagcccacttttttttctttttttgaaataaaatagcctgtctttcagatctcaaaggctcttttcagagccaccaaaaaaaaaaaaaaaaaaaaaaaaaaaaaaaaaaaaaaaaaaaaaaaaaaaaaaaaaaaaaaaaaaaaaaaaaaaaaaaaaaaaaaaaaaaaaaaaaaaaa

SEQ ID NO: 3662 - RNA, 1400 nt, synthetic construct
  misc_feature 1..1400: note = mRNA a-1 (hSL-A100) (opt11) from Homo sapiens__NP_000448.3__HNF4A(1-375)(K300R_K307R_K309R)
  source 1..1400: mol_type = other RNA
aggagagtcccgcagtcggcgtccagcggctctgcttgttcgtgtgtgtgtcgttgcaggccttattcaagcttaccatgcgcctcagcaaaacactcgttgacatggatatggccgactactccgccgcactagatcccgcctataccacactcgaattcgaaaacgttcaagtactcaccatgggcaacgacacctccccatccgaaggcaccaacctcaacgccccaaactccctcggtgtatccgcactctgcgcaatctgcggcgaccgcgctacaggcaaacactacggcgcatcctcctgcgacggatgcaagggcttcttccgccgctcagtccggaaaaaccacatgtactcttgccgcttctcacgtcagtgcgtggtcgacaaagacaaacgcaaccaatgccgctactgccgactcaaaaaatgcttccgcgccggaatgaaaaaagaagcagtacaaaacgaacgagaccgcatcagcacccgtcgctccagctacgaagactcttcacttccctccatcaacgccctcctccaagccgaagtcctctcacgccaaatcacgtcccccgtctccggcataaacggcgacatccgagcaaaaaaaatcgcctccatcgcagacgtatgcgaatccatgaaagaacagctcctagtcctcgtcgaatgggccaaatacatcccagcattctgcgaacttcccctagacgaccaagtcgcccttctcagagcacacgctggggaacacctcctactaggcgcaacaaaacgctccatggtcttcaaagacgtactactcctcggcaacgactacatagtccctcgccactgccccgaactcgcagaaatgtcccgagtctcaatacgaatactagacgaactagtcctccctttccaagaactacaaatcgacgacaacgaatacgcttacctaaaagccatcattttcttcgacccagacgcccgcgggctctccgaccccggccgcatacgacgccttcgctcccaagtccaagtatcattagaagactacatcaacgaccgccaatacgactcccgcggccgcttcggagaactcctactcctcctacccacactccagtccatcacctggcaaatgatcgaacaaatccaattcattaaactattcggcatggccaaaatcgacaacctactccaagaaatgctcctctgaggactagtccctgttcccagagcccacttttttttctttttttgaaataaaatagcctgtctttcagatctcaaaggctcttttcagagccaccaaaaaaaaaaaaaaaaaaaaaaaaaaaaaaaaaaaaaaaaaaaaaaaaaaaaaaaaaaaaaaaaaaaaaaaaaaaaaaaaaaaaaaaaaaaaaaaaaaaaa

SEQ ID NO: 3663 - RNA, 1400 nt, synthetic construct
  misc_feature 1..1400: note = mRNA a-1 (hSL-A100) (opt11) from Homo sapiens__NP_000448.3__HNF4A(1-375)(K447R_K470R)
  source 1..1400: mol_type = other RNA
aggagagtcccgcagtcggcgtccagcggctctgcttgttcgtgtgtgtgtcgttgcaggccttattcaagcttaccatgcgcctctccaaaaccctcgtcgatatggacatggccgactactccgccgcccttgaccccgcctacaccaccctagaattcgaaaacgtacaagtactcacaatgggcaacgacacctccccatccgaaggaacaaacctcaacgctcccaacagcttaggtgtctccgccctctgcgccatctgcggagatcgcgccaccggcaaacactacggcgcctcatcatgcgacggctgcaaaggcttcttccgacgctcagtccgcaaaaaccacatgtactcctgcagattctcaagacaatgtgtcgttgacaaagacaaacgaaaccaatgccgatactgccgccttaaaaaatgcttccgcgcaggaatgaaaaaagaagcagtccagaacgaacgcgaccgcatatccacccgccgttccagctacgaagacagctcactcccttcaatcaacgccctactacaagccgaagtcctctcccgacaaataacctcacccgtatccggcatcaacggagacatacgcgccaaaaaaatagcctcaatcgccgacgtctgcgaatccatgaaagaacaactcctagtcctagtcgaatgggccaaatacatacccgcattctgcgaactccccctagacgaccaggtagccctcctccgagcccacgccggcgagcacctcttacttggcgcaaccaaacgctccatggtattcaaggacgtcctactcctaggcaatgactacatcgtcccccgccactgccccgaactcgctgaaatgtcccgagtctcaatcagaattctagatgaactagtcctacccttccaagaactccaaatagacgacaacgaatacgcatacctcaaagccatcatattcttcgaccccgatgccaaaggtctaagcgaccccggaaaaataaagcgactacggtcgcaagtacaagtctccctggaagactacataaacgaccgccaatacgacagccgcggacgattcggagaactactcctactcctccccactctccaatccataacatggcaaatgatcgaacaaatccaattcatcaaactattcggcatggccaaaatcgacaatcttttacaggaaatgctactttgaggactagtccctgttcccagagcccacttttttttctttttttgaaataaaatagcctgtctttcagatctcaaaggctcttttcagagccaccaaaaaaaaaaaaaaaaaaaaaaaaaaaaaaaaaaaaaaaaaaaaaaaaaaaaaaaaaaaaaaaaaaaaaaaaaaaaaaaaaaaaaaaaaaaaaaaaaaaaa

SEQ ID NO: 3664 - RNA, 1400 nt, synthetic construct
  misc_feature 1..1400: note = mRNA a-1 (hSL-A100) (opt11) from Homo sapiens__NP_000448.3__HNF4A(1-375)(K458R)
  source 1..1400: mol_type = other RNA
aggagagtcccgcagtcggcgtccagcggctctgcttgttcgtgtgtgtgtcgttgcaggccttattcaagcttaccatgcgactttccaaaaccctagtcgacatggacatggccgactactctgccgccctcgacccagcttacacaacattagagttcgaaaacgtccaagtcctgaccatgggaaacgacacaagcccatctgaaggaactaacctcaacgcccccaactccctaggagtatccgctctctgcgccatctgcggagaccgcgccaccgggaaacactacggcgcctcctcatgcgacggatgcaaaggcttcttccgccgctcagtccgcaaaaaccacatgtactcctgtcgattctcccgacaatgcgtcgtcgacaaagacaaacgcaaccaatgccgatactgccgcctcaagaaatgcttcagagccggcatgaagaaagaagccgtacaaaacgaacgagaccgcatctccacacgccgtagctcctacgaagactcaagcctcccctcaatcaacgccctacttcaggccgaagtcctctcccgacaaattaccagcccagtctccggcatcaacggcgacatccgagccaagaaaatcgcatcaatagccgatgtctgcgaaagcatgaaagaacaactccttgtcctcgtagaatgggccaaatacatccccgccttctgcgaactacccctcgatgaccaagtagccctactcagagcccacgccggcgaacacctcctcctcggcgccaccaaacgcagcatggtcttcaaagatgtactcctcctcggcaacgactacatcgtcccccgacactgccccgaacttgcagaaatgagcagagtctcaatccgcatcctcgacgaactcgtactaccattccaagaactccagatcgacgacaacgaatacgcctacctgaaagcaattatcttcttcgaccccgacgccaaaggcctctcagaccccggcaaaattaaacgcctcagaagtcaagtccaagtatccctcgaagactatatcaatgaccgccaatacgactcccgcgggcgcttcggcgaactcctcctccttctcccaaccctccaatcaatcacctggcaaatgatcgaacaaatccaattcataaaattattcggaatggccaaaatcgacaacctactccaggaaatgctcctctgaggactagtccctgttcccagagcccacttttttttctttttttgaaataaaatagcctgtctttcagatctcaaaggctcttttcagagccaccaaaaaaaaaaaaaaaaaaaaaaaaaaaaaaaaaaaaaaaaaaaaaaaaaaaaaaaaaaaaaaaaaaaaaaaaaaaaaaaaaaaaaaaaaaaaaaaaaaaaa

SEQ ID NO: 3665 - RNA, 1400 nt, synthetic construct
  misc_feature 1..1400: note = mRNA a-1 (hSL-A100) (opt11) from Homo sapiens__NP_000448.3__HNF4A(1-375)(K106R_K108R_K126R_K127R)
  source 1..1400: mol_type = other RNA
aggagagtcccgcagtcggcgtccagcggctctgcttgttcgtgtgtgtgtcgttgcaggccttattcaagcttaccatgcgactgtccaaaaccttagtcgacatggacatggcagactactcagccgccctcgacccagcatatacaacactagagttcgaaaacgtccaggtccttaccatgggcaacgacacctcaccctccgaaggcaccaacctcaacgctcccaactccctaggcgtctcagccctctgcgcgatatgcggagaccgagccaccggtaaacactacggcgcttcgagctgcgacggctgcaaaggcttcttccgtcgctcagtccgcaaaaaccacatgtactcatgccgattctcacgccaatgcgtagtagaccgcgaccgccgcaaccagtgccgatactgccgtcttaagaaatgcttccgcgccggcatgcgcagagaagcagtccaaaacgaacgcgaccgcatctcaacccggcgcagctcttacgaagactcaagccttccctcaatcaacgccctactacaagccgaagtcctaagccgccaaatcacttcacccgtatccggaataaacggcgacatccgagccaagaaaatagcctccatcgccgacgtctgcgaaagcatgaaagaacaactcctcgtcttagtcgaatgggccaaatacatccccgcattctgcgaactcccactggacgaccaagtagccctgctccgagcccacgccggcgaacacctcctcctcggcgccacgaaacgaagcatggtcttcaaagacgtccttctccttggcaacgactacatcgtcccacgccactgcccagagctagccgaaatgtcacgagtctcaatccgcatactcgacgagctagtactcccattccaagaactacaaatagacgacaacgaatacgcctatctcaaagcgatcatattcttcgaccccgacgccaaaggcctctccgacccaggcaaaatcaaacgcctccgctcccaagtccaggtgtcccttgaagactacataaacgatcgccaatacgactcacgaggaagattcggcgaactccttcttcttctccccacactccagtcaatcacatggcaaatgatcgaacagatacaattcatcaaacttttcggcatggccaaaatagacaacctcctacaggaaatgctactatgaggactagtccctgttcccagagcccacttttttttctttttttgaaataaaatagcctgtctttcagatctcaaaggctcttttcagagccaccaaaaaaaaaaaaaaaaaaaaaaaaaaaaaaaaaaaaaaaaaaaaaaaaaaaaaaaaaaaaaaaaaaaaaaaaaaaaaaaaaaaaaaaaaaaaaaaaaaaaa

SEQ ID NO: 3666 - RNA, 1400 nt, synthetic construct
  misc_feature 1..1400: note = mRNA a-1 (hSL-A100) (opt11) from Homo sapiens__NP_000448.3__HNF4A(1-375)(E285Q)
  source 1..1400: mol_type = other RNA
aggagagtcccgcagtcggcgtccagcggctctgcttgttcgtgtgtgtgtcgttgcaggccttattcaagcttaccatgcgactctccaaaacacttgtcgacatggacatggccgactactccgccgccctcgatcccgcatacaccaccctcgagttcgaaaacgtccaagtcctcaccatgggaaatgacacctcgccatccgaaggcacgaacctaaatgcccccaactcccttggcgtctccgcactctgcgccatctgcggcgaccgcgcaaccgggaaacactacggcgcctcatcctgcgacggctgcaaaggattcttccgtcgatctgtacgcaaaaaccacatgtactcttgccgattcagccgacaatgcgtcgttgacaaagacaaacgcaaccaatgccgctactgccgactcaaaaagtgcttccgcgcaggtatgaaaaaggaagcagtacaaaacgaacgagaccgcatttccacccgacgatcatcctatgaagactcctccctcccctcaatcaacgccctacttcaagccgaagtcctctcccgacaaataacctcccccgtcagcggcatcaacggcgacatcagagccaagaaaatcgcaagcatcgcagacgtatgcgagtcaatgaaagaacaactcctcgtcctagtcgaatgggcaaaatacatccccgccttctgcgaactcccactagacgaccaagtagccctcctccgcgcccacgccggagaacacctcctcctaggcgccactaaacgctccatggtcttcaaagacgtcctcctcctaggcaatgattacatcgttccccgacattgccccgaactagccgaaatgtcccgagtatccatccgcatcctcgacgaactcgtcctaccattccaagaactacaaatcgacgacaaccaatatgcatacctaaaagcaatcatcttcttcgaccccgacgccaaaggccttagcgacccaggcaaaatcaagcgactacgcagccaagtacaagtatccctagaagattacatcaacgatcgccaatacgactcccgcggccggttcggcgaactcctcctcctcctccccactctacaatccataacctggcaaatgatagaacaaatccaattcatcaagttattcggcatggccaaaatagacaacctcctccaagaaatgctactctgaggactagtccctgttcccagagcccacttttttttctttttttgaaataaaatagcctgtctttcagatctcaaaggctcttttcagagccaccaaaaaaaaaaaaaaaaaaaaaaaaaaaaaaaaaaaaaaaaaaaaaaaaaaaaaaaaaaaaaaaaaaaaaaaaaaaaaaaaaaaaaaaaaaaaaaaaaaaaa

SEQ ID NO: 3667 - RNA, 1400 nt, synthetic construct
  misc_feature 1..1400: note = mRNA a-1 (hSL-A100) (opt11) from Homo sapiens__NP_000448.3__HNF4A(1-375)(T166E)
  source 1..1400: mol_type = other RNA
aggagagtcccgcagtcggcgtccagcggctctgcttgttcgtgtgtgtgtcgttgcaggccttattcaagcttaccatgcgcctatccaaaaccctcgtcgacatggacatggccgactactcagccgcactcgaccccgcatataccactctcgagttcgaaaacgtacaagtcctcaccatggggaacgacactagcccctccgaaggcaccaacctcaacgcaccaaactccttaggggtttcagccctatgcgccatatgcggcgatagagcaacaggaaaacactacggcgcctcatcatgcgatggctgcaaaggcttcttccgccgatccgtccgaaagaaccacatgtactcatgccgcttctcacgacaatgcgtcgtcgacaaagacaagcgaaaccaatgccgctactgccgcctaaagaaatgcttccgcgccggcatgaagaaagaagcagtacaaaacgaacgcgatcgcatctccacccgcagatcgtcctacgaagacagcagcctccccagcatcaacgccctcctccaagctgaagtcctctcccgccaaatcgaatcacccgtctcaggcatcaacggtgatatccgcgcaaagaaaatagcctccatcgccgacgtctgcgaatccatgaaagaacaactcctagtcctagtagaatgggccaaatacatcccagcattctgcgagctccccctggacgatcaagtcgctctcctccgcgcccacgccggcgaacacctcctactcggagcaaccaaacgcagtatggtattcaaagacgtcctactactcggtaacgactacatagtaccccgccactgcccagaactcgccgaaatgtcccgtgtctccatacgcatcctagacgaactcgtcctccccttccaagaactacaaatcgacgacaacgaatacgcctacctaaaagccatcatcttcttcgaccccgacgctaaaggcctctccgatccaggcaaaatcaaacgcctacgaagccaagtccaagtttccctcgaagactacatcaacgacagacaatacgactcccgcggccgcttcggcgaactactcctcctacttccaacactccaaagcataacgtggcaaatgatagaacaaatccaattcatcaaactcttcggcatggctaaaatagacaacctcctccaggaaatgctcctttgaggactagtccctgttcccagagcccacttttttttctttttttgaaataaaatagcctgtctttcagatctcaaaggctcttttcagagccaccaaaaaaaaaaaaaaaaaaaaaaaaaaaaaaaaaaaaaaaaaaaaaaaaaaaaaaaaaaaaaaaaaaaaaaaaaaaaaaaaaaaaaaaaaaaaaaaaaaaaa

SEQ ID NO: 3668 - RNA, 1400 nt, synthetic construct
  misc_feature 1..1400: note = mRNA a-1 (hSL-A100) (opt11) from Homo sapiens__NP_000448.3__HNF4A(1-375)(S148A)
  source 1..1400: mol_type = other RNA
aggagagtcccgcagtcggcgtccagcggctctgcttgttcgtgtgtgtgtcgttgcaggccttattcaagcttaccatgcgactatctaaaacactcgtcgacatggacatggccgactactccgcggccctggaccccgcctacaccacgctagaattcgaaaacgtccaagtattaacaatgggaaacgacacctctccctccgaaggcaccaacctcaacgcacccaactccctcggagtctccgccctctgcgccatctgtggcgaccgagcaaccgggaaacattacggcgcatcctcctgcgacggctgcaaaggcttcttccgccgatccgtcagaaaaaaccacatgtactcgtgccgattctcacgccaatgcgtagttgacaaagacaaacgcaaccaatgccgctactgccgccttaaaaaatgcttccgcgccggaatgaaaaaagaggccgtacaaaatgaacgcgaccgaatcagcacacgccgctcttcatacgaagactccgcactcccatccatcaacgccctactacaagccgaagtcctcagccggcaaatcacatccccagtgtccggtattaacggagacatacgcgccaagaaaatagcctccatagcagacgtctgcgagtcaatgaaagaacaactcctcgtactcgtagaatgggcaaaatacatccccgccttctgcgaacttcccctcgacgaccaagtcgcactcctccgcgcccacgccggcgaacatctcctactaggagccaccaaacgttcaatggtcttcaaagacgtcctgctactcggcaacgactatatcgtccccagacactgccccgaactagcagaaatgtccagagtctcaatacgaatcctagacgaactcgtcctcccattccaagaactacaaatcgacgacaacgaatacgcctacctcaaagccatcatcttctttgaccccgacgccaaagggctctccgaccccggaaaaatcaaacgcctgcgctcacaagtccaagtatccctcgaagactacatcaacgaccgccagtacgacagccgaggacgtttcggcgaactcctactcctcctcccaacactccagtccatcacctggcaaatgatcgaacaaatccaattcataaaactcttcggcatggccaaaatcgacaacctactccaagaaatgctcctctgaggactagtccctgttcccagagcccacttttttttctttttttgaaataaaatagcctgtctttcagatctcaaaggctcttttcagagccaccaaaaaaaaaaaaaaaaaaaaaaaaaaaaaaaaaaaaaaaaaaaaaaaaaaaaaaaaaaaaaaaaaaaaaaaaaaaaaaaaaaaaaaaaaaaaaaaaaaaaa

SEQ ID NO: 3669 - RNA, 1400 nt, synthetic construct
  misc_feature 1..1400: note = mRNA a-1 (hSL-A100) (opt11) from Homo sapiens__NP_000448.3__HNF4A(1-375)(S148E)
  source 1..1400: mol_type = other RNA
aggagagtcccgcagtcggcgtccagcggctctgcttgttcgtgtgtgtgtcgttgcaggccttattcaagcttaccatgcgcctctccaaaaccctcgtcgacatggacatggccgactactcagcagccctagacccagcctacacaacactcgagttcgaaaacgtacaagtactaaccatgggcaacgacacctcaccctctgaaggaaccaacctcaacgcacccaactccctcggcgtatccgccctgtgcgccatctgcggtgatcgcgccaccggcaaacactacggggcctcaagctgcgacggctgcaaaggcttcttccgccgctctgtcaggaaaaaccacatgtacagctgccgattctcccgccaatgcgtagtcgataaagacaaacggaaccaatgccgatactgtcgcctcaagaaatgcttccgagcaggcatgaaaaaggaagcagtccaaaacgaacgggaccgaatctccactcgccgctcatcctacgaagacagcgaactaccctccattaatgccctcctccaagcagaagtactttcacgacaaataacctcccccgtctcaggcatcaacggcgacatcagagccaagaaaatcgcctccatcgccgacgtatgcgaatccatgaaagaacaactcctggtgctagtcgaatgggcaaaatatatccccgctttctgcgaactccccctagacgaccaagtcgcactcctccgagcccacgccggagagcacctcttactaggcgccaccaaacgaagcatggtcttcaaagacgtcctcctcctcggaaatgactacatcgtccccagacactgccccgaactcgccgaaatgtcacgagtctccatcagaatcctcgacgaactggtcctaccatttcaagaactacaaatcgatgacaacgaatacgcatacctcaaagcgatcatcttcttcgaccccgacgccaaagggctctccgacccaggcaaaatcaaacgcctcagaagccaggtccaagtctccctagaagactacataaacgaccgccagtatgactcccgcggcagattcggcgaactcctccttctacttccgaccctccaatccatcacctggcaaatgatcgaacaaatccaattcatcaaactcttcggcatggccaaaattgacaacctcctacaagaaatgctcctatgaggactagtccctgttcccagagcccacttttttttctttttttgaaataaaatagcctgtctttcagatctcaaaggctcttttcagagccaccaaaaaaaaaaaaaaaaaaaaaaaaaaaaaaaaaaaaaaaaaaaaaaaaaaaaaaaaaaaaaaaaaaaaaaaaaaaaaaaaaaaaaaaaaaaaaaaaaaaaa

SEQ ID NO: 3670 - RNA, 1400 nt, synthetic construct
  misc_feature 1..1400: note = mRNA a-1 (hSL-A100) (opt11) from Homo sapiens__NP_000448.3__HNF4A(1-375)(S183A)
  source 1..1400: mol_type = other RNA
aggagagtcccgcagtcggcgtccagcggctctgcttgttcgtgtgtgtgtcgttgcaggccttattcaagcttaccatgcgactcagcaaaacactagttgacatggacatggccgactacagcgcagccctggatccagcctacaccaccctcgaattcgaaaacgtacaagtcctcaccatgggtaacgacacctccccctcggagggaacaaacctcaacgcccccaactcactcggcgtcagcgcactctgcgccatatgcggcgaccgcgccaccggaaaacactacggagcctcaagctgcgacggctgcaaaggattcttcagacgcagcgtccggaaaaaccacatgtactcctgccgcttctcccgacaatgcgtcgtcgacaaagacaaacgaaaccaatgccgatactgccgcctaaaaaaatgcttccgcgctggaatgaaaaaagaagcagtacaaaacgaacgcgaccgcatatccaccagaagatcctcctacgaagactccagcctaccctcaatcaacgctctcctccaagcagaagtcctcagccgccaaatcacctcacccgtcagcggcatcaacggggacatccgcgccaaaaaaatcgccgcgattgccgacgtgtgcgaatccatgaaagagcaactcctcgtcctcgtagaatgggccaaatacatccccgccttctgcgaactacccctagacgaccaagtagcccttctacgcgcccacgccggggaacacctcctactcggcgcaaccaaaaggtcaatggtcttcaaagacgtcctcctactcggaaacgactacatcgtgcccaggcactgtccggaactcgccgaaatgtccagagtctcaatccggatactagacgaactcgtactccccttccaagaactacaaatcgacgacaacgaatacgcatacctaaaagccatcatcttcttcgacccagacgctaaaggactaagcgacccaggcaagatcaaacgactacgttcccaagtacaagtatccctggaagactacatcaacgaccgccaatacgactcacgaggtcgcttcggcgaactgctcctactcctacccaccctccaatccatcacatggcaaatgatcgaacaaatccaattcatcaaactcttcggtatggctaaaatcgacaacctactccaagaaatgcttctctgaggactagtccctgttcccagagcccacttttttttctttttttgaaataaaatagcctgtctttcagatctcaaaggctcttttcagagccaccaaaaaaaaaaaaaaaaaaaaaaaaaaaaaaaaaaaaaaaaaaaaaaaaaaaaaaaaaaaaaaaaaaaaaaaaaaaaaaaaaaaaaaaaaaaaaaaaaaaaa

SEQ ID NO: 3671 - RNA, 1400 nt, synthetic construct
  misc_feature 1..1400: note = mRNA a-1 (hSL-A100) (opt11) from Homo sapiens__NP_000448.3__HNF4A(1-375)(S183E)
  source 1..1400: mol_type = other RNA
aggagagtcccgcagtcggcgtccagcggctctgcttgttcgtgtgtgtgtcgttgcaggccttattcaagcttaccatgcgcctctccaaaaccctcgtcgacatggacatggccgactactccgccgccctcgacccagcctacacaacactagagttcgaaaacgtccaagtcctaaccatgggaaacgatacctccccctcggaagggaccaacctcaacgccccaaattcacttggagtctccgccctatgcgccatatgtggagaccgcgctaccggaaaacactatggcgcgtcatcctgcgacggatgcaaaggcttcttcagacgctcggtccgcaaaaaccacatgtactcctgccgattctcccgccaatgcgtcgtcgacaaagacaaaagaaaccaatgcaggtactgccgtctgaagaaatgcttccgcgccggaatgaagaaagaagccgtccaaaacgaacgcgaccgaatcagcaccagacgcagctcctacgaagactcctcactcccatcaatcaacgccctactccaagccgaagtcctctcccgccaaatcacctccccagtaagcggaatcaacggcgacatccgcgccaagaaaatagccgaaatagccgacgtctgcgaatcaatgaaagaacagctactcgtcctcgtcgaatgggccaaatacatacccgccttctgcgaactccctctcgacgaccaagtcgcactactcagagcccacgccggagaacacctactcctcggagccacgaaacgatccatggtattcaaagacgtactcctccttggtaacgattacatcgtcccaagacactgcccagaactcgccgaaatgtccagagtatcaatccgaatcctcgacgagctagtactcccctttcaggaactacaaatagatgacaacgaatacgcatacctaaaagccatcatcttctttgaccccgacgccaaaggcctctccgacccaggcaaaatcaaacgcctacgctcccaagttcaagtatccctcgaagactacatcaatgaccgccaatacgacagccgaggacgcttcggcgaactactcctgctactccccaccctacaatccatcacttggcaaatgatcgaacaaatccaattcatcaaactcttcggcatggccaaaatcgacaaccttctccaggaaatgctcctctgaggactagtccctgttcccagagcccacttttttttctttttttgaaataaaatagcctgtctttcagatctcaaaggctcttttcagagccaccaaaaaaaaaaaaaaaaaaaaaaaaaaaaaaaaaaaaaaaaaaaaaaaaaaaaaaaaaaaaaaaaaaaaaaaaaaaaaaaaaaaaaaaaaaaaaaaaaaaaa

SEQ ID NO: 3672 - RNA, 1400 nt, synthetic construct
  misc_feature 1..1400: note = mRNA a-1 (hSL-A100) (opt11) from Homo sapiens__NP_000448.3__HNF4A(1-375)(S461A)
  source 1..1400: mol_type = other RNA
aggagagtcccgcagtcggcgtccagcggctctgcttgttcgtgtgtgtgtcgttgcaggccttattcaagcttaccatgcgactctccaaaaccctcgtcgacatggacatggcagattactccgctgccctcgacccggcctacaccacactagagttcgaaaacgttcaagtattaaccatgggcaacgacacatcccccagcgaaggcaccaatctaaacgcacccaactccctcggggtctcagcactatgcgccatctgcggagatcgcgctactggcaaacactacggagcctcctcctgcgacggctgcaaaggcttcttccgaagatcagtccgcaaaaaccacatgtactcatgccgcttctctcgccaatgcgtcgtcgacaaagacaaacgaaaccagtgccgctactgccgcctaaagaaatgctttcgcgccggcatgaagaaagaagcagtacaaaacgaacgcgaccgcatctccacccgccggtcaagctacgaggactcatcactcccatcaatcaacgctctcctccaagcagaagtccttagccgacaaatcacatcccccgtttccggaatcaacggcgacatccgagcaaagaaaatcgcctctatcgcagacgtatgcgaatccatgaaagaacaactcctagtcctagtcgaatgggcaaaatatatacccgccttctgcgaactgcccctagacgatcaagtcgcactactccgagcccacgccggcgagcacctcctgctcggcgccacaaaacgatccatggtattcaaagacgtactactcctcgggaacgactacatcgtaccccgccactgccccgagctcgccgaaatgtcacgtgtctcaattcgcatactagacgagctagtcctccccttccaagaactacaaatagacgacaacgaatacgcatacctaaaagccatcatcttcttcgaccccgatgccaaaggactatccgaccccggcaaaatcaaacgccttcgttcacaagtgcaagtctcgctcgaagactacatcaacgaccgccaatacgactccagaggccgattcggagaactcctactcctcctccccaccctccaatccatcacatggcaaatgatagaacaaatccaattcataaaactcttcggcatggccaaaatcgacaacctgctccaagaaatgctcctctgaggactagtccctgttcccagagcccacttttttttctttttttgaaataaaatagcctgtctttcagatctcaaaggctcttttcagagccaccaaaaaaaaaaaaaaaaaaaaaaaaaaaaaaaaaaaaaaaaaaaaaaaaaaaaaaaaaaaaaaaaaaaaaaaaaaaaaaaaaaaaaaaaaaaaaaaaaaaaa

SEQ ID NO: 3673 - RNA, 1400 nt, synthetic construct
  misc_feature 1..1400: note = mRNA a-1 (hSL-A100) (opt11) from Homo sapiens__NP_000448.3__HNF4A(1-375)(S461E)
  source 1..1400: mol_type = other RNA
aggagagtcccgcagtcggcgtccagcggctctgcttgttcgtgtgtgtgtcgttgcaggccttattcaagcttaccatgcgactgtccaaaaccctagtcgacatggacatggcagactacagcgcagcactcgatcccgcctacaccaccctagagttcgaaaacgtacaagtactaacaatgggaaacgacacctctccatccgaaggcacaaacctcaacgcacccaactccctcggcgtctccgcactttgcgcaatctgcggcgaccgagccaccggcaaacattacggagcctccagctgcgacggctgcaagggattcttccgccgcagcgtccgcaaaaaccacatgtactcgtgccgcttctcacgacagtgcgtagtcgacaaagacaaacgcaaccaatgcagatactgcagacttaaaaagtgcttccgcgcgggaatgaagaaagaagccgtccaaaacgaacgagatcgcatctccacccgccggagctcatacgaagactcatcactaccatcaataaacgccctcctacaagccgaagtcctatcccgccaaataacctcccccgtctctggcatcaacggagacatccgcgccaagaaaatcgcaagcatcgccgacgtctgcgaatcaatgaaagagcaactactcgtcctagtagaatgggcaaaatacataccagccttctgcgaactccccctagacgaccaagtcgcgctactccgagcccacgcaggagaacaccttctcctaggcgcaaccaaacgctccatggtatttaaagacgtcctactcctgggcaacgactacatagtcccccgccattgcccagaactcgccgaaatgtcacgcgtatcgatacgcatcctcgacgagctagtcctccccttccaagaactacaaatagacgacaacgaatacgcctacttgaaagccataatcttcttcgacccagacgccaaaggcctctccgacccaggcaaaataaaacgcctacgcagccaggtacaggtcagcctcgaagactatatcaacgaccgtcaatacgactcccgaggccgattcggagaactcctcctactcctaccaaccctccaatcaatcacctggcaaatgatcgaacaaatacaattcatcaaactgttcggcatggcaaaaatagacaacctacttcaagaaatgctcttatgaggactagtccctgttcccagagcccacttttttttctttttttgaaataaaatagcctgtctttcagatctcaaaggctcttttcagagccaccaaaaaaaaaaaaaaaaaaaaaaaaaaaaaaaaaaaaaaaaaaaaaaaaaaaaaaaaaaaaaaaaaaaaaaaaaaaaaaaaaaaaaaaaaaaaaaaaaaaaa

SEQ ID NO: 3674 - RNA, 1400 nt, synthetic construct
  misc_feature 1..1400: note = mRNA a-1 (hSL-A100) (opt11) from Homo sapiens__NP_000448.3__HNF4A(1-375)(S142A_S143A_S313A)
  source 1..1400: mol_type = other RNA
aggagagtcccgcagtcggcgtccagcggctctgcttgttcgtgtgtgtgtcgttgcaggccttattcaagcttaccatgcgcctctccaaaacccttgtcgacatggacatggcagactactccgccgcacttgacccggcttacacaaccctagaattcgaaaacgtccaagtactcaccatgggaaatgacacctcaccctctgaagggaccaacctaaacgcaccaaactcactcggagtcagcgccctatgcgccatctgcggcgaccgcgcaaccggaaaacactacggcgcctcctcttgcgacggctgcaaaggcttcttccgaagatccgtcagaaaaaaccatatgtacagctgccgcttctcacgacaatgcgtcgtcgacaaagacaaaagaaaccaatgcagatattgccgactcaaaaaatgctttcgagccggcatgaaaaaggaagcagtccaaaacgaacgcgaccgcatttccacccgcagagccgcctacgaagacagctccctccccagcatcaacgcactactccaagctgaagtattatcccgccaaatcacctccccagtctccggcatcaacggcgacatacgggccaaaaaaatcgcctcaatcgccgacgtctgcgaatccatgaaagaacaactcctagtcctagtcgaatgggccaaatacatacccgcattctgcgaactacctttagacgaccaagtcgccctcttacgagcccacgccggcgaacatctactgcttggcgccaccaaacgatccatggttttcaaagacgtactactcctcggaaacgactacatcgtcccacgtcactgcccagaactagccgaaatgtcccgcgtctcaatccgcatcctcgacgaactcgtactcccctttcaagaactacaaatcgacgacaacgagtacgcctacctcaaagccatcatcttcttcgaccccgacgcaaaaggcctctccgaccccggcaaaattaaacgacttagagcacaagtacaagtcagcctagaagactacataaatgaccgccaatacgacagcagaggccgcttcggcgagctcctactcctcctccccaccctacaatcaattacctggcagatgatcgaacaaatacaattcataaaacttttcggaatggccaaaatcgacaacctactccaagaaatgctcctctgaggactagtccctgttcccagagcccacttttttttctttttttgaaataaaatagcctgtctttcagatctcaaaggctcttttcagagccaccaaaaaaaaaaaaaaaaaaaaaaaaaaaaaaaaaaaaaaaaaaaaaaaaaaaaaaaaaaaaaaaaaaaaaaaaaaaaaaaaaaaaaaaaaaaaaaaaaaaaa

SEQ ID NO: 3675 - RNA, 1400 nt, synthetic construct
  misc_feature 1..1400: note = mRNA a-1 (hSL-A100) (opt11) from Homo sapiens__NP_000448.3__HNF4A(1-375)(S142A_S143A_S313A_K458R)
  source 1..1400: mol_type = other RNA
aggagagtcccgcagtcggcgtccagcggctctgcttgttcgtgtgtgtgtcgttgcaggccttattcaagcttaccatgcgcctcagcaaaacactagtagacatggacatggcagactactccgccgccctagacccagcctacacaaccctcgaattcgaaaacgtccaagtcctaacgatgggcaacgacacatccccctccgagggcaccaacctcaacgcccccaactctctcggcgtctctgccctctgcgccatctgcggcgaccgcgccaccggaaaacactacggagccagctcatgcgacggctgcaaaggattctttcgacgctccgttagaaaaaaccacatgtactcatgccgtttctctcgccaatgcgtcgtcgacaaagacaaacgtaaccagtgccgctactgccgcctaaaaaaatgcttccgcgcaggcatgaaaaaagaagccgtccaaaacgagagagaccgcatatccacccgccgagccgcctacgaagactcttcactaccgtccataaacgccctcctacaagccgaagtcctatcacgacaaataacctcccccgtcagcggcatcaacggcgacatcagagccaagaaaatagcctctatagcagacgtatgcgaatcaatgaaagaacaactcctagtactagtcgaatgggccaaatacattcccgccttctgcgaactgccactcgacgaccaagtggccctactccgtgcccacgccggcgaacatttactcctcggcgccaccaaacgatcaatggtattcaaagacgtactactcctcggcaacgactacatagtcccccgccactgccccgaactcgccgaaatgtcacgtgtctctatccggatcctagacgaactcgtcctccccttccaagaactccaaatcgacgacaacgaatacgcctacctaaaagccatcatattcttcgatcccgacgccaagggtctctccgacccaggaaaaatcaaacgcctacgcgcacaagtacaagtatccctcgaagactacatcaacgaccgacaatacgacagccgcggccgattcggcgaactactccttctcctccccacactacaatcaataacctggcaaatgatcgaacaaatccagttcataaaactctttggcatggccaaaatagacaacctcctccaggaaatgctcctctgaggactagtccctgttcccagagcccacttttttttctttttttgaaataaaatagcctgtctttcagatctcaaaggctcttttcagagccaccaaaaaaaaaaaaaaaaaaaaaaaaaaaaaaaaaaaaaaaaaaaaaaaaaaaaaaaaaaaaaaaaaaaaaaaaaaaaaaaaaaaaaaaaaaaaaaaaaaaaa

SEQ ID NO: 3676 - RNA, 1400 nt, synthetic construct
  misc_feature 1..1400: note = mRNA a-1 (hSL-A100) (opt11) from Homo sapiens__NP_000448.3__HNF4A(1-375)(S142A_S143A_S167A_S313A_ S378A_T429A_T432A_S436A_K458R)
  source 1..1400: mol_type = other RNA
aggagagtcccgcagtcggcgtccagcggctctgcttgttcgtgtgtgtgtcgttgcaggccttattcaagcttaccatgcgcctaagcaaaaccctagtcgacatggacatggcagactactccgccgccctcgaccccgcctacaccaccctagaattcgaaaacgttcaggtcctcaccatggggaacgacacatcgccaagcgaaggaaccaaccttaacgccccaaactccctgggcgtctccgccctttgcgccatctgcggagaccgcgccacaggcaaacactatggcgcctccagctgcgacggctgcaaaggcttcttccgacgctcagtacggaaaaaccacatgtactcatgccgcttctcacgccaatgcgtcgtcgacaaagacaaacgcaaccaatgccgctactgccgactcaaaaaatgcttccgcgcaggcatgaaaaaggaagccgtccaaaacgaacgcgaccgtatctcaacccgacgtgctgcatacgaagactcatccctcccctccatcaacgccctactccaggccgaagtcctgagtcgacaaatcacagcccccgtctcaggcatcaacggcgacatccgagcaaagaaaatcgcctctatagccgacgtctgcgaatcaatgaaagaacaactcctcgtcctcgtagaatgggccaaatacatccccgcattctgcgaactacccctcgacgaccaagtcgccctactaagagcccacgccggcgaacaccttctgcttggcgccacaaaacgcagcatggtattcaaagacgtactactcctcggcaacgactacatcgtaccccgacactgccccgaactcgccgaaatgtcccgcgtctccatacgcatcctagacgaactggtcctccccttccaggaactccaaatcgacgacaacgaatacgcctacctcaaagccatcatattcttcgacccagacgcaaaaggcctcagcgaccccggcaaaatcaaaagactccgcgcccaagtacaagtcagcctagaagattacataaacgaccgccaatacgatagcagaggccgattcggcgaactcctcctactcctacccacactacaatcaatcacctggcaaatgatagaacaaatccaattcatcaagctattcggcatggcaaaaattgacaacctactacaagaaatgctcctctgaggactagtccctgttcccagagcccacttttttttctttttttgaaataaaatagcctgtctttcagatctcaaaggctcttttcagagccaccaaaaaaaaaaaaaaaaaaaaaaaaaaaaaaaaaaaaaaaaaaaaaaaaaaaaaaaaaaaaaaaaaaaaaaaaaaaaaaaaaaaaaaaaaaaaaaaaaaaaa

SEQ ID NO: 3677 - RNA, 1400 nt, synthetic construct
  misc_feature 1..1400: note = mRNA a-1 (hSL-A100) (opt11) from Homo sapiens__NP_000448.3__HNF4A(1-375)(S142A_S143A_S148A_S167A_ S313A_S378A_T429A_T432A_S436A_K458R)
  source 1..1400: mol_type = other RNA
aggagagtcccgcagtcggcgtccagcggctctgcttgttcgtgtgtgtgtcgttgcaggccttattcaagcttaccatgcgcctttccaaaaccctagtcgacatggacatggccgactactcagccgcactagaccccgcctatactaccctagagttcgaaaacgtccaagtcctcaccatgggcaatgacacctccccatccgaaggcaccaacctcaacgcccccaactcactaggagtctccgccctttgcgccatctgcggcgaccgcgccacaggaaaacactacggcgcgtcaagctgcgatggatgcaaaggtttcttccgtcgttccgtccgcaaaaaccacatgtattcctgccgattctcgcgccaatgcgtcgtcgacaaagacaaacgaaaccaatgccgatactgccgcctcaaaaagtgcttccgcgccggcatgaagaaagaagccgtccaaaacgaacgcgacagaatatcaacccgacgagccgcctacgaagactcagccctcccctcaataaatgccctcctccaagcagaggtcctttccagacagatcaccgcccccgtctccggcatcaacggcgacatcagagccaagaaaatcgcctccatcgccgacgtctgcgaatccatgaaagaacaacttctagttctcgtcgaatgggccaaatacatccccgccttctgcgaactaccccttgacgaccaagtcgctctcctgcgcgcccacgccggcgaacacctccttctcggagcaactaaacgctccatggtgttcaaagacgtcctcctcctcggcaacgactacatcgtcccccgacactgccccgaactagctgaaatgtcacgcgtcagcatcagaatcctcgacgaactcgtcctccccttccaagaactccaaatcgatgacaacgagtacgcctatcttaaagccatcatattcttcgacccagacgcaaaaggtctctccgaccccggcaaaataaaacgactccgcgcccaagtccaagtttccctcgaagactacatcaacgaccgacaatacgattcccgcggccgattcggcgaactcctcctactccttcccaccctccagtccataacatggcaaatgatcgaacaaatccaattcataaaactcttcggcatggccaaaatagacaacctcctccaagagatgctactctgaggactagtccctgttcccagagcccacttttttttctttttttgaaataaaatagcctgtctttcagatctcaaaggctcttttcagagccaccaaaaaaaaaaaaaaaaaaaaaaaaaaaaaaaaaaaaaaaaaaaaaaaaaaaaaaaaaaaaaaaaaaaaaaaaaaaaaaaaaaaaaaaaaaaaaaaaaaaaa

SEQ ID NO: 3678 - RNA, 1400 nt, synthetic construct
  misc_feature 1..1400: note = mRNA a-1 (hSL-A100) (opt11) from Homo sapiens__NP_000448.3__HNF4A(1-375)(K106R_K108R_K126R_K127R_ S142A_S143A_S148A_S167A_S313A_S378A_T429A_T432A_S436A_K458R )
  source 1..1400: mol_type = other RNA
aggagagtcccgcagtcggcgtccagcggctctgcttgttcgtgtgtgtgtcgttgcaggccttattcaagcttaccatgcgcctctccaagaccctcgtcgacatggacatggcagactacagcgcagccctagaccccgcctacaccacccttgagttcgaaaacgtccaagtcctaacaatgggaaacgacacctcaccatccgaaggcacaaacctaaacgcccccaactcacttggcgtttcggccctctgcgccatatgcggagaccgcgccaccggcaaacactacggagcatcctcctgcgacggctgtaaaggcttcttcagacgatccgtacgcaaaaaccacatgtactcctgccgcttcagcagacaatgcgtcgtcgaccgcgaccgccgcaaccaatgccgctactgccgcctaaagaaatgcttccgcgcaggcatgcgccgagaagcagtccaaaacgaacgagaccgaataagcacccgcagagccgcgtacgaagactccgccctcccatcaatcaacgcacttctacaagccgaagtactctcccgccaaataaccgccccagtatccggaatcaacggcgacatccgcgccaagaaaatcgcttccatagcagacgtctgtgaatccatgaaagagcaactcctcgtcctcgtcgagtgggccaaatacatccccgccttctgcgagctacccctcgacgaccaagtcgccctcctccgagcccacgctggcgaacacctcctactcggcgccaccaaaagatccatggttttcaaagacgtactccttctgggaaacgactacatcgtacccaggcactgccccgagctagccgaaatgtccagagtctcaatccgcatactcgacgagctcgtccttccctttcaagaacttcaaatagacgacaacgaatacgcatacctgaaagccatcatcttcttcgaccccgacgccaaaggactatccgacccaggcaaaatcaaacgcctacgagcacaagtacaagtctccctagaagactacataaacgaccgccaatacgactcgagaggccgcttcggcgaactactccttctcctccctaccctacaaagcatcacctggcaaatgatcgaacaaatccaattcataaaactcttcggaatggccaaaatcgacaatttactccaggaaatgttactctgaggactagtccctgttcccagagcccacttttttttctttttttgaaataaaatagcctgtctttcagatctcaaaggctcttttcagagccaccaaaaaaaaaaaaaaaaaaaaaaaaaaaaaaaaaaaaaaaaaaaaaaaaaaaaaaaaaaaaaaaaaaaaaaaaaaaaaaaaaaaaaaaaaaaaaaaaaaaaa

SEQ ID NO: 3679 - RNA, 1400 nt, synthetic construct
  misc_feature 1..1400: note = mRNA a-1 (hSL-A100) (opt11) from Homo sapiens__NP_000448.3__HNF4A(1-375)(S142A_S143A_S148A_T166A_ S167A_S313A_S378A_T429A_T432A_S436A_K458R)
  source 1..1400: mol_type = other RNA
aggagagtcccgcagtcggcgtccagcggctctgcttgttcgtgtgtgtgtcgttgcaggccttattcaagcttaccatgcgcctctccaaaacactcgtcgatatggacatggccgactacagcgctgcccttgaccccgcgtacaccaccctagaattcgaaaacgtccaagttctcaccatgggcaacgacacctccccctcagaaggaaccaacctaaatgcccccaactctctcggcgtctccgctctctgcgccatctgcggcgaccgagccaccggaaaacactacggagcctcctcctgcgacgggtgcaaaggcttcttcagaagatccgtccgcaaaaaccacatgtactcatgccggttctcccgacaatgcgtagtcgacaaagacaaacgcaaccaatgccgctactgccgcctcaaaaaatgctttcgcgccggcatgaagaaagaagcagtacaaaacgaaagagacagaatctcaactcgcagagccgcctacgaagactcggcgctcccctctatcaacgccctgcttcaagccgaagtcctctcacgccaaatcgccgcacccgtatccggaatcaacggcgatatccgcgcaaaaaaaatcgcatccatcgccgacgtctgcgaatccatgaaggaacaactgctagtcctcgtagaatgggccaaatacatccctgccttctgtgaactccccctagacgatcaagtcgccctcctacgcgcccacgccggcgagcacctactacttggagccaccaaacgttctatggtcttcaaagacgtactcttactcggcaacgactacatagtcccccgccactgcccagaactggccgaaatgagccgcgtctcaatacgaatcctagacgaactcgtgctaccattccaagaactacaaatcgacgacaacgaatacgcatacctaaaagctattatcttcttcgaccccgacgccaaaggcctatccgaccccggcaaaataaaacgcctgcgagcccaagtacaagtaagcctcgaagactacatcaacgaccgacagtacgactcccgaggccgcttcggcgaactcctacttctcctccccaccctacaatccatcacctggcaaatgatagaacaaatccaattcatcaaactcttcggaatggcaaaaatcgataacctgctccaagaaatgctcctctgaggactagtccctgttcccagagcccacttttttttctttttttgaaataaaatagcctgtctttcagatctcaaaggctcttttcagagccaccaaaaaaaaaaaaaaaaaaaaaaaaaaaaaaaaaaaaaaaaaaaaaaaaaaaaaaaaaaaaaaaaaaaaaaaaaaaaaaaaaaaaaaaaaaaaaaaaaaaaa

SEQ ID NO: 3680 - RNA, 1400 nt, synthetic construct
  misc_feature 1..1400: note = mRNA a-1 (hSL-A100) (opt11) from Homo sapiens__NP_000448.3__HNF4A(1-375)(S87A_S142A_S143A_S148A_T 166A_S167A_S313A_S378A_T429A_T432A_S436A_K458R)
  source 1..1400: mol_type = other RNA
aggagagtcccgcagtcggcgtccagcggctctgcttgttcgtgtgtgtgtcgttgcaggccttattcaagcttaccatgcgcctctccaaaaccctcgtcgacatggacatggcagactactctgccgccctcgaccccgcctacacaaccctcgagttcgaaaacgtacaagtcttaaccatgggaaacgacacctcaccatcagaaggtacaaacctcaacgcccctaactcactcggcgtatctgcactatgcgcaatatgcggagaccgtgccactggcaaacactacggagcctcatcatgtgacggctgcaaaggcttcttccgacgtgcagtccgcaaaaaccatatgtactcctgccgattctcccgacaatgcgtcgtagacaaagacaaacgaaaccaatgccggtactgccgcctaaagaaatgcttccgcgccgggatgaagaaagaagccgtacaaaacgaacgagatcgcatctccacacgccgagccgcctacgaagactccgccctcccctccatcaacgccctactccaggccgaagtactgtcgcgccaaatcgccgcgccagtttccggaataaacggcgacatccgcgccaagaaaatcgcctcaatcgcagacgtatgcgaatccatgaaagaacaactcctcgtcctcgtagaatgggccaaatacatccccgcattctgcgaactacccctagatgaccaagtagcactattacgcgctcacgccggagaacacctcctcctcggagccactaaacgctccatggtcttcaaagacgtcctcctcctcggcaacgactacatcgtaccccgccactgccccgaactcgcagaaatgtcaagggtctccataagaatcctagacgagctagtcctaccgttccaagaactccaaatcgacgacaatgaatacgcatacctcaaagccataatcttcttcgacccagacgccaaaggcctctcagaccccggcaaaatcaaacgactacgcgcccaggtccaagtctccctagaagactacatcaacgacagacaatacgacagccgagggagattcggcgaactcctcctactcctccccaccctccaatcaataacatggcaaatgatcgaacaaatccagttcatcaaactcttcggcatggccaaaatcgacaacctactccaagaaatgctcctctgaggactagtccctgttcccagagcccacttttttttctttttttgaaataaaatagcctgtctttcagatctcaaaggctcttttcagagccaccaaaaaaaaaaaaaaaaaaaaaaaaaaaaaaaaaaaaaaaaaaaaaaaaaaaaaaaaaaaaaaaaaaaaaaaaaaaaaaaaaaaaaaaaaaaaaaaaaaaaa

SEQ ID NO: 3681 - RNA, 1400 nt, synthetic construct
  misc_feature 1..1400: note = mRNA a-1 (hSL-A100) (opt11) from Homo sapiens__NP_000448.3__HNF4A(1-375)(S87A_K106R_K108R_K126R_K 127R_S142A_S143A_S148A_T166A_S167A_S313A_S378A_T429A_T432A_ S436A_K458R)
  source 1..1400: mol_type = other RNA
aggagagtcccgcagtcggcgtccagcggctctgcttgttcgtgtgtgtgtcgttgcaggccttattcaagcttaccatgcgcctcagcaagacactcgtagacatggacatggccgactactccgccgcacttgaccccgcctataccaccctcgaattcgaaaacgtacaagtactcacaatgggaaacgacacctccccatccgaaggtaccaacttaaacgcccccaactccttaggcgtctccgccctctgcgcaatctgcggcgaccgagctacaggtaaacactacggcgcatcaagctgtgacggctgcaaaggcttcttccgacgagccgtccgcaaaaaccacatgtactcatgcagattctcccgacaatgcgtcgtggacagagaccgacgaaaccaatgccgctactgccgcctcaaaaaatgcttccgcgccggcatgcgacgtgaagcagtccaaaacgaacgtgatcgcataagcactagacgcgccgcctacgaagactccgccctgccctccatcaacgccctactacaagccgaagtccttagcagacaaatagccgccccagtctccggaataaacggagacatacgtgccaaaaaaatagcatccatcgccgacgtatgcgaaagcatgaaagaacaactccttgtcctagtagaatgggctaaatacatccccgcattctgcgaactccccctagacgaccaagtagccctcctccgagcacacgccggcgaacacctcctactcggcgccacaaaaagaagcatggtcttcaaagacgtcctacttctaggaaacgactacatcgtccctcgccactgccccgaactcgccgagatgagtagagtctctatcagaatcctcgacgaactcgtactcccattccaagaactacaaatagacgacaacgaatacgcctacctcaaagcgatcatcttcttcgaccccgacgccaaaggcctatcagaccccggcaaaatcaaaagactccgcgcccaagtacaagtctccctagaagactacatcaacgaccgccagtacgacagccgaggccgattcggcgaactacttctactcctcccaacactacaatcaatcacctggcagatgatcgaacaaatccaattcatcaaactattcggcatggccaaaatagacaaccttctacaagaaatgctcctatgaggactagtccctgttcccagagcccacttttttttctttttttgaaataaaatagcctgtctttcagatctcaaaggctcttttcagagccaccaaaaaaaaaaaaaaaaaaaaaaaaaaaaaaaaaaaaaaaaaaaaaaaaaaaaaaaaaaaaaaaaaaaaaaaaaaaaaaaaaaaaaaaaaaaaaaaaaaaaa

SEQ ID NO: 3682 - RNA, 1400 nt, synthetic construct
  misc_feature 1..1400: note = mRNA a-1 (hSL-A100) (opt11) from Homo sapiens__NP_000448.3__HNF4A(1-375)(S87A_K106R_K108R_K126R_K 127R)
  source 1..1400: mol_type = other RNA
aggagagtcccgcagtcggcgtccagcggctctgcttgttcgtgtgtgtgtcgttgcaggccttattcaagcttaccatgcgcctctccaaaacactcgtcgacatggacatggccgactactcagcagccctagaccccgcttacaccaccctcgagttcgaaaacgtacaagtcctcaccatgggcaacgacaccagcccatctgaaggtaccaacctcaacgcaccaaactccctcggcgtttcagctctatgcgccatatgcggagaccgcgccaccggcaaacactacggagcctcctcttgcgacggctgcaaaggcttcttccgcagagccgtacgcaaaaaccacatgtacagctgtagattttcccgccaatgcgtcgtcgaccgcgaccgccgcaaccagtgcagatattgccgactcaagaaatgcttccgcgcaggaatgcgccgcgaagccgtacaaaacgaacgcgaccgcatctccacacgccgctcatcttacgaagactcctccctaccaagcatcaacgcactacttcaagcagaagtcctatcccgacaaatcacctcccccgtctcaggcataaacggcgacataagggcaaagaaaatcgcctccatagccgacgtatgcgaatcaatgaaagaacaactcctagtcctcgtcgaatgggccaaatacatccccgccttctgcgaactgcccctcgacgaccaagtagcacttctccgcgcccacgccggcgaacacctcctactcggcgccaccaaacgttccatggtcttcaaagacgtcctcctacttggtaacgactacatcgtaccccgccactgccctgaactcgcagaaatgtcccgcgtctcaataagaatcctcgacgagctagttctccccttccaagaactacaaatcgacgacaacgaatacgcctacctcaaagccatcatatttttcgaccccgacgccaaaggcctttccgaccccggcaaaataaaacgcctccgctctcaagtccaggtcagcctcgaagactacatcaacgaccgccaatacgactctcgtggccgcttcggagaactactactactcctccccacactacaatccatcacctggcaaatgatcgaacaaatccaattcatcaaactcttcggcatggccaaaattgacaacctactccaagaaatgctcctatgaggactagtccctgttcccagagcccacttttttttctttttttgaaataaaatagcctgtctttcagatctcaaaggctcttttcagagccaccaaaaaaaaaaaaaaaaaaaaaaaaaaaaaaaaaaaaaaaaaaaaaaaaaaaaaaaaaaaaaaaaaaaaaaaaaaaaaaaaaaaaaaaaaaaaaaaaaaaaa

SEQ ID NO: 3683 - RNA, 1400 nt, synthetic construct
  misc_feature 1..1400: note = mRNA a-1 (hSL-A100) (opt11) from Homo sapiens__NP_000448.3__HNF4A(1-375)(S87A_K106R_K108R_K126R_K 127R_S142A_S143A_S148A_T166A_S167A_S313A_S378A_T429A_T432A_ S436A_K458R_S461A)
  source 1..1400: mol_type = other RNA
aggagagtcccgcagtcggcgtccagcggctctgcttgttcgtgtgtgtgtcgttgcaggccttattcaagcttaccatgcgcctaagcaaaaccctagtagacatggacatggcagactactcagcagcactagaccccgcctacaccaccctcgaatttgaaaacgttcaagtcctaacaatgggcaacgacacctctcccagcgaaggcacaaacctcaacgcccccaactcactcggggtctccgccctctgcgccatatgcggtgaccgtgcaaccggcaaacactacggcgcctcatcctgcgacggctgcaaaggattcttccgacgcgccgtacgcaaaaaccacatgtactcctgcagattctcacgccaatgcgtcgtggaccgagaccgccgcaaccaatgccgttactgccgcctcaagaaatgcttccgagccggaatgcgaagagaagccgtacaaaacgaacgcgaccgcatctccacacgacgagcagcctacgaagactccgccctaccctccataaacgcactcctccaagccgaagtactctcccgacaaatagccgcaccagtctccggcataaacggagacatccgagcaaagaaaatagcctcaatcgccgacgtatgcgaatcaatgaaagaacaacttctcgtcctcgtcgaatgggccaaatatatacccgccttctgcgaactccccctagacgaccaagtggcccttcttcgcgcccacgccggcgaacacctcctactcggagccaccaaacgctccatggtcttcaaagacgtactactcctcggtaacgactacatcgtcccacgacactgccccgaactagccgaaatgtcacgcgtctccatccgcatcctagacgaactcgtactcccattccaagaactccaaatcgacgacaacgaatacgcatacctcaaagccatcatcttcttcgacccagacgccaaaggcctatccgacccaggaaaaataaaacgcttacgcgcacaagtccaagtctccctcgaagactacatcaacgaccgtcagtacgacagccgggggagattcggcgaactgctactactacttcccaccctccaatccatcacctggcaaatgatagaacaaatacaattcatcaaactattcggcatggccaaaatcgacaacctcctacaagaaatgctactctgaggactagtccctgttcccagagcccacttttttttctttttttgaaataaaatagcctgtctttcagatctcaaaggctcttttcagagccaccaaaaaaaaaaaaaaaaaaaaaaaaaaaaaaaaaaaaaaaaaaaaaaaaaaaaaaaaaaaaaaaaaaaaaaaaaaaaaaaaaaaaaaaaaaaaaaaaaaaaa

SEQ ID NO: 3684 - RNA, 1400 nt, synthetic construct
  misc_feature 1..1400: note = mRNA a-1 (hSL-A100) (opt11) from Homo sapiens__NP_000448.3__HNF4A(1-375)(S87A_K106R_K108R_K126R_K 127R_S142A_S143A_S148A_T166A_S167A_S313A_S378A_T429A_T432A_ S436A_K458R_S461E)
  source 1..1400: mol_type = other RNA
aggagagtcccgcagtcggcgtccagcggctctgcttgttcgtgtgtgtgtcgttgcaggccttattcaagcttaccatgcgcctctccaaaaccctcgtcgacatggacatggcagactacagcgccgccctcgaccccgcatacaccaccctagagttcgaaaacgtccaagtcctaacgatgggaaacgacacctcaccatccgaaggcacaaacctcaacgccccgaactccctaggagtctcagccctctgcgccatatgcggcgaccgagccacaggcaaacactacggcgcctcatcgtgcgacggatgcaaaggattcttccgacgagctgtccgcaaaaaccacatgtactcctgccgcttctcccgccaatgcgtcgttgaccgcgaccggcgcaaccaatgcagatactgccgactcaagaaatgcttccgcgcaggcatgcgacgagaagccgtccaaaacgaacgcgaccgcatctcaaccagacgcgccgcctacgaagactctgcactccccagcatcaacgccctcctgcaagccgaagtattatcccgacagatcgccgcccccgtatccggcatcaacggcgacatccgcgccaagaaaatcgcctccatcgcagatgtctgcgaaagcatgaaagaacaattactcgtactcgtcgaatgggcaaaatacatccccgcattctgcgaactccccctcgacgaccaagtcgccctattacgcgcccacgcaggagaacaccttctcttaggcgcaacgaaacgcagcatggtcttcaaagacgtcctactcctcggcaacgactacatcgtcccccgtcactgccccgaactcgccgaaatgtcccgcgtatccatccgcatcctcgacgaactcgtcctaccattccaagaactccaaatcgacgacaacgaatacgcctacctcaaagcaatcatcttcttcgaccccgacgcaaaaggactatccgaccccggcaaaatcaaacgcctccgcgcacaagtccaagtctccctcgaagactacataaacgacagacaatacgacagccgaggcagattcggagaacttctcctcctcctccccacactacaatccatcacatggcaaatgatcgaacaaatacaattcatcaaactcttcggcatggcaaaaatcgacaacctgctccaagaaatgctactttgaggactagtccctgttcccagagcccacttttttttctttttttgaaataaaatagcctgtctttcagatctcaaaggctcttttcagagccaccaaaaaaaaaaaaaaaaaaaaaaaaaaaaaaaaaaaaaaaaaaaaaaaaaaaaaaaaaaaaaaaaaaaaaaaaaaaaaaaaaaaaaaaaaaaaaaaaaaaaa

SEQ ID NO: 3685 - RNA, 1400 nt, synthetic construct
  misc_feature 1..1400: note = mRNA a-1 (hSL-A100) (opt11) from Homo sapiens__NP_000448.3__HNF4A(1-375)(S87A_K106R_K108R_K126R_K 127R_S142A_S143A_S148E_T166A_S167E_S313A_S378E_T429E_T432E_ S436E_K458R_S461E)
  source 1..1400: mol_type = other RNA
aggagagtcccgcagtcggcgtccagcggctctgcttgttcgtgtgtgtgtcgttgcaggccttattcaagcttaccatgcgactaagcaagaccctagtagacatggacatggccgactactccgccgccctggatcccgcctacaccacactagaatttgaaaacgtacaagtcctcaccatgggcaacgacacaagccccagcgaagggaccaacctcaacgcgccaaacagcctaggcgtctcagccctatgtgccatctgcggagacagagccaccggcaaacactacggagcctcatcctgcgacggatgcaaaggcttcttccgacgcgccgtccgcaaaaaccacatgtactcctgccgtttctcccgacaatgcgtcgtagaccgcgaccgccgcaaccaatgccgctattgccgcctaaagaaatgcttccgcgccggcatgcgacgcgaagccgtccagaacgagcgcgaccgaatctccacacgtcgcgctgcctacgaagactctgaactcccctcgataaacgcactgctccaagccgaagttctatcacgccaaatagccgaacccgtcagcggcatcaacggcgacatccgcgccaagaaaatcgcatcaatcgcagatgtatgcgaatccatgaaagaacagctcctcgtcctcgtagaatgggctaaatacatccccgccttctgtgagctccccctcgacgaccaggtagccctgctaagagcccatgccggcgaacacctcctccttggcgccactaaacgatcaatggtattcaaagacgtcctcctactaggaaacgactacatagtccccagacactgccccgaacttgcagaaatgagccgagtctccatccgcatcttagacgaactcgtcctcccattccaagaactccagatcgacgacaacgaatacgcataccttaaagcaataatcttcttcgaccccgacgccaaaggactatcagaccccgggaaaattaaaagactccgagcacaagtccaagtctcactcgaagactacatcaacgatcgccaatacgactcacgcggacgatttggcgaactcctcctgttactccccaccctacaaagcatcacctggcaaatgatcgaacaaatccagttcataaaactcttcggaatggccaaaatcgacaacctgctccaagaaatgctcctctgaggactagtccctgttcccagagcccacttttttttctttttttgaaataaaatagcctgtctttcagatctcaaaggctcttttcagagccaccaaaaaaaaaaaaaaaaaaaaaaaaaaaaaaaaaaaaaaaaaaaaaaaaaaaaaaaaaaaaaaaaaaaaaaaaaaaaaaaaaaaaaaaaaaaaaaaaaaaaa

SEQ ID NO: 3686 - RNA, 1400 nt, synthetic construct
  misc_feature 1..1400: note = mRNA a-1 (hSL-A100) (opt11) from Homo sapiens__NP_000448.3__HNF4A(1-375)(S87A_K106R_K108R_K126R_K 127R_S142A_S143A_S148A_T166A_S167A_K179R_K180R_S313A_S378A_ T429A_T432A_S436A_K458R_S461E)
  source 1..1400: mol_type = other RNA
aggagagtcccgcagtcggcgtccagcggctctgcttgttcgtgtgtgtgtcgttgcaggccttattcaagcttaccatgcggctctccaaaactctcgtcgacatggacatggcagactacagcgccgccctcgacccagcctacacaaccctcgaattcgaaaacgttcaagtcctcaccatgggtaacgacacatccccctcagaaggaaccaacctcaacgcacccaactccctcggagtttccgccctatgcgcaatctgcggcgatcgagccaccggcaaacactacggcgcctcgtcttgcgacggctgcaaaggcttcttccgccgcgccgtcagaaaaaaccacatgtactcatgccggttctccagacaatgcgtcgtcgaccgagaccgccgaaaccaatgcaggtactgccgcctgaaaaaatgcttccgcgcaggcatgcgccgcgaagccgtccaaaacgagcgagaccgaatctcaacgcgacgcgccgcctacgaagactcagccctcccatccatcaacgcactactacaagccgaagtactatcccgacaaatagccgcaccagtctcaggaatcaacggagacatacgcgccagacgaatagcctccattgccgacgtatgcgaaagcatgaaagaacaactactcgttctcgtcgagtgggccaaatacattcccgctttctgcgaattacccctagacgaccaagtcgccctcctcagagcccacgcaggcgaacacctcctactcggagccaccaaacgatccatggtcttcaaagacgtcttactcctcggcaacgactacatcgtccccagacactgtcccgaactcgccgaaatgtcccgcgtctccatccgaatcctcgacgaactcgtactccccttccaggaactccaaatcgacgacaacgaatacgcctacctaaaagccatcatttttttcgaccctgatgccaaaggcctctctgaccccggcaaaatcaaacgactacgcgcccaagtccaagtctcactcgaagactacatcaacgatcgccagtacgactcccgaggccgcttcggtgaactcctcctcctcctgcccaccctacaatcaataacttggcaaatgatcgaacaaatacaattcatcaaactcttcggcatggccaaaattgacaacctcctacaagaaatgcttctctgaggactagtccctgttcccagagcccacttttttttctttttttgaaataaaatagcctgtctttcagatctcaaaggctcttttcagagccaccaaaaaaaaaaaaaaaaaaaaaaaaaaaaaaaaaaaaaaaaaaaaaaaaaaaaaaaaaaaaaaaaaaaaaaaaaaaaaaaaaaaaaaaaaaaaaaaaaaaaa

SEQ ID NO: 3687 - RNA, 1400 nt, synthetic construct
  misc_feature 1..1400: note = mRNA a-1 (hSL-A100) (opt11) from Homo sapiens__NP_000448.3__HNF4A(1-375)(S87A_K106R_K108R_K126R_K 127R_S142A_S143A_S148A_T166A_S167A_K300R_K307R_K309R_S313A_ S378A_T429A_T432A_S436A_K458R_S461E)
  source 1..1400: mol_type = other RNA
aggagagtcccgcagtcggcgtccagcggctctgcttgttcgtgtgtgtgtcgttgcaggccttattcaagcttaccatgcgcctatccaaaacactcgttgacatggacatggcagactactccgcagccctcgaccccgcctacaccaccctcgaattcgaaaacgtccaagtcctaacaatgggaaacgacacatccccatcagaagggaccaacctaaacgcccccaactccctcggcgtctccgcactctgcgcaatctgcggcgacagagccaccggaaaacactacggcgcctcctcatgcgacggatgcaaaggattcttccgaagagccgtccgaaaaaaccacatgtactcatgccgattctcgcgccaatgcgtcgtcgatcgcgacagacgcaaccaatgccgatactgcagacttaaaaaatgcttccgtgctggcatgcgacgcgaagctgtccaaaatgagcgcgaccgcatatctacccgaagagccgcctacgaagactcagcactaccctcaatcaacgccctactccaggccgaagtcctatcccgacaaatcgcagcccccgtgtccggcataaacggtgacatccgcgccaaaaaaatcgcctcaatagccgacgtctgtgaaagcatgaaagaacaactactagttctcgtcgaatgggcaaaatacatacccgcattctgcgaactcccactagacgaccaagtggccctcctccgagcccatgcaggagaacacctcctcctcggggccacaaaacgctccatggtgttcaaagacgtactactcctaggaaacgactacatcgtaccccgccactgccccgaactagctgaaatgtcacgcgtctcgatccgcatcctcgacgaactcgtcctaccattccaagaactgcaaatcgacgacaacgagtacgcgtacctaaaagcaataatattcttcgaccccgacgcccgcggcctctccgaccccggaagaatcaggcgactccgcgcccaagtccaagtaagcctcgaagactacatcaacgaccgccaatacgactcacgaggcagattcggcgaactactcctcctcctcccaacacttcaatcaatcacctggcaaatgatcgaacaaatccaattcatcaagctattcggcatggccaaaatcgacaacctcctacaagaaatgctactgtgaggactagtccctgttcccagagcccacttttttttctttttttgaaataaaatagcctgtctttcagatctcaaaggctcttttcagagccaccaaaaaaaaaaaaaaaaaaaaaaaaaaaaaaaaaaaaaaaaaaaaaaaaaaaaaaaaaaaaaaaaaaaaaaaaaaaaaaaaaaaaaaaaaaaaaaaaaaaaa

SEQ ID NO: 3688 - RNA, 1400 nt, synthetic construct
  misc_feature 1..1400: note = mRNA a-1 (hSL-A100) (opt11) from Homo sapiens__NP_000448.3__HNF4A(1-375)(S87A_K106R_K108R_K126R_K 127R_S142A_S143A_S148A_T166A_S167A_S313A_S378A_T429A_T432A_ S436A_K447R_K458R_S461E_K470R)
  source 1..1400: mol_type = other RNA
aggagagtcccgcagtcggcgtccagcggctctgcttgttcgtgtgtgtgtcgttgcaggccttattcaagcttaccatgagactatcaaaaaccctggtggacatggacatggccgactacagcgctgccctcgaccccgcctataccacactagagttcgaaaacgtccaagtcctaaccatgggcaacgacacatccccctccgaaggaacaaacctaaacgcccccaactccctcggtgtgtccgccttatgcgccatctgcggagaccgcgccacaggcaaacactacggcgcatcaagctgcgacggctgtaaaggattcttccgccgcgccgtgcgcaaaaaccacatgtactcatgccgcttctcccgccagtgcgtcgtcgaccgcgaccgccgcaaccaatgccgatactgccgcctcaagaaatgcttccgagccggcatgcgacgagaagcagtccaaaacgaacgcgatcgcatctccacaagacgcgcagcatatgaagactcggccctcccatcaatcaacgccctcctacaagccgaagtactatcccgccaaatcgccgcccccgtctccggcatcaacggcgacatacgcgctaagaaaatcgcctcaatagcagacgtctgcgaatcaatgaaagaacaactgctcgtactcgtggaatgggccaaatacatcccagcgttctgcgaactccccctcgacgaccaagtagcattactacgcgcccacgccggcgaacaccttctactaggagcaaccaaacgatccatggtcttcaaagacgtcctgctcctaggaaatgactacatcgtcccccgccattgccctgaactagcagaaatgtcgcgcgtctcaatccgaatcctcgacgaactcgttctaccattccaagaactacaaatcgacgacaacgaatacgcctaccttaaagcaataatcttcttcgacccagatgcaaaaggcctctccgaccccggcaaaatcaaacgcctacgagcacaagtccaagtctctctcgaagactacatcaacgaccgccaatacgactcacgtggccgcttcggcgaactcctcctcctcctacccacccttcaatcaatcacatggcaaatgatcgaacaaatacaattcataaaactattcggcatggccaaaatcgacaacctcctccaagaaatgctactctgaggactagtccctgttcccagagcccacttttttttctttttttgaaataaaatagcctgtctttcagatctcaaaggctcttttcagagccaccaaaaaaaaaaaaaaaaaaaaaaaaaaaaaaaaaaaaaaaaaaaaaaaaaaaaaaaaaaaaaaaaaaaaaaaaaaaaaaaaaaaaaaaaaaaaaaaaaaaaa

SEQ ID NO: 3689 - RNA, 1400 nt, synthetic construct
  misc_feature 1..1400: note = mRNA a-1 (hSL-A100) (opt11) from Homo sapiens__NP_000448.3__HNF4A(1-375)(S87A_K106R_K108R_K126R_K 127R_S142A_S143A_S148A_T166A_S167A_K179R_K180R_K234R_K300R_ K307R_K309R_S313A_S378A_T429A_T432A_S436A_K447R_K458R_S461E _K470R)
  source 1..1400: mol_type = other RNA
aggagagtcccgcagtcggcgtccagcggctctgcttgttcgtgtgtgtgtcgttgcaggccttattcaagcttaccatgcgcctttccaaaaccctagtcgacatggacatggccgactactccgcagccctagacccagcgtacaccaccctcgagttcgaaaacgtccaagtactcacaatgggcaacgacacctccccctcggaaggcaccaacctcaacgcccctaactcactcggcgtttccgctctctgcgccatctgcggagaccgagcgacaggaaaacactacggagcctcctcatgcgatggctgcaaaggcttcttccgccgcgcagtacgcaaaaaccacatgtactcatgcagattctcaagacaatgcgtcgtcgaccgcgaccgacgcaaccaatgccgatactgccgcctcaagaaatgcttccgcgccggcatgcgccgagaagcagtccaaaacgaacgcgacagaataagtactcgccgagccgcatacgaagacagcgccctaccatccatcaacgcactcctccaagccgaagtcctatcacgacaaatcgcagctcccgtttccggcatcaacggcgatatccgcgcaagacgaatagcaagcattgcagacgtctgcgaatcaatgaaagaacaactcctcgtcctcgtcgaatgggccaaatacatccccgcattctgcgaactccccctcgacgaccaagtcgccctactaagagcccacgccggcgaacacctcctcctaggcgctacccgacgctccatggtattcaaagacgtcctactcctaggtaacgactacatcgtaccccgccactgccccgaactcgcagaaatgagcagagtttcaatccgcatcctagacgagctagttctccccttccaagaacttcaaatcgacgataacgaatacgcctacctaaaagccatcatcttcttcgacccagacgcccgaggcctctccgacccaggacgaataagaagactacgcgcccaagtacaagtttccctcgaagattacatcaacgacagacagtacgactccagaggccgattcggtgaactcctcctgctactccccaccctccaaagcataacatggcaaatgatcgaacaaatccaattcatcaaactcttcggcatggccaaaatcgacaacctcctacaagaaatgctactgtgaggactagtccctgttcccagagcccacttttttttctttttttgaaataaaatagcctgtctttcagatctcaaaggctcttttcagagccaccaaaaaaaaaaaaaaaaaaaaaaaaaaaaaaaaaaaaaaaaaaaaaaaaaaaaaaaaaaaaaaaaaaaaaaaaaaaaaaaaaaaaaaaaaaaaaaaaaaaaa

SEQ ID NO: 3690 - RNA, 1400 nt, synthetic construct
  misc_feature 1..1400: note = mRNA a-1 (hSL-A100) (opt11) from Homo sapiens__NP_000448.3__HNF4A(1-375)(S87A_S95A_S99A_K106R_K10 8R_K126R_K127R_S142A_S143A_S148A_T166A_S167A_S313A_S378A_T4 29A_T432A_S436A_K458R_S461E)
  source 1..1400: mol_type = other RNA
aggagagtcccgcagtcggcgtccagcggctctgcttgttcgtgtgtgtgtcgttgcaggccttattcaagcttaccatgagactaagcaaaaccctcgtcgacatggacatggccgactacagcgccgccctcgaccccgcatacaccaccctcgaatttgaaaacgtacaagtcctcaccatgggtaacgatacctccccatccgaaggaaccaacctcaacgccccaaactcactaggcgtctccgccctctgcgccatctgcggcgaccgcgccaccggcaaacactacggcgcctcttcctgtgacggatgcaaaggctttttccggcgcgcagtccgcaaaaaccacatgtacgcctgccgtttcgcccgacagtgcgtagtcgaccgcgaccgtcgaaaccaatgcagatactgccgactaaagaaatgcttccgcgccggcatgcgcagagaagcagtacaaaacgaacgagaccgcatctcaacccgccgtgcggcatatgaagactcggccctaccatccatcaacgccctgctccaagccgaagtattatcccgccaaatcgcagcccccgttagtggaatcaacggcgacatccgagccaagaaaatcgcctccatagccgacgtctgcgagagcatgaaagaacaactcctcgtactcgtagaatgggcaaaatacatacccgccttctgcgaactccccctagacgaccaagtagccctactccgagcccacgccggtgaacatctactcctcggagccaccaaaagatccatggtattcaaagacgtcctcctcctaggcaacgactacatcgtcccccgccactgccccgaactcgccgaaatgtcccgcgtctcaatccgcatactggacgagctcgtactccccttccaagaactacaaatcgacgacaacgaatacgcttacctaaaagcaatcatcttcttcgacccagacgcgaaaggcctatcagatcccggcaaaatcaaacgcctacgcgcacaagtacaagtatcccttgaagactacataaacgaccgacaatacgacagccggggccgtttcggagaacttctcctcctcctacccacactccaatccattacctggcaaatgatagaacaaatccaattcatcaaactcttcggaatggccaagatcgacaacctcctccaagaaatgctactctgaggactagtccctgttcccagagcccacttttttttctttttttgaaataaaatagcctgtctttcagatctcaaaggctcttttcagagccaccaaaaaaaaaaaaaaaaaaaaaaaaaaaaaaaaaaaaaaaaaaaaaaaaaaaaaaaaaaaaaaaaaaaaaaaaaaaaaaaaaaaaaaaaaaaaaaaaaaaaa

SEQ ID NO: 3691 - RNA, 1400 nt, synthetic construct
  misc_feature 1..1400: note = mRNA a-1 (hSL-A100) (opt11) from Homo sapiens__NP_000448.3__HNF4A(1-375)(S87A_K106R_K108R_K126R_K 127R_S138A_T139A_S142A_S143A_S148A_T166A_S167A_S313A_S378A_ T429A_T432A_S436A_K458R_S461E)
  source 1..1400: mol_type = other RNA
aggagagtcccgcagtcggcgtccagcggctctgcttgttcgtgtgtgtgtcgttgcaggccttattcaagcttaccatgcgcctctccaaaaccctagtagatatggacatggcagactatagcgcagcactcgaccccgcctacactacccttgaattcgaaaacgtccaagtcctcacaatgggaaacgacacctctccttccgaaggcaccaacctcaacgccccaaactccctcggcgtctccgccttgtgcgccatctgcggcgaccgagccacaggaaaacactacggagcctcctcctgcgatggctgcaaaggcttcttccgccgcgcagtaagaaaaaaccacatgtactcatgccgcttctcccgccagtgcgtcgtagaccgcgaccgccgcaaccaatgccgctactgccgcctcaaaaaatgcttccgagccggaatgcgaagagaagccgtccaaaacgaacgcgaccgcatcgccgcccgacgggccgcatacgaggatagcgccctcccaagcatcaatgctcttctccaagccgaggtcctttcccgtcaaatcgcagcccccgtatccggaatcaacggagacatacgcgccaaaaaaatcgcaagcatcgccgacgtctgcgaaagcatgaaagaacaactcctcgtactcgtcgaatgggccaaatacataccagccttctgcgaactacccctcgacgatcaagtagccctcctacgagcccacgccggagaacacctcctacttggcgccacaaaacgaagcatggttttcaaggacgtcctcctcctcggcaacgactacatagtaccccgccactgccccgaactagcagaaatgtcccgggtatcgatccgcatactagacgaactagtcctcccctttcaagaactccaaatcgatgacaacgaatacgcttacctgaaagcaataatcttcttcgaccctgacgccaaaggcctctccgacccaggaaaaataaaacgcctccgcgcccaagtacaagtctccctagaagactacataaacgaccgacaatacgactcccgaggacgattcggcgaactactattattactacctacactacaatccatcacctggcaaatgatcgaacaaatccaattcatcaaactattcggcatggccaaaatcgacaacctactccaagaaatgctcctatgaggactagtccctgttcccagagcccacttttttttctttttttgaaataaaatagcctgtctttcagatctcaaaggctcttttcagagccaccaaaaaaaaaaaaaaaaaaaaaaaaaaaaaaaaaaaaaaaaaaaaaaaaaaaaaaaaaaaaaaaaaaaaaaaaaaaaaaaaaaaaaaaaaaaaaaaaaaaaa
